(19) United States
(12) Patent Application Publication
(10) Pub. No.: US 2024/0075116 A1
(43) Pub. Date: Mar. 7, 2024

(54) RNA ENCODING A TUMOR ANTIGEN

(71) Applicant: CureVac SE, Tübingen (DE)

(72) Inventors: Mariola FOTIN-MLECZEK, Sindelfingen (DE); Ingmar HOERR, Stuttgart (DE)

(73) Assignee: CureVac SE, Tübingen (DE)

(21) Appl. No.: 18/183,082

(22) Filed: Mar. 13, 2023

Related U.S. Application Data
(63) Continuation of application No. 16/094,995, filed on Oct. 19, 2018, now abandoned.

(30) Foreign Application Priority Data
Apr. 22, 2016 (WO) PCT/EP2016/059111

(51) Int. Cl. A61K 39/00; A61P 35/00

(52) U.S. Cl. CPC A61K 39/0011; A61K 39/001103; A61K 39/001104; A61K 39/001106; A61K 39/001107; A61K 39/001109; A61K 39/001119; A61K 39/001122; A61K 39/001139; A61K 39/00114; A61K 39/00115; A61K 39/001151; A61K 39/001156; A61K 39/001157; A61K 39/001158; A61K 39/00116; A61K 39/001162; A61K 39/001166; A61K 39/001168; A61K 39/001182; A61K 39/001184; A61K 39/001186; A61K 39/001188; A61K 39/00119; A61K 39/001191; A61K 39/001193; A61K 39/001194; A61K 39/001195; A61P 35/00; A61K 2039/53

(57) ABSTRACT

The present invention relates to an RNA encoding a tumor antigen. In particular, the present invention relates to RNA suitable for treatment and/or prophylaxis of cancer and related diseases. The present invention concerns such RNA as well as compositions, vaccines and kits comprising the RNA. Furthermore, the present invention relates to the RNA, compositions, vaccines or kits as disclosed herein for use in the treatment and/or prophylaxis of cancer and related diseases.

### REFERENCE TO RELATED APPLICATIONS

[0001] This application is a continuation of U.S. application Ser. No. 16/094,995, filed Oct. 19, 2018, which is a national phase application under 35 U.S.C. § 371 of International Application No. PCT/EP2017/059525, filed Apr. 21, 2017, which claims benefit of International Application No. PCT/EP2016/059111, filed Apr. 22, 2016, the entire contents of each of which are hereby incorporated by reference.

### SEQUENCE LISTING

[0002] This application contains a Sequence Listing XML, which has been submitted electronically and is hereby incorporated by reference in its entirety. Said Sequence Listing XML, created on Mar. 13, 2023, is named CRVCP0214USCI.xml and is 11,214,398 bytes in size.

### BACKGROUND

[0003] The present invention relates to an RNA encoding a tumor antigen. In particular, the present invention relates to RNA suitable for treatment and/or prophylaxis of cancer and related diseases. The present invention concerns such novel RNA as well as compositions, vaccines and kits comprising the RNA. Furthermore, the present invention relates to the RNA, compositions, vaccines or kits as disclosed herein for use in the treatment and/or prophylaxis of cancer and related diseases.

[0004] Apart from cardiovascular diseases and infectious diseases, the occurrence of cancer diseases is one of the most frequent causes of death in modern society and is in most cases associated with considerable costs in terms of therapy and subsequent rehabilitation measures. The treatment of cancer diseases is greatly dependent, for example, on the type of tumor that occurs, on the age, the distribution of cancer cells in the patient to be treated, etc. Cancer therapy is nowadays conventionally carried out by the use of radiation therapy or chemotherapy in addition to invasive operations. However, such conventional therapies typically place extraordinary stress on the immune system and can be used in some cases to only a limited extent. In addition, most of these conventional therapies require long intervals between the individual treatments to allow for regeneration of the immune system.

[0005] Therefore, supplementary strategies have been investigated in recent years in addition to such “conventional treatments” to avoid or at least reduce the impact on the immune system by such treatments. One such supplementary treatment in particular includes gene therapeutic approaches or genetic vaccination, which already have been found to be highly promising for treatment or for supporting such conventional therapies.

[0006] Gene therapy and genetic vaccination are methods of molecular medicine, which have already been proven in the therapy and prevention of certain diseases and generally exhibit a considerable effect on daily medical practice, in particular on the treatment of diseases as mentioned above. Both methods, gene therapy and genetic vaccination, are based on the introduction of nucleic acids into the patient's cells or tissue and subsequent processing of the information coded for by the nucleic acid that has been introduced into the cells or tissue, that is to say the (protein) expression of the desired polypeptides.

[0007] In gene therapy approaches, typically DNA is used even though RNA is also known in recent developments. Importantly, in all these gene therapy approaches mRNA functions as messenger for the sequence information of the encoded protein, irrespectively if DNA, viral RNA or mRNA is used.

[0008] In general RNA is considered an unstable molecule: RNases are ubiquitous and notoriously difficult to inactivate. Furthermore, RNA is also chemically more labile than DNA. Also for that reason, many gene therapy approaches normally use DNA to transfer the coding information into the cell which is then transcribed into mRNA, carrying the naturally occurring elements of an mRNA, particularly the 5′-CAP structure and the 3′ poly(A) sequence to ensure expression of the encoded therapeutic or antigenic protein.

[0009] However, in many cases expression systems based on the introduction of such nucleic acids into the patient's cells or tissue and the subsequent expression of the desired polypeptides coded for by these nucleic acids do not exhibit the desired, or even the required, level of expression which may allow for an efficient therapy, irrespective as to whether DNA or RNA is used.

[0010] In the prior art, different attempts have hitherto been made to increase the yield of the expression of an encoded protein, in particular by use of improved expression systems, both in vitro and/or in viva. Methods for increasing expression described generally in the prior art are conventionally based on the use of expression vectors or cassettes containing specific promoters and corresponding regulation elements. As these expression vectors or cassettes are typically limited to particular cell systems, these expression systems have to be adapted for use in different cell systems. Such adapted expression vectors or cassettes are then usually transfected into the cells and typically treated in dependence of the specific cell line. Therefore, preference is given primarily to those nucleic acid molecules which are able to express the encoded proteins in a target cell by systems inherent in the cell, independent of promoters and regulation elements which are specific for particular cell types. In this context, there can be distinguished between mRNA stabilizing elements and elements which increase translation efficiency of the mRNA.

[0011] mRNAs which are optimized in their coding sequence and which are in general suitable for such a purpose are described in application WO 02/098443 (CureVac GmbH). For example, WO 02/098443 describes mRNAs that are stabilised in general form and optimised for translation in their coding regions. WO 02/098443 further discloses a method for determining sequence modifications. WO 02/098443 additionally describes possibilities for substituting adenine and uracil nucleotides in mRNA sequences in order to increase the guanine/cytosine (G/C) content of the sequences. According to WO 02/098443, such substitutions and adaptations for increasing the G/C content can be used for gene therapeutic applications but also genetic vaccines in the treatment of cancer or infectious diseases. In this context, WO 02/098443 generally mentions sequences as a base sequence for such modifications, in which the modified mRNA codes for at least one biologically active peptide or polypeptide, which is translated in the patient to be treated, for example, either not at all or inadequately or with faults. Alternatively, WO 02/098443 proposes mRNAs coding for antigens e.g. tumour antigens or viral antigens as a base sequence for such modifications.

[0012] In a further approach to increase the expression of an encoded protein the application WO 2007/036366 describes the positive effect of long poly(A) sequences (particularly longer than 120 bp) and the combination of at least two 3′ untranslated regions of the beta globin gene on mRNA stability and translational activity.

[0013] However, even though some of these prior art documents try to provide quite efficient tools for gene therapy approaches and additionally improved mRNA stability and translational activity, there still remains the problem of a generally lower stability of RNA-based applications versus DNA vaccines and DNA based gene therapeutic approaches. Accordingly, there still exists a need in the art to provide improved tools for gene therapy approaches and genetic vaccination or as a supplementary therapy for conventional treatments as discussed above, which allow for better provision of encoded proteins in viva, e.g. via a further improved mRNA stability and/or translational activity, preferably for gene therapy and genetic vaccination.

[0014] Furthermore despite of all progress in the art, efficient expression of an encoded peptide or protein in cell-free systems, cells or organisms (recombinant expression) is still a challenging problem.

### SUMMARY

[0015] It is thus an object of the present invention to provide a tumor vaccine. In particular, it is an object to provide a system for expressing a tumor antigen, preferably by stabilization of the mRNA and/or an increase of the translational efficiency of such an mRNA with respect to such nucleic acids known from the prior art. It is a further object of the invention to provide such a system, which allows treatment and/or prophylaxis of cancer by stimulating the immune system in a safe and effective manner. It is thus a particular object of the present invention to provide a cancer vaccine or a composition for treatment or prophylaxis of cancer by stimulating the immune system.

[0016] The object underlying the present invention is solved by the claimed subject matter.

[0017] The present application is filed together with a sequence listing in electronic format. The information contained in the electronic format of the sequence listing is incorporated herein by reference in its entirety.

[0018] For the sake of clarity and readability the following definitions are provided. Any technical feature mentioned for these definitions may be read on each and every embodiment of the invention. Additional definitions and explanations may be specifically provided in the context of these embodiments.

### BRIEF DESCRIPTION OF THE DRAWINGS

[0019] The figures shown in the following are merely illustrative and shall describe the present invention in a further way. These figures shall not be construed to limit the present invention thereto.

[0020] FIG. 1: shows the presence of IgG2a antibodies specific for the cancer antigen NY-ESO-1 in mice that were vaccinated with NY-ESO-1 mRNA vaccine. A detailed description of the experiment is provided in the example section (see Example 2).

[0021] FIG. 2: shows the induction of antigen-specific T-lymphocytes directed against the cancer antigen NY-ESO-1 in mice that were vaccinated with NY-ESO-1 mRNA vaccine. A detailed description of the experiment is provided in the example section (see Example 2).

[0022] FIG. 3: shows the presence of IgG2a antibodies specific for the cancer antigen PSA in mice that were vaccinated with PSA mRNA vaccine. A detailed description of the experiment is provided in the example section (see Example 3).

[0023] FIG. 4: shows the induction of antigen-specific T-lymphocytes directed against the cancer antigen PSA in mice that were vaccinated with PSA mRNA vaccine. A detailed description of the experiment is provided in the example section (see Example 3).

[0024] FIG. 5: shows the induction of antigen-specific T-lymphocytes directed against the cancer antigen PSM (PSMA) in mice that were vaccinated with PSM (PSMA) mRNA vaccine. A detailed description of the experiment is provided in the example section (see Example 4).

[0025] FIG. 6: shows the induction of antigen-specific T-lymphocytes directed against the cancer antigen MAGE-A2 in mice that were vaccinated with MAGE-A2 mRNA vaccine. A detailed description of the experiment is provided in the example section (see Example 5).

[0026] FIG. 7: shows the induction of antigen-specific T-lymphocytes directed against the cancer antigen MAGE-C2 in mice that were vaccinated with MAGE-C2 mRNA vaccine. A detailed description of the experiment is provided in the example section (see Example 5).

[0027] FIG. 8: shows the induction of antigen-specific T-lymphocytes directed against the cancer antigen MAGE-A3 in mice that were vaccinated with MAGE-A3 mRNA vaccine. A detailed description of the experiment is provided in the example section (see Example 5).

[0028] FIG. 9: shows the induction of antigen-specific T-lymphocytes directed against the cancer antigen PMEL (human gp100, hgp100) in mice that were vaccinated with PMEL mRNA vaccine. A detailed description of the experiment is provided in the example section (see Example B).

### DETAILED DESCRIPTION

[0029] Adaptive immune response: The adaptive immune response is typically understood to be an antigen-specific response of the immune system. Antigen specificity allows for the generation of responses that are tailored, for example, to specific pathogens or pathogen-infected cells. The ability to mount these tailored responses is usually maintained in the body by “memory cells”. Should a pathogen infect the body more than once, these specific memory cells are used to quickly eliminate it. In this context, the first step of an adaptive immune response is the activation of naïve antigen-specific T cells or different immune cells able to induce an antigen-specific immune response by antigen-presenting cells. This occurs in the lymphoid tissues and organs through which naïve T cells are constantly passing. The three cell types that may serve as antigen-presenting cells are dendritic cells, macrophages, and B cells. Each of these cells has a distinct function in eliciting immune responses. Dendritic cells may take up antigens by phagocytosis and macropinocytosis and may become stimulated by contact with e.g. a foreign antigen to migrate to the local lymphoid tissue, where they differentiate into mature dendritic cells. Macrophages ingest particulate antigens such as bacteria and are induced by infectious agents or other appropriate stimuli to express MHC molecules. The unique ability of B cells to bind and internalize soluble protein antigens via their receptors may also be important to induce T cells. MHC-molecules are, typically, responsible for presentation of an antigen to T-cells. Therein, presenting the antigen on MHC molecules leads to activation of T cells, which induces their proliferation and differentiation into armed effector T cells. The most important function of effector cells is the killing of infected cells by CDB+cytotoxic T cells and the activation of macrophages by Th1 cells, which together make up cell-mediated immunity, and the activation of cells by both Th2 and Th1 cells to produce different classes of antibody, thus driving the humoral immune response. T cells recognize an antigen by their T cell receptors which do not recognize and bind the antigen directly, but instead recognize short peptide fragments e.g. of pathogen-derived protein antigens, e.g. so-called epitopes, which are bound to MHC molecules on the surfaces of other cells.

[0030] Adaptive immune system: The adaptive immune system is essentially dedicated to eliminate or prevent pathogenic growth. It typically regulates the adaptive immune response by providing the vertebrate immune system with the ability to recognize and remember specific pathogens (to generate immunity), and to mount stronger attacks each time the pathogen is encountered. The system is highly adaptable because of somatic hypermutation (a process of accelerated somatic mutations), and V(D)J recombination (an irreversible genetic recombination of antigen receptor gene segments). This mechanism allows a small number of genes to generate a vast number of different antigen receptors, which are then uniquely expressed on each individual lymphocyte. Because the gene rearrangement leads to an irreversible change in the DNA of each cell, all of the progeny (offspring) of such a cell will then inherit genes encoding the same receptor specificity, including the Memory B cells and Memory T cells that are the keys to long-lived specific immunity.

[0031] Adjuvant/adjuvant component: An adjuvant or an adjuvant component in the broadest sense is typically a pharmacological and/or immunological agent that may modify, e.g. enhance, the effect of other agents, such as a drug or vaccine. It is to be interpreted in a broad sense and refers to a broad spectrum of substances. Typically, these substances are able to increase the immunogenicity of antigens. For example, adjuvants may be recognized by the innate immune systems and, e.g., may elicit an innate immune response.

[0032] “Adjuvants” typically do not elicit an adaptive immune response. Insofar, “adjuvants” do not qualify as antigens. Their mode of action is distinct from the effects triggered by antigens resulting in an adaptive immune response.

[0033] Antigen: In the context of the present invention, the term “antigen” typically refers to a substance, which is capable of being recognized by the immune system, preferably by the adaptive immune system, and which is capable of eliciting an antigen-specific immune response, e.g. by formation of antibodies and/or antigen-specific T cells as part of an adaptive immune response. Typically, an antigen may be or may comprise a peptide or protein, which may be presented by the MHC to T-cells. In the sense of the present invention an antigen may be the product of translation of a provided nucleic acid molecule, preferably an RNA comprising at least one coding sequence as defined heroin. In this context, also fragments, variants and derivatives of an antigen, such as a peptide or a protein, comprising at least one epitope are understood as antigens.

[0034] Artificial nucleic acid molecule: An artificial nucleic acid molecule may typically be understood to be a nucleic acid molecule, e.g. a DNA or an RNA, that does not occur naturally. In other words, an artificial nucleic acid molecule may be understood as a non-natural nucleic acid molecule. Such nucleic acid molecule may be non-natural due to its individual sequence (which does not occur naturally) and/or due to other modifications, e.g. structural modifications of nucleotides, which do not occur naturally. An artificial nucleic acid molecule may be a DNA molecule, an RNA molecule or a hybrid-molecule comprising DNA and RNA portions. Typically, artificial nucleic acid molecules may be designed and/or generated by genetic engineering methods to correspond to a desired artificial sequence of nucleotides (heterologous sequence). In this context an artificial sequence is usually a sequence that may not occur naturally, i.e. it differs from the wild type sequence by at least one nucleotide. The term “wild type” may be understood as a sequence occurring in nature. Further, the term “artificial nucleic acid molecule” is not restricted to mean “one single molecule” but is, typically, understood to comprise an ensemble of identical molecules. Accordingly, it may relate to a plurality of identical molecules contained in an aliquot.

[0035] Bicistronic RNA, multicistronic RNA: A bicistronic or multicistronic RNA is typically an RNA, preferably an mRNA, that typically may have two (bicistronic) or more (multicistronic) open reading frames (ORF). An open reading frame in this context is a sequence of codons that is translatable into a peptide or protein.

[0036] Carrier/polymeric carrier: A carrier in the context of the invention may typically be a compound that facilitates transport and/or complexation of another compound (cargo). A polymeric carrier is typically a carrier that is formed of a polymer. A carrier may be associated to its cargo by covalent or non-covalent interaction. A carrier may transport nucleic acids, e.g. RNA or DNA, to the target cells. The carrier may—for some embodiments—be a cationic component.

[0037] Cationic component: The term “cationic component” typically refers to a charged molecule, which is positively charged (cation) at a pH value typically from 1 to 9, preferably at a pH value of or below 9 (e.g. from 5 to 9), of or below 8 (e.g. from 5 to 8), of or below 7 (e.g. from 5 to 7), most preferably at a physiological pH, e.g. from 7.3 to 7.4. Accordingly, a cationic component may be any positively charged compound or polymer, preferably a cationic peptide or protein, which is positively charged under physiological conditions, particularly under physiological conditions in viva. A “cationic peptide or protein” may contain at least one positively charged amino acid, or more than one positively charged amino acid, e.g. selected from Arg, His, Lys or Orn. Accordingly, “polycationic” components are also within the scope exhibiting more than one positive charge under the conditions given.

[0038] 5′-nap: A 5′-cap is an entity, typically a modified nucleotide entity, which generally “caps” the 5′-end of a mature mRNA. A 5′-cap may typically be formed by a modified nucleotide, particularly by a derivative of a guanine nucleotide. Preferably, the 5′-cap is linked to the 5′-terminus via a 5′-5′-triphosphate linkage. A 5′-cap may be methylated, e.g. m7GpppN, wherein N is the terminal 5′ nucleotide of the nucleic acid carrying the 5′-cap, typically the 5′-end of an RNA. Further examples of 5′cap structures include glyceryl, inverted deoxy abasic residue (moiety), 4′,5′ methylene nucleotide, 1-(beta-D-erythrofuranosyl) nucleotide, 4′-thio nucleotide, carbocylic nucleotide, 1,5-anhydrohexitol nucleotide, L-nucleotides, alpha-nucleotide, modified base nucleotide, threo-pentofuranosyl nucleotide, acyclic 3′,4′-seco nucleotide, acyclic 3,4-dihydroxybutyl nucleotide, acyclic 3,5 dihydroxypentyl nucleotide, 3′-3′-inverted nucleotide moiety, 3′-3′-inverted abasic moiety, 3′-2′-inverted nucleotide moiety, 3′-2′-inverted abasic moiety, 1,4-butanediol phosphate, 3′-phosphoramidate, hexylphosphate, aminohexyl phosphate, 3′-phosphate, 3′phosphorothioate, phosphorodithioate, or bridging or non-bridging methylphosphonate moiety.

[0039] Cellular immunity/cellular immune response: Cellular immunity relates typically to the activation of macrophages, natural killer cells (NK), antigen-specific cytotoxic T-lymphocytes, and the release of various cytokines in response to an antigen. In more general terms, cellular immunity is not based on antibodies, but on the activation of cells of the immune system. Typically, a cellular immune response may be characterized e.g. by activating antigen-specific cytotoxic T-lymphocytes that are able to induce apoptosis in cells, e.g. specific immune cells like dendritic cells or other cells, displaying epitopes of foreign antigens on their surface. Such cells may be virus-infected or infected with intracellular bacteria, or cancer cells displaying tumor antigens. Further characteristics may be activation of macrophages and natural killer cells, enabling them to destroy pathogens and stimulation of cells to secrete a variety of cytokines that influence the function of other cells involved in adaptive immune responses and innate immune responses.

[0040] DNA: DNA is the usual abbreviation for deoxy-ribonucleic acid. It is a nucleic acid molecule, i.e. a polymer consisting of nucleotides. These nucleotides are usually deoxy-adenosine-monophosphate, deoxy-thymidine-monophosphate, deoxy-guanosine-monophosphate and deoxy-cytidine-monophosphate monomers which are—by themselves—composed of a sugar moiety (deoxyribose), a base moiety and a phosphate moiety, and polymerise by a characteristic backbone structure. The backbone structure is, typically, formed by phosphodiester bonds between the sugar moiety of the nucleotide, i.e. deoxyribose, of a first and a phosphate moiety of a second, adjacent monomer. The specific order of the monomers, i.e. the order of the bases linked to the sugar/phosphate-backbone, is called the DNA sequence. DNA may be single stranded or double stranded. In the double stranded form, the nucleotides of the first strand typically hybridize with the nucleotides of the second strand, e.g. by A/T-base-pairing and G/C-base-pairing.

[0041] Epitpe: In the context of the present invention, the term ‘epitope’ typically refers to a fragment of an antigen or a variant of an antigen, wherein said fragment is presented by an MHC complex. Such a fragment comprising or consisting of an epitope as used herein may typically comprise from about 5 to about 20 amino acids. An epitope may also be referred to herein as ‘antigen determinant’. Epitopes can be distinguished in T cell epitopes and B cell epitopes. T cell epitopes or parts of the proteins in the context of the present invention may comprise fragments preferably having a length of about B to about 20 or even more amino acids, e.g. fragments as processed and presented by MHC class I molecules, preferably having a length of about 8 to about 10 amino acids, e.g. 8, 9, or 10, (or even 11, or 12 amino acids), or fragments as processed and presented by MHC class II molecules, preferably having a length of about 13 or more amino acids, e.g. 3, 14, 15, 16, 7, 18, 19, 20 or even more amino acids, wherein these fragments may be selected from any part of the amino acid sequence. These fragments are typically recognized by T cells in form of a complex consisting of the peptide fragment and an MHC molecule, i.e. the fragments are typically not recognized in their native form. B cell epitopes are typically fragments located on the outer surface of (native) protein or peptide antigens as defined herein, preferably having 5 to 5 amino acids, more preferably having 5 to 12 amino acids, even more preferably having 6 to 9 amino acids, which may be recognized by antibodies, i.e. in their native form. Such epitopes of proteins or peptides may furthermore be selected from any of the herein mentioned variants of such proteins or peptides. In this context, antigenic determinants can be conformational or discontinuous epitopes, which are composed of segments of the proteins or peptides as defined herein that are discontinuous in the amino acid sequence of the proteins or peptides as defined herein but are brought together in the three-dimensional structure or continuous or linear epitopes, which are composed of a single polypeptide chain.

[0042] Fragment of a sequence: A fragment of a sequence may typically be a shorter portion of a full-length sequence of e.g. a nucleic acid molecule or an amino acid sequence. Accordingly, a fragment, typically, consists of a sequence that is identical to the corresponding stretch within the full-length sequence. A preferred fragment of a sequence in the context of the present invention, consists of a continuous stretch of entities, such as nucleotides or amino acids corresponding to a continuous stretch of entities in the molecule the fragment is derived from, which represents at least 20%, preferably at least 30%, more preferably at least 40%, more preferably at least 50%, even more preferably at least 60%, even more preferably at least 70%, and most preferably at least 80% of the total (i.e. full-length) molecule from which the fragment is derived.

[0043] G/C modified: A G/C-modified nucleic acid may typically be a nucleic acid, preferably an artificial nucleic acid molecule as defined herein, based on a modified wild-type sequence comprising a preferably increased number of guanosine and/or cytosine nucleotides as compared to the wild-type sequence. Such an increased number may be generated by substitution of codons containing adenosine or thymidine nucleotides by codons containing guanosine or cytosine nucleotides. If the enriched G/C content occurs in a coding region of DNA or RNA, it makes use of the degeneracy of the genetic code. Accordingly, the codon substitutions preferably do not alter the encoded amino acid residues, but exclusively increase the G/C content of the nucleic acid molecule. As used herein, the term ‘G/C modification’ comprises, in particular, the modifications of the number of guanosine and/or cytosine nucleotides in the RNA according to the invention, such as GC optimization of sequences, adaptation of sequences to human codon usage, codon optimization, or C-optimization of sequences.

[0044] Gene therapy: Gene therapy may typically be understood to mean a treatment of a patient's body or isolated elements of a patient's body, for example isolated tissues/cells, by nucleic acids encoding a peptide or protein. It typically may comprise at least one of the steps of a) administration of a nucleic acid, preferably an RNA as defined herein, directly to the patient—by whatever administration route—or in vitro to isolated cells/tissues of the patient, which results in transfection of the patient's cells either in vivo/ex vivo or in vitro, b) transcription and/or translation of the introduced nucleic acid molecule; and optionally c) re-administration of isolated, transfected cells to the patient, if the nucleic acid has not been administered directly to the patient.

[0045] Genetic vaccination: Genetic vaccination may typically be understood to be vaccination by administration of a nucleic acid molecule encoding an antigen or an immunogen or fragments thereof. The nucleic acid molecule may be administered to a subject's body or to isolated cells of a subject. Upon transfection of certain cells of the body or upon transfection of the isolated cells, the antigen or immunogen may be expressed by those cells and subsequently presented to the immune system, eliciting an adaptive, i.e. antigen-specific immune response. Accordingly, genetic vaccination typically comprises at least one of the steps of a) administration of a nucleic acid, preferably an artificial nucleic acid molecule as defined herein, to a subject, preferably a patient, or to isolated cells of a subject, preferably a patient, which usually results in transfection of the subject's cells either in vivo or in vitra b) transcription and/or translation of the introduced nucleic acid molecule; and optionally c) re-administration of isolated, transfected cells to the subject, preferably the patient, if the nucleic acid has not been administered directly to the patient.

[0046] Heterologous sequence: Two sequences are typically understood to be ‘heterologous’ if they are not derivable from the same gene. i.e., although heterologous sequences may be derivable from the same organism, they naturally (in nature) do not occur in the same nucleic acid molecule, such as in the same mRNA.

[0047] Humoral immunity/humoral immune response: Humoral immunity refers typically to antibody production and optionally to accessory processes accompanying antibody production. A humoral immune response may be typically characterized, e.g., by Th2 activation and cytokine production, germinal center formation and isotype switching, affinity maturation and memory cell generation. Humoral immunity also typically may refer to the effector functions of antibodies, which include pathogen and toxin neutralization, classical complement activation, and opsonin promotion of phagocytosis and pathogen elimination.

[0048] Immunogen: In the context of the present invention, an immunogen may be typically understood to be a compound that is able to stimulate an immune response. Preferably, an immunogen is a peptide, polypeptide, or protein. In a particularly preferred embodiment, an immunogen in the sense of the present invention is the product of translation of a provided nucleic acid molecule, preferably an artificial nucleic acid molecule as defined heroin. Typically, an immunogen elicits at least an adaptive immune response.

[0049] Immunostimulatory composition: In the context of the invention, an immunostimulatory composition may be typically understood to be a composition containing at least one component which is able to induce an immune response or from which a component, which is able to induce an immune response, is derivable. Such immune response may be preferably an innate immune response or a combination of an adaptive and an innate immune response. Preferably, an immunostimulatory composition in the context of the invention contains at least one artificial nucleic acid molecule, more preferably an RNA, for example an mRNA molecule. The immunostimulatory component, such as the mRNA may be complexed with a suitable carrier. Thus, the immunostimulatory composition may comprise an mRNA/carrier-complex. Furthermore, the immunostimulatory composition may comprise an adjuvant and/or a suitable vehicle for the immunostimulatory component, such as the mRNA.

[0050] Immune response: An immune response may typically be a specific reaction of the adaptive immune system to a particular antigen (so called specific or adaptive immune response) or an unspecific reaction of the innate immune system (so called unspecific or innate immune response), or a combination thereof.

[0051] Immune system: The immune system may protect organisms from infection. If a pathogen succeeds in passing a physical barrier of an organism and enters this organism, the innate immune system provides an immediate, but non-specific response. If pathogens evade this innate response, vertebrates possess a second layer of protection, the adaptive immune system. Here, the immune system adapts its response during an infection to improve its recognition of the pathogen. This improved response is then retained after the pathogen has been eliminated, in the form of an immunological memory, and allows the adaptive immune system to mount faster and stronger attacks each time this pathogen is encountered. According to this, the immune system comprises the innate and the adaptive immune system. Each of these two parts typically contains so called humoral and cellular components.

[0052] Immunostimulatory RNA: An immunostimulatory RNA (isRNA) in the context of the invention may typically be an RNA that is able to induce an innate immune response. It usually does not have an open reading frame and thus does not provide a peptide-antigen or immunogen but elicits an immune response e.g. by binding to a specific kind of Toll-like-receptor (TLR) or other suitable receptors. However, of course also mRNAs having an open reading frame and coding for a peptide/protein may induce an innate immune response and, thus, may be immunostimulatory RNAs.

[0053] Innate immune system: The innate immune system, also known as non-specific (or unspecific) immune system, typically comprises the cells and mechanisms that defend the host from infection by other organisms in a non-specific manner. This means that the cells of the innate system may recognize and respond to pathogens in a generic way, but unlike the adaptive immune system, it does not confer long-lasting or protective immunity to the host. The innate immune system may be, e.g., activated by ligands of Toll-like receptors (TLRs) or other auxiliary substances such as lipopolysaccharides, TNF-alpha, CO40 ligand, or cytokines, monokines, lymphokines, interleukins or chemokines, IL-1, IL-2, IL-3, IL-4, IL-5, IL-6, IL-7, IL-8, IL-9, IL-10, IL-11, IL-12, IL-13, IL-14, IL-15, IL-16, IL-17, IL-18, IL-19, IL-20, IL-21, IL-22, L-23, IL-24, IL-25, IL-26, IL-27, IL-28, IL-29, IL-30, IL-31, IL-32, IL-33, IFN-alpha, IFN-beta, IFN-gamma, GM-CSF, 6-CSF, M-CSF, LT-beta, TNF-alpha, growth factors, and hGH, a ligand of human Toll-like receptor TLR1, TLR2, TLR3, TLR4, TLR5, TLR6, TLR7, TLR8, TLR9, TLR10, a ligand of murine Toll-like receptor TLR1, TLR2, TLR3, TLR4, TLR5, TLR6, TLR7, TLR8, TLR9, TLR10, TLR11, TLR12 or TLR13, a ligand of a NOD-like receptor, a ligand of a RIG-1 like receptor, an immunostimulatory nucleic acid, an immunostimulatory RNA (isRNA), a CpG-DNA, an antibacterial agent, or an anti-viral agent. The pharmaceutical composition according to the present invention may comprise one or more such substances. Typically, a response of the innate immune system includes recruiting immune cells to sites of infection, through the production of chemical factors, including specialized chemical mediators, called cytokines; activation of the complement cascade; identification and removal of foreign substances present in organs, tissues, the blood and lymph, by specialized white blood calls; activation of the adaptive immune system; and/or acting as a physical and chemical barrier to infectious agents.

[0054] Cloning site: A cloning site is typically understood to be a segment of a nucleic acid molecule, which is suitable for insertion of a nucleic acid sequence, e.g., a nucleic acid sequence comprising an open reading frame. Insertion may be performed by any molecular biological method known to the one skilled in the art, e.g. by restriction and ligation. A cloning site typically comprises one or more restriction enzyme recognition sites (restriction sites). These one or more restrictions sites may be recognized by restriction enzymes which cleave the DNA at these sites. A cloning site which comprises more than one restriction site may also be termed a multiple cloning site (MCS) or a polylinker.

[0055] Nucleic acid molecule: A nucleic acid molecule is a molecule comprising, preferably consisting of nucleic acid components. The term nucleic acid molecule preferably refers to DNA or RNA molecules. It is preferably used synonymous with the term “polynucleotide”.

[0056] Preferably, a nucleic acid molecule is a polymer comprising or consisting of nucleotide monomers, which are covalently linked to each other by phosphodiester-bonds of a sugar/phosphate-backbone. The term “nucleic acid molecule” also encompasses modified nucleic acid molecules, such as base-modified, sugar-modified or backbone-modified etc. DNA or RNA molecules.

[0057] Open reading frame: An open reading frame (ORF) in the context of the invention may typically be a sequence of several nucleotide triplets, which may be translated into a peptide or protein. An open reading frame preferably contains a start codon, i.e. a combination of three subsequent nucleotides coding usually for the amino acid methionine (ATG), at its 5′-end and a subsequent region, which usually exhibits a length which is a multiple of 3 nucleotides. An ORF is preferably terminated by a stop-codon (e.g., TAA, TAG, TGA). Typically, this is the only stop-codon of the open reading frame. Thus, an open reading frame in the context of the present invention is preferably a nucleotide sequence, consisting of a number of nucleotides that may be divided by three, which starts with a start codon (e.g. ATG) and which preferably terminates with a stop codon (e.g., TAA, TGA, or TAG). The open reading frame may be isolated or it may be incorporated in a longer nucleic acid sequence, for example in a vector or an mRNA. An open reading frame may also be termed “(protein) coding region” or, preferably, “coding sequence”.

[0058] Peptide: A peptide or polypeptide is typically a polymer of amino acid monomers, linked by peptide bonds. It typically contains less than 50 monomer units. Nevertheless, the term peptide is not a disclaimer for molecules having more than 50 monomer units. Long peptides are also called polypeptides, typically having between 50 and BOO monomeric units.

[0059] Pharmaceutically effective amount: A pharmaceutically effective amount in the context of the invention is typically understood to be an amount that is sufficient to induce a pharmaceutical effect, such as an immune response, altering a pathological level of an expressed peptide or protein, or substituting a lacking gene product, e.g., in case of a pathological situation.

[0060] Protein: A protein typically comprises one or more peptides or polypeptides. A protein is typically folded into 3-dimensional form, which may be required for the protein to exert its biological function.

[0061] Poly(A) sequence: A poly(A) sequence, also called poly(A) tail or 3′-poly(A) tail, is typically understood to be a sequence of adenosine nucleotides, e.g., of up to about 400 adenosine nucleotides, e.g. from about 20 to about 400, preferably from about 50 to about 400, more preferably from about 50 to about 300, even more preferably from about 50 to about 250, most preferably from about 60 to about 250 adenosine nucleotides. As used heroin, a poly(A) sequence may also comprise about 10 to 200 adenosine nucleotides, preferably about 10 to 100 adenosine nucleotides, more preferably about 40 to 80 adenosine nucleotides or even more preferably about 50 to 70 adenosine nucleotides. A poly(A) sequence is typically located at the 3′end of an mRNA. In the context of the present invention, a poly(A) sequence may be located within an mRNA or any other nucleic acid molecule, such as, e.g., in a vector, for example, in a vector serving as template for the generation of an RNA, preferably an mRNA, e.g., by transcription of the vector.

[0062] Polyadenylation: Polyadenylation is typically understood to be the addition of a poly(A) sequence to a nucleic acid molecule, such as an RNA molecule, e.g. to a premature mRNA. Polyadenylation may be induced by a so-called polyadenylation signal. This signal is preferably located within a stretch of nucleotides at the 3′-end of a nucleic acid molecule, such as an RNA molecule, to be polyadenylated. A polyadenylation signal typically comprises a hexamer consisting of adenine and uracil/thymine nucleotides, preferably the hexamer sequence AAUAAA. Other sequences, preferably hexamer sequences, are also conceivable. Polyadenylation typically occurs during processing of a pre-mRNA (also called premature-mRNA). Typically, RNA maturation (from pre-mRNA to mature mRNA) comprises the step of polyadenylation.

[0063] Restriction site: A restriction site, also termed restriction enzyme recognition site, is a nucleotide sequence recognized by a restriction enzyme. A restriction site is typically a short, preferably palindromic nucleotide sequence, e.g. a sequence comprising 4 to 8 nucleotides.

[0064] A restriction site is preferably specifically recognized by a restriction enzyme. The restriction enzyme typically cleaves a nucleotide sequence comprising a restriction site at this site. In a double-stranded nucleotide sequence, such as a double-stranded DNA sequence, the restriction enzyme typically cuts both strands of the nucleotide sequence.

[0065] RNA, mRNA: RNA is the usual abbreviation for ribonucleic-acid. It is a nucleic acid molecule, i.e. a polymer consisting of nucleotides.

[0066] These nucleotides are usually adenosine-monophosphate, uridine-monophosphate, guanosine-monophosphate and cytidine-monophosphate monomers which are connected to each other along a so-called backbone. The backbone is formed by phosphodiester bonds between the sugar, i.e. ribose, of a first and a phosphate moiety of a second, adjacent monomer. The specific succession of the monomers is called the RNA-sequence. Usually RNA may be obtainable by transcription of a DNA-sequence, e.g., inside a cell. In eukaryotic cells, transcription is typically performed inside the nucleus or the mitochondria. In vivo, transcription of DNA usually results in the so-called premature RNA which has to be processed into so-called messenger-RNA, usually abbreviated as mRNA. Processing of the premature RNA, e.g. in eukaryotic organisms, comprises a variety of different posttranscriptional-modifications such as splicing, 5′-capping, polyadenylation, export from the nucleus or the mitochondria and the like. The sum of these processes is also called maturation of RNA. The mature messenger RNA usually provides the nucleotide sequence that may be translated into an amino-acid sequence of a particular peptide or protein. Typically, a mature mRNA comprises a 5′-cap, a 5′-UTR, an open reading frame, a 3′-UTR and a poly(A) sequence. Aside from messenger RNA, several non-coding types of RNA exist which may be involved in regulation of transcription and/or translation.

[0067] Sequence of a nucleic acid molecule: The sequence of a nucleic acid molecule is typically understood to be the particular and individual order, i.e. the succession of its nucleotides. The sequence of a protein or peptide is typically understood to be the order, i.e. the succession of its amino acids.

[0068] Sequence identity: Two or more sequences are identical if they exhibit the same length and order of nucleotides or amino acids. The percentage of identity typically describes the extent to which two sequences are identical, i.e. it typically describes the percentage of nucleotides that correspond in their sequence position with identical nucleotides of a reference-sequence. For determination of the degree of identity, the sequences to be compared are considered to exhibit the same length, i.e. the length of the longest sequence of the sequences to be compared. This means that a first sequence consisting of 8 nucleotides is 80% identical to a second sequence consisting of 10 nucleotides comprising the first sequence. In other words, in the context of the present invention, identity of sequences preferably relates to the percentage of nucleotides of a sequence which have the same position in two or more sequences having the same length. Daps are usually regarded as non-identical positions, irrespective of their actual position in an alignment.

[0069] Stabilized nucleic acid molecule: A stabilized nucleic acid molecule is a nucleic acid molecule, preferably a DNA or RNA molecule that is modified such, that it is more stable to disintegration or degradation, e.g., by environmental factors or enzymatic digest, such as by an exo- or endonuclease degradation, than the nucleic acid molecule without the modification. Preferably, a stabilized nucleic acid molecule in the context of the present invention is stabilized in a call, such as a prokaryotic or eukaryotic cell, preferably in a mammalian call, such as a human call. The stabilization effect may also be exerted outside of calls, e.g. in a buffer solution etc., for example, in a manufacturing process for a pharmaceutical composition comprising the stabilized nucleic acid molecule.

[0070] Transfection: The term “transfection” refers to the introduction of nucleic acid molecules, such as DNA or RNA (e.g. mRNA) molecules, into cells, preferably into eukaryotic cells. In the context of the present invention, the term “transfection” encompasses any method known to the skilled person for introducing nucleic acid molecules into cells, preferably into eukaryotic cells, such as into mammalian cells. Such methods encompass, for example, electroporation, lipofection, e.g. based on cationic lipids and/or liposomes, calcium phosphate precipitation, nanoparticle based transfection, virus based transfection, or transfection based on cationic polymers, such as DEAE-dextran or polyethylenimine etc. Preferably, the introduction is non-viral.

[0071] Vaccine: A vaccine is typically understood to be a prophylactic or therapeutic material providing at least one antigen, preferably an immunogen. The antigen or immunogen may be derived from any material that is suitable for vaccination. For example, the antigen or immunogen may be derived from a pathogen, such as from bacteria or virus particles etc., or from a tumor or cancerous tissue. The antigen or immunogen stimulates the body's adaptive immune system to provide an adaptive immune response.

[0072] Vector: The term “vector” refers to a nucleic acid molecule, preferably to an artificial nucleic acid molecule. A vector in the context of the present invention is suitable for incorporating or harboring a desired nucleic acid sequence, such as a nucleic acid sequence comprising an open reading frame. Such vectors may be storage vectors, expression vectors, cloning vectors, transfer vectors etc. A storage vector is a vector, which allows the convenient storage of a nucleic acid molecule, for example, of an mRNA molecule. Thus, the vector may comprise a sequence corresponding, e.g., to a desired mRNA sequence or a part thereof, such as a sequence corresponding to the coding sequence and the 3′-UTR of an mRNA. An expression vector may be used for production of expression products such as RNA, e.g. mRNA, or peptides, polypeptides or proteins. For example, an expression vector may comprise sequences needed for transcription of a sequence stretch of the vector, such as a promoter sequence, e.g. an RNA polymerase promoter sequence. A cloning vector is typically a vector that contains a cloning site, which may be used to incorporate nucleic acid sequences into the vector. A cloning vector may be, e.g., a plasmid vector or a bacteriophage vector. A transfer vector may be a vector, which is suitable for transferring nucleic acid molecules into cells or organisms, for example, viral vectors. A vector in the context of the present invention may be, e.g., an RNA vector or a DNA vector. Preferably, a vector is a DNA molecule. Preferably, a vector in the sense of the present application comprises a cloning site, a selection marker, such as an antibiotic resistance factor, and a sequence suitable for multiplication of the vector, such as an origin of replication. Preferably, a vector in the context of the present application is a plasmid vector.

[0073] Vehicle: A vehicle is typically understood to be a material that is suitable for storing, transporting, and/or administering a compound, such as a pharmaceutically active compound. For example, it may be a physiologically acceptable liquid, which is suitable for storing, transporting, and/or administering a pharmaceutically active compound.

[0074] 3′-untranslated region (3′-UTR): Generally, the term “3′-UTR” refers to a part of the artificial nucleic acid molecule, which is located 3′ (i.e. “downstream”) of an open reading frame and which is not translated into protein. Typically, a 3′-UTR is the part of an mRNA which is located between the protein coding region (open reading frame (ORF) or coding sequence (CDS)) and the poly(A) sequence of the mRNA. In the context of the invention, the term 3′-UTR may also comprise elements, which are not encoded in the template, from which an RNA is transcribed, but which are added after transcription during maturation, e.g. a poly(A) sequence. A 3′-UTR of the mRNA is not translated into an amino acid sequence. The 3′-UTR sequence is generally encoded by the gene, which is transcribed into the respective mRNA during the gene expression process. The genomic sequence is first transcribed into pre-mature mRNA, which comprises optional introns. The pre-mature mRNA is then further processed into mature mRNA in a maturation process. This maturation process comprises the steps of 5′capping, splicing the pre-mature mRNA to excise optional introns and modifications of the 3′-end, such as polyadenylation of the 3′-end of the pre-mature mRNA and optional endo-/or exonuclease cleavages etc. In the context of the present invention, a 3′-UTR corresponds to the sequence of a mature mRNA, which is located between the stop codon of the protein coding region, preferably immediately 3′ to the stop codon of the protein coding region, and the poly(A) sequence of the mRNA. The term “corresponds to” means that the 3′-UTR sequence may be an RNA sequence, such as in the mRNA sequence used for defining the 3′-UTR sequence, or a DNA sequence, which corresponds to such RNA sequence. In the context of the present invention, the term “a 3′-UTR of a gene”, such as “a 3′-UTR of a ribosomal protein gene”, is the sequence, which corresponds to the 3′-UTR of the mature mRNA derived from this gene, i.e. the mRNA obtained by transcription of the gene and maturation of the pre-mature mRNA. The term “3′-UTR of a gene” encompasses the DNA sequence and the RNA sequence (both sense and antisense strand and both mature and immature) of the 3′-UTR.

[0075] 5′-untranslated region (5′-UTR): A 5′-UTR is typically understood to be a particular section of messenger RNA (mRNA). It is located 5′ of the open reading frame of the mRNA. Typically, the 5′-UTR starts with the transcriptional start site and ends one nucleotide before the start codon of the open reading frame. The 5′-UTR may comprise elements for controlling gene expression, also called regulatory elements. Such regulatory elements may be, for example, ribosomal binding sites. The 5′-UTR may be post-transcriptionally modified, for example by addition of a 5′-CAP. In the context of the present invention, a 5′-UTR corresponds to the sequence of a mature mRNA, which is located between the 5′-CAP and the start codon. Preferably, the 5′-UTR corresponds to the sequence, which extends from a nucleotide located 3′ to the 5′-CAP, preferably from the nucleotide located immediately 3′ to the 5′-CAP, to a nucleotide located 5′ to the start codon of the protein coding region, preferably to the nucleotide located immediately 5′ to the start codon of the protein coding region. The nucleotide located immediately 3′ to the 5′-CAP of a mature mRNA typically corresponds to the transcriptional start site. The term “corresponds to” means that the 5′-UTR sequence may be an RNA sequence, such as in the mRNA sequence used for defining the 5′-UTR sequence, or a DNA sequence, which corresponds to such RNA sequence. In the context of the present invention, the term “a 5′-UTR of a gene” is the sequence, which corresponds to the 5′-UTR of the mature mRNA derived from this gene, i.e. the mRNA obtained by transcription of the gene and maturation of the pre-mature mRNA. The term “5′-UTR of a gene” encompasses the DNA sequence and the RNA sequence of the 5′-UTR. By the inventive embodiments such a 5′-UTR may be provided 5′-terminal to the coding sequence. Its length is typically less than 500, 400, 300, 250 or less than 200 nucleotides. In other embodiments its length may be in the range of at least 10, 20, 30 or 40, preferably up to 100 or 150, nucleotides.

[0076] 5′Terminal Oligopyrimidine Tract (TOP): The 5′terminal oligopyrimidine tract (TOP) is typically a stretch of pyrimidine nucleotides located in the 5′ terminal region of a nucleic acid molecule, such as the 5′ terminal region of certain mRNA molecules or the 5′ terminal region of a functional entity, e.g. the transcribed region, of certain genes. The sequence starts with a cytidine, which usually corresponds to the transcriptional start site, and is followed by a stretch of usually about 3 to 30 pyrimidine nucleotides. For example, the TOP may comprise 3, 4, 5, 6, 7, 8, 9, 10, 11, 12, 13, 14, 15, 16, 17, 18, 19, 20, 21, 22, 23, 24, 25, 26, 27, 28, 29, 30 or even more nucleotides. The pyrimidine stretch and thus the 5′ TOP ends one nucleotide 5′ to the first purine nucleotide located downstream of the TOP. Messenger RNA that contains a 5′terminal oligopyrimidine tract is often referred to as TOP mRNA. Accordingly, genes that provide such messenger RNAs are referred to as TOP genes. TOP sequences have, for example, been found in genes and mRNAs encoding peptide elongation factors and ribosomal proteins.

[0077] TOP motif: In the context of the present invention, a TOP motif is a nucleic acid sequence which corresponds to a 5′TOP as defined above. Thus, a TOP motif in the context of the present invention is preferably a stretch of pyrimidine nucleotides having a length of 3-30 nucleotides. Preferably, the TOP-motif consists of at least 3 pyrimidine nucleotides, preferably at least 4 pyrimidine nucleotides, preferably at least 5 pyrimidine nucleotides, more preferably at least 6 nucleotides, more preferably at least 7 nucleotides, most preferably at least 8 pyrimidine nucleotides, wherein the stretch of pyrimidine nucleotides preferably starts at its 5′end with a cytosine nucleotide. In TOP genes and TOP mRNAs, the TOP-motif preferably starts at its 5′end with the transcriptional start site and ends one nucleotide 5′ to the first purin residue in said gene or mRNA. A TOP motif in the sense of the present invention is preferably located at the 5′end of a sequence, which represents a 5′UTR, or at the 5′end of a sequence, which codes for a 5′UTR. Thus, preferably, a stretch of 3 or more pyrimidine nucleotides is called “TOP motif” in the sense of the present invention if this stretch is located at the 5′end of a respective sequence, such as the artificial nucleic acid molecule, the 5′UTR element of the artificial nucleic acid molecule, or the nucleic acid sequence which is derived from the 5′UTR of a TOP gene as described herein. In other words, a stretch of 3 or more pyrimidine nucleotides, which is not located at the 5′-end of a 5′UTR or a 5′UTR element but anywhere within a 5′UTR or a 5′UTR element, is preferably not referred to as “TOP motif”.

[0078] TOP gene: TOP genes are typically characterised by the presence of a 5′ terminal oligopyrimidine tract. Furthermore, most TOP genes are characterized by a growth-associated translational regulation. However, also TOP genes with a tissue specific translational regulation are known. As defined above, the 5′UTR of a TOP gene corresponds to the sequence of a 5′UTR of a mature mRNA derived from a TOP gene, which preferably extends from the nucleotide located 3′ to the 5′-CAP to the nucleotide located 5′ to the start codon. A 5′UTR of a TOP gene typically does not comprise any start codons, preferably no upstream AUGs (uAHGs) or upstream open reading frames (uORFs). Therein, upstream AUGs and upstream open reading frames are typically understood to be AUGs and open reading frames that occur 5′ of the start codon (AUG) of the open reading frame that should be translated. The 5′UTRs of TOP genes are generally rather short. The lengths of 5′UTRs of TOP genes may vary between 20 nucleotides up to 500 nucleotides, and are typically less than about 200 nucleotides, preferably less than about 50 nucleotides, more preferably less than about 100 nucleotides. Exemplary 5′UTRs of TOP genes in the sense of the present invention are the nucleic acid sequences extending from the nucleotide at position 5 to the nucleotide located immediately 5′ to the start codon (e.g. the ATG) in the sequences according to SEQ ID NOs. 1-1363 of the patent application WO2013/143700, whose disclosure is incorporated herewith by reference. In this context, a particularly preferred fragment of a 5′UTR of a TOP gene is a 5′UTR of a TOP gene lacking the 5′TOP motif. The terms “5′UTR of a TOP gene” or “5′-TOP UTR” preferably refer to the 5′UTR of a naturally occurring TOP gene.

[0079] The present invention provides an RNA comprising at least one coding sequence encoding a tumor antigen, or a fragment or variant of a tumor antigen.

[0080] In the context of the present invention, the tumor antigen encoded by the at least one coding sequence of the RNA is preferably an antigen as defined herein, which is derived from or associated with a tumor or a coner disease. Preferably, the tumor is a malignant tumor. The tumor antigen is preferably an antigen associated with a cancer disease. A tumor antigen as used herein is typically derived from a tumor cell, preferably a mammalian tumor cell. A tumor antigen is preferably located in or on the surface of a tumor cell derived from a mammalian, preferably from a human, tumor, such as a systemic or a solid tumor.

[0081] Tumor antigens may also be selected from proteins, which are overexpressed in tumor cells compared to a normal cell. Furthermore, the expression ‘tumor antigen’ also includes an antigen expressed in cells, which are (were) not themselves (or originally not themselves) degenerated but are associated with the supposed tumor. Antigens, which are connected with tumor-supplying vessels or (re)formation thereof, in particular those antigens, which are associated with neovascularization, e.g. growth factors, such as VEGF, bFGF etc., are also included herein. Further antigens connected with a tumor include antigens from cells or tissues typically embedding the tumor. Further, some substances (usually proteins or peptides) are expressed in patients suffering (knowingly or not-knowingly) from a cancer disease and they occur in increased concentrations in the body fluids of said patients. Some substances may also referred to herein as ‘tumor antigens’, without being antigens in the strictest sense of an immune response inducing substance. The class of tumor antigens can be divided further into tumor-specific antigens (TSAs) and tumor-associated-antigens (TAAs), both of which are comprised by the expression as used herein. TSAs can only be presented by tumor cells and never by normal “healthy” cells. They typically result from a tumor specific mutation. TAAs, which are more common, are usually presented by both tumor and healthy cells. These antigens are recognized and the antigen-presenting cell can be destroyed by cytotoxic T cells. Additionally, tumor antigens can also occur on the surface of the tumor in the form of, e.g., a mutated receptor. In this case, they can be recognized by antibodies.

[0082] As used herein, the term ‘tumor antigen’ or ‘antigen’ preferably refers to any one of the antigens provided in Table 1 herein. The at least one coding sequence of the RNA according to the invention thus preferably encodes a tumor antigen selected from the antigens provided in Table 1, or a fragment or variant thereo.

[0083] The inventors surprisingly found that the RNA according to the invention is capable of providing expression of the tumor antigen encoded in the at least one coding region upon administration of the RNA to cells or to a patient. It was unexpectedly found that an improved immune response can advantageously be obtained by using the RNA according to the invention as a vaccine against a tumor antigen as defined herein.

[0084] Preferably, the at least one coding sequence of the RNA according to the invention encodes a tumor antigen, preferably as defined herein, or a fragment or variant thereof, wherein the tumor antigen is preferably selected from the group consisting of IAO1_HLA-A/m; IAO2; 5T4; ACRBP; AFP; AKAP4; alpha-actinin-_4/m; alpha-methylacyl-coenzyme_A_racemase; ANDR; ART-4; ARTC1/m; AURKB; B2MR; B3RN5; B4RN1; B7H4; BAGE-1; BAS1; BCL-2; bcr/abl; beta-catenin/m; BING-4; BIRC7; BRCA1/m; BY55; calreticulin; CAMEL; CASP-8/m; CASPA; nathepsin_B; nathepsin_L; CD1A; CD1R; CD1C; CD1D; CD1E; CD20; CD22; CD27E; CD33; CD3E; CD3Z; CD44_Isoform_I; CD44_Isoform_B; CD4; CD52; CD55; CD56; CD80; CD86; CD8A; CDC27/m; CDE30; CDK4/m; CDKN2A/m; CEA; CEAM6; CH3L2; CLCA2; CML28; CML66; CDA-1/m; coactosin-like_protein; collagen_XXIII; COX-2; CPIB1; CSAR2; CT45A1; CT55; CT-_9/BRD6; CTAR2_Isoform_LAGE-1A; CTAR2_Isoform_LAGE-1B; CTCFL; Cten; cyclin_B1; cyclin_D1; nyp-8; DAM-10; DEPIA; E7; EFIA2; EFTUD2/m; EGFR; ELN3; ELF2/m; EMMPRIN; EpCam; EphA2; EphA3; ErbB3; ERBB4; ERG; ETVE; EWS; EZH2; FABP7; FCRR3A_Version_; FCRR3A_Version_2; FRF5; FRFR2; fibronectin; FOS; FOXP3; FUT1; R250; RAGE-1; RAGE-2; RAGE-3; RAGE-4; RAGE-5; RAGE-6; AGE7b; RAGE-8_(GAGE-2D); GASR; GnT-V; RPC3; GPNMB/m; GRM3; HAGE; hepsin; Her2/neu; HLA-A2/m; homeobox_NKX3.1; HOM-TES-85; HPR1; HS71A; HS71B; HST-2; hTERT; iCE; IF2B3; IL1; IL-13Ra2; IL2-RA; IL2-RB; IL2-RG; IL-5; IMP3; ITA5; ITB1; ITB6; kallikrein-2; kallikrein-3; kallikrein-4; K120A; KIAA0205; KIF2C; KK-LC-1; LDLR; LRMN; LIRB2; LY6K; MARA5; MARA8; MARA8; MAGE-A1D; MAGE-A12; MAGE-A1; MAGE-A2; MAGE-A3; MAGE-A4; MAGE-A6; MAGE-A9; MAGE-B10; MAGE-B16; MAGE-B17; MAGE-_B1; MAGE-B2; MAGE-B3; MAGE-B4; MAGE-5; MAGE-B6; MAGE-C1; MAGE-C2; MAGE-C3; MAGE-D1; MAGE-D2; MAGE-D4; MAGE-_E1; MAGE-E1_(MAGE1); MAGE-E2; MAGE-F1; MAGE-H1; MAGEL2; mammaglobin_A; MART-1/melan-A; MART-2; MCI_R; M-CSF; mesothelin; MITF; MMP1_1; MMP7; MUC-1; MUM-1/m; MUM-2/m; MYCN; MY01A; MY01B; MY01C; MY01D; MY01E; MY01F; MY01G; MY01H; NA17; NA88-A; Neo-PAP; NFYC/m; NREP; NPM; NRCAM; NSE; NUF2; NY-ESO-11 DAI; DRT; DS-9; osteocalcin; osteopontin; p53; PAGE-4; PAI-1; PAI-2; PAP; PATE; PAX3; PAX5; PD1L1; PDCD1; PDEF; PECA1; PGCB; PRFRB; Pim-1_-Kinase; Pin-1; PLAC1; PMEL; PML; PDTEF; PDTE; PRAME; PRDX5/m; PRM2; prostein; proteinase-3; PSA; PSB9; PSCA; PSRR; PSM; PTPRC; RAB8A; RAGE-1; RARA; RASH; RASK; RASN; RRS5; RHAMM/CD168; RHDC; RSSA; RU1; RU2; RUNX1; S-100; SAGE; SART-_1; SART-2; SART-3; SEPR; SERPINB5; SIA7F; SIA8A; SIAT9; SIRT2/m; SDX10; SP17; SPNXA; SPXN3; SSX-1; SSX-2; SSX3; SSX-4; ST1A1; STAG2; STAMP-1; STEAP-1; Survivin-2B; survivin; SYCP1; SYT-SSX-1; SYT-SSX-2; TARP; TCRg; TF2AA; TGFB1; TGFR2; TGM-4; TIE2; TKTL1; TPI/m; TROV11; TRGV9; TRPC1; TRP-p8; TSG10; TSPY1; TVC_(TRGV3); TX101; tyrosinase; TYRP1; TYRP2; UPA; VEGFR1; WT1; and XAGE1.

[0085] It is further preferred that the at least one coding sequence of the RNA of the present invention encodes a tumor antigen, or a fragment or variant thereof, wherein the tumor antigen is an antigen selected from the antigens listed in Table 1. Therein, each row corresponds to an antigen as identified by the respective gene name (first column ‘ene Name’) and the database accession number of the corresponding protein (second column ‘Protein Accession No.’). The third column (‘A’) in Table 1 indicates the SEQ ID NO: corresponding to the respective amino acid sequence as provided herein. The SEQ ID NO: corresponding to the nucleic acid sequence of the wild type RNA encoding the antigen is indicated in the fourth column (‘B’). The fifth column (‘C’) provides the SEQ ID NO: corresponding to modified nucleic acid sequences of the RNAs as described herein that encode the antigen preferably having the amino acid sequence as defined by the SEQ ID NO: indicated in the third column (‘A’) or by the database entry indicated in the second column (‘Protein Accession No.’).

[0086] For example, the at least one coding region of the RNA according to the invention may encode the antigen ‘5T4’ (see Table 1, third row), as referenced in the UniProtKB database under ‘Q13B41’ (see Table 1, third row, second column). The full-length amino acid sequence of the 5T4 antigen as used herein is indicated in the third column and is defined by SEQ ID NO: 3. In the case of an RNA encoding 5T4 or a fragment or variant thereof, the at least one coding region of the RNA may thus comprise or consist of, for example, the nucleic acid sequence according to SEQ ID NO: 507 (see Table 1, third row, fourth column) or a fragment or variant thereof, or, alternatively, any one of the nucleic acid sequences according to SEQ ID NOs:1011; 1515; 2019; 2523; 3027; 3531; 4035, or a fragment or variant of any one of these sequences.

TABLE 1
List of tumor antigens

| | Accession No. | | | |
|---|---|---|---|---|
| | (UniProtKB, NCBI, | | | |
| Gene Name | Genbank or Pubmed) | A | B | C |
| HLA-A | P30443 | 1 | 505 | 1009; 1513; 2017; 2521; 3025; 3529; 4033 |
| HLA-A | P01892 | 2 | 506 | 1010; 1514; 2018; 2522; 3026; 3530; 4034 |
| TPBG | Q13641 | 3 | 507 | 1011; 1515; 2019; 2523; 3027; 3531; 4035 |
| ACRBP | Q8NEB7 | 4 | 508 | 1012; 1516; 2020; 2524; 3028; 3532; 4036 |
| AFP | P02771 | 5 | 509 | 1013; 1517; 2021; 2525; 3029; 3533; 4037 |
| AKAP4 | Q5JQC9 | 6 | 510 | 1014; 1518; 2022; 2526; 3030; 3534; 4038 |
| ACTN4 | B4DSX0 | 7 | 511 | 1015; 1519; 2023; 2527; 3031; 3535; 4039 |
| ACTN4 | B4E337 | 8 | 512 | 1016; 1520; 2024; 2528; 3032; 3536; 4040 |
| ACTN4 | O43707 | 9 | 513 | 1017; 1521; 2025; 2529; 3033; 3537; 4041 |
| AMACR | A0A024RE16 | 10 | 514 | 1018; 1522; 2026; 2530; 3034; 3538; 4042 |
| AMACR | A8KAC3 | 11 | 515 | 1019; 1523; 2027; 2531; 3035; 3539; 4043 |
| AR | P10275 | 12 | 516 | 1020; 1524; 2028; 2532; 3036; 3540; 4044 |
| NOB1 | Q9ULX3 | 13 | 517 | 1021; 1525; 2029; 2533; 3037; 3541; 4045 |
| ART1 | P52961 | 14 | 518 | 1022; 1526; 2030; 2534; 3038; 3542; 4046 |
| AURKB | Q96GD4 | 15 | 519 | 1023; 1527; 2031; 2535; 3039; 3543; 4047 |
| B2M | P61769 | 16 | 520 | 1024; 1528; 2032; 2536; 3040; 3544; 4048 |
| B3BNT5 | Q9BYG0 | 17 | 521 | 1025; 1529; 2033; 2537; 3041; 3545; 4049 |
| B4BALNT1 | Q00973 | 18 | 522 | 1026; 1530; 2034; 2538; 3042; 3546; 4050 |
| VTCN1 | Q7Z7D3 | 19 | 523 | 1027; 1531; 2035; 2539; 3043; 3547; 4051 |
| BAGE | Q13072 | 20 | 524 | 1028; 1532; 2036; 2540; 3044; 3548; 4052 |
| BSG | P35613 | 21 | 525 | 1029; 1533; 2037; 2541; 3045; 3549; 4053 |
| bcl2 | A9QXG9 | 22 | 526 | 1030; 1534; 2038; 2542; 3046; 3550; 4054 |
| BCR/ABL | A9UEZ4 | 23 | 527 | 1031; 1535; 2039; 2543; 3047; 3551; 4055 |
| BCR/ABL | A9UEZ7 | 24 | 528 | 1032; 1536; 2040; 2544; 3048; 3552; 4056 |
| BCR/ABL | A9UEZ8 | 25 | 529 | 1033; 1537; 2041; 2545; 3049; 3553; 4057 |
| BCR/ABL | A9UEZ9 | 26 | 530 | 1034; 1538; 2042; 2546; 3050; 3554; 4058 |
| BCR/ABL | A9UFO0 | 27 | 531 | 1035; 1539; 2043; 2547; 3051; 3555; 4059 |
| BCR/ABL | A9UFO1 | 28 | 532 | 1036; 1540; 2044; 2548; 3052; 3556; 4060 |
| BCR/ABL | A9UFO3 | 29 | 533 | 1037; 1541; 2045; 2549; 3053; 3557; 4061 |
| BCR/ABL | A9UFO4 | 30 | 534 | 1038; 1542; 2046; 2550; 3054; 3558; 4062 |
| BCR/ABL | A9UFO5 | 31 | 535 | 1039; 1543; 2047; 2551; 3055; 3559; 4063 |
| BCR/ABL | A9UFO6 | 32 | 536 | 1040; 1544; 2048; 2552; 3056; 3560; 4064 |
| BCR/ABL | A9UFO8 | 33 | 537 | 1041; 1545; 2049; 2553; 3057; 3561; 4065 |
| CTNNB1 | P35222 | 34 | 538 | 1042; 1546; 2050; 2554; 3058; 3562; 4066 |
| CTNNBL1 | Q8WYA6 | 35 | 539 | 1043; 1547; 2051; 2555; 3059; 3563; 4067 |
| WDR46 | O15213 | 36 | 540 | 1044; 1548; 2052; 2556; 3060; 3564; 4068 |
| BIRC7 | Q96CA5 | 37 | 541 | 1045; 1549; 2053; 2557; 3061; 3565; 4068 |
| BRCA1 | A0A024R1V0 | 38 | 542 | 1046; 1550; 2054; 2558; 3062; 3566; 4070 |
| BRCA1 | A0A024R1V7 | 39 | 543 | 1047; 1551; 2055; 2559; 3063; 3567; 4071 |
| BRCA1 | A0A024R1Z8 | 40 | 544 | 1048; 1552; 2056; 2560; 3064; 3568; 4072 |
| BRCA1 | A0A068BFX7 | 41 | 545 | 1049; 1553; 2057; 2561; 3065; 3569; 4073 |
| BRCA1 | C6YB45 | 42 | 546 | 1050; 1554; 2058; 2562; 3066; 3570; 4074 |
| BRCA1 | C6YB47 | 43 | 547 | 1051; 1555; 2059; 2563; 3067; 3571; 4075 |
| BRCA1 | G3XAC3 | 44 | 548 | 1052; 1556; 2060; 2564; 3068; 3572; 4076 |
| CD160 | O95971 | 45 | 549 | 1053; 1557; 2061; 2565; 3069; 3573; 4077 |
| CALR | B4DHR1 | 46 | 550 | 1054; 1558; 2062; 2566; 3070; 3574; 4078 |
| CALR | B4E2Y9 | 47 | 551 | 1055; 1559; 2063; 2567; 3071; 3575; 4079 |
| CALR | P27797 | 48 | 552 | 1056; 1560; 2064; 2568; 3072; 3576; 4080 |
| CALR3 | Q96L12 | 49 | 553 | 1057; 1561; 2065; 2569; 3073; 3577; 4081 |
| CAMEL | O95987 | 50 | 554 | 1058; 1562; 2066; 2570; 3074; 3578; 4082 |
| CASP8 | Q14790 | 51 | 555 | 1058; 1563; 2067; 2571; 3075; 3579; 4083 |
| CASP10 | Q92851-4 | 52 | 556 | 1060; 1564; 2068; 2572; 3076; 3580; 4084 |
| CTSB | A0A024R374 | 53 | 557 | 1061; 1565; 2069; 2573; 3077; 3581; 4085 |
| CTSB | P07858 | 54 | 558 | 1062; 1566; 2070; 2574; 3078; 3582; 4086 |
| CTSL | A0A024R276 | 55 | 559 | 1063; 1567; 2071; 2575; 3079; 3583; 4087 |
| CTSL | P07711 | 56 | 560 | 1064; 1568; 2072; 2576; 3080; 3584; 4088 |
| CTSL | Q9HBQ7 | 57 | 561 | 1065; 1569; 2073; 2577; 3081; 3585; 4089 |
| CD1A | P06126 | 58 | 562 | 1066; 1570; 2074; 2578; 3082; 3586; 4090 |
| CD1B | P29016 | 59 | 563 | 1067; 1571; 2075; 2579; 3083; 3587; 4091 |
| CD1C | P29017 | 60 | 564 | 1068; 1572; 2076; 2580; 3084; 3588; 4092 |
| CD1D | P15813 | 61 | 565 | 1069; 1573; 2077; 2581; 3085; 3589; 4093 |
| CD1E | P15812 | 62 | 566 | 1070; 1574; 2078; 2582; 3086; 3590; 4094 |
| MS4A1 | P11836 | 63 | 567 | 1071; 1575; 2079; 2583; 3087; 3591; 4095 |
| CD22 | O60926 | 64 | 568 | 1072; 1576; 2080; 2584; 3088; 3592; 4096 |
| CD22 | P20273 | 65 | 569 | 1073; 1577; 2081; 2585; 3089; 3593; 4097 |
| CD22 | Q0EAF5 | 66 | 570 | 1074; 1578; 2082; 2586; 3090; 3594; 4098 |
| CD276 | Q5ZPR3 | 67 | 571 | 1075; 1579; 2083; 2587; 3091; 3595; 4099 |
| CD33 | B4DF51 | 68 | 572 | 1076; 1580; 2084; 2588; 3092; 3596; 4100 |
| CD33 | P20138 | 69 | 573 | 1077; 1581; 2085; 2589; 3093; 3597; 4101 |
| CD33 | Q546G0 | 70 | 574 | 1078; 1582; 2086; 2590; 3094; 3598; 4102 |
| CD3E | P07766 | 71 | 575 | 1079; 1583; 2087; 2591; 3095; 3599; 4103 |
| CD247 | P20963 | 72 | 576 | 1080; 1584; 2088; 2592; 3096; 3600; 4104 |
| CD44 | P16070 | 73 | 577 | 1081; 1585; 2089; 2593; 3097; 3601; 4105 |
| CD44 | P16070-6 | 74 | 578 | 1082; 1586; 2090; 2594; 3098; 3602; 4106 |
| CD4 | P01730 | 75 | 579 | 1083; 1587; 2091; 2595; 3099; 3603; 4107 |
| CD52 | P31358 | 76 | 580 | 1084; 1588; 2092; 2596; 3100; 3604; 4108 |
| CDW52 | Q6IBD0 | 77 | 581 | 1085; 1589; 2093; 2597; 3101; 3605; 4109 |
| HEL-S-171mP | V9HWN9 | 78 | 582 | 1086; 1590; 2094; 2598; 3102; 3606; 4110 |
| CD55 | B1AP15 | 79 | 583 | 1087; 1591; 2095; 2599; 3103; 3607; 4111 |
| CD55 | D3DT85 | 80 | 584 | 1088; 1592; 2096; 2600; 3104; 3608; 4112 |
| CD55 | D3DT86 | 81 | 585 | 1089; 1593; 2097; 2601; 3105; 3609; 4113 |
| CD55 | P08174 | 82 | 586 | 1090; 1594; 2098; 2602; 3106; 3610; 4114 |
| NCAM1 | P13591 | 83 | 587 | 1091; 1595; 2099; 2603; 3107; 3611; 4115 |
| CD80 | A0N0P2 | 84 | 588 | 1092; 1596; 2100; 2604; 3108; 3612; 4116 |
| CD80 | P33681 | 85 | 589 | 1093; 1597; 2101; 2605; 3109; 3613; 4117 |
| CD86 | P42081 | 86 | 590 | 1094; 1598; 2102; 2606; 3110; 3614; 4118 |
| CD8A | P01732 | 87 | 591 | 1095; 1599; 2103; 2607; 3111; 3615; 4119 |
| CDC27 | G5EA36 | 88 | 592 | 1096; 1600; 2104; 2608; 3112; 3616; 4120 |
| CDC27 | P30260 | 89 | 593 | 1097; 1601; 2105; 2609; 3113; 3617; 4121 |
| TNFRSF8 | P28908 | 90 | 594 | 1098; 1602; 2106; 2610; 3114; 3618; 4122 |
| CDK4 | A0A024RBB6 | 91 | 595 | 1099; 1603; 2107; 2611; 3115; 3619; 4123 |
| CDK4 | P11802 | 92 | 596 | 1100; 1604; 2108; 2612; 3116; 3620; 4124 |
| CDK4 | Q6LC83 | 93 | 597 | 1101; 1605; 2109; 2613; 3117; 3621; 4125 |
| CDK4 | Q96BE9 | 94 | 598 | 1102; 1606; 2110; 2614; 3118; 3622; 4126 |
| CDKN2A | D1LYX3 | 95 | 599 | 1103; 1607; 2111; 2615; 3119; 3623; 4127 |
| CDKN2A | G3XAG3 | 96 | 600 | 1104; 1608; 2112; 2616; 3120; 3624; 4128 |
| CDKN2A | K7PML8 | 97 | 601 | 1105; 1609; 2113; 2617; 3121; 3625; 4129 |
| CDKN2A | L8E941 | 98 | 602 | 1106; 1610; 2114; 2618; 3122; 3926; 4130 |
| CDKN2A | QBN726 | 99 | 603 | 1107; 1611; 2115; 2619; 3123; 3927; 4131 |
| CEACAM5 | NP_004354 | 100 | 604 | 1108; 1612; 2116; 2620; 3124; 3628; 4132 |
| CEACAM6 | P40199 | 101 | 605 | 1109; 1613; 2117; 2621; 3125; 3629; 4133 |
| CHI3L2 | Q15782 | 102 | 606 | 1110; 1614; 2118; 2622; 3126; 3630; 4134 |
| CLCA2 | Q9UQC9 | 103 | 607 | 1111; 1615; 2119; 2623; 3127; 3631; 4135 |
| EXOSC5 | Q9NQT4 | 104 | 608 | 1112; 1616; 2120; 2624; 3128; 3632; 4136 |
| NUDCD1 | Q96RS6 | 105 | 609 | 1113; 1617; 2121; 2625; 3129; 3633; 4137 |
| UBXN11 | Q5T124 | 106 | 610 | 1114; 1618; 2122; 2626; 3130; 3634; 4138 |
| COTL1 | Q14019 | 107 | 611 | 1115; 1619; 2123; 2627; 3131; 3635; 4139 |
| COL23A1 | L8EAS4 | 108 | 612 | 1116; 1620; 2124; 2628; 3132; 3636; 4140 |
| COL23A1 | Q86Y22 | 109 | 613 | 1117; 1621; 2125; 2629; 3133; 3637; 4141 |
| COX-2 | Q6ZYK7 | 110 | 614 | 1118; 1622; 2126; 2630; 3134; 3638; 4142 |
| CYP1B1 | Q16678 | 111 | 615 | 1119; 1623; 2127; 2631; 3135; 3639; 4143 |
| CSAG2 | Q9Y5P2-2 | 112 | 616 | 1120; 1624; 2128; 2632; 3136; 3640; 4144 |
| CSAG2 | Q9Y5P2 | 113 | 617 | 1121; 1625; 2129; 2633; 3137; 3641; 4145 |
| CT45A1 | Q5HYN5 | 114 | 618 | 1122; 1626; 2130; 2634; 3138; 3642; 4146 |
| CT55 | Q8WUE5 | 115 | 619 | 1123; 1627; 2131; 2635; 3139; 3643; 4147 |
| BRDT | Q58F21 | 116 | 620 | 1124; 1628; 2132; 2636; 3140; 3644; 4148 |
| CTAG2 | O75638-2 | 117 | 621 | 1125; 1629; 2133; 2637; 3141; 3645; 4149 |
| CTAG2 | O75638 | 118 | 622 | 1126; 1630; 2134; 2638; 3142; 3646; 4150 |
| CTCFL | Q8NI51 | 119 | 623 | 1127; 1631; 2135; 2639; 3143; 3647; 4151 |
| TNS4 | QBIZW8 | 120 | 624 | 1128; 1632; 2136; 2640; 3144; 3648; 4152 |
| CCNB1 | P14635 | 121 | 625 | 1129; 1633; 2137; 2641; 3145; 3649; 4153 |
| CCND1 | P24385 | 122 | 626 | 1130; 1634; 2138; 2642; 3146; 3650; 4154 |
| PPIB | P23284 | 123 | 627 | 1131; 1635; 2139; 2643; 3147; 3651; 4155 |
| MAGEB1 | P43366 | 124 | 628 | 1132; 1636; 2140; 2644; 3148; 3652; 4156 |
| DEPDC1 | Q5TB30 | 125 | 629 | 1133; 1637; 2141; 2645; 3149; 3653; 4157 |
| E7 | P03129 | 126 | 630 | 1134; 1638; 2142; 2646; 3150; 3654; 4158 |
| E7 | P06788 | 127 | 631 | 1135; 1639; 2143; 2647; 3151; 3655; 4159 |
| E7 | P17387 | 128 | 632 | 1136; 1640; 2144; 2648; 3152; 3656; 4160 |
| E7 | P06429 | 129 | 633 | 1137; 1641; 2145; 2649; 3153; 3657; 4161 |
| E7 | P27230 | 130 | 634 | 1138; 1642; 2146; 2650; 3154; 3658; 4162 |
| E7 | P24837 | 131 | 635 | 1139; 1643; 2147; 2651; 3155; 3659; 4163 |
| E7 | P21736 | 132 | 636 | 1140; 1644; 2148; 2652; 3156; 3660; 4164 |
| E7 | P26558 | 133 | 637 | 1141; 1645; 2149; 2653; 3157; 3661; 4165 |
| E7 | P36831 | 134 | 638 | 1142; 1646; 2150; 2654; 3158; 3662; 4166 |
| E7 | P36833 | 135 | 639 | 1143; 1647; 2151; 2655; 3159; 3663; 4167 |
| E7 | Q9QCZ1 | 136 | 640 | 1144; 1648; 2152; 2656; 3I60; 3664; 4168 |
| ORF | Q81865 | 137 | 641 | 1145; 1649; 2153; 2657; 3161; 3665; 4169 |
| E7 | Q80956 | 138 | 642 | 1146; 1650; 2154; 2658; 3162; 3666; 4170 |
| EEF1A2 | Q05639 | 139 | 643 | 1147; 1651; 2155; 2659; 3163; 3667; 4171 |
| EFTUD2 | Q15029 | 140 | 644 | 1148; 1652; 2156; 2660; 3164; 3668; 4172 |
| EGFR | A0A0B4J1Y5 | 141 | 645 | 1149; 1653; 2157; 2661; 3165; 3669; 4173 |
| EGFR | E7BSV0 | 142 | 646 | 1150; 1654; 2158; 2662; 3166; 3670; 4174 |
| EGFR | L0R6G1 | 143 | 647 | 1151; 1655; 2159; 2663; 3167; 3671; 4175 |
| EGFR | P00533-2 | 144 | 648 | 1152; 1656; 2160; 2664; 3168; 3672; 4176 |
| EGFR | P00533 | 145 | 649 | 1153; 1657; 2161; 2665; 3169; 3673; 4177 |
| EGFR | Q147T7 | 146 | 650 | 1154; 1658; 2162; 2666; 3170; 3674; 4178 |
| EGFR | Q504U8 | 147 | 651 | 1155; 1659; 2163; 2667; 3171; 3675; 4179 |
| EGFR | Q8NDU8 | 148 | 652 | 1156; 1660; 2164; 2668; 3172; 3676; 4180 |
| EGLN3 | Q9H6Z9 | 149 | 653 | 1157; 1661; 2165; 2669; 3173; 3677; 4181 |
| ELF2 | B7Z720 | 150 | 654 | 1158; 1662; 2166; 2670; 3174; 3678; 4182 |
| hEMMPRIN | Q54A51 | 151 | 655 | 1159; 1663; 2167; 2671; 3175; 3679; 4183 |
| EPCAM | P16422 | 152 | 656 | 1160; 1664; 2168; 2672; 3176; 3680; 4184 |
| EPHA2 | P29317 | 153 | 657 | 1161; 1665; 2169; 2673; 3177; 3681; 4185 |
| EPHA3 | P29320 | 154 | 658 | 1162; 1666; 2170; 2674; 3178; 3682; 4186 |
| EPHA3 | Q6P4R6 | 155 | 659 | 1163; 1667; 2171; 2675; 3179; 3683; 4187 |
| ERBB3 | B3KWG5 | 156 | 660 | 1164; 1668; 2172; 2676; 3180; 3684; 4188 |
| ERBB3 | B4DGQ7 | 157 | 661 | 1165; 1669; 2173; 2677; 3181; 3685; 4189 |
| ERBB4 | Q15303 | 158 | 662 | 1166; 1670; 2174; 2678; 3182; 3686; 4190 |
| ERG | P11308 | 159 | 663 | 1167; 1671; 2175; 2679; 3183; 3687; 4191 |
| ETV6 | P41212 | 160 | 664 | 1168; 1672; 2176; 2680; 3184; 3688; 4192 |
| EWSR1 | Q01844 | 161 | 665 | 1169; 1673; 2177; 2681; 3185; 3689; 4193 |
| EZH2 | F2YMM1 | 162 | 666 | 1170; 1674; 2178; 2682; 3186; 3690; 4194 |
| EZH2 | G3XAL2 | 163 | 667 | 1171; 1675; 2179; 2683; 3187; 3691; 4195 |
| EZH2 | L0R855 | 164 | 668 | 1172; 1676; 2180; 2684; 3188; 3692; 4196 |
| EZH2 | Q15910 | 165 | 669 | 1173; 1677; 2181; 2685; 3189; 3693; 4197 |
| EZH2 | S4S3R8 | 166 | 670 | 1174; 1678; 2182; 2686; 3190; 3694; 4198 |
| FABP7 | O15540 | 167 | 671 | 1175; 1679; 2183; 2687; 3191; 3695; 4199 |
| FCGR3A | P08637 | 168 | 672 | 1176; 1680; 2184; 2688; 3192; 3696; 4200 |
| FCGR3A | CCDS1232.1 | 169 | 673 | 1177; 1681; 2185; 2689; 3193; 3697; 4201 |
| FGF5 | P12034 | 170 | 674 | 1178; 1682; 2186; 2690; 3194; 3698; 4202 |
| FGF5 | Q60518 | 171 | 675 | 1179; 1683; 2187; 2691; 3195; 3699; 4203 |
| FGFR2 | P21802 | 172 | 676 | 1180; 1684; 2188; 2692; 3196; 3700; 4204 |
| LRFN4 | A0A024R5I6 | 173 | 677 | 1181; 1685; 2189; 2693; 3197; 3701; 4205 |
| ITGA5 | A0A024RB01 | 174 | 678 | 1182; 1686; 2190; 2694; 3198; 3702; 4206 |
| FNDC3A | A0A024RDT9 | 175 | 679 | 1183; 1687; 2191; 2695; 3199; 3703; 4207 |
| FNDC3A | A0A024RDV5 | 176 | 680 | 1184; 1688; 2192; 2696; 3200; 3704; 4208 |
| FANK1 | A6NH44 | 177 | 681 | 1185; 1689; 2193; 2697; 3201; 3705; 4209 |
| A8K6A5 | A8K6A5 | 178 | 682 | 1186; 1690; 2194; 2698; 3202; 3706; 4210 |
| B2R627 | B2R627 | 179 | 683 | 1187; 1691; 2195; 2699; 3203; 3707; 4211 |
| B3KXM5 | B3KXM5 | 180 | 684 | 1188; 1692; 2196; 2700; 3204; 3708; 4212 |
| B4DIC5 | B4DIC5 | 181 | 685 | 1189; 1693; 2197; 2701; 3205; 3709; 4213 |
| B4DN21 | B4DN21 | 182 | 686 | 1190; 1694; 2198; 2702; 3206; 3710; 4214 |
| B4DS98 | B4DS98 | 183 | 687 | 1191; 1695; 2199; 2703; 3207; 3711; 4215 |
| B4DTH2 | B4DTH2 | 184 | 688 | 1192; 1696; 2200; 2704; 3208; 3712; 4216 |
| B4DTK1 | B4DTK1 | 185 | 689 | 1193; 1697; 2201; 2705; 3209; 3713; 4217 |
| B4DU16 | B4DU16 | 186 | 690 | 1194; 1698; 2202; 2706; 3210; 3714; 4218 |
| B7Z3W5 | B7Z3W5 | 187 | 691 | 1195; 1699; 2203; 2707; 3211; 3715; 4219 |
| B7Z939 | B7Z939 | 188 | 692 | 1196; 1700; 2204; 2708; 3212; 3716; 4220 |
| FNDC3A | G5E9X3 | 189 | 693 | 1197; 1701; 2205; 2709; 3213; 3717; 4221 |
| Q9H382 | Q9H382 | 190 | 694 | 1198; 1702; 2206; 2710; 3214; 3718; 4222 |
| FOS | P01100 | 191 | 695 | 1199; 1703; 2207; 2711; 3215; 3719; 4223 |
| FOXP3 | Q9BZS1 | 192 | 696 | 1200; 1704; 2208; 2712; 3216; 3720; 4224 |
| FUT1 | P19526 | 193 | 697 | 1201; 1705; 2209; 2713; 3217; 3721; 4225 |
| CA9 | Q16790 | 194 | 698 | 1202; 1706; 2210; 2714; 3218; 3722; 4226 |
| GAGE1 | AAAB2744 | 195 | 699 | 1203; 1707; 2211; 2715; 3219; 3723; 4227 |
| GAGE2A | Q6NT46 | 196 | 700 | 1204; 1708; 2212; 2716; 3220; 3724; 4228 |
| GAGE3 | Q13067 | 197 | 701 | 1205; 1709; 2213; 2717; 3221; 3725; 4229 |
| GAGE4 | Q13068 | 198 | 702 | 1206; 1710; 2214; 2718; 3222; 3726; 4230 |
| GAGE5 | Q13069 | 199 | 703 | 1207; 1711; 2215; 2719; 3223; 3727; 4231 |
| GAGE6 | Q13070 | 200 | 704 | 1208; 1712; 2216; 2720; 3224; 3728; 4232 |
| GAGE7 | O76087 | 201 | 705 | 1209; 1713; 2217; 2721; 3225; 3729; 4233 |
| GAGE2D | Q9UEU5 | 202 | 706 | 1210; 1714; 2218; 2722; 3226; 3730; 4234 |
| CCKBR | P32239 | 203 | 707 | 1211; 1715; 2219; 2723; 3227; 3731; 4235 |
| MGAT5 | Q09328 | 204 | 708 | 1212; 1716; 2220; 2724; 3228; 3732; 4236 |
| GPC3 | I6QTG3 | 205 | 709 | 1213; 1717; 2221; 2725; 3229; 3733; 4237 |
| GPC3 | P51654 | 206 | 710 | 1214; 1718; 2222; 2726; 3230; 3734; 4238 |
| GPC3 | Q8IYG2 | 207 | 711 | 1215; 1719; 2223; 2727; 3231; 3735; 4239 |
| GPNMB | A0A024RA55 | 208 | 712 | 1216; 1720; 2224; 2728; 3232; 3736; 4240 |
| GPNMB | Q14956 | 209 | 713 | 1217; 1721; 2225; 2729; 3233; 3737; 4241 |
| GPNMB | Q8IXJ5 | 210 | 714 | 1218; 1722; 2226; 2730; 3234; 3738; 4242 |
| GPNMB | Q96F58 | 211 | 715 | 1219; 1723; 2227; 2731; 3235; 3739; 4243 |
| GRM3 | Q14832 | 212 | 716 | 1220; 1724; 2228; 2732; 3236; 3740; 4244 |
| DDX43 | Q9NXZ2 | 213 | 717 | 1221; 1725; 2229; 2733; 3237; 3741; 4245 |
| HPN | B2ZDQ2 | 214 | 718 | 1222; 1726; 2230; 2734; 3238; 3742; 4246 |
| HPN | P05981 | 215 | 719 | 1223; 1727; 2231; 2735; 3239; 3743; 4247 |
| ERBB2 | B4DTR1 | 216 | 720 | 1224; 1728; 2232; 2736; 3240; 3744; 4248 |
| ERBB2 | L8E8G2 | 217 | 721 | 1225; 1729; 2233; 2737; 3241; 3745; 4249 |
| ERBB2 | P04626 | 218 | 722 | 1226; 1730; 2234; 2738; 3242; 3746; 4250 |
| HER-2 | Q9UK79 | 219 | 723 | 1227; 1731; 2235; 2739; 3243; 3747; 4251 |
| HLA-A2 | Q95387 | 220 | 724 | 1228; 1732; 2236; 2740; 3244; 3748; 4252 |
| HLA-A2 | Q9MYF8 | 221 | 725 | 1229; 1733; 2237; 2741; 3245; 3749; 4253 |
| NKX3-1 | Q99801 | 222 | 726 | 1230; 1734; 2238; 2742; 3246; 3750; 4254 |
| LUZP4 | B2RBQ6 | 223 | 727 | 1231; 1735; 2239; 2743; 3247; 3751; 4255 |
| LUZP4 | Q9P127 | 224 | 728 | 1232; 1736; 2240; 2744; 3248; 3752; 4256 |
| NDRG1 | 12543784 | 225 | 729 | 1233; 1737; 2241; 2745; 3249; 3753; 4257 |
| HSPA1A | P0DMV8 | 226 | 730 | 1234; 1738; 2242; 2746; 3250; 3754; 4258 |
| HSPA1B | P0DMV9 | 227 | 731 | 1235; 1739; 2243; 2747; 3251; 3755; 4259 |
| FGF6 | P10767 | 228 | 732 | 1236; 1740; 2244; 2748; 3252; 3756; 4260 |
| hTERT | O94807 | 229 | 733 | 1237; 1741; 2245; 2749; 3253; 3757; 4261 |
| CES2 | O00748 | 230 | 734 | 1238; 1742; 2246; 2750; 3254; 3758; 4262 |
| IGF2BP3 | O00425 | 231 | 735 | 1239; 1743; 2247; 2751; 3255; 3759; 4263 |
| IL10 | P22301 | 232 | 736 | 1240; 1744; 2248; 2752; 3256; 3760; 4264 |
| IL13RA2 | Q14627 | 233 | 737 | 1241; 1745; 2249; 2753; 3257; 3761; 4265 |
| IL2RA | P01589 | 234 | 738 | 1242; 1746; 2250; 2754; 3258; 3762; 4266 |
| IL2RB | P14784 | 235 | 739 | 1243; 1747; 2251; 2755; 3259; 3763; 4267 |
| IL2RG | P31785 | 236 | 740 | 1244; 1748; 2252; 2756; 3260; 3764; 4268 |
| IL5 | P05113 | 237 | 741 | 1245; 1749; 2253; 2757; 3261; 3765; 4269 |
| IMP3 | Q9NV31 | 238 | 742 | 1246; 1750; 2254; 2758; 3262; 3766; 4270 |
| ITGA5 | P08648 | 239 | 743 | 1247; 1751; 2255; 2759; 3263; 3767; 4271 |
| ITGB1 | P05556 | 240 | 744 | 1248; 1752; 2256; 2760; 3264; 3768; 4272 |
| ITGB6 | P18564 | 241 | 745 | 1249; 1753; 2257; 2761; 3265; 3769; 4273 |
| KLK2 | A0A024R4J4 | 242 | 746 | 1250; 1754; 2258; 2762; 3266; 3770; 4274 |
| KLK2 | A0A024R4N3 | 243 | 747 | 1251; 1755; 2259; 2763; 3267; 3771; 4275 |
| KLK2 | B0AZU9 | 244 | 748 | 1252; 1756; 2260; 2764; 3268; 3772; 4276 |
| KLK2 | B4DU77 | 245 | 749 | 1253; 1757; 2261; 2765; 3269; 3773; 4277 |
| KLK2 | P20151 | 246 | 750 | 1254; 1758; 2262; 2766; 3270; 3774; 4278 |
| KLK2 | Q6T774 | 247 | 751 | 1255; 1759; 2263; 2767; 3271; 3775; 4279 |
| KLK2 | Q6T775 | 248 | 752 | 1256; 1760; 2264; 2768; 3272; 3776; 4280 |
| KLK3 | P07288-1 | 4558 | 4561 | 4564; 4567; 4570; 4573; 4576; 4579; 4582; 4590 |
| KLK3 | P07288-2 | 4559 | 4562 | 4565; 4568; 4571; 4574; 4577; 4580; 4583 |
| KLK3 | P07288-3 | 4560 | 4563 | 4566; 4569; 4572; 4575; 4578; 4581; 4584 |
| KLK4 | A0A0C4DFQ5 | 249 | 753 | 1257; 1761; 2265; 2769; 3273; 3777; 4281 |
| KLK4 | Q5BQA0 | 250 | 754 | 1258; 1762; 2266; 2770; 3274; 3778; 4282 |
| KLK4 | Q96PT0 | 251 | 755 | 1259; 1763; 2267; 2771; 3275; 3779; 4283 |
| KLK4 | Q96PT1 | 252 | 756 | 1260; 1764; 2268; 2772; 3276; 3780; 4284 |
| KLK4 | Q9Y5K2 | 253 | 757 | 1261; 1765; 2269; 2773; 3277; 3781; 4285 |
| KIF20A | O95235 | 254 | 758 | 1262; 1766; 2270; 2774; 3278; 3782; 4286 |
| LPGAT1 | Q92604 | 255 | 759 | 1263; 1767; 2271; 2775; 3279; 3783; 4287 |
| KIF2C | Q99661 | 256 | 760 | 1264; 1768; 2272; 2776; 3280; 3784; 4288 |
| CT83 | Q5H943 | 257 | 761 | 1265; 1769; 2273; 2777; 3281; 3785; 4289 |
| LDLR | P01130 | 258 | 762 | 1266; 1770; 2274; 2778; 3282; 3786; 4290 |
| LGMN | Q99538 | 259 | 763 | 1267; 1771; 2275; 2779; 3283; 3787; 4291 |
| LILRB2 | Q8N423 | 260 | 764 | 1268; 1772; 2276; 2780; 3284; 3788; 4292 |
| LY6K | Q17RY6 | 261 | 765 | 1269; 1773; 2277; 2781; 3285; 3789; 4293 |
| MAGEA5 | P43359 | 262 | 766 | 1270; 1774; 2278; 2782; 3286; 3790; 4294 |
| MAGEA8 | P43361 | 263 | 767 | 1271; 1775; 2279; 2783; 3287; 3791; 4295 |
| MAGEA11 | P43364 | 264 | 768 | 1272; 1776; 2280; 2784; 3288; 3792; 4296 |
| MAGEA10 | A0A024RC14 | 265 | 769 | 1273; 1777; 2281; 2785; 3289; 3793; 4297 |
| MAGEA12 | P43365 | 266 | 770 | 1274; 1778; 2282; 2786; 3290; 3794; 4298 |
| MAGEA1 | P43355 | 267 | 771 | 1275; 1779; 2283; 2787; 3291; 3795; 4299 |
| MAGEA2 | P43356 | 268 | 772 | 1276; 1780; 2284; 2788; 3292; 3796; 4300; 4588 |
| MAGEA3 | P43357 | 269 | 773 | 1277; 1781; 2285; 2789; 3293; 3797; 4301; 4587 |
| MAGEA4 | A0A024RC12 | 270 | 774 | 1278; 1782; 2286; 2790; 3294; 3798; 4302 |
| MAGEA4 | P43358 | 271 | 775 | 1279; 1783; 2287; 2791; 3295; 3799; 4303 |
| MAGEA4 | Q1RN33 | 272 | 776 | 1280; 1784; 2288; 2792; 3296; 3800; 4304 |
| MAGEA6 | A8K072 | 273 | 777 | 1281; 1785; 2289; 2793; 3297; 3801; 4305 |
| MAGEA6 | P43360 | 274 | 778 | 1282; 1786; 2290; 2794; 3298; 3802; 4306 |
| MAGEA6 | Q6FHI5 | 275 | 779 | 1283; 1787; 2291; 2795; 3299; 3803; 4307 |
| MAGEA9 | P43362 | 276 | 780 | 1284; 1788; 2292; 2796; 3300; 3804; 4308 |
| MAGEB10 | Q96LZ2 | 277 | 781 | 1285; 1789; 2293; 2797; 3301; 3805; 4309 |
| MAGEB16 | A2A368 | 278 | 782 | 1286; 1790; 2294; 2798; 3302; 3806; 4310 |
| MAGEB17 | A8MXT2 | 279 | 783 | 1287; 1791; 2295; 2799; 3303; 3807; 4311 |
| MAGE-B1 | Q96TG1 | 280 | 784 | 1288; 1792; 2296; 2800; 3304; 3808; 4312 |
| MAGEB2 | O15479 | 281 | 785 | 1289; 1793; 2297; 2801; 3305; 3809; 4313 |
| MAGEB3 | O15480 | 282 | 786 | 1290; 1794; 2298; 2802; 3306; 3810; 4314 |
| MAGEB4 | O15481 | 283 | 787 | 1291; 1795; 2299; 2803; 3307; 3811; 4315 |
| MAGEB5 | Q9BZ81 | 284 | 788 | 1292; 1796; 2300; 2804; 3308; 3812; 4316 |
| MAGEB6 | Q8N7X4 | 285 | 789 | 1293; 1797; 2301; 2805; 3309; 3813; 4317 |
| MAGEC1 | O60732 | 286 | 790 | 1294; 1798; 2302; 2806; 3310; 3814; 4318 |
| MAGEC2 | Q9UBF1 | 287 | 791 | 1295; 1799; 2303; 2807; 3311; 3815; 4319; 4585 |
| MAGEC3 | Q8TD91 | 288 | 792 | 1296; 1800; 2304; 2808; 3312; 3816; 4320 |
| MAGED1 | Q9Y5V3 | 289 | 793 | 1297; 1801; 2305; 2809; 3313; 3817; 4321 |
| MAGED2 | Q9UNF1 | 290 | 794 | 1298; 1802; 2306; 2810; 3314; 3818; 4322 |
| MAGED4 | Q96JG8 | 291 | 795 | 1299; 1803; 2307; 2811; 3315; 3819; 4323 |
| MAGEE1 | Q6IAI7 | 292 | 796 | 1300; 1804; 2308; 2812; 3316; 3820; 4324 |
| MAGEE1 | Q9HCI5 | 293 | 797 | 1301; 1805; 2309; 2813; 3317; 3821; 4325 |
| MAGEE2 | Q8TD90 | 294 | 798 | 1302; 1806; 2310; 2814; 3318; 3822; 4326 |
| MAGEF1 | Q9HAY2 | 295 | 799 | 1303; 1807; 2311; 2815; 3319; 3823; 4327 |
| MAGEH1 | Q9H213 | 296 | 800 | 1304; 1808; 2312; 2816; 3320; 3824; 4328 |
| MAGEL2 | Q9UJ55 | 297 | 801 | 1305; 1809; 2313; 2817; 3321; 3825; 4329 |
| SCGB2A2 | Q13296 | 298 | 802 | 1306; 1810; 2314; 2818; 3322; 3826; 4330 |
| SCGB2A2 | Q6NX70 | 299 | 803 | 1307; 1811; 2315; 2819; 3323; 3827; 4331 |
| MLANA | Q16655 | 300 | 804 | 1308; 1812; 2316; 2820; 3324; 3828; 4332 |
| HHAT | Q5VTY9 | 301 | 805 | 1309; 1813; 2317; 2821; 3325; 3829; 4333 |
| MC1R | Q01726 | 302 | 806 | 1310; 1814; 2318; 2822; 3326; 3830; 4334 |
| MC1R | Q1JUL4 | 303 | 807 | 1311; 1815; 2319; 2823; 3327; 3831; 4335 |
| MC1R | Q1JUL6 | 304 | 808 | 1312; 1816; 2320; 2824; 3328; 3832; 4336 |
| MC1R | Q1JUL8 | 305 | 809 | 1313; 1817; 2321; 2825; 3329; 3833; 4337 |
| MC1R | Q1JUL9 | 306 | 810 | 1314; 1818; 2322; 2826; 3330; 3834; 4338 |
| MC1R | Q1JUM0 | 307 | 811 | 1315; 1819; 2323; 2827; 3331; 3835; 4339 |
| MC1R | Q1JUM2 | 308 | 812 | 1316; 1820; 2324; 2828; 3332; 3836; 4340 |
| MC1R | Q1JUM3 | 309 | 813 | 1317; 1821; 2325; 2829; 3333; 3837; 4341 |
| MC1R | Q1JUM4 | 310 | 814 | 1318; 1822; 2326; 2830; 3334; 3838; 4342 |
| MC1R | Q1JUM5 | 311 | 815 | 1319; 1823; 2327; 2831; 3335; 3839; 4343 |
| MC1R | Q6UR92 | 312 | 816 | 1320; 1824; 2328; 2832; 3336; 3840; 4344 |
| MC1R | Q6UR94 | 313 | 817 | 1321; 1825; 2329; 2833; 3337; 3841; 4345 |
| MC1R | Q6UR95 | 314 | 818 | 1322; 1826; 2330; 2834; 3338; 3842; 4346 |
| MC1R | Q6UR96 | 315 | 819 | 1323; 1827; 2331; 2835; 3339; 3843; 4347 |
| MC1R | Q6UR97 | 316 | 820 | 1324; 1828; 2332; 2836; 3340; 3844; 4348 |
| MC1R | Q6UR98 | 317 | 821 | 1325; 1829; 2333; 2837; 3341; 3845; 4349 |
| MC1R | Q6UR99 | 318 | 822 | 1326; 1830; 2334; 2838; 3342; 3846; 4350 |
| MC1R | Q6URA0 | 319 | 823 | 1327; 1831; 2335; 2839; 3343; 3847; 4351 |
| MC1R | Q86YW1 | 320 | 824 | 1328; 1832; 2336; 2840; 3344; 3848; 4352 |
| MC1R | V9Q5S2 | 321 | 825 | 1329; 1833; 2337; 2841; 3345; 3849; 4353 |
| MC1R | V9Q671 | 322 | 826 | 1330; 1834; 2338; 2842; 3346; 3850; 4354 |
| MC1R | V9Q783 | 323 | 827 | 1331; 1835; 2339; 2843; 3347; 3851; 4355 |
| MC1R | V9Q7F1 | 324 | 828 | 1332; 1836; 2340; 2844; 3348; 3852; 4356 |
| MC1R | V9Q8N1 | 325 | 829 | 1333; 1837; 2341; 2845; 3349; 3853; 4357 |
| MC1R | V9Q977 | 326 | 830 | 1334; 1838; 2342; 2846; 3350; 3854; 4358 |
| MC1R | V9Q9P5 | 327 | 831 | 1335; 1839; 2343; 2847; 3351; 3855; 4359 |
| MC1R | V9Q9R8 | 328 | 832 | 1336; 1840; 2344; 2848; 3352; 3856; 4360 |
| MC1R | V9QAE0 | 329 | 833 | 1337; 1841; 2345; 2849; 3353; 3857; 4361 |
| MC1R | V9QAR2 | 330 | 834 | 1338; 1842; 2346; 2850; 3354; 3858; 4362 |
| MC1R | V9QAW3 | 331 | 835 | 1339; 1843; 2347; 2851; 3355; 3859; 4363 |
| MC1R | V9QB02 | 332 | 836 | 1340; 1844; 2348; 2852; 3356; 3860; 4364 |
| MC1R | V9QB58 | 333 | 837 | 1341; 1845; 2349; 2853; 3357; 3861; 4365 |
| MC1R | V9QBY6 | 334 | 838 | 1342; 1846; 2350; 2854; 3358; 3862; 4366 |
| MC1R | V9QC17 | 335 | 839 | 1343; 1847; 2351; 2855; 3359; 3863; 4367 |
| MC1R | V9QC66 | 336 | 840 | 1344; 1848; 2352; 2856; 3360; 3864; 4368 |
| MC1R | V9QCQ4 | 337 | 841 | 1345; 1849; 2353; 2857; 3361; 3865; 4369 |
| MC1R | V9QDF4 | 338 | 842 | 1346; 1850; 2354; 2858; 3362; 3866; 4370 |
| MC1R | V9QDN7 | 339 | 843 | 1347; 1851; 2355; 2859; 3363; 3867; 4371 |
| MC1R | V9QDQ6 | 340 | 844 | 1348; 1852; 2356; 2860; 3364; 3868; 4372 |
| CSF1 | P09603 | 341 | 845 | 1349; 1853; 2357; 2861; 3365; 3869; 4373 |
| MSLN | Q13421 | 342 | 846 | 1350; 1854; 2358; 2862; 3366; 3870; 4374 |
| MITF | O75030-8 | 343 | 847 | 1351; 1855; 2359; 2863; 3367; 3871; 4375 |
| MITF | O75030-9 | 344 | 848 | 1352; 1856; 2360; 2864; 3368; 3872; 4376 |
| MITF | O75030 | 345 | 849 | 1353; 1857; 2361; 2865; 3369; 3873; 4377 |
| MMP11 | B3KQS8 | 346 | 850 | 1354; 1858; 2362; 2866; 3370; 3874; 4378 |
| MMP7 | P09237 | 347 | 851 | 1355; 1859; 2363; 2867; 3371; 3875; 4379 |
| MUC1 | AAA60019 | 348 | 852 | 1356; 1860; 2364; 2868; 3372; 3876; 4380 |
| MUC1 | NP_116242 | 349 | 853 | 1357; 1861; 2365; 2869; 3373; 3877; 4381 |
| TRAPPC1 | Q9Y5R8 | 350 | 854 | 1358; 1862; 2366; 2870; 3374; 3878; 4382 |
| MYCN | P04198 | 351 | 855 | 1359; 1863; 2367; 2871; 3375; 3879; 4383 |
| MYO1A | Q9UBC5 | 352 | 856 | 1360; 1864; 2368; 2872; 3376; 3880; 4384 |
| MYO1B | O43795 | 353 | 857 | 1361; 1865; 2369; 2873; 3377; 3881; 4385 |
| MYO1C | O00159 | 354 | 858 | 1362; 1866; 2370; 2874; 3378; 3882; 4386 |
| MYO1D | O94832 | 355 | 859 | 1363; 1867; 2371; 2875; 3379; 3883; 4387 |
| MYO1E | Q12965 | 356 | 860 | 1364; 1868; 2372; 2876; 3380; 3884; 4388 |
| MYO1F | O00160 | 357 | 861 | 1365; 1869; 2373; 2877; 3381; 3885; 4389 |
| MYO1G | B0I1T2 | 358 | 862 | 1366; 1870; 2374; 2878; 3382; 3886; 4390 |
| MYO1H | NP_001094891 | 359 | 863 | 1367; 1871; 2375; 2879; 3383; 3887; 4391 |
| MGAT5B | Q3V5L5 | 360 | 864 | 1368; 1872; 2376; 2880; 3384; 3888; 4392 |
| VENTXP1 | 10790436 | 361 | 865 | 1369; 1873; 2377; 2881; 3385; 3889; 4393 |
| PAPOLG | Q9BWT3 | 362 | 866 | 1370; 1874; 2378; 2882; 3386; 3890; 4394 |
| NFYC | Q13952 | 363 | 867 | 1371; 1875; 2379; 2883; 3387; 3891; 4395 |
| ANO7 | Q6IWH7 | 364 | 868 | 1372; 1876; 2380; 2884; 3388; 3892; 4396 |
| NPM1 | P0G748 | 365 | 869 | 1373; 1877; 2381; 2885; 3389; 3893; 4397 |
| NRCAM | Q92823 | 366 | 870 | 1374; 1878; 2382; 2886; 3390; 3894; 4398 |
| ENO2 | P09104 | 367 | 871 | 1375; 1879; 2383; 2887; 3391; 3895; 4399 |
| NUF2 | Q9BZD4 | 368 | 872 | 1376; 1880; 2384; 2888; 3392; 3896; 4400 |
| CTAG1A | P78358 | 369 | 873 | 1377; 1881; 2385; 2889; 3393; 3897; 4401; 4586 |
| GPR143 | P51810 | 370 | 874 | 1378; 1882; 2386; 2890; 3394; 3898; 4402 |
| OGT | O15294 | 371 | 875 | 1379; 1883; 2387; 2891; 3395; 3899; 4403 |
| OS9 | B4DH11 | 372 | 876 | 1380; 1884; 2388; 2892; 3396; 3900; 4404 |
| OS9 | B4E321 | 373 | 877 | 1381; 1885; 2389; 2893; 3397; 3901; 4405 |
| OS9 | B7Z8E7 | 374 | 878 | 1382; 1886; 2390; 2894; 3398; 3902; 4406 |
| OS9 | Q13438 | 375 | 879 | 1383; 1887; 2391; 2895; 3399; 3903; 4407 |
| BGLAP | P02818 | 376 | 880 | 1384; 1888; 2392; 2896; 3400; 3904; 4408 |
| SPP1 | A0A024RDE2 | 377 | 881 | 1385; 1889; 2393; 2897; 3401; 3905; 4409 |
| SPP1 | A0A024RDE6 | 378 | 882 | 1386; 1890; 2394; 2898; 3402; 3906; 4410 |
| SPP1 | A0A024RDJ0 | 379 | 883 | 1387; 1891; 2395; 2899; 3403; 3907; 4411 |
| SPP1 | B7Z351 | 380 | 884 | 1388; 1892; 2396; 2900; 3404; 3908; 4412 |
| SPP1 | F2YQ21 | 381 | 885 | 1389; 1893; 2397; 2901; 3405; 3909; 4413 |
| SPP1 | P10451 | 382 | 886 | 1390; 1894; 2398; 2902; 3406; 3910; 4414 |
| TP53 | P04637 | 383 | 887 | 1391; 1895; 2399; 2903; 3407; 3911; 4415 |
| PAGE4 | O60829 | 384 | 888 | 1392; 1896; 2400; 2904; 3408; 3912; 4416 |
| SERPINE1 | P05121 | 385 | 889 | 1393; 1897; 2401; 2905; 3409; 3913; 4417 |
| SERPINB2 | P05120 | 386 | 890 | 1394; 1898; 2402; 2906; 3410; 3914; 4418 |
| REG3A | Q06141 | 387 | 891 | 1395; 1899; 2403; 2907; 3411; 3915; 4419 |
| PAP | Q53S56 | 388 | 892 | 1396; 1900; 2404; 2908; 3412; 3916; 4420 |
| PATE1 | Q8WXA2 | 389 | 893 | 1397; 1901; 2405; 2909; 3413; 3917; 4421 |
| PAX3 | P23760 | 390 | 894 | 1398; 1902; 2406; 2910; 3414; 3918; 4422 |
| PAX5 | Q02548 | 391 | 895 | 1399; 1903; 2407; 2911; 3415; 3919; 4423 |
| CD274 | Q9NZQ7 | 392 | 896 | 1400; 1904; 2408; 2912; 3416; 3920; 4424 |
| PDCD1 | Q15116 | 393 | 897 | 1401; 1905; 2409; 2913; 3417; 3921; 4425 |
| SPDEF | O95238 | 394 | 898 | 1402; 1906; 2410; 2914; 3418; 3922; 4426 |
| PECAM1 | P16284 | 395 | 899 | 1403; 1907; 2411; 2915; 3419; 3923; 4427 |
| BCAN | Q96GW7 | 396 | 900 | 1404; 1908; 2412; 2916; 3420; 3924; 4428 |
| PDGFRB | P09619 | 397 | 901 | 1405; 1909; 2413; 2917; 3421; 3925; 4429 |
| PIM1 | A0A024RD25 | 398 | 902 | 1406; 1910; 2414; 2918; 3422; 3926; 4430 |
| PIN1P1 | O15428 | 399 | 903 | 1407; 1911; 2415; 2919; 3423; 3927; 4431 |
| PIN1 | Q13526 | 400 | 904 | 1408; 1912; 2416; 2920; 3424; 3928; 4432 |
| PIN1 | Q49AR7 | 401 | 905 | 1409; 1913; 2417; 2921; 3425; 3929; 4433 |
| PLAC1 | Q9HBJ0 | 402 | 906 | 1410; 1914; 2418; 2922; 3426; 3930; 4434 |
| PMEL | P40967 | 403 | 907 | 1411; 1915; 2419; 2923; 3427; 3931; 4435; 4591 |
| PML | P29590 | 404 | 908 | 1412; 1916; 2420; 2924; 3428; 3932; 4436 |
| POTEF | A5A3E0 | 405 | 909 | 1413; 1917; 2421; 2925; 3429; 3933; 4437 |
| POTED | Q86YR6 | 406 | 910 | 1414; 1918; 2422; 2926; 3430; 3934; 4438 |
| PRAME | A0A024R1E6 | 407 | 911 | 1415; 1919; 2423; 2927; 3431; 3935; 4439 |
| PRAME | P78395 | 408 | 912 | 1416; 1920; 2424; 2928; 3432; 3936; 4440 |
| PRDX5 | P30044 | 409 | 913 | 1417; 1921; 2425; 2929; 3433; 3937; 4441 |
| PRM2 | P04554 | 410 | 914 | 1418; 1922; 2426; 2930; 3434; 3938; 4442 |
| SLC45A3 | Q96JT2 | 411 | 915 | 1419; 1923; 2427; 2931; 3435; 3939; 4443 |
| PRTN3 | D6CHE9 | 412 | 916 | 1420; 1924; 2428; 2932; 3436; 3940; 4444 |
| PRTN3 | P24158 | 413 | 917 | 1421; 1925; 2429; 2933; 3437; 3941; 4445 |
| NPEPPS | P55786 | 414 | 918 | 1422; 1926; 2430; 2934; 3438; 3942; 4446 |
| PSMB9 | P28065 | 415 | 919 | 1423; 1927; 2431; 2935; 3439; 3943; 4447 |
| PSCA | D3DWI6 | 416 | 920 | 1424; 1928; 2432; 2936; 3440; 3944; 4448 |
| PSCA | O43653 | 417 | 921 | 1425; 1929; 2433; 2937; 3441; 3945; 4449 |
| OR51E2 | Q9H255 | 418 | 922 | 1426; 1930; 2434; 2938; 3442; 3946; 4450 |
| FOLH1 | Q04609 | 419 | 923 | 1427; 1931; 2435; 2939; 3443; 3947; 4451; 4589 |
| PTPRC | NP_002829 | 420 | 924 | 1428; 1932; 2436; 2940; 3444; 3948; 4452 |
| RAB8A | PG1006 | 421 | 925 | 1429; 1933; 2437; 2941; 3445; 3949; 4453 |
| MOK | Q9UQ07 | 422 | 926 | 1430; 1934; 2438; 2942; 3446; 3950; 4454 |
| RARA | P10276 | 423 | 927 | 1431; 1935; 2439; 2943; 3447; 3951; 4455 |
| HRAS | P01112 | 424 | 928 | 1432; 1936; 2440; 2944; 3448; 3952; 4456 |
| KRAS | P01116 | 425 | 929 | 1433; 1937; 2441; 2945; 3449; 3953; 4457 |
| NRAS | P01111 | 426 | 930 | 1434; 1938; 2442; 2946; 3450; 3954; 4458 |
| RGS5 | O15539 | 427 | 931 | 1435; 1939; 2443; 2947; 3451; 3955; 4459 |
| HMMR | O75330 | 428 | 932 | 1436; 1940; 2444; 2948; 3452; 3956; 4460 |
| RHOC | P08134 | 429 | 933 | 1437; 1941; 2445; 2949; 3453; 3957; 4461 |
| RPSA | P08865 | 430 | 934 | 1438; 1942; 2446; 2950; 3454; 3958; 4462 |
| SFMBT1 | Q9UHJ3 | 431 | 935 | 1439; 1943; 2447; 2951; 3455; 3959; 4463 |
| DCDC2 | Q9UHG0 | 432 | 936 | 1440; 1944; 2448; 2952; 3456; 3960; 4464 |
| RUNX1 | Q01196 | 433 | 937 | 1441; 1945; 2449; 2953; 3457; 3961; 4465 |
| HEL-S-100 | V9HW39 | 434 | 938 | 1442; 1946; 2450; 2954; 3458; 3962; 4466 |
| SAGE1 | Q9NXZ1 | 435 | 939 | 1443; 1947; 2451; 2955; 3459; 3963; 4467 |
| SART1 | O43290 | 436 | 940 | 1444; 1948; 2452; 2956; 3460; 3964; 4468 |
| DSE | Q9UL01 | 437 | 941 | 1445; 1949; 2453; 2957; 3461; 3965; 4469 |
| SART3 | Q15020 | 438 | 942 | 1446; 1950; 2454; 2958; 3462; 3966; 4470 |
| FAP | Q12884 | 439 | 943 | 1447; 1951; 2455; 2959; 3463; 3967; 4471 |
| SERPINB5 | P36952 | 440 | 944 | 1448; 1952; 2456; 2960; 3464; 3968; 4472 |
| ST6GALNAC6 | Q969X2 | 441 | 945 | 1449; 1953; 2457; 2961; 3465; 3969; 4473 |
| ST8SIA1 | Q92185 | 442 | 946 | 1450; 1954; 2458; 2962; 3466; 3970; 4474 |
| ST3GAL5 | Q9UNP4 | 443 | 947 | 1451; 1955; 2459; 2963; 3467; 3971; 4475 |
| SIRT2 | A0A024R0G8 | 444 | 948 | 1452; 1956; 2460; 2964; 3468; 3972; 4476 |
| SIRT2 | Q8IXJ6 | 445 | 949 | 1453; 1957; 2461; 2965; 3469; 3973; 4477 |
| S0X10 | P56693 | 446 | 950 | 1454; 1958; 2462; 2966; 3470; 3974; 4478 |
| SPA17 | Q15506 | 447 | 951 | 1455; 1959; 2463; 2967; 3471; 3975; 4479 |
| SPANXA1 | Q9NS26 | 448 | 952 | 1456; 1960; 2464; 2968; 3472; 3976; 4480 |
| SPANXN3 | Q5MJ09 | 449 | 953 | 1457; 1961; 2465; 2969; 3473; 3977; 4481 |
| SSX1 | QI6384 | 450 | 954 | 1458; 1962; 2466; 2970; 3474; 3978; 4482 |
| SSX2 | Q16385 | 451 | 955 | 1459; 1963; 2467; 2971; 3475; 3979; 4483 |
| SSX3 | Q99909 | 452 | 956 | 1460; 1964; 2468; 2972; 3476; 3980; 4484 |
| SSX4 | O60224 | 453 | 957 | 1461; 1965; 2469; 2973; 3477; 3981; 4485 |
| SULT1A1 | P50225 | 454 | 958 | 1462; 1966; 2470; 2974; 3478; 3982; 4486 |
| STAG2 | Q8N3U4-2 | 455 | 959 | 1463; 1967; 2471; 2975; 3479; 3983; 4487 |
| STEAP2 | Q8NFT2 | 456 | 960 | 1464; 1968; 2472; 2976; 3480; 3984; 4488 |
| STEAP1 | A0A024RA63 | 457 | 961 | 1465; 1969; 2473; 2977; 3481; 3985; 4489 |
| STEAP1 | Q9UHE8 | 458 | 962 | 1466; 1970; 2474; 2978; 3482; 3986; 4490 |
| BIRC5 | O15392-2 | 459 | 963 | 1467; 1971; 2475; 2979; 3483; 3987; 4491 |
| BIRC5 | O15392 | 460 | 964 | 1468; 1972; 2476; 2980; 3484; 3988; 4492 |
| SYCP1 | A0A024R0I2 | 461 | 965 | 1469; 1973; 2477; 2981; 3485; 3989; 4493 |
| SYCP1 | B7ZLS9 | 462 | 966 | 1470; 1974; 2478; 2982; 3486; 3990; 4494 |
| SYCP1 | Q15431 | 463 | 967 | 1471; 1975; 2479; 2983; 3487; 3991; 4495 |
| SYCP1 | Q3MHC4 | 464 | 968 | 1472; 1976; 2480; 2984; 3488; 3992; 4496 |
| SYT-SSX1 | A4PIV7 | 465 | 969 | 1473; 1977; 2481; 2985; 3489; 3993; 4497 |
| SYT-SSX1 | A4PIV8 | 466 | 970 | 1474; 1978; 2482; 2986; 3490; 3994; 4498 |
| SYT-SSX2 | A4PIV9 | 467 | 971 | 1475; 1979; 2483; 2987; 3491; 3995; 4499 |
| SYT-SSX2 | A4PIW0 | 468 | 972 | 1476; 1980; 2484; 2988; 3492; 3996; 4500 |
| TARP | Q0VGM3 | 469 | 973 | 1477; 1981; 2485; 2989; 3493; 3997; 4501 |
| TCRg | A2JGV3 | 470 | 974 | 1478; 1982; 2486; 2990; 3494; 3998; 4502 |
| GTF2A1 | P52655 | 471 | 975 | 1479; 1983; 2487; 2991; 3495; 3999; 4503 |
| TGFB1 | P01137 | 472 | 976 | 1480; 1984; 2488; 2992; 3496; 4000; 4504 |
| TGFBR2 | P37173 | 473 | 977 | 1481; 1985; 2489; 2993; 3497; 4001; 4505 |
| TGM4 | B2R7D1 | 474 | 978 | 1482; 1986; 2490; 2994; 3498; 4002; 4506 |
| TEK | Q02763 | 475 | 979 | 1483; 1987; 2491; 2995; 3499; 4003; 4507 |
| TKTL1 | P51854 | 476 | 980 | 1484; 1988; 2492; 2996; 3500; 4004; 4508 |
| TPI1 | P60174 | 477 | 981 | 1485; 1989; 2493; 2997; 3501; 4005; 4509 |
| TRGV11 | Q99601 | 478 | 982 | 1486; 1990; 2494; 2998; 3502; 4006; 4510 |
| LOC402482 | A4D1X2 | 479 | 983 | 1487; 1991; 2495; 2999; 3503; 4007; 4511 |
| TRGV9 | Q99603 | 480 | 984 | 1488; 1992; 2496; 3000; 3504; 4008; 4512 |
| TRGV9 | Q99604 | 481 | 985 | 1489; 1993; 2497; 3001; 3505; 4009; 4513 |
| TRPC1 | P48995 | 482 | 986 | 1490; 1994; 2498; 3002; 3506; 4010; 4514 |
| TRPM8 | Q7Z2W7 | 483 | 987 | 1491; 1995; 2499; 3003; 3507; 4011; 4515 |
| TSGA10 | Q9BZW7 | 484 | 988 | 1492; 1996; 2500; 3004; 3508; 4012; 4516 |
| TSPY1 | Q01534 | 485 | 989 | 1493; 1997; 2501; 3005; 3509; 4013; 4517 |
| TRGV3 | M13231.1 | 486 | 990 | 1494; 1998; 2502; 3006; 3510; 4014; 4518 |
| TEX101 | Q9BY14-2 | 487 | 991 | 1495; 1999; 2503; 3007; 3511; 4015; 4519 |
| TYR | A0A024DBG7 | 488 | 992 | 1496; 2000; 2504; 3008; 3512; 4016; 4520 |
| TYR | L8B082 | 489 | 993 | 1497; 2001; 2505; 3009; 3513; 4017; 4521 |
| TYR | L8B086 | 490 | 994 | 1498; 2002; 2506; 3010; 3514; 4018; 4522 |
| TYR | L8B0B9 | 491 | 995 | 1499; 2003; 2507; 3011; 3515; 4019; 4523 |
| TRP-2 | O75767 | 492 | 996 | 1500; 2004; 2508; 3012; 3516; 4020; 4524 |
| TYR | P14679 | 493 | 997 | 1501; 2005; 2509; 3013; 3517; 4021; 4525 |
| TYR | U3M8N0 | 494 | 998 | 1502; 2006; 2510; 3014; 3518; 4022; 4526 |
| TYR | U3M9D5 | 495 | 999 | 1503; 2007; 2511; 3015; 3519; 4023; 4527 |
| TYR | U3M9J2 | 496 | 1000 | 1504; 2008; 2512; 3016; 3520; 4024; 4528 |
| TYRP1 | P17643 | 497 | 1001 | 1505; 2009; 2513; 3017; 3521; 4025; 4529 |
| DCT | P40126 | 498 | 1002 | 1506; 2010; 2514; 3018; 3522; 4026; 4530 |
| PRAP1 | Q96NZ9 | 499 | 1003 | 1507; 2011; 2515; 3019; 3523; 4027; 4531 |
| VEGFR1 | B5A924 | 500 | 1004 | 1508; 2012; 2516; 3020; 3524; 4028; 4532 |
| WT1 | A0A0H5AUY0 | 501 | 1005 | 1509; 2013; 2517; 3021; 3525; 4029; 4533 |
| WT1 | P19544 | 502 | 1006 | 1510; 2014; 2518; 3022; 3526; 4030; 4534 |
| WT1-AS | Q06250 | 503 | 1007 | 1511; 2015; 2519; 3023; 3527; 4031; 4535 |
| XAGE1A | Q9HD64 | 504 | 1008 | 1512; 2016; 2520; 3024; 3528; 4032; 4536 |

Legend to Table 1:
Column ‘A’: amino acid sequence SEQ ID ND:; column ‘B’: RNA sequence SEQ ID ND: (wild type RNA); column ‘C’: RNA sequence SEQ ID ND: (modified RNA).

[0087] It is thus further preferred that the at least one coding sequence of the RNA of the present invention encodes a tumor antigun, or a fragment or variant thereof, wherein the tumor antigen is an antigen selected from the antigens listed in Table 1, preferably an antigen selected from the antigens defined by the database accession number provided under the respective column in Table 1. More preferably, the at least one coding sequence of the RNA according to the invention comprises or consists any one of the nucleic acid sequences provided in Table 1, or a fragment or variant of any one of those sequences, preferably as defined herein.

[0088] According to a preferred embodiment, the present invontinn concerns an RNA comprising at least noncoding sequence encoding a tumor antigen, or a fragment or variant of a tumor antigen, wherein the tumor antigen preferably comprises or consists of any one of the amino acid sequences defined in the third column (column ‘A’) of Table 1, or a fragment or variant of any one of these sequences. In other words, the at least one of coding sequence preferably encodes a tumor antigen comprising or consisting of an amino acid sequence selected from the group consisting of SEQ ID NOs: 1-504, or a fragment or variant of any one of said amino acid sequences.

[0089] The at least one coding sequence of the RNA according to the invention preferably comprises a nucleic acid sequence encoding a full-length tumor antigen or a full-length variant of a tumor antigen as defined herein. The term ‘full-length (tumor) antigen’ or ‘full-length variant of a (tumor) antigen’ as used herein typically refers to an antigen that substantially comprises the entire amino acid sequence of the naturally occurring tumor antigen. As used herein, the term ‘full-length (tumor) antigen’ preferably relates to the full-length sequence of an antigen indicated in Table 1. More preferably, the term ‘full-length (tumor) antigen’ preferably refers to an amino acid sequence as defined by any one of the SEQ ID NO:'s listed under the third column (‘A’) of Table 1 or to an amino acid provided in the database under the respective database accession number.

[0090] Alternatively, the at least one coding sequence of the RNA according to the invention may also comprise a nucleic acid sequence encoding a fragment of a tumor antigen or a fragment of a variant of a tumor antigen as defined herein.

[0091] In the context of the present invention, a ‘fragment’ of an antigen or of a variant thereof may comprise a sequence of an antigen or of a variant thereof as defined above, which is, with regard to its amino acid sequence (or its encoded nucleic acid sequence), N-terminally, C-terminally and/or intrasequentially truncated compared to the amino acid sequence of the naturally occurring protein or a variant thereof (or its encoded nucleic acid sequence). Such truncation may thus occur either on the amino acid level or on the nucleic acid level, respectively. A sequence identity with respect to such a fragment as defined herein therefore preferably refers to the entire antigen or a variant thereof as defined herein or to the entire (coding) nucleic acid sequence of such an antigen or of a variant thereof.

[0092] A fragment of an antigen or of a variant thereof in the context of the present invention may furthermore comprise a sequence of an antigen or of a variant thereof as defined herein, which has a length of about 5 to about 20 or even more amino acids and which is preferably processed and presented by an MHC complex. Preferably, a fragment of an antigen or of a variant thereof in the context of the present invention may furthermore comprise a sequence of an antigen or of a variant thereof as defined above, which has a length of about B to about 20 or even more amino acids, e.g. a fragment as processed and presented by MHC class I molecules, preferably having a length of about 8 to about 10 amino acids, e.g. 8, 9, or 10, (or even 6, 7, 11, or 12 amino acids), or a fragment as processed and presented by MHC class II molecules, preferably having a length of about 13 or more amino acids, e.g. 13, 14, 15, 16, 17, 18, 19, 20 or even more amino acids, wherein the fragment may be selected from any part of the amino acid sequence. These fragments are typically recognized by T-cells in the form of a complex consisting of the peptide fragment and an MHC molecule, i.e. the fragments are typically not recognized in their native form.

[0093] Preferably, a fragment or a variant of an antigen is a functional fragment or a functional variant, which comprises at least one functional epitope of the corresponding antigen capable of inducing an adaptive immune response in a subject. Such a functional epitope may be a confirmed epitope by any biological assay or a predicted epitope by any possibility to predict epitopes (e.g. computer analysis of the antigen).

[0094] A fragment of an antigen or of a variant thereof as defined herein preferably comprises at least one epitope of the antigen or of the variant thereof. An epitope (also called “antigen determinant”) in the context of the present invention is typically a fragment located on the outer surface of a (native) antigen or of a variant thereof as defined herein, preferably having 5 to 20 amino acids, more preferably having 5 to 15 or 5 to 12 amino acids, even more preferably having 8 to 9 amino acids, which may be recognized by antibodies or B-cell receptors, i.e. in their native form. Such an epitope of an antigen or of a variant thereof may furthermore be selected from any of the herein mentioned variants of such antigens. In this context, an antigenic determinant can be a conformational or discontinous epitope, which is composed of segments of an antigen or of a variant thereof as defined herein that are discontinuous in the amino acid sequence of the antigen or of the variant as defined herein but are brought together in the three-dimensional structure. Alternatively, an antigenic determinant may also be a continuous or linear epitope, which is composed of a single polypeptide chain.

[0095] According to a preferred embodiment of the invention, the RNA comprises at least one coding sequence encoding a variant of a tumor antigen as defined herein, or a fragment of a variant of a tumor antigen.

[0096] In certain embodiments of the present invention, a ‘variant’ of a tumor antigen or a fragment thereof as defined herein may be encoded by the RNA comprising at least one coding sequence as defined herein, wherein the amino acid sequence encoded by the at least one coding sequence differs in at least one amino acid residue from the naturally occurring amino acid sequence. In this context, the ‘Change’ in at least one amino acid residue may consist, for example, in a mutation of an amino acid residue to another amino acid, a deletion or an insertion. More preferably, the term ‘variant’ as used in the context of the amino acid sequence encoded by the at least one coding sequence of the RNA according to the invention comprises any homolog, isoform or transcript variant of the tumor antigen or a fragment thereof as defined herein, wherein the homolog, isoform or transcript variant is preferably characterized by a degree of identity or homology, respectively, as defined herein.

[0097] Preferably, a variant of a tumor antigen or a fragment thereof may be encoded by the RNA comprising at least one coding sequence as defined herein, wherein at least one amino acid residue of the amino acid sequence encoded by the at least one coding sequence is substituted. Substitutions, wherein amino acids, which originate from the same class, are exchanged for one another, are called conservative substitutions. In particular, these are amino acids having aliphatic side chains, positively or negatively charged side chains, aromatic groups in the side chains or amino acids, the side chains of which can form hydrogen bridges, e.g. side chains which have a hydroxyl function. By conservative constitution, e.g. an amino acid having a polar side chain may be replaced by another amino acid having a corresponding polar side chain, or, for example, an amino acid characterized by a hydrophobic side chain may be substituted by another amino acid having a corresponding hydrophobic side chain (e.g. serine (threonine) by threonine (serine) or leucine (isoleucine) by isoleucine (leucine)). In a preferred embodiment, a variant of a tumor antigen or a fragment thereof may be encoded by the RNA according to the invention, wherein at least one amino acid residue of the amino acid sequence encoded by the at least one coding sequence comprises at least one conservative substitution compared to the respective naturally occurring sequence. These amino acid sequences as well as their encoding nucleic acid sequences in particular are comprised by the term ‘variant’ as defined herein.

[0098] Insertions, deletions and/or non-conservative substitutions are also possible, in particular, at those sequence positions, which cause no modification to the three-dimensional structure or do not affect the binding region. Modifications to a three-dimensional structure by insertion(s) or deletion(s) can easily be determined e.g. using CD spectra (circular dichroism spectra) (Urry, 985, Absorption, Circular Dichroism and ORD of Polypeptides, in: Modern Physical Methods in Biochemistry, Neuberger et al. (ed.), Elsevier, Amsterdam).

[0099] In order to determine the percentage, to which two sequences (nucleic acid sequences, e.g. RNA or mRNA sequences as defined herein, or amino acid sequences, preferably the amino acid sequence encoded by the RNA according to the invention) are identical, the sequences can be aligned in order to be subsequently compared to one another. For this purpose, e.g. gaps can be inserted into the sequence of the first sequence and the component at the corresponding position of the second sequence can be compared. If a position in the first sequence is occupied by the same component as is the case at a corresponding position in the second sequence, the two sequences are identical at this position. The percentage, to which two sequences are identical, is a function of the number of identical positions divided by the total number of positions. The percentage, to which two sequences are identical, can be determined using a mathematical algorithm. A prof erred, but not limiting, example of a mathematical algorithm, which can be used is the algorithm of Karlin et al. (1993), PNAS USA, 90:5873-5877 or Altschul et al. (1997), Nucleic Acids Res., 25:3389-3402. Such an algorithm is integrated, for example, in the BLAST program. Sequences, which are identical to the sequences of the present invention to a certain extent, can be identified by this program.

[0100] A fragment of a tumor antigen or a variant thereof encoded by the at least one coding sequence of the RNA according to the invention may typically comprise an amino acid sequence having a sequence identity of at least 5%, 10%, 20%, 30%, 40%, 50%, 60%, 70%, 80%, 85%, 86%, 87%, 88%, 89%, 90%, 91%, 92%, 93%, 94%, 95%, 96%, 97%, 98%, or 99%, preferably of at least 70%, more preferably of at least 80%, even more preferably at least 85%, even more preferably of at least 90% and most preferably of at least 95% or even 97%, with an amino acid sequence of the respective naturally occurring full-length antigen or a variant thereof.

[0101] More preferably, a fragment of a tumor antigen or a variant thereof encoded by the at least one coding sequence of the RNA according to the invention may typically comprise or consist of an amino acid sequence having a sequence identity of at least 5%, 10%, 20%, 30%, 40%, 50%, 60%, 70%, 80%, 85%, 86%, 87%, 88%, 89%, 90%, 91%, 92%, 93%, 94%, 95%, 96%, 97%, 98%, or 99%, preferably of at least 70%, more preferably of at least 80%, even more preferably at least 85%, even more preferably of at least 90% and most preferably of at least 95% or even 97%, with an amino acid sequence of an antigen selected from the antigens indicated in Table 1 or a variant thereof. Even more preferably, a fragment of a tumor antigen or a variant thereof encoded by the at least one coding sequence of the RNA according to the invention may typically comprise or consist of an amino acid sequence having a sequence identity of at least 5%, 10%, 20%, 30%, 40%, 50%, 50%, 70%, 80%, 85%, 86%, 87%, 88%, 89%, 90%, 91%, 92%, 93%, 94%, 95%, 96%, 97%, 98%, or 99%, preferably of at least 70%, more preferably of at least 80%, even more preferably at least 85%, even more preferably of at least 90% and most preferably of at least 95% or even 97%, with any one of the amino acid sequences defined in the third column (column ‘A’) of Table 1, or a fragment or variant of any one of these sequences.

[0102] Most preferably, a fragment of a tumor antigen or a variant thereof encoded by the at least one coding sequence of the RNA according to the invention typically comprises or consists of an amino acid sequence having a sequence identity of at least 80% with any one of the amino acid sequences defined in the third column (column ‘A’) of Table 1, or a fragment or variant of any one of these sequences.

[0103] Preferably, the tumor antigen encoded by the at least one coding sequence of the RNA is an antigen as defined herein, which is encoded by a nucleic acid sequence comprising or consisting of any one of the nucleic acid sequences defined in Table 1, preferably in the fourth or fifth column (column ‘B’ or ‘C’, respectively) of Table 1, or a fragment or variant of any one of these sequences. In other words, the tumor antigen encoded by the at least one coding sequence of the RNA is preferably an antigen as defined herein, which is preferably encoded by a nucleic acid sequence comprising or consisting of a nucleic acid sequence selected from the group consisting of SEQ ID NOs: 505-4033; 4561-4591 or a fragment or variant of any of these sequence.

[0104] In a preferred embodiment, the present invention thus provides an RNA comprising at least one coding sequence, wherein the coding sequence comprises or consists any one of the nucleic acid sequences defined in Table 1, preferably in the fourth or fifth column (column ‘B’ or ‘C’, respectively) of Table 1, or a fragment or variant of any one of these sequences.

[0105] In certain embodiments, the RNA according to the invention, preferably the at least one coding sequence of the RNA according to the invention, may comprise or consist of a fragment of a nucleic acid sequence encoding a tumor antigen or a fragment or variant thereof as defined herein. Preferably, the at least one coding sequence of the RNA according to the invention comprises or consists of a fragment, preferably as defined herein, of any one of the nucleic acid sequences defined in Table 1, preferably in the fourth or fifth column (column ‘B’ or ‘C’, respectively) of Table 1, or a fragment or variant of any one of these sequences.

[0106] In this context, a ‘fragment of a nucleic acid sequence’ is preferably a nucleic acid sequence encoding a fragment of a tumor antigen or of a variant thereof as described herein. More preferably, the expression ‘fragment of a nucleic acid sequence’ refers to a nucleic acid sequence having a sequence identity of at least 5%, 10%, 20%, 30%, 40%, 50%, 60%, 70%, 80%, 85%, 86%, 87%, 88%, 89%, 90%, 91%, 92%, 93%, 94%, 95%, 96%, 97%, 98%, or 99%, preferably of at least 70%, more preferably of at least 80%, even more preferably at least 85%, even more preferably of at least 90% and most preferably of at least 95% or even 97%, with a respective full-length nucleic acid sequence.

[0107] In another preferred embodiment, the RNA according to the invention, preferably the at least one coding sequence of the RNA according to the invention, may comprise or consist of a variant of a nucleic acid sequence as defined herein, preferably of a nucleic acid sequence encoding a tumor antigen or a fragment thereof as defined herein. The expression ‘variant of a nucleic acid sequence’ as used herein in the context of a nucleic acid sequence encoding a tumor antigen or a fragment thereof, typically refers to a nucleic acid sequence, which differs by at least one nucleic acid residue from the respective naturally occurring nucleic acid sequence encoding a tumor antigen or a fragment thereof. More preferably, the expression ‘variant of a nucleic acid sequence’ refers to a nucleic acid sequence having a sequence identity of at least 5%, 10%, 20%, 30%, 40%, 50%, 50%, 70%, 80%, 85%, 85%, 87%, 88%, 89%, 90%, 91%, 92%, 93%, 94%, 95%, 96%, 97%, 98%, or 99%, preferably of at least 70%, more preferably of at least 80%, even more preferably at least 85%, even more preferably of at least 90% and most preferably of at least 95% or even 97%, with a nucleic acid sequence, from which it is derived.

[0108] Preferably, the RNA according to the invention, more preferably the at least one coding sequence of the RNA according to the invention, encodes a variant of a tumor antigen or a fragment thereof, preferably as defined herein.

[0109] In a preferred embodiment, the RNA according to the invention, more preferably the at least one coding sequence of the RNA according to the invention, comprises or consists of a variant of a nucleic acid sequence encoding a tumor antigen or a fragment thereof as defined herein, wherein the variant of the nucleic acid sequence encodes an amino acid sequence comprising at least one conservative substitution of an amino acid residue.

[0110] In another embodiment, the RNA according to the invention, more preferably the at least one coding sequence of the RNA according to the invention, comprises or consists of a variant of a nucleic acid sequence encoding a tumor antigen or a fragment thereof as defined herein, wherein the nucleic acid sequence of the variant differs from the respective naturally occurring nucleic acid sequence in at least one nucleic acid residue, preferably without resulting—due to the degenerated genetic code—in an alteration of the encoded amino acid sequence, i.e. the amino acid sequence encoded by the variant or at least part thereof may preferably not differ from the naturally occurring amino acid sequence in one or more mutation(s) within the above meaning.

[0111] Furthermore, a ‘variant’ of a nucleic acid sequence encoding a tumor antigen or a fragment or variant thereof as defined herein, may also comprise DNA sequences, which correspond to RNA sequences as defined herein and may also comprise further RNA sequences, which correspond to DNA sequences as defined herein. Those skilled in the art are familiar with the translation of an RNA sequence into a DNA sequence (or vice versa) or with the creation of the complementary strand sequence (i.e. by substitution of U residues with T residues and/or by constructing the complementary strand with respect to a given sequence).

[0112] According to a preferred embodiment, the at least one coding sequence of the RNA according to the invention comprises or consists of a nucleic acid sequence having a sequence identity of at least 5%, 10%, 20%, 30%, 40%, 50%, 50%, 70%, 80%, 85%, 86%, 87%, 88%, 89%, 90%, 91%, 92%, 93%, 94%, 95%, 96%, 97%, 98%, or 99%, preferably of at least 70%, more preferably of at least 80%, even more preferably at least 85%, even more preferably of at least 90% and most preferably of at least 95% or even 97%, with a nucleic acid sequence encoding a naturally occurring full-length tumor antigen as defined herein, or a variant thereof.

[0113] In a further preferred embodiment, the at least one coding sequence of the RNA according to the invention comprises or consists of a nucleic acid sequence identical to or having a sequence identity of at least 5%, 10%, 20%, 30%, 40%, 50%, 60%, 70%, 80%, 85%, 86%, 87%, 88%, 89%, 90%, 91%, 92%, 93%, 94%, 95%, 96%, 97%, 98%, or 99%, preferably of at least 70%, more preferably of at least 80%, even more preferably at least 85%, even more preferably of at least 90% and most preferably of at least 95% or even 97%, with any one of the nucleic acid sequences defined in Table 1, preferably in the fourth or fifth column (column ‘B’ or, respectively) of Table 1, or a fragment or variant thereof. According to a particularly preferred embodiment, the at least one coding sequence of the RNA according to the invention comprises or consists of a nucleic acid sequence having a sequence identity of at least 80% with any one of the nucleic acid sequences defined in Table 1, preferably in the fourth or fifth column (column ‘B’ or ‘C’, respectively) of Table 1, or a fragment or variant of any one of these sequences.

[0114] In a further preferred embodiment, the at least one coding sequence of the RNA according to the invention comprises or consists of a nucleic acid sequence having a sequence identity of at least 5%, 10%, 20%, 30%, 40%, 50%, 50%, 70%, 80%, 85%, 86%, 87%, 88%, 89%, 90%, 91%, 92%, 93%, 94%, 95%, 96%, 97%, 98%, or 99%, preferably of at least 70%, more preferably of at least 80%, even more preferably at least 85%, even more preferably of at least 90% and most preferably of at least 95% or even 97%, with any one of the nucleic acid sequences defined in the fourth (column ‘B’) of Table 1, or a fragment or variant of any one of these sequences. In other words, the at least one coding sequence of the RNA according to the invention preferably comprises or consists of a nucleic acid sequence having a sequence identity of at least 5%, 10%, 20%, 30%, 40%, 50%, 50%, 70%, 80%, 85%, 86%, 87%, 88%, 89%, 90%, 91%, 92%, 93%, 94%, 95%, 96%, 97%, 98%, or 99%, preferably of at least 70%, more preferably of at least 80%, even more preferably at least 85%, even more preferably of at least 90% and most preferably of at least 95% or even 97%, with a nucleic acid sequence selected from the group consisting of SEQ ID NOs: 505-1008; 4561-4553, or a fragment or variant of any one of said nucleic acid sequences. According to a particularly preferred embodiment, the at least one coding sequence of the RNA according to the invention comprises or consists of a nucleic acid sequence having a sequence identity of at least 80% with any one of the nucleic acid sequences defined in the fourth (column ‘B’) of Table 1, or a fragment or variant of any one of these sequences.

[0115] According to certain embodiments of the present invention, the RNA is mono-, bi-, or multicistronic, preferably as defined herein. The coding sequences in a bi- or multicistronic RNA preferably encode distinct tumor antigens as defined herein or a fragment or variant thereof. Preferably, the coding sequences encoding two or more antigens may be separated in the bi- or multicistronic RNA by at least one IRES (internal ribosomal entry site) sequence, as defined below. Thus, the term “encoding two or more antigens” may mean, without being limited thereto, that the bi- or even multicistronic RNA, may encode e.g. at least two, three, four, five, six or more (preferably different) antigens of the antigens or their fragments or variants within the definitions provided herein. More preferably, without being limited thereto, the bi- or even multicistronic mRNA, may encode, for example, at least two, three, four, five, six or more (preferably different) antigens as defined herein or their fragments or variants as defined herein. In this context, a so-called IRES (internal ribosomal entry site) sequence as defined above can function as a sole ribosome binding site, but it can also serve to provide a bi- or even multicistronic mRNA as defined above, which encodes several antigens, which are to be translated by the ribosomes independently of one another. Examples of IRES sequences, which can be used according to the invention, are those from picornaviruses (e.g. FMDV), pestiviruses (CFFV), polioviruses (PV), encephalomyocarditis viruses (ECMV), foot and mouth disease viruses (FMDV), hepatitis C viruses (HCV), classical swine fever viruses (CSFV), mouse leukoma virus (MLV), simian immunodeficiency viruses (SIV) or cricket paralysis viruses (CrPV).

[0116] According to a further embodiment the at least one coding sequence of the RNA according to the invention may encode at least two, three, four, five, six, seven, eight and more antigens (or fragments and derivatives thereof) as defined herein linked with or without an amino acid linker sequence, wherein said linker sequence can comprise rigid linkers, flexible linkers, cleavable linkers (e.g., self-cleaving peptides) or a combination thereof. Therein, the antigens may be identical or different or a combination thereof. Particular antigen/epitope combinations can be encoded by said mRNA encoding at least two antigens as explained herein (also referred to herein as ‘multi-antigen-constructs/mRNA’).

[0117] Preferably, the at least one coding sequence of the RNA according to the invention comprises at least two, three, four, five, six, seven, eight or more nucleic acid sequences identical to or having a sequence identity of at least 5%, 10%, 20%, 30%, 40%, 50%, 60%, 70%, 80%, 85%, 86%, 87%, 88%, 89%, 90%, 91%, 92%, 93%, 94%, 95%, 95%, 97%, 98%, or 99%, preferably of at least 70%, more preferably of at least 80%, even more preferably at least 85%, even more preferably of at least 90% and most preferably of at least 95% or even 97%, with any one of the nucleic acid sequences disclosed in Table 1 herein, or a fragment or variant of any one of said nucleic acid sequences.

[0118] Preferably, the RNA comprising at least one coding sequence as defined herein typically comprises a length of about 50 to about 20000, or 100 to about 20000 nucleotides, preferably of about 250 to about 20000 nucleotides, more preferably of about 500 to about 10000, even more preferably of about 500 to about 5000.

[0119] The RNA according to the invention may further be single stranded or double stranded. When provided as a double stranded RNA, the RNA according to the invention preferably comprises a sense and a corresponding antisense strand.

[0120] In a preferred embodiment, the RNA comprising at least one coding sequence as defined herein is an mRNA, a viral RNA or a replicon RNA.

[0121] According to a further embodiment, the RNA, preferably an mRNA, according to the invention is a modified RNA, preferably a modified RNA as described herein. In this context, a modification as defined herein preferably loads to a stabilization of the RNA according to the invention. More preferably, the invention thus provides a stabilized RNA comprising at least one coding sequence as defined herein.

[0122] According to one embodiment, the RNA of the present invention may thus be provided as a “stabilized mRNA”, that is to say as an RNA that is essentially resistant to in vivo degradation (e.g. by an exo- or endo-nuclease). Such stabilization can be effected, for example, by a modified phosphate backbone of the RNA of the present invention. A backbone modification in connection with the present invention is a modification in which phosphates of the backbone of the nucleotides contained in the RNA are chemically modified. Nucleotides that may be preferably used in this connection contain e.g. a phosphorothioate-modified phosphate backbone, preferably at least one of the phosphate oxygens contained in the phosphate backbone being replaced by a sulfur atom. Stabilized RNAs may further include, for example: non-ionic phosphate analogues, such as, for example, alkyl and aryl phosphonates, in which the charged phosphonate oxygen is replaced by an alkyl or aryl group, or phosphodiesters and alkylphosphotriesters, in which the charged oxygen residue is present in alkylated form. Such backbone modifications typically include, without implying any limitation, modifications from the group consisting of methylphosphonates, phosphoramidates and phosphorothioates (e.g. cytidine-5′-0-(1-thiophosphate)).

[0123] In the following, specific modifications are described, which are preferably capable of “stabilizing” the RNA as defined herein.

[0124] Chemical Modifications:

[0125] The term “RNA modification” as used herein may refer to chemical modifications comprising backbone modifications as woll as sugar modifications or base modifications.

[0126] In this context, a modified RNA as defined herein may contain nucleotide analogues/modifications, e.g. backbone modifications, sugar modifications or base modifications. A backbone modification in connection with the present invention is a modification, in which phosphates of the backbone of the nucleotides contained in an RNA as defined herein are chemically modified. A sugar modification in connection with the present invention is a chemical modification of the sugar of the nucleotides of the RNA as defined herein.

[0127] Furthermore, a base modification in connection with the present invention is a chemical modification of the base moiety of the nucleotides of the RNA. In this context, nucleotide analogues or modifications are preferably selected from nucleotide analogues, which are applicable for transcription and/or translation.

[0128] Sugar Modifications:

[0129] The modified nucleosides and nucleotides, which may be incorporated into a modified RNA as described herein, can be modified in the sugar moiety. For example, the 2′ hydroxyl group (OH) can be modified or replaced with a number of different “oxy” or “deoxy” substituents. Examples of “oxy”-2′ hydroxyl group modifications include, but are not limited to, alkoxy or aryloxy (—OR, e.g., R═H, alkyl, cycloalkyl, aryl, aralkyl, heteroaryl or sugar); polyethyleneglycols (PEG), —O(CH₂CH₂O)ₙCH₂CH₂OR; “locked” nucleic acids (LNA) in which the 2′ hydroxyl is connected, e.g., by a methylene bridge, to the 4′ carbon of the same ribose sugar; and amino groups (—O-amino, wherein the amino group, e.g., NRR, can be alkylamino, dialkylamino, heterocyclyl, arylamino, diarylamino, heteroarylamino, or diheteroaryl amino, ethylene diamine, polyamino) or aminoalkoxy.

[0130] “Deoxy” modifications include hydrogen, amino (e.g. NH₂; alkylamino, dialkylamino, heterocyclyl, arylamino, diaryl amino, heteroaryl amino, diheteroaryl amino, or amino acid); or the amino group can be attached to the sugar through a linker, wherein the linker comprises one or more of the atoms C, N, and D.

[0131] The sugar group can also contain one or more carbons that possess the opposite stereochemical configuration than that of the corresponding carbon in ribose. Thus, a modified RNA can include nucleotides containing, for instance, arabinose as the sugar.

[0132] Backbone Modifications:

[0133] The phosphate backbone may further be modified in the modified nucleosides and nucleotides, which may be incorporated into a modified RNA as described herein. The phosphate groups of the backbone can be modified by replacing one or more of the oxygen atoms with a different substituent. Further, the modified nucleosides and nucleotides can include the full replacement of an unmodified phosphate moiety with a modified phosphate as described herein. Examples of modified phosphate groups include, but are not limited to, phosphorothioate, phosphoroselenates, burano phosphates, burano phosphate esters, hydrogen phosphonates, phosphoroamidates, alkyl or aryl phosphonates and phosphotriesters. Phosphorodithioates have both non-linking oxygens replaced by sulfur. The phosphate linker can also be modified by the replacement of a linking oxygen with nitrogen (bridged phosphoroamidates), sulfur (bridged phosphorothioates) and carbon (bridged methylene-phosphonates).

[0134] Base Modifications:

[0135] The modified nucleosides and nucleotides, which may be incorporated into a modified RNA as described herein can further be modified in the nucleobase moiety. Examples of nucleobases found in RNA include, but are not limited to, adenine, guanine, cytosine and uracil. For example, the nucleosides and nucleotides described herein can be chemically modified on the major groove face. In some embodiments, the major groove chemical modifications can include an amino group, a thiol group, an alkyl group, or a halo group.

[0136] In particularly preferred embodiments of the present invention, the nucleotide analogues/modifications are selected from base modifications, which are preferably selected from 2-amino-6-chloropurineriboside-5′-triphosphate, 2-Aminopurine-riboside-5′-triphosphate; 2-aminoadenosine-5′-triphosphate, 2′-Amino-2′-deoxycytidine-triphosphate, 2-thiocytidine-5′-triphosphate, 2-thiouridine-5′-triphosphate, 2′-Fluorothymidine-5′-triphosphate, 2′-O-Methyl-inosine-5′-triphosphate 4-thiouridine-5′-triphosphate, 5-aminoallylcytidine-5′-triphosphate, 5-aminoallyluridine-5′-triphosphate, 5-bromocytidine-5′-triphosphate, 5-bromouridine-5′-triphosphate, 5-Bromo-2′-deoxycytidine-5′-triphosphate, 5-Bromo-2′-deoxyuridine-5′-triphosphate, 5-iodocytidine-5′-triphosphate, 5-Iodo-2′-deoxycytidine-5′-triphosphate, 5-iodouridine-5′-triphosphate, 5-Iodo-2′-deoxyuridine-5′-triphosphate, 5-methylcytidine-5′-triphosphate, 5-methyluridine-5′-triphosphate, 5-Propynyl-2′-deoxycytidine-5′-triphosphate, 5-Propynyl-2′-deoxyuridine-5′-triphosphate, 6-azacytidine-5′-triphosphate, 6-azauridine-5′-triphosphate, 6-chloropurineriboside-5′-triphosphate, 7-deazaadenosine-5′-triphosphate, 7-deazaguanosine-5′-triphosphate, 8-azaadenine-5′-triphosphate, 8-azidoadenosine-5′-triphosphate, benzimidazole-riboside-5′-triphosphate, NI-methyladenosine-5′-triphosphate, NI-methylguanosine-5′-triphosphate, N6-methyladenosine-5′-triphosphate, 06-methylguanosine-5′-triphosphate, pseudouridine-5′-triphosphate, or puromycin-5′-triphosphate, xanthosine-5′-triphosphate. Particular preference is given to nucleotides for base modifications selected from the group of base-modified nucleotides consisting of 5-methylcytidine-5′-triphosphate, 7-deazaguanosine-5′-triphosphate, 5-bromocytidine-5′-triphosphate, and pseudouridine-5′-triphosphate.

[0137] In some embodiments, modified nucleosides include pyridin-4-one ribonucleoside, 5-aza-uridine, 2-thio-5-aza-uridine, 2-thiouridine, 4-thio-pseudouridine, 2-thio-pseudouridine, 5-hydroxyuridine, 3-methyluridine, 5-carboxymethyl-uridine, 1-carboxymethyl-pseudouridine, 5-propynyl-uridine, 1-propynyl-pseudouridine, 5-taurinomethyluridine, 1-taurinomethyl-pseudouridine, 5-taurinomethyl-2-thio-uridine, I-taurinomethyl-4-thio-uridine, 5-methyl-uridine, 1-methyl-pseudouridine, 4-thio-1-methyl-pseudouridine, 2-thio-1-methyl-pseudouridine, 1-methyl-1-deaza-pseudouridine, 2-thio-1-methyl-1-deaza-pseudouridine, dihydrouridine, dihydropseudouridine, 2-thio-dihydrouridine, 2-thio-dihydropseudouridine, 2-methoxyuridine, 2-methoxy-4-thio-uridine, 4-methoxy-pseudouridine, and 4-methoxy-2-thio-pseudouridine.

[0138] In some embodiments, modified nucleosides include 5-aza-cytidine, pseudoisocytidine, 3-methyl-cytidine, N4-acetylcytidine, 5-formylcytidine, N4-methylcytidine, 5-hydroxymethylcytidine, -methyl-pseudoisocytidine, pyrrolo-cytidine, pyrrolo-pseudoisocytidine, 2-thio-cytidine, 2-thio-5-methyl-cytidine, 4-thio-pseudoisocytidine, 4-thio-1-methyl-pseudoisocytidine, 4-thio-1-methyl-1-deaza-pseudoisocytidine, 1-methyl-1-deaza-pseudoisocytidine, zebularine, 5-aza-zebularine, 5-methyl-zebularine, 5-aza-2-thio-zebularine, 2-thio-zebularine, 2-methoxy-cytidine, 2-methoxy-5-methyl-cytidine, 4-methoxy-pseudoisocytidine, and 4-methoxy-1-methyl-pseudoisocytidine.

[0139] In other embodiments, modified nucleosides include 2-aminopurine, 2,6-diaminopurine, 7-deaza-adenine, 7-deaza-8-aza-adenine, 7-deaza-2-aminopurine, 7-deaza-8-aza-2-aminopurine, 7-deaza-2,6-diaminopurine, 7-deaza-8-aza-2,6-diaminopurine, 1-methyladenosine, N6-methyladenosine, N6-isopentenyladenosine, N6-(cis-hydroxyisopentenyl)adenosine, 2-methylthio-N6-(cis-hydroxyisopentenyl) adenosine, N6-glycinylcarbamoyladenosine, N6-threonylcarbamoyladenosine, 2-methylthio-NE-threonyl carbamoyladenosine, N6,N6-dimethyladenosine, 7-methyladenine, 2-methylthio-adenine, and 2-methoxy-adenine.

[0140] In other embodiments, modified nucleosides include inosine, 1-methyl-inosine, wyosine, wybutosine, 7-deaza-guanosine, 7-deaza-8-aza-guanosine, 6-thio-guanosine, 6-thio-7-deaza-guanosine, 6-thio-7-deaza-8-aza-guanosine, 7-methyl-guanosine, 6-thio-7-methyl-guanosine, 7-methylinosine, 6-methoxy-guanosine, 1-methylguanosine, N2-methylguanosine, N2,N2-dimethylguanosine, 8-oxo-guanosine, 7-methyl-8-oxo-guanosine, 1-methyl-6-thio-guanosine, N2-methyl-6-thio-guanosine, and N2,N2-dimethyl-6-thio-guanosine.

[0141] In some embodiments, the nucleotide can be modified on the major groove face and can include replacing hydrogen on C-5 of uracil with a methyl group or a halo group. In specific embodiments, a modified nucleoside is 5′-0-(1-thiophosphate)-adenosine, 5′-0-(1-thiophosphate)-cytidine, 5′-0-(1-thiophosphate)-guanosine, 5′-0-(1-thiophosphate)-uridine or 5′-0-(1-thiophosphate)-pseudouridine.

[0142] In further specific embodiments, a modified RNA may comprise nucleoside modifications selected from G-aza-cytidine, 2-thio-cytidine, α-thio-cytidine, Pseudo-iso-cytidine, 5-aminoallyl-uridine, 5-iodo-uridine, NI-methyl-pseudouridine, 5,6-dihydrouridine, α-thio-uridine, 4-thio-uridine, 6-aza-uridine, 5-hydroxy-uridine, deoxy-thymidine, 5-methyl-uridine, Pyrrolo-cytidine, inosine, α-thio-guanosine, 6-methyl-guanosine, 5-methyl-cytidine, 8-oxo-guanosine, 7-deaza-guanosine, NI-methyl-adenosine, 2-amino-6-Chloro-purine, N6-methyl-2-amino-purine, Pseudo-iso-cytidine, 6-Chloro-purine, N6-methyl-adenosine, α-thio-adenosine, 8-azido-adenosine, 7-deaza-adenosine.

[0143] Lipid Modification:

[0144] According to a further embodiment, a modified RNA as defined herein can contain a lipid modification. Such a lipid-modified RNA typically comprises an RNA as defined herein. Such a lipid-modified RNA as defined herein typically further comprises at least one linker covalently linked with that RNA, and at least one lipid covalently linked with the respective linker. Alternatively, the lipid-modified RNA comprises at least one RNA as defined herein and at least one (bifunctional) lipid covalently linked (without a linker) with that RNA. According to a third alternative, the lipid-modified RNA comprises an RNA molecule as defined herein, at least one linker covalently linked with that RNA, and at least one lipid covalently linked with the respective linker, and also at least one (bifunctional) lipid covalently linked (without a linker) with that RNA. In this context, it is particularly preferred that the lipid modification is present at the terminal ends of a linear RNA sequence.

[0145] G/C Content Modification:

[0146] According to another embodiment, the RNA of the present invention, preferably an mRNA, may be modified, and thus stabilized, by modifying the guanosine/cytosine (G/C) content of the RNA, preferably of the at least one coding sequence of the RNA of the present invention.

[0147] In a particularly preferred embodiment of the present invention, the G/C content of the coding region of the RNA of the present invention is modified, particularly increased, compared to the G/C content of the coding region of the respective wild-type RNA, i.e. the unmodified RNA. The amino acid sequence encoded by the RNA is preferably not modified as compared to the amino acid sequence encoded by the respective wild-type RNA. This modification of the RNA of the present invention is based on the fact that the sequence of any RNA region to be translated is important for efficient translation of that RNA. Thus, the composition of the RNA and the sequence of various nucleotides are important. In particular, sequences having an increased G (guanosine)/C (cytosine) content are more stable than sequences having an increased A (adenosine)/U (uracil) content. According to the invention, the codons of the RNA are therefore varied compared to the respective wild-type RNA, while retaining the translated amino acid sequence, such that they include an increased amount of G/C nucleotides. In respect to the fact that several codons code for one and the same amino acid (so-called degeneration of the genetic code), the most favourable codons for the stability can be determined (so-called alternative codon usage). Depending on the amino acid to be encoded by the RNA, there are various possibilities for modification of the RNA sequence, compared to its wild-type sequence. In the case of amino acids, which are encoded by codons, which contain exclusively G or C nucleotides, no modification of the codon is necessary. Thus, the codons for Pro (CCC or CCG), Arg (CGC or CGG), Ala (GCC or GCG) and Gly (GGC or GGG) require no modification, since no A or U is present. In contrast, codons which contain A and/or U nucleotides can be modified by substitution of other codons, which code for the same amino acids but contain no A and/or U. Examples of these are: the codons for Pro can be modified from CCU or CCA to CCC or CCG; the codons for Arg can be modified from CGU or CGA or AGA or AGG to CGC or CGG; the codons for Ala can be modified from GCU or GCA to GCC or GCG; the codons for Gly can be modified from GGH or BOA to GGC or GGG. In other cases, although A or H nucleotides cannot be eliminated from the codons, it is however possible to decrease the A and H content by using codons which contain a lower content of A and/or H nucleotides. Examples of these are: the codons for Phe can be modified from HUU to UUC; the codons for Lou can be modified from UHA, UUG, CUU or CUA to CUC or CUG; the codons for Ser can be modified from UCU or UCA or AGH to UCC, UCG or AGC; the codon for Tyr can be modified from UAU to UAC; the codon for Cys can be modified from UGU to UGC; the codon for His can be modified from CAU to CAC; the codon for Gln can be modified from CAA to CAG; the codons for Ile can be modified from AUU or AUA to AUC; the codons for Thr can be modified from ACU or ACA to ACC or ACG; the codon for Asn can be modified from AAU to AAC; the codon for Lys can be modified from AAA to AAG; the codons for Val can be modified from GUU or GUA to GUC or GOH; the codon for Asp can be modified from GAU to GAC; the codon for Glu can be modified from GAA to GAG; the stop codon UAA can be modified to UAG or HGA. In the case of the codons for Met (AUG) and Trp (UGG), on the other hand, there is no possibility of sequence modification. The substitutions listed above can be used either individually or in all possible combinations to increase the B/C content of the at least one mRNA of the composition of the present invention compared to its particular wild-type mRNA (i.e. the original sequence). Thus, for example, all codons for Thr occurring in the wild-type sequence can be modified to ACC (or ACG). Preferably, however, for example, combinations of the above substitution possibilities are used:
[0148] substitution of all codons coding for Thr in the original sequence (wild-type mRNA) to ACC (or ACG) and
[0149] substitution of all codons originally coding for Ser to UCC (or UCG or AGC); substitution of all codons coding for Ile in the original sequence to AUC and
[0150] substitution of all codons originally coding for Lys to AAG and
[0151] substitution of all codons originally coding for Tyr to UAC; substitution of all codons coding for Val in the original sequence to GUC (or GUG) and
[0152] substitution of all codons originally coding for Blu to GAG and substitution of all codons originally coding for Ala to GCC (or GCG) and
[0153] substitution of all codons originally coding for Arg to CGC (or CGG); substitution of all codons coding for Val in the original sequence to GUC (or GUG) and
[0154] substitution of all codons originally coding for Blu to GAG and
[0155] substitution of all codons originally coding for Ala to GCC (or GCG) and
[0156] substitution of all codons originally coding for Gly to GGC (or BOB) and
[0157] substitution of all codons originally coding for Asn to AAC; substitution of all codons coding for Val in the original sequence to GUC (or GUG) and
[0158] substitution of all codons originally coding for Phe to UUC and
[0159] substitution of all codons originally coding for Cys to UGC and
[0160] substitution of all codons originally coding for Lou to CUG (or CUC) and
[0161] substitution of all codons originally coding for Gln to CAG and
[0162] substitution of all codons originally coding for Pro to CCC (or CCG); etc.

[0163] Preferably, the B/C content of the coding region of the RNA of the present invention is increased by at least 7%, more preferably by at least 15%, particularly preferably by at least 20%, compared to the B/C content of the coding region of the wild-type RNA, which codes for an antigen as defined herein or a fragment or variant thereof. According to a specific embodiment at least 5%, 10%, 20%, 30%, 40%, 50%, 60%, more preferably at least 70%, even more preferably at least 80% and most preferably at least 90%, 95% or even 100% of the substitutable codons in the region coding for an antigen as defined herein or a fragment or variant thereof or the whole sequence of the wild type RNA sequence are substituted, thereby increasing the GC/content of said sequence. In this context, it is particularly preferable to increase the G/C content of the RNA of the present invention, preferably of the at least one coding region of the RNA according to the invention, to the maximum (i.e. 100% of the substitutable codons) as compared to the wild-type sequence.

[0164] According to the invention, a further preferred modification of the RNA of the present invention is based on the finding that the translation efficiency is also determined by a different frequency in the occurrence of tRNAs in cells. Thus, if so-called “rare codons” are present in the RNA of the present invention to an increased extent, the corresponding modified RNA sequence is translated to a significantly poorer degree than in the case where codons coding for relatively “frequent” tRNAs are present. According to the invention, in the modified RNA of the present invention, the region which codes for an antigen as defined herein or a fragment or variant thereof is modified compared to the corresponding region of the wild-type RNA such that at least one codon of the wild-type sequence, which codes for a tRNA which is relatively rare in the cell, is exchanged for a codon, which codes for a tRNA which is relatively frequent in the coll and carries the same amino acid as the relatively rare tRNA. By this modification, the sequences of the RNA of the present invention is modified such that codons for which frequently occurring tRNAs are available are inserted. In other words, according to the invention, by this modification all codons of the wild-type sequence, which code for a tRNA which is relatively rare in the cell, can in each case be exchanged for a codon, which codes for a tRNA which is relatively frequent in the cell and which, in each case, carries the same amino acid as the relatively rare tRNA. Which tRNAs occur relatively frequently in the cell and which, in contrast, occur relatively rarely is known to a person skilled in the art; cf. e.g. Akashi, Curr. Opin. Genet. Dev. 2001, 11(6): 660-666. The codons, which use for the particular amino acid the tRNA which occurs the most frequently, e.g. the Gly codon, which uses the tRNA, which occurs the most frequently in the (human) cell, are particularly preferred. According to the invention, it is particularly preferable to link the sequential G/C content which is increased, in particular maximized, in the modified RNA of the present invention, with the “frequent” codons without modifying the amino acid sequence of the protein encoded by the coding region of the RNA. This preferred embodiment allows provision of a particularly efficiently translated and stabilized (modified) RNA of the present invention. The determination of a modified RNA of the present invention as described above (increased G/C content; exchange of tRNAs) can be carried out using the computer program explained in WO 02/098443—the disclosure content of which is included in its full scope in the present invention. Using this computer program, the nucleotide sequence of any desired RNA can be modified with the aid of the genetic code or the degenerative nature thereof such that a maximum G/C content results, in combination with the use of codons which code for tRNAs occurring as frequently as possible in the cell, the amino acid sequence coded by the modified RNA preferably not being modified compared to the non-modified sequence. Alternatively, it is also possible to modify only the G/C content or only the codon usage compared to the original sequence. The source code in Visual Basic 5.0 (development environment used: Microsoft Visual Studio Enterprise 5.0 with Servicepack 3) is also described in WO 02/098443. In a further preferred embodiment of the present invention, the A/U content in the environment of the ribosome binding site of the RNA of the present invention is increased compared to the A/U content in the environment of the ribosome binding site of its respective wild-type mRNA. This modification (an increased A/U content around the ribosome binding site) increases the efficiency of ribosome binding to the RNA. An effective binding of the ribosomes to the ribosome binding site (Kozak sequence: SEQ ID NO: 4557; the AUG forms the start codon) in turn has the effect of an efficient translation of the RNA. According to a further embodiment of the present invention, the RNA of the present invention may be modified with respect to potentially destabilizing sequence elements. Particularly, the coding region and/or the 5′ and/or 3′ untranslated region of this RNA may be modified compared to the respective wild-type RNA such that it contains no destabilizing sequence elements, the encoded amino acid sequence of the modified RNA preferably not being modified compared to its respective wild-type RNA. It is known that, for example in sequences of eukaryotic RNAs, destabilizing sequence elements (DSE) occur, to which signal proteins bind and regulate enzymatic degradation of RNA in vivo. For further stabilization of the modified RNA, optionally in the region which encodes an antigen as defined herein or a fragment or variant thereof, one or more such modifications compared to the corresponding region of the wild-type RNA can therefore be carried out, so that no or substantially no destabilizing sequence elements are contained there. According to the invention, SE present in the untranslated regions (3′- and/or 5′-UTR) can also be eliminated from the RNA of the present invention by such modifications. Such destabilizing sequences are e.g. AU-rich sequences (AURES), which occur in 3′-UTR sections of numerous unstable RNAs (Caput et al., Pron. Natl. Acad. Sci. USA 1986, 83: 570 to 5674). The RNA of the present invention is therefore preferably modified compared to the respective wild-type RNA such that the RNA of the present invention contains no such destabilizing sequences. This also applies to those sequence motifs which are recognized by possible endonucleases, e.g. the sequence GAACAAG, which is contained in the 3′-UTR segment of the gene encoding the transferrin receptor (Binder et al., EMBO J. 994, 13: 1969 to 1980). These sequence motifs are also preferably removed in the RNA of the present invention.

[0165] According to a preferred embodiment, the present invention provides an RNA as defined herein comprising at least one coding sequence, wherein the coding sequence comprises or consists of any one of the (modified) nucleic acid sequences defined in the fifth column (column ‘C’) of Table 1, or of a fragment or variant of any one of these sequences. In other words, the at least one coding sequence preferably comprises or consists of a nucleic acid sequence selected from the group consisting of SEQ ID NOs: 1009-4033; 4564-4591 or a fragment or variant of any one of these nucleic acid sequences.

[0166] In a further preferred embodiment, the at least one coding sequence of the RNA according to the invention comprises or consists of a nucleic acid sequence identical to or having a sequence identity of at least 5%, 10%, 20%, 30%, 40%, 50%, 60%, 70%, 80%, 85%, 86%, 87%, 88%, 89%, 90%, 91%, 92%, 93%, 94%, 95%, 96%, 97%, 98%, or 99%, preferably of at least 70%, more preferably of at least 80%, even more preferably at least 85%, even more preferably of at least 90% and most preferably of at least 95% or even 97%, with any one of the (modified) nucleic acid sequences defined in the fifth column (column ‘C’) of Table 1, or of a fragment or variant of any one of these sequences.

[0167] According to a particularly preferred embodiment, the at least one coding sequence of the RNA according to the invention comprises or consists of a nucleic acid sequence having a sequence identity of at least 80% with any one of the (modified) nucleic acid sequences defined in the fifth column (column ‘C’) of Table 1, or of a fragment or variant of any one of these sequences. GC optimized sequences:

[0168] In a preferred embodiment, the present invention provides an RNA comprising at least one coding sequence, wherein the coding sequence comprises or consists of a nucleic acid sequence selected from the group consisting of SEQ ID NOs: 1009-1512; 3025-3528; 3529-4032; 4033-4033, 4554-4555; 4575-4591 or a fragment or variant of any one of these nucleic acid sequences.

[0169] According to a further embodiment, the at least one coding sequence of the RNA according to the invention comprises or consists of a nucleic acid sequence having a sequence identity of at least 5%, 10%, 20%, 30%, 40%, 50%, 60%, 70%, 80%, 85%, 86%, 87%, 88%, 89%, 90%, 91%, 92%, 93%, 94%, 95%, 91%, 97%, 98%, or 99%, preferably of at least 70%, more preferably of at least 80%, even more preferably at least 85%, even more preferably of at least 90% and most preferably of at least 95% or even 97%, with a nucleic acid sequence selected from the group consisting of SEQ ID NOs: 1009-1512; 3025-3528; 3529-4032; 4033-4033, 4554-4566; 4575-4591 or a fragment or variant of any one of these nucleic acid sequences.

[0170] Sequences Adapted to Human Codon Usage:

[0171] According to the invention, a further preferred modification of the RNA of the present invention is based on the finding that codons encoding the same amino acid typically occur at different frequencies. According to the invention, in the modified RNA of the present invention, the coding sequence (coding region) as defined herein is preferably modified compared to the corresponding region of the respective wild-type RNA such that the frequency of the codons encoding the same amino acid corresponds to the naturally occurring frequency of that codon according to the human codon usage as e.g. shown in Table 2.

[0172] For example, in the case of the amino acid alanine (Ala) present in an amino acid sequence encoded by the at least one coding sequence of the RNA according to the invention, the wild type coding sequence is preferably adapted in a way that the codon “GCC” is used with a frequency of 0.40, the codon “GCT” is used with a frequency of 0.28, the codon “GCA” is used with a frequency of 0.22 and the codon “GCG” is used with a frequency of 0.10 etc. (see Table 2).

TABLE 2
Human codon usage table

| Amin | | | | Amino | | | |
|---|---|---|---|---|---|---|---|
| oacid | codon | fraction | /1000 | acid | codon | fraction | /1000 |
| Ala | GCG | 0.10 | 7.4 | Pro | CCG | 0.11 | 6.9 |
| Ala | GCA | 0.22 | 15.8 | Pro | CCA | 0.27 | 16.9 |
| Ala | GCT | 0.28 | 18.5 | Pro | CCT | 0.29 | 17.5 |
| Ala | GCC* | 0.40 | 27.7 | Pro | CCC* | 0.33 | 19.8 |
| Cys | TGT | 0.42 | 10.6 | Gln | CAG* | 0.73 | 34.2 |
| Cys | TGC* | 0.58 | 12.6 | Gln | CAA | 0.27 | 12.3 |
| Asp | GAT | 0.44 | 21.8 | Arg | AGG | 0.22 | 12.0 |
| Asp | GAC* | 0.56 | 25.1 | Arg | AGA* | 0.21 | 12.1 |
| Glu | GAG* | 0.59 | 39.6 | Arg | CGG | 0.19 | 11.4 |
| Glu | GAA | 0.41 | 29.0 | Arg | CGA | 0.10 | 6.2 |
| Phe | TTT | 0.43 | 17.6 | Arg | CGT | 0.09 | 4.5 |
| Phe | TTC* | 0.57 | 20.3 | Arg | CGC | 0.19 | 10.4 |
| Gly | GGG | 0.23 | 16.5 | Ser | AGT | 0.14 | 12.1 |
| Gly | GGA | 0.26 | 16.5 | Ser | AGC* | 0.25 | 19.5 |
| Gly | GGT | 0.18 | 10.8 | Ser | TCG | 0.06 | 4.4 |
| Gly | GGC* | 0.33 | 22.2 | Ser | TCA | 0.15 | 12.2 |
| His | CAT | 0.41 | 10.9 | Ser | TCT | 0.18 | 15.2 |
| His | CAC* | 0.59 | 15.1 | Ser | TCC | 0.23 | 17.7 |
| Ile | ATA | 0.14 | 7.5 | Thr | ACG | 0.12 | 6.1 |
| Ile | ATT | 0.35 | 16.0 | Thr | ACA | 0.27 | 15.1 |
| Ile | ATC* | 0.52 | 20.8 | Thr | ACT | 0.23 | 13.1 |
| Lys | AAG* | 0.60 | 31.9 | Thr | ACC* | 0.38 | 18.9 |
| Lys | AAA | 0.40 | 24.4 | Val | GTG* | 0.48 | 28.1 |
| Leu | TTG | 0.12 | 12.9 | Val | GTA | 0.10 | 7.1 |
| Leu | TTA | 0.06 | 7.7 | Val | GTT | 0.17 | 11.0 |
| Leu | CTG* | 0.43 | 39.6 | Val | GTC | 0.25 | 14.5 |
| Leu | CTA | 0.07 | 7.2 | Trp | TGG* | 1 | 13.2 |
| Leu | CTT | 0.12 | 13.2 | Tyr | TAT | 0.42 | 12.2 |
| Leu | CTC | 0.20 | 19.6 | Tyr | TAC* | 0.58 | 15.3 |
| Met | ATG* | 1 | 22.0 | Stop | TGA* | 0.61 | 1.6 |
| Asn | AAT | 0.44 | 17.0 | Stop | TAG | 0.17 | 0.8 |
| Asn | AAC* | 0.56 | 19.1 | Stop | TAA | 0.22 | 1.0 |

*most frequent codon

[0173] In a preferred embodiment, the present invention provides an RNA comprising at least one coding sequence, wherein the coding sequence comprises a nucleic acid sequence selected from the group consisting of SEQ ID NOs: 2017-2520; 4570-4572, or a fragment or variant of any one of said nucleic acid sequences.

[0174] According to a further embodiment, the at least one coding sequence of the RNA according to the invention comprises or consists of a nucleic acid sequence having a sequence identity of at least 5%, 10%, 20%, 30%, 40%, 50%, 60%, 70%, 80%, 85%, 86%, 87%, 88%, 89%, 90%, 91%, 92%, 93%, 94%, 95%, 91%, 97%, 98%, or 99%, preferably of at least 70%, more preferably of at least 80%, even more preferably at least 85%, even more preferably of at least 90% and most preferably of at least 95% or even 97%, with a nucleic acid sequence selected from the group consisting of SEQ ID NOs: 2017-2520, 4570-4572 or a fragment or variant of any one of said nucleic acid sequences.

[0175] Codon-Optimized Sequences:

[0176] As described above it is preferred according to the invention, that all codons of the wild-type sequence which code for a tRNA, which is relatively rare in the cell, are exchanged for a codon which codes for a tRNA, which is relatively frequent in the cell and which, in each case, carries the same amino acid as the relatively rare tRNA. Therefore it is particularly preferred that the most frequent codons are used for each encoded amino acid (see Table 2, most frequent codons are marked with asterisks). Such an optimization procedure increases the codon adaptation index (CAI) and ultimately maximises the CAI. In the context of the invention, sequences with increased or maximized CAI are typically referred to as “codon-optimized” sequences and/or CAI increased and/or maximized sequences.

[0177] According to a preferred embodiment, the RNA of the present invention comprises at least one coding sequence, wherein the coding sequence is codon-optimized as described heroin. More preferably, the codon adaptation index (CAI) of the at least one coding sequence is at least 0.5, at least 0.8, at least 0.9 or at least 0.95. Most preferably, the codon adaptation index (CAI) of the at least one coding sequence is 1.

[0178] For example, in the case of the amino acid alanine (Ala) present in the amino acid sequence encoded by the at least one coding sequence of the RNA according to the invention, the wild type coding sequence is adapted in a way that the most frequent human codon “GCC” is always used for said amino acid, or for the amino acid Cysteine (Cys), the wild type sequence is adapted in a way that the most frequent human codon “TGC” is always used for said amino acid etc.

[0179] In a preferred embodiment, the present invention provides an RNA comprising at least one coding sequence, wherein the coding sequence comprises a nucleic acid sequence selected from the group consisting of SEQ ID NOs: 2521-3024; 4573-4575, or a fragment or variant of any one of said nucleic acid sequences.

[0180] According to a further embodiment, the at least one coding sequence of the RNA according to the invention comprises or consists of a nucleic acid sequence having a sequence identity of at least 5%, 10%, 20%, 30%, 40%, 50%, 50%, 70%, 80%, 85%, 85%, 87%, 88%, 89%, 90%, 91%, 92%, 93%, 94%, 95%, 96%, 97%, 98%, or 99%, preferably of at least 70%, more preferably of at least 80%, even more preferably at least 85%, even more preferably of at least 90% and most preferably of at least 95% or even 97%, with a nucleic acid sequence selected from the group consisting of SEQ ID NOs: 2521-3024; 4573-4575, or a fragment or variant of any one of said nucleic acid sequences.

[0181] C-Optimized Sequences:

[0182] According to another embodiment, the RNA of the composition of the present invention may be modified by modifying, preferably increasing, the cytosine (C) content of the RNA, preferably of the coding region of the aRNA.

[0183] In a particularly preferred embodiment of the present invention, the C content of the coding region of the RNA of the present invention is modified, preferably increased, compared to the C content of the coding region of the respective wild-type RNA, i.e. the unmodified RNA. The amino acid sequence encoded by the at least one coding sequence of the RNA of the present invention is preferably not modified as compared to the amino acid sequence encoded by the respective wild-type mRNA.

[0184] In a preferred embodiment of the present invention, the modified RNA is modified such that at least 10%, 20%, 30%, 40%, 50%, 60%, 70% or 80%, or at least 90% of the theoretically possible maximum cytosine-content or even a maximum cytosine-content is achieved.

[0185] In further preferred embodiments, at least 10%, 20%, 30%, 40%, 50%, 60%, 70%, 80%, 90% or even 100% of the codons of the target RNA wild type sequence, which are “cytosine content optimizable” are replaced by codons having a higher cytosine-content than the ones present in the wild type sequence.

[0186] In a further preferred embodiment, some of the codons of the wild type coding sequence may additionally be modified such that a codon for a relatively rare tRNA in the cell is exchanged by a codon for a relatively frequent tRNA in the cell, provided that the substituted codon for a relatively frequent tRNA carries the same amino acid as the relatively rare tRNA of the original wild type codon. Preferably, all of the codons for a relatively rare tRNA are replaced by a codon for a relatively frequent tRNA in the cell, except codons encoding amino acids, which are exclusively encoded by codons not containing any cytosine, or except for glutamine (Gln), which is encoded by two codons each containing the same number of cytosines.

[0187] In a further preferred embodiment of the present invention, the modified target RNA is modified such that at least 80%, or at least 90% of the theoretically possible maximum cytosine-content or even a maximum cytosine-content is achieved by means of codons, which code for relatively frequent tRNAs in the cell, wherein the amino acid sequence remains unchanged.

[0188] Due to the naturally occurring degeneracy of the genetic code, more than one codon may encode a particular amino acid. Accordingly, 18 out of 20 naturally occurring amino acids are encoded by more than one codon (with Tryp and Met being an exception), e.g. by 2 codons (e.g. Cys, Asp, Glu), by three codons (e.g. Ile), by 4 codons (e.g. Al, Gly, Pro) or by 6 codons (e.g. Lou, Arg, Ser). However, not all codons encoding the same amino acid are utilized with the same frequency under in vivo conditions. Depending on each single organism, a typical codon usage profile is established.

[0189] The term ‘cytosine content-optimizable codon’ as used within the context of the present invention refers to codons, which exhibit a lower content of cytosines than other codons encoding the same amino acid. Accordingly, any wild type codon, which may be replaced by another codon encoding the same amino acid and exhibiting a higher number of cytosines within that codon, is considered to be cytosine-optimizable (C-optimizable). Any such substitution of a C-optimizable wild type codon by the specific C-optimized codon within a wild type coding region increases its overall C-content and reflects a C-enriched modified mRNA sequence. According to a preferred embodiment, the RNA of the present invention, preferably the at least one coding sequence of the RNA of the present invention comprises or consists of a C-maximized RNA sequence containing C-optimized codons for all potentially C-optimizable codons. Accordingly, 100% or all of the theoretically replaceable C-optimizable codons are preferably replaced by C-optimized codons over the entire length of the coding region.

[0190] In this context, cytosine-content optimizable codons are codons, which contain a lower number of cytosines than other codons coding for the same amino acid.

[0191] Any of the codons GCG, GCA, GCU codes for the amino acid Ala, which may be exchanged by the codon GCC encoding the same amino acid, and/or
[0192] the codon UGU that codes for Cys may be exchanged by the codon UGC encoding the same amino acid, and/or
[0193] the codon GAU which codes for Asp may be exchanged by the codon GAC encoding the same amino acid, and/or
[0194] the codon that UUU that codes for Phe may be exchanged for the codon UUC encoding the same amino acid, and/or
[0195] any of the codons GGG, GGA, GGU that code Gly may be exchanged by the codon GGC encoding the same amino acid, and/or
[0196] the codon CAU that codes for His may be exchanged by the codon CAC encoding the same amino acid, and/or
[0197] any of the codons AUA, AUU that code for Ile may be exchanged by the codon AHC, and/or
[0198] any of the codons UUG, UUA, CG, CUA, CUU coding for Lou may be exchanged by the codon CUC encoding the same amino acid, and/or
[0199] the codon AAU that codes for Asn may be exchanged by the codon AAC encoding the same amino acid, and/or
[0200] any of the codons CCG, CCA, CCU coding for Pro may be exchanged by the codon CCC encoding the same amino acid, and/or
[0201] any of the codons AGG, AGA, CGG, CGU, CGU coding for Arg may be exchanged by the codon CGC encoding the same amino acid, and/or
[0202] any of the codons AGU, AGC, UCG, UCA, UCU coding for Ser may be exchanged by the codon HCC encoding the same amino acid, and/or
[0203] any of the codons ACG, ACA, ACU coding for Thr may be exchanged by the codon ACC encoding the same amino acid, and/or
[0204] any of the codons GUG, GUA, GUU coding for Val may be exchanged by the codon GUC encoding the same amino acid, and/or
[0205] the codon UAU coding for Tyr may be exchanged by the codon UAC encoding the same amino acid.

[0206] In any of the above instances, the number of cytosines is increased by 1 per exchanged codon. Exchange of all non C-optimized codons (corresponding to C-optimizable codons) of the coding region results in a C-maximized coding sequence. In the context of the invention, at least 70%, preferably at least 80%, more preferably at least 90%, of the non C-optimized codons within the at least one coding region of the RNA according to the invention are replaced by C-optimized codons.

[0207] It may be preferred that for some amino acids the percentage of C-optimizable codons replaced by C-optimized codons is less than 70%, while for other amino acids the percentage of replaced codons is higher than 70% to meet the overall percentage of C-optimization of at least 70% of all C-optimizable wild type codons of the coding region.

[0208] Preferably, in a C-optimized RNA of the invention, at least 50% of the C-optimizable wild type codons for any given amino acid are replaced by C-optimized codons, e.g. any modified C-enriched RNA preferably contains at least 50% C-optimized codons at C-optimizable wild type codon positions encoding any one of the above mentioned amino acids Ala, Cys, Asp, Phe, Gly, His, Ile, Lou, Asn, Pro, Arg, Ser, Thr, Val and Tyr, preferably at least 60%.

[0209] In this context codons encoding amino acids, which are not cytosine content-optimizable and which are, however, encoded by at least two codons, may be used without any further selection process. However, the codon of the wild type sequence that codes for a relatively rare tRNA in the cell, e.g. a human cell, may be exchanged for a codon that codes for a relatively frequent tRNA in the cell, wherein both code for the same amino acid. Accordingly, the relatively rare codon GAA coding for Glu may be exchanged by the relative frequent codon GAG coding for the same amino acid, and/or the relatively rare codon AAA coding for Lys may be exchanged by the relative frequent codon AAG coding for the same amino acid, and/or the relatively rare codon CAA coding for Gln may be exchanged for the relative frequent codon CAG encoding the same amino acid.

[0210] In this context, the amino acids Met (AUG) and Trp (UGG), which are encoded by only one codon each, remain unchanged. Stop codons are not cytosine-content optimized, however, the relatively rare stop codons amber, ochre (UAA, UAG) may be exchanged by the relatively frequent stop codon opal (UGA).

[0211] The single substitutions listed above may be used individually as well as in all possible combinations in order to optimize the cytosine-content of the modified RNA compared to the wild type mRNA sequence.

[0212] Accordingly, the at least one coding sequence as defined herein may be changed compared to the coding region of the respective wild type RNA in such a way that an amino acid encoded by at least two or more codons, of which one comprises one additional cytosine, such a codon may be exchanged by the C-optimized codon comprising one additional cytosine, wherein the amino acid is preferably unaltered compared to the wild type sequence.

[0213] In a preferred embodiment, the present invention provides an RNA comprising at least one coding sequence, wherein the coding sequence comprises a nucleic acid sequence selected from the group consisting of SEQ ID NOs:1513-2016; 4567-4569, or a fragment or variant of any one of said nucleic acid sequences.

[0214] According to a further embodiment, the at least one coding sequence of the RNA according to the invention comprises or consists of a nucleic acid sequence having a sequence identity of at least 5%, 10%, 20%, 30%, 40%, 50%, 60%, 70%, 80%, 85%, 86%, 87%, 88%, 89%, 90%, 91%, 92%, 93%, 94%, 95%, 96%, 97%, 98%, or 99%, preferably of at least 70%, more preferably of at least 80%, even more preferably at least 85%, even more preferably of at least 90% and most preferably of at least 95% or even 97%, with a nucleic acid sequence selected from the group consisting of SEQ ID NOs:1513-2016; 4557-4569, or a fragment or variant of any one of said nucleic acid sequences.

[0215] According to a particularly preferred embodiment, the invention provides an RNA, preferably an mRNA, comprising at least one coding sequence as defined herein, wherein the G/C content of the at least one coding sequence of the RNA is increased compared to the G/C content of the corresponding coding sequence of the corresponding wild-type RNA, and/or
[0216] wherein the C content of the at least one coding sequence of the RNA is increased compared to the C content of the corresponding coding sequence of the corresponding wild-type RNA, and/or
[0217] wherein the codons in the at least one coding sequence of the RNA are adapted to human codon usage, wherein the codon adaptation index (CAI) is preferably increased or maximised in the at least one coding sequence of the RNA, and wherein the amino acid sequence encoded by the RNA is preferably not being modified compared to the amino acid sequence encoded by the corresponding wild-type RNA.

[0218] According to another preferred embodiment of the invention, a modified RNA as defined herein, can be modified by the addition of a so-called ‘5′ cap’ structure, which preferably stabilizes the RNA as described herein. A 5′-cap is an entity, typically a modified nucleotide entity, which generally “caps” the 5′-end of a mature mRNA. A 5′-cap may typically be formed by a modified nucleotide, particularly by a derivative of a guanine nucleotide. Preferably, the 5′-cap is linked to the 5′-terminus via a 5′-5′-triphosphate linkage. A 5′-cap may be methylated, e.g. m7GpppN, wherein N is the terminal 5′ nucleotide of the nucleic acid carrying the 5′-cap, typically the 5′-end of an mRNA. m7GpppN is the 5′-cap structure, which naturally occurs in mRNA transcribed by polymerase II and is therefore preferably not considered as modification comprised in a modified mRNA in this context. Accordingly, a modified RNA of the present invention may comprise a m7GpppN as 5′-cap, but additionally the modified RNA typically comprises at least one further modification as defined herein.

[0219] Further examples of 5′nap structures include glyceryl, inverted deoxy abasic residue (moiety), 4′,5′ methylene nucleotide, 1-(beta-D-erythrofuranosyl) nucleotide, 4′-thio nucleotide, carbocyclic nucleotide, 1,5-anhydrohexitol nucleotide, L-nucleotides, alpha-nucleotide, modified base nucleotide, threo-pentofuranosyl nucleotide, acyclic 3′,4′-seco nucleotide, acyclic 3,4-dihydroxybutyl nucleotide, acyclic 3,5 dihydroxypentyl nucleotide, 3′-3′-inverted nucleotide moiety, 3′-3′-inverted abasic moiety, 3′-2′-inverted nucleotide moiety, 3′-2′-inverted abasic moiety, 1,4-butanediol phosphate, 3′-phosphoramidate, hexylphosphate, aminohexyl phosphate, 3′-phosphate, 3′phosphorothioate, phosphorodithioate, or bridging or non-bridging methylphosphonate moiety. These modified 5′-cap structures are regarded as at least one modification in this context.

[0220] Particularly preferred modified 5′-cap structures are cap1 (methylation of the ribose of the adjacent nucleotide of m7G), cap2 (additional methylation of the ribose of the 2nd nucleotide downstream of the m7G), cap3 (additional methylation of the ribose of the 3rd nucleotide downstream of the m7G), cap4 (methylation of the ribose of the 4th nucleotide downstream of the m7G), ARCA (anti-reverse cap analogue, modified ARCA (e.g. phosphothioate modified ARCA), inosine, NI-methyl-guanosine, 2′-fluoro-guanosine, 7-deaza-guanosine, 8-oxo-guanosine, 2-amino-guanosine, LNA-guanosine, and 2-azido-guanosine. Accordingly, the RNA according to the invention preferably comprises a 5′-cap structure.

[0221] In a preferred embodiment, the RNA according to the invention comprises at least one 5′- or 3′-UTR element. In this context, an UTR element comprises or consists of a nucleic acid sequence, which is derived from the 5′- or 3′-UTR of any naturally occurring gene or which is derived from a fragment, a homolog or a variant of the 5′- or 3′-UTR of a gene. Preferably, the 5′- or 3′-UTR element used according to the present invention is heterologous to the at least one coding sequence of the RNA of the invention. Even if 5′- or 3′-UTR elements derived from naturally occurring genes are preferred, also synthetically engineered UTR elements may be used in the context of the present invention.

[0222] The term ‘3′UTR element’ typically refers to a nucleic acid sequence, which comprises or consists of a nucleic acid sequence that is derived from a 3′HTR or from a variant of a 3′HTR. A 3′HTR element in the sense of the present invention may represent the 3′HTR of an RNA, preferably an mRNA. Thus, in the sense of the present invention, preferably, a 3′HTR element may be the 3′HTR of an RNA, preferably of an mRNA, or it may be the transcription template for a 3′HTR of an RNA. Thus, a 3′HTR element preferably is a nucleic acid sequence which corresponds to the 3′HTR of an RNA, preferably to the 3′HTR of an mRNA, such as an mRNA obtained by transcription of a genetically engineered vector construct. Preferably, the 3′HTR element fulfils the function of a 3′HTR or encodes a sequence which fulfils the function of a 3′HTR.

[0223] According to a preferred embodiment, the RNA, preferably an mRNA, according to the invention comprises a 5′-cap structure and/or at least one 3′-untranslated region element (3′-UTR element), preferably as defined herein. More preferably, the RNA further comprises a 5′-UTR element as defined herein.

[0224] According to a further preferred embodiment, the RNA of the present invention may contain a poly-A tail on the 3′ terminus of typically about 10 to 200 adenosine nucleotides, preferably about 10 to 100 adenosine nucleotides, more preferably about 40 to 80 adenosine nucleotides or even more preferably about 50 to 70 adenosine nucleotides.

[0225] Preferably, the poly(A) sequence in the RNA of the present invention is derived from a DNA template by RNA in vitro transcription. Alternatively, the poly(A) sequence may also be obtained in vitro by common methods of chemical-synthesis without being necessarily transcribed from a DNA-progenitor. Moreover, poly(A) sequences, or poly(A) tails may be generated by enzymatic polyadenylation of the RNA according to the present invention using commercially available polyadenylation kits and corresponding protocols known in the art.

[0226] Alternatively, the RNA as described herein optionally comprises a polyadenylation signal, which is defined herein as a signal, which convoys polyadenylation to a (transcribed) RNA by specific protein factors (e.g. cleavage and polyadenylation specificity factor (CPSF), cleavage stimulation factor (CstF), cleavage factors I and II (CF I and CF II), poly(A) polymerase (PAP)). In this context, a consensus polyadenylation signal is preferred comprising the NN(U/T)ANA consensus sequence. In a particularly preferred aspect, the polyadenylation signal comprises one of the following sequences: AA(U/T)AAA or A(U/T)(U/T)AAA (wherein uridine is usually present in RNA and thymidine is usually present in DNA).

[0227] According to a further preferred embodiment, the RNA of the present invention may contain a poly(C) tail on the 3′ terminus of typically about 10 to 200 cytosine nucleotides, preferably about 10 to 100 cytosine nucleotides, more preferably about 20 to 70 cytosine nucleotides or even more preferably about 20 to 60 or even 10 to 40 cytosine nucleotides.

[0228] In a further preferred embodiment, the RNA according to the invention further comprises at least one 3′UTR element. Preferably, the at least one 3′UTR element comprises or consists of a nucleic acid sequence derived from the 3′UTR of a chordate gene, preferably a vertebrate gene, more preferably a mammalian gene, most preferably a human gene, or from a variant of the 3′UTR of a chordate gene, preferably a vertebrate gene, more preferably a mammalian gene, most preferably a human gene.

[0229] Preferably, the RNA of the present invention comprises a 3′UTR element, which may be derivable from a gene that relates to an mRNA with an enhanced half-life (that provides a stable mRNA), for example a 3′UTR element as defined and described below. Preferably, the 3′-UTR element is a nucleic acid sequence derived from a 3′-UTR of a gone, which preferably encodes a stable mRNA, or from a homolog, a fragment or a variant of said gene

[0230] In a particularly preferred embodiment, the 3′UTR element comprises or consists of a nucleic acid sequence, which is derived from a 3′UTR of a gene selected from the group consisting of an albumin gene, an α-globin gene, a β-globin gene, a tyrosine hydroxylase gene, a lipoxygenase gene, and a collagen alpha gene, such as a collagen alpha I(I) gene, or from a variant of a 3′UTR of a gene selected from the group consisting of an albumin gene, an α-globin gene, a β-globin gene, a tyrosine hydroxylase gene, a lipoxygenase gene, and a collagen alpha gene, such as a collagen alpha I(I) gene according to SEQ ID No. 1369-1390 of the patent application WO2013/143700, whose disclosure is incorporated herein by reference, or from a homolog, a fragment or a variant thereof. In a particularly preferred embodiment, the 3′UTR element comprises or consists of a nucleic acid sequence which is derived from a 3′UTR of an albumin gene, preferably a vertebrate albumin gene, more preferably a mammalian albumin gene, most preferably a human albumin gene according to SEQ ID NO: 4549 or the corresponding RNA sequence SEQ ID NO: 4550.

Human albumin 3′UTR SEQ ID NO: 4549:
CATCACATTTAAAAGCATCTCAGCCTACCATGAGAATAAGAGAAAGAAAA
TGAAGATCAAAAGCTTATTCATCTGTTTTTCTTTTTCGTTGGTGTAAAGC
CAACACCCTGTCTAAAAAACATAAATTTCTTTAATCATTTTGCCTCTTTT
CTCTGTGCTTCAATTAATAAAAAATGGAAAGAATCT
(corresponding to SEQ ID NO: 1369 of the patent
application W02013/143700 ).

[0231] In this context it is particularly preferred that the RNA according to the invention comprises a 3′-UTR element comprising a corresponding RNA sequence derived from the nucleic acids according to SEQ ID NO:1369-1390 of the patent application WO2013/143700 or a fragment, homolog or variant thereof.

[0232] Most preferably the 3′-UTR element comprises the nucleic acid sequence derived from a fragment of the human albumin gene according to SEQ ID NO: SEQ ID NO: 4551 or SEQ ID NO: 4553:

albumin7 3′UTR
CATCACATTTAAAAGCATCTCAGCCTACCATGAGAATAAGAGAAAGAAAA
TGAAGATCAATAGCTTATTCATCTCTTTTTCTTTTTCGTTGGTGTAAAGC
CAACACCCTGTCTAAAAAACATAAATTTCTTTAATCATTTTGCCTCTTTT
CTCTGTGCTTCAATTAATAAAAAATGGAAAGAACCT
(SEQ ID NO: 4551 corresponding to SEQ ID No: 1376
of the patent application W02013/143700)

[0233] In this context, it is particularly preferred that the 3′-UTR element of the RNA according to the present invention comprises or consists of a corresponding RNA sequence of the nucleic acid sequence according to SEQ ID NO: 4551 or SEQ ID NO: 4553 as shown in SEQ ID NO: 4552 or SEQ ID NO: 4554.

[0234] In another particularly preferred embodiment, the 3′UTR element comprises or consists of a nucleic acid sequence which is derived from a 3′UTR of an α-globin gene, preferably a vertebrate α- or β-globin gene, more preferably a mammalian α- or β-globin gene, most preferably a human α- or β-globin gene according to SEQ ID NO: 4541, SEQ ID NO: 4543 or SEQ ID NO: 4545 or the corresponding RNA sequences SEQ ID NO: 4542, SEQ ID NO: 4544 or SEQ ID NO: 4546. SEQ ID NO: 3543, 3536 or 3538:

3′-UTR of Homo sapiens hemoglobin, alpha 1 (HBAI)
GCTGGAGCCTCGGTGGCCATGCTTCTTGCCCCTTGGGCCTCCCCCCAGCC
CCTCCTCCCCTTCCTGCACCCGTACCCCCGTGGTCTTTGAATAAAGTCTG
AGTGGGCGGC
(SEQ ID NO: 4541 corresponding to SEQ ID NO: 1370
of the patent application W02013/143700)
3′-UTR of Homo sapiens hemoglobin, alpha 2 (HBA2)
GCTGGAGCCTCGGTAGCCGTTCCTCCTGCCCGCTGGGCCTCCCAACGGGC
CCTCCTCCCCTCCTTGCACCGGCCCTTCCTGGTCTTTGAATAAAGTCTGA
GTGGGCAG
(SEQ ID NO: 4543 corresponding to SEQ ID NO: 1371
of the patent application W02013/143700)
3′-UTR of Homo sapiens hemoglobin, beta (HBB)
GCTCGCTTTCTTGCTGTCCAATTTCTATTAAAGGTTCCTTTGTTCCCTAA
GTCCAACTACTAAACTGGGGGATATTATGAAGGGCCTTGAGCATCTGGAT
TCTGCCTAATAAAAAACATTTATTTTCATTGC
(SEQ ID NO: 4545 corresponding to SEQ ID NO: 1372
of the patent application W02013/143700)

[0235] For example, the 3′UTR element may comprise or consist of the center, α-complex-binding portion of the 3′UTR of an α-globin gene, such as of a human α-globin gene, or a homolog, a fragment, or a variant of an α-globin gene, preferably according to SEQ ID NO: 4547:

Center, α-complex-binding portion of the 3′UTR of
an α-globin gene (also named herein as “muag”)
GCCCGATGGGCCTCCCAACGGGCCCTCCTCCCCTCCTTGCACCG
(SEQ ID NO: 4547 corresponding to SEQ ID NO: 1393
of the patent application W02013/143700).

[0236] In this context it is particularly preferred that the 3′-UTR element of the RNA according to the invention comprises or consists of a corresponding RNA sequence of the nucleic acid sequence according to SEQ ID NO: 4547 as shown in SEQ ID NO: 4548, or a homolog, a fragment or variant thereof.

[0237] The term ‘a nucleic acid sequence which is derived from the 3′UTR of a [ . . . ] gene’ preferably refers to a nucleic acid sequence which is based on the 3′UTR sequence of a [ . . . ] gene or on a part thereof, such as on the 3′UTR of an albumin gene, an α-globin gene, a β-globin gene, a tyrosine hydroxylase gene, a lipoxygenase gene, or a collagen alpha gene, such as a collagen alpha I(I) gene, preferably of an albumin gene or on a part thereof. This term includes sequences corresponding to the entire 3′UTR sequence, i.e. the full length 3′UTR sequence of a gene, and sequences corresponding to a fragment of the 3′UTR sequence of a gene, such as an albumin gene, α-globin gene, β-globin gene, tyrosine hydroxylase gene, lipoxygenase gene, or collagen alpha gene, such as a collagen alpha I(I) gene, preferably of an albumin gene.

[0238] The term ‘a nucleic acid sequence which is derived from a variant of the 3′UTR of a [ . . . ] gene’ preferably refers to a nucleic acid sequence, which is based on a variant of the 3′UTR sequence of a gene, such as on a variant of the 3′UTR of an albumin gene, an α-globin gene, a β-globin gene, a tyrosine hydroxylase gene, a lipoxygenase gene, or a collagen alpha gene, such as a collagen alpha I(I) gene, or on a part thereof as described above. This term includes sequences corresponding to the entire sequence of the variant of the 3′UTR of a gene, i.e. the full length variant 3′UTR sequence of a gene, and sequences corresponding to a fragment of the variant 3′UTR sequence of a gene. A fragment in this context preferably consists of a continuous stretch of nucleotides corresponding to a continuous stretch of nucleotides in the full-length variant 3′UTR, which represents at least 20%, preferably at least 30%, more preferably at least 40%, more preferably at least 50%, even more preferably at least 60%, even more preferably at least 70%, even more preferably at least 80%, and most preferably at least 90% of the full-length variant 3′UTR. Such a fragment of a variant, in the sense of the present invention, is preferably a functional fragment of a variant as described herein.

[0239] In a particularly preferred embodiment, the at least one mRNA of the inventive composition comprises at least one 5′-untranslated region element (5′UTR element). Preferably, the at least one 5′UTR element comprises or consists of a nucleic acid sequence, which is derived from the 5′UTR of a TOP gene or which is derived from a fragment, homolog or variant of the 5′UTR of a TOP gene.

[0240] It is particularly preferred that the 5′UTR element does not comprise a TOP-motif or a 5′TOP, as defined above.

[0241] In some embodiments, the nucleic acid sequence of the 5′HTR element, which is derived from a 5′HTR of a TOP gene, terminates at its 3′-end with a nucleotide located at position 1, 2, 3, 4, 5, 5, 7, 8, 9 or 10 upstream of the start codon (e.g. A(U/T)R) of the gene or mRNA it is derived from. Thus, the 5′HTR element does not comprise any part of the protein coding region. Thus, preferably, the only protein coding part of the at least one mRNA of the inventive composition is provided by the coding region.

[0242] The nucleic acid sequence derived from the 5′HTR of a TOP gene is preferably derived from a eukaryotic TOP gene, preferably a plant or animal TOP gene, more preferably a chordate TOP gene, even more preferably a vertebrate TOP gene, most preferably a mammalian TOP gene, such as a human TOP gene.

[0243] For example, the 5′HTR element is prefereably selected from 5′-HTR elements comprising or consisting of a nucleic acid sequence, which is derived from a nucleic acid sequence selected from the group consisting of SEQ ID Nos: 1-1363, SEQ ID NO: 1395, SEQ ID NO: 1421 and SEQ ID NO: 1422 of the patent application WO2013/143700, whose disclosure is incorporated herein by reference, from the homologs of SEQ ID NOs: 1-1363, SEQ ID NO: 1395, SEQ ID NO: 1421 and SEQ ID NO: 1422 of the patent application WO2013/143700, from a variant thereof, or preferably from a corresponding RNA sequence. The term “homologs of SEQ ID NOs: 1-1363, SEQ ID NO: 1395, SEQ ID NO: 1421 and SED ID NO: 1422 of the patent application WO2013/143700” refers to sequences of other species than Homo sapiens, which are homologous to the sequences according to SEQ ID NOs: 1-1363, SEQ ID NO: 1395, SEQ ID NO: 1421 and SEQ ID NO: 1422 of the patent application WO2013/143700.

[0244] In a preferred embodiment, the 5′HTR element of the RNA according to the invention comprises or consists of a nucleic acid sequence, which is derived from a nucleic acid sequence extending from nucleotide position 5 (i.e. the nucleotide that is located at position 5 in the sequence) to the nucleotide position immediately 5′ to the start codon (located at the 3′ end of the sequences), e.g. the nucleotide position immediately 5′ to the ATG sequence, of a nucleic acid sequence selected from SEQ ID NOs: 1-1363, SEQ ID NO: 1395, SEQ ID NO: 1421 and SEQ ID NO: 1422 of the patent application WO2013/143700, from the homologs of SEQ ID NOs: 1-1363, SEQ ID NO: 1395, SEQ ID NO: 1421 and SEQ ID NO: 1422 of the patent application WO2013/143700 from a variant thereof, or a corresponding RNA sequence. It is particularly preferred that the 5′ UTR element is derived from a nucleic acid sequence extending from the nucleotide position immediately 3′ to the 5′TOP to the nucleotide position immediately 5′ to the start codon (located at the 3′ end of the sequences), e.g. the nucleotide position immediately 5′ to the ATG sequence, of a nucleic acid sequence selected from SEQ ID NOs: 1-1363, SEQ ID NO: 1395, SEQ ID NO: 1421 and SEQ ID NO: 1422 of the patent application WO2013/143700, from the homologs of SEQ ID NO: 1-133, SEQ ID NO: 1395, SEQ ID NO: 1421 and SEQ ID NO: 1422 of the patent application WO2013/143700, from a variant thereof, or a corresponding RNA sequence.

[0245] In a particularly preferred embodiment, the 5′HTR element comprises or consists of a nucleic acid sequence, which is derived from a 5′HTR of a TOP gene encoding a ribosomal protein or from a variant of a 5′HTR of a TOP gene encoding a ribosomal protein. For example, the 5′HTR element comprises or consists of a nucleic acid sequence, which is derived from a 5′HTR of a nucleic acid sequence according to any of SEQ ID NOs: 57, 170, 193, 244, 259, 554, 650, 575, 700, 721, 913, 1016, 1063, 1120, 1138, and 1284-1360 of the patent application WO2013/143700, a corresponding RNA sequence, a homolog thereof, or a variant thereof as described herein, preferably lacking the 5′TOP motif. As described above, the sequence extending from position 5 to the nucleotide immediately 5′ to the ATG (which is located at the 3′end of the sequences) corresponds to the 5′UTR of said sequences.

[0246] Preferably, the 5′UTR element comprises or consists of a nucleic acid sequence, which is derived from a 5′UTR of a TOP gene encoding a ribosomal Large protein (RPL) or from a homolog or variant of a 5′UTR of a TOP gene encoding a ribosomal Large protein (RPL). For example, the 5′UTR element comprises or consists of a nucleic acid sequence, which is derived from a 5′UTR of a nucleic acid sequence according to any of SEQ ID NOs: 57, 259, 1284-1318, 1344, 1345, 1348-1354, 1357, 1358, 1421 and 1422 of the patent application WO2013/143700, a corresponding RNA sequence, a homolog thereof, or a variant thereof as described herein, preferably lacking the 5′TOP motif.

[0247] In a particularly preferred embodiment, the 5′UTR element comprises or consists of a nucleic acid sequence which is derived from the 5′UTR of a ribosomal protein Large 32 gene, preferably from a vertebrate ribosomal protein Large 32 (L32) gene, more preferably from a mammalian ribosomal protein Large 32 (L32) gene, most preferably from a human ribosomal protein Large 32 (L32) gene, or from a variant of the 5′UTR of a ribosomal protein Large 32 gene, preferably from a vertebrate ribosomal protein Large 32 (L32) gene, more preferably from a mammalian ribosomal protein Large 32 (L32) gene, most preferably from a human ribosomal protein Large 32 (L32) gene, wherein preferably the 5′UTR element does not comprise the 5′TOP of said gene.

[0248] Accordingly, in a particularly preferred embodiment, the 5′UTR element comprises or consists of a nucleic acid sequence, which has an identity of at least about 40%, preferably of at least about 50%, preferably of at least about 60%, preferably of at least about 70%, more preferably of at least about 80%, more preferably of at least about 90%, even more preferably of at least about 95%, even more preferably of at least about 99% to the nucleic acid sequence according to SEQ ID NO: 4537 or SEQ ID NO: 4538 (5′-UTR of human ribosomal protein Large 32 lacking the 5′terminal oligopyrimidine tract: GGCGCTCCTACGAGGTGGCAGCCATCTCCTTCTCGCATC (SEQ ID NO: 4537); corresponding to SEQ ID NO:1328 of the patent application WO2013/143700) or preferably to a corresponding RNA sequence, or wherein the at least one 5′UTR element comprises or consists of a fragment of a nucleic acid sequence which has an identity of at least about 40%, preferably of at least about 50%, preferably of at least about 50%, preferably of at least about 70%, more preferably of at least about 80%, more preferably of at least about 90%, even more preferably of at least about 95%, even more preferably of at least about 99% to the nucleic acid sequence according to SEQ ID NO: 4537 or more preferably to a corresponding RNA sequence (SEQ ID NO: 4538), wherein, preferably, the fragment is as described above, i.e. being a continuous stretch of nucleotides representing at least 20% etc. of the full-length 5′UTR. Preferably, the fragment exhibits a length of at least about 20 nucleotides or more, preferably of at least about 30 nucleotides or more, more preferably of at least about 40 nucleotides or more. Preferably, the fragment is a functional fragment as described herein.

[0249] In some embodiments, the RNA according to the invention comprises a 5′UTR element, which comprises or consists of a nucleic acid sequence, which is derived from the 5′HTR of a vertebrate TOP gene, such as a mammalian, e.g. a human TOP gene, selected from RPSA, RPS2, RPS3, RPS3A, RPS4, RPS5, RPS6, RPS7, RPS8, RPS9, RPS10, RPS11, RPS12, RPS13, RPS14, RPS15, RPS15A, RPS16, RPS17, RPS18, RPS19, RPS20, RPS21, RPS23, RPS24, RPS25, RPS26, RPS27, RPS27A, RPS28, RPS29, RPS30, RPL3, RPL4, RPL5, RPL6, RPL7, RPL7A, RPL8, RPL9, RPL10, RPL10A, RPL10, RPL12, RPL13, RPL13A, RPL14, RPL15, RPL17, RPL18, RPL18A, RPL19, RPL21, RPL22, RPL23, RPL23A, RPL24, RPL26, RPL27, RPL27A, RPL28, RPL29, RPL30, RPL31, RPL32, RPL34, RPL35, RPL35A, RPL36, RPL36A, RPL37, RPL37A, RPL38, RPL39, RPL40, RPL41, RPLP0, RPLP1, RPLP2, RPLP3, RPLP0, RPLP1, RPLP2, EEF1A1, EEF1B2, EEF10, EEF1G, EEF2, EIF3E, EIF3F, EIF3H, EIF2S3, EIF3, EIF3K, EIF3E1P, EIF4A2, PABPC1, HNRNPA1, TPT1, TUBB1, UBA52, NPM1, ATP5G2, GNB2L1, NME2, IDCR8, or from a homolog or variant thereof, wherein preferably the 5′UTR element does not comprise a TOP-motif or the 5′TOP of said genes, and wherein optionally the 5′UTR element starts at its 5′-end with a nucleotide located at position 1, 2, 3, 4, 5, 6, 7, 8, 9 or 10 downstream of the 5′terminal oligopyrimidine tract (TOP) and wherein further optionally the 5′UTR element which is derived from a 5′UTR of a TOP gene terminates at its 3′-end with a nucleotide located at position 1, 2, 3, 4, 5, 6, 7, 8, 9 or 10 upstream of the start codon (A(U/T)G) of the gene it is derived from.

[0250] In further particularly preferred embodiments, the 5′UTR element comprises or consists of a nucleic acid sequence, which is derived from the 5′UTR of a ribosomal protein Large 32 gene (RPL32), a ribosomal protein Large 35 gene (RPL35), a ribosomal protein Large 21 gene (RPL21), an ATP synthase, H+ transporting, mitochondrial F1 complex, alpha subunit 1, cardiac muscle (ATP5A1) gene, an hydroxysteroid (17-beta) dehydrogenase 4 gene (HSD17B4), an androgen-induced I gene (AIGI), cytochrome c oxidase subunit VIc gene (COX6C), or a N-acylsphingosine amidohydrolase (acid ceramidase) I gene (ASAHI) or from a variant thereof, preferably from a vertebrate ribosomal protein Large 32 gene (RPL32), a vertebrate ribosomal protein Large 35 gene (RPL35), a vertebrate ribosomal protein Large 21 gene (RPL21), a vertebrate ATP synthase, H+ transporting, mitochondrial F1 complex, alpha subunit 1, cardiac muscle (ATP5A1) gene, a vertebrate hydroxysteroid (17-beta) dehydrogenase 4 gene (HSD17B4), a vertebrate androgen-induced I gene (AIGI), a vertebrate cytochrome c oxidase subunit VIc gene (COX6C), or a vertebrate N-acylsphingosine amidohydrolase (acid ceramidase) I gene (ASAHI) or from a variant thereof, more preferably from a mammalian ribosomal protein Large 32 gene (RPL32), a ribosomal protein Large 35 gene (RPL35), a ribosomal protein Large 21 gene (RPL21), a mammalian ATP synthase, H+ transporting, mitochondrial F1 complex, alpha subunit 1, cardiac muscle (ATP5A1) gene, a mammalian hydroxysteroid (17-beta) dehydrogenase 4 gene (HSD17B4), a mammalian androgen-induced I gene (AIGI), a mammalian cyto-chrome c oxidase subunit Vlc gene (COX6C), or a mammalian N-aoylsphingosine ami-dnhydrolaso (acid ceramidase) I gene (ASAHI) or from a variant thereof, most preferably from a human ribosomal protein Large 32 gene (RPL32), a human ribosomal protein Large 35 gene (RPL35), a human ribosomal protein Large 21 gene (RPL21), a human ATP synthase, H+ transporting, mitochondrial F1 complex, alpha subunit 1, cardiac muscle (ATP5A1) gene, a human hydroxysteroid (17-beta) dehydrogenase 4 gene (HSD17B4), a human androgen-induced I gene (AIGI), a human Cytochrome c oxidase subunit VIc gene (COX6C), or a human N-acylsphingosine amidohydrolase (acid ceramidase) I gene (ASAHI) or from a variant thereof, wherein preferably the 5′UTR element does not comprise the 5′TOP of said gene.

[0251] Accordingly, in a particularly preferred embodiment, the 5′UTR element comprises or consists of a nucleic acid sequence, which has an identity of at least about 40%, preferably of at least about 50%, preferably of at least about 60%, preferably of at least about 70%, more preferably of at least about 80%, more preferably of at least about 90%, even more preferably of at least about 95%, even more preferably of at least about 99% to the nucleic acid sequence according to SEQ ID NO: 136S, or SEQ ID NOs: 1412-1420 of the patent application WO2013/143700, or a corresponding RNA sequence, or wherein the at least one 5′UTR element comprises or consists of a fragment of a nucleic acid sequence which has an identity of at least about 40%, preferably of at least about 50%, preferably of at least about 60%, preferably of at least about 70%, more preferably of at least about 80%, more preferably of at least about 90%, even more preferably of at least about 95%, even more preferably of at least about 99% to the nucleic acid sequence according to SEQ ID NO: 136S, or SEQ ID NOs: 1412-1420 of the patent application WO2013/143700, wherein, preferably, the fragment is as described above, i.e. being a continuous stretch of nucleotides representing at least 20% etc. of the full-length 5′UTR. Preferably, the fragment exhibits a length of at least about 20 nucleotides or more, preferably of at least about 30 nucleotides or more, more preferably of at least about 40 nucleotides or more. Preferably, the fragment is a functional fragment as described herein.

[0252] Accordingly, in a particularly preferred embodiment, the 5′UTR element comprises or consists of a nucleic acid sequence, which has an identity of at least about 40%, preferably of at least about 50%, preferably of at least about 60%, preferably of at least about 70%, more preferably of at least about 80%, more preferably of at least about 90%, even more preferably of at least about 95%, even more preferably of at least about 99% to tha nucleic acid sequence according to SEQ ID NO: 4539 or SEQ ID NO: 4540 (5′-UTR of ATP5A1 lacking the 5′ terminal oligopyrimidine tract: GCGGCTCGGCCATTTTGTCAGTCAGTCCGGAGGCTGCGGCTGCAGAAGTACCGCCTGCG-GAGTAACTGCAAAG (SEQ ID NO: 4539); corresponding to SEQ ID No. 1414 of the patent application WO2013/143700) or preferably to a corresponding RNA sequence, or wherein the at least one 5′UTR element comprises or consists of a fragment of a nucleic acid sequence which has an identity of at least about 40%, preferably of at least about 50%, preferably of at least about 60%, preferably of at least about 70%, more preferably of at least about 80%, more preferably of at least about 90%, even more preferably of at least about 95%, even more preferably of at least about 99% to the nucleic acid sequence according to SEQ ID NO: 4539 or more preferably to a corresponding RNA sequence (SEQ ID NO: 4540), wherein, preferably, the fragment is as described above, i.e. being a continuous stretch of nucleotides representing at least 20% etc. of the full-length 5′UTR. Preferably, the fragment exhibits a length of at least about 20 nucleotides or more, preferably of at least about 30 nucleotides or more, more preferably of at least about 40 nucleotides or more. Preferably, the fragment is a functional fragment as described herein.

[0253] Preferably, the at least one 5′UTR element and the at least one 3′UTR element act synergistically to increase protein production from the at least one mRNA of the inventive composition as described above.

[0254] In a particularly preferred embodiment, the RNA according to the invention comprises a histone stem-loop sequence/structure. Such histone stem-loop sequences are preferably selected from histone stem-loop sequences as disclosed in WO 2012/019780, the disclosure of which is incorporated herewith by reference.

[0255] A histone stem-loop sequence, suitable to be used within the present invention, is preferably selected from at least one of the following formulae (I) or (II):

Formula (I) (Stem-Loop Sequence without Stem Bordering Elements):

[chemical structure]

Formula (II) (Stem-Loop Sequence with Stem Bordering Elements):

[chemical structure]

wherein:

| | |
|---|---|
| stem1 or stem2 bordering elements N₁₋₆ | is a consecutive sequence of 1 to 6, preferably of 2 to 6, more preferably of |
| | 2 to 5, even more preferably of 3 to 5, most preferably of 4 to 5 or 5N, |
| | wherein each N is independently from another selected from a nucleotide |
| | selected from A, U, T, G and C, or a nucleotide analogue thereof: |
| stem1 [N₀₋₂GN₃₋₅] | is reverse complementary or partially reverse complementary with element |
| | stem2, and is a consecutive sequence between of 5 to 7 nucleotides; |
| | wherein N₀₋₂ is a consecutive sequence of 0 to 2, preferably of 0 to 1, more |
| | preferably of 1N, wherein each N is independently from another selected |
| | from a nucleotide selected from A, U, T, G and C or a nucleotide analogue |
| | thereof; |
| | wherein N₃₋₅ is a consecutive sequence of 3 to 5, preferably of 4 to 5, more |
| | preferably of 4N, wherein each N is independently from another selected |
| | from a nucleotide selected from A, U, T, G and C or a nucleotide analogue |
| | thereof, and |
| | wherein G is guanosine or an analogue thereof, and may be optionally |
| | replaced by a cytidine or an analogue thereof, provided that its |
| | complementary nucleotide cytidine in stem2 is replaced by guanosine; |
| loop sequence [N₀₋₄(U/T)N₀₋₄] | is located between elements stem1 and stem2, and is a consecutive |
| | sequence of 3 to 5 nucleotides, more preferably of 4 nucleotides; |
| | wherein each N₀₋₄ is independent from another a consecutive sequence of 0 |
| | to 4, preferably of 1 to 3, more preferably of 1 to 2N, wherein each N is |
| | independently from another selected from a nucleotide selected from A, U, |
| | T, G and C or a nucleotide analogue thereof; and |
| | wherein U/T represents uridine, or optionally thymidine; |
| stem2 [N₃₋₅CN₀₋₂] | is reverse complementary or partially reverse complementary with element |
| | stem1, and is a consecutive sequence between of 5 to 7 nucleotides; |
| | wherein N₃₋₅ is a consecutive sequence of 3 to 5, preferably of 4 to 5, more |
| | preferably of 4N, wherein each N is independently from another selected |
| | from a nucleotide selected from A, U, T, G and C or a nucleotide analogue |
| | thereof; |
| | wherein N₀₋₂ is a consecutive sequence of 0 to 2, preferably of 0 to 1, more |
| | preferably of 1N, wherein each N is independently from another selected |
| | from a nucleotide selected from A, U, T, G or C or a nucleotide analogue |
| | thereof; and |
| | wherein C is cytidine or an analogue thereof, and may be optionally replaced |
| | by a guanosine or an analogue thereof provided that its complementary |
| | nucleoside guanosine in stem1 is replaced by cytidine; |

wherein
[0256] stem1 and stem2 are capable of base pairing with each other forming a reverse complementary sequence, wherein base pairing may occur between stem1 and stem2, e.g. by Watson-Crick base pairing of nucleotides A and H/T or G and C or by non-Watson-Crick base pairing e.g. wobble base pairing, reverse Watson-Crick base pairing, Hoogsteen base pairing, reverse Hoogsteen base pairing or are capable of base pairing with each other forming a partially reverse complementary sequence, wherein an incomplete base pairing may occur between stem1 and stem2, on the basis that one are more bases in one stem do not have a complementary base in the reverse complementary sequence of the other stem.

[0257] According to a further preferred embodiment, the RNA according to the invention may comprise at least one histone stem-loop sequence according to at least one of the following specific formulae (Ia) or (IIa):

Formula (Ia) (Stem-Loop Sequence without Stem Bordering Elements):

[chemical structure]

Formula (IIa) (Stem-Loop Sequence with Stem Bordering Elements):

[chemical structure]

wherein:
[0258] N, C, G, T and U are as defined above.

[0259] According to a furthermore particularly preferred embodiment, the RNA according to the invention may comprise at least one histone stem-loop sequence according to at least one of the following specific formulae (Ib) or (IIb):

Formula (Ib) (Stem-Loop Sequence without Stem Bordering Elements):

[chemical structure]

formula (IIb) (stem-loop sequence with stem bordering elements):

[chemical structure]

wherein:
[0260] N, C, G, T and U are as defined above.

[0261] A particularly preferred histone stem-loop sequence is the sequence CAAAGGCTCTTTTCAGAGCCACCA (according to SEQ ID NO: 4555) or more preferably the corresponding RNA sequence CAAAGGCUCUUUUCAGAGCCACCA (according to SEQ ID NO: 4556).

[0262] According to another particularly preferred embodiment, the RNA according to the invention may additionally or alternatively encode a secretory signal peptide. Such signal peptides are sequences, which typically exhibit a length of about 15 to 30 amino acids and are preferably located at the N-terminus of the encoded peptide, without being limited thereto. Signal peptides as defined herein preferably allow the transport of the antigen, antigenic protein or antigenic peptide as encoded by the at least one mRNA of the composition into a defined cellular compartiment, preferably the cell surface, the endoplasmic reticulum (ER) or the endosomal-lysosomal compartiment. Examples of secretary signal peptide sequences as defined herein include, without being limited thereto, signal sequences of classical or non-classical MHC-molecules (e.g. signal sequences of MHC I and II molecules, e.g. of the MHC class I molecule HLA-A*0201), signal sequences of cytokines or immunoglobulines as defined herein, signal sequences of the invariant chain of immunoglobulines or antibodies as defined herein, signal sequences of Lampi, Tapasin, Erp57, Calretikulin, Calnexin, and further membrane associated proteins or of proteins associated with the endoplasmic reticulum (ER) or the endosomal-lysosomal compartiment. Most preferably, signal sequences of MHC class I molecule HLA-A*0201 may be used according to the present invention. For example, a signal peptide derived from HLA-A is preferably used in order to promote secretion of the encoded antigen as defined herein or a fragment or variant thereof. More preferably, an HLA-A signal peptide is fused to an encoded antigen as defined herein or to a fragment or variant thereof:

[0263] Any of the above modifications may be applied to the RNA of the present invention, and further to any RNA as used in the context of the present invention and may be, if suitable or necessary, be combined with each other in any combination, provided, these combinations of modifications do not interfere with each other in the respective at least one mRNA. A person skilled in the art will be able to take his choice accordingly.

[0264] The RNA, preferably an mRNA, according to the invention, which comprises at least one coding sequence as defined herein, may preferably comprise a 5′ HTR and/or a 3′ HTR preferably containing at least one histone stem-loop. Where, in addition to the antigen as defined herein or a fragment or variant thereof, a further peptide or protein is encoded by the at least one coding sequence of the RNA according to the invention, the encoded peptide or protein is preferably no histone protein, no reporter protein and/or no marker or selection protein, as defined herein. The 3′ HTR of the RNA according to the invention preferably comprises also a poly(A) and/or a poly(C) sequence as defined herein. The single elements of the 3′ HTR may occur therein in any order from 5′ to 3′ along the sequence of the RNA of the present invention. In addition, further elements as described herein, may also be contained, such as a stabilizing sequence as defined herein (e.g. derived from the HTR of a globin gene), IRES sequences, etc. Each of the elements may also be repeated in the RNA according to the invention at least once (particularly in di- or multicistronic constructs), preferably twice or more. As an example, the single elements may be present in the RNA according to the invention in the following order:
[0265] 5′-coding region-histone stem-loop-poly(A)/(C) sequence-3′; or
[0266] 5′-coding region-poly(A)/(C) sequence-histone stem-loop-3′; or
[0267] 5′-coding region-histone stem-loop-polyadenylation signal-3′; or
[0268] 5′-coding region-polyadenylation signal-histone stem-loop-3′; or
[0269] 5′-coding region-histone stem-loop-histone stem-loop-poly(A)/(C) sequence-3′; or
[0270] 5′-coding region-histone stem-loop-histone stem-loop-polyadenylation signal-3′; or
[0271] 5′-coding region-stabilizing sequence-poly(A)/(C) sequence-histone stem-loop-3′; or
[0272] 5′-coding region-stabilizing sequence-poly(A)/(C) sequence-poly(A)/(C) sequence-histone stem-loop-3′; etc.

[0273] According to a further embodiment, the RNA, preferably an mRNA, of the present invention preferably comprises at least one of the following structural elements: a 5′- and/or 3′-untranslated region element (HTR element), particularly a 5′-HTR element, which preferably comprises or consists of a nucleic acid sequence which is derived from the 5′-UTR of a TOP gene or from a fragment, homolog or a variant thereof, or a 5′- and/or 3′-HTR element which may preferably be derivable from a gene that provides a stable mRNA or from a homolog, fragment or variant thereof; a histone-stem-loop structure, preferably a histone-stem-loop in its 3′ untranslated region; a 5′-cap structure; a poly-A tail; or a poly(C) sequence.

[0274] According to some embodiments, it is particularly preferred that—if, in addition to an antigen as defined herein or a fragment or variant thereof, a further peptide or protein is encoded by the at least one coding sequence as defined herein—the encoded peptide or protein is preferably no histone protein, no reporter protein (e.g. Luciferase, GFP, EGFP, β-Galactosidase, particularly EGFP) and/or no marker or selection protein (e.g. alpha-Globin, Galactokinase and Xanthine:Guanine phosphoribosyl transferase (GPT)). In a preferred embodiment, the RNA according to the invention does not comprise a reporter gene or a marker gene. Preferably, the RNA according to the invention does not encode, for instance, luciferase; green fluorescent protein (GFP) and its variants (such as eGFP, RFP or BFP); α-globin; hypoxanthine-guanine phosphoribosyltransferase (HGPRT); β-galactosidase; galactokinase; alkaline phosphatase; secreted embryonic alkaline phosphatase (SEAP)) or a resistance gene (such as a resistance gene against neomycin, puromycin, hygromycin and zeocin). In a preferred embodiment, the RNA according to the invention does not encode luciferase. In another embodiment, the RNA according to the invention does not encode GFP or a variant thereof.

[0275] According to a preferred embodiment, the RNA according to the present invention comprises, preferably in 5′ to 3′ direction, the following elements:
[0276] a) a 5′-CAP structure, preferably m7GpppN,
[0277] b) at least one coding sequence comprising or consisting of any one of the nucleic acid sequences defined in the fifth column (column ‘C’) of Table 1, or a fragment or variant thereof,
[0278] c) a poly(A) tail, preferably consisting of 10 to 200, 10 to 100, 40 to 80 or 50 to 70 adenosine nucleotides,
[0279] d) a poly(C) tail, preferably consisting of 10 to 200, 10 to 100, 20 to 70, 20 to 60 or 10 to 40 cytosine nucleotides, and
[0280] e) a histone stem-loop, preferably comprising the RNA sequence according to SEQ ID NO: 4556.

[0281] More preferably, the RNA according to the invention comprises, preferably in 5′ to 3′ direction, the following elements:
[0282] a) a 5′-CAP structure, preferably m7GpppN,
[0283] b) at least one coding sequence comprising or consisting of any one of the nucleic acid sequences defined in the fifth column (column ‘C’) of Table 1, or a fragment or variant thereof,
[0284] c) a 3′-UTR element comprising a nucleic acid sequence, which is derived from an α-globin gene, preferably comprising the corresponding RNA sequence of the nucleic acid sequence according to SEQ ID NO: 4547, or a homolog, a fragment or a variant thereof,
[0285] d) a poly(A) tail, preferably consisting of 10 to 200, 10 to 100, 40 to 80 or 50 to 70 adenosine nucleotides,
[0286] e) a poly(C) tail, preferably consisting of 10 to 200, 10 to 100, 20 to 70, 20 to 60 or 10 to 40 cytosine nucleotides, and
[0287] f) a histone stem-loop, preferably comprising the RNA sequence according to SEQ ID NO: 4556.

[0288] In a further embodiment, the RNA according to the invention comprises, preferably in 5′ to 3′ direction, the following elements:
[0289] a) a 5′-CAP structure, preferably m7GpppN,
[0290] b) a 5′-HTR element, which preferably comprises or consists of a nucleic acid sequence, which is derived from the 5′-HTR of a TOP gene, preferably comprising an RNA sequence corresponding to the nucleic acid sequence according to SEQ ID NO: 4537, or a homolog, a fragment or a variant thereof,
[0291] c) at least one coding sequence comprising or consisting of any one of the nucleic acid sequences defined in the fifth column (column ‘C’) of Table 1, or a fragment or variant thereof,
[0292] d) a 3′-UTR element comprising a nucleic acid sequence, which is preferably derived from an α-globin gene, preferably comprising the corresponding RNA sequence of the nucleic acid sequence according to SEQ ID NO: 4547, or a homolog, a fragment or a variant thereof; and/or
   [0293] a 3′-UTR element comprising a nucleic acid sequence, which is derived from an albumin gene, preferably comprising the corresponding RNA sequence of the nucleic acid sequence according to SEQ ID NO: 4551, or a homolog, a fragment or a variant thereof,
[0294] e) a poly(A) tail, preferably consisting of 10 to 200, 10 to 10D, 40 to 80 or 50 to 70 adenosine nucleotides,
[0295] f) a poly(C) tail, preferably consisting of 10 to 200, 10 to 100, 20 to 70, 20 to 60 or 10 to 40 cytosine nucleotides, and
[0296] g) a histone stem-loop, preferably comprising the RNA sequence according to SEQ ID NO: 4556.

[0297] The RNA according to the present invention may be prepared using any method known in the art, including synthetic methods such as e.g. solid phase RNA synthesis, as well as in vitro methods, such as RNA in vitro transcription reactions.

[0298] In a further aspect, the present invention concerns a composition comprising the RNA comprising at least one coding sequence as defined herein and a pharmaceutically acceptable carrier. The composition according to the invention is preferably provided as a pharmaceutical composition or as a vaccine.

[0299] According to a preferred embodiment, the (pharmaceutical) composition or the vaccine according to the invention comprises the RNA of the present invention, wherein the at least one coding sequence of the RNA encodes any one of the tumor antigens as defined in Table I, preferably as defined in the first (‘ene Name’), second (Protein Accession No.’) or third column (‘A’) of Table 1, or a fragment or variant of any one of these antigens.

[0300] Preferably, the (pharmaceutical) composition or the vaccine according to the invention comprises the RNA of the present invention, wherein the at least one coding sequence of the RNA comprises or consists of a nucleic acid sequence encoding a tumor antigen, or a fragment or variant of a tumor antigen, wherein the tumor antigen preferably comprises or consists of any one of the amino acid sequences defined in Table 1 herein, preferably in the third column (column ‘A’) of Table 1, or a fragment or variant of any one of these sequences.

[0301] Preferably, the (pharmaceutical) composition or the vaccine according to the invention comprises the RNA of the present invention, wherein the at least one coding sequence of the RNA comprises or consists of a nucleic acid sequence encoding a tumor antigen, or a fragment or variant of a tumor antigen, wherein the tumor antigen preferably comprises or consists of an amino acid sequence having a sequence identity of at least 5%, 10%, 20%, 30%, 40%, 50%, 60%, 70%, 80%, 85%, 86%, 87%, 88%, 89%, 90%, 91%, 92%, 93%, 94%, 95%, 95%, 97%, 98%, or 99%, preferably of at least 70%, more preferably of at least 80%, even more preferably at least 85%, even more preferably of at least 90% and most preferably of at least 95% or even 97%, with any one of the amino acid sequences defined in Table 1 herein, preferably in the third column (column ‘A’) of Table 1, or a fragment or variant of any one of these sequences.

[0302] More preferably, the (pharmaceutical) composition or the vaccine according to the invention comprises the RNA of the present invention, wherein the at least one coding sequence of the RNA comprises or consists of a nucleic acid sequence encoding a tumor antigen, or a fragment or variant of a tumor antigen, wherein the tumor antigen preferably comprises or consists of an amino acid sequence having a sequence identity of at least 80% with any one of the amino acid sequences defined in Table 1 heroin, preferably in the third column (column ‘A’) of Table 1, or a fragment or variant of any one of these sequences.

[0303] In preferred embodiments, the (pharmaceutical) composition or the vaccine according to the invention comprises the RNA of the present invention, wherein the at least one coding sequence of the RNA comprises or consists of any one of the nucleic acid sequences defined in Table 1, preferably in the fourth or fifth column (column ‘B’ or ‘C’, respectively) of Table 1, or a fragment or variant of any one of these sequences.

[0304] According to another embodiment, the (pharmaceutical) composition or the vaccine according to the invention comprises the RNA of the present invention, wherein the at least one coding sequence of the RNA comprises or consists of a nucleic acid sequence having a sequence identity of at least 5%, 10%, 20%, 30%, 40%, 50%, 60%, 70%, 80%, 85%, 86%, 87%, 88%, 89%, 90%, 91%, 92%, 93%, 94%, 95%, 96%, 97%, 98%, or 99%, preferably of at least 70%, more preferably of at least 80%, even more preferably at least 85%, even more preferably of at least 90% and most preferably of at least 95% or even 97%, with any one of the nucleic acid sequences defined in Table 1, preferably in the fourth or fifth column (column ‘B’ or ‘C’, respectively) of Table 1, or a fragment or variant of any one of these sequences.

[0305] According to a particularly preferred embodiment, the (pharmaceutical) composition or the vaccine according to the invention comprises the RNA of the present invention, wherein the at least one coding sequence of the RNA comprises or consists of a nucleic acid sequence having a sequence identity of at least 80% with any one of the nucleic acid sequences defined in Table 1, preferably in the fourth or fifth column (column ‘B’ or ‘C’, respectively) of Table 1, or a fragment or variant of any one of these sequences.

[0306] More preferably, the (pharmaceutical) composition or the vaccine according to the invention comprises the RNA of the present invention, wherein the at least one coding sequence of the RNA comprises or consists of any one of the nucleic acid sequences defined in the fifth column (‘C’) of Table 1, or a fragment or variant of any one of these sequences.

[0307] According to a further embodiment, the (pharmaceutical) composition or the vaccine according to the invention comprises the RNA of the present invention, wherein the at least one coding sequence of the RNA comprises or consists of a nucleic acid sequence having a sequence identity of at least 5%, 10%, 20%, 30%, 40%, 50%, 60%, 70%, 80%, 85%, 86%, 87%, 88%, 89%, 90%, 91%, 92%, 93%, 94%, 95%, 96%, 97%, 98%, or 99%, preferably of at least 70%, more preferably of at least 80%, even more preferably at least 85%, even more preferably of at least 90% and most preferably of at least 95% or even 97%, with any one of the nucleic acid sequences defined in the fifth column (‘C’) of Table 1, or a fragment or variant of any one of these sequences.

[0308] According to a particularly preferred embodiment, the (pharmaceutical) composition or the vaccine according to the invention comprises the RNA of the present invention, wherein the at least one coding sequence of the RNA comprises or consists of a nucleic acid sequence having a sequence identity of at least 80% with any one of the nucleic acid sequences defined in the fifth column (‘C’) of Table 1, or a fragment or variant of any one of these sequences.

[0309] In the context of the present invention, the (pharmaceutical) composition or vaccine may encode one or more of the tumor antigens defined herein or a fragment or variant thereof.

[0310] The (pharmaceutical) composition or vaccine according to the invention may thus comprise the RNA of the present invention, wherein the RNA encodes one specific antigen of the antigens defined herein or a fragment or a variant thereof. In that embodiment, the (pharmaceutical) composition or vaccine preferably comprises the RNA according to the invention comprising the at least one coding sequence as defined herein encoding the antigen or a fragment or variant thereof.

[0311] Alternatively, the (pharmaceutical) composition or vaccine of the present invention may comprise at least one RNA according to the invention, wherein the at least one RNA encodes at least two, three, four, five, six, seven, eight, nine, ten, eleven or twelve distinct antigens as defined herein or a fragment or variant thereof. Preferably, the (pharmaceutical) composition or vaCcine comprises several classes of the RNA according to the invention, wherein each RNA species encodes one of the antigens or a fragment or variant thereof. In another embodiment, the RNA comprised in the (pharmaceutical) composition or vaccine is a bi- or multicistronic RNA as defined herein, which encodes the at least two, three, four, five, six, seven, eight, nine, ten, eleven or twelve distinct antigens. Mixtures between these embodiments are also envisaged, such as compositions comprising more than one RNA species, wherein at least one RNA species may be monocistronic, while at least one other RNA species may be bi- or multicistronic.

[0312] The (pharmaceutical) composition or vaccine according to the present invention, preferably the at least one coding sequence of the RNA comprised therein, may thus comprise any combination of the nucleic acid sequences as defined herein.

[0313] In a preferred embodiment of the composition according to the invention, the RNA is complexed with one or more cationic or polycationic compounds, preferably with cationic or polycationic polymers, cationic or polycationic peptides or proteins, e.g. protamine, cationic or polycationic polysaccharides and/or cationic or polycationic lipids.

[0314] According to a preferred embodiment, the RNA of the composition according to the present invention may be complexed with lipids to form one or more liposomes, lipoplexes, or lipid nanoparticles. Therefore, in one embodiment, the inventive composition comprises liposomes, lipoplexes, and/or lipid nanoparticles comprising the at least one mRNA.

[0315] Lipid-based formulations have been increasingly recognized as one of the most promising delivery systems for RNA due to their biocompatibility and their ease of large-scale production. Cationic lipids have been widely studied as synthetic materials for delivery of RNA. After mixing together, nucleic acids are condensed by cationic lipids to form lipid/nucleic acid complexes known as lipoplexes. These lipid complexes are able to protect genetic material from the action of nucleases and deliver it into cells by interacting with the negatively charged cell membrane. Lipoplexes can be prepared by directly mixing positively charged lipids at physiological pH with negatively charged nucleic acids.

[0316] Conventional liposomes consist of a lipid bilayer that can be composed of cationic, anionic, or neutral (phospho)lipids and cholesterol, which encloses an aqueous core. Both the lipid bilayer and the aqueous space can incorporate hydrophobic or hydrophilic compounds, respectively. Liposome characteristics and behaviour in vivo can be modified by addition of a hydrophilic polymer coating, e.g. polyethylene glycol (PEG), to the liposome surface to confer steric stabilization. Furthermore, liposomes can be used for specific targeting by attaching ligands (e.g., antibodies, peptides, and carbohydrates) to its surface or to the terminal end of the attached PEG chains (Front Pharmacol. 2015 Doc 1:6:286).

[0317] Liposomes are colloidal lipid-based and surfactant-based delivery systems composed of a phospholipid bilayer surrounding an aqueous compartment. They may present as spherical vesicles and can range in size from 20 nm to a few microns. Cationic lipid-based liposomes are able to complex with negatively charged nucleic acids via electrostatic interactions, resulting in complexes that offer biocompatibility, low toxicity, and the possibility of the large-scale production required for in vivo clinical applications. Liposomes can fuse with the plasma membrane for uptake; once inside the cell, the liposomes are processed via the endocytic pathway and the genetic material is then released from the endosome/carrier into the cytoplasm. Liposomes have long been perceived as drug delivery vehicles because of their superior biocompatibility, given that liposomes are basically analogs of biological membranes, and can be prepared from both natural and synthetic phospholipids (Int J Nanomedicine. 2014; 9:1833-1843).

[0318] Cationic liposomes have been traditionally the most commonly used non-viral delivery systems for oligonucleotides, including plasmid DNA, antisense oligos, and siRNA/small hairpin RNA-shRNA). Cationic lipids, such as DOTAP, (1,2-dioleoyl-3-trimethylammonium-propane) and DOTMA (N-[1-(2,3-dioleoyloxy)propyl]-N,N,N-trimethyl-ammonium methyl sulfate) can form complexes or lipoplexes with negatively charged nucleic acids to form nanoparticles by electrostatic interaction, providing high in vitro transfection efficiency. Furthermore, neutral lipid-based nanoliposomes for RNA delivery as e.g. neutral 1,2-dioleoyl-sn-glycero-3-phosphatidylcholine (DOPC)-based nanoliposomes were developed. (Adv Drug Deliv Rev. 2014 February; 66:110-116).

[0319] Therefore, in one embodiment the RNA of the composition according to the present invention is complexed with cationic lipids and/or neutral lipids and thereby forms liposomes, lipid nanoparticles, lipoplexes or neutral lipid-based nanoliposomes.

[0320] In a preferred embodiment, the composition according to the invention comprises the RNA according to the invention that is formulated together with a cationic or polycationic compound and/or with a polymeric carrier. Accordingly, in a further embodiment of the invention, it is preferred that the RNA as defined herein or any other nucleic acid comprised in the inventive (pharmaceutical) composition or vaccine is associated with or complexed with a cationic or polycationic compound or a polymeric carrier, optionally in a weight ratio selected from a range of about 6:1 (w/w) to about 0.25:1 (w/w), more preferably from about 5:1 (w/w) to about 0.5:1 (w/w), even more preferably of about 4:1 (w/w) to about 1:1 (w/w) or of about 3:1 (w/w) to about 1:1 (w/w), and most preferably a ratio of about 3:1 (w/w) to about 2:1 (w/w) of mRNA or nucleic acid to cationic or polycationic compound and/or with a polymeric carrier; or optionally in a nitrogen/phosphate (N/P) ratio of mRNA or nucleic acid to cationic or polycationic compound and/or polymeric carrier in the range of about 0.1-10, preferably in a range of about 0.3-4 or 0.3-, and most preferably in a range of about 0.5-1 or 0.7-, and even most preferably in a range of about 0.3-0.9 or 0.5-0.9. More preferably, the N/P ratio of the at least one mRNA to the one or more pollinations is in the range of about 0.1 to 10, including a range of about 0.3 to 4, of about 0.5 to 2, of about 0.7 to 2 and of about 0.7 to 1.5.

[0321] Therein, the RNA as defined herein or any other nucleic acid comprised in the (pharmaceutical) composition or vaccine according to the invention can also be associated with a vehicle, transfection or complexation agent for increasing the transfection efficiency and/or the immunostimulatory properties of the RNA according to the invention or of optionally comprised further included nucleic acids.

[0322] Cationic or polycationic compounds, being particularly preferred agents in this context include protamine, nucleolin, spermine or spermidine, or other cationic peptides or proteins, such as poly-L-lysine (PLL), poly-arginine, basic polypeptides, cell penetrating peptides (CPPs), including HIV-binding peptides, HIV-1 Tat (HIV), Tat-derived peptides, Penetratin, VP22 derived or analog peptides, HSV VP22 (Herpes simplex), MAP, KALA or protein transduction domains (PTDs), PpT620, prolin-rich peptides, arginine-rich peptides, lysine-rich peptides, MPG-peptide(s), Pep-1, L-oligomers, Calcitonin peptide(s), Antennapedia-derived peptides (particularly from Drosophila antennapedia), pAntp, plsl, FGF, Lactoferrin, Transportan, Buforin-2, Bac715-24, SynB, SynB(I), pVEC, hCT-derived peptides, SAP, or histones. More preferably, the RNA according to the invention is complexed with one or more polycations, preferably with protamine or oligofectamine, most preferably with protamine. In this context protamine is particularly preferred.

[0323] Additionally, preferred cationic or polycationic proteins or peptides may be selected from the following proteins or peptides having the following total formula (III):

(Arg)ₗ;(Lys)ₘ;(His)ₙ;(Orn)ₒ;(Xaa)ₓ (formula (III))

wherein l+m+n+o+x=8-15, and l, m, n or o independently of each other may be any number selected from 0, 1, 2, 3, 4, 5, 6, 7, 8, 9, 10, 11, 12, 13, 14 or 15, provided that the overall content of Arg, Lys, His and Orn represents at least 50% of all amino acids of the oligopeptide; and Xaa may be any amino acid selected from native (=naturally occurring) or non-native amino acids except of Arg, Lys, His or Orn; and x may be any number selected from 0, 1, 2, 3 or 4, provided, that the overall content of Xaa does not exceed 50% of all amino acids of the oligopeptide. Particularly preferred cationic peptides in this context are e.g. Arg₇, Arg₈, Arg₉, H₃R₉, R₉H₃, H₃R₉H₃, YSSR₉SSY, (RKH)₄, Y(RKH)₂R, etc. In this context the disclosure of WO 2009/030481 is incorporated herewith by reference.

[0324] Further preferred cationic or polycationic compounds, which can be used as transfection or complexation agent may include cationic polysaccharides, for example chitosan, polybrene, cationic polymers, e.g. polyethyleneimine (PEI), cationic lipids, e.g. DOTMA: [1-(2,3-sioleyloxy)propyl)]-N,N,N-trimethylammonium chloride, DMRIE, di-C14-amidine, DOTIM, SAINT, DC-Chol, BOTC, CTAP, DOPI, DDDAP, DOPE: Dioleyl phosphatidylethanol-amine, DOSPA, DODAB, DOIC, DMEPC, DOGS: Dioctadecylamidoglicylspermin, DIMRI: Dimyristo-oxypropyl dimethyl hydroxyethyl ammonium bromide, DOTAP: dioleoyloxy-3-(trimethylammonio)propane, DC-6-14: 0,0-ditetradecanoyl-N-(α-trimethylammonioacetyl)diethanolamino chloride, CLIPI: rac-[(2,3-dioctadecyloxypropyl)(2-hydroxyethyl)]-dimethylammonium chloride, CLIPS: rac-[2(2,3-dihexadecyloxypropyl-oxymethyloxy)ethyl]trimethylammonium, CLIP9: rac-[2(2,3-dihexadecyloxypropyl-oxysuccinyloxy)ethyl]-trimethylammonium, oligofeotamine, or cationic or polycationic polymers, e.g. modified polyaminoacids, such as β-aminoacid-polymers or reversed polyamides, etc., modified polyethylenes, such as PVP (poly(N-ethyl-4-vinylpyridinium bromide)), etc., modified acrylates, such as pDMAEMA (poly(dimethylaminoethyl methylacrylate)), etc., modified amidoamines such as pAMAM (poly(amidoamine)), etc., modified polybetaaminoester (PBAE), such as diamine end modified 1,4 butanediyl diacrylate-co-5-amino-1-pentanol polymers, etc., dendrimers, such as polypropylamine dendrimers or pAMAM based dendrimers, etc., polyimine(s), such as PEI: poly(ethyleneimine), poly(propyleneimine), etc., polyallylamine, sugar backbone based polymers, such as cyclodextrin based polymers, dextran based polymers, chitosan, etc., silan backbone based polymers, such as PMOXA-POMS copolymers, etc., blockpolymers consisting of a combination of one or more cationic blocks (e.g. selected from a cationic polymer as mentioned above) and of one or more hydrophilic or hydrophobic blocks (e.g. polyethyleneglycole); etc.

[0325] According to a preferred embodiment, the composition of the present invention comprises the RNA as defined herein and a polymeric carrier. A polymeric carrier used according to the invention might be a polymeric carrier formed by disulfide-crosslinked cationic components. The disulfide-crosslinked cationic components may be the same or different from each other. The polymeric carrier can also contain further components. It is also particularly preferred that the polymeric carrier used according to the present invention comprises mixtures of cationic peptides, proteins or polymers and optionally further components as defined herein, which are crosslinked by disulfide bonds as described herein. In this context, the disclosure of WO 2012/013326 is incorporated herewith by reference.

[0326] In this context, the cationic components, which form basis for the polymeric carrier by disulfide-crosslinkage, are typically selected from any suitable cationic or polycationic peptide, protein or polymer suitable for this purpose, particular any cationic or polycationic peptide, protein or polymer capable of complexing the RNA as defined herein or a further nucleic acid comprised in the composition, and thereby preferably condensing the RNA or the nucleic acid. The cationic or polycationic peptide, protein or polymer, is preferably a linear molecule, however, branched cationic or polycationic peptides, proteins or polymers may also be used.

[0327] Every disulfide-crosslinking cationic or polycationic protein, peptide or polymer of the polymeric carrier, which may be used to complex the RNA according to the invention or any further nucleic acid comprised in the (pharmaceutical) composition or vaccine of the present invention contains at least one —SH moiety, most preferably at least one cysteine residue or any further chemical group exhibiting an —SH moiety, capable of forming a disulfide linkage upon condensation with at least one further cationic or polycationic protein, peptide or polymer as cationic component of the polymeric carrier as mentioned herein.

[0328] As defined above, the polymeric carrier, which may be used to complex the RNA of the present invention or any further nucleic acid comprised in the (pharmaceutical) composition or vaccine according to the invention may be formed by disulfide-crosslinked cationic (or polycationic) components. Preferably, such cationic or polycationic peptides or proteins or polymers of the polymeric carrier, which comprise or are additionally modified to comprise at least one —SH moiety, are selected from, proteins, peptides and polymers as defined herein for complexation agent.

[0329] In a further particular embodiment, the polymeric carrier which may be used to complex the RNA as defined herein or any further nucleic acid comprised in the (pharmaceutical) composition or vaccine according to the invention may be selected from a polymeric carrier molecule according to generic formula (IV):

L-P′—S—[S—P²—S]ₙ—S—P³-L formula (IV)

wherein,
[0330] P¹ and P³ are different or identical to each other and represent a linear or branched hydrophilic polymer chain, each P¹ and P³ exhibiting at least one —SH-moiety, capable to form a disulfide linkage upon condensation with component P², or alternatively with (AA), (AA)ₓ, or [(AA)ₓ]_{z} if such components are used as a linker between P and P² or P³ and P²) and/or with further components (e.g. (AA), (AA)ₓ, [(AA)ₓ]_{z} or L), the linear or branched hydrophilic polymer chain selected independent from each other from polyethylene glycol (PEG), poly-N-(2-hydroxypropyl)methacrylamide, poly-2-(methacryloyloxy)ethyl phosphorylcholines, poly(hydroxyalkyl L-asparagine), poly(2-(methacryloyloxy)ethyl phosphorylcholine), hydroxyethylstarch or poly(hydroxyalkyl L-glutamine), wherein the hydrophilic polymer chain exhibits a molecular weight of about 1 kDa to about 100 kDa, preferably of about 2 kDa to about 25 kDa; or more preferably of about 2 kDa to about 10 kDa, e.g. about 5 kDa to about 25 kDa or 5 kDa to about 10 kDa;
[0331] P² is a cationic or polycationic peptide or protein, e.g. as defined above for the polymeric carrier formed by disulfide-crosslinked cationic components, and preferably having a length of about 3 to about 100 amino acids, more preferably having a length of about 3 to about 50 amino acids, even more preferably having a length of about 3 to about 25 amino acids, e.g. a length of about 3 to 10, 5 to 5, 10 to 20 or 15 to 25 amino acids, more preferably a length of about 5 to about 20 and even more preferably a length of about 10 to about 20; or
   [0332] is a cationic or polycationic polymer, e.g. as defined above for the polymeric carrier formed by disulfide-crosslinked cationic components, typically having a molecular weight of about 0.5 kDa to about 30 kDa, including a molecular weight of about 1 kDa to about 20 kDa, even more preferably of about 1.5 kDa to about 10 kDa, or having a molecular weight of about 0.5 kDa to about 100 kDa, including a molecular weight of about 10 kDa to about 50 kDa, even more preferably of about 10 kDa to about 30 kDa;
   [0333] each P² exhibiting at least two —SH-moieties, capable to form a disulfide linkage upon condensation with further components P² or component(s) P¹ and/or P³ or alternatively with further components (e.g. (AA), (AA)ₓ, or [(AA)ₓ]_{z});
[0334] —S—S— is a (reversible) disulfide bond (the brackets are omitted for better readability), wherein S preferably represents sulphur or a —SH carrying moiety, which has formed a (reversible) disulfide bond. The (reversible) disulfide bond is preferably formed by condensation of —SH-moieties of either components P¹ and F², P² and P², or P² and P³, or optionally of further components as defined herein (e.g. L, (AA), (AA)ₓ, [(AA)ₓ]_{z}, etc); The —SH-moiety may be part of the structure of these components or added by a modification as defined below;
[0335] L is an optional ligand, which may be present or not, and may be selected independent from the other from ROD, Transferrin, Folate, a signal peptide or signal sequence, a localization signal or sequence, a nuclear localization signal or sequence (NLS), an antibody, a cell penetrating peptide, (e.g. TAT or KALA), a ligand of a receptor (e.g. cytokines, hormones, growth factors etc), small molecules (e.g. carbohydrates like mannose or galactose or synthetic ligands), small molecule agonists, inhibitors or antagonists of receptors (e.g. RGD peptidomimetic analogues), or any further protein as defined herein, etc.;
[0336] n is an integer, typically selected from a range of about 1 to 50, preferably from a range of about 1, 2 or 3 to 30, more preferably from a range of about 1, 2, 3, 4, or 5 to 25, or a range of about 1, 2, 3, 4, or 5 to 20, or a range of about 1, 2, 3, 4, or 5 to 15, or a range of about 1, 2, 3, 4, or 5 to 10, including e.g. a range of about 4 to 9, 4 to 10, 3 to 20, 4 to 20, 5 to 20, or 10 to 20, or a range of about 3 to 15, 4 to 15, 5 to 15, or 10 to 15, or a range of about 6 to 11 or 7 to 10. Most preferably, n is in a range of about 1, 2, 3, 4, or 5 to 10, more preferably in a range of about 1, 2, 3, or 4 to 9, in a range of about 1, 2, 3, or 4 to 8, or in a range of about 1, 2, or 3 to 7.

[0337] In this context, the disclosure of WO 2011/026641 is incorporated herewith by reference. Each of hydrophilic polymers P¹ and P³ typically exhibits at least one —SH-moiety, wherein the at least one —SH-moiety is capable to form a disulfide linkage upon reaction with component P² or with component (AA) or (AA)ₓ, if used as linker between P¹ and P² or P³ and P² as defined below and optionally with a further component, e.g. L and/or (AA) or (AA)ₓ, e.g. if two or more —SH-moieties are contained. The following subformulae “P¹—S—S—P²” and “P²—S—S—P³” within generic formula (IV) above (the brackets are omitted for better readability), wherein any of S, P¹ and P³ are as defined herein, typically represent a situation, wherein one-SH-moiety of hydrophilic polymers P¹ and P³ was condensed with one —SH-moiety of component P² of generic formula (IV) above, wherein both sulphurs of these —SH-moieties form a disulfide bond —S—S— as defined herein in formula (IV). These —SH-moieties are typically provided by each of the hydrophilic polymers P¹ and P³, e.g. via an internal cysteine or any further (modified) amino acid or compound which carries a —SH moiety. Accordingly, the subformulae “P¹—S—S—P²” and “P²—S—S—P³” may also be written as “P¹-Cys-Cys-P²” and “P²-Cys-Cys-P³”, if the —SH-moiety is provided by a cysteine, wherein the term Cys-Cys represents two cysteines coupled via a disulfide bond, not via a peptide bond. In this case, the term “—S—S—” in these formulae may also be written as “—S-Cys”, as “-Cys-S” or as “-Cys-Cys-”. In this context, the term “-Cys-Cys-” does not represent a peptide bond but a linkage of two cysteines via their —SH-moieties to form a disulfide bond. Accordingly, the term “-Cys-Cys-” also may be understood generally as “-(Cys-S)—(S-Cys)-”, wherein in this specific case S indicates the sulphur of the —SH-moiety of cysteine. Likewise, the terms “—S-Cys” and “—Cys-S” indicate a disulfide bond between a —SH containing moiety and a cysteine, which may also be written as “—S—(S-Cys)” and “-(Cys-S)—S”. Alternatively, the hydrophilic polymers P¹ and P³ may be modified with a —SH moiety, preferably via a chemical reaction with a compound carrying a —SH moiety, such that each of the hydrophilic polymers P¹ and P³ carries at least one such —SH moiety. Such a compound carrying a —SH moiety may be e.g. an (additional) cysteine or any further (modified) amino acid, which carries a —SH moiety. Such a compound may also be any non-amino compound or moiety, which contains or allows to introduce a —SH moiety into hydrophilic polymers P¹ and P³ as defined herein. Such non-amino compounds may be attached to the hydrophilic polymers P¹ and P³ of formula (IV) of the polymeric carrier according to the present invention via chemical reactions or binding of compounds, e.g. by binding of a 3-thio propionic acid or thioimolane, by amide formation (e.g. carboxylic acids, sulphonic acids, amines, etc), by Michael addition (e.g maleinimide moieties, α,β-unsatured carbonyls, etc), by click chemistry (e.g. azides or alkines), by alkene/alkine methatesis (e.g. alkenes or alkines), imine or hydrozone formation (aldehydes or ketons, hydrazins, hydroxylamins, amines), complexation reactions (avidin, biotin, protein G) or components which allow Sn-type substitution reactions (e.g halogenalkans, thiols, alcohols, amines, hydrazines, hydrazides, sulphonic acid esters, oxyphosphonium salts) or other chemical moieties which can be utilized in the attachment of further components. A particularly preferred PEG derivate in this context is alpha-Methoxy-omega-mercapto poly(ethylene glycol). In each case, the SH-moiety, e.g. of a cysteine or of any further (modified) amino acid or compound, may be present at the terminal ends or internally at any position of hydrophilic polymers P¹ and P³. As defined herein, each of hydrophilic polymers P¹ and P³ typically exhibits at least one —SH-moiety preferably at one terminal end, but may also contain two or even more —SH-moieties, which may be used to additionally attach further components as defined herein, preferably further functional peptides or proteins e.g. a ligand, an amino acid component (AA) or (AA)ₓ, antibodies, call penetrating peptides or enhancer peptides (e.g. TAT, KALA), etc.

[0338] Preferably, the inventive composition comprises at least one RNA as defined herein, which is complexed with one or more polycations, and at least one free RNA, wherein the at least one complexed RNA is preferably identical to the at least one free RNA. In this context, it is particularly preferred that the composition of the present invention comprises the RNA according to the invention that is complexed at least partially with a cationic or polycationic compound and/or a polymeric carrier, preferably cationic proteins or peptides. In this context, the disclosure of WO 2010/037539 and WO 2012/113513 is incorporated herewith by reference. Partially means that only a part of the RNA as defined herein is complexed in the composition according to the invention with a cationic compound and that the rest of the RNA as defined herein is (comprised in the inventive (pharmaceutical) composition or vaccine) in uncomplexed form (“free”). Preferably, the molar ratio of the complexed RNA to the free RNA is selected from a molar ratio of about 0.001:1 to about 1:0.001, including a ratio of about 1:1. More preferably the ratio of complexed RNA to free RNA (in the (pharmaceutical) composition or vaccine of the present invention) is selected from a range of about 5:1 (w/w) to about 1:10 (w/w), more preferably from a range of about 4:1 (w/w) to about 1:8 (w/w), even more preferably from a range of about 3:1 (w/w) to about 1:5 (w/w) or 1:3 (w/w), and most preferably the ratio of complexed mRNA to free mRNA in the inventive pharmaceutical composition or vaccine is selected from a ratio of about 1:1 (w/w).

[0339] The complexed RNA in the (pharmaceutical) composition or vaccine according to the present invention, is preferably prepared according to a first step by complexing the RNA according to the invention with a cationic or polycationic compound and/or with a polymeric carrier, preferably as defined herein, in a specific ratio to form a stable complex. In this context, it is highly preferable, that no free cationic or polycationic compound or polymeric carrier or only a negligibly small amount thereof remains in the component of the complexed RNA after complexing the RNA. Accordingly, the ratio of the RNA and the cationic or polycationic compound and/or the polymeric carrier in the component of the complexed RNA is typically selected in a range so that the RNA is entirely complexed and no free cationic or polycationic compound or polymeric carrier or only a negligibly small amount thereof remains in the composition.

[0340] Preferably the ratio of the RNA as defined herein to the cationic or polycationic compound and/or the polymeric carrier, preferably as defined herein, is selected from a range of about 6:1 (w/w) to about 0.25:1 (w/w), more preferably from about 5:1 (w/w) to about 0.5:1 (w/w), even more preferably of about 4:1 (w/w) to about 1:1 (w/w) or of about 3:1 (w/w) to about 1:1 (w/w), and most preferably a ratio of about 3:1 (w/w) to about 2:1 (w/w). Alternatively, the ratio of the RNA as defined herein to the cationic or polycationic compound and/or the polymeric carrier, preferably as defined herein, in the component of the complexed mRNA, may also be calculated on the basis of the nitrogen/phosphate ratio (N/P-ratio) of the entire complex. In the context of the present invention, an N/P-ratio is preferably in the range of about 0.1-10, preferably in a range of about 0.3-4 and most preferably in a range of about 0.5-2 or 0.7-2 regarding the ratio of RNA:cationic or polycationic compound and/or polymeric carrier, preferably as defined herein, in the complex, and most preferably in a range of about 0.7-1.5, 0.5-1 or 0.7-1, and even most preferably in a range of about 0.3-0.9 or 0.5-0.9, preferably provided that the cationic or polycationic compound in the complex is a cationic or polycationic cationic or polycationic protein or peptide and/or the polymeric carrier as defined above. In this specific embodiment the complexed RNA as defined herein is also encompassed in the term “adjuvant component”.

[0341] In other embodiments, the composition according to the invention comprising the RNA as defined herein may be administered naked without being associated with any further vehicle, transfection or complexation agent.

[0342] It has to be understood and recognized, that according to the present invention, the inventive composition may comprise at least one naked RNA as defined herein, preferably an mRNA, and/or at least one formulated/complexed RNA as defined herein, preferably an mRNA, wherein every formulation and/or complexation as disclosed above may be used.

[0343] According to another embodiment, the (pharmaceutical) composition or vaccine according to the invention may comprise an adjuvant, which is preferably added in order to enhance the immunostimulatory properties of the composition. In this context, an adjuvant may be understood as any compound, which is suitable to support administration and delivery of the composition according to the invention. Furthermore, such an adjuvant may, without being bound thereto, initiate or increase an immune response of the innate immune system, i.e. a non-specific immune response. In other words, when administered, the composition according to the invention typically initiates an adaptive immune response due to an antigen as defined herein or a fragment or variant thereof, which is encoded by the at least one coding sequence of the inventive RNA contained in the composition of the present invention. Additionally, the composition according to the invention may generate an (supportive) innate immune response due to addition of an adjuvant as defined herein to the composition according to the invention.

[0344] Such an adjuvant may be selected from any adjuvant known to a skilled person and suitable for the present case, i.e. supporting the induction of an immune response in a mammal. Preferably, the adjuvant may be selected from the group consisting of, without being limited thereto, TOM, MOP, muramyl dipeptide, pluronics, alum solution, aluminium hydroxide, ADJUMER™ (polyphosphazene); aluminium phosphate gel; glucans from algae; algammulin; aluminium hydroxide gel (alum); highly protein-adsorbing aluminium hydroxide gel; low viscosity aluminium hydroxide gel; AF or SPT (emulsion of squalane (5%), Tween 80 (0.2%), Pluronic L121 (1.25%), phosphate-buffered saline, pH 7.4); AVRIDINE™ (propanediamine); BAY R1005™ ((N-(2-deoxy-2-L-leucylamino-b-D-glucopyranosyl)-N-octadecyl-dodecanoyl-amide hydroacetate); CALCITRIOL™ (1-alpha,25-dihydroxy-vitamin D3); calcium phosphate gel; CAP™ (calcium phosphate nanoparticles); cholera holotoxin, cholera-toxin-A1-protein-A-D-fragment fusion protein, sub-unit B of the cholera toxin; CRL 1005 (block copolymer P1205); cytokine-containing liposomes; DDA (dimethyldioctadecylammonium bromide); DHEA (dehydroepiandrosterone); DMPC (dimyristoylphosphatidylcholine); DMPG (dimyristoylphosphatidylglycerol); DOC/alum complex (deoxycholic acid sodium salt); Freund's complete adjuvant; Freund's incomplete adjuvant; gamma inulin; Gorbu adjuvant (mixture of: i) N-aoetylglucosaminyl-(PI-4)-N-acetylmuramyl-L-alanyl-D-glutamine (GMDP), ii) dimethyldioctadecylammonium chloride (DDA), iii) zinc-L-proline salt complex (ZnPro-8); GM-CSF); GMDP (N-acetylglucosaminyl-(b1-4)-N-acetylmuramyl-L-alanyl-D-isoglutamine); imiquimod (1-(2-methypropyl)-1H-imidazo[4,5-o]quinoline-4-amine); ImmTher™ (N-aoetylgluonsaminyl-N-aoetylmuramyl-L-Ala-D-isollu-L-Ala-glycerl dipalmitate); DRVs (immunoliposomes prepared from dehydration-rehydration vesicles); interferon-gamma; interleukin-Ibeta; interleukin-2; interleukin-7; interleukin-12; ISCOMS™; ISCOPREP 7.0.3™; liposomes; LOXDRIBINE™ (7-allyl-8-oxoguanosine); LT oral adjuvant (E. coli labile enterotoxin-protoxin); microspheres and microparticles of any composition; MF59™; (squalene-water emulsion); MONTANIDE ISA 51™ (purified incomplete Freund's adjuvant); MONTANIDE ISA720™ (metabolisable oil adjuvant); MPL™ (3-D-desacyl-4′-monophosphoryl lipid A); MTP-PE and MTP-PE liposomes ((N-acetyl-L-alanyl-D-isoglutaminyl-L-alanine-2-(1,2-dipalmitoyl-sn-glycero-3-(hydroxyphosphoryloxy))-ethylamide, monosodium salt); MURAMETIDE™ (Nac-Mur-L-Ala-D-Gln-OCH3); MURAPALMITINE™ and D-MURAPALMITINE™ (Nao-Mur-L-Thr-D-isoGln-sn-glyceroldipalmitoyl); NAGO (neuraminidase-galactose oxidase); nanospheres or nanoparticles of any composition; NISVs (non-ionic surfactant vesicles); PLEURAN™ (β-glucan); PLGA, PGA and PLA (homo- and co-polymers of lactic acid and glycolic acid; microspheres/nanospheres); PLURONIC L121™; PMMA (polymethyl methacrylate); PDDDS™ (proteinoid microspheres); polyethylene carbamate derivatives; poly-rA: poly-rU (polyadenylic acid-polyuridylic acid complex); polysorbate 80 (Tween 80); protein cochleates (Avanti Polar Lipids, Inc., Alabaster, AL); STIMULON™ (DS-21); Quil-A (Quil-A saponin); S-28463 (4-amino-otec-dimethyl-2-ethoxymethyl-1H-imidazo[4,5 c]quinoline-1-ethanol); SAF-I™ (“Syntox adjuvant formulation”); Sendai proteoliposomes and Sendai-containing lipid matrices; Span-85 (sorbitan trioleate); Specol (emulsion of Marcol 52, Span 85 and Tween 85); squalene or Robane® (2,6,10,15,19,23-hexamethyltetracosan and 2,6,10,15,19,23-hexamethyl-2,6,10,14,18,22-tetracosahexano); stearyltyrosine (octadecyltyrosine hydrochloride); Theramid® (N-acetylglucosaminyl-N-acetylmuramyl-L-Ala-D-isollu-L-Ala-dipalmitoxypropylamid); Theronyl-MDP (Termurtide™ or [thr I]-MDP; N-acetylmuramyl-L-threonyl-D-isoglutamine); Ty particles (Ty-VLPs or virus-like particles); Walter-Reed liposomes (liposomes containing lipid A adsorbed on aluminium hydroxide), and lipopeptides, including Pam3Cys, in particular aluminium salts, such as Adju-phos, Alhydrogel, Rehydragel; emulsions, including CFA, SAF, IFA, MF59, Provax, TiterMax, Montanide, Vaxfectin; copolymers, including Optivax (CRL1005), L121, Poloaxmor4010), etc.; liposomes, including Stealth, cochleates, including BIORAL; plant derived adjuvants, including QS21, Quil A, Iscomatrix, ISCOM; adjuvants suitable for costimulation including Tomatine, biopolymers, including PLG, PMM, Inulin; microbe derived adjuvants, including Romurtide, DETOX, MPL, CWS, Mannose, CpG nucleic acid sequences, CpG7909, ligands of human TLR I-10, ligands of murine TLR I-13, ISS-1018, IC31, Imidazoquinolines, Ampligen, Ribi529, IMOxine, IRIVs, VLPs, cholera toxin, heat-labile toxin, Pam3Cys, Flagellin, GPI anchor, LNFPIII/Lewis X, antimicrobial peptides, UC-IV150, RSV fusion protein, cdiGMP; and adjuvants suitable as antagonists including CORP neuropeptide.

[0345] Particularly preferred, an adjuvant may be selected from adjuvants, which support induction of a Th1-immune response or maturation of naïve T-cells, such as GM-CSF, L-12, IFNγ, any immunostimulatory nucleic acid as defined above, preferably an immunostimulatory RNA, CpG DNA, etc.

[0346] In a further preferred embodiment it is also possible that the inventive composition contains besides the antigen-providing RNA further components which are selected from the group comprising: further antigens (e.g. in the form of a peptide or protein) or further antigen-encoding nucleic acids; a further immunotherapeutic agent; one or more auxiliary substances; or any further compound, which is known to be immunostimulating due to its binding affinity (as ligands) to human Toll-like receptors; and/or an adjuvant nucleic acid, preferably an immunostimulatory RNA (isRNA).

[0347] The composition of the present invention can additionally contain one or more auxiliary substances in order to increase its immunogenicity or immunostimulatory capacity, if desired. A synergistic action of the RNA as defined herein and of an auxiliary substance, which may be optionally contained in the inventive composition, is preferably achieved thereby. Depending on the various types of auxiliary substances, various mechanisms can come into consideration in this respect. For example, compounds that permit the maturation of dendritic cells (DCs), for example lipopolysaccharides, TNF-alpha or CD40 ligand, form a first class of suitable auxiliary substances. In general, it is possible to use as auxiliary substance any agent that influences the immune system in the manner of a “danger signal” (LPS, GP96, etc.) or cytokines, such as GM-CFS, which allow an immune response to be enhanced and/or influenced in a targeted manner. Particularly preferred auxiliary substances are cytokines, such as monokines, lymphokines, interleukins or chemokines, that further promote the innate immune response, such as IL-1, IL-2, IL-3, IL-4, IL-5, IL-6, IL-7, IL-8, IL-9, IL-10, IL-12, IL-13, IL-14, IL-15, IL-16, IL-17, IL-18, IL-19, IL-20, IL-21, IL-22, IL-23, IL-24, IL-25, IL-26, IL-27, IL-28, IL-29, IL-30, IL-31, IL-32, IL-33, IFN-alpha, IFN-beta, IFN-gamma, GM-CSF, G-CSF, M-CSF, LT-beta or TNF-alpha, growth factors, such as hH.

[0348] Suitable adjuvants may also be selected from cationic or polycationic compounds wherein the adjuvant is preferably prepared upon complexing the RNA of the composition according to the invention with the cationic or polycationic compound. Associating or complexing the RNA of the composition with cationic or polycationic compounds as defined herein preferably provides adjuvant properties and confers a stabilizing effect to the RNA of the composition. In particular, such preferred cationic or polycationic compounds are selected from cationic or polycationic peptides or proteins, including protamine, nucleolin, spermin or spermidine, or other cationic peptides or proteins, such as poly-L-lysine (PLL), poly-arginine, basic polypeptides, cell penetrating peptides (CPPs), including HIV-binding peptides, Tat, HIV-1 Tat (HIV), Tat-derived peptides, Penetratin, VP22 derived or analog peptides, HSV VP22 (Herpes simplex), MAP, KALA or protein transduction domains (PTDs, PpT620, prolin-rich peptides, arginine-rich peptides, lysine-rich peptides, MPG-peptide(s), Pep-I, L-oligomers, Calcitonin peptide(s), Antennapedia-derived peptides (particularly from Drosophila antennapedia), pAntp, plsl, FGF, Lactoferrin, Transportan, Buforin-2, Bac715-24, SynB, SynB(I), pVEC, hCT-derived peptides, SAP, protamine, spermine, spermidine, or histones. Further preferred cationic or polycationic compounds may include cationic polysaccharides, for example chitosan, polybrene, cationic polymers, e.g. polyethyleneimine (PEI), cationic lipids, e.g. DOTMA: [1-(2,3-sioleyloxy)propyl)]-N,N,N-trimethylammonium chloride, DMRIE, di-C14-amidine, DDTIM, SAINT, DC-Chol, BOTC, CTAP, DOPC, DDDAP, DOPE: Dinleyl phosphatidylethanol-amine, DDSPA, DDDAB, DDIC, DMEPC, DOGS: Dioctadecylamidoglicylspermin, DIMRI: Dimyristo-oxypropyl dimethyl hydroxyethyl ammonium bromide, DDTAP: dioleoyloxy-3-(trimethylammonio)propano, DC-6-14: O,O-ditetradecanoyl-N-(α-trimethylammonioacetyl)diethanolamine chloride, CLIPI: rac-[(2,3-dioctadecyloxypropyl)(2-hydroxyethyl)]-dimethylammonium chloride, CLIPS: rac-[2(2,3-dihexadocyloxypropyl-oxymethyloxy)ethyl]-trimethylammonium, CLIP9: ran-[2(2,3-dihexadecyloxypropyl-oxysuccinyloxy)ethyl]-trimethylammonium, oligofectamine, or cationic or polycationic polymers, e.g. modified polyaminoacids, such as 3-aminoacid-polymers or reversed polyamides, etc., modified polyethylenes, such as PVP (poly(N-ethyl-4-vinylpyridinium bromide)), etc., modified acrylates, such as pDMAEMA (poly(dimethylaminoethyl methylacrylate)), etc., modified Amidoamines such as pAMAM (poly(amidoamine)), etc., modified polybetaaminoester (PEAF), such as diamine end modified 1,4 butanediol diacrylate-co-5-amino-1-pentanol polymers, etc., dendrimers, such as polypropylamine dendrimers or pAMAM based dendrimers, etc., polyimine(s), such as PEI: poly(ethyleneimine), poly(propyleneimine), etc., polyallylamine, sugar backbone based polymers, such as cyclodextrin based polymers, dextran based polymers, Chitosan, etc., silan backbone based polymers, such as PMDXA-PDMS copolymers, etc., blockpolymers consisting of a combination of one or more cationic blocks (e.g. selected of a cationic polymer as mentioned above) and of one or more hydrophilic- or hydrophobic blocks (e.g polyethyleneglycol); etc.

[0349] Additionally, preferred cationic or polycationic proteins or peptides, which can be used as an adjuvant by complexing the RNA of the composition according to the invention, may be selected from following proteins or peptides having the following total formula (III): (Arg)ₗ;(Lys)ₘ;(His)ₙ;(Drn)ₒ;(Xaa)ₓ, wherein l+m+n+o+x=8-15, and l, m, n or o independently of each other may be any number selected from 0, 1, 2, 3, 4, 5, 6, 7, 8, 9, 10, 11, 12, 3, 14 or 15, provided that the overall content of Arg, Lys, His and Orn represents at least 50% of all amino acids of the oligopeptide; and Xaa may be any amino acid selected from native (=naturally occurring) or non-native amino acids except of Arg, Lys, His or Orn; and x may be any number selected from 0, 1, 2, 3 or 4, provided, that the overall content of Xaa does not exceed 50% of all amino acids of the oligopeptide. Particularly preferred oligoarginines in this context are e.g. Arg₇ (SEQ ID NO: 4592), Arg₈ (SEQ ID NO: 4593), Arg₉ (SEQ ID NO: 4594), H₃R₉ (SEQ ID NO: 4595), R₉H₃ (SEQ ID NO: 4596), H₃R₉H₃ (SEQ ID NO: 4597), YSSR₉SSY (SEQ ID NO: 4598), (RKH)₄ (SEQ ID NO: 4599), Y(RKH)₂R (SEQ ID NO: 4600), etc.

[0350] The ratio of the RNA to the cationic or polycationic compound in the adjuvant component may be calculated on the basis of the nitrogen/phosphate ratio (N/P-ratio) of the entire RNA complex, i.e. the ratio of positively charged (nitrogen) atoms of the cationic or polycationic compound to the negatively charged phosphate atoms of the nucleic acids. For example, 1 μg of RNA typically contains about 3 nmol phosphate residues, provided the RNA exhibits a statistical distribution of bases. Additionally, 1 μg of peptide typically contains about x nmol nitrogen residues, dependent on the molecular weight and the number of basic amino acids. When exemplarily calculated for (Arg)₉ (molecular weight 1424 g/mol, 9 nitrogen atoms), 1 μg (Arg)₉ contains about 700 pmol (Arg)s and thus 700×9=6300 pmol basic amino acids=6.3 nmol nitrogen atoms. For a mass ratio of about 1:1 RNA/(Arg)₉ an N/P ratio of about 2 can be calculated. When exemplarily calculated for protamine (molecular weight about 4250 g/mol, 21 nitrogen atoms, when protamine from salmon is used) with a mass ratio of about 2:1 with 2 μg RNA, 6 nmol phosphate are to be calulated for the RNA; 1 μg protamine contains about 235 pmol protamine moleoules and thus 235×21=4935 pmol basic nitrogen atoms=4.9 nmol nitrogen atoms. For a mass ratio of about 2:1 RNA/protamine an N/P ratio of about 0.81 can be calculated. For a mass ratio of about 8:1 RNA/protamine an N/P ratio of about 0.2 can be calculated. In the context of the present invention, an N/P-ratio is preferably in the range of about 0.1-10, preferably in a range of about 0.3-4 and most preferably in a range of about 0.5-2 or 0.7-2 regarding the ratio of RNA: peptide in the complex, and most preferably in the range of about 0.7-1.5.

[0351] In a preferred embodiment, the composition of the present invention is obtained in two separate steps in order to obtain both, an efficient immunostimulatory effect and efficient translation of the RNA according to the invention. Therein, a so called “adjuvant component” is prepared by complexing—in a first step—an RNA as defined herein of the adjuvant component with a cationic or polycationic compound in a specific ratio to form a stable complex. In this context, it is important, that no free cationic or polycationic compound or only a neglibly small amount remains in the adjuvant component after complexing the RNA. Accordingly, the ratio of the RNA and the cationic or polycationic compound in the adjuvant component is typically selected in a range that the RNA is entirely complexed and no free cationic or polycationic compound or only a neglectably small amount remains in the composition. Preferably the ratio of the adjuvant component, i.e. the ratio of the RNA to the cationic or polycationic compound is selected from a range of about 6:1 (w/w) to about 0.25:1 (w/w), more preferably from about 5:1 (w/w) to about 0.5:1 (w/w), even more preferably of about 4:1 (w/w) to about 1:1 (w/w) or of about 3:1 (w/w) to about 1:1 (w/w), and most preferably a ratio of about 3:1 (w/w) to about 2:1 (w/w).

[0352] According to a preferred embodiment, the RNA of the invention comprising at least one coding sequence as defined herein is added in a second step to the complexed RNA of the adjuvant component in order to form the (immunostimulatory) composition of the invention. Therein, the RNA of the composition according to the invention is added as free RNA, preferably as free mRNA, which is not complexed by other compounds. Prior to addition, the free RNA is not complexed and will preferably not undergo any detectable or significant complexation reaction upon the addition of the adjuvant component. This is due to the strong binding of the cationic or polycationic compound to the above described RNA according to the invention comprised in the adjuvant component. In other words, when the RNA comprising at least one coding sequence as defined herein is added to the “adjuvant component”, preferably no free or substantially no free cationic or polycationic compound is present, which could form a complex with the free RNA. Accordingly, an efficient translation of the RNA of the composition is possible in vivo. Therein, the free RNA, preferably an mRNA, may occur as a mono-, di-, or multicistronic (m)RNA, i.e. an RNA which carries the coding sequences of one or more proteins. Such coding sequences in di-, or even multicistronic mRNA may be separated by at least one IRES sequence, e.g. as defined herein.

[0353] In a particularly preferred embodiment, the free RNA as defined herein, which is comprised in the composition of the present invention, may be identical or different to the RNA as defined herein, which is comprised in the adjuvant component of the composition, depending on the specific requirements of therapy. Even more preferably, the free RNA, which is comprised in the composition according to the invention, is identical to the RNA of the adjuvant component of the inventive composition.

[0354] In a particularly preferred embodiment, the composition according to the invention comprises the RNA of the invention, which encodes at least one antigen as defined herein and wherein said RNA is present in the composition partially as free RNA and partially as complexed RNA. Preferably, the RNA as defined herein, preferably an mRNA, is complexed as described above and the same (m)RNA is then added as free RNA, wherein preferably the compound, which is used for complexing the RNA is not present in free form in the composition at the moment of addition of the free RNA component.

[0355] The ratio of the first component (i.e. the adjuvant component comprising or consisting of the RNA as defined herein complexed with a cationic or polycationic compound) and the second component (i.e. the free RNA as defined herein) may be selected in the inventive composition according to the specific requirements of a particular therapy. Typically, the ratio of the RNA in the adjuvant component and the at least one free RNA (RNA in the adjuvant component:free RNA) of the composition according to the invention is selected such that a significant stimulation of the innate immune system is elicited due to the adjuvant component. In parallel, the ratio is selected such that a significant amount of the free RNA can be provided in viva leading to an efficient translation and concentration of the expressed protein in via, e.g. the at least one antigen as defined herein. Preferably the ratio of the RNA in the adjuvant component:free RNA in the inventive composition is selected from a range of about 5:1 (w/w) to about 1:10 (w/w), more preferably from a range of about 4:1 (w/w) to about 1:8 (w/w), even more preferably from a range of about 3:1 (w/w) to about 1:5 (w/w) or 1:3 (w/w), and most preferably the ratio of RNA in the adjuvant component:free RNA in the inventive composition is selected from a ratio of about 1:1 (w/w).

[0356] Additionally or alternatively, the ratio of the first component (i.e. the adjuvant component comprising or consisting of the RNA complexed with a cationic or polycationic compound) and the second component (i.e. the free RNA) may be calculated on the basis of the nitrogen/phosphate ratio (N/P-ratio) of the entire RNA complex. In the context of the present invention, an N/P-ratio is preferably in the range of about 0.1-10, preferably in a range of about 0.3-4 and most preferably in a range of about 0.5-2 or 0.7-2 regarding the ratio of RNA:peptide in the complex, and most preferably in the range of about 0.7-1.5.

[0357] Additionally or alternatively, the ratio of the first component (i.e. the adjuvant component comprising or consisting of the RNA complexed with a cationic or polycationic compound) and the second component (i.e. the free RNA) may also be selected in the composition according to the invention on the basis of the molar ratio of both RNA to each other, i.e. the RNA of the adjuvant component, being complexed with a cationic or polycationic compound and the free RNA of the second component. Typically, the molar ratio of the RNA of the adjuvant component to the free RNA of the second component may be selected such, that the molar ratio suffices the above (w/w) and/or N/P-definitions. More preferably, the molar ratio of the RNA of the adjuvant component to the free RNA of the second component may be selected e.g. from a molar ratio of about 0.001:1, 0.01:1, 0.1:1, 0.2:1, 0.3:1, 0.4:1, 0.5:1, 0.6:1, 0.7:1, 0.8:1, 0.9:1, 1:1, 1:0.9, 1:0.8, 1:0.7, 1:0.6, 1:0.5, 1:0.4, 1:0.3, 1:0.2, 1:0.1, 1:0.01, 1:0.001, etc. or from any range formed by any two of the above values, e.g. a range selected from about 0.001:1 to 1:0.001, including a range of about 0.01:1 to 1:0.001, 0.1:1 to 1:0.001, 0.2:1 to 1:0.001, 0.3:1 to 1:0.001, 0.4:1 to 1:0.001, 0.5:1 to 1:0.001, 0.6:1 to 1:0.001, 0.7:1 to 1:0.001, 0.8:1 to 1:0.001, 0.9:1 to 1:0.001, 1:1 to 1:0.001, 1:0.9 to 1:0.001, 1:0.8 to 1:0.001, 1:0.7 to 1:0.001, 1:0.6 to 1:0.001, 1:0.5 to 1:0.001, 1:0.4 to 1:0.001, 1:0.3 to 1:0.001, 1:0.2 to 1:0.001, 1:0.1 to 1:0.001, 1:0.01 to 1:0.001, or a range of about 0.01:1 to 1:0.01, 0.1:1 to 1:0.01, 0.2:1 to 1:0.01, 0.3:1 to 1:0.01, 0.4:1 to 1:0.01, 0.5:1 to 1:0.01, 0.6:1 to 1:0.01, 0.7:1 to 1:0.01, 0.8:1 to 1:0.01, 0.9:1 to 1:0.01, 1:1 to 1:0.01, 1:0.9 to 1:0.01, 1:0.8 to 1:0.01, 1:0.7 to 1:0.01, 1:0.6 to 1:0.01, 1:0.5 to 1:0.01, 1:0.4 to 1:0.01, 1:0.3 to 1:0.01, 1:0.2 to 1:0.01, 1:0.1 to 1:0.01, 1:0.01 to 1:0.01, or including a range of about 0.001:1 to 1:0.01, 0.001:1 to 1:0.1, 0.001:1 to 1:0.2, 0.001:1 to 1:0.3, 0.001:1 to 1:0.4, 0.001:1 to 1:0.5, 0.001:1 to 1:0.6, 0.001:1 to 1:0.7, 0.001:1 to 1:0.8, 0.001:1 to 1:0.9, 0.001:1 to 1:1, 0.001 to 0.9:1, 0.001 to 0.8:1, 0.001 to 0.7:1, 0.001 to 0.6:1, 0.001 to 0.5:1, 0.001 to 0.4:1, 0.001 to 0.3:1, 0.001 to 0.2:1, 0.001 to 0.1:1, or a range of about 0.01:1 to 1:0.01, 0.01:1 to 1:0.1, 0.01:1 to 1:0.2, 0.01:1 to 1:0.3, 0.01:1 to 1:0.4, 0.01:1 to 1:0.5, 0.01:1 to 1:0.6, 0.01:1 to 1:0.7, 0.01:1 to 1:0.8, 0.01:1 to 1:0.9, 0.01:1 to 1:1, 0.001 to 0.9:1, 0.001 to 0.8:1, 0.001 to 0.7:1, 0.001 to 0.6:1, 0.001 to 0.5:1, 0.001 to 0.4:1, 0.001 to 0.3:1, 0.001 to 0.2:1, 0.001 to 0.1:1, etc.

[0358] Even more preferably, the molar ratio of the RNA of the adjuvant component to the free RNA of the second component may be selected e.g. from a range of about 0.01:1 to 1:0.01. Most preferably, the molar ratio of the RNA of the adjuvant component to the free RNA of the second component may be selected e.g. from a molar ratio of about 1:1. Any of the above definitions with regard to (w/w) and/or N/P ratio may also apply.

[0359] Suitable adjuvants may furthermore be selected from nucleic acids having the formula (Va): GiXmGn, wherein: G is guanosine, uracil or an analogue of guanosine or uracil; X is guanosine, uracil, adenosine, thymidine, cytosine or an analogue of the above-mentioned nucleotides; I is an integer from 1 to 40, wherein when I=1 G is guanosine or an analogue thereof, when I>I at least 50% of the nucleotides are guanosine or an analogue thereof; m is an integer and is at least 3; wherein when m=3 X is uracil or an analogue thereof, when m>3 at least 3 successive uracils or analogues of uracil occur; n is an integer from 1 to 40, wherein when n=1G is guanosine or an analogue thereof, when n>I at least 50% of the nucleotides are guanosine or an analogue thereof, or formula (Vb): (NᵤGₗXₘGₙNᵥ)ₐ (SEQ ID NO: 4601), wherein: G is guanosine (guanine), uridine (uracil) or an analogue of guanosine (guanine) or uridine (uracil), preferably guanosine (guanine) or an analogue thereof; X is guanosine (guanine), uridine (uracil), adenosine (adenine), thymidine (thymine), cytidine (cytosine), or an analogue of these nucleotides (nucleosides), preferably uridine (uracil) or an analogue thereof; N is a nucleic acid sequence having a length of about 4 to 50, preferably of about 4 to 40, more preferably of about 4 to 30 or 4 to 20 nucleic acids, each N independently being selected from guanosine (guanine), uridine (uracil), adenosine (adenine), thymidine (thymine), cytidine (cytosine) or an analogue of these nucleotides (nucleosides); a is an integer from 1 to 20, preferably from 1 to 15, most preferably from 1 to 10; I is an integer from 1 to 40, wherein when I=I, G is guanosine (guanine) or an analogue thereof, when I>1, at least 50% of these nucleotides (nucleosides) are guanosine (guanine) or an analogue thereof; m is an integer and is at least 3; wherein when m=3, X is uridine (uracil) or an analogue thereof, and when m>3, at least 3 successive uridines (uracils) or analogues of uridine (uracil) occur; n is an integer from 1 to 40, wherein when n=1, G is guanosine (guanine) or an analogue thereof, when n>1, at least 50% of these nucleotides (nucleosides) are guanosine (guanine) or an analogue thereof; u,v may be independently from each other an integer from 0 to 50, preferably wherein when u=0, v≥I, or when v=0, u≥I; wherein the nucleic acid molecule of formula (Vb) has a length of at least 50 nucleotides, preferably of at least 100 nucleotides, more preferably of at least 150 nucleotides, even more preferably of at least 200 nucleotides and most preferably of at least 250 nucleotides.

[0360] Other suitable adjuvants may furthermore be selected from nucleic acids having the formula (VI): CₗXₘCₙ (SEQ ID NO: 4602), wherein: C is cytosine, uracil or an analogue of cytosine or uracil; X is guanosine, uracil, adenosine, thymidine, cytosine or an analogue of the above-mentioned nucleotides; I is an integer from 1 to 40, wherein when I=1 C is cytosine or an analogue thereof, when I>I at least 50% of the nucleotides are cytosine or an analogue thereof; m is an integer and is at least 3; wherein when m=3 X is uracil or an analogue thereof, when m>3 at least 3 successive uracils or analogues of uracil occur; n is an integer from 1 to 40, wherein when n=1 C is cytosine or an analogue thereof, when n>1 at least 50% of the nucleotides are cytosine or an analogue thereof.

[0361] In this context the disclosure of WO002008014979 and WO2009095226 is also incorporated herein by reference.

[0362] In a further aspect, the present invention provides a vaccine, which is based on the RNA according to the invention comprising at least one coding sequence as defined herein. The vaccine according to the invention is preferably a (pharmaceutical) composition as defined herein.

[0363] Accordingly, the vaccine according to the invention is based on the same components as the (pharmaceutical) composition described herein. Insofar, it may be referred to the description of the (pharmaceutical) composition as provided herein. Preferably, the vaccine according to the invention comprises the RNA as defined herein and a pharmaceutically acceptable carrier. In embodiments, where the vaccine comprises more than one RNA component (such as a plurality of RNAs according to the invention, wherein each encodes a distinct antigen), the vaccine may be provided in physically separate form and may be administered by separate administration steps. The vaccine according to the invention may correspond to the (pharmaceutical) composition as described herein, especially where the mRNA components are provided by one single composition. However, the inventive vaccine may also be provided physically separated. For instance, in embodiments, wherein the vaccine comprises more than one RNA species, these RNA species may be provided such that, for example, two, three, four, five or six separate compositions, which may contain at least one RNA species each (e.g. three distinct mRNA species), each encoding distinct antigens, are provided, which may or may not be combined. Also, the inventive vaccine may be a combination of at least two distinct compositions, each composition comprising at least one mRNA encoding at least one of the antigens defined herein. Alternatively, the vaccine may be provided as a combination of at least one mRNA, preferably at least two, three, four, five, six or more mRNAs, each encoding one of the antigens defined herein. The vaccine may be combined to provide one single composition prior to its use or it may be used such that more than one administration is required to administer the distinct mRNA species encoding any of the antigen combinations as defined herein. If the vaccine contains at least one mRNA molecule, typically at least two mRNA molecules, encoding of the antigen combinations defined herein, it may e.g. be administered by one single administration (combining all mRNA species), by at least two separate administrations. Accordingly; any combination of mono-, bi- or multicistronic mRNAs encoding the at least one antigen or any combination of antigens as defined herein (and optionally further antigens), provided as separate entities (containing one mRNA species) or as combined entity (containing more than one mRNA species), is understood as a vaccine according to the present invention. According to a particularly preferred embodiment of the inventive vaccine, the at least one antigen, preferably a combination as defined herein of at least two, three, four, five, six or more antigens encoded by the inventive composition as a whole, is provided as an individual (monocistronic) mRNA, which is administered separately.

[0364] As with the (pharmaceutical) composition according to the present invention, the entities of the vaccine may be provided in liquid and or in dry (e.g. lyophilized) form. They may contain further components, in particular further components allowing for its pharmaceutical use. The vaccine or the (pharmaceutical) composition may, e.g., additionally contain a pharmaceutically acceptable carrier and/or further auxiliary substances and additives and/or adjuvants.

[0365] The vaccine or (pharmaceutical) composition typically comprises a safe and effective amount of the RNA according to the invention as defined herein, encoding an antigen as defined herein or a fragment or variant thereof or a combination of antigens, preferably as defined herein. As used herein, “safe and effective amount” means an amount of the RNA that is sufficient to significantly induce a positive modification of cancer or a disease or disorder related to canoer. At the same time, however, a “safe and effective amount” is small enough to avoid serious side-effects, that is to say to permit a sensible relationship between advantage and risk. The determination of these limits typically lies within the scope of sensible medical judgment. In relation to the vaccine or (pharmaceutical) composition of the present invention, the expression “safe and effective amount” preferably means an amount of the RNA (and thus of the encoded antigen) that is suitable for stimulating the adaptive immune system in such a manner that no excessive or damaging immune reactions are achieved but, preferably, also no such immune reactions below a measurable level. Such a “safe and effective amount” of the RNA of the (pharmaceutical) composition or vaccine as defined herein may furthermore be selected in dependence of the type of RNA, e.g. monocistronic, bi- or even multicistronic RNA, since a bi- or even multicistronic RNA may lead to a significantly higher expression of the encoded antigen(s) than the use of an equal amount of a monocistronic RNA. A “safe and effective amount” of the RNA of the (pharmaceutical) composition or vaccine as defined above will furthermore vary in connection with the particular condition to be treated and also with the age and physical condition of the patient to be treated, the severity of the condition, the duration of the treatment, the nature of the accompanying therapy, of the particular pharmaceutically acceptable carrier used, and similar factors, within the knowledge and experience of the accompanying doctor. The vaccine or composition according to the invention can be used according to the invention for human and also for veterinary medical purposes, as a pharmaceutical composition or as a vaccine.

[0366] In a preferred embodiment, the RNA of the (pharmaceutical) composition, vaccine or kit of parts according to the invention is provided in lyophilized form. Preferably, the lyophilized RNA is reconstituted in a suitable buffer, advantageously based on an aqueous carrier, prior to administration, e.g. Ringer-Lactate solution, which is preferred, Ringer solution, a phosphate buffer solution. In a preferred embodiment, the (pharmaceutical) composition, the vaccine or the kit of parts according to the invention contains at least two, three, four, five, six or more RNAs, preferably mRNAs which are provided separately in lyophilized form (optionally together with at least one further additive) and which are preferably reconstituted separately in a suitable buffer (such as Ringer-Lactate solution) prior to their use so as to allow individual administration of each of the (monocistronic) RNAs.

[0367] The vaccine or (pharmaceutical) composition according to the invention may typically contain a pharmaceutically acceptable carrier. The expression “pharmaceutically acceptable carrier” as used herein preferably includes the liquid or non-liquid basis of the inventive vaccine. If the inventive vaccine is provided in liquid form, the carrier will be water, typically pyrogen-free water; isotonic saline or buffered (aqueous) solutions, e.g phosphate, citrate etc. buffered solutions. Particularly for injection of the inventive vaccine, water or preferably a buffer, more preferably an aqueous buffer, may be used, containing a sodium salt, preferably at least 50 mM of a sodium salt, a calcium salt, preferably at least 0.01 mM of a calcium salt, and optionally a potassium salt, preferably at least 3 mM of a potassium salt. According to a preferred embodiment, the sodium, calcium and, optionally, potassium salts may occur in the form of their halogenides, e.g. chlorides, iodides, or bromides, in the form of their hydroxides, carbonates, hydrogen carbonates, or sulfates, etc. Without being limited thereto, examples of sodium salts include e.g. NaCl, NaI, NaBr, Na₂CO₃, NaHCO₃, Na₂SO₄, examples of the optional potassium salts include e.g. KCl, Kl, KBr, K₂CO₃, KHCO₃, K₂SO₄, and examples of calcium salts include e.g. CaCl₂), Cal₂, CaBr₂, CaCO₃, CaSO₄, Ca(OH)₂. Furthermore, organic anions of the aforementioned cations may be contained in the buffer. According to a more preferred embodiment, the buffer suitable for injection purposes as defined above, may contain salts selected from sodium chloride (NaCl), calcium chloride (CaCl₂)) and optionally potassium chloride (KCl), wherein further anions may be present additional to the chlorides. CaCl₂) can also be replaced by another salt like KCl. Typically, the salts in the injection buffer are present in a concentration of at least 50 mM sodium chloride (NaCl), at least 3 mM potassium chloride (KCl) and at least 0.01 mM calcium chloride (CaCl₂)). The injection buffer may be hypertonic, isotonic or hypotonic with reference to the specific reference medium, i.e. the buffer may have a higher, identical or lower salt content with reference to the specific reference medium, wherein preferably such concentrations of the afore mentioned salts may be used, which do not lead to damage of cells due to osmosis or other concentration effects. Reference media are e.g. in “in vivo” methods occurring liquids such as blood, lymph, cytosolic liquids, or other body liquids, or e.g. liquids, which may be used as reference media in “in vitro” methods, such as common buffers or liquids. Such common buffers or liquids are known to a skilled person. Ringer-Lactate solution is particularly preferred as a liquid basis.

[0368] However, one or more compatible solid or liquid fillers or diluents or encapsulating compounds may be used as well, which are suitable for administration to a person. The term “compatible” as used herein means that the constituents of the inventive vaccine are capable of being mixed with the RNA according to the invention as defined herein, in such a manner that no interaction occurs, which would substantially reduce the pharmaceutical effectiveness of the inventive vaccine undertypical use conditions. Pharmaceutically acceptable carriers, fillers and diluents must, of course, have sufficiently high purity and sufficiently low toxicity to make them suitable for administration to a person to be treated. Some examples of compounds which can be used as pharmaceutically acceptable carriers, fillers or constituents thereof are sugars, such as, for example, lactose, glucose, trehalose and sucrose; starches, such as, for example, corn starch or potato starch; dextrose; cellulose and its derivatives, such as, for example, sodium carboxymethylcellulose, ethylcellulose, cellulose acetate; powdered tragacanth; malt; gelatin; tallow; solid glidants, such as, for example, stearin acid, magnesium stearate; calcium sulfate; vegetable oils, such as, for example, groundnut oil, cottonseed oil, sesame oil, olive oil, corn oil and oil from theobroma; polyols, such as, for example, polypropylene glycol, glycerl, sorbitol, mannitol and polyethylene glycol; alginin acid.

[0369] The choice of a pharmaceutically acceptable carrier is determined, in principle, by the manner, in which the pharmaceutical composition or vaccine according to the invention is administered. The composition or vaccine can be administered, for example, systemically or locally. Routes for systemic administration in general include, for example, transdermal, oral, parenteral routes, including subcutaneous, intravenous, intramuscular, intraarterial, intradermal and intraperitoneal injections and/or intranasal administration routes. Routes for local administration in general include, for example, topical administration routes but also intradermal, transdermal, subcutaneous, or intramuscular injections or intralesional, intracranial, intrapulmonal, intracardial, and sublingual injections. More preferably, composition or vaccines according to the present invention may be administered by an intradormal, subcutaneous, or intramuscular route, preferably by injection, which may be needle-free and/or needle injection. Compositions/vaccines are therefore preferably formulated in liquid or solid form. The suitable amount of the vaccine or composition according to the invention to be administered can be determined by routine experiments, e.g. by using animal models. Such models include, without implying any limitation, rabbit, sheep, mouse, rat, dog and non-human primate models. Preferred unit dose forms for injection include sterile solutions of water, physiological saline or mixtures thereof. The pH of such solutions should be adjusted to about 7.4. Suitable carriers for injection include hydrogels, devices for controlled or delayed release, polylactic acid and collagen matrices. Suitable pharmaceutically acceptable carriers for topical application include those which are suitable for use in lotions, creams, gels and the like. If the inventive composition or vaccine is to be administered perorally, tablets, capsules and the like are the preferred unit dose form. The pharmaceutically acceptable carriers for the preparation of unit dose forms which can be used for oral administration are well known in the prior art. The choice thereof will depend on secondary considerations such as taste, costs and storability, which are not critical for the purposes of the present invention, and can be made without difficulty by a person skilled in the art.

[0370] The inventive vaccine or composition can additionally contain one or more auxiliary substances in order to further increase the immunogenicity. A synergistic action of the RNA according to the invention and of an auxiliary substance, which may be optionally be co-formulated (or separately formulated) with the inventive vaccine or composition as described above, is preferably achieved thereby. Depending on the various types of auxiliary substances, various mechanisms may play a role in this respect. For example, compounds that permit the maturation of dendritic cells (DCs), for example lipopolysaccharides, TNF-alpha or CD40 ligand, form a first class of suitable auxiliary substances. In general, it is possible to use as auxiliary substance any agent that influences the immune system in the manner of a “danger signal” (LPS, GP96, etc.) or cytokines, such as GM-CFS, which allow an immune response produced by the immune-stimulating adjuvant according to the invention to be enhanced and/or influenced in a targeted manner. Particularly preferred auxiliary substances are cytokines, such as monokines, lymphokines, interleukins or chemokines, that—additional to induction of the adaptive immune response by the encoded at least one antigen—promote the innate immune response, such as IL-1, IL-2, IL-3, IL-4, IL-5, IL-6, IL-7, IL-8, IL-9, IL-10, IL-12, IL-13, IL-14, IL-15, IL-16, IL-17, IL-18, IL-19, IL-20, IL-21, IL-22, IL-23, IL-24, IL-25, IL- 26, IL-27, IL-28, IL-29, IL-30, IL-31, IL-32, IL-33, INF-alpha, IFN-beta, INF-gamma, GM-CSF, 6-CSF, M-CSF, LT-beta or TNF-alpha, growth factors, such as hGH. Preferably, such immunogenicity increasing agents or compounds are provided separately (not co-formulated with the inventive vaccine or composition) and administered individually.

[0371] Further additives which may be included in the inventive vaccine or composition are emulsifiers, such as, for example, Tween; wetting agents, such as, for example, sodium lauryl sulfate; colouring agents; taste-imparting agents, pharmaceutical carriers; tablet-forming agents; stabilizers; antioxidants; preservatives.

[0372] The inventive vaccine or composition can also additionally contain any further compound, which is known to be immune-stimulating due to its binding affinity (as ligands) to human Toll-like receptors TLR1, TLR2, TLR3, TLR4, TLR5, TLRG, TLR7, TLR8, TLR9, TLR10, or due to its binding affinity (as ligands) to murine Toll-like receptors TLR1, TLR2, TLR3, TLR4, TLR5, TLR6, TLR7, TLR8, TLR9, TLR10, TLR11, TLR12 or TLR13.

[0373] Another class of compounds, which may be added to an inventive vaccine or composition in this context, may be CpG nucleic acids, in particular CpG-RNA or CpG-DNA. A CpG-RNA or CpG-DNA can be a single-stranded CpG-DNA (ss CpG-DNA), a double-stranded CpG-DNA (dsDNA), a single-stranded CpG-RNA (ss CpG-RNA) or a double-stranded CpG-RNA (ds CpG-RNA). The CpG nucleic acid is preferably in the form of CpG-RNA, more preferably in the form of single-stranded CpG-RNA (ss CpG-RNA). The CpG nucleic acid preferably contains at least one or more (mitogenic) cytosine/guanine dinucleotide sequence(s) (CpG motif(s)). According to a first preferred alternative, at least one CpG motif contained in these sequences, that is to say the C (cytosine) and the G (guanine) of the CpG motif, is unmethylated. All further cytosines or guanines optionally contained in these sequences can be either methylated or unmethylated. According to a further preferred alternative, however, the C (cytosine) and the G (guanine) of the CpG motif can also be present in methylated form.

[0374] According to one aspect of the present invention, the RNA, the (pharmaceutical) composition or the vaccine may be used according to the invention (for the preparation of a medicament) for the treatment or prophylaxis of cancer and diseases or disorders related thereto.

[0375] As used heroin, the term “cancer” refers to the broad class of disorders and malignancies characterized by hyperproliferative cell growth, either in vitro (e.g., transformed cells) or in viva. Conditions which can be treated or prevented by the compositions and methods of the invention include, e.g., a variety of neoplasms, including benign or malignant tumours, a variety of hyperplasias, or the like. Compositions and methods of the invention can achieve the inhibition and/or reversion of undesired hyperproliferative cell growth involved in such conditions. Specific examples of cancer include Acute Lymphoblastic Leukemia, Adult; Acute Lymphoblastic Leukemia, Childhood; Acute Myeloid Leukemia, Adult; Adrenocortical Carcinoma; Adrenocortical Carcinoma, Childhood; AIDS-Related Lymphoma; AIDS-Related Malignancies; Anal Cancer; Astrocytoma, Childhood Cerebellar; Astrocytoma, Childhood Cerebral; Bile Duct Cancer, Extrahepatic; Bladder Cancer; Bladder Cancer, Childhood; Bone Cancer, Osteosarcoma/Malignant Fibrous Histiocytoma; Brain Stem Glioma, Childhood; Brain Tumor, Adult; Brain Tumor, Brain Stem Glioma, Childhood; Brain Tumor, Cerebellar Astrocytoma, Childhood; Brain Tumor, Cerebral Astrocytoma/Malignant Glioma, Childhood; Brain Tumor, Ependymoma, Childhood; Brain Tumor, Medulloblastoma, Childhood; Brain Tumor, Supratentorial Primitive Neuroectodermal Tumors, Childhood; Brain Tumor, Visual Pathway and Hypothalamic Glioma, Childhood; Brain Tumor, Childhood (Other); Breast Cancer; Breast Cancer and Pregnancy; Breast Cancer, Childhood; Breast Cancer, Male; Bronchial Adenomas/Carcinoids, Childhood: Carcinoid Tumor, Childhood; Carcinoid Tumor, Gastrointestinal; Carcinoma, Adrenocortical; Carcinoma, Islet Cell; Carcinoma of Unknown Primary; Central Nervous System Lymphoma, Primary; Cerebellar Astrocytoma, Childhood; Cerebral Astrocytoma/Malignant Glioma, Childhood; Cervical Cancer; Childhood Cancers; Chronic Lymphocytic Leukemia; Chronic Myelogenous Leukemia; Chronic Myeloproliferative Disorders; Clear Ceil Sarcoma of Tendon Sheaths; Colon Cancer; Colorectal Cancer, Childhood; Cutaneous T-Cell Lymphoma; Endometrial Cancer; Ependymoma, Childhood; Epithelial Cancer, Ovarian; Esophageal Cancer; Esophageal Cancer, Childhood; Ewing's Family of Tumors; Extracranial Germ Cell Tumor, Childhood; Extragonadal Germ Cell Tumor; Extrahepatic Bile Duct Cancer; Eye Cancer, Intraocular Melanoma; Eye Cancer, Retinoblastoma; Gallbladder Cancer; Gastric (Stomach) Cancer; Gastric (Stomach) Cancer, Childhood; Gastrointestinal Carcinoid Tumor; Germ Cell Tumor, Extracranial, Childhood; form Cell Tumor, Extragonadal; germ Cell Tumor, Ovarian; Gestational Trophoblastic Tumor; Glioma. Childhood Brain Stem; Glioma. Childhood Visual Pathway and Hypothalamic; Hairy Cell Leukemia; Head and Nock Cancer; Hepatocellular (Liver) Cancer, Adult (Primary); Hepatocellular (Liver) Cancer, Childhood (Primary); Hodgkin's Lymphoma, Adult; Hodgkin's Lymphoma, Childhood; Hodgkin's Lymphoma During Pregnancy; Hypopharyngeal Cancer; Hypothalamic and Visual Pathway Glioma, Childhood; Intraocular Melanoma; Islet Cell Carcinoma (Endocrine Pancreas); Kaposi's Sarcoma; Kidney Cancer; Laryngeal Cancer; Laryngeal Cancer, Childhood; Leukemia, Acute Lymphoblastic, Adult; Leukemia, Acute Lymphoblastic, Childhood; Leukemia, Acute Myeloid, Adult; Leukemia, Acute Myeloid, Childhood; Leukemia, Chronic Lymphocytic; Leukemia, Chronic Myelogenous; Leukemia, Hairy Cell; Lip and Oral Cavity Cancer; Liver Cancer, Adult (Primary); Liver Cancer, Childhood (Primary); Lung Cancer, Non-Small Cell; Lung Cancer, Small Cell; Lymphoblastic Leukemia, Adult Acute; Lymphoblastic Leukemia, Childhood Acute; Lymphocytic Leukemia, Chronic; Lymphoma, AIDS-Related; Lymphoma, Central Nervous System (Primary); Lymphoma, Cutaneous T-Cell; Lymphoma, Hodgkin's, Adult; Lymphoma, Hodgkin's; Childhood; Lymphoma, Hodgkin's During Pregnancy; Lymphoma, Non-Hodgkin's, Adult; Lymphoma, Non-Hodgkin's, Childhood; Lymphoma, Non-Hodgkin's During Pregnancy; Lymphoma, Primary Central Nervous System; Macroglobulinemia, Waldenstrom's; Male Breast Cancer; Malignant Mesothelioma, Adult; Malignant Mesothelioma, Childhood; Malignant Thymoma; Medulloblastoma, Childhood; Melanoma; Melanoma, Intraocular; Merkel Ceil Carcinoma; Mesothelioma, Malignant; Metastatic Squamous Nock Cancer with Occult Primary; Multiple Endocrine Neoplasia Syndrome, Childhood; Multiple Myeloma/Plasma Ceil Neoplasm; Mycosis Fungoides; Myelodysplasia Syndromes; Myelogenous Leukemia, Chronic; Myeloid Leukemia, Childhood Acute; Myeloma, Multiple; Myeloproliferative Disorders, Chronic; Nasal Cavity and Paranasal Sinus Cancer; Nasopharyngeal Cancer; Nasopharyngeal Cancer, Childhood; Neuroblastoma; Neurofibroma; Non-Hodgkin's Lymphoma, Adult; Non-Hodgkin's Lymphoma, Childhood; Non-Hodgkin's Lymphoma During Pregnancy; Non-Small Ceil Lung Cancer; Oral Cancer, Childhood; Oral Cavity and Lip Cancer; Oropharyngeal Cancer; Osteosarcoma/Malignant Fibrous Histiocytoma of Bone; Ovarian Cancer, Childhood; Ovarian Epithelial Cancer; Ovarian Germ Ceil Tumor; Ovarian Low Malignant Potential Tumor; Pancreatic Cancer; Pancreatic Cancer, Childhood', Pancreatic Cancer, Islet Cell; Paranasal Sinus and Nasal Cavity Cancer; Parathyroid Cancer; Penile Cancer; Pheochromocytoma; Pineal and Supratentorial Primitive Neuroectodermal Tumors, Childhood; Pituitary Tumor; Plasma Ceil Neoplasm/Multiple Myeloma; Pleuropulmonary Blastoma; Pregnancy and Breast Cancer; Pregnancy and Hodgkin's Lymphoma; Pregnancy and Non-Hodgkin's Lymphoma; Primary Central Nervous System Lymphoma; Primary Liver Cancer, Adult; Primary Liver Cancer, Childhood; Prostate Cancer; Rectal Cancer; Renal Ceil (Kidney) Cancer; Renal Ceil Cancer, Childhood; Renal Pelvis and Ureter, Transitional Cell Cancer; Retinoblastoma; Rhabdomyosarcoma, Childhood; Salivary Gland Cancer; Salivary Gland'Cancer, Childhood; Sarcoma, Ewing's Family of Tumors; Sarcoma, Kaposi's; Sarcoma (Osteosarcoma)/Malignant Fibrous Histiocytoma of Bone; Sarcoma, Rhabdomyosarcoma, Childhood; Sarcoma, Soft Tissue, Adult; Sarcoma, Soft Tissue, Childhood; Sezary Syndrome; Skin Cancer; Skin Cancer, Childhood; Skin Cancer (Melanoma); Skin Carcinoma, Merkel Cell; Small Cell Lung Cancer; Small Intestine Cancer; Soft Tissue Sarcoma, Adult; Soft Tissue Sarcoma, Childhood; Squamous Nock Cancer with Occult Primary, Metastatic; Stomach (Gastric) Cancer; Stomach (Gastric) Cancer, Childhood; Supratentorial Primitive Neuroectodermal Tumors, Childhood; T-Cell Lymphoma, Cutaneous; Testicular Cancer; Thymoma, Childhood; Thymoma, Malignant; Thyroid Cancer; Thyroid Cancer, Childhood; Transitional Cell Cancer of the Renal Pelvis and Ureter; Trophoblastic Tumor, Gestational; Unknown Primary Site, Cancer of, Childhood; Unusual Cancers of Childhood; Ureter and Renal Pelvis, Transitional Cell Cancer; Urethral Cancer; Uterine Sarcoma; Vaginal Cancer; Visual Pathway and Hypothalamic Glioma, Childhood; Vulvar Cancer; Waldenstrom's Macro globulinemia; and Wilms' Tumor.

[0376] In this context, also included in the present invention are methods of treating or preventing cancer and diseases or disorders related thereto, preferably as defined herein, by administering to a subject in need thereof a pharmaceutically effective amount of the RNA, the pharmaceutical composition or the vaccine according to the invention. Such a method typically comprises an optional first step of preparing the RNA, the composition or the vaccine of the present invention, and a second step, comprising administering (a pharmaceutically effective amount of) said composition or vaccine to a patient/subject in need thereof. A subject in need thereof will typically be a mammal. In the context of the present invention, the mammal is preferably selected from the group comprising, without being limited thereto, e.g. goat, cattle, swine, dog, cat, donkey, monkey, ape, a rodent such as a mouse, hamster, rabbit and, particularly, human, wherein the mammal typically suffers from cancer, and/or diseases or disorders related thereto (as defined herein).

[0377] The invention also relates to the use of the RNA, the composition or the vaccine according to the invention, preferably for eliciting an immune response in a mammal, preferably for the treatment or prophylaxis of cancer or a related condition as defined herein.

[0378] The subject receiving the pharmaceutical composition or the vaccine according to the invention may be a patient with cancer, preferably as defined herein, or a related condition, receiving chemotherapy (e.g. first-line or second-line chemotherapy), radiotherapy, chemoradiation (combination of chemotherapy and radiotherapy), tyrosine kinase inhibitors (e.g. EGFR tyrosine kinase inhibitors), antibody therapy and/or inhibitory and/or stimulatory checkpoint molecules (e.g. CTLA4 inhibitors, PD1 pathway inhibitors), or a patient, who has achieved partial response or stable disease after having received one or more of the treatments specified above.

[0379] The present invention furthermore comprises the use of the (pharmaceutical) composition or the RNA according to the invention as defined herein for modulating, preferably for inducing or enhancing, an immune response in a mammal as defined herein, more preferably for treating and/or for supporting the treatment or prophylaxis of cancer, preferably as defined herein, or of diseases or disorders related thereto. In this context, support of the treatment or prophylaxis of cancer may be any combination of a conventional cancer therapy method of such as surgery, radiation therapy, chemotherapy (e.g. first-line or second-line chemotherapy), chemoradiation, treatment with tyrosine kinase inhibitors, treatment with inhibitory and/or stimulatory checkpoint molecules, preferably CTA4 inhibitors, PD-I pathway inhibitors, antibody therapy or any combination of these, and a therapy using the RNA or the pharmaceutical composition as defined herein. Support of the treatment or prophylaxis of cancer may be also envisaged in any of the other embodiments defined herein. Accordingly, any use of the RNA, the (pharmaceutical) composition or the vaccine according to the invention in co-therapy with any other approach, preferably one or more of the above therapeutic approaches, in particular in combination with surgery, radiation therapy, chemotherapy, chemoradiation, and/or treatment with kinase inhibitors, inhibitory and/or stimulatory checkpoint molecules or antibodies is within the scope of the present invention.

[0380] In this context, antibodies and/or inhibitory and/or stimulatory checkpoint molecules used for combination with the RNA, the vaccine or the (pharmaceutical) composition according to the invention may be encoded by a nucleic acid, preferably an RNA and most preferably by an mRNA.

[0381] For administration, preferably any of the administration routes may be used as defined herein. In particular, an administration route is used, which is suitable for treating or preventing cancer, preferably a cancer disease as defined herein or diseases or disorders related thereto, by inducing or enhancing an adaptive immune response on the basis of an antigen encoded by the RNA according to the invention.

[0382] Administration of the composition and/or the vaccine according to the invention may then occur prior, concurrent and/or subsequent to administering another composition and/or vaccine as defined herein, which may—in addition—contain another RNA or combination of RNAs encoding a different antigen or combination of antigens, wherein each antigen encoded by the RNA according to the invention is preferably suitable for the treatment or prophylaxis of cancer and diseases or disorders related thereto. In this context, a treatment as defined herein may also comprise the modulation of a disease associated to cancer and of diseases or disorders related thereto.

[0383] According to a preferred embodiment of this aspect of the invention, the (pharmaceutical) composition or the vaccine according to the invention is administered by injection. Any suitable injection technique known in the art may be employed. Preferably, the inventive composition is administered by injection, preferably by needle-loss injection, for example by jet-injection.

[0384] In one embodiment, the inventive composition comprises at least two, three, four, five, six, seven, eight, nine, ten, eleven, twelve or more RNAs as defined herein, each of which is preferably injected separately, preferably by needle-loss injection. Alternatively, the inventive composition comprises at least two, three, four, five, six, seven, eight, nine, ten, eleven, twelve or more RNAs, wherein the at least two, three, four, five, six, seven, eight, nine, ten, eleven, twelve or more RNAs are administered, preferably by injection as defined herein, as a mixture.

[0385] The immunization protocol for the immunization of a subject against an antigen or a combination of at least two, three, four, five, six, seven, eight, nine, ten, eleven, twelve or more antigens as defined herein typically comprises a series of single doses or dosages of the (pharmaceutical) composition or the vaccine according to the invention. A single dosage, as used herein, refers to the initial/first dose, a second dose or any further doses, respectively, which are preferably administered in order to “boost” the immune reaction. In this context, each single dosage preferably comprises the administration of the same antigen or the same combination of antigens as defined herein, wherein the interval between the administration of two single dosages can vary from at least one day, preferably 2, 3, 4, 5, 6 or 7 days, to at least one week, preferably 2, 3, 4, 5, 6, 7 or 8 weeks. The intervals between single dosages may be constant or vary over the course of the immunization protocol, e.g. the intervals may be shorter in the beginning and longer towards the end of the protocol.

[0386] Depending on the total number of single dosages and the interval between single dosages, the immunization protocol may extend over a period of time, which preferably lasts at least one week, more preferably several weeks (e.g. 2, 3, 4, 5, 6, 7, 8, 9, 10, 11 or 12 weeks), even more preferably several months (e.g. 3, 4, 5, 6, 7, 8, 9, 10, 11, 12, 18 or 24 months). Each single dosage preferably encompasses the administration of an antigen, preferably of a combination of at least two, three, four, five, six, seven, eight, nine, ten, eleven, twelve or more antigens as defined herein and may therefore involve at least one, preferably 1, 2, 3, 4, 5, 6, 7, 8, 9, 10, 11 or 12 injections. In some cases, the composition or the vaccine according to the invention is administered as a single dosage typically in one injection. In the case, where the vaccine according to the invention comprises separate RNA formulations encoding distinct antigens as defined herein, the minimum number of injections carried out during the administration of a single dosage corresponds to the number of separate components of the vaccine. In certain embodiments, the administration of a single dosage may encompass more than one injection for each component of the vaccine (e.g. a specific RNA formulation comprising an RNA encoding, for instance, one antigen as defined herein).

[0387] For example, parts of the total volume of an individual component of the vaccine may be injected into different body parts, thus involving more than one injection. In a more specific example, a single dosage of a vaccine comprising four separate RNA formulations, each of which is administered in two different body parts, comprises eight injections. Typically, a single dosage comprises all injections required to administer all components of the vaccine, wherein a single component may be involve more than one injection as outlined above. In the case, where the administration of a single dosage of the vaccine according to the invention encompasses more than one injection, the injection are carried out essentially simultaneously or concurrently, i.e. typically in a time-staggered fashion within the time-frame that is required for the practitioner to carry out the single injection steps, one after the other. The administration of a single dosage therefore preferably extends over a time period of several minutes, e.g. 2, 3, 4, 5, 10, 15, 30 or 60 minutes.

[0388] Administration of the RNA as defined herein, the (pharmaceutical) composition or the vaccine according to the invention may be carried out in a time staggered treatment. A time staggered treatment may be e.g. administration of the RNA, the composition or the vaccine prior, concurrent and/or subsequent to a conventional therapy of cancer or diseases or disorders related thereto, e.g. by administration of the RNA, the composition or the vaccine prior, concurrent and/or subsequent to a therapy or an administration of a therapeutic suitable for the treatment or prophylaxis of cancer or diseases or disorders related thereto. Such time staggered treatment may be carried out using e.g. a kit, preferably a kit of parts as defined herein.

[0389] Time staggered treatment may additionally or alternatively also comprise an administration of the RNA as defined herein, the (pharmaceutical) composition or the vaccine according to the invention in a form, wherein the RNA encoding an antigen as defined herein or a fragment or variant thereof, preferably forming part of the composition or the vaccine, is administered parallel, prior or subsequent to another RNA encoding an antigen as defined above, preferably forming part of the same inventive composition or vaccine. Preferably, the administration (of all RNAs) occurs within an hour, more preferably within 30 minutes, even more preferably within 15, 10, 5, 4, 3, or 2 minutes or even within 1 minute. Such time staggered treatment may be carried out using e.g. a kit, preferably a kit of parts as defined herein.

[0390] In a preferred embodiment, the pharmaceutical composition or the vaccine of the present invention is administered repeatedly, wherein each administration preferably comprises individual administration of the at least one mRNA of the inventive composition or vaccine. At each time point of administration, the at least one mRNA may be administered more than once (e.g. 2 or 3 times). In a particularly preferred embodiment of the invention, at least two, three, four, five, six or more RNAs (each encoding a distinct one of the antigens as defined herein) are administered at each time point, wherein each RNA is administered twice by injection, distributed over the four limbs.

[0391] According to another aspect of the present invention, the present invention also provides a kit, in particular a kit of parts, comprising the RNA as defined herein, the (pharmaceutical) composition, and/or the vaccine according to the invention, optionally a liquid vehicle for solubilising and optionally technical instructions with information on the administration and dosage of the RNA, the composition and/or the vaccine. The technical instructions may contain information about administration and dosage of the RNA, the composition and/or the vaccine. Such kits, preferably kits of parts, may be applied e.g. For any of the above mentioned applications or uses, preferably for the use of the RNA according to the invention (for the preparation of an inventive medicament, preferably a vaccine) for the treatment or prophylaxis of cancer or diseases or disorders related thereto. The kits may also be applied for the use of the RNA, the composition or the vaccine as defined herein (for the preparation of an inventive vaccine) for the treatment or prophylaxis of cancer or diseases or disorders related thereto, wherein the RNA, the composition and/or the vaccine may be capable of inducing or enhancing an immune response in a mammal as defined above. Such kits may further be applied for the use of the RNA, the composition or the vaccine as defined herein (for the preparation of an inventive vaccine) for modulating, preferably for eliciting, e.g. to induce or enhance, an immune response in a mammal as defined above, and preferably for supporting treatment or prophylaxis of cancer or diseases or disorders related thereto. Kits of parts, as a special form of kits, may contain one or more identical or different compositions and/or one or more identical or different vaccines as described herein in different parts of the kit. Kits of parts may also contain an (e.g. one) composition, an (e.g. one) vaccine and/or the RNA according to the invention in different parts of the kit, e.g. each part of the kit containing an RNA as defined herein, preferably encoding a distinct antigen. Preferably, the kit or the kit of parts contains as a part a vehicle for solubilising the RNA according to the invention, the vehicle preferably being Ringer-lactate solution. Any of the above kits may be used in a treatment or prophylaxis as defined above.

[0392] In another embodiment of this aspect, the kit according to the present invention may additionally contain at least one adjuvant. In a further embodiment, the kit according to the present invention may additionally contain at least one further pharmaceutically active component, preferably a therapeutic compound suitable for treatment and/or prophylaxis of cancer or a related disorder. Moreover, in another embodiment, the kit may additionally contain parts and/or devices necessary or suitable for the administration of the composition or the vaccine according to the invention, including needles, applicators, patches, injection-devices.

### EXAMPLES

[0393] The Examples shown in the following are merely illustrative and shall describe the present invention in a further way. These Examples shall not be construed to limit the present invention thereto.

### Example 1: Preparation of mRNA Cancer Vaccine

[0394] 1.1 Preparation of DNA and mRNA Constructs

[0395] For the present examples, DNA sequences encoding cancer antigens, are prepared and used for subsequent RNA in vitro transcription reactions.

[0396] Most DNA sequences were prepared by modifying the wild type encoding DNA sequences by introducing a C-optimized sequence. Sequences were introduced into a pUC19 derived vector and modified to comprise stabilizing sequences derived from alpha-globin-3′-UTR, a stretch of 30 cytosines, and a stretch of 64 adenosines at the 3′-terminal end (poly-A-tail).

[0397] The following constructs, coding for the indicated antigens, are used in the present example:

[0398] NY-ESO-1 (SEQ ID NO: 4586), PSA (SEQ ID NO: 4590), PSM (SEQ ID NO: 4589), MAGE-A2 (SEQ ID NO: 4588), MAGE-A3 (SEQ ID NO: 4587), MAGE-C2 (SEQ ID NO: 4585) and PMEL (SEQ ID NO: 4591).

[0399] The obtained plasmid DNA constructs were transformed and propagated in bacteria (Escherichia coli) using common protocols known in the art.

### 1.2. RNA In Vitro Transcription

[0400] The DNA plasmids prepared according to paragraph 1 are enzymatically linearized using EonRI and transcribed in vitro using DNA dependent T7 RNA polymerase in the presence of a nucleotide mixture and CAP analog (m7GpppG) under suitable buffer conditions. The obtained mRNAs purified using PureMessenger® (CureVac, Tobingen, Germany; WO 2008/077592 A1) are used for in vivo vaccination experiments (see Examples 2-6).

1.3. Preparation of Protamine Complexed mRNA (“RNActive® Formulation”):

[0401] The obtained antigen mRNA constructs were complexed with protamine prior to use in in viva vaccination experiments. The mRNA complexation consists of a mixture of 50% free mRNA and 50% mRNA complexed with protamine at a weight ratio of 2:1. First, mRNA is complexed with protamine by addition of protamine-Ringer's lactate solution to mRNA. After incubation for 10 minutes, when the complexes are stably generated, free mRNA is added, and the final concentration of the vaccine is adjusted with Ringer's lactate solution.

### Example 2: Vaccination Experiment with NY-ESO-1 mRNA Vaccine

[0402] To test the NY-ESO-1 mRNA vaccine obtained according to Example 1 in viva, C57GL/6 mice were intradermally injected with NY-ESO-1 mRNA vaccine. The immune responses of NY-ESO-1 vaccinated mice were analysed (NY-ESO-1 specific immune response and NY-ESD1 specific cellular immune response). A detailed description of the experiment is provided below.

### 2.1. Detection of an NY-ESO-1-Specific Immune Response (B-Cell Immune Response):

[0403] For vaccination 5 mice (C57 BL/6) per group were intradermally injected 8 times within 3 weeks with NY-ESO-1 mRNA vaccine. As negative control lacZ mRNA was injected. Detection of an antigen-specific immune response (B-cell immune response) was carried out by detecting NY-ESO-1 specific antibodies. Therefore, blood samples were taken from the vaccinated mice one week after the last vaccination and sera were prepared. MaxiSorb plates (Nalgene Nunc International) were coated with the antigenic protein (0.5 μg/well). After blocking with 1×PBS containing 0.05% Tween-20 and 1% BSA the plates were incubated with diluted mouse serum (1:30, 1:90, 1:270, 1:810). Subsequently a biotin-coupled secondary antibody (anti-mouse-IgG2a, Pharmingen) was added. After washing, the plate was incubated with horseradish peroxidase-streptavidin and subsequently the conversion of the ABTS substrate (2,2′-azino-bis(3-ethyl-benzothiazoline-6-sulfonic acid) was measured. The result of the experiment is shown in FIG. 1.

### 2.2. Detection of an NY-ESO-1-Specific Cellular Immune Response (CTL) by ELISPOT

[0404] 2 weeks after the last vaccination mice were sacrificed, the spleens were removed and the splenocytes were isolated. The splenocytes were restimulated for 7 days in the presence of NY-ESO-1 peptides (peptide library); a peptide library of HIV antigen was used as control. To determine an antigen-specific cellular immune response IFNgamma secretion was measured after re-stimulation with peptide. For detection of IFNgamma a coat multiscreen plate (Millipore) was incubated overnight with coating buffer (0.1 M Carbonat-Bicarbonat Buffer pH 0.6, 10.59 g/l Na₂CO₃, 8.4 g/l NaHCO₃) comprising antibody against IFNgamma (RD Pharmingen, Heidelberg, Germany). After coating effector cells (5×10⁵/well) were incubated with the antigen-specific peptide library, an unspecific peptide, DMSO or medium as control for 24h in the plate. Subsequently the plate was washed with 1×PBS and incubated with a biotin-coupled secondary antibody. After washing with 1×PBS/0.05% Tween-20 the substrate (5-Bromo-4-Cloro-3-Indolyl Phosphate/Nitro Blue Tetrazolium Liquid Substrate System from Sigma Aldrich, Taufkirchen, Germany) was added to the plate and the conversion of the substrate could be detected visually. The results are shown in FIG. 1.

### Results:

[0405] The data shows that we detected antigen specific IgG2a antibodies in serum of mice vaccinated with the NY-ESO-1 mRNA vaccine demonstrating that the mRNAs are functional and immunogenic in viva. The result is shown in FIG. 1. The presence of antigen-specific cytotoxic T-cells in splenocytes from NY-ESO-1 vaccinated mice was investigated using the ELISPOT technique. As shown in FIG. 2, the stimulation with NY-ESO-1 peptide library led to high IFN-gamma secretion in splenocytes from mice vaccinated with NY-ESO-1 mRNA vaccine and not in splenocytes from control mice, vaccinated with mRNA coding for irrelevant protein beta-galactosidase. None of the splenocytes reacted to the HIV-derived control peptide library. The result is shown in FIG. 2.

[0406] Overall, the results shown in FIG. 1 and FIG. 2 demonstrate that the inventive NY-ESO-1 mRNA vaccine induces antigen specific R-cell and T-cell responses in viva.

### Example 3: Vaccination Experiment with PSA mRNA Vaccine

[0407] To test the PSA mRNA vaccine obtained according to Example in viva, C57BL/6 mice were intradermally injected with PSA mRNA vaccine. The immune responses of PSA vaccinated mice were analysed (PSA specific immune response and PSA specific cellular immune response). The results of the experiment are shown in FIGS. 3 and 4. A detailed description of the experiment is provided below.

### 3.1. Detection of an PSA-Specific Immune Response (B-Cell Immune Response):

[0408] For vaccination 4 mice (C57 BL/6) per group were intradermally injected 4 times within 3 weeks with 5 μg PSA mRNA vaccine. As negative control, an injection buffer was applied. Detection of an antigen-specific immune response (B-cell immune response) was carried out by detecting PSA specific antibodies. The detection of antigen-specific immune response (B-cell immune response) was performed according to Example 2.2. The results are shown in FIG. 3.

### 3.2. Detection of an PSA-Specific Cellular Immune Response by ELISPOT:

[0409] 2 months after the last vaccination mice were sacrificed, the spleens were removed and the splenocytes were isolated. The splenocytes were incubated for 7 days in presence of IL-4 to select dendritic cells. To determine an antigen-specific cellular immune response INFgamma secretion was measured after re-stimulation. The detection of an antigen-specific cellular immune response by ELISPOT was essentially performed according to Example 2.3. The results are shown in FIG. 4.

### Results:

[0410] The data shows that we detected antigen specific IgG2a antibodies in serum of mic vaccinated with the PSA mRNA vaccine demonstrating that the mRNAs are functional and immunogenic in viva. The result is shown in FIG. 3. The presence of antigen-specific cytotoxic T-cells in splenocytes from PSA vaccinated mice was investigated using the ELISPOT technique. As shown in FIG. 4, the stimulation with PSA peptide library led to high IFN-gamma secretion in splenocytes from mice vaccinated with PSA mRNA vaccine and not in splenocytes from control mice, vaccinated with buffer. None of the splenocytes reacted to the control peptide library. The result is shown in FIG. 4.

[0411] Overall, the results shown in FIG. 3 and FIG. 4 demonstrate that the inventive PSA mRNA vaccine induces antigen specific B-cell and T-cell responses in viva.

### Example 4: Vaccination Experiment with PSM mRNA Vaccine

[0412] To test the PSM mRNA vaccine obtained according to Example 1 is viva, C57BL/6 mice were intradermally injected with PSM mRNA vaccine. The immune responses of PSM vaccinated mice were analysed (PSM specific cellular immune response). The result of the experiment is shown in FIG. 5. A detailed description of the experiment is provided below.

### 4.1. Detection of an PSM-Specific Cellular Immune Response by ELISPOT:

[0413] For vaccination 8 mice (C57 BL/6) per group were intradermally injected 5 times with 32 μg PSA mRNA vaccine. As negative control, ringer lactate (RiLa) buffer was applied. After the last vaccination mice were sacrificed, the spleens were removed and the splenocytes were isolated. For re-stimulation 3×10⁷ splenocytes were incubated for 5 days with a PSM peptide library (1 μg/ml per peptide) in presence of IL-2 (30 L/ml). The detection of an antigen-specific cellular immune response by ELISPOT was essentially performed according to Example 2.3. The result is shown in FIG. 5.

### Results:

[0414] The presence of antigen-specific cytotoxic T-cells in splenocytes from PSM vaccinated mice was investigated using the ELISPOT technique. As shown in FIG. 5, the stimulation with PSM peptide library led to high IFN-gamma secretion in splenocytes from mice vaccinated with PSM mRNA vaccine and not in splenocytes from control mice, vaccinated with RiLa buffer. The result is shown in FIG. 5.

[0415] Overall, the results shown in FIG. 5 demonstrate that the inventive PSM mRNA vaccine induces antigen specific T-cell responses in viva.

### Example 5: Vaccination Experiment with MAGE-A2, MAGE-A3 and MAGE-C2 mRNA Vaccines

[0416] To test the MAGE-A2, MAGE-A3 and MAGE-C2 mRNA vaccine obtained according to Example 1 is viva, C57BL/6 mice were intradermally injected with MAGE-A2, MAGE-A3 and MAGE-C2 mRNA vaccines. The immune responses of vaccinated mice were analysed (antigen specific cellular immune response). The results of the experiments are shown in FIGS. 6-8. A detailed description of the experiment is provided below.

### 5.1. Detection of an Antigen-Specific Cellular Immune Response by ELISPOT:

[0417] For the present example, MAGE-A2, MAGE-A3 and MAGE-C2 mRNA vaccines were applied with application regimens as provided below:
[0418] MAGE-A2: C57BL/B mice were vaccinated intradermally with mRNA encoding human MAGE-A2. (20 μg/mouse/vaccination day, 5 mice per group). Ringer lactate was used as control. After 8 vaccinations splenocytes were isolated and analyzed by ELISpot assay.
[0419] MAGE-A3: C57BL/6 mice were vaccinated intradermally with mRNA encoding human MAGE-A2. (32 μg/mouse/vaccination day, 8 mice per group). Ringer lactate was used as control. After 5 vaccinations splenocytes were isolated and analyzed by ELISpot assay.
[0420] MAGE-C2: C57BL/6 mice were vaccinated intradermally with mRNA encoding human MAGE-A2. (20 μg/mouse/vaccination day, 5 mice per group). Ringer lactate was used as control. After 8 vaccinations splenocytes were isolated and analyzed by ELISpot assay.

[0421] After the last vaccination the mice were sacrificed, the spleens were removed and the splenocytes were isolated. For re-stimulation 3×10⁷ splenocytes were incubated for 5 days with the respective antigen-specific peptide or peptide library (1 μg/ml per peptide) in presence of IL-2 (30 U/m). To determine an antigen-specific cellular immune response IFNγ secretion was measured after re-stimulation with peptide. The detection of an antigen-specific cellular immune response by ELISPOT was performed according to Example 2.3. The result is shown in FIGS. 6-8.

### Results:

[0422] The presence of antigen-specific cytotoxic T-cells in splenocytes from MAGE-A2, MAGE-A3 and MAGE-C2 vaccinated mice was investigated using the ELISPOT technique. As shown in FIG. 6, the stimulation with MAGE-A2 peptide library led to high IFN-gamma secretion in splenocytes from mice vaccinated with MAGE-A2 mRNA vaccine. Stimulation with a control peptide library did not lead to IFN-gamma secretion. As shown in FIG. 7, the stimulation with MAGE-C2 peptide library led to high IFN-gamma secretion in splenocytes from mice vaccinated with MAGE-C2 mRNA vaccine. Stimulation with a control peptide library did not lead to IFN-gamma secretion. As shown in FIG. 8, the stimulation with MAGE-A3 peptide library led to high IFN-gamma secretion in splenocytes from mice vaccinated with MAGE-A3 mRNA vaccine and not in splenocytes from control mice, vaccinated with RiLa buffer.

[0423] Overall, the results shown in FIGS. 6-8 demonstrate that the inventive MAGE-A2, MAGE-A3 and MAGE-C2 mRNA vaccine induce antigen specific T-cell responses in viva.

### Example 6: Vaccination Experiment with PMEL mRNA Vaccine

[0424] To test the PMEL mRNA vaccine obtained according to Example 1 is viva, C57BL/6 mice were intradermally injected with PMEL mRNA vaccines. The immune response of vaccinated mice was analysed (PMEL specific cellular immune response). The result of the experiment is shown in FIG. 9. A detailed description of the experiment is provided below.

### 6.1. Detection of a PMEL-Specific Cellular Immune Response by ELISPOT:

[0425] 8 mice (C57 BL/6) per group were intradermally injected 4 times within 3 weeks with 64 μg PMEL mRNA vaccine. As negative control, RiLa injection buffer was injected. After the last vaccination the mice were sacrificed, the spleens were removed and the splenocytes were isolated. The detection of an antigen-specific cellular immune response by ELISPOT was performed according to Example 2.3. The result is shown in FIG. 9.

### Results:

[0426] The presence of PMEL-specific cytotoxic T-cells in splenocytes from PMEL vaccinated mice was investigated using the ELISPOT technique. As shown in FIG. 9, the stimulation with PMEL peptide library led to high IFN-gamma secretion in splenocytes from mice vaccinated with PMEL mRNA vaccine. Stimulation with a control peptide library did not lead to IFN-gamma secretion.

1. An RNA comprising at least one coding sequence, wherein the coding sequence comprises a nucleic acid sequence selected from the group consisting of SEQ ID NOs: 505-4033; 4561-4591, or a fragment or variant of any one of said nucleic acid sequences.

2. The RNA according to claim 1, wherein the at least one coding sequence encodes a tumor antigen, or a fragment or variant of a tumor antigen, wherein the tumor antigen is preferably selected from the group consisting of 1A01_HLA-A/m; 1A02; 5T4; ACRBP; AFP; AKAP4; alpha-actinin-_4/m; alpha-methylacyl-coenzyme_A_racemase; ANDR; ART-4; ARTC1/m; AURKB; B2MG; B3GN5; B4GN1; B7H4; BAGE-1; BAS1; BCL-2; bcr/abl; beta-catenin/m; BING-4; BIRC7; BRCA1/m; BY55; calreticulin; CAMEL; CASP-8/m; CASPA; cathepsin_B; cathepsin_L; CD1A; CD1B; CD1C; CD1D; CD1E; CD20; CD22; CD276; CD33; CD3E; CD3Z; CD44_Isoform_1; CD44_Isoform_6; CD4; CD52; CD55; CD56; CD80; CD86; CD8A; CDC27/m; CDE30; CDK4/m; CDKN2A/m; CEA; CEAM6; CH₃L2; CLCA2; CML28; CML66; COA-1/m; coactosin-like_protein; collagen_XXIII; COX-2; CP1B1; CSAG2; CT45A1; CT55; CT-_9/BRD6; CTAG2_Isoform_LAGE-1A; CTAG2_Isoform_LAGE-1B; CTCFL; Cten; cyclin_B1; cyclin_D1; cyp-B; DAM-10; DEP1A; E7; EF1A2; EFTUD2/m; EGFR; EGLN3; ELF2/m; EMMPRIN; EpCam; EphA2; EphA3; ErbB3; ERBB4; ERG; ETV6; EWS; EZH2; FABP7; FCGR3A_Version_1; FCGR3A_Version_2; FGF5; FGFR2; fibronectin; FOS; FOXP3; FUT1; G250; GAGE-1; GAGE-2; GAGE-3; GAGE-4; GAGE-5; GAGE-6; GAGE7b; GAGE-8_(GAGE-2D); GASR; GnT-V; GPC3; GPNMB/m; GRM3; HAGE; hepsin; Her2/neu; HLA-A2/m; homeobox_NKX3.1; HOM-TES-85; HPG1; HS71A; HS71B; HST-2; hTERT; iCE; IF2B3; IL10; IL-13Ra2; IL2-RA; IL2-RB; IL2-RG; IL-5; IMP3; ITA5; ITB1; ITB6; kallikrein-2; kallikrein-3; kallikrein-4; KI20A; KIAA0205; KIF2C; KK-LC-1; LDLR; LGMN; LIRB2; LY6K; MAGA5; MAGA8; MAGAB; MAGE-A10; MAGE-A12; MAGE-A1; MAGE-A2; MAGE-A3; MAGE-A4; MAGE-A6; MAGE-A9; MAGE-B10; MAGE-B16; MAGE-B17; MAGE-_B1; MAGE-B2; MAGE-B3; MAGE-B4; MAGE-B5; MAGE-B6; MAGE-C1; MAGE-C2; MAGE-C3; MAGE-D1; MAGE-D2; MAGE-D4; MAGE-_E1; MAGE-E1_(MAGE1); MAGE-E2; MAGE-F1; MAGE-H1; MAGEL2; mammaglobin_A; MART-1/melan-A; MART-2; MCi_R; M-CSF; mesothelin; MITF; MMP1_1; MMP7; MUC-1; MUM-1/m; MUM-2/m; MYCN; MYO1A; MYO1B; MYO1C; MYO1D; MYO1E; MYO1F; MYO1G; MYO1H; NA17; NA88-A; Neo-PAP; NFYC/m; NGEP; NPM; NRCAM; NSE; NUF2; NY-ESO-1; OA1; OGT; OS-9; osteocalcin; osteopontin; p53; PAGE-4; PAI-1; PAI-2; PAP; PATE; PAX3; PAX5; PD1L1; PDCD1; PDEF; PECA1; PGCB; PGFRB; Pim-1_-Kinase; Pin-1; PLAC1; PMEL; PML; POTEF; POTE; PRAME; PRDX5/m; PRM2; prostein; proteinase-3; PSA; PSB9; PSCA; PSGR; PSM; PTPRC; RAB8A; RAGE-1; RARA; RASH; RASK; RASN; RGS5; RHAMM/CD168; RHOC; RSSA; RU1; RU2; RUNX1; S-100; SAGE; SART-_1; SART-2; SART-3; SEPR; SERPINB5; SIA7F; SIA8A; SIAT9; SIRT2/m; SOX10; SP17; SPNXA; SPXN3; SSX-1; SSX-2; SSX3; SSX-4; ST1A1; STAG2; STAMP-1; STEAP-1; Survivin-2B; survivin; SYCP1; SYT-SSX-1; SYT-SSX-2; TARP; TCRg; TF2AA; TGFB1; TGFR2; TGM-4; TIE2; TKTL1; TPI/m; TRGV11; TRGV9; TRPC1; TRP-p8; TSG10; TSPY1; TVC_(TRGV3); TX101; tyrosinase; TYRP1; TYRP2; UPA; VEGFR1; WT1; and XAGE1.

3. (canceled)

4. The RNA according to claim 1, wherein the RNA is mono-, bi-, or multicistronic.

5. The RNA according to claim 1, wherein the RNA is an mRNA, a viral RNA or a replicon RNA.

6. The RNA according to claim 1, wherein the RNA is a modified RNA, preferably a stabilized RNA.

7. The RNA according to claim 1, wherein
the G/C content of the at least one coding sequence of the RNA is increased compared to the G/C content of the corresponding coding sequence of the corresponding wild-type RNA, and/or wherein
the C content of the at least one coding sequence of the RNA is increased compared to the C content of the corresponding coding sequence of the corresponding wild-type RNA, and/or wherein
the codons in the at least one coding sequence of the RNA are adapted to human codon usage, wherein the codon adaptation index (CAI) is preferably increased or maximised in the at least one coding sequence of the RNA,
wherein the amino acid sequence encoded by the RNA is preferably not being modified compared to the amino acid sequence encoded by the corresponding wild-type RNA.

8.-10. (canceled)

11. The RNA according to claim 1, which comprises a 5′-CAP structure and/or at least one 3′-untranslated region element (3′-UTR element).

12. The RNA according to claim 1, which comprises at least one histone stem-loop.

13.-15. (canceled)

16. The RNA according to claim 1, wherein the at least one RNA comprises a poly(A) sequence, preferably comprising 10 to 200, 10 to 100, 40 to 80 or 50 to 70 adenosine nucleotides, and/or a poly(C) sequence, preferably comprising 10 to 200, 10 to 100, 20 to 70, 20 to 60 or 10 to 40 cytosine nucleotides.

17. The RNA according to claim 1, which comprises, preferably in 5′ to 3′ direction, the following elements:
a) a 5′-CAP structure, preferably m7GpppN,
b) at least one coding sequence,
c) a poly(A) tail, preferably consisting of 10 to 200, 10 to 100, 40 to 80 or 50 to 70 adenosine nucleotides,
d) a poly(C) tail, preferably consisting of 10 to 200, 10 to 100, 20 to 70, 20 to 60 or 10 to 40 cytosine nucleotides, and
e) a histone stem-loop, preferably comprising the RNA sequence according to SEQ ID NO: 4556.

18. The RNA according to claim 11, which comprises a 3′-UTR element and wherein the 3′-UTR element comprises a nucleic acid sequence derived from a 3′-UTR of a gene, which preferably encodes a stable mRNA, or from a homolog, a fragment or a variant of said gene.

19.-20. (canceled)

21. The RNA according to claim 1, which comprises, preferably in 5′ to 3′ direction, the following elements:
a) a 5′-CAP structure, preferably m7GpppN,
b) at least one coding sequence,
c) a 3′-UTR element comprising a nucleic acid sequence, which is derived from an α-globin gene, preferably comprising the corresponding RNA sequence of the nucleic acid sequence according to SEQ ID NO: 4547, or a homolog, a fragment or a variant thereof,
d) a poly(A) tail, preferably consisting of 10 to 200, 10 to 100, 40 to 80 or 50 to 70 adenosine nucleotides,
e) a poly(C) tail, preferably consisting of 10 to 200, 10 to 100, 20 to 70, 20 to 60 or 10 to 40 cytosine nucleotides, and
f) a histone stem-loop, preferably comprising the RNA sequence according to SEQ ID NO: 4556.

22.-23. (canceled)

24. The RNA according to claim 1, wherein the RNA comprises a 5′-UTR element.

25.-28. (canceled)

29. The RNA according to claim 1, which comprises, preferably in 5′ to 3′ direction, the following elements:
a) a 5′-CAP structure, preferably m7GpppN,
b) a 5′-UTR element, which comprises or consists of a nucleic acid sequence, which is derived from the 5′-UTR of a TOP gene, preferably comprising an RNA sequence corresponding to the nucleic acid sequence according to SEQ ID NO: 4537, or a homolog, a fragment or a variant thereof,
c) at least one coding sequence,
d) a 3′-UTR element comprising a nucleic acid sequence, which is derived from an α-globin gene, preferably comprising the corresponding RNA sequence of the nucleic acid sequence according to SEQ ID NO: 4547, or a homolog, a fragment or a variant thereof; and/or
a 3′-UTR element comprising a nucleic acid sequence, which is derived from an albumin gene, preferably comprising the corresponding RNA sequence of the nucleic acid sequence according to SEQ ID NO: 4551 or SEQ ID NO: 4553, or a homolog, a fragment or a variant thereof,
e) a poly(A) tail, preferably consisting of 10 to 200, 10 to 100, 40 to 80 or 50 to 70 adenosine nucleotides,
f) a poly(C) tail, preferably consisting of 10 to 200, 10 to 100, 20 to 70, 20 to 60 or 10 to 40 cytosine nucleotides, and
g) a histone stem-loop, preferably comprising the RNA sequence according to SEQ ID NO: 4556

30. A composition comprising the RNA according to claim 1 and a pharmaceutically acceptable carrier.

31.-35. (canceled)

36. The composition according to claim 30, wherein the RNA is complexed with one or more lipids, thereby forming liposomes, lipid nanoparticles and/or lipoplexes.

37. The composition according to claim 30, wherein the composition comprises at least one adjuvant.

38.-41. (canceled)

42. A kit, preferably kit of parts, comprising an RNA according to claim 1, and optionally a liquid vehicle for solubilising and optionally technical instructions with information on the administration and dosage of the RNA, the RNA.

43.-45. (canceled)

46. A method of treating or preventing cancer comprising administering to a subject in need thereof an RNA according to claim 1.

47.-55. (canceled)

The application's sequence listing, which the Patent Office published only in electronic form, follows.

SEQUENCE LISTING (4602 sequences)

SEQ ID NO: 1 - protein, 365 aa, synthetic construct
  REGION 1..365: note = P30443
MAVMAPRTLLLLLSGALALTQTWAGSHSMRYFFTSVSRPGRGEPRFIAVGYVDDTQFVRFDSDAASQKMEPRAPWIEQEGPEYWDQETRNMKAHSQTDRANLGTLRGYYNQSEDGSHTIQIMYGCDVGPDGRFLRGYRQDAYDGKDYIALNEDLRSWTAADMAAQITKRKWEAVHAAEQRRVYLEGRCVDGLRRYLENGKETLQRTDPPKTHMTHHPISDHEATLRCWALGFYPAEITLTWQRDGEDQTQDTELVETRPAGDGTFQKWAAVVVPSGEEQRYTCHVQHEGLPKPLTLRWELSSQPTIPIVGIIAGLVLLGAVITGAVVAAVMWRRKSSDRKGGSYTQAASSDSAQGSDVSLTACKV

SEQ ID NO: 2 - protein, 365 aa, synthetic construct [sequence omitted]

SEQ ID NO: 3 - protein, 420 aa, synthetic construct
  REGION 1..420: note = Q13641
MPGGCSRGPAAGDGRLRLARLALVLLGWVSSSSPTSSASSFSSSAPFLASAVSAQPPLPDQCPALCECSEAARTVKCVNRNLTEVPTDLPAYVRNLFLTGNQLAVLPAGAFARRPPLAELAALNLSGSRLDEVRAGAFEHLPSLRQLDLSHNPLADLSPFAFSGSNASVSAPSPLVELILNHIVPPEDERQNRSFEGMVVAALLAGRALQGLRRLELASNHFLYLPRDVLAQLPSLRHLDLSNNSLVSLTYVSFRNLTHLESLHLEDNALKVLHNGTLAELQGLPHIRVFLDNNPWVCDCHMADMVTWLKETEVVQGKDRLTCAYPEKMRNRVLLELNSADLDCDPILPPSLQTSYVFLGIVLALIGAIFLLVLYLNRKGIKKWMHNIRDACRDHMEGYHYRYEINADPRLTNLSSNSDV

SEQ ID NO: 4 - protein, 543 aa, synthetic construct
  REGION 1..543: note = Q8NEB7
MRKPAAGFLPSLLKVLLLPLAPAAAQDSTQASTPGSPLSPTEYERFFALLTPTWKAETTCRLRATHGCRNPTLVQLDQYENHGLVPDGAVCSNLPYASWFESFCQFTHYRCSNHVYYAKRVLCSQPVSILSPNTLKEIEASAEVSPTTMTSPISPHFTVTERQTFQPWPERLSNNVEELLQSSLSLGGQEQAPEHKQEQGVEHRQEPTQEHKQEEGQKQEEQEEEQEEEGKQEEGQGTKEGREAVSQLQTDSEPKFHSESLSSNPSSFAPRVREVESTPMIMENIQELIRSAQEIDEMNEIYDENSYWRNQNPGSLLQLPHTEALLVLCYSIVENTCIITPTAKAWKYMEEEILGFGKSVCDSLGRRHMSTCALCDFCSLKLEQCHSEASLQRQQCDTSHKTPFVSPLLASQSLSIGNQVGSPESGRFYGLDLYGGLHMDFWCARLATKGCEDVRVSGWLQTEFLSFQDGDFPTKICDTDYIQYPNYCSFKSQQCLMRNRNRKVSRMRCLQNETYSALSPGKSEDVVLRWSQEFSTLTLGQFG

SEQ ID NO: 5 - protein, 609 aa, synthetic construct
  REGION 1..609: note = P02771
MKWVESIFLIFLLNFTESRTLHRNEYGIASILDSYQCTAEISLADLATIFFAQFVQEATYKEVSKMVKDALTAIEKPTGDEQSSGCLENQLPAFLEELCHEKEILEKYGHSDCCSQSEEGRHNCFLAHKKPTPASIPLFQVPEPVTSCEAYEEDRETFMNKFIYEIARRHPFLYAPTILLWAARYDKIIPSCCKAENAVECFQTKAATVTKELRESSLLNQHACAVMKNFGTRTFQAITVTKLSQKFTKVNFTEIQKLVLDVAHVHEHCCRGDVLDCLQDGEKIMSYICSQQDTLSNKITECCKLTTLERGQCIIHAENDEKPEGLSPNLNRFLGDRDFNQFSSGEKNIFLASFVHEYSRRHPQLAVSVILRVAKGYQELLEKCFQTENPLECQDKGEEELQKYIQESQALAKRSCGLFQKLGEYYLQNAFLVAYTKKAPQLTSSELMAITRKMAATAATCCQLSEDKLLACGEGAADIIIGHLCIRHEMTPVNPGVGQCCTSSYANRRPCFSSLVVDETYVPPAFSDDKFIFHKDLCQAQGVALQTMKQEFLINLVKQKPQITEEQLEAVIADFSGLLEKCCQGQEQEVCFAEEGQKLISKTRAALGV

SEQ ID NO: 6 - protein, 854 aa, synthetic construct
  REGION 1..854: note = Q5JQC9
MMAYSDTTMMSDDIDWLRSHRGVCKVDLYNPEGQQDQDRKVICFVDVSTLNVEDKDYKDAASSSSEGNLNLGSLEEKEIIVIKDTEKKDQSKTEGSVCLFKQAPSDPVSVLNWLLSDLQKYALGFQHALSPSTSTCKHKVGDTEGEYHRASSENCYSVYADQVNIDYLMNRPQNLRLEMTAAKNTNNNQSPSAPPAKPPSTQRAVISPDGECSIDDLSFYVNRLSSLVIQMAHKEIKEKLEGKSKCLHHSICPSPGNKERISPRTPASKIASEMAYEAVELTAAEMRGTGEESREGGQKSFLYSELSNKSKSGDKQMSQRESKEFADSISKGLMVYANQVASDMMVSLMKTLKVHSSGKPIPASVVLKRVLLRHTKEIVSDLIDSCMKNLHNITGVLMTDSDFVSAVKRNLFNQWKQNATDIMEAMLKRLVSALIGEEKETKSQSLSYASLKAGSHDPKCRNQSLEFSTMKAEMKERDKGKMKSDPCKSLTSAEKVGEHILKEGLTIWNQKQGNSCKVATKACSNKDEKGEKINASTDSLAKDLIVSALKLIQYHLTQQTKGKDTCEEDCPGSTMGYMAQSTQYEKCGGGQSAKALSVKQLESHRAPGPSTCQKENQHLDSQKMDMSNIVLMLIQKLLNENPFKCEDPCEGENKCSEPRASKAASMSNRSDKAEEQCQEHQELDCTSGMKQANGQFIDKLVESVMKLCLIMAKYSNDGAALAELEEQAASANKPNFRGTRCIHSGAMPQNYQDSLGHEVIVNNQCSTNSLQKQLQAVLQWIAASQFNVPMLYFMGDKDGQLEKLPQVSAKAAEKGYSVGGLLQEVMKFAKERQPDEAVGKVARKQLLDWLLANL

SEQ ID NO: 7 - protein, 416 aa, synthetic construct
  REGION 1..416: note = B4DSX0
MVDYHAANQSYQYGPSSAGNGAGGGGSMGDYMAQEDDWDRDLLLDPAWEKQQRKTFTAWCNSHLRKAGTQIENIDEDFRDGLKLMLLLEVISGERLPKPERGKMRVHKINNVNKALDFIASKGVKLVSIGAEEIVDGNAKMTLGMIWTIILRFAIQDISVEETSAKEGLLLWCQRKTAPYKNVNVQNFHISWKDGLAFNALIHRHRPELIEYDKLRKDDPVTNLNNAFEVAEKYLDIPKMLDAEDIVNTARPDEKAIMTYVSSFYHAFSGAQKAETAANRICKVLAVNQENEHLMEDYEKLASDLLEWIRRTIPWLEDRVPQKTIQEMQQKLEDFRDYRRVHKPPKVQEKCQLEINFNTLQTKLRLSNRPAFMPSWRSRASSSPTSTCAASSPARPMLWGPGSRPRWRRSGASPLR

SEQ ID NO: 8 - protein, 562 aa, synthetic construct [sequence omitted]

SEQ ID NO: 9 - protein, 911 aa, synthetic construct
  REGION 1..911: note = O43707
MVDYHAANQSYQYGPSSAGNGAGGGGSMGDYMAQEDDWDRDLLLDPAWEKQQRKTFTAWCNSHLRKAGTQIENIDEDFRDGLKLMLLLEVISGERLPKPERGKMRVHKINNVNKALDFIASKGVKLVSIGAEEIVDGNAKMTLGMIWTIILRFAIQDISVEETSAKEGLLLWCQRKTAPYKNVNVQNFHISWKDGLAFNALIHRHRPELIEYDKLRKDDPVTNLNNAFEVAEKYLDIPKMLDAEDIVNTARPDEKAIMTYVSSFYHAFSGAQKAETAANRICKVLAVNQENEHLMEDYEKLASDLLEWIRRTIPWLEDRVPQKTIQEMQQKLEDFRDYRRVHKPPKVQEKCQLEINFNTLQTKLRLSNRPAFMPSEGKMVSDINNGWQHLEQAEKGYEEWLLNEIRRLERLDHLAEKFRQKASIHEAWTDGKEAMLKHRDYETATLSDIKALIRKHEAFESDLAAHQDRVEQIAAIAQELNELDYYDSHNVNTRCQKICDQWDALGSLTHSRREALEKTEKQLEAIDQLHLEYAKRAAPFNNWMESAMEDLQDMFIVHTIEEIEGLISAHDQFKSTLPDADREREAILAIHKEAQRIAESNHIKLSGSNPYTTVTPQIINSKWEKVQQLVPKRDHALLEEQSKQQSNEHLRRQFASQANVVGPWIQTKMEEIGRISIEMNGTLEDQLSHLKQYERSIVDYKPNLDLLEQQHQLIQEALIFDNKHTNYTMEHIRVGWEQLLTTIARTINEVENQILTRDAKGISQEQMQEFRASFNHFDKDHGGALGPEEFKACLISLGYDVENDRQGEAEFNRIMSLVDPNHSGLVTFQAFIDFMSRETTDTDTADQVIASFKVLAGDKNFITAEELRRELPPDQAEYCIARMAPYQGPDAVPGALDYKSFSTALYGESDL

SEQ ID NO: 10 - protein, 198 aa, synthetic construct [sequence omitted]

SEQ ID NO: 11 - protein, 198 aa, synthetic construct [sequence omitted]

SEQ ID NO: 12 - protein, 920 aa, synthetic construct
  REGION 1..920: note = P10275
MEVQLGLGRVYPRPPSKTYRGAFQNLFQSVREVIQNPGPRHPEAASAAPPGASLLLLQQQQQQQQQQQQQQQQQQQQQQQETSPRQQQQQQGEDGSPQAHRRGPTGYLVLDEEQQPSQPQSALECHPERGCVPEPGAAVAASKGLPQQLPAPPDEDDSAAPSTLSLLGPTFPGLSSCSADLKDILSEASTMQLLQQQQQEAVSEGSSSGRAREASGAPTSSKDNYLGGTSTISDNAKELCKAVSVSMGLGVEALEHLSPGEQLRGDCMYAPLLGVPPAVRPTPCAPLAECKGSLLDDSAGKSTEDTAEYSPFKGGYTKGLEGESLGCSGSAAAGSSGTLELPSTLSLYKSGALDEAAAYQSRDYYNFPLALAGPPPPPPPPHPHARIKLENPLDYGSAWAAAAAQCRYGDLASLHGAGAAGPGSGSPSAAASSSWHTLFTAEEGQLYGPCGGGGGGGGGGGGGGGGGGGGGGGEAGAVAPYGYTRPPQGLAGQESDFTAPDVWYPGGMVSRVPYPSPTCVKSEMGPWMDSYSGPYGDMRLETARDHVLPIDYYFPPQKTCLICGDEASGCHYGALTCGSCKVFFKRAAEGKQKYLCASRNDCTIDKFRRKNCPSCRLRKCYEAGMTLGARKLKKLGNLKLQEEGEASSTTSPTEETTQKLTVSHIEGYECQPIFLNVLEAIEPGVVCAGHDNNQPDSFAALLSSLNELGERQLVHVVKWAKALPGFRNLHVDDQMAVIQYSWMGLMVFAMGWRSFTNVNSRMLYFAPDLVFNEYRMHKSRMYSQCVRMRHLSQEFGWLQITPQEFLCMKALLLFSIIPVDGLKNQKFFDELRMNYIKELDRIIACKRKNPTSCSRRFYQLTKLLDSVQPIARELHQFTFDLLIKSHMVSVDFPEMMAEIISVQVPKILSGKVKPIYFHTQ

SEQ ID NO: 13 - protein, 412 aa, synthetic construct [sequence omitted]

SEQ ID NO: 14 - protein, 327 aa, synthetic construct
  REGION 1..327: note = P52961
MQMPAMMSLLLVSVGLMEALQAQSHPITRRDLFSQEIQLDMALASFDDQYAGCAAAMTAALPDLNHTEFQANQVYADSWTLASSQWQERQARWPEWSLSPTRPSPPPLGFRDEHGVALLAYTANSPLHKEFNAAVREAGRSRAHYLHHFSFKTLHFLLTEALQLLGSGQRPPRCHQVFRGVHGLRFRPAGPRATVRLGGFASASLKHVAAQQFGEDTFFGIWTCLGAPIKGYSFFPGEEEVLIPPFETFQVINASRLAQGPARIYLRALGKHSTYNCEYIKDKKCKSGPCHLDNSAMGQSPLSAVWSLLLLLWFLVVRAFPDGPGLL

SEQ ID NO: 15 - protein, 344 aa, synthetic construct
  REGION 1..344: note = Q96GD4
MAQKENSYPWPYGRQTAPSGLSTLPQRVLRKEPVTPSALVLMSRSNVQPTAAPGQKVMENSSGTPDILTRHFTIDDFEIGRPLGKGKFGNVYLAREKKSHFIVALKVLFKSQIEKEGVEHQLRREIEIQAHLHHPNILRLYNYFYDRRRIYLILEYAPRGELYKELQKSCTFDEQRTATIMEELADALMYCHGKKVIHRDIKPENLLLGLKGELKIADFGWSVHAPSLRRKTMCGTLDYLPPEMIEGRMHNEKVDLWCIGVLCYELLVGNPPFESASHNETYRRIVKVDLKFPASVPMGAQDLISKLLRHNPSERLPLAQVSAHPWVRANSRRVLPPSALQSVA

SEQ ID NO: 16 - protein, 119 aa, synthetic construct
  REGION 1..119: note = P61769
MSRSVALAVLALLSLSGLEAIQRTPKIQVYSRHPAENGKSNFLNCYVSGFHPSDIEVDLLKNGERIEKVEHSDLSFSKDWSFYLLYYTEFTPTEKDEYACRVNHVTLSQPKIVKWDRDM

SEQ ID NO: 17 - protein, 378 aa, synthetic construct
  REGION 1..378: note = Q9BYG0
MRMLVSGRRVKKWQLIIQLFATCFLASLMFFWEPIDNHIVSHMKSYSYRYLINSYDFVNDTLSLKHTSAGPRYQYLINHKEKCQAQDVLLLLFVKTAPENYDRRSGIRRTWGNENYVRSQLNANIKTLFALGTPNPLEGEELQRKLAWEDQRYNDIIQQDFVDSFYNLTLKLLMQFSWANTYCPHAKFLMTADDDIFIHMPNLIEYLQSLEQIGVQDFWIGRVHRGAPPIRDKSSKYYVSYEMYQWPAYPDYTAGAAYVISGDVAAKVYEASQTLNSSLYIDDVFMGLCANKIGIVPQDHVFFSGEGKTPYHPCIYEKMMTSHGHLEDLQDLWKNATDPKVKTISKGFFGQIYCRLMKIILLCKISYVDTYPCRAAFI

SEQ ID NO: 18 - protein, 533 aa, synthetic construct
  REGION 1..533: note = Q00973
MWLGRRALCALVLLLACASLGLLYASTRDAPGLRLPLAPWAPPQSPRRPELPDLAPEPRYAHIPVRIKEQVVGLLAWNNCSCESSGGGLPLPFQKQVRAIDLTKAFDPAELRAASATREQEFQAFLSRSQSPADQLLIAPANSPLQYPLQGVEVQPLRSILVPGLSLQAASGQEVYQVNLTASLGTWDVAGEVTGVTLTGEGQADLTLVSPGLDQLNRQLQLVTYSSRSYQTNTADTVRFSTEGHEAAFTIRIRHPPNPRLYPPGSLPQGAQYNISALVTIATKTFLRYDRLRALITSIRRFYPTVTVVIADDSDKPERVSGPYVEHYLMPFGKGWFAGRNLAVSQVTTKYVLWVDDDFVFTARTRLERLVDVLERTPLDLVGGAVREISGFATTYRQLLSVEPGAPGLGNCLRQRRGFHHELVGFPGCVVTDGVVNFFLARTDKVREVGFDPRLSRVAHLEFFLDGLGSLRVGSCSDVVVDHASKLKLPWTSRDAGAETYARYRYPGSLDESQMAKHRLLFFKHRLQCMTSQ

SEQ ID NO: 19 - protein, 282 aa, synthetic construct
  REGION 1..282: note = Q7Z7D3
MASLGQILFWSIISIIIILAGAIALIIGFGISGRHSITVTTVASAGNIGEDGILSCTFEPDIKLSDIVIQWLKEGVLGLVHEFKEGKDELSEQDEMFRGRTAVFADQVIVGNASLRLKNVQLTDAGTYKCYIITSKGKGNANLEYKTGAFSMPEVNVDYNASSETLRCEAPRWFPQPTVVWASQVDQGANFSEVSNTSFELNSENVTMKVVSVLYNVTINNTYSCMIENDIAKATGDIKVTESEIKRRSHLQLLNSKASLCVSSFFAISWALLPLSPYLMLK

SEQ ID NO: 20 - protein, 43 aa, synthetic construct
  REGION 1..43: note = Q13072
MAARAVFLALSAQLLQARLMKEESPVVSWRLEPEDGTALCFIF

SEQ ID NO: 21 - protein, 385 aa, synthetic construct
  REGION 1..385: note = P35613
MAAALFVLLGFALLGTHGASGAAGFVQAPLSQQRWVGGSVELHCEAVGSPVPEIQWWFEGQGPNDTCSQLWDGARLDRVHIHATYHQHAASTISIDTLVEEDTGTYECRASNDPDRNHLTRAPRVKWVRAQAVVLVLEPGTVFTTVEDLGSKILLTCSLNDSATEVTGHRWLKGGVVLKEDALPGQKTEFKVDSDDQWGEYSCVFLPEPMGTANIQLHGPPRVKAVKSSEHINEGETAMLVCKSESVPPVTDWAWYKITDSEDKALMNGSESRFFVSSSQGRSELHIENLNMEADPGQYRCNGTSSKGSDQAIITLRVRSHLAALWPFLGIVAEVLVLVTIIFIYEKRRKPEDVLDDDDAGSAPLKSSGQHQNDKGKNVRQRNSS

SEQ ID NO: 22 - protein, 239 aa, synthetic construct [sequence omitted]

SEQ ID NO: 23 - protein, 429 aa, synthetic construct [sequence omitted]

SEQ ID NO: 24 - protein, 554 aa, synthetic construct [sequence omitted]

SEQ ID NO: 25 - protein, 514 aa, synthetic construct [sequence omitted]

SEQ ID NO: 26 - protein, 441 aa, synthetic construct
  REGION 1..441: note = A9UEZ9
MVDPVGFAEAWKAQFPDSEPPRMELRSVGDIEQELERCKASIRRLEQEVNQERFRMIYLQTLLAKEKKSYDRQRWGFRRAAQAPDGASEPRASASRPQPAPADGADPPPAEEPEARPDGEGSPGKARPGTARRPGAAASGERDDRGPPASVAALRSNFERIRKGHGQPGADAEKPFYVNVEFHHERGLVKVNDKEVSDRISSLGSQAMQMERKKSQHGAGSSVGDASRPPYRGRSSESSCGVDGDYEDAELNPRFLKDNLIDANGGSRPPWPPLEYQPYQSIYVGGMMEGEGKGPLLRSQSTSEQEKRLTWPRRSYSPRSFEDCGGGYTPDCSSNENLTSSEEDFSSGQSSRVSPSPTTYRMFRDKSRSPSQNSQQSFDSSSPPTPQCHKRHRHCPVVVSEATIVGVRKTGQIWPNDGEGAFHGDADGSLELQGKPSRWTQ

SEQ ID NO: 27 - protein, 524 aa, synthetic construct
  REGION 1..524: note = A9UF00
MVDPVGFAEAWKAQFPDSEPPRMELRSVGDIEQELERCKASIRRLEQEVNQERFRMIYLQTLLAKEKKSYDRQRWGFRRAAQAPDGASEPRASASRPQPAPADGADPPPAEEPEARPDGEGSPGKARPGTARRPGAAASGERDDRGPPASVAALRSNFERIRKGHGQPGADAEKPFYVNVEFHHERGLVKVNDKEVSDRISSLGSQAMQMERKKSQHGAGSSVGDASRPPYRGRSSESSCGVDGDYEDAELNPRFLKDNLIDANGGSRPPWPPLEYQPYQSIYVGGMMEGEGKGPLLRSQSTSEQEKRLTWPRRSYSPRSFEDCGGGYTPDCSSNENLTSSEEDFSSGQSSRVSPSPTTYRMFRDKSRSPSQNSQQSFDSSSPPTPQCHKRHRHCPVVVSEATIVGVRKTGQIWPNDGEGAFHGDADGSFGTPPGYGCAADRAEEQRRHQDGLPYIDDSPSSSPHLSSKGRGSRDALVSGALESTKASELDLEKGLEMRKWDPVKMTPTFSLHCMILWPVEITL

SEQ ID NO: 28 - protein, 465 aa, synthetic construct
  REGION 1..465: note = A9UF01
MVDPVGFAEAWKAQFPDSEPPRMELRSVGDIEQELERCKASIRRLEQEVNQERFRMIYLQTLLAKEKKSYDRQRWGFRRAAQAPDGASEPRASASRPQPAPADGADPPPAEEPEARPDGEGSPGKARPGTARRPGAAASGERDDRGPPASVAALRSNFERIRKGHGQPGADAEKPFYVNVEFHHERGLVKVNDKEVSDRISSLGSQAMQMERKKSQHGAGSSVGDASRPPYRGRSSESSCGVDGDYEDAELNPRFLKDNLIDANGGSRPPWPPLEYQPYQSIYVGGMMEGEGKGPLLRSQSTSEQEKRLTWPRRSYSPRSFEDCGGGYTPDCSSNENLTSSEEDFSSGQSSRVSPSPTTYRMFRDKSRSPSQNSQQSFDSSSPPTPQCHKRHRHCPVVVSEATIVGVRKTGQIWPNDGEGAFHGEHPGAAEEVFQKLLPDIRGAADADQLVCETPDCPQHSADHQ

SEQ ID NO: 29 - protein, 458 aa, synthetic construct
  REGION 1..458: note = A9UF03
MVDPVGFAEAWKAQFPDSEPPRMELRSVGDIEQELERCKASIRRLEQEVNQERFRMIYLQTLLAKEKKSYDRQRWGFRRAAQAPDGASEPRASASRPQPAPADGADPPPAEEPEARPDGEGSPGKARPGTARRPGAAASGERDDRGPPASVAALRSNFERIRKGHGQPGADAEKPFYVNVEFHHERGLVKVNDKEVSDRISSLGSQAMQMERKKSQHGAGSSVGDASRPPYRGRSSESSCGVDGDYEDAELNPRFLKDNLIDANGGSRPPWPPLEYQPYQSIYVGGMMEGEGKGPLLRSQSTSEQEKRLTWPRRSYSPRSFEDCGGGYTPDCSSNENLTSSEEDFSSGQSSRVSPSPTTYRMFRDKSRSPSQNSQQSFDSSSPPTPQCHKRHRHCPVVVSEATIVGVRKTGQIWPNDGEGAFHGDADGSFGTPPGYCCLCLPAWPSGCTAATARVTRS

SEQ ID NO: 30 - protein, 454 aa, synthetic construct
  REGION 1..454: note = A9UF04
MVDPVGFAEAWKAQFPDSEPPRMELRSVGDIEQELERCKASIRRLEQEVNQERFRMIYLQTLLAKEKKSYDRQRWGFRRAAQAPDGASEPRASASRPQPAPADGADPPPAEEPEARPDGEGSPGKARPGTARRPGAAASGERDDRGPPASVAALRSNFERIRKGHGQPGADAEKPFYVNVEFHHERGLVKVNDKEVSDRISSLGSQAMQMERKKSQHGAGSSVGDASRPPYRGRSSESSCGVDGDYEDAELNPRFLKDNLIDANGGSRPPWPPLEYQPYQSIYVGGMMEGEGKGPLLRSQSTSEQEKRLTWPRRSYSPRSFEDCGGGYTPDCSSNENLTSSEEDFSSGQSSRVSPSPTTYRMFRDKSRSPSQNSQQSFDSSSPPTPQCHKRHRHCPVVVSEATIVGVRKTGQIWPNDGEGAFHGDADGSFGTPPGYGCAAGRPPHLTELPVQHQ

SEQ ID NO: 31 - protein, 467 aa, synthetic construct
  REGION 1..467: note = A9UF05
MVDPVGFAEAWKAQFPDSEPPRMELRSVGDIEQELERCKASIRRLEQEVNQERFRMIYLQTLLAKEKKSYDRQRWGFRRAAQAPDGASEPRASASRPQPAPADGADPPPAEEPEARPDGEGSPGKARPGTARRPGAAASGERDDRGPPASVAALRSNFERIRKGHGQPGADAEKPFYVNVEFHHERGLVKVNDKEVSDRISSLGSQAMQMERKKSQHGAGSSVGDASRPPYRGRSSESSCGVDGDYEDAELNPRFLKDNLIDANGGSRPPWPPLEYQPYQSIYVGGMMEGEGKGPLLRSQSTSEQEKRLTWPRRSYSPRSFEDCGGGYTPDCSSNENLTSSEEDFSSGQSSRVSPSPTTYRMFRDKSRSPSQNSQQSFDSSSPPTPQCHKRHRHCPVVVSEATIVGVRKTGQIWPNDGEGAFHGDAVLKTEVPHQGVRRARLSLEALGEDPSFLFPASDGPRHSSTW

SEQ ID NO: 32 - protein, 513 aa, synthetic construct
  REGION 1..513: note = A9UF06
MVDPVGFAEAWKAQFPDSEPPRMELRSVGDIEQELERCKASIRRLEQEVNQERFRMIYLQTLLAKEKKSYDRQRWGFRRAAQAPDGASEPRASASRPQPAPADGADPPPAEEPEARPDGEGSPGKARPGTARRPGAAASGERDDRGPPASVAALRSNFERIRKGHGQPGADAEKPFYVNVEFHHERGLVKVNDKEVSDRISSLGSQAMQMERKKSQHGAGSSVGDASRPPYRGRSSESSCGVDGDYEDAELNPRFLKDNLIDANGGSRPPWPPLEYQPYQSIYVGGMMEGEGKGPLLRSQSTSEQEKRLTWPRRSYSPRSFEDCGGGYTPDCSSNENLTSSEEDFSSGQSSRVSPSPTTYRMFRDKSRSPSQNSQQSFDSSSPPTPQCHKRHRHCPVVVSEATIVGVRKTGQIWPNDGEGAFHGDADGSFGTPPGYGCAADRAEEQRRHQDGLPYIDDSPSSSPHLSSKGRGSRDALVSGALESTKASELDPVKMTPTFSLHCMILWPVEITL

SEQ ID NO: 33 - protein, 406 aa, synthetic construct [sequence omitted]

SEQ ID NO: 34 - protein, 781 aa, synthetic construct
  REGION 1..781: note = P35222
MATQADLMELDMAMEPDRKAAVSHWQQQSYLDSGIHSGATTTAPSLSGKGNPEEEDVDTSQVLYEWEQGFSQSFTQEQVADIDGQYAMTRAQRVRAAMFPETLDEGMQIPSTQFDAAHPTNVQRLAEPSQMLKHAVVNLINYQDDAELATRAIPELTKLLNDEDQVVVNKAAVMVHQLSKKEASRHAIMRSPQMVSAIVRTMQNTNDVETARCTAGTLHNLSHHREGLLAIFKSGGIPALVKMLGSPVDSVLFYAITTLHNLLLHQEGAKMAVRLAGGLQKMVALLNKTNVKFLAITTDCLQILAYGNQESKLIILASGGPQALVNIMRTYTYEKLLWTTSRVLKVLSVCSSNKPAIVEAGGMQALGLHLTDPSQRLVQNCLWTLRNLSDAATKQEGMEGLLGTLVQLLGSDDINVVTCAAGILSNLTCNNYKNKMMVCQVGGIEALVRTVLRAGDREDITEPAICALRHLTSRHQEAEMAQNAVRLHYGLPVVVKLLHPPSHWPLIKATVGLIRNLALCPANHAPLREQGAIPRLVQLLVRAHQDTQRRTSMGGTQQQFVEGVRMEEIVEGCTGALHILARDVHNRIVIRGLNTIPLFVQLLYSPIENIQRVAAGVLCELAQDKEAAEAIEAEGATAPLTELLHSRNEGVATYAAAVLFRMSEDKPQDYKKRLSVELTSSLFRTEPMAWNETADLGLDIGAQGEPLGYRQDDPSYRSFHSGGYGQDALGMDPMMEHEMGGHHPGADYPVDGLPDLGHAQDLMDGLPPGDSNQLAWFDTDL

SEQ ID NO: 35 - protein, 563 aa, synthetic construct
  REGION 1..563: note = Q8WYA6
MDVGELLSYQPNRGTKRPRDDEEEEQKMRRKQTGTRERGRYREEEMTVVEEADDDKKRLLQIIDRDGEEEEEEEEPLDESSVKKMILTFEKRSYKNQELRIKFPDNPEKFMESELDLNDIIQEMHVVATMPDLYHLLVELNAVQSLLGLLGHDNTDVSIAVVDLLQELTDIDTLHESEEGAEVLIDALVDGQVVALLVQNLERLDESVKEEADGVHNTLAIVENMAEFRPEMCTEGAQQGLLQWLLKRLKAKMPFDANKLYCSEVLAILLQDNDENRELLGELDGIDVLLQQLSVFKRHNPSTAEEQEMMENLFDSLCSCLMLSSNRERFLKGEGLQLMNLMLREKKISRSSALKVLDHAMIGPEGTDNCHKFVDILGLRTIFPLFMKSPRKIKKVGTTEKEHEEHVCSILASLLRNLRGQQRTRLLNKFTENDSEKVDRLMELHFKYLGAMQVADKKIEGEKHDMVRRGEIIDNDTEEEFYLRRLDAGLFVLQHICYIMAEICNANVPQIRQRVHQILNMRGSSIKIVRHIIKEYAENIGDGRSPEFRENEQKRILGLLENF

SEQ ID NO: 36 - protein, 610 aa, synthetic construct
  REGION 1..610: note = O15213
METAPKPGKDVPPKKDKLQTKRKKPRRYWEEETVPTTAGASPGPPRNKKNRELRPQRPKNAYILKKSRISKKPQVPKKPREWKNPESQRGLSGTQDPFPGPAPVPVEVVQKFCRIDKSRKLPHSKAKTRSRLEVAEAEEEETSIKAARSELLLAEEPGFLEGEDGEDTAKICQADIVEAVDIASAAKHFDLNLRQFGPYRLNYSRTGRHLAFGGRRGHVAALDWVTKKLMCEINVMEAVRDIRFLHSEALLAVAQNRWLHIYDNQGIELHCIRRCDRVTRLEFLPFHFLLATASETGFLTYLDVSVGKIVAALNARAGRLDVMSQNPYNAVIHLGHSNGTVSLWSPAMKEPLAKILCHRGGVRAVAVDSTGTYMATSGLDHQLKIFDLRGTYQPLSTRTLPHGAGHLAFSQRGLLVAGMGDVVNIWAGQGKASPPSLEQPYLTHRLSGPVHGLQFCPFEDVLGVGHTGGITSMLVPGAGEPNFDGLESNPYRSRKQRQEWEVKALLEKVPAELICLDPRALAEVDVISLEQGKKEQIERLGYDPQAKAPFQPKPKQKGRSSTASLVKRKRKVMDEEHRDKVRQSLQQQHHKEAKAKPTGARPSALDRFVR

SEQ ID NO: 37 - protein, 298 aa, synthetic construct
  REGION 1..298: note = Q96CA5
MGPKDSAKCLHRGPQPSHWAAGDGPTQERCGPRSLGSPVLGLDTCRAWDHVDGQILGQLRPLTEEEEEEGAGATLSRGPAFPGMGSEELRLASFYDWPLTAEVPPELLAAAGFFHTGHQDKVRCFFCYGGLQSWKRGDDPWTEHAKWFPSCQFLLRSKGRDFVHSVQETHSQLLGSWDPWEEPEDAAPVAPSVPASGYPELPTPRREVQSESAQEPGGVSPAEAQRAWWVLEPPGARDVEAQLRRLQEERTCKVCLDRAVSIVFVPCGHLVCAECAPGLQLCPICRAPVRSRVRTFLS

SEQ ID NO: 38 - protein, 759 aa, synthetic construct
  REGION 1..759: note = A0A024R1V0
MDLSALRVEEVQNVINAMQKILECPICLELIKEPVSTKCDHIFCKFCMLKLLNQKKGPSQCPLCKNDITKRSLQESTRFSQLVEELLKIICAFQLDTGLEYANSYNFAKKENNSPEHLKDEVSIIQSMGYRNRAKRLLQSEPENPSLQETSLSVQLSNLGTVRTLRTKQRIQPQKTSVYIELGSDSSEDTVNKATYCSVGDQELLQITPQGTRDEISLDSAKKAACEFSETDVTNTEHHQPSNNDLNTTEKRAAERHPEKYQGEAASGCESETSVSEDCSGLSSQSDILTTQQRDTMQHNLIKLQQEMAELEAVLEQHGSQPSNSYPSIISDSSALEDLRNPEQSTSEKVLTSQKSSEYPISQNPEGLSADKFEVSADSSTSKNKEPGVERSSPSKCPSLDDRWYMHSCSGSLQNRNYPSQEELIKVVDVEEQQLEESGPHDLTETSYLPRQDLEGTPYLESGISLFSDDPESDPSEDRAPESARVGNIPSSTSALKVPQLKVAESAQSPAAAHTTDTAGYNAMEESVSREKPELTASTERVNKRMSMVVSGLTPEEFMLVYKFARKHHITLTNLITEETTHVVMKTDAEFVCERTLKYFLGIAGGKWVVSYFWVTQSIKERKMLNEHDFEVRGDVVNGRNHQGPKRARESQDRKIFRGLEICCYGPFTNMPTDQLEWMVQLCGASVVKELSSFTLGTGVHPIVVVQPDAWTEDNGFHAIGQMCEAPVVTREWVLDSVALYQCQELDTYLIPQIPHSHY

SEQ ID NO: 39 - protein, 719 aa, synthetic construct
  REGION 1..719: note = A0A024R1V7
MDLSALRVEEVQNVINAMQKILECPICLELIKEPVSTKCDHIFCKFCMLKLLNQKKGPSQCPLCKNDITKRSLQESTRFSQLVEELLKIICAFQLDTGLEYANSYNFAKKENNSPEHLKDEVSIIQSMGYRNRAKRLLQSEPENPSLQETSLSVQLSNLGTVRTLRTKQRIQPQKTSVYIELAACEFSETDVTNTEHHQPSNNDLNTTEKRAAERHPEKYQGEAASGCESETSVSEDCSGLSSQSDILTTQQRDTMQHNLIKLQQEMAELEAVLEQHGSQPSNSYPSIISDSSALEDLRNPEQSTSEKAVLTSQKSSEYPISQNPEGLSADKFEVSADSSTSKNKEPGVERSSPSKCPSLDDRWYMHSCSGSLQNRNYPSQEELIKVVDVEEQQLEESGPHDLTETSYLPRQDLEGTPYLESGISLFSDDPESDPSEDRAPESARVGNIPSSTSALKVPQLKVAESAQSPAAAHTTDTAGYNAMEESVSREKPELTASTERVNKRMSMVVSGLTPEEFMLVYKFARKHHITLTNLITEETTHVVMKTDAEFVCERTLKYFLGIAGGKWVVSYFWVTQSIKERKMLNEHDFEVRGDVVNGRNHQGPKRARESQDRKIFRGLEICCYGPFTNMPTDQLEWMVQLCGASVVKELSSFTLGTGVHPIVVVQPDAWTEDNGFHAIGQMCEAPVVTREWVLDSVALYQCQELDTYLIPQIPHSHY

SEQ ID NO: 40 - protein, 721 aa, synthetic construct
  REGION 1..721: note = A0A024R1Z8
MDLSALRVEEVQNVINAMQKILECPICLELIKEPVSTKCDHIFCKFCMLKLLNQKKGPSQCPLCKNDITKRSLQESTRFSQLVEELLKIICAFQLDTGLEYANSYNFAKKENNSPEHLKDEVSIIQSMGYRNRAKRLLQSEPENPSLQETSLSVQLSNLGTVRTLRTKQRIQPQKTSVYIELGSDSSEDTVNKATYCSVGDQELLQITPQGTRDEISLDSAKKGEAASGCESETSVSEDCSGLSSQSDILTTQQRDTMQHNLIKLQQEMAELEAVLEQHGSQPSNSYPSIISDSSALEDLRNPEQSTSEKAVLTSQKSSEYPISQNPEGLSADKFEVSADSSTSKNKEPGVERSSPSKCPSLDDRWYMHSCSGSLQNRNYPSQEELIKVVDVEEQQLEESGPHDLTETSYLPRQDLEGTPYLESGISLFSDDPESDPSEDRAPESARVGNIPSSTSALKVPQLKVAESAQSPAAAHTTDTAGYNAMEESVSREKPELTASTERVNKRMSMVVSGLTPEEFMLVYKFARKHHITLTNLITEETTHVVMKTDAEFVCERTLKYFLGIAGGKWVVSYFWVTQSIKERKMLNEHDFEVRGDVVNGRNHQGPKRARESQDRKIFRGLEICCYGPFTNMPTDQLEWMVQLCGASVVKELSSFTLGTGVHPIVVVQPDAWTEDNGFHAIGQMCEAPVVTREWVLDSVALYQCQELDTYLIPQIPHSHY

SEQ ID NO: 41 - protein, 11 aa, synthetic construct
  REGION 1..11: note = A0A068BFX7
MDLSALRVEEV

SEQ ID NO: 42 - protein, 173 aa, synthetic construct
  REGION 1..173: note = C6YB45
MDAEFVCERTLKYFLGIAGGKWVVSYFWVTQSIKERKMLNEHDFEVRGDVVNGRNHQGPKRARESQDRKIFRGLEICCYGPFTNMPTDQLEWMVQLCGASVVKELSSFTLGTGVHPIVVVQPDAWTEDNGFHAIGQMCEAPVVTREWVLDSVALYQCQELDTYLIPQIPHSHY

SEQ ID NO: 43 - protein, 354 aa, synthetic construct [sequence omitted]

SEQ ID NO: 44 - protein, 680 aa, synthetic construct
  REGION 1..680: note = G3XAC3
MDLSALRVEEVQNVINAMQKILECPICLELIKEPVSTKCDHIFCKFCMLKLLNQKKGPSQCPLCKNDITKRSLQESTRFSQLVEELLKIICAFQLDTGLEYANSYNFAKKENNSPEHLKDEVSIIQSMGYRNRAKRLLQSEPENPSLQETSLSVQLSNLGTVRTLRTKQRIQPQKTSVYIELGEAASGCESETSVSEDCSGLSSQSDILTTQQRDTMQHNLIKLQQEMAELEAVLEQHGSQPSNSYPSIISDSSALEDLRNPEQSTSEKAVLTSQKSSEYPISQNPEGLSADKFEVSADSSTSKNKEPGVERSSPSKCPSLDDRWYMHSCSGSLQNRNYPSQEELIKVVDVEEQQLEESGPHDLTETSYLPRQDLEGTPYLESGISLFSDDPESDPSEDRAPESARVGNIPSSTSALKVPQLKVAESAQSPAAAHTTDTAGYNAMEESVSREKPELTASTERVNKRMSMVVSGLTPEEFMLVYKFARKHHITLTNLITEETTHVVMKTDAEFVCERTLKYFLGIAGGKWVVSYFWVTQSIKERKMLNEHDFEVRGDVVNGRNHQGPKRARESQDRKIFRGLEICCYGPFTNMPTDQLEWMVQLCGASVVKELSSFTLGTGVHPIVVVQPDAWTEDNGFHAIGQMCEAPVVTREWVLDSVALYQCQELDTYLIPQIPHSHY

SEQ ID NO: 45 - protein, 181 aa, synthetic construct
  REGION 1..181: note = O95971
MLLEPGRGCCALAILLAIVDIQSGGCINITSSASQEGTRLNLICTVWHKKEEAEGFVVFLCKDRSGDCSPETSLKQLRLKRDPGIDGVGEISSQLMFTISQVTPLHSGTYQCCARSQKSGIRLQGHFFSILFTETGNYTVTGLKQRQHLEFSHNEGTLSSGFLQEKVWVMLVTSLVALQAL

SEQ ID NO: 46 - protein, 212 aa, synthetic construct [sequence omitted]

SEQ ID NO: 47 - protein, 296 aa, synthetic construct
  REGION 1..296: note = B4E2Y9
MHGDSEYNIMFGPDICGPGTKKVHVIFNYKGKNVLINKDIRCKDDEFTHLYTLIVRPDNTYEVKIDNSQVESGSLEDDWDFLPPKKIKDPDASKPEDWDERAKIDDPTDSKPEDWDKPEHIPDPDAKKPEDWDEEMDGEWEPPVIQNPEYKGEWKPRQIDNPDYKGTWIHPEIDNPEYSPDPSIYAYDNFGVLGLDLWQVKSGTIFDNFLITNDEAYAEEFGNETWGVTKAAEKQMKDKQDEEQRLKEEEEDKKRKEEEEAEDKEDDEDKDEDEEDEEDKEEDEEEDVPGQAKDEL

SEQ ID NO: 48 - protein, 417 aa, synthetic construct
  REGION 1..417: note = P27797
MLLSVPLLLGLLGLAVAEPAVYFKEQFLDGDGWTSRWIESKHKSDFGKFVLSSGKFYGDEEKDKGLQTSQDARFYALSASFEPFSNKGQTLVVQFTVKHEQNIDCGGGYVKLFPNSLDQTDMHGDSEYNIMFGPDICGPGTKKVHVIFNYKGKNVLINKDIRCKDDEFTHLYTLIVRPDNTYEVKIDNSQVESGSLEDDWDFLPPKKIKDPDASKPEDWDERAKIDDPTDSKPEDWDKPEHIPDPDAKKPEDWDEEMDGEWEPPVIQNPEYKGEWKPRQIDNPDYKGTWIHPEIDNPEYSPDPSIYAYDNFGVLGLDLWQVKSGTIFDNFLITNDEAYAEEFGNETWGVTKAAEKQMKDKQDEEQRLKEEEEDKKRKEEEEAEDKEDDEDKDEDEEDEEDKEEDEEEDVPGQAKDEL

SEQ ID NO: 49 - protein, 384 aa, synthetic construct
  REGION 1..384: note = Q96L12
MARALVQLWAICMLRVALATVYFQEEFLDGEHWRNRWLQSTNDSRFGHFRLSSGKFYGHKEKDKGLQTTQNGRFYAISARFKPFSNKGKTLVIQYTVKHEQKMDCGGGYIKVFPADIDQKNLNGKSQYYIMFGPDICGFDIKKVHVILHFKNKYHENKKLIRCKVDGFTHLYTLILRPDLSYDVKIDGQSIESGSIEYDWNLTSLKKETSPAESKDWEQTKDNKAQDWEKHFLDASTSKQSDWNGDLDGDWPAPMLQKPPYQDGLKPEGIHKDVWLHRKMKNTDYLTQYDLSEFENIGAIGLELWQVRSGTIFDNFLITDDEEYADNFGKATWGETKGPEREMDAIQAKEEMKKAREEEEEELLSGKINRHEHYFNQFHRRNEL

SEQ ID NO: 50 - protein, 109 aa, synthetic construct [sequence omitted]

SEQ ID NO: 51 - protein, 479 aa, synthetic construct
  REGION 1..479: note = Q14790
MDFSRNLYDIGEQLDSEDLASLKFLSLDYIPQRKQEPIKDALMLFQRLQEKRMLEESNLSFLKELLFRINRLDLLITYLNTRKEEMERELQTPGRAQISAYRVMLYQISEEVSRSELRSFKFLLQEEISKCKLDDDMNLLDIFIEMEKRVILGEGKLDILKRVCAQINKSLLKIINDYEEFSKERSSSLEGSPDEFSNGEELCGVMTISDSPREQDSESQTLDKVYQMKSKPRGYCLIINNHNFAKAREKVPKLHSIRDRNGTHLDAGALTTTFEELHFEIKPHDDCTVEQIYEILKIYQLMDHSNMDCFICCILSHGDKGIIYGTDGQEAPIYELTSQFTGLKCPSLAGKPKVFFIQACQGDNYQKGIPVETDSEEQPYLEMDLSSPQTRYIPDEADFLLGMATVNNCVSYRNPAEGTWYIQSLCQSLRERCPRGDDILTILTEVNYEVSNKDDKKNMGKQMPQPTFTLRKKLVFPSD

SEQ ID NO: 52 - protein, 522 aa, synthetic construct
  REGION 1..522: note = Q92851-4
MKSQGQHWYSSSDKNCKVSFREKLLIIDSNLGVQDVENLKFLCIGLVPNKKLEKSSSASDVFEHLLAEDLLSEEDPFFLAELLYIIRQKKLLQHLNCTKEEVERLLPTRQRVSLFRNLLYELSEGIDSENLKDMIFLLKDSLPKTEMTSLSFLAFLEKQGKIDEDNLTCLEDLCKTVVPKLLRNIEKYKREKAIQIVTPPVDKEAESYQGEEELVSQTDVKTFLEALPQESWQNKHAGSNGNRATNGAPSLVSRGMQGASANTLNSETSTKRAAVYRMNRNHRGLCVIVNNHSFTSLKDRQGTHKDAEILSHVFQWLGFTVHIHNNVTKVEMEMVLQKQKCNPAHADGDCFVFCILTHGRFGAVYSSDEALIPIREIMSHFTALQCPRLAEKPKLFFIQACQGEEIQPSVSIEADALNPEQAPTSLQDSIPAEADFLLGLATVPGYVSFRHVEEGSWYIQSLCNHLKKLVPRHEDILSILTAVNDDVSRRVDKQGTKKQMPQPAFTLRKKLVFPVPLDALSL

SEQ ID NO: 53 - protein, 339 aa, synthetic construct
  REGION 1..339: note = A0A024R374
MWQLWASLCCLLVLANARSRPSFHPLSDELVNYVNKRNTTWQAGHNFYNVDMSYLKRLCGTFLGGPKPPQRVMFTEDLKLPASFDAREQWPQCPTIKEIRDQGSCGSCWAFGAVEAISDRICIHTNAHVSVEVSAEDLLTCCGSMCGDGCNGGYPAEAWNFWTRKGLVSGGLYESHVGCRPYSIPPCEHHVNGSRPPCTGEGDTPKCSKICEPGYSPTYKQDKHYGYNSYSVSNSEKDIMAEIYKNGPVEGAFSVYSDFLLYKSGVYQHVTGEMMGGHAIRILGWGVENGTPYWLVANSWNTDWGDNGFFKILRGQDHCGIESEVVAGIPRTDQYWEKI

SEQ ID NO: 54 - protein, 339 aa, synthetic construct; identical to SEQ ID NO: 53
  REGION 1..339: note = P07858

SEQ ID NO: 55 - protein, 333 aa, synthetic construct [sequence omitted]

SEQ ID NO: 56 - protein, 333 aa, synthetic construct [sequence omitted]

SEQ ID NO: 57 - protein, 151 aa, synthetic construct
  REGION 1..151: note = Q9HBQ7
MDYAFQYVQDNGGLDSEESYPYEATEESCKYNPKYSVANDTGFVDIPKQEKALMKAVATVGPISVAIDAGHESFLFYKEGIYFEPDCSSEDMDHGVLVVGYGFESTESDNNKYWLVKNSWGEEWGMGGYVKMAKDRRNHCGIASAASYPTV

SEQ ID NO: 58 - protein, 327 aa, synthetic construct
  REGION 1..327: note = P06126
MLFLLLPLLAVLPGDGNADGLKEPLSFHVTWIASFYNHSWKQNLVSGWLSDLQTHTWDSNSSTIVFLCPWSRGNFSNEEWKELETLFRIRTIRSFEGIRRYAHELQFEYPFEIQVTGGCELHSGKVSGSFLQLAYQGSDFVSFQNNSWLPYPVAGNMAKHFCKVLNQNQHENDITHNLLSDTCPRFILGLLDAGKAHLQRQVKPEAWLSHGPSPGPGHLQLVCHVSGFYPKPVWVMWMRGEQEQQGTQRGDILPSADGTWYLRATLEVAAGEAADLSCRVKHSSLEGQDIVLYWEHHSSVGFIILAVIVPLLLLIGLALWFRKRCFC

SEQ ID NO: 59 - protein, 333 aa, synthetic construct
  REGION 1..333: note = P29016
MLLLPFQLLAVLFPGGNSEHAFQGPTSFHVIQTSSFTNSTWAQTQGSGWLDDLQIHGWDSDSGTAIFLKPWSKGNFSDKEVAELEEIFRVYIFGFAREVQDFAGDFQMKYPFEIQGIAGCELHSGGAIVSFLRGALGGLDFLSVKNASCVPSPEGGSRAQKFCALIIQYQGIMETVRILLYETCPRYLLGVLNAGKADLQRQVKPEAWLSSGPSPGPGRLQLVCHVSGFYPKPVWVMWMRGEQEQQGTQLGDILPNANWTWYLRATLDVADGEAAGLSCRVKHSSLEGQDIILYWRNPTSIGSIVLAIIVPSLLLLLCLALWYMRRRSYQNIP

SEQ ID NO: 60 - protein, 333 aa, synthetic construct
  REGION 1..333: note = P29017
MLFLQFLLLALLLPGGDNADASQEHVSFHVIQIFSFVNQSWARGQGSGWLDELQTHGWDSESGTIIFLHNWSKGNFSNEELSDLELLFRFYLFGLTREIQDHASQDYSKYPFEVQVKAGCELHSGKSPEGFFQVAFNGLDLLSFQNTTWVPSPGCGSLAQSVCHLLNHQYEGVTETVYNLIRSTCPRFLLGLLDAGKMYVHRQVRPEAWLSSRPSLGSGQLLLVCHASGFYPKPVWVTWMRNEQEQLGTKHGDILPNADGTWYLQVILEVASEEPAGLSCRVRHSSLGGQDIILYWGHHFSMNWIALVVIVPLVILIVLVLWFKKHCSYQDIL

SEQ ID NO: 61 - protein, 335 aa, synthetic construct
  REGION 1..335: note = P15813
MGCLLFLLLWALLQAWGSAEVPQRLFPLRCLQISSFANSSWTRTDGLAWLGELQTHSWSNDSDTVRSLKPWSQGTFSDQQWETLQHIFRVYRSSFTRDVKEFAKMLRLSYPLELQVSAGCEVHPGNASNNFFHVAFQGKDILSFQGTSWEPTQEAPLWVNLAIQVLNQDKWTRETVQWLLNGTCPQFVSGLLESGKSELKKQVKPKAWLSRGPSPGPGRLLLVCHVSGFYPKPVWVKWMRGEQEQQGTQPGDILPNADETWYLRATLDVVAGEAAGLSCRVKHSSLEGQDIVLYWGGSYTSMGLIALAVLACLLFLLIVGFTSRFKRQTSYQGVL

SEQ ID NO: 62 - protein, 388 aa, synthetic construct
  REGION 1..388: note = P15812
MLLLFLLFEGLCCPGENTAAPQALQSYHLAAEEQLSFRMLQTSSFANHSWAHSEGSGWLGDLQTHGWDTVLGTIRFLKPWSHGNFSKQELKNLQSLFQLYFHSFIQIVQASAGQFQLEYPFEIQILAGCRMNAPQIFLNMAYQGSDFLSFQGISWEPSPGAGIRAQNICKVLNRYLDIKEILQSLLGHTCPRFLAGLMEAGESELKRKVKPEAWLSCGPSPGPGRLQLVCHVSGFYPKPVWVMWMRGEQEQRGTQRGDVLPNADETWYLRATLDVAAGEAAGLSCRVKHSSLGGHDLIIHWGGYSIFLILICLTVIVTLVILVVVDSRLKKQSSNKNILSPHTPSPVFLMGANTQDTKNSRHQFCLAQVSWIKNRVLKKWKTRLNQLW

SEQ ID NO: 63 - protein, 297 aa, synthetic construct
  REGION 1..297: note = P11836
MTTPRNSVNGTFPAEPMKGPIAMQSGPKPLFRRMSSLVGPTQSFFMRESKTLGAVQIMNGLFHIALGGLLMIPAGIYAPICVTVWYPLWGGIMYIISGSLLAATEKNSRKCLVKGKMIMNSLSLFAAISGMILSIMDILNIKISHFLKMESLNFIRAHTPYINIYNCEPANPSEKNSPSTQYCYSIQSLFLGILSVMLIFAFFQELVIAGIVENEWKRTCSRPKSNIVLLSAEEKKEQTIEIKEEVVGLTETSSQPKNEEDIEIIPIQEEEEEETETNFPEPPQDQESSPIENDSSP

SEQ ID NO: 64 - protein, 662 aa, synthetic construct [sequence omitted]

SEQ ID NO: 65 - protein, 847 aa, synthetic construct
  REGION 1..847: note = P20273
MHLLGPWLLLLVLEYLAFSDSSKWVFEHPETLYAWEGACVWIPCTYRALDGDLESFILFHNPEYNKNTSKFDGTRLYESTKDGKVPSEQKRVQFLGDKNKNCTLSIHPVHLNDSGQLGLRMESKTEKWMERIHLNVSERPFPPHIQLPPEIQESQEVTLTCLLNFSCYGYPIQLQWLLEGVPMRQAAVTSTSLTIKSVFTRSELKFSPQWSHHGKIVTCQLQDADGKFLSNDTVQLNVKHTPKLEIKVTPSDAIVREGDSVTMTCEVSSSNPEYTTVSWLKDGTSLKKQNTFTLNLREVTKDQSGKYCCQVSNDVGPGRSEEVFLQVQYAPEPSTVQILHSPAVEGSQVEFLCMSLANPLPTNYTWYHNGKEMQGRTEEKVHIPKILPWHAGTYSCVAENILGTGQRGPGAELDVQYPPKKVTTVIQNPMPIREGDTVTLSCNYNSSNPSVTRYEWKPHGAWEEPSLGVLKIQNVGWDNTTIACAACNSWCSWASPVALNVQYAPRDVRVRKIKPLSEIHSGNSVSLQCDFSSSHPKEVQFFWEKNGRLLGKESQLNFDSISPEDAGSYSCWVNNSIGQTASKAWTLEVLYAPRRLRVSMSPGDQVMEGKSATLTCESDANPPVSHYTWFDWNNQSLPYHSQKLRLEPVKVQHSGAYWCQGTNSVGKGRSPLSTLTVYYSPETIGRRVAVGLGSCLAILILAICGLKLQRRWKRTQSQQGLQENSSGQSFFVRNKKVRRAPLSEGPHSLGCYNPMMEDGISYTTLRFPEMNIPRTGDAESSEMQRPPPDCDDTVTYSALHKRQVGDYENVIPDFPEDEGIHYSELIQFGVGERPQAQENVDYVILKH

SEQ ID NO: 66 - protein, 847 aa, synthetic construct; identical to SEQ ID NO: 65
  REGION 1..847: note = Q0EAF5

SEQ ID NO: 67 - protein, 534 aa, synthetic construct
  REGION 1..534: note = Q5ZPR3
MLRRRGSPGMGVHVGAALGALWFCLTGALEVQVPEDPVVALVGTDATLCCSFSPEPGFSLAQLNLIWQLTDTKQLVHSFAEGQDQGSAYANRTALFPDLLAQGNASLRLQRVRVADEGSFTCFVSIRDFGSAAVSLQVAAPYSKPSMTLEPNKDLRPGDTVTITCSSYQGYPEAEVFWQDGQGVPLTGNVTTSQMANEQGLFDVHSILRVVLGANGTYSCLVRNPVLQQDAHSSVTITPQRSPTGAVEVQVPEDPVVALVGTDATLRCSFSPEPGFSLAQLNLIWQLTDTKQLVHSFTEGRDQGSAYANRTALFPDLLAQGNASLRLQRVRVADEGSFTCFVSIRDFGSAAVSLQVAAPYSKPSMTLEPNKDLRPGDTVTITCSSYRGYPEAEVFWQDGQGVPLTGNVTTSQMANEQGLFDVHSVLRVVLGANGTYSCLVRNPVLQQDAHGSVTITGQPMTFPPEALWVTVGLSVCLIALLVALAFVCWRKIKQSCEEENAGAEDQDGEGEGSKTALQPLKHSDSKEDDGQEIA

SEQ ID NO: 68 - protein, 212 aa, synthetic construct
  REGION 1..212: note = B4DF51
MPLLLLLPLLWADLTHRPKILIPGTLEPGHSKNLTCSVSWACEQGTPPIFSWLSAAPTSLGPRTTHSSVLIITPRPQDHGTNLTCQVKFAGAGVTTERTIQLNVTYVPQNPTTGIFPGDGSGKQETRAGVVHGAIGGAGVTALLALCLCLIFFIVKTHRRKAARTAVGRNDTHPTTGSASPVSDGASWHPVCPADTSSQCGPPSCPIQHFQN

SEQ ID NO: 69 - protein, 364 aa, synthetic construct
  REGION 1..364: note = P20138
MPLLLLLPLLWAGALAMDPNFWLQVQESVTVQEGLCVLVPCTFFHPIPYYDKNSPVHGYWFREGAIISRDSPVATNKLDQEVQEETQGRFRLLGDPSRNNCSLSIVDARRRDNGSYFFRMERGSTKYSYKSPQLSVHVTDLTHRPKILIPGTLEPGHSKNLTCSVSWACEQGTPPIFSWLSAAPTSLGPRTTHSSVLIITPRPQDHGTNLTCQVKFAGAGVTTERTIQLNVTYVPQNPTTGIFPGDGSGKQETRAGVVHGAIGGAGVTALLALCLCLIFFIVKTHRRKAARTAVGRNDTHPTTGSASPKHQKKSKLHGPTETSSCSGAAPTVEMDEELHYASLNFHGMNPSKDTSTEYSEVRTQ

SEQ ID NO: 70 - protein, 364 aa, synthetic construct; identical to SEQ ID NO: 69
  REGION 1..364: note = Q546G0

SEQ ID NO: 71 - protein, 207 aa, synthetic construct
  REGION 1..207: note = P07766
MQSGTHWRVLGLCLLSVGVWGQDGNEEMGGITQTPYKVSISGTTVILTCPQYPGSEILWQHNDKNIGGDEDDKNIGSDEDHLSLKEFSELEQSGYYVCYPRGSKPEDANFYLYLRARVCENCMEMDVMSVATIVIVDICITGGLLLLVYYWSKNRKAKAKPVTRGAGAGGRQRGQNKERPPPVPNPDYEPIRKGQRDLYSGLNQRRI

SEQ ID NO: 72 - protein, 164 aa, synthetic construct
  REGION 1..164: note = P20963
MKWKALFTAAILQAQLPITEAQSFGLLDPKLCYLLDGILFIYGVILTALFLRVKFSRSADAPAYQQGQNQLYNELNLGRREEYDVLDKRRGRDPEMGGKPQRRKNPQEGLYNELQKDKMAEAYSEIGMKGERRRGKGHDGLYQGLSTATKDTYDALHMQALPPR

SEQ ID NO: 73 - protein, 742 aa, synthetic construct
  REGION 1..742: note = P16070
MDKFWWHAAWGLCLVPLSLAQIDLNITCRFAGVFHVEKNGRYSISRTEAADLCKAFNSTLPTMAQMEKALSIGFETCRYGFIEGHVVIPRIHPNSICAANNTGVYILTSNTSQYDTYCFNASAPPEEDCTSVTDLPNAFDGPITITIVNRDGTRYVQKGEYRTNPEDIYPSNPTDDDVSSGSSSERSSTSGGYIFYTFSTVHPIPDEDSPWITDSTDRIPATTLMSTSATATETATKRQETWDWFSWLFLPSESKNHLHTTTQMAGTSSNTISAGWEPNEENEDERDRHLSFSGSGIDDDEDFISSTISTTPRAFDHTKQNQDWTQWNPSHSNPEVLLQTTTRMTDVDRNGTTAYEGNWNPEAHPPLIHHEHHEEEETPHSTSTIQATPSSTTEETATQKEQWFGNRWHEGYRQTPKEDSHSTTGTAAASAHTSHPMQGRTTPSPEDSSWTDFFNPISHPMGRGHQAGRRMDMDSSHSITLQPTANPNTGLVEDLDRTGPLSMTTQQSNSQSFSTSHEGLEEDKDHPTTSTLTSSNRNDVTGGRRDPNHSEGSTTLLEGYTSHYPHTKESRTFIPVTSAKTGSFGVTAVTVGDSNSNVNRSLSGDQDTFHPSGGSHTTHGSESDGHSHGSQEGGANTTSGPIRTPQIPEWLIILASLLALALILAVCIAVNSRRRCGQKKKLVINSGNGAVEDRKPSGLNGEASKSQEMVHLVNKESSETPDQFMTADETRNLQNVDMKIGV

SEQ ID NO: 74 - protein, 699 aa, synthetic construct
  REGION 1..699: note = P16070-6
MDKFWWHAAWGLCLVPLSLAQIDLNITCRFAGVFHVEKNGRYSISRTEAADLCKAFNSTLPTMAQMEKALSIGFETCRYGFIEGHVVIPRIHPNSICAANNTGVYILTSNTSQYDTYCFNASAPPEEDCTSVTDLPNAFDGPITITIVNRDGTRYVQKGEYRTNPEDIYPSNPTDDDVSSGSSSERSSTSGGYIFYTFSTVHPIPDEDSPWITDSTDRIPATTLMSTSATATETATKRQETWDWFSWLFLPSESKNHLHTTTQMAGTSSNTISAGWEPNEENEDERDRHLSFSGSGIDDDEDFISSTISTTPRAFDHTKQNQDWTQWNPSHSNPEVLLQTTTRMTDVDRNGTTAYEGNWNPEAHPPLIHHEHHEEEETPHSTSTTASAHTSHPMQGRTTPSPEDSSWTDFFNPISHPMGRGHQAGRRMDMDSSHSITLQPTANPNTGLVEDLDRTGPLSMTTQQSNSQSFSTSHEGLEEDKDHPTTSTLTSSNRNDVTGGRRDPNHSEGSTTLLEGYTSHYPHTKESRTFIPVTSAKTGSFGVTAVTVGDSNSNVNRSLSGDQDTFHPSGGSHTTHGSESDGHSHGSQEGGANTTSGPIRTPQIPEWLIILASLLALALILAVCIAVNSRRRCGQKKKLVINSGNGAVEDRKPSGLNGEASKSQEMVHLVNKESSETPDQFMTADETRNLQNVDMKIGV

SEQ ID NO: 75 - protein, 458 aa, synthetic construct
  REGION 1..458: note = P01730
MNRGVPFRHLLLVLQLALLPAATQGKKVVLGKKGDTVELTCTASQKKSIQFHWKNSNQIKILGNQGSFLTKGPSKLNDRADSRRSLWDQGNFPLIIKNLKIEDSDTYICEVEDQKEEVQLLVFGLTANSDTHLLQGQSLTLTLESPPGSSPSVQCRSPRGKNIQGGKTLSVSQLELQDSGTWTCTVLQNQKKVEFKIDIVVLAFQKASSIVYKKEGEQVEFSFPLAFTVEKLTGSGELWWQAERASSSKSWITFDLKNKEVSVKRVTQDPKLQMGKKLPLHLTLPQALPQYAGSGNLTLALEAKTGKLHQEVNLVVMRATQLQKNLTCEVWGPTSPKLMLSLKLENKEAKVSKREKAVWVLNPEAGMWQCLLSDSGQVLLESNIKVLPTWSTPVQPMALIVLGGVAGLLLFIGLGIFFCVRCRHRRRQAERMSQIKRLLSEKKTCQCPHRFQKTCSPI

SEQ ID NO: 76 - protein, 61 aa, synthetic construct
  REGION 1..61: note = P31358
MKRFLFLLLTISLLVMVQIQTGLSGQNDTSQTSSPSASSNISGGIFLFFVANAIIHLFCFS

SEQ ID NO: 77 - protein, 61 aa, synthetic construct
  REGION 1..61: note = Q6IBD0
MKRFLFLLLTISLLVMVQIQTGLSGQNDTSQTSSPSASSSMSGGIFLFFVANAIIHLFCFS

SEQ ID NO: 78 - protein, 61 aa, synthetic construct; identical to SEQ ID NO: 76
  REGION 1..61: note = V9HWN9

SEQ ID NO: 79 - protein, 317 aa, synthetic construct
  REGION 1..317: note = B1AP15
MTVARPSVPAALPLLGELPRLLLLVLLCLPAVWGDCGLPPDVPNAQPALEGRTSFPEDTVITYKCEESFVKIPGEKDSVICLKGSQWSDIEEFCNQKSCPNPGEIRNGQIDVPGGILFGATISFSCNTGYKLFGSTSSFCLISGSSVQWSDPLPECREIYCPAPPQIDNGIIQGERDHYGYRQSVTYACNKGFTMIGEHSIYCTVNNDEGEWSGPPPECRGKSLTSKVPPTVQKPTTVNVPTTEVSPTSQKTTTKTTTPNAQATRSTPVSRTTKHFHETTPNKGSGTTSGTTRLLSGHTCFTLTGLLGTLVTMGLLT

SEQ ID NO: 80 - protein, 293 aa, synthetic construct [sequence omitted]

SEQ ID NO: 81 - protein, 267 aa, synthetic construct [sequence omitted]

SEQ ID NO: 82 - protein, 381 aa, synthetic construct
  REGION 1..381: note = P08174
MTVARPSVPAALPLLGELPRLLLLVLLCLPAVWGDCGLPPDVPNAQPALEGRTSFPEDTVITYKCEESFVKIPGEKDSVICLKGSQWSDIEEFCNRSCEVPTRLNSASLKQPYITQNYFPVGTVVEYECRPGYRREPSLSPKLTCLQNLKWSTAVEFCKKKSCPNPGEIRNGQIDVPGGILFGATISFSCNTGYKLFGSTSSFCLISGSSVQWSDPLPECREIYCPAPPQIDNGIIQGERDHYGYRQSVTYACNKGFTMIGEHSIYCTVNNDEGEWSGPPPECRGKSLTSKVPPTVQKPTTVNVPTTEVSPTSQKTTTKTTTPNAQATRSTPVSRTTKHFHETTPNKGSGTTSGTTRLLSGHTCFTLTGLLGTLVTMGLLT

SEQ ID NO: 83 - protein, 858 aa, synthetic construct
  REGION 1..858: note = P13591
MLQTKDLIWTLFFLGTAVSLQVDIVPSQGEISVGESKFFLCQVAGDAKDKDISWFSPNGEKLTPNQQRISVVWNDDSSSTLTIYNANIDDAGIYKCVVTGEDGSESEATVNVKIFQKLMFKNAPTPQEFREGEDAVIVCDVVSSLPPTIIWKHKGRDVILKKDVRFIVLSNNYLQIRGIKKTDEGTYRCEGRILARGEINFKDIQVIVNVPPTIQARQNIVNATANLGQSVTLVCDAEGFPEPTMSWTKDGEQIEQEEDDEKYIFSDDSSQLTIKKVDKNDEAEYICIAENKAGEQDATIHLKVFAKPKITYVENQTAMELEEQVTLTCEASGDPIPSITWRTSTRNISSEEKASWTRPEKQETLDGHMVVRSHARVSSLTLKSIQYTDAGEYICTASNTIGQDSQSMYLEVQYAPKLQGPVAVYTWEGNQVNITCEVFAYPSATISWFRDGQLLPSSNYSNIKIYNTPSASYLEVTPDSENDFGNYNCTAVNRIGQESLEFILVQADTPSSPSIDQVEPYSSTAQVQFDEPEATGGVPILKYKAEWRAVGEEVWHSKWYDAKEASMEGIVTIVGLKPETTYAVRLAALNGKGLGEISAASEFKTQPVQGEPSAPKLEGQMGEDGNSIKVNLIKQDDGGSPIRHYLVRYRALSSEWKPEIRLPSGSDHVMLKSLDWNAEYEVYVVAENQQGKSKAAHFVFRTSAQPTAIPANGSPTSGLSTGAIVGILIVIFVLLLVVVDITCYFLNKCGLFMCIAVNLCGKAGPGAKGKDMEEGKAAFSKDESKEPIVEVRTEEERTPNHDGGKHTEPNETTPLTEPEKGPVEAKPECQETETKPAPAEVKTVPNDATQTKENESKA

SEQ ID NO: 84 - protein, 288 aa, synthetic construct
  REGION 1..288: note = A0N0P2
MGHTRRQGTSPSKCPYLNFFQLLVLAGLSHFCSGVIHVTKEVKEVATLSCGHNVSVEELAQTRIYWQKEKKMVLTMMSGDMNIWPEYKNRTIFDITNNLSIVILALRPSDEGTYECVVLKYEKDAFKREHLAEVTLSVKADFPTPSISDFEIPTSNIRRIICSTSGGFPEPHLSWLENGEELNAINTTVSQDPETELYAVSSKLDFNMTTNHSFMCLIKYGHLRVNQTFNWNTTKQEHFPDNLLPSWAITLISVNGIFVICCLTYCFAPRCRERRRNERLRRESVRPV

SEQ ID NO: 85 - protein, 288 aa, synthetic construct; identical to SEQ ID NO: 84
  REGION 1..288: note = P33681

SEQ ID NO: 86 - protein, 329 aa, synthetic construct
  REGION 1..329: note = P42081
MDPQCTMGLSNILFVMAFLLSGAAPLKIQAYFNETADLPCQFANSQNQSLSELVVFWQDQENLVLNEVYLGKEKFDSVHSKYMGRTSFDSDSWTLRLHNLQIKDKGLYQCIIHHKKPTGMIRIHQMNSELSVLANFSQPEIVPISNITENVYINLTCSSIHGYPEPKKMSVLLRTKNSTIEYDGVMQKSQDNVTELYDVSISLSVSFPDVTSNMTIFCILETDKTRLLSSPFSIELEDPQPPPDHIPWITAVLPTVIICVMVFCLILWKWKKKKRPRNSYKCGTNTMEREESEQTKKREKIHIPERSDEAQRVFKSSKTSSCDKSDTCF

SEQ ID NO: 87 - protein, 235 aa, synthetic construct
  REGION 1..235: note = P01732
MALPVTALLLPLALLLHAARPSQFRVSPLDRTWNLGETVELKCQVLLSNPTSGCSWLFQPRGAAASPTFLLYLSQNKPKAAEGLDTQRFSGKRLGDTFVLTLSDFRRENEGYYFCSALSNSIMYFSHFVPVFLPAKPTTTPAPRPPTPAPTIASQPLSLRPEACRPAAGGAVHTRGLDFACDIYIWAPLAGTCGVLLLSLVITLYCNHRNRRRVCKCPRPVVKSGDKPSLSARYV

SEQ ID NO: 88 - protein, 823 aa, synthetic construct
  REGION 1..823: note = G5EA36
MTVLQEPVQAAIWQALNHYAYRDAVFLAERLYAEVHSEEALFLLATCYYRSGKAYKAYRLLKGHSCTTPQCKYLLAKCCVDLSKLAEGEQILSGGVFNKQKSHDDIVTEFGDSACFTLSLLGHVYCKTDRLAKGSECYQKSLSLNPFLWSPFESLCEIGEKPDPDQTFKFTSLQNFSNCLPNSCTTQVPNHSLSHRQPETVLTETPQDTIELNRLNLESSNSKYSLNTDSSVSYIDSAVISPDTVPLGTGTSILSKQVQNKPKTGRSLLGGPAALSPLTPSFGILPLETPSPGDGSYLQNYTNTPPVIDVPSTGAPSKKSVARIGQTGTKSVFSQSGNSREVTPILAQTQSSGPQTSTTPQVLSPTITSPPNALPRRSSRLFTSDSSTTKENSKKLKMKFPPKIPNRKTKSKTNKGGITQPNINDSLEITKLDSSIISEGKISTITPQIQAFNLQKAAAGLMSLLREMGKGYLALCSYNCKEAINILSHLPSHHYNTGWVLCQIGRAYFELSEYMQAERIFSEVRRIENYRVEGMEIYSTTLWHLQKDVALSVLSKDLTDMDKNSPEAWCAAGNCFSLQREHDIAIKFFQRAIQVDPNYAYAYTLLGHEFVLTEELDKALACFRNAIRVNPRHYNAWYGLGMIYYKQEKFSLAEMHFQKALDINPQSSVLLCHIGVVQHALKKSEKALDTLNKAIVIDPKNPLCKFHRASVLFANEKYKSALQELEELKQIVPKESLVYFLIGKVYKKLGQTHLALMNFSWAMDLDPKGANNQIKEAIDKRYLPDDEEPITQEEQIMGTDESQESSMTDADDTQLHAAESDEF

SEQ ID NO: 89 - protein, 824 aa, synthetic construct
  REGION 1..824: note = P30260
MTVLQEPVQAAIWQALNHYAYRDAVFLAERLYAEVHSEEALFLLATCYYRSGKAYKAYRLLKGHSCTTPQCKYLLAKCCVDLSKLAEGEQILSGGVFNKQKSHDDIVTEFGDSACFTLSLLGHVYCKTDRLAKGSECYQKSLSLNPFLWSPFESLCEIGEKPDPDQTFKFTSLQNFSNCLPNSCTTQVPNHSLSHRQPETVLTETPQDTIELNRLNLESSNSKYSLNTDSSVSYIDSAVISPDTVPLGTGTSILSKQVQNKPKTGRSLLGGPAALSPLTPSFGILPLETPSPGDGSYLQNYTNTPPVIDVPSTGAPSKKSVARIGQTGTKSVFSQSGNSREVTPILAQTQSSGPQTSTTPQVLSPTITSPPNALPRRSSRLFTSDSSTTKENSKKLKMKFPPKIPNRKTKSKTNKGGITQPNINDSLEITKLDSSIISEGKISTITPQIQAFNLQKAAAEGLMSLLREMGKGYLALCSYNCKEAINILSHLPSHHYNTGWVLCQIGRAYFELSEYMQAERIFSEVRRIENYRVEGMEIYSTTLWHLQKDVALSVLSKDLTDMDKNSPEAWCAAGNCFSLQREHDIAIKFFQRAIQVDPNYAYAYTLLGHEFVLTEELDKALACFRNAIRVNPRHYNAWYGLGMIYYKQEKFSLAEMHFQKALDINPQSSVLLCHIGVVQHALKKSEKALDTLNKAIVIDPKNPLCKFHRASVLFANEKYKSALQELEELKQIVPKESLVYFLIGKVYKKLGQTHLALMNFSWAMDLDPKGANNQIKEAIDKRYLPDDEEPITQEEQIMGTDESQESSMTDADDTQLHAAESDEF

SEQ ID NO: 90 - protein, 595 aa, synthetic construct
  REGION 1..595: note = P28908
MRVLLAALGLLFLGALRAFPQDRPFEDTCHGNPSHYYDKAVRRCCYRCPMGLFPTQQCPQRPTDCRKQCEPDYYLDEADRCTACVTCSRDDLVEKTPCAWNSSRVCECRPGMFCSTSAVNSCARCFFHSVCPAGMIVKFPGTAQKNTVCEPASPGVSPACASPENCKEPSSGTIPQAKPTPVSPATSSASTMPVRGGTRLAQEAASKLTRAPDSPSSVGRPSSDPGLSPTQPCPEGSGDCRKQCEPDYYLDEAGRCTACVSCSRDDLVEKTPCAWNSSRTCECRPGMICATSATNSCARCVPYPICAAETVTKPQDMAEKDTTFEAPPLGTQPDCNPTPENGEAPASTSPTQSLLVDSQASKTLPIPTSAPVALSSTGKPVLDAGPVLFWVILVLVVVVGSSAFLLCHRRACRKRIRQKLHLCYPVQTSQPKLELVDSRPRRSSTQLRSGASVTEPVAEERGLMSQPLMETCHSVGAAYLESLPLQDASPAGGPSSPRDLPEPRVSTEHTNNKIEKIYIMKADTVIVGTVKAELPEGRGLAGPAEPELEEELEADHTPHYPEQETEPPLGSCSDVMLSVEEEGKEDPLPTAASGK

SEQ ID NO: 91 - protein, 303 aa, synthetic construct
  REGION 1..303: note = A0A024RBB6
MATSRYEPVAEIGVGAYGTVYKARDPHSGHFVALKSVRVPNGGGGGGGLPISTVREVALLRRLEAFEHPNVVRLMDVCATSRTDREIKVTLVFEHVDQDLRTYLDKAPPPGLPAETIKDLMRQFLRGLDFLHANCIVHRDLKPENILVTSGGTVKLADFGLARIYSYQMALTPVVVTLWYRAPEVLLQSTYATPVDMWSVGCIFAEMFRRKPLFCGNSEADQLGKIFDLIGLPPEDDWPRDVSLPRGAFPPRGPRPVQSVVPEMEESGAQLLLEMLTFNPHKRISAFRALQHSYLHKDEGNPE

SEQ ID NO: 92 - protein, 303 aa, synthetic construct; identical to SEQ ID NO: 91
  REGION 1..303: note = P11802

SEQ ID NO: 93 - protein, 229 aa, synthetic construct
  REGION 1..229: note = Q6LC83
MDVCATSRTDREIKVTLVFEHVDQDLRTYLDKAPPPGLPAETIKDLMRQFLRGLDFLHANCIVHRDLKPENILVTSGGTVKLADFGLARIYSYQMALTPVVVTLWYRAPEVLLQSTYATPVDMWSVGCIFAEMFRRKPLFCGNSEADQLGKIFDLIGLPPEDDWPRDVSLPRGAFPPRGPRPVQSVVPEMEESGAQLLLEMLTFNPHKRISAFRALQHSYLHKDEGNPE

SEQ ID NO: 94 - protein, 111 aa, synthetic construct
  REGION 1..111: note = Q96BE9
MATSRYEPVAEIGVGAYGTVYKARDPHSGHFVALKSVRVPNGGGGGGGLPISTVREVALLRRLEAFEHPNVVRLMDVCATSRTDREIKRCFVESLSSVETLKPTSWAKSLT

SEQ ID NO: 95 - protein, 142 aa, synthetic construct [sequence omitted]

SEQ ID NO: 96 - protein, 116 aa, synthetic construct
  REGION 1..116: note = G3XAG3
MEPAAGSSMEPSADWLATAAARGRVEEVRALLEAGALPNAPNSYGRRPIQVGRGSAAGAGDGGRLWRTKFAGELESGSASILRKKGRLPGEFSEGVCNHRPPPGDALGAWEAKEEE

SEQ ID NO: 97 - protein, 156 aa, synthetic construct
  REGION 1..156: note = K7PML8
MEPAAGSSMEPSADWLATAAARGRVEEVRALLEAGALPNAPNSYGRRPIQVMMMGSARVAELLLLHGAEPNCADPATLTRPVHDAAREGFLDTLVVLHRAGARLDVRDAWGRLPVDLAEELGHRDVARYLRAAAGGTRGSNHARIDAAEGPSDIPD

SEQ ID NO: 98 - protein, 108 aa, synthetic construct
  REGION 1..108: note = L8E941
MEVMMMGSARVAELLLLHGAEPNCADPATLTRPVHDAAREGFLDTLVVLHRAGARLDVRDAWGRLPVDLAEELGHRDVARYLRAAAGGTRGSNHARIDAAEGPSDIPD

SEQ ID NO: 99 - protein, 132 aa, synthetic construct
  REGION 1..132: note = Q8N726
MVRRFLVTLRIRRACGPPRVRVFVVHIPRLTGEWAAPGAPAAVALVLMLLRSQRLGQQPLPRRPGHDDGQRPSGGAAAAPRRGAQLRRPRHSHPTRARRCPGGLPGHAGGAAPGRGAAGRARCLGPSARGPG

SEQ ID NO: 100 - protein, 702 aa, synthetic construct
  REGION 1..702: note = NP_004354
MESPSAPPHRWCIPWQRLLLTASLLTFWNPPTTAKLTIESTPFNVAEGKEVLLLVHNLPQHLFGYSWYKGERVDGNRQIIGYVIGTQQATPGPAYSGREIIYPNASLLIQNIIQNDTGFYTLHVIKSDLVNEEATGQFRVYPELPKPSISSNNSKPVEDKDAVAFTCEPETQDATYLWWVNNQSLPVSPRLQLSNGNRTLTLFNVTRNDTASYKCETQNPVSARRSDSVILNVLYGPDAPTISPLNTSYRSGENLNLSCHAASNPPAQYSWFVNGTFQQSTQELFIPNITVNNSGSYTCQAHNSDTGLNRTTVTTITVYAEPPKPFITSNNSNPVEDEDAVALTCEPEIQNTTYLWWVNNQSLPVSPRLQLSNDNRTLTLLSVTRNDVGPYECGIQNELSVDHSDPVILNVLYGPDDPTISPSYTYYRPGVNLSLSCHAASNPPAQYSWLIDGNIQQHTQELFISNITEKNSGLYTCQANNSASGHSRTTVKTITVSAELPKPSISSNNSKPVEDKDAVAFTCEPEAQNTTYLWWVNGQSLPVSPRLQLSNGNRTLTLFNVTRNDARAYVCGIQNSVSANRSDPVTLDVLYGPDTPIISPPDSSYLSGANLNLSCHSASNPSPQYSWRINGIPQQHTQVLFIAKITPNNNGTYACFVSNLATGRNNSIVKSITVSASGTSPGLSAGATVGIMIGVLVGVALI

SEQ ID NO: 101 - protein, 344 aa, synthetic construct
  REGION 1..344: note = P40199
MGPPSAPPCRLHVPWKEVLLTASLLTFWNPPTTAKLTIESTPFNVAEGKEVLLLAHNLPQNRIGYSWYKGERVDGNSLIVGYVIGTQQATPGPAYSGRETIYPNASLLIQNVTQNDTGFYTLQVIKSDLVNEEATGQFHVYPELPKPSISSNNSNPVEDKDAVAFTCEPEVQNTTYLWWVNGQSLPVSPRLQLSNGNMTLTLLSVKRNDAGSYECEIQNPASANRSDPVTLNVLYGPDGPTISPSKANYRPGENLNLSCHAASNPPAQYSWFINGTFQQSTQELFIPNITVNNSGSYMCQAHNSATGLNRTTVTMITVSGSAPVLSAVATVGITIGVLARVALI

SEQ ID NO: 102 - protein, 390 aa, synthetic construct
  REGION 1..390: note = Q15782
MGATTMDQKSLWAGVVVLLLLQGGSAYKLVCYFTNWSQDRQEPGKFTPENIDPFLCSHLIYSFASIENNKVIIKDKSEVMLYQTINSLKTKNPKLKILLSIGGYLFGSKGFHPMVDSSTSRLEFINSIILFLRNHNFDGLDVSWIYPDQKENTHFTVLIHELAEAFQKDFTKSTKERLLLTAGVSAGRQMIDNSYQVEKLAKDLDFINLLSFDFHGSWEKPLITGHNSPLSKGWQDRGPSSYYNVEYAVGYWIHKGMPSEKVVMGIPTYGHSFTLASAETTVGAPASGPGAAGPITESSGFLAYYEICQFLKGAKITRLQDQQVPYAVKGNQWVGYDDVKSMETKVQFLKNLNLGGAMIWSIDMDDFTGKSCNQGPYPLVQAVKRSLGSL

SEQ ID NO: 103 - protein, 943 aa, synthetic construct
  REGION 1..943: note = Q9UQC9
MTQRSIAGPICNLKFVTLLVALSSELPFLGAGVQLQDNGYNGLLIAINPQVPENQNLISNIKEMITEASFYLFNATKRRVFFRNIKILIPATWKANNNSKIKQESYEKANVIVTDWYGAHGDDPYTLQYRGCGKEGKYIHFTPNFLLNDNLTAGYGSRGRVFVHEWAHLRWGVFDEYNNDKPFYINGQNQIKVTRCSSDITGIFVCEKGPCPQENCIISKLFKEGCTFIYNSTQNATASIMFMQSLSSVVEFCNASTHNQEAPNLQNQMCSLRSAWDVITDSADFHHSFPMNGTELPPPPTFSLVQAGDKVVCLVLDVSSKMAEADRLLQLQQAAEFYLMQIVEIHTFVGIASFDSKGEIRAQLHQINSNDDRKLLVSYLPTTVSAKTDISICSGLKKGFEVVEKLNGKAYGSVMILVTSGDDKLLGNCLPTVLSSGSTIHSIALGSSAAPNLEELSRLTGGLKFFVPDISNSNSMIDAFSRISSGTGDIFQQHIQLESTGENVKPHHQLKNTVTVDNTVGNDTMFLVTWQASGPPEIILFDPDGRKYYTNNFITNLTFRTASLWIPGTAKPGHWTYTLNNTHHSLQALKVTVTSRASNSAVPPATVEAFVERDSLHFPHPVMIYANVKQGFYPILNATVTATVEPETGDPVTLRLLDDGAGADVIKNDGIYSRYFFSFAANGRYSLKVHVNHSPSISTPAHSIPGSHAMYVPGYTANGNIQMNAPRKSVGRNEEERKWGFSRVSSGGSFSVLGVPAGPHPDVFPPCKIIDLEAVKVEEELTLSWTAPGEDFDQGQATSYEIRMSKSLQNIQDDFNNAILVNTSKRNPQQAGIREIFTFSPQISTNGPEHQPNGETHESHRIYVAIRAMDRNSLQSAVSNIAQAPLFIPPNSDPVPARDYLILKGVLTAMGLIGIICLIIVVTHHTLSRKKRADKKENGTKLL

SEQ ID NO: 104 - protein, 235 aa, synthetic construct
  REGION 1..235: note = Q9NQT4
MEEETHTDAKIRAENGTGSSPRGPGCSLRHFACEQNLLSRPDGSASFLQGDTSVLAGVYGPAEVKVSKEIFNKATLEVILRPKIGLPGVAEKSRERLIRNTCEAVVLGTLHPRTSITVVLQVVSDAGSLLACCLNAACMALVDAGVPMRALFCGVACALDSDGTLVLDPTSKQEKEARAVLTFALDSVERKLLMSSTKGLYSDTELQQCLAAAQAASQHVFRFYRESLQRRYSKS

SEQ ID NO: 105 - protein, 583 aa, synthetic construct
  REGION 1..583: note = Q96RS6
MEVAANCSLRVKRPLLDPRFEGYKLSLEPLPCYQLELDAAVAEVKLRDDQYTLEHMHAFGMYNYLHCDSWYQDSVYYIDTLGRIMNLTVMLDTALGKPREVFRLPTDLTACDNRLCASIHFSSSTWVTLSDGTGRLYVIGTGERGNSASEKWEIMFNEELGDPFIIIHSISLLNAEEHSIATLLLRIEKEELDMKGSGFYVSLEWVTISKKNQDNKKYEIIKRDILRGKSVPHYAAIEPDGNGLMIVSYKSLTFVQAGQDLEENMDEDISEKIKEPLYYWQQTEDDLTVTIRLPEDSTKEDIQIQFLPDHINIVLKDHQFLEGKLYSSIDHESSTWIIKESNSLEISLIKKNEGLTWPELVIGDKQGELIRDSAQCAAIAERLMHLTSEELNPNPDKEKPPCNAQELEECDIFFEESSSLCRFDGNTLKTTHVVNLGSNQYLFSVIVDPKEMPCFCLRHDVDALLWQPHSSKQDDMWEHIATFNALGYVQASKRDKKFFACAPNYSYAALCECLRRVFIYRQPAPMSTVLYNRKEGRQVGQVAKQQVASLETNDPILGFQATNERLFVLTTKNLFLIKVNTEN

SEQ ID NO: 106 - protein, 520 aa, synthetic construct
  REGION 1..520: note = Q5T124
MSSPLASLSKTRKVPLPSEPMNPGRRGIRIYGDEDEVDMLSDGCGSEEKISVPSCYGGIGAPVSRQVPASHDSELMAFMTRKLWDLEQQVKAQTDEILSKDQKIAALEDLVQTLRPHPAEATLQRQEELETMCVQLQRQVREMERFLSDYGLQWVGEPMDQEDSESKTVSEHGERDWMTAKKFWKPGDSLAPPEVDFDRLLASLQDLSELVVEGDTQVTPVPGGARLRTLEPIPLKLYRNGIMMFDGPFQPFYDPSTQRCLRDILDGFFPSELQRLYPNGVPFKVSDLRNQVYLEDGLDPFPGEGRVVGRQLMHKALDRVEEHPGSRMTAEKFLNRLPKFVIRQGEVIDIRGPIRDTLQNCCPLPARIQEIVVETPTLAAERERSQESPNTPAPPLSMLRIKSENGEQAFLLMMQPDNTIGDVRALLAQARVMDASAFEIFSTFPPTLYQDDTLTLQAAGLVPKAALLLRARRAPKSSLKFSPGPCPGPGPGPSPGPGPGPSPGPGPGPSPCPGPSPSPQ

SEQ ID NO: 107 - protein, 142 aa, synthetic construct
  REGION 1..142: note = Q14019
MATKIDKEACRAAYNLVRDDGSAVIWVTFKYDGSTIVPGEQGAEYQHFIQQCTDDVRLFAFVRFTTGDAMSKRSKFALITWIGENVSGLQRAKTGTDKTLVKEVVQNFAKEFVISDRKELEEDFIKSELKKAGGANYDAQTE

SEQ ID NO: 108 - protein, 164 aa, synthetic construct
  REGION 1..164: note = L8EAS4
MATRDPWVWMASPDFQARKGKRVHQETLAPGETKDKMELLGLRGPLDLLGPGALLATLGKMAPGEHKAQRAPKESPDKTARWAQRDPQGPRVSLEYLERRATMGHQASLDHQGPRASQGAWGLGERTVWTVPQDRRGSLATEARMELQGPGVPQASRASRETQW

SEQ ID NO: 109 - protein, 540 aa, synthetic construct
  REGION 1..540: note = Q86Y22
MGPGERAGGGGDAGKGNAAGGGGGGRSATTAGSRAVSALCLLLSVGSAAACLLLGVQAAALQGRVAALEEERELLRRAGPPGALDAWAEPHLERLLREKLDGLAKIRTAREAPSECVCPPGPPGRRGKPGRRGDPGPPGQSGRDGYPGPLGLDGKPGLPGPKGEKGAPGDFGPRGDQGQDGAAGPPGPPGPPGARGPPGDTGKDGPRGAQGPAGPKGEPGQDGEMGPKGPPGPKGEPGVPGKKGDDGTPSQPGPPGPKGEPGSMGPRGENGVDGAPGPKGEPGHRGTDGAAGPRGAPGLKGEQGDTVVIDYDGRILDALKGPPGPQGPPGPPGIPGAKGELGLPGAPGIDGEKGPKGQKGDPGEPGPAGLKGEAGEMGLSGLPGADGLKGEKGESASDSLQESLAQLIVEPGPPGPPGPPGPMGLQGIQGPKGLDGAKGEKGASGERGPSGLPGPVGPPGLIGLPGTKGEKGRPGEPGLDGFPGPRGEKGDRSERGEKGERGVPGRKGVKGQKGEPGPPGLDQPCPVGPDGLPVPGCWHK

SEQ ID NO: 110 - protein, 163 aa, synthetic construct
  REGION 1..163: note = Q6ZYK7
MLARALLLCAVLALSHTANPCCSHPCQNRGVCMSVGFDQYKCDCTRTGFYGENCSTPEFLTRIKLFLKPTPNTVHYILTHFKGFWNVVNNIPFLRNAIMSYVLTSRSHLIDSPPTYNADYGYKSWEAFSNLSYYTRALPPVPDDCPTPLGVKALHASVFQDRS

SEQ ID NO: 111 - protein, 543 aa, synthetic construct
  REGION 1..543: note = Q16678
MGTSLSPNDPWPLNPLSIQQTTLLLLLSVLATVHVGQRLLRQRRRQLRSAPPGPFAWPLIGNAAAVGQAAHLSFARLARRYGDVFQIRLGSCPIVVLNGERAIHQALVQQGSAFADRPAFASFRVVSGGRSMAFGHYSEHWKVQRRAAHSMMRNFFTRQPRSRQVLEGHVLSEARELVALLVRGSADGAFLDPRPLTVVAVANVMSAVCFGCRYSHDDPEFRELLSHNEEFGRTVGAGSLVDVMPWLQYFPNPVRTVFREFEQLNRNFSNFILDKFLRHCESLRPGAAPRDMMDAFILSAEKKAAGDSHGGGARLDLENVPATITDIFGASQDTLSTALQWLLLLFTRYPDVQTRVQAELDQVVGRDRLPCMGDQPNLPYVLAFLYEAMRFSSFVPVTIPHATTANTSVLGYHIPKDTVVFVNQWSVNHDPLKWPNPENFDPARFLDKDGLINKDLTSRVMIFSVGKRRCIGEELSKMQLFLFISILAHQCDFRANPNEPAKMNFSYGLTIKPKSFKVNVTLRESMELLDSAVQNLQAKETCQ

SEQ ID NO: 112 - protein, 110 aa, synthetic construct
  REGION 1..110: note = Q9Y5P2-2
MWMGLIQLVEGVKRKDQGFLEKEFYHKTNIKMRCEFLACWPAFTVLGEAWRDQVDWSRLLRDAGLVKMSRKPRASSPLSNNHPPTPKRFPRQPGREKGPIKEVPGTKGSP

SEQ ID NO: 113 - protein, 127 aa, synthetic construct
  REGION 1..127: note = Q9Y5P2
MWMGLIQLVEGVKRKDQGFLEKEFYHKTNIKMRCEFLACWPAFTVLGEAWRDQVDWSRLLRDAGLVKMSRKPRASSPLSNNHPPTPKRRGSGRHPLNPGPEALSKFPRQPGREKGPIKEVPGTKGSP

SEQ ID NO: 114 - protein, 189 aa, synthetic construct
  REGION 1..189: note = Q5HYN5
MTDKTEKVAVDPETVFKRPRECDSPSYQKRQRMALLARKQGAGDSLIAGSAMSKAKKLMTGHAIPPSQLDSQIDDFTGFSKDRMMQKPGSNAPVGGNVTSSFSGDDLECRETASSPKSQREINADIKRKLVKELRCVGQKYEKIFEMLEGVQGPTAVRKRFFESIIKEAARCMRRDFVKHLKKKLKRMI

SEQ ID NO: 115 - protein, 264 aa, synthetic construct
  REGION 1..264: note = Q8WUE5
MLRLLRLALAFYGRTADPAERQGPQQQGLPQGDTQLTTVQGVVTSFCGDYGMIDESIYFSSDVVTGNVPLKVGQKVNVVVEEDKPHYGLRAIKVDVVPRHLYGAGPSDSGTRVLIGCVTSINEDNIYISNSIYFSIAIVSEDFVPYKGDLLEVEYSTEPGISNIKATSVKPIRCIHTEEVCITSVHGRNGVIDYTIFFTLDSVKLPDGYVPQVDDIVNVVMVESIQFCFIWRAISITPVHKSSSGFQDDGGLGRPKRERRSQSI

SEQ ID NO: 116 - protein, 947 aa, synthetic construct
  REGION 1..947: note = Q58F21
MSLPSRQTAIIVNPPPPEYINTKKNGRLTNQLQYLQKVVLKDLWKHSFSWPFQRPVDAVKLQLPDYYTIIKNPMDLNTIKKRLENKYYAKASECIEDFNTMFSNCYLYNKPGDDIVLMAQALEKLFMQKLSQMPQEEQVVGVKERIKKGTQQNIAVSSAKEKSSPSATEKVFKQQEIPSVFPKTSISPLNVVQGASVNSSSQTAAQVTKGVKRKADTTTPATSAVKASSEFSPTFTEKSVALPPIKENMPKNVLPDSQQQYNVVKTVKVTEQLRHCSEILKEMLAKKHFSYAWPFYNPVDVNALGLHNYYDVVKNPMDLGTIKEKMDNQEYKDAYKFAADVRLMFMNCYKYNPPDHEVVTMARMLQDVFETHFSKIPIEPVESMPLCYIKTDITETTGRENTNEASSEGNSSDDSEDERVKRLAKLQEQLKAVHQQLQVLSQVPFRKLNKKKEKSKKEKKKEKVNNSNENPRKMCEQMRLKEKSKRNQPKKRKQQFIGLKSEDEDNAKPMNYDEKRQLSLNINKLPGDKLGRVVHIIQSREPSLSNSNPDEIEIDFETLKASTLRELEKYVSACLRKRPLKPPAKKIMMSKEELHSQKKQELEKRLLDVNNQLNSRKRQTKSDKTQPSKAVENVSRLSESSSSSSSSSESESSSSDLSSSDSSDSESEMFPKFTEVKPNDSPSKENVKKMKNECIPPEGRTGVTQIGYCVQDTTSANTTLVHQTTPSHVMPPNHHQLAFNYQELEHLQTVKNISPLQILPPSGDSEQLSNGITVMHPSGDSDTTMLESECQAPVQKDIKIKNADSWKSLGKPVKPSGVMKSSDELFNQFRKAAIEKEVKARTQELIRKHLEQNTKELKASQENQRDLGNGLTVESFSNKIQNKCSGEEQKEHQQSSEAQDKSKLWLLKDRDLARQKEQERRRREAMVGTIDMTLQSDIMTMFENNFD

SEQ ID NO: 117 - protein, 180 aa, synthetic construct
  REGION 1..180: note = O75638-2
MQAEGRGTGGSTGDADGPGGPGIPDGPGGNAGGPGEAGATGGRGPRGAGAARASGPRGGAPRGPHGGAASAQDGRCPCGARRPDSRLLELHITMPFSSPMEAELVRRILSRDAAPLPRPGAVLKDFTVSGNLLFIRLTAADHRQLQLSISSCLQQLSLLMWITQCFLPVFLAQAPSGQRR

SEQ ID NO: 118 - protein, 210 aa, synthetic construct
  REGION 1..210: note = O75638
MQAEGQGTGGSTGDADGPGGPGIPDGPGGNAGGPGEAGATGGRGPRGAGAARASGPRGGAPRGPHGGAASAQDGRCPCGARRPDSRLLQLHITMPFSSPMEAELVRRILSRDAAPLPRPGAVLKDFTVSGNLLFMSVRDQDREGAGRMRVVGWGLGSASPEGQKARDLRTPKHKVSEQRPGTPGPPPPEGAQGDGCRGVAFNVMFSAPHI

SEQ ID NO: 119 - protein, 663 aa, synthetic construct
  REGION 1..663: note = Q8NI51
MAATEISVLSEQFTKIKELELMPEKGLKEEEKDGVCREKDHRSPSELEAERTSGAFQDSVLEEEVELVLAPSEESEKYILTLQTVHFTSEAVELQDMSLLSIQQQEGVQVVVQQPGPGLLWLEEGPRQSLQQCVAISIQQELYSPQEMEVLQFHALEENVMVASEDSKLAVSLAETTGLIKLEEEQEKNQLLAERTKEQLFFVETMSGDERSDEIVLTVSNSNVEEQEDQPTAGQADAEKAKSTKNQRKTKGAKGTFHCDVCMFTSSRMSSFNRHMKTHTSEKPHLCHLCLKTFRTVTLLRNHVNTHTGTRPYKCNDCNMAFVTSGELVRHRRYKHTHEKPFKCSMCKYASVEASKLKRHVRSHTGERPFQCCQCSYASRDTYKLKRHMRTHSGEKPYECHICHTRFTQSGTMKIHILQKHGENVPKYQCPHCATIIARKSDLRVHMRNLHAYSAAELKCRYCSAVFHERYALIQHQKTHKNEKRFKCKHCSYACKQERHMTAHIRTHTGEKPFTCLSCNKCFRQKQLLNAHFRKYHDANFIPTVYKCSKCGKGFSRWINLHRHSEKCGSGEAKSAASGKGRRTRKRKQTILKEATKGQKEAAKGWKEAANGDEAAAEEASTTKGEQFPGEMFPVACRETTARVKEEVDEGVTCEMLLNTMDK

SEQ ID NO: 120 - protein, 715 aa, synthetic construct
  REGION 1..715: note = Q8IZW8
MSQVMSSPLLAGGHAVSLAPCDEPRRTLHPAPSPSLPPQCSYYTTEGWGAQALMAPVPCMGPPGRLQQAPQVEAKATCFLPSPGEKALGTPEDLDSYIDFSLESLNQMILELDPTFQLLPPGTGGSQAELAQSTMSMRKKEESEALDIKYIEVTSARSRCHDGPQHCSSPSVTPPFGSLRSGGLLLSRDVPRETRSSSESLIFSGNQGRGHQRPLPPSEGLSPRPPNSPSISIPCMGSKASSPHGLGSPLVASPRLEKRLGGLAPQRGSRISVLSASPVSDVSYMFGSSQSLLHSSNSSHQSSSRSLESPANSSSSLHSLGSVSLCTRPSDFQAPRNPTLTMGQPRTPHSPPLAKEHASSCPPSITNSMVDIPIVLINGCPEPGSSPPQRTPGHQNSVQPGAASPSNPCPATRSNSQTLSDAPFTTCPEGPARDMQPTMKFVMDTSKYWFKPNITREQAIELLRKEEPGAFVIRDSSSYRGSFGLALKVQEVPASAQSRPGEDSNDLIRHFLIESSAKGVHLKGADEEPYFGSLSAFVCQHSIMALALPCKLTIPQRELGGADGASDSTDSPASCQKKSAGCHTLYLSSVSVETLTGALAVQKAISTTFERDILPTPTVVHFKVTEQGITLTDVQRKVFFRRHYPLTTLRFCGMDPEQRKWQKYCKPSWIFGFVAKSQTEPQENVCHLFAEYDMVQPASQVIGLVTALLQDAERM

SEQ ID NO: 121 - protein, 433 aa, synthetic construct
  REGION 1..433: note = P14635
MALRVTRNSKINAENKAKINMAGAKRVPTAPAATSKPGLRPRTALGDIGNKVSEQLQAKMPMKKEAKPSATGKVIDKKLPKPLEKVPMLVPVPVSEPVPEPEPEPEPEPVKEEKLSPEPILVDTASPSPMETSGCAPAEEDLCQAFSDVILAVNDVDAEDGADPNLCSEYVKDIYAYLRQLEEEQAVRPKYLLGREVTGNMRAILIDWLVQVQMKFRLLQETMYMTVSIIDRFMQNNCVPKKMLQLVGVTAMFIASKYEEMYPPEIGDFAFVTDNTYTKHQIRQMEMKILRALNFGLGRPLPLHFLRRASKIGEVDVEQHTLAKYLMELTMLDYDMVHFPPSQIAAGAFCLALKILDNGEWTPTLQHYLSYTEESLLPVMQHLAKNVVMVNQGLTKHMTVKNKYATSKHAKISTLPQLNSALVQDLAKAVAKV

SEQ ID NO: 122 - protein, 295 aa, synthetic construct
  REGION 1..295: note = P24385
MEHQLLCCEVETIRRAYPDANLLNDRVLRAMLKAEETCAPSVSYFKCVQKEVLPSMRKIVATWMLEVCEEQKCEEEVFPLAMNYLDRFLSLEPVKKSRLQLLGATCMFVASKMKETIPLTAEKLCIYTDNSIRPEELLQMELLLVNKLKWNLAAMTPHDFIEHFLSKMPEAEENKQIIRKHAQTFVALCATDVKFISNPPSMVAAGSVVAAVQGLNLRSPNNFLSYYRLTRFLSRVIKCDPDCLRACQEQIEALLESSLRQAQQNMDPKAAEEEEEEEEEVDLACTPTDVRDVDI

SEQ ID NO: 123 - protein, 216 aa, synthetic construct
  REGION 1..216: note = P23284
MLRLSERNMKVLLAAALIAGSVFFLLLPGPSAADEKKKGPKVTVKVYFDLRIGDEDVGRVIFGLFGKTVPKTVDNFVALATGEKGFGYKNSKFHRVIKDFMIQGGDFTRGDGTGGKSIYGERFPDENFKLKHYGPGWVSMANAGKDTNGSQFFITTVKTAWLDGKHVVFGKVLEGMEVVRKVESTKTDSRDKPLKDVIIADCGKIEVEKPFAIAKE

SEQ ID NO: 124 - protein, 347 aa, synthetic construct
  REGION 1..347: note = P43366
MPRGQKSKLRAREKRRKAREETQGLKVAHATAAEKEECPSSSPVLGDTPTSSPAAGIPQKPQGAPPTTTAAAAVSCTESDEGAKCQGEENASFSQATTSTESSVKDPVAWEAGMLMHFILRKYKMREPIMKADMLKVVDEKYKDHFTEILNGASRRLELVFGLDLKEDNPSGHTYTLVSKLNLTNDGNLSNDWDFPRNGLLMPLLGVIFLKGNSATEEEIWKFMNVLGAYDGEEHLIYGEPRKFITQDLVQEKYLKYEQVPNSDPPRYQFLWGPRAYAETTKMKVLEFLAKMNGATPRDFPSHYEEALRDEEERAQVRSSVRARRRTTATTFRARSRAPFSRSSHPM

SEQ ID NO: 125 - protein, 811 aa, synthetic construct
  REGION 1..811: note = Q5TB30
MESQGVPPGPYRATKLWNEVTTSFRAGMPLRKHRQHFKKYGNCFTAGEAVDWLYDLLRNNSNFGPEVTRQQTIQLLRKFLKNHVIEDIKGRWGSENVDDNNQLFRFPATSPLKTLPRRYPELRKNNIENFSKDKDSIFKLRNLSRRTPKRHGLHLSQENGEKIKHEIINEDQENAIDNRELSQEDVEEVWRYVILIYLQTILGVPSLEEVINPKQVIPQYIMYNMANTSKRGVVILQNKSDDLPHWVLSAMKCLANWPRSNDMNNPTYVGFERDVFRTIADYFLDLPEPLLTFEYYELFVNILVVCGYITVSDRSSGIHKIQDDPQSSKFLHLNNLNSFKSTECLLLSLLHREKNKEESDSTERLQISNPGFQERCAKKMQLVNLRNRRVSANDIMGGSCHNLIGLSNMHDLSSNSKPRCCSLEGIVDVPGNSSKEASSVFHQSFPNIEGQNNKLFLESKPKQEFLLNLHSEENIQKPFSAGFKRTSTLTVQDQEELCNGKCKSKQLCRSQSLLLRSSTRRNSYINTPVAEIIMKPNVGQGSTSVQTAMESELGESSATINKRLCKSTIELSENSLLPASSMLTGTQSLLQPHLERVAIDALQLCCLLLPPPNRRKLQLLMRMISRMSQNVDMPKLHDAMGTRSLMIHTFSRCVLCCAEEVDLDELLAGRLVSFLMDHHQEILQVPSYLQTAVEKHLDYLKKGHIENPGDGLFAPLPTYSYCKQISAQEFDEQKVSTSQAAIAELLENIIKNRSLPLKEKRKKLKQFQKEYPLIYQKRFPTTESEAALFGDKPTIKQPMLILRKPKFRSLR

SEQ ID NO: 126 - protein, 98 aa, synthetic construct
  REGION 1..98: note = P03129
MHGDTPTLHEYMLDLQPETTDLYCYEQLNDSSEEEDEIDGPAGQAEPDRAHYNIVTFCCKCDSTLRLCVQSTHVDIRTLEDLLMGTLGIVCPICSQKP

SEQ ID NO: 127 - protein, 105 aa, synthetic construct
  REGION 1..105: note = P06788
MHGPKATLQDIVLHLEPQNEIPVDLLCHEQLSDSEEENDEIDGVNHQHLPARRAEPQRHTMLCMCCKCEARIKLVVESSADDLRAFQQLFLNTLSFVCPWCASQQ

SEQ ID NO: 128 - protein, 98 aa, synthetic construct
  REGION 1..98: note = P17387
MRGETPTLQDYVLDLQPEATDLHCYEQLPDSSDEEDVIDSPAGQAEPDTSNYNIVTFCCQCKSTLRLCVQSTQVDIRILQELLMGSFGIVCPNCSTRL

SEQ ID NO: 129 - protein, 97 aa, synthetic construct
  REGION 1..97: note = P06429
MRGHKPTLKEYVLDLYPEPTDLYCYEQLSDSSDEDEGLDRPDGQAQPATADYYIVTCCHTCNTTVRLCVNSTASDLRTIQQLLMGTVNIVCPTCAQQ

SEQ ID NO: 130 - protein, 99 aa, synthetic construct
  REGION 1..99: note = P27230
MHGEITTLQDYVLDLEPEATDLYCYEQLCDSSEEEEDTIDGPAGQAKPDTSNYNIVTSCCKCEATLRLCVQSTHIDIRKLEDLLMGTFGIVCPGCSQRA

SEQ ID NO: 131 - protein, 109 aa, synthetic construct
  REGION 1..109: note = P24837
MRGPKPTLQEIVLDLCPYNEIQPVDLVCHEQLGESEDEIDEPDHAVNHQHQLLARRDEPQRHTIQCSCCKCNNTLQLVVEASRDTLRQLQQLFMDSLGFVCPWCATANQ

SEQ ID NO: 132 - protein, 106 aa, synthetic construct
  REGION 1..106: note = P21736
MHGPRETLQEIVLHLEPQNELDPVDLLCYEQLSESEEENDEADGVSHAQLPARRAEPQRHKILCVCCKCDGRIELTVESSAEDLRTLQQLFLSTLSFVCPWCATNQ

SEQ ID NO: 133 - protein, 101 aa, synthetic construct
  REGION 1..101: note = P26558
MRGNVPQLKDVVLHLTPQTEIDLQCYEQFDSSEEEDEVDNMRDQLPERRAGQATCYRIEAPCCRCSSVVQLAVESSGDTLRVVQQMLMGELSLVCPCCANN

SEQ ID NO: 134 - protein, 99 aa, synthetic construct
  REGION 1..99: note = P36831
MRGDKATIKDYILDLQPETTDLHCYEQLGDSSDEEDTDGVDRPDGQAEQATSNYYIVTYCHSCDSTLRLCIHSTATDLRTLQQMLLGTLQVVCPGCARL

SEQ ID NO: 135 - protein, 105 aa, synthetic construct
  REGION 1..105: note = P36833
MHGKVPTLQDVVLELTPQTEIDLQCNEQLDSSEDEDEDEVDHLQERPQQARQAKQHTCYLIHVPCCECKFVVQLDIQSTKEDLRVVQQLLMGALTVTCPLCASSN

SEQ ID NO: 136 - protein, 98 aa, synthetic construct
  REGION 1..98: note = Q9QCZ1
MRGNNPTLREYILDLHPEPTDLFCYEQLCDSSDEDEIGLDRPDGQAQPATANYYIVTCCYTCDTTVRLCINSTTTDVRTLQQLLMGTCTIVCPSCAQQ

SEQ ID NO: 137 - protein, 107 aa, synthetic construct
  REGION 1..107: note = Q81965
MHGPKATLCDIVLDLEPQNYEEVDLVCYEQLPDSDSENEKDEPDGVNHPLLLARRAEPQRHNIVCVCCKCNNQLQLVVETSQDGLRALQQLFMDTLSFVCPLCAANQ

SEQ ID NO: 138 - protein, 105 aa, synthetic construct
  REGION 1..105: note = Q80956
MHGKVPTLQEVILELAPQTEIDLQCNEQLDSSEDEDEDEIDHLLERPQQARQAEQHKCYLIHVPCCKCELVVQLDIQSTKEELRVVQQLLMGALTVTCPLCASSK

SEQ ID NO: 139 - protein, 463 aa, synthetic construct
  REGION 1..463: note = Q05639
MGKEKTHINIVVIGHVDSGKSTTTGHLIYKCGGIDKRTIEKFEKEAAEMGKGSFKYAWVLDKLKAERERGITIDISLWKFETTKYYITIIDAPGHRDFIKNMITGTSQADCAVLIVAAGVGEFEAGISKNGQTREHALLAYTLGVKQLIVGVNKMDSTEPAYSEKRYDEIVKEVSAYIKKIGYNPATVPFVPISGWHGDNMLEPSPNMPWFKGWKVERKEGNASGVSLLEALDTILPPTRPTDKPLRLPLQDVYKIGGIGTVPVGRVETGILRPGMVVTFAPVNITTEVKSVEMHHEALSEALPGDNVGFNVKNVSVKDIRRGNVCGDSKSDPPQEAAQFTSQVIILNHPGQISAGYSPVIDCHTAHIACKFAELKEKIDRRSGKKLEDNPKSLKSGDAAIVEMVPGKPMCVESFSQYPPLGRFAVRDMRQTVAVGVIKNVEKKSGGAGKVTKSAQKAQKAGK

SEQ ID NO: 140 - protein, 972 aa, synthetic construct
  REGION 1..972: note = Q15029
MDTDLYDEFGNYIGPELDSDEDDDELGRETKDLDEMDDDDDDDDVGDHDDDHPGMEVVLHEDKKYYPTAEEVYGPEVETIVQEEDTQPLTEPIIKPVKTKKFTLMEQTLPVTVYEMDFLADLMDNSELIRNVTLCGHLHHGKTCFVDCLIEQTHPEIRKRYDQDLCYTDILFTEQERGVGIKSTPVTVVLPDTKGKSYLFNIMDTPGHVNFSDEVTAGLRISDGVVLFIDAAEGVMLNTERLIKHAVQERLAVTVCINKIDRLILELKLPPTDAYYKLRHIVDEVNGLISMYSTDENLILSPLLGNVCFSSSQYSICFTLGSFAKIYADTFGDINYQEFAKRLWGDIYFNPKTRKFTKKAPTSSSQRSFVEFILEPLYKILAQVVGDVDTSLPRTLDELGIHLTKEELKLNIRPLLRLVCKKFFGEFTGFVDMCVQHIPSPKVGAKPKIEHTYTGGVDSDLGEAMSDCDPDGPLMCHTTKMYSTDDGVQFHAFGRVLSGTIHAGQPVKVLGENYTLEDEEDSQICTVGRLWISVARYHIEVNRVPAGNWVLIEGVDQPIVKTATITEPRGNEEAQIFRPLKFNTTSVIKIAVEPVNPSELPKMLDGLRKVNKSYPSLTTKVEESGEHVILGTGELYLDCVMHDLRKMYSEIDIKVADPVVTFCETVVETSSLKCFAETPNKKNKITMIAEPLEKGLAEDIENEVVQITWNRKKLGEFFQTKYDWDLLAARSIWAFGPDATGPNILVDDTLPSEVDKALLGSVKDSIVQGFQWGTREGPLCDELIRNVKFKILDAVVAQEPLHRGGGQIIPTARRVVYSAFLMATPRLMEPYYFVEVQAPADCVSAVYTVLARRRGHVTQDAPIPGSPLYTIKAFIPAIDSFGFETDLRTHTQGQAFSLSVFHHWQIVPGDPLDKSIVIRPLEPQPAPHLAREFMIKTRRRKGLSEDVSISKFFDDPMLLELAKQDVVLNYPM

SEQ ID NO: 141 - protein, 657 aa, synthetic construct
  REGION 1..657: note = A0A0B4J1Y5
MRPSGTAGAALLALLAALCPASRALEEKKVCQGTSNKLTQLGTFEDHFLSLQRMFNNCEVVLGNLEITYVQRNYDLSFLKTIQEVAGYVLIALNTVERIPLENLQIIRGNMYYENSYALAVLSNYDANKTGLKELPMRNLQEILHGAVRFSNNPALCNVESIQWRDIVSSDFLSNMSMDFQNHLGSCQKCDPSCPNGSCWGAGEENCQKLTKIICAQQCSGRCRGKSPSDCCHNQCAAGCTGPRESDCLVCRKFRDEATCKDTCPPLMLYNPTTYQMDVNPEGKYSFGATCVKKCPRNYVVTDHGSCVRACGADSYEMEEDGVRKCKKCEGPCRKVCNGIGIGEFKDSLSINATNIKHFKNCTSISGDLHILPVAFRGDSFTHTPPLDPQELDILKTVKEITGFLLIQAWPENRTDLHAFENLEIIRGRTKQHGQFSLAVVSLNITSLGLRSLKEISDGDVIISGNKNLCYANTINWKKLFGTSGQKTKIISNRGENSCKATGQVCHALCSPEGCWGPEPRDCVSCRNVSRGRECVDKCNLLEGEPREFVENSECIQCHPECLPQAMNITCTGRGPDNCIQCAHYIDGPHCVKTCPAGVMGENNTLVWKYADAGHVCHLCHPNCTYGCTGPGLEGCPTNGSYIVSHFPRSFYKMSVH

SEQ ID NO: 142 - protein, 1136 aa, synthetic construct
  REGION 1..1136: note = E7BSV0
MRPSGTAGAALLALLAALCPASRALEEKKVCQGTSNKLTQLGTFEDHFLSLQRMFNNCEVVLGNLEITYVQRNYDLSFLKTIQEVAGYVLIALNTVERIPLENLQIIRGNMYYENSYALAVLSNYDANKTGLKELPMRNLQEILHGAVRFSNNPALCNVESIQWRDIVSSDFLSNMSMDFQNHLGSCQKCDPSCPNGSCWGAGEENCQKLTKIICAQQCSGRCRGKSPSDCCHNQCAAGCTGPRESDCLVCRKFRDEATCKDTCPPLMLYNPTTYQMDVNPEGKYSFGATCVKKCPRNYVVTDHGSCVRACGADSYEMEEDGVRKCKKCEGPCRKVCNGIGIGEFKDSLSINATNIKHFKNCTSISGDLHILPVAFRGDSFTHTPPLDPQELDILKTVKEITGFLLIQAWPENRTDLHAFENLEIIRGRTKQHGQFSLAVVSLNITSLGLRSLKEISDGDVIISGNKNLCYANTINWKKLFGTSGQKTKIISNRGENSCKATGQVCHALCSPEGCWGPEPRDCVSCRNVSRGRECVDKCNLLEGEPREFVENSECIQCHPECLPQAMNITCTGRGPDNCIQCAHYIDGPHCVKTCPAGVMGENNTLVWKYADAGHVCHLCHPNCTYGCTGPGLEGCPTNGPKIPSIATGMVGALLLLLVVALGIGLFMRRRHIVRKRTLRRLLQERELVEPLTPSGEAPNQALLRILKETEFKKIKVLGSGAFGTVYKGLWIPEGEKVKIPVAIKELREATSPKANKEILDEAYVMASVDNPHVCRLLGICLTSTVQLITQLMPFGCLLDYVREHKDNIGSQYLLNWCVQIAKGMNYLEDRRLVHRDLAARNVLVKTPQHVKITDFGLAKLLGAEEKEYHAEGGKVPIKWMALESILHRIYTHQSDVWSYGVTVWELMTFGSKPYDGIPASEISSILEKGERLPQPPICTIDVYMIMVKCWMIDADSRPKFRELIIEFSKMARDPQRYLVIQGDERMHLPSPTDSNFYRALMDEEDMDDVVDADEYLIPQQGFFSSPSTSRTPLLSSLSATSNNSTVACIDRNGLQSCPIKEDSFLQRYSSDPTGALTEDSIDDTFLPVPGEWLVWKQSCSSTSSTHSAAASLQCPSQVLPPASPEGETVADLQTQ

SEQ ID NO: 143 - protein, 49 aa, synthetic construct
  REGION 1..49: note = L0R6G1
MCATCAIQTAPTGPNKSSLSDFSLPLKLHFLSTISISPFASNKVLTLFI

SEQ ID NO: 144 - protein, 405 aa, synthetic construct
  REGION 1..405: note = P00533-2
MRPSGTAGAALLALLAALCPASRALEEKKVCQGTSNKLTQLGTFEDHFLSLQRMFNNCEVVLGNLEITYVQRNYDLSFLKTIQEVAGYVLIALNTVERIPLENLQIIRGNMYYENSYALAVLSNYDANKTGLKELPMRNLQEILHGAVRFSNNPALCNVESIQWRDIVSSDFLSNMSMDFQNHLGSCQKCDPSCPNGSCWGAGEENCQKLTKIICAQQCSGRCRGKSPSDCCHNQCAAGCTGPRESDCLVCRKFRDEATCKDTCPPLMLYNPTTYQMDVNPEGKYSFGATCVKKCPRNYVVTDHGSCVRACGADSYEMEEDGVRKCKKCEGPCRKVCNGIGIGEFKDSLSINATNIKHFKNCTSISGDLHILPVAFRGDSFTHTPPLDPQELDILKTVKEITGLS

SEQ ID NO: 145 - protein, 1210 aa, synthetic construct [sequence omitted]

SEQ ID NO: 146 - protein, 464 aa, synthetic construct [sequence omitted]

SEQ ID NO: 147 - protein, 1091 aa, synthetic construct
  REGION 1..1091: note = Q504U8
MRPSGTAGAALLALLAALCPASRALEEKKVCQGTSNKLTQLGTFEDHFLSLQRMFNNCEVVLGNLEITYVQRNYDLSFLKTIQEVAGYVLIALNTVERIPLENLQIIRGNMYYENSYALAVLSNYDANKTGLKELPMRNLQGQKCDPSCPNGSCWGAGEENCQKLTKIICAQQCSGRCRGKSPSDCCHNQCAAGCTGPRESDCLVCRKFRDEATCKDTCPPLMLYNPTTYQMDVNPEGKYSFGATCVKKCPRNYVVTDHGSCVRACGADSYEMEEDGVRKCKKCEGPCRKVCNGIGIGEFKDSLSINATNIKHFKNCTSISGDLHILPVAFRGDSFTHTPPLDPQELDILKTVKEITGFLLIQAWPENRTDLHAFENLEIIRGRTKQHGQFSLAVVSLNITSLGLRSLKEISDGDVIISGNKNLCYANTINWKKLFGTSGQKTKIISNRGENSCKATGQVCHALCSPEGCWGPEPRDCVSCRNVSRGRECVDKCNLLEGEPREFVENSECIQCHPECLPQAMNITCTGRGPDNCIQCAHYIDGPHCVKTCPAGVMGENNTLVWKYADAGHVCHLCHPNCTYGCTGPGLEGCPTNGPKIPSIATGMVGALLLLLVVALGIGLFMRRRHIVRKRTLRRLLQERELVEPLTPSGEAPNQALLRILKETEFKKIKVLGSGAFGTVYKGLWIPEGEKVKIPVAIKELREATSPKANKEILDEAYVMASVDNPHVCRLLGICLTSTVQLITQLMPFGCLLDYVREHKDNIGSQYLLNWCVQIAKGMNYLEDRRLVHRDLAARNVLVKTPQHVKITDFGLAKLLGAEEKEYHAEGGKVPIKWMALESILHRIYTHQSDVWSYGVTVWELMTFGSKPYDGIPASEISSILEKGERLPQPPICTIDVYMIMVKCWMIDADSRPKFRELIIEFSKMARDPQRYLVIQGDERMHLPSPTDSNFYRALMDEEDMDDVVDADEYLIPQQGFFSSPSTSRTPLLSSLSATSNNSTVACIDRNGLQSCPIKEDSFLQRYSSDPTGALTEDSIDDTFLPVPGEWLVWKQSCSSTSSTHSAAASLQCPSQVLPPASPEGETVADLQTQ

SEQ ID NO: 148 - protein, 71 aa, synthetic construct
  REGION 1..71: note = Q8NDU8
MRPSGTAGAALLALLAALCPASRALEEKKGKGVSRRLPRRPRIAPRTPQPAQPRTGAPARARAPARPFLFP

SEQ ID NO: 149 - protein, 239 aa, synthetic construct
  REGION 1..239: note = Q9H6Z9
MPLGHIMRLDLEKIALEYIVPCLHEVGFCYLDNFLGEVVGDCVLERVKQLHCTGALRDGQLAGPRAGVSKRHLRGDQITWIGGNEEGCEAISFLLSLIDRLVLYCGSRLGKYYVKERSKAMVACYPGNGTGYVRHVDNPNGDGRCITCIYYLNKNWDAKLHGGILRIFPEGKSFIADVEPIFDRLLFFWSDRRNPHEVQPSYATRYAMTVWYFDAEERAEAKKKFRNLTRKTESALTED

SEQ ID NO: 150 - protein, 521 aa, synthetic construct
  REGION 1..521: note = B7Z720
MATSLHEGPTNQLDLLIRAVEASVHSSNAHCTDKTIEAAEALLHMESPTCLRDSRSPEFIHAAMRPDVITETVVEVSTEESEPMDTSPIPTSPDSHEPMKKKKVGRKPKTQQSPISNGSPELGIKKKPREGKGNTTYLWEFLLDLLQDKNTCPRYIKWTQREKGIFKLVDSKAVSKLWGKHKNKPDMNYETMGRALRYYYQRGILAKVEGQRLVYQFKDMPKNIVVIDDDKSETCNEDLAGTTDEKSLERVSLSAESLLKAASSVRSGKNSSPINCSRAEKGVARVVNITSPGHDASSRSPTTTASVSATAAPRTVRVAMQVPVVMTSLGQKISTVAVQSVNAGAPLITSTSPTTATSPKVVIQTIPTVMPASTENGDKITMQPAKIITIPATQLAQCQLQTKSNLTGSGSINIVGTPLAVRALTPVSIAHGTPVMRLSMPTQQASGQTPPRVISAVIKGPEVKSEAVAKKQEHDVKTLQLVEEKPADGNKTVTHVVVVSAPSAIALPVTMKTEGLVTCEK

SEQ ID NO: 151 - protein, 269 aa, synthetic construct
  REGION 1..269: note = Q54A51
MAAALFVLLGFALLGTHGASGAAGTVFTTVEDLGSKILLTCSLNDSATEVTGHRWLKGGVVLKEDALPGQKTEFKVDSDDQWGEYSCVFLPEPMGTANIQLHGPPRVKAVKSSEHINEGETAMLVCKSESVPPVTDWAWYKITDSEDKALMNGSESRFFVSSSQGRSELHIENLNMEADPGQYRCNGTSSKGSDQAIITLRVRSHLAALWPFLGIVAEVLVLVTIIFIYEKRRKPEDVLDDDDAGSAPLKSSGQHQNDKGKNVRQRNSS

SEQ ID NO: 152 - protein, 314 aa, synthetic construct
  REGION 1..314: note = P16422
MAPPQVLAFGLLLAAATATFAAAQEECVCENYKLAVNCFVNNNRQCQCTSVGAQNTVICSKLAAKCLVMKAEMNGSKLGRRAKPEGALQNNDGLYDPDCDESGLFKAKQCNGTSMCWCVNTAGVRRTDKDTEITCSERVRTYWIIIELKHKAREKPYDSKSLRTALQKEITTRYQLDPKFITSILYENNVITIDLVQNSSQKTQNDVDIADVAYYFEKDVKGESLFHSKKMDLTVNGEQLDLDPGQTLIYYVDEKAPEFSMQGLKAGVIAVIVVVVIAVVAGIVVLVISRKKRMAKYEKAEIKEMGEMHRELNA

SEQ ID NO: 153 - protein, 976 aa, synthetic construct
  REGION 1..976: note = P29317
MELQAARACFALLWGCALAAAAAAQGKEVVLLDFAAAGGELGWLTHPYGKGWDLMQNIMNDMPIYMYSVCNVMSGDQDNWLRTNWVYRGEAERIFIELKFTVRDCNSFPGGASSCKETFNLYYAESDLDYGTNFQKRLFTKIDTIAPDEITVSSDFEARHVKLNVEERSVGPLTRKGFYLAFQDIGACVALLSVRVYYKKCPELLQGLAHFPETIAGSDAPSLATVAGTCVDHAVVPPGGEEPRMHCAVDGEWLVPIGQCLCQAGYEKVEDACQACSPGFFKFEASESPCLECPEHTLPSPEGATSCECEEGFFRAPQDPASMPCTRPPSAPHYLTAVGMGAKVELRWTPPQDSGGREDIVYSVTCEQCWPESGECGPCEASVRYSEPPHGLTRTSVTVSDLEPHMNYTFTVEARNGVSGLVTSRSFRTASVSINQTEPPKVRLEGRSTTSLSVSWSIPPPQQSRVWKYEVTYRKKGDSNSYNVRRTEGFSVTLDDLAPDTTYLVQVQALTQEGQGAGSKVHEFQTLSPEGSGNLAVIGGVAVGVVLLLVLAGVGFFIHRRRKNQRARQSPEDVYFSKSEQLKPLKTYVDPHTYEDPNQAVLKFTTEIHPSCVTRQKVIGAGEFGEVYKGMLKTSSGKKEVPVAIKTLKAGYTEKQRVDFLGEAGIMGQFSHHNIIRLEGVISKYKPMMIITEYMENGALDKFLREKDGEFSVLQLVGMLRGIAAGMKYLANMNYVHRDLAARNILVNSNLVCKVSDFGLSRVLEDDPEATYTTSGGKIPIRWTAPEAISYRKFTSASDVWSFGIVMWEVMTYGERPYWELSNHEVMKAINDGFRLPTPMDCPSAIYQLMMQCWQQERARRPKFADIVSILDKLIRAPDSLKTLADFDPRVSIRLPSTSGSEGVPFRTVSEWLESIKMQQYTEHFMAAGYTAIEKVVQMTNDDIKRIGVRLPGHQKRIAYSLLGLKDQVNTVGIPI

SEQ ID NO: 154 - protein, 983 aa, synthetic construct
  REGION 1..983: note = P29320
MDCQLSILLLLSCSVLDSFGELIPQPSNEVNLLDSKTIQGELGWISYPSHGWEEISGVDEHYTPIRTYQVCNVMDHSQNNWLRTNWVPRNSAQKIYVELKFTLRDCNSIPLVLGTCKETFNLYYMESDDDHGVKFREHQFTKIDTIAADESFTQMDLGDRILKLNTEIREVGPVNKKGFYLAFQDVGACVALVSVRVYFKKCPFTVKNLAMFPDTVPMDSQSLVEVRGSCVNNSKEEDPPRMYCSTEGEWLVPIGKCSCNAGYEERGFMCQACRPGFYKALDGNMKCAKCPPHSSTQEDGSMNCRCENNYFRADKDPPSMACTRPPSSPRNVISNINETSVILDWSWPLDTGGRKDVTFNIICKKCGWNIKQCEPCSPNVRFLPRQFGLTNTTVTVTDLLAHTNYTFEIDAVNGVSELSSPPRQFAAVSITTNQAAPSPVLTIKKDRTSRNSISLSWQEPEHPNGIILDYEVKYYEKQEQETSYTILRARGTNVTISSLKPDTIYVFQIRARTAAGYGTNSRKFEFETSPDSFSISGESSQVVMIAISAAVAIILLTVVIYVLIGRFCGYKSKHGADEKRLHFGNGHLKLPGLRTYVDPHTYEDPTQAVHEFAKELDATNISIDKVVGAGEFGEVCSGRLKLPSKKEISVAIKTLKVGYTEKQRRDFLGEASIMGQFDHPNIIRLEGVVTKSKPVMIVTEYMENGSLDSFLRKHDAQFTVIQLVGMLRGIASGMKYLSDMGYVHRDLAARNILINSNLVCKVSDFGLSRVLEDDPEAAYTTRGGKIPIRWTSPEAIAYRKFTSASDVWSYGIVLWEVMSYGERPYWEMSNQDVIKAVDEGYRLPPPMDCPAALYQLMLDCWQKDRNNRPKFEQIVSILDKLIRNPGSLKIITSAAARPSNLLLDQSNVDITTFRTTGDWLNGVWTAHCKEIFTGVEYSSCDTIAKISTDDMKKVGVTVVGPQKKIISSIKALETQSKNGPVPV

SEQ ID NO: 155 - protein, 983 aa, synthetic construct [sequence omitted]

SEQ ID NO: 156 - protein, 462 aa, synthetic construct
  REGION 1..462: note = B3KWG5
MPMSTILPVTSPCLPATGVTVWELMTFGAEPYAGLRLAEVPDLLEKGERLAQPQICTIDVYMVMVKCWMIDENIRPTFKELANEFTRMARDPPRYLVIKRESGPGIAPGPEPHGLTNKKLEEVELEPELDLDLDLEAEEDNLATTTLGSALSLPVGTLNRPRGSQSLLSPSSGYMPMNQGNLGESCQESAVSGSSERCPRPVSLHPMPRGCLASESSEGHVTGSEAELQEKVSMCRSRSRSRSPRPRGDSAYHSQRHSLLTPVTPLSPPGLEEEDVNGYVMPDTHLKGTPSSREGTLSSVGLSSVLGTEEEDEDEEYEYMNRRRRHSPPHPPRPSSLEELGYEYMDVGSDLSASLGSTQSCPLHPVPIMPTAGTTPDEDYEYMNRQRDGGGPGGDYAAMGACPASEQGYEEMRAFQGPGHQAPHVHYARLKTLRSLEATDSAFDNPDYWHSRLFPKANAQRT

SEQ ID NO: 157 - protein, 921 aa, synthetic construct
  REGION 1..921: note = B4DGQ7
MRANDALQVLGLLFSLARGSEVGNSQAVCPGTLNGLSVTGDAENQYQTLYKLYERCEVVMGNLEIVLTGHNADLSFLQWIREVTGYVLVAMNEFSTLPLPNLRVVRGTQVYDGKFAIFVMLNYNTNSSHALRQLRLTQLTEILSGGVYIEKNDKLCHMDTIDWRDIVRDRDAEIVVKDNGRSCPPCHEVCKGRCWGPGSEDCQTLTKTICAPQCNGHCFGPNPNQCCHDECAGGCSGPQDTDCFACRHFNDSGACVPRCPQPLVYNKLTFQLEPNPHTKYQYGGVCVASCPHNFVVDQTSCVRACPPDKMEVDKNGLKMCEPCGGLCPKACEGTGSGSRFQTVDSSNIDGFVNCTKILGNLDFLITGLNGDPWHKIPALDPEKLNVFRTVREITGYLNIQSWPPHMHNFSVFSNLTTIGGRSLYNRGFSLLIMKNLNVTSLGFRSLKEISAGRIYISANRQLCYHHSLNWTKVLRGPTEERLDIKHNRPRRDCVAEGKVCDPLCSSGGCWGPGPGQCLSCRNYSRGGVCVTHCNFLNGEPREFAHEAECFSCHPECQPMEGTATCNGSGSDTCAQCAHFRDGPHCVSSCPHGVLGAKGPIYKYPDVQNECRPCHENCTQGCKGPELQDCLGQTLVLIGKTHLTMALTVIAGLVVIFMMLGGTFLYWRGRRIQNKRAMRRYLERGESIEPLDPSEKANKVLARIFKETELRKLKVLGSGVFGTVHKGVWIPEGESIKIPVCIKVIEDKSGRQSFQAVTDHMLAIGSLDHAHIVRLLGLCPGSSLQLVTQYLPLGSLLDHVRQHRGALGPQLLLNWGVQIAKGMYYLEEHGMVHRNLAARNVLLKSPSQVQVADFGVADLLPPDDKQLLYSEAKTPIKWMALESIHFGKYTHQSDVWSYGQCIWMPSLPSLAPVSNLPFETPS

SEQ ID NO: 158 - protein, 1308 aa, synthetic construct
  REGION 1..1308: note = Q15303
MKPATGLWVWVSLLVAAGTVQPSDSQSVCAGTENKLSSLSDLEQQYRALRKYYENCEVVMGNLEITSIEHNRDLSFLRSVREVTGYVLVALNQFRYLPLENLRIIRGTKLYEDRYALAIFLNYRKDGNFGLQELGLKNLTEILNGGVYVDQNKFLCYADTIHWQDIVRNPWPSNLTLVSTNGSSGCGRCHKSCTGRCWGPTENHCQTLTRTVCAEQCDGRCYGPYVSDCCHRECAGGCSGPKDTDCFACMNFNDSGACVTQCPQTFVYNPTTFQLEHNFNAKYTYGAFCVKKCPHNFVVDSSSCVRACPSSKMEVEENGIKMCKPCTDICPKACDGIGTGSLMSAQTVDSSNIDKFINCTKINGNLIFLVTGIHGDPYNAIEAIDPEKLNVFRTVREITGFLNIQSWPPNMTDFSVFSNLVTIGGRVLYSGLSLLILKQQGITSLQFQSLKEISAGNIYITDNSNLCYYHTINWTTLFSTINQRIVIRDNRKAENCTAEGMVCNHLCSSDGCWGPGPDQCLSCRRFSRGRICIESCNLYDGEFREFENGSICVECDPQCEKMEDGLLTCHGPGPDNCTKCSHFKDGPNCVEKCPDGLQGANSFIFKYADPDRECHPCHPNCTQGCNGPTSHDCIYYPWTGHSTLPQHARTPLIAAGVIGGLFILVIVGLTFAVYVRRKSIKKKRALRRFLETELVEPLTPSGTAPNQAQLRILKETELKRVKVLGSGAFGTVYKGIWVPEGETVKIPVAIKILNETTGPKANVEFMDEALIMASMDHPHLVRLLGVCLSPTIQLVTQLMPHGCLLEYVHEHKDNIGSQLLLNWCVQIAKGMMYLEERRLVHRDLAARNVLVKSPNHVKITDFGLARLLEGDEKEYNADGGKMPIKWMALECIHYRKFTHQSDVWSYGVTIWELMTFGGKPYDGIPTREIPDLLEKGERLPQPPICTIDVYMVMVKCWMIDADSRPKFKELAAEFSRMARDPQRYLVIQGDDRMKLPSPNDSKFFQNLLDEEDLEDMMDAEEYLVPQAFNIPPPIYTSRARIDSNRSEIGHSPPPAYTPMSGNQFVYRDGGFAAEQGVSVPYRAPTSTIPEAPVAQGATAEIFDDSCCNGTLRKPVAPHVQEDSSTQRYSADPTVFAPERSPRGELDEEGYMTPMRDKPKQEYLNPVEENPFVSRRKNGDLQALDNPEYHNASNGPPKAEDEYVNEPLYLNTFANTLGKAEYLKNNILSMPEKAKKAFDNPDYWNHSLPPRSTLQHPDYLQEYSTKYFYKQNGRIRPIVAENPEYLSEFSLKPGTVLPPPPYRHRNTVV

SEQ ID NO: 159 - protein, 486 aa, synthetic construct
  REGION 1..486: note = P11308
MIQTVPDPAAHIKEALSVVSEDQSLFECAYGTPHLAKTEMTASSSSDYGQTSKMSPRVPQQDWLSQPPARVTIKMECNPSQVNGSRNSPDECSVAKGGKMVGSPDTVGMNYGSYMEEKHMPPPNMTTNERRVIVPADPTLWSTDHVRQWLEWAVKEYGLPDVNILLFQNIDGKELCKMTKDDFQRLTPSYNADILLSHLHYLRETPLPHLTSDDVDKALQNSPRLMHARNTGGAAFIFPNTSVYPEATQRITTRPDLPYEPPRRSAWTGHGHPTPQSKAAQPSPSTVPKTEDQRPQLDPYQILGPTSSRLANPGSGQIQLWQFLLELLSDSSNSSCITWEGTNGEFKMTDPDEVARRWGERKSKPNMNYDKLSRALRYYYDKNIMTKVHGKRYAYKFDFHGIAQALQPHPPESSLYKYPSDLPYMGSYHAHPQKMNFVAPHPPALPVTSSSFFAAPNPYWNSPTGGIYPNTRLPTSHMPSHLGTYY

SEQ ID NO: 160 - protein, 452 aa, synthetic construct
  REGION 1..452: note = P41212
MSETPAQCSIKQERISYTPPESPVPSYASSTPLHVPVPRALRMEEDSIRLPAHLRLQPIYWSRDDVAQWLKWAENEFSLRPIDSNTFEMNGKALLLLTKEDFRYRSPHSGDVLYELLQHILKQRKPRILFSPFFHPGNSIHTQPEVILHQNHEEDNCVQRTPRPSVDNVHHNPPTIELLHRSRSPITTNHRPSPDPEQRPLRSPLDNMIRRLSPAERAQGPRPHQENNHQESYPLSVSPMENNHCPASSESHPKPSSPRQESTRVIQLMPSPIMHPLILNPRHSVDFKQSRLSEDGLHREGKPINLSHREDLAYMNHIMVSVSPPEEHAMPIGRIADCRLLWDYVYQLLSDSRYENFIRWEDKESKIFRIVDPNGLARLWGNHKNRTNMTYEKMSRALRHYYKLNIIRKEPGQRLLFRFMKTPDEIMSGRTDRLEHLESQELDEQIYQEDEC

SEQ ID NO: 161 - protein, 656 aa, synthetic construct
  REGION 1..656: note = Q01844
MASTDYSTYSQAAAQQGYSAYTAQPTQGYAQTTQAYGQQSYGTYGQPTDVSYTQAQTTATYGQTAYATSYGQPPTGYTTPTAPQAYSQPVQGYGTGAYDTTTATVTTTQASYAAQSAYGTQPAYPAYGQQPAATAPTRPQDGNKPTETSQPQSSTGGYNQPSLGYGQSNYSYPQVPGSYPMQPVTAPPSYPPTSYSSTQPTSYDQSSYSQQNTYGQPSSYGQQSSYGQQSSYGQQPPTSYPPQTGSYSQAPSQYSQQSSSYGQQSSFRQDHPSSMGVYGQESGGFSGPGENRSMSGPDNRGRGRGGFDRGGMSRGGRGGGRGGMGSAGERGGFNKPGGPMDEGPDLDLGPPVDPDEDSDNSAIYVQGLNDSVTLDDLADFFKQCGVVKMNKRTGQPMIHIYLDKETGKPKGDATVSYEDPPTAKAAVEWFDGKDFQGSKLKVSLARKKPPMNSMRGGLPPREGRGMPPPLRGGPGGPGGPGGPMGRMGGRGGDRGGFPPRGPRGSRGNPSGGGNVQHRAGDWQCPNPGCGNQNFAWRTECNQCKAPKPEGFLPPPFPPPGGDRGRGGPGGMRGGRGGLMDRGGPGGMFRGGRGGDRGGFRGGRGMDRGGFGGGRRGGPGGPPGPLMEQMGGRRGGRGGPGKMDKGEHRQERRDRPY

SEQ ID NO: 162 - protein, 665 aa, synthetic construct
  REGION 1..665: note = F2YMM1
MGQTGKKSEKGPVCWRKRVKSEYMRLRQLKRFRRADEVKSMFSSNRQKILERTEILNQEWKQRRIQPVHILTSVSSLRGTREVEDETVLHNIPYMGDEVLDQDGTFIEELIKNYDGKVHGDRECGFINDEIFVELVNALGQYNDDDDDDDGDDPEEREEKQKDLEDHRDDKESRPPRKFPSDKIFEAISSMFPDKGTAEELKEKYKELTEQQLPGALPPECTPNIDGPNAKSVQREQSLHSFHTLFCRRCFKYDCFLHPFHATPNTYKRKNTETALDNKPCGPQCYQHLEGAKEFAAALTAERIKTPPKRPGGRRRGRLPNNSSRPSTPTINVLESKDTDSDREAGTETGGENNDKEEEEKKDETSSSSEANSRCQTPIKMKPNIEPPENVEWSGAEASMFRVLIGTYYDNFCAIARLIGTKTCRQVYEFRVKESSIIAPAPAEDVDTPPRKKKRKHRLWAAHCRKIQLKKGQNRFPGCRCKAQCNTKQCPCYLAVRECDPDLCLTCGAADHWDSKNVSCKNCSIQRGSKKHLLLAPSDVAGWGIFIKDPVQKNEFISEYCGEIISQDEADRRGKVYDKYMCSFLFNLNNDFVVDATRKGNKIRFANHSVNPNCYAKVMMVNGDHRIGIFAKRAIQTGEELFFDYRYSQADALKYVGIEREMEIP

SEQ ID NO: 163 - protein, 334 aa, synthetic construct
  REGION 1..334: note = G3XAL2
MGQTGKKSEKGPVCWRKRVKSEYMRLRQLKRFRRADEVKSMFSSNRQKILERTEILNQEWKQRRIQPVHILTSVSSLRGTRECSVTSDLDFPTQVIPLKTLNAVASVPIMYSWSPLQQNFMVEDETVLHNIPYMGDEVLDQDGTFIEELIKNYDGKVHGDRECGFINDEIFVELVNALGQYNDDDDDDDGDDPEEREEKQKDLEDHRDDKESRPPRKFPSDKIFEAISSMFPDKGTAEELKEKYKELTEQQLPGALPPECTPNIDGPNAKSVQREQSLHSFHTLFCRRCFKYDCFLHPFHATPNTYKRKNTETALDNKPCGPQCYQHLPLLPRN

SEQ ID NO: 164 - protein, 64 aa, synthetic construct
  REGION 1..64: note = L0R855
MPLVNIMMMTMMMMETILKKEKKSRKIWRITEMIKKAAHLGNFLLIKFLKPFPQCFQIRAQQKN

SEQ ID NO: 165 - protein, 746 aa, synthetic construct
  REGION 1..746: note = Q15910
MGQTGKKSEKGPVCWRKRVKSEYMRLRQLKRFRRADEVKSMFSSNRQKILERTEILNQEWKQRRIQPVHILTSVSSLRGTRECSVTSDLDFPTQVIPLKTLNAVASVPIMYSWSPLQQNFMVEDETVLHNIPYMGDEVLDQDGTFIEELIKNYDGKVHGDRECGFINDEIFVELVNALGQYNDDDDDDDGDDPEEREEKQKDLEDHRDDKESRPPRKFPSDKIFEAISSMFPDKGTAEELKEKYKELTEQQLPGALPPECTPNIDGPNAKSVQREQSLHSFHTLFCRRCFKYDCFLHPFHATPNTYKRKNTETALDNKPCGPQCYQHLEGAKEFAAALTAERIKTPPKRPGGRRRGRLPNNSSRPSTPTINVLESKDTDSDREAGTETGGENNDKEEEEKKDETSSSSEANSRCQTPIKMKPNIEPPENVEWSGAEASMFRVLIGTYYDNFCAIARLIGTKTCRQVYEFRVKESSIIAPAPAEDVDTPPRKKKRKHRLWAAHCRKIQLKKDGSSNHVYNYQPCDHPRQPCDSSCPCVIAQNFCEKFCQCSSECQNRFPGCRCKAQCNTKQCPCYLAVRECDPDLCLTCGAADHWDSKNVSCKNCSIQRGSKKHLLLAPSDVAGWGIFIKDPVQKNEFISEYCGEIISQDEADRRGKVYDKYMCSFLFNLNNDFVVDATRKGNKIRFANHSVNPNCYAKVMMVNGDHRIGIFAKRAIQTGEELFFDYRYSQADALKYVGIEREMEIP

SEQ ID NO: 166 - protein, 707 aa, synthetic construct
  REGION 1..707: note = S4S3R8
MGQTGKKSEKGPVCWRKRVKSEYMRLRQLKRFRRADEVKSMFSSNRQKILERTEILNQEWKQRRIQPVHILTSVSSLRGTREVEDETVLHNIPYMGDEVLDQDGTFIEELIKNYDGKVHGDRECGFINDEIFVELVNALGQYNDDDDDDDGDDPEEREEKQKDLEDHRDDKESRPPRKFPSDKIFEAISSMFPDKGTAEELKEKYKELTEQQLPGALPPECTPNIDGPNAKSVQREQSLHSFHTLFCRRCFKYDCFLHPFHATPNTYKRKNTETALDNKPCGPQCYQHLEGAKEFAAALTAERIKTPPKRPGGRRRGRLPNNSSRPSTPTINVLESKDTDSDREAGTETGGENNDKEEEEKKDETSSSSEANSRCQTPIKMKPNIEPPENVEWSGAEASMFRVLIGTYYDNFCAIARLIGTKTCRQVYEFRVKESSIIAPAPAEDVDTPPRKKKRKHRLWAAHCRKIQLKKDGSSNHVYNYQPCDHPRQPCDSSCPCVIAQNFCEKFCQCSSECQNRFPGCRCKAQCNTKQCPCYLAVRECDPDLCLTCGAADHWDSKNVSCKNCSIQRGSKKHLLLAPSDVAGWGIFIKDPVQKNEFISEYCGEIISQDEADRRGKVYDKYMCSFLFNLNNDFVVDATRKGNKIRFANHSVNPNCYAKVMMVNGDHRIGIFAKRAIQTGEELFFDYRYSQADALKYVGIEREMEIP

SEQ ID NO: 167 - protein, 132 aa, synthetic construct
  REGION 1..132: note = O15540
MVEAFCATWKLTNSQNFDEYMKALGVGFATRQVGNVTKPTVIISQEGDKVVIRTLSTFKNTEISFQLGEEFDETTADDRNCKSVVSLDGDKLVHIQKWDGKETNFVREIKDGKMVMTLTFGDVVAVRHYEKA

SEQ ID NO: 168 - protein, 254 aa, synthetic construct
  REGION 1..254: note = P08637
MWQLLLPTALLLLVSAGMRTEDLPKAVVFLEPQWYRVLEKDSVTLKCQGAYSPEDNSTQWFHNESLISSQASSYFIDAATVDDSGEYRCQTNLSTLSDPVQLEVHIGWLLLQAPRWVFKEEDPIHLRCHSWKNTALHKVTYLQNGKGRKYFHHNSDFYIPKATLKDSGSYFCRGLFGSKNVSSETVNITITQGLAVSTISSFFPPGYQVSFCLVMVLLFAVDTGLYFSVKTNIRSSTRDWKDHKFKWRKDPQDK

SEQ ID NO: 169 - protein, 290 aa, synthetic construct
  REGION 1..290: note = CCDS1232.1
MGGGAGERLFTSSCLVGLVPLGLRISLVTCPLQCGIMWQLLLPTALLLLVSAGMRTEDLPKAVVFLEPQWYRVLEKDSVTLKCQGAYSPEDNSTQWFHNESLISSQASSYFIDAATVDDSGEYRCQTNLSTLSDPVQLEVHIGWLLLQAPRWVFKEEDPIHLRCHSWKNTALHKVTYLQNGKGRKYFHHNSDFYIPKATLKDSGSYFCRGLFGSKNVSSETVNITITQGLAVSTISSFFPPGYQVSFCLVMVLLFAVDTGLYFSVKTNIRSSTRDWKDHKFKWRKDPQDK

SEQ ID NO: 170 - protein, 268 aa, synthetic construct
  REGION 1..268: note = P12034
MSLSFLLLLFFSHLILSAWAHGEKRLAPKGQPGPAATDRNPRGSSSRQSSSSAMSSSSASSSPAASLGSQGSGLEQSSFQWSPSGRRTGSLYCRVGIGFHLQIYPDGKVNGSHEANMLSVLEIFAVSQGIVGIRGVFSNKFLAMSKKGKLHASAKFTDDCKFRERFQENSYNTYASAIHRTEKTGREWYVALNKRGKAKRGCSPRVKPQHISTHFLPRFKQSEQPELSFTVTVPEKKKPPSPIKPKIPLSAPRKNTNSVKYRLKFRFG

SEQ ID NO: 171 - protein, 38 aa, synthetic construct
  REGION 1..38: note = Q60518
MSTRCGEAGRARGTQPHRGYRAQNQPYKMHLGPPRLEE

SEQ ID NO: 172 - protein, 821 aa, synthetic construct
  REGION 1..821: note = P21802
MVSWGRFICLVVVTMATLSLARPSFSLVEDTTLEPEEPPTKYQISQPEVYVAAPGESLEVRCLLKDAAVISWTKDGVHLGPNNRTVLIGEYLQIKGATPRDSGLYACTASRTVDSETWYFMVNVTDAISSGDDEDDTDGAEDFVSENSNNKRAPYWTNTEKMEKRLHAVPAANTVKFRCPAGGNPMPTMRWLKNGKEFKQEHRIGGYKVRNQHWSLIMESVVPSDKGNYTCVVENEYGSINHTYHLDVVERSPHRPILQAGLPANASTVVGGDVEFVCKVYSDAQPHIQWIKHVEKNGSKYGPDGLPYLKVLKAAGVNTTDKEIEVLYIRNVTFEDAGEYTCLAGNSIGISFHSAWLTVLPAPGREKEITASPDYLEIAIYCIGVFLIACMVVTVILCRMKNTTKKPDFSSQPAVHKLTKRIPLRRQVTVSAESSSSMNSNTPLVRITTRLSSTADTPMLAGVSEYELPEDPKWEFPRDKLTLGKPLGEGCFGQVVMAEAVGIDKDKPKEAVTVAVKMLKDDATEKDLSDLVSEMEMMKMIGKHKNIINLLGACTQDGPLYVIVEYASKGNLREYLRARRPPGMEYSYDINRVPEEQMTFKDLVSCTYQLARGMEYLASQKCIHRDLAARNVLVTENNVMKIADFGLARDINNIDYYKKTTNGRLPVKWMAPEALFDRVYTHQSDVWSFGVLMWEIFTLGGSPYPGIPVEELFKLLKEGHRMDKPANCTNELYMMMRDCWHAVPSQRPTFKQLVEDLDRILTLTTNEEYLDLSQPLEQYSPSYPDTRSSCSSGDDSVFSPDPMPYEPCLPQYPHINGSVKT

SEQ ID NO: 173 - protein, 635 aa, synthetic construct
  REGION 1..635: note = A0A024R5I6
MAPPLLLLLLASGAAACPLPCVCQNLSESLSTLCAHRGLLFVPPNVDRRTVELRLADNFIQALGPPDFRNMTGLVDLTLSRNAITRIGARAFGDLESLRSLHLDGNRLVELGTGSLRGPVNLQHLILSGNQLGRIAPGAFDDFLESLEDLDLSYNNLRQVPWAGIGAMPALHTLNLDHNLIDALPPGAFAQLGQLSRLDLTSNRLATLAPDPLFSRGRDAEASPAPLVLSFSGNPLHCNCELLWLRRLARPDDLETCASPPGLAGRYFWAVPEGEFSCEPPLIARHTQRLWVLEGQRATLRCRALGDPAPTMHWVGPDDRLVGNSSRARAFPNGTLEIGVTGAGDAGGYTCIATNPAGEATARVELRVLALPHGGNSSAEGGRPGPSDIAASARTAAEGEGTLESEPAVQVTEVTATSGLVSWGPGRPADPVWMFQIQYNSSEDETLIYRIVPASSHHFLLKHLVPGADYDLCLLALSPAAGPSDLTATRLLGCAHFSTLPASPLCHALQAHVLGGTLTVAVGGVLVAALLVFTVALLVRGRGAGNGRLPLKLSHVQSQTNGGPSPTPKAHPPRSPPPRPQRSCSLDLGDAGCYGYARRLGGAWARRSHSVHGGLLGAGCRGVGGSAERLEESVV

SEQ ID NO: 174 - protein, 1098 aa, synthetic construct
  REGION 1..1098: note = A0A024RB01
MPPRQPPRQAGGGLSREFGKLLPALSHSPLGGLGSGSGSVAPGQGRAGAMGSRTPESPLHAVQLRWGPRRRPPLLPLLLLLLPPPPRVGGFNLDAEAPAVLSGPPGSFFGFSVEFYRPGTDGVSVLVGAPKANTSQPGVLQGGAVYLCPWGASPTQCTPIEFDSKGSRLLESSLSSSEGEEPVEYKSLQWFGATVRAHGSSILACAPLYSWRTEKEPLSDPVGTCYLSTDNFTRILEYAPCRSDFSWAAGQGYCQGGFSAEFTKTGRVVLGGPGSYFWQGQILSATQEQIAESYYPEYLINLVQGQLQTRQASSIYDDSYLGYSVAVGEFSGDDTEDFVAGVPKGNLTYGYVTILNGSDIRSLYNFSGEQMASYFGYAVAATDVNGDGLDDLLVGAPLLMDRTPDGRPQEVGRVYVYLQHPAGIEPTPTLTLTGHDEFGRFGSSLTPLGDLDQDGYNDVAIGAPFGGETQQGVVFVFPGGPGGLGSKPSQVLQPLWAASHTPDFFGSALRGGRDLDGNGYPDLIVGSFGVDKAVVYRGRPIVSASASLTIFPAMFNPEERSCSLEGNPVACINLSFCLNASGKHVADSIGFTVELQLDWQKQKGGVRRALFLASRQATLTQTLLIQNGAREDCREMKIYLRNESEFRDKLSPIHIALNFSLDPQAPVDSHGLRPALHYQSKSRIEDKAQILLDCGEDNICVPDLQLEVFGEQNHVYLGDKNALNLTFHAQNVGEGGAYEAELRVTAPPEAEYSGLVRHPGNFSSLSCDYFAVNQSRLLVCDLGNPMKAGASLWGGLRFTVPHLRDTKKTIQFDFQILSKNLNNSQSDVVSFRLSVEAQAQVTLNGVSKPEAVLFPVSDWHPRDQPQKEEDLGPAVHHVYELINQGPSSISQGVLELSCPQALEGQQLLYVTRVTGLNCTTNHPINPKGLELDPEGSLHHQQKREAPSRSSASSGPQILKCPEAECFRLRCELGPLHQQESQSLQLHFRVWAKTFLQREHQPFSLQCEAVYKALKMPYRILPRQLPQKERQVATAVQWTKAEGSYGVPLWIIILAILFGLLLLGLLIYILYKLGFFKRSLPYGTAMEKAQLKPPATSDA

SEQ ID NO: 175 - protein, 1198 aa, synthetic construct
  REGION 1..1198: note = A0A024RDT9
MAEHPPLLDTTQILSSDISLLSAPIVSADGTQQVILVQVNPGEAFTIRREDGQFQCITGPAQVPMMSPNGSVPPIYVPPGYAPQVIEDNGVRRVVVVPQAPEFHPGSHTVLHRSPHPPLPGFIPVPTMMPPPPRHMYSPVTGAGDMTTQYMPQYQSSQVYGDVDAHSTHGRSNFRDERSSKTYERLQKKLKDRQGTQKDKMSSPPSSPQKCPSPINEHNGLIKGQIAGGINTGSAKIKSGKGKGGTQVDTEIEEKDEETKAFEALLSNIVKPVASDIQARTVVLTWSPPSSLINGETDESSVPELYGYEVLISSTGKDGKYKSVYVGEETNITLNDLKPAMDYHAKVQAEYNSIKGTPSEAEIFTTLSCEPDIPNPPRIANRTKNSLTLQWKAPSDNGSKIQNFVLEWDEGKGNGEFCQCYMGSQKQFKITKLSPAMGCKFRLSARNDYGTSGFSEEVLYYTSGCAPSMPASPVLTKAGITWLSLQWSKPSGTPSDEGISYILEMEEETSGYGFKPKYDGEDLAYTVKNLRRSTKYKFKVIAYNSEGKSNPSEVVEFTTCPDKPGIPVKPSVKGKIHSHSFKITWDPPKDNGGATINKYVVEMAEGSNGNKWEMIYSGATREHLCDRLNPGCFYRLRVYCISDGGQSAVSESLLVQTPAVPPGPCLPPRLQGRPKAKEIQLRWGPPLVDGGSPISCYSVEMSPIEKDEPREVYQGSEVECTVSSLLPGKTYSFRLRAANKMGFGPFSEKCDITTAPGPPDQCKPPQVTCRSATCAQVNWEVPLSNGTDVTEYRLEWGGVEGSMQICYCGPGLSYEIKGLSPATTYYCRVQALSVVGAGPFSEVVACVTPPSVPGIVTCLQEISDDEIENPHYSPSTCLAISWEKPCDHGSEILAYSIDFGDKQSLTVGKVTSYIINNLQPDTTYRIRIQALNSLGAGPFSHMIKLKTKPLPPDPPRLECVAFSHQNLKLKWGEGTPKTLSTDSIQYHLQMEDKNGRFVSLYRGPCHTYKVQRLNESTSYKFCIQACNEAGEGPLSQEYIFTTPKSVPAALKAPKIEKVNDHICEITWECLQPMKGDPVIYSLQVMLGKDSEFKQIYKGPDSSFRYSSLQLNCEYRFRVCAIRQCQDSLGHQDLVGPYSTTVLFISQRTEPPASTNRDTVESTRTRRALSDEQCAAVILVLFAFFSILIAFIIQYFVIK

SEQ ID NO: 176 - protein, 1142 aa, synthetic construct
  REGION 1..1142: note = A0A024RDV5
MSGPAQVPMMSPNGSVPPIYVPPGYAPQVIEDNGVRRVVVVPQAPEFHPGSHTVLHRSPHPPLPGFIPVPTMMPPPPRHMYSPVTGAGDMTTQYMPQYQSSQVYGDVDAHSTHGRSNFRDERSSKTYERLQKKLKDRQGTQKDKMSSPPSSPQKCPSPINEHNGLIKGQIAGGINTGSAKIKSGKGKGGTQVDTEIEEKDEETKAFEALLSNIVKPVASDIQARTVVLTWSPPSSLINGETDESSVPELYGYEVLISSTGKDGKYKSVYVGEETNITLNDLKPAMDYHAKVQAEYNSIKGTPSEAEIFTTLSCEPDIPNPPRIANRTKNSLTLQWKAPSDNGSKIQNFVLEWDEGKGNGEFCQCYMGSQKQFKITKLSPAMGCKFRLSARNDYGTSGFSEEVLYYTSGCAPSMPASPVLTKAGITWLSLQWSKPSGTPSDEGISYILEMEEETSGYGFKPKYDGEDLAYTVKNLRRSTKYKFKVIAYNSEGKSNPSEVVEFTTCPDKPGIPVKPSVKGKIHSHSFKITWDPPKDNGGATINKYVVEMAEGSNGNKWEMIYSGATREHLCDRLNPGCFYRLRVYCISDGGQSAVSESLLVQTPAVPPGPCLPPRLQGRPKAKEIQLRWGPPLVDGGSPISCYSVEMSPIEKDEPREVYQGSEVECTVSSLLPGKTYSFRLRAANKMGFGPFSEKCDITTAPGPPDQCKPPQVTCRSATCAQVNWEVPLSNGTDVTEYRLEWGGVEGSMQICYCGPGLSYEIKGLSPATTYYCRVQALSVVGAGPFSEVVACVTPPSVPGIVTCLQEISDDEIENPHYSPSTCLAISWEKPCDHGSEILAYSIDFGDKQSLTVGKVTSYIINNLQPDTTYRIRIQALNSLGAGPFSHMIKLKTKPLPPDPPRLECVAFSHQNLKLKWGEGTPKTLSTDSIQYHLQMEDKNGRFVSLYRGPCHTYKVQRLNESTSYKFCIQACNEAGEGPLSQEYIFTTPKSVPAALKAPKIEKVNDHICEITWECLQPMKGDPVIYSLQVMLGKDSEFKQIYKGPDSSFRYSSLQLNCEYRFRVCAIRQCQDSLGHQDLVGPYSTTVLFISQRTEPPASTNRDTVESTRTRRALSDEQCAAVILVLFAFFSILIAFIIQYFVIK

SEQ ID NO: 177 - protein, 339 aa, synthetic construct
  REGION 1..339: note = A6NH44
MPPSKPHPPVVGKVTHHSIELYWDLEKKAKRQGPQEQWFRFSIEEEDPKMHTYGIIYTGYATKHVVEGLEPRTLYRFRLKVTSPSGECEYSPLVSVSTTREPISSEHLHRAVSVNDEDLLVRILQGGRVKVDVPNKFGFTALMVAAQKGYTRLVKILVSNGTDVNLKNGSGKDSLMLACYAGHLDVVKYLRRHGASWQARDLGGCTALHWAADGGHCSVIEWMIKDGCEVDVVDTGSGWTPLMRVSAVSGNQRVASLLIDAGANVNVKDRNGKTPLMVAVLNNHEELVQLLLDKGADASVKNEFGKGVLEMARVFDRQSVVSLLEERKKKQRPKKSCVC

SEQ ID NO: 178 - protein, 1049 aa, synthetic construct [sequence omitted]

SEQ ID NO: 179 - protein, 1049 aa, synthetic construct [sequence omitted]

SEQ ID NO: 180 - protein, 466 aa, synthetic construct
  REGION 1..466: note = B3KXM5
MLSLRQRMMHARFRNPLSRQPARPSYRQGYNGRPNVEGKVLPGSNGKPNGQRIINGPQGTKWVVDLDRGLVLNAEGRYLQDSHGNPLRIKLGGDGRTIVDLEGTPVVSPDGLPLFGQGRHGTPLANAQDKPILSLGGKPLVGLEVIKKTTHPPTTTMQPTTTTTPLPTTTTPRPTTATTRRTTTRRPTTTVRTTTRTTTTTTPKPTTPIPTCPPGTLERHDDDGNLIMSSNGIPECYAEEDEFSGLETDTAVPTEEAYVIYDEDYEFETSRPPTTTEPSTTATTPRVIPEEGAISSFPEEEFDLAGRKRFVAPYVTYLNKDPSAPCSLTDALDHFQVDSLDEIIPNDLKKSDLPPQHAPRNITVVAVEGCHSFVIVDWDKATPGDVVTGYLVYSASYEDFIRNKWSTQASSVTHLPIENLKPNTRYYFKVQAQNPHGYGPISPSVSFVTESDNPLLVVRPPGGEPI

SEQ ID NO: 181 - protein, 156 aa, synthetic construct
  REGION 1..156: note = B4DIC5
MEEQRNEEIQSFIYSLKQMLLNVEANSAKVQEDLEAEFQSLFSLLEELKEGMLMKIKQDRASRTYELQNQLAACTRALESSEELLETANQTLQAMDSEDFPQAAKQIKDGVTMAPAFRLSLKAKVSDNMSHLMVDFAQERQMLQALKFLPGERGTH

SEQ ID NO: 182 - protein, 306 aa, synthetic construct
  REGION 1..306: note = B4DN21
MIFEEHGFRRTTPPTTATPIRHRPRPYPPNVGQEALSQTTISWAPFQDTSEYIISCHPVGTDEEPLQFRVPGTSTSATLTGLTRGATYNIIVEALKDQQRHKVREEVVTVGNSVNEGLNQPTDDSCFDPYTVSHYAVGDEWERMSESGFKLLCQCLGFGSGHFRCDSSRWCHDNGVNYKIGEKWDRQGENGQMMSCTCLGNGKGEFKCDPHEATCYDDGKTYHVGEQWQKEYLGAICSCTCFGGQRGWRCDNCRRPGGEPSPEGTTGQSYNQYSQRYHQRTNTNVNCPIECFMPLDVQADREDSRE

SEQ ID NO: 183 - protein, 639 aa, synthetic construct [sequence omitted]

SEQ ID NO: 184 - protein, 337 aa, synthetic construct [sequence omitted]

SEQ ID NO: 185 - protein, 1014 aa, synthetic construct [sequence omitted]

SEQ ID NO: 186 - protein, 894 aa, synthetic construct [sequence omitted]

SEQ ID NO: 187 - protein, 383 aa, synthetic construct
  REGION 1..383: note = B7Z3W5
MASAFRLSLKPKVSDNMTHLMVDFSQERQMLQTLKFLPVPKAPEIDPVECLVADNSVTVAWRMPEEDNKIDHFILEHRKTNFDGLPRVKDERCWEIIDNIKGTEYTLSGLKFDSKYMNFRVRACNKAVAGEYSDPVTLETKALNFNLDNSSSHLNLKVEDTCVEWDPTGGKGQESKIKGKENKGSVHVTSLKKHTSGTPSPKRTSVGSRPPAVRGSRDRFTGESYTVLGDTAIESGQHYWEVKAQKDCKSYSVGVAYKTLGKFDQLGKTNTSWCIHVNNWLQNTFAAKHNNKVKALDVTVPEKIGVFCDFDGGQLSFYDANSKQLLYSFKTKFTQPVLPGFMVWCGGLSLSTGMQVPSAVRTLQKSENGMTGSASSLNNVVTQ

SEQ ID NO: 188 - protein, 146 aa, synthetic construct
  REGION 1..146: note = B7Z939
MPPSKPHPPVVGKVTHHSIELYWDLEKKAKRQGPQEQWFRFSIEEEDPKMHTYGIIYTGYATKHVVEGLEPRTLYRFRLKVTSPSGECEYSPLVSVSTTSEYSDRPHSPLSRSMEMTSNLEKIFCLSFGLTRSRNDTIFKHCNNIC

SEQ ID NO: 189 - protein, 684 aa, synthetic construct
  REGION 1..684: note = G5E9X3
MAEHPPLLDTTQILSSDISLLSAPIVSADGTQQVILVQVNPGEAFTIRREDGQFQCITGPAQVPMMSPNGSVPPIYVPPGYAPQVIEDNGVRRVVVVPQAPEFHPGSHTVLHRSPHPPLPGFIPVPTMMPPPPRHMYSPVTGAGDMTTQYMPQYQSSQVYGDVDAHSTHGRSNFRDERSSKTYERLQKKLKDRQGTQKDKMSSPPSSPQKCPSPINEHNGLIKGQIAGGINTGSAKIKSGKGKGGTQVDTEIEEKDEETKAFEALLSNIVKPVASDIQARTVVLTWSPPSSLINGETDESSVPELYGYEVLISSTGKDGKYKSVYVGEETNITLNDLKPAMDYHAKVQAEYNSIKGTPSEAEIFTTLSCEPDIPNPPRIANRTKNSLTLQWKAPSDNGSKIQNFVLEWDEGKGNGEFCQCYMGSQKQFKITKLSPAMGCKFRLSARNDYGTSGFSEEVLYYTSGCAPSMPASPVLTKAGITWLSLQWSKPSGTPSDEGISYILEMEEETSGYGFKPKYDGEDLAYTVKNLRRSTKYKFKVIAYNSEGKSNPSEVVEFTTCPDKPGIPVKPSVKGKIHSHSFKITWDPPKDNGGATINKYVVEMAEGSNGNKWEMIYSGATREHLCDRLNPGCFYRLRVYCISDGGQSAVSESLLVQTPAVPPGPCLPPRLQGRPKAKEIQTPSG

SEQ ID NO: 190 - protein, 163 aa, synthetic construct
  REGION 1..163: note = Q9H382
MSESGFKLLCQCLGFGSGHFRCDSSRWCHDNGVNYKIGEKWDRQGENGQMMSCTCLGNGKGEFKCDPHEATCYDDGKTYHVGEQWQKEYLGAICSCTCFGGQRGWRCDNCRRPGGEPSPEGTTGQSYNQYSQRYHQRTNTNVNCPIECFMPLDVQADREDSRE

SEQ ID NO: 191 - protein, 380 aa, synthetic construct
  REGION 1..380: note = P01100
MMFSGFNADYEASSSRCSSASPAGDSLSYYHSPADSFSSMGSPVNAQDFCTDLAVSSANFIPTVTAISTSPDLQWLVQPALVSSVAPSQTRAPHPFGVPAPSAGAYSRAGVVKTMTGGRAQSIGRRGKVEQLSPEEEEKRRIRRERNKMAAAKCRNRRRELTDTLQAETDQLEDEKSALQTEIANLLKEKEKLEFILAAHRPACKIPDDLGFPEEMSVASLDLTGGLPEVATPESEEAFTLPLLNDPEPKPSVEPVKSISSMELKTEPFDDFLFPASSRPSGSETARSVPDMDLSGSFYAADWEPLHSGSLGMGPMATELEPLCTPVVTCTPSCTAYTSSFVFTYPEADSFPSCAAAHRKGSSSNEPSSDSLSSPTLLAL

SEQ ID NO: 192 - protein, 431 aa, synthetic construct
  REGION 1..431: note = Q9BZS1
MPNPRPGKPSAPSLALGPSPGASPSWRAAPKASDLLGARGPGGTFQGRDLRGGAHASSSSLNPMPPSQLQLPTLPLVMVAPSGARLGPLPHLQALLQDRPHFMHQLSTVDAHARTPVLQVHPLESPAMISLTPPTTATGVFSLKARPGLPPGINVASLEWVSREPALLCTFPNPSAPRKDSTLSAVPQSSYPLLANGVCKWPGCEKVFEEPEDFLKHCQADHLLDEKGRAQCLLQREMVQSLEQQLVLEKEKLSAMQAHLAGKMALTKASSVASSDKGSCCIVAAGSQGPVVPAWSGPREAPDSLFAVRRHLWGSHGNSTFPEFLHNMDYFKFHNMRPPFTYATLIRWAILEAPEKQRTLNEIYHWFTRMFAFFRNHPATWKNAIRHNLSLHKCFVRVESEKGAVWTVDELEFRKKRSQRPSRCSNPTPGP

SEQ ID NO: 193 - protein, 365 aa, synthetic construct
  REGION 1..365: note = P19526
MWLRSHRQLCLAFLLVCVLSVIFFLHIHQDSFPHGLGLSILCPDRRLVTPPVAIFCLPGTAMGPNASSSCPQHPASLSGTWTVYPNGRFGNQMGQYATLLALAQLNGRRAFILPAMHAALAPVFRITLPVLAPEVDSRTPWRELQLHDWMSEEYADLRDPFLKLSGFPCSWTFFHHLREQIRREFTLHDHLREEAQSVLGQLRLGRTGDRPRTFVGVHVRRGDYLQVMPQRWKGVVGDSAYLRQAMDWFRARHEAPVFVVTSNGMEWCKENIDTSQGDVTFAGDGQEATPWKDFALLTQCNHTIMTIGTFGFWAAYLAGGDTVYLANFTLPDSEFLKIFKPEAAFLPEWVGINADLSPLWTLAKP

SEQ ID NO: 194 - protein, 459 aa, synthetic construct
  REGION 1..459: note = Q16790
MAPLCPSPWLPLLIPAPAPGLTVQLLLSLLLLVPVHPQRLPRMQEDSPLGGGSSGEDDPLGEEDLPSEEDSPREEDPPGEEDLPGEEDLPGEEDLPEVKPKSEEEGSLKLEDLPTVEAPGDPQEPQNNAHRDKEGDDQSHWRYGGDPPWPRVSPACAGRFQSPVDIRPQLAAFCPALRPLELLGFQLPPLPELRLRNNGHSVQLTLPPGLEMALGPGREYRALQLHLHWGAAGRPGSEHTVEGHRFPAEIHVVHLSTAFARVDEALGRPGGLAVLAAFLEEGPEENSAYEQLLSRLEEIAEEGSETQVPGLDISALLPSDFSRYFQYEGSLTTPPCAQGVIWTVFNQTVMLSAKQLHTLSDTLWGPGDSRLQLNFRATQPLNGRVIEASFPAGVDSSPRAAEPVQLNSCLAAGDILALVFGLLFAVTSVAFLVQMRRQHRRGTKGGVSYRPAEVAETGA

SEQ ID NO: 195 - protein, 138 aa, synthetic construct
  REGION 1..138: note = AAA82744
MSWRGRSTYRPRPRRYVEPPEMIGPMRPEQFSDEVEPATPEEGEPATQRQDPAAAQEGEDEGASAGQGPKPEADSQEQGHPQTGCECEDGPDGQEMDPPNPEEVKTPEEEMRSHYVAQTGILWLLMNNCFLNLSPRKP

SEQ ID NO: 196 - protein, 116 aa, synthetic construct
  REGION 1..116: note = Q6NT46
MSWRGRSTYRPRPRRYVEPPEMIGPMRPEQFSDEVEPATPEEGEPATQRQDPAAAQEGQDEGASAGQGPKPEAHSQEQGHPQTGCECEDGPDGQEMDPPNPEEVKTPEEGEKQSQC

SEQ ID NO: 197 - protein, 118 aa, synthetic construct
  REGION 1..118: note = Q13067
MNLSRGKSTYYWPRPRRYVQPPEVIGPMRPEQFSDEVEPATPEEGEPATQRQDPAAAQEGEDEGASAGQGPKPEADSQEQGHPQTGCECEDGPDGQEMDPPNPEEVKTPEEGEKQSQC

SEQ ID NO: 198 - protein, 117 aa, synthetic construct
  REGION 1..117: note = Q13068
MSWRGRSTYYWPRPRRYVQPPEMIGPMRPEQFSDEVEPATPEEGEPATQRQDPAAAQEGEDEGASAGQGPKPEADSQEQGHPQTGCECEDGPDGQEMDPPNPEEVKTPEEGEGQSQC

SEQ ID NO: 199 - protein, 117 aa, synthetic construct
  REGION 1..117: note = Q13069
MSWRGRSTYYWPRPRRYVQPPEVIGPMRPEQFSDEVEPATPEEGEPATQRQDPAAAQEGEDEGASAGQGPKPEADSQEQGHPQTGCECEDGPDGQEMDPPNPEEVKTPEEGEKQSQC

SEQ ID NO: 200 - protein, 117 aa, synthetic construct
  REGION 1..117: note = Q13070
MSWRGRSTYYWPRPRRYVQPPEVIGPMRPEQFSDEVEPATPEEGEPATQRQDPAAAQEGEDEGASAGQGPKPEADSQEQGHPQTGCECEDGPDGQEVDPPNPEEVKTPEEGEKQSQC

SEQ ID NO: 201 - protein, 117 aa, synthetic construct
  REGION 1..117: note = O76087
MSWRGRSTYYWPRPRRYVQPPEMIGPMRPEQFSDEVEPATPEEGEPATQRQDPAAAQEGEDEGASAGQGPKPEAHSQEQGHPQTGCECEDGPDGQEMDPPNPEEVKTPEEGEKQSQC

SEQ ID NO: 202 - protein, 116 aa, synthetic construct
  REGION 1..116: note = Q9UEU5
MSWRGRSTYRPRPRRYVEPPEMIGPMRPEQFSDEVEPATPEEGEPATQRQDPAAAQEGEDEGASAGQGPKPEADSQEQGHPQTGCECEDGPDGQEMDPPNPEEVKTPEEGEKQSQC

SEQ ID NO: 203 - protein, 447 aa, synthetic construct
  REGION 1..447: note = P32239
MELLKLNRSVQGTGPGPGASLCRPGAPLLNSSSVGNLSCEPPRIRGAGTRELELAIRITLYAVIFLMSVGGNMLIIVVLGLSRRLRTVTNAFLLSLAVSDLLLAVACMPFTLLPNLMGTFIFGTVICKAVSYLMGVSVSVSTLSLVAIALERYSAICRPLQARVWQTRSHAARVIVATWLLSGLLMVPYPVYTVVQPVGPRVLQCVHRWPSARVRQTWSVLLLLLLFFIPGVVMAVAYGLISRELYLGLRFDGDSDSDSQSRVRNQGGLPGAVHQNGRCRPETGAVGEDSDGCYVQLPRSRPALELTALTAPGPGSGSRPTQAKLLAKKRVVRMLLVIVVLFFLCWLPVYSANTWRAFDGPGAHRALSGAPISFIHLLSYASACVNPLVYCFMHRRFRQACLETCARCCPRPPRARPRALPDEDPPTPSIASLSRLSYTTISTLGPG

SEQ ID NO: 204 - protein, 741 aa, synthetic construct
  REGION 1..741: note = Q09328
MALFTPWKLSSQKLGFFLVTFGFIWGMMLLHFTIQQRTQPESSSMLREQILDLSKRYIKALAEENRNVVDGPYAGVMTAYDLKKTLAVLLDNILQRIGKLESKVDNLVVNGTGTNSTNSTTAVPSLVALEKINVADIINGAQEKCVLPPMDGYPHCEGKIKWMKDMWRSDPCYADYGVDGSTCSFFIYLSEVENWCPHLPWRAKNPYEEADHNSLAEIRTDFNILYSMMKKHEEFRWMRLRIRRMADAWIQAIKSLAEKQNLEKRKRKKVLVHLGLLTKESGFKIAETAFSGGPLGELVQWSDLITSLYLLGHDIRISASLAELKEIMKKVVGNRSGCPTVGDRIVELIYIDIVGLAQFKKTLGPSWVHYQCMLRVLDSFGTEPEFNHANYAQSKGHKTPWGKWNLNPQQFYTMFPHTPDNSFLGFVVEQHLNSSDIHHINEIKRQNQSLVYGKVDSFWKNKKIYLDIIHTYMEVHATVYGSSTKNIPSYVKNHGILSGRDLQFLLRETKLFVGLGFPYEGPAPLEAIANGCAFLNPKFNPPKSSKNTDFFIGKPTLRELTSQHPYAEVFIGRPHVWTVDLNNQEEVEDAVKAILNQKIEPYMPYEFTCEGMLQRINAFIEKQDFCHGQVMWPPLSALQVKLAEPGQSCKQVCQESQLICEPSFFQHLNKDKDMLKYKVTCQSSELAKDILVPSFDPKNKHCVFQGDLLLFSCAGAHPRHQRVCPCRDFIKGQVALCKDCL

SEQ ID NO: 205 - protein, 580 aa, synthetic construct
  REGION 1..580: note = I6QTG3
MAGTVRTACLVVAMLLSLDFPGQAQPPPPPPDATCHQVRSFFQRLQPGLKWVPETPVPGSDLQVCLPKGPTCCSRKMEEKYQLTARLNMEQLLQSASMELKFLIIQNAAVFQEAFEIVVRHAKNYTNAMFKNNYPSLTPQAFEFVGEFFTDVSLYILGSDINVDDMVNELFDSLFPVIYTQLMNPGLPDSALDINECLRGARRDLKVFGNFPKLIMTQVSKSLQVTRIFLQALNLGIEVINTTDHLKFSKDCGRMLTRMWYCSYCQGLMMVKPCGGYCNVVMQGCMAGVVEIDKYWREYILSLEELVNGMYRIYDMENVLLGLFSTIHDSIQYVQKNAGKLTTTIGKLCAHSQQRQYRSAYYPEDLFIDKKVLKVAHVEHEETLSSRRRELIQKLKSFISFYSALPGYICSHSPVAENDTLCWNGQELVERYSQKAARNGMKNQFNLHELKMKGPEPVVSQIIDKLKHINQLLRTMSMPKGRVLDKNLDEEGFESGDCGDDEDECIGGSGDGMIKVKNQLRFLAELAYDLDVDDAPGNSQQATPKDNEISTFHNLGNVHSPLKLLTSMAISVVCFFFLVH

SEQ ID NO: 206 - protein, 580 aa, synthetic construct; identical to SEQ ID NO: 205
  REGION 1..580: note = P51654

SEQ ID NO: 207 - protein, 580 aa, synthetic construct [sequence omitted]

SEQ ID NO: 208 - protein, 560 aa, synthetic construct
  REGION 1..560: note = A0A024RA55
MECLYYFLGFLLLAARLPLDAAKRFHDVLGNERPSAYMREHNQLNGWSSDENDWNEKLYPVWKRGDMRWKNSWKGGRVQAVLTSDSPALVGSNITFAVNLIFPRCQKEDANGNIVYEKNCRNEAGLSADPYVYNWTAWSEDSDGENGTGQSHHNVFPDGKPFPHHPGWRRWNFIYVFHTLGQYFQKLGRCSVRVSVNTANVTLGPQLMEVTVYRRHGRAYVPIAQVKDVYVVTDQIPVFVTMFQKNDRNSSDETFLKDLPIMFDVLIHDPSHFLNYSTINYKWSFGDNTGLFVSTNHTVNHTYVLNGTFSLNLTVKAAAPGPCPPPPPPPRPSKPTPSLGPAGDNPLELSRIPDENCQINRYGHFQATITIVEGILEVNIIQMTDVLMPVPWPESSLIDFVVTCQGSIPTEVCTIISDPTCEITQNTVCSPVDVDEMCLLTVRRTFNGSGTYCVNLTLGDDTSLALTSTLISVPDRDPASPLRMANSALISVGCLAIFVTVISLLVYKKHKEYNPIENSPGNVVRSKGLSVFLNRAKAVFFPGNQEKDPLLKNQEFKGVS

SEQ ID NO: 209 - protein, 572 aa, synthetic construct
  REGION 1..572: note = Q14956
MECLYYFLGFLLLAARLPLDAAKRFHDVLGNERPSAYMREHNQLNGWSSDENDWNEKLYPVWKRGDMRWKNSWKGGRVQAVLTSDSPALVGSNITFAVNLIFPRCQKEDANGNIVYEKNCRNEAGLSADPYVYNWTAWSEDSDGENGTGQSHHNVFPDGKPFPHHPGWRRWNFIYVFHTLGQYFQKLGRCSVRVSVNTANVTLGPQLMEVTVYRRHGRAYVPIAQVKDVYVVTDQIPVFVTMFQKNDRNSSDETFLKDLPIMFDVLIHDPSHFLNYSTINYKWSFGDNTGLFVSTNHTVNHTYVLNGTFSLNLTVKAAAPGPCPPPPPPPRPSKPTPSLATTLKSYDSNTPGPAGDNPLELSRIPDENCQINRYGHFQATITIVEGILEVNIIQMTDVLMPVPWPESSLIDFVVTCQGSIPTEVCTIISDPTCEITQNTVCSPVDVDEMCLLTVRRTFNGSGTYCVNLTLGDDTSLALTSTLISVPDRDPASPLRMANSALISVGCLAIFVTVISLLVYKKHKEYNPIENSPGNVVRSKGLSVFLNRAKAVFFPGNQEKDPLLKNQEFKGVS

SEQ ID NO: 210 - protein, 206 aa, synthetic construct [sequence omitted]

SEQ ID NO: 211 - protein, 206 aa, synthetic construct
  REGION 1..206: note = Q96F58
MECLYYFLGFLLLAARLPLDAAKRFHDVLGNERPSAYMREHNQLNGWSSDENDWNEKLYPVWKRGDMRWKNSWKGGRVQAVLTSDSPALVGSNITFAVNLIFPRCQKEDANGNIVYEKNCRNEAGLSADPYVYNWTAWSEDSDGENGTGQSHHNVFPDGKPFPHHPGWRRWNFIYVFHTLGWLLQTPKLLLYLSLKFQPSLFLLYN

SEQ ID NO: 212 - protein, 879 aa, synthetic construct
  REGION 1..879: note = Q14832
MKMLTRLQVLTLALFSKGFLLSLGDHNFLRREIKIEGDLVLGGLFPINEKGTGTEECGRINEDRGIQRLEAMLFAIDEINKDDYLLPGVKLGVHILDTCSRDTYALEQSLEFVRASLTKVDEAEYMCPDGSYAIQENIPLLIAGVIGGSYSSVSIQVANLLRLFQIPQISYASTSAKLSDKSRYDYFARTVPPDFYQAKAMAEILRFFNWTYVSTVASEGDYGETGIEAFEQEARLRNICIATAEKVGRSNIRKSYDSVIRELLQKPNARVVVLFMRSDDSRELIAAASRANASFTWVASDGWGAQESIIKGSEHVAYGAITLELASQPVRQFDRYFQSLNPYNNHRNPWFRDFWEQKFQCSLQNKRNHRRVCDKHLAIDSSNYEQESKIMFVVNAVYAMAHALHKMQRTLCPNTTKLCDAMKILDGKKLYKDYLLKINFTAPFNPNKDADSIVKFDTFGDGMGRYNVFNFQNVGGKYSYLKVGHWAETLSLDVNSIHWSRNSVPTSQCSDPCAPNEMKNMQPGDVCCWICIPCEPYEYLADEFTCMDCGSGQWPTADLTGCYDLPEDYIRWEDAWAIGPVTIACLGFMCTCMVVTVFIKHNNTPLVKASGRELCYILLFGVGLSYCMTFFFIAKPSPVICALRRLGLGSSFAICYSALLTKTNCIARIFDGVKNGAQRPKFISPSSQVFICLGLILVQIVMVSVWLILEAPGTRRYTLAEKRETVILKCNVKDSSMLISLTYDVILVILCTVYAFKTRKCPENFNEAKFIGFTMYTTCIIWLAFLPIFYVTSSDYRVQTTTMCISVSLSGFVVLGCLFAPKVHIILFQPQKNVVTHRLHLNRFSVSGTGTTYSQSSASTYVPTVCNGREVLDSTTSSL

SEQ ID NO: 213 - protein, 648 aa, synthetic construct
  REGION 1..648: note = Q9NXZ2
MSHHGGAPKASTWVVASRRSSTVSRAPERRPAEELNRTGPEGYSVGRGGRWRGTSRPPEAVAAGHEELPLCFALKSHFVGAVIGRGGSKIKNIQSTTNTTIQIIQEQPESLVKIFGSKAMQTKAKAVIDNFVKKLEENYNSECGIDTAFQPSVGKDGSTDNNVVAGDRPLIDWDQIREEGLKWQKTKWADLPPIKKNFYKESTATSAMSKVEADSWRKENFNITWDDLKDGEKRPIPNPTCTFDDAFQCYPEVMENIKKAGFQKPTPIQSQAWPIVLQGIDLIGVAQTGTGKTLCYLMPGFIHLVLQPSLKGQRNRPGMLVLTPTRELALQVEGECCKYSYKGLRSVCVYGGGNRDEQIEELKKGVDIIIATPGRLNDLQMSNFVNLKNITYLVLDEADKMLDMGFEPQIMKILLDVRPDRQTVMTSATWPHSVHRLAQSYLKEPMIVYVGTLDLVAVSSVKQNIIVTTEEEKWSHMQTFLQSMSSTDKVIVFVSRKAVADHLSSDLILGNISVESLHGDREQRDREKALENFKTGKVRILIATDLASRGLDVHDVTHVYNFDFPRNIEEYVHRIGRTGRAGRTGVSITTLTRNDWRVASELINILERANQSIPEELVSMAERFKAHQQKREMERKMERPQGRPKKFH

SEQ ID NO: 214 - protein, 402 aa, synthetic construct
  REGION 1..402: note = B2ZDQ2
MAQKEGGRTVPCCSRPKVAALTAGTLLLLTAIGAASWAIVAVLLRSDQEPLYPVQVSSADARLMVFDKTEGTWRLLCSSRSNARVAGLSCEEMGFLRALTHSELDVRTAGANGTSGFFCVDEGRLPHTQRLLEVISVCDCPRGRFLAAICQDCGRRKLPVDRIVGGRDTSLGRWPWQVSLRYDGAHLCGGSLLSGDWVLTAAHCFPERNRVLSRWRVFAGAVAQASPHGLQLGVQAVVYHGGYLPFRDPNSEENSNDIALVHLSSPLPLTEYIQPVCLPAAGQALVDGKICTVTGWGNTQYYGQQAGVLQEARVPIISNDVCNGADFYGNQIKPKMFCAGYPEGGIDACQGDSGGPFVCEDSISRTPRWRLCGIVSWGTGCALAQKPGVYTKVSDFREWIFQ

SEQ ID NO: 215 - protein, 417 aa, synthetic construct
  REGION 1..417: note = P05981
MAQKEGGRTVPCCSRPKVAALTAGTLLLLTAIGAASWAIVAVLLRSDQEPLYPVQVSSADARLMVFDKTEGTWRLLCSSRSNARVAGLSCEEMGFLRALTHSELDVRTAGANGTSGFFCVDEGRLPHTQRLLEVISVCDCPRGRFLAAICQDCGRRKLPVDRIVGGRDTSLGRWPWQVSLRYDGAHLCGGSLLSGDWVLTAAHCFPERNRVLSRWRVFAGAVAQASPHGLQLGVQAVVYHGGYLPFRDPNSEENSNDIALVHLSSPLPLTEYIQPVCLPAAGQALVDGKICTVTGWGNTQYYGQQAGVLQEARVPIISNDVCNGADFYGNQIKPKMFCAGYPEGGIDACQGDSGGPFVCEDSISRTPRWRLCGIVSWGTGCALAQKPGVYTKVSDFREWIFQAIKTHSEASGMVTQL

SEQ ID NO: 216 - protein, 979 aa, synthetic construct
  REGION 1..979: note = B4DTR1
MELAALCRWGLLLALLPPGAASTQDNYLSTDVGSCTLVCPLHNQEVTAEDGTQRCEKCSKPCARVCYGLGMEHLREVRAVTSANIQEFAGCKKIFGSLAFLPESFDGDPASNTAPLQPEQLQVFETLEEITGYLYISAWPDSLPDLSVFQNLQVIRGRILHNGAYSLTLQGLGISWLGLRSLRELGSGLALIHHNTHLCFVHTVPWDQLFRNPHQALLHTANRPEDECVGEGLACHQLCARGHCWGPGPTQCVNCSQFLRGQECVEECRVLQGLPREYVNARHCLPCHPECQPQNGSVTCFGPEADQCVACAHYKDPPFCVARCPSGVKPDLSYMPIWKFPDEEGACQPCPINCTHSCVDLDDKGCPAEQRASPLTSIISAVVGILLVVVLGVVFGILIKRRQQKIRKYTMRRLLQETELVEPLTPSGAMPNQAQMRILKETELRKVKVLGSGAFGTVYKGIWIPDGENVKIPVAIKVLRENTSPKANKEILDEAYVMAGVGSPYVSRLLGICLTSTVQLVTQLMPYGCLLDHVRENRGRLGSQDLLNWCMQIAKGMSYLEDVRLVHRDLAARNVLVKSPNHVKITDFGLARLLDIDETEYHADGGKVPIKWMALESILRRRFTHQSDVWSYGVTVWELMTFGAKPYDGIPAREIPDLLEKGERLPQPPICTIDVYMIMVKCWMIDSECRPRFRELVSEFSRMARDPQRFVVIQNEDLGPASPLDSTFYRSLLEDDDMGDLVDAEEYLVPQQGFFCPDPAPGAGGMVHHRHRSSSTRSGGGDLTLGLEPSEEEAPRSPLAPSEGAGSDVFDGDLGMGAAKGLQSLPTHDPSPLQRYSEDPTVPLPSETDGYVAPLTCSPQPEYVNQPDVRPQPPSPREGPLPAARPAGATLERPKTLSPGKNGVVKDVFAFGGAVENPEYLTPQGGAAPQPHPPPAFSPAFDNLYYWDQDPPERGAPPSTFKGTPTAENPEYLGLDVPV

SEQ ID NO: 217 - protein, 87 aa, synthetic construct
  REGION 1..87: note = L8E8G2
MMRMKTFVMIHFHLMNGGKAKLYSRPHAKLLPEQRVTDKTGAPVEWPGQTQCSTETQTLAAMPAQAVMRVTCTVVDMHKSECAPAQT

SEQ ID NO: 218 - protein, 1255 aa, synthetic construct [sequence omitted]

SEQ ID NO: 219 - protein, 419 aa, synthetic construct
  REGION 1..419: note = Q9UK79
MELAALCRWGLLLALLPPGAASTQVCTGTDMKLRLPASPETHLDMLRHLYQGCQVVQGNLELTYLPTNASLSFLQDIQEVQGYVLIAHNQVRQVPLQRLRIVRGTQLFEDNYALAVLDNGDPLNNTTPVTGASPGGLRELQLRSLTEILKGGVLIQRNPQLCYQDTILWKDIFHKNNQLALTLIDTNRSRACHPCSPMCKGSRCWGESSEDCQSLTRTVCAGGCARCKGPLPTDCCHEQCAAGCTGPKHSDCLACLHFNHSGICELHCPALVTYNTDTFESMPNPEGRYTFGASCVTACPYNYLSTDVGSCTLVCPLHNQEVTAEDGTQRCEKCSKPCARGTHSLPPRPAAVPVPLRMQPGPAHPVLSFLRPSWDLVSAFYSLPLAPLSPTSVPISPVSVGRGPDPDAHVAVDLSRYEG

SEQ ID NO: 220 - protein, 182 aa, synthetic construct
  REGION 1..182: note = Q95387
GSHSMRYFFTSVSRPGRGEPRFIAVGYVDDTQFVRFDSDAASQRMEPRAPWIEQEGPEYWDGETRKVKAHSQTHRVDLGTLRGYYNQSEAGSHTVQRMYGCDVGSDWRFLRGYHQYAYDGKDYIALKEDLRSWTAADMAAQTTKHKWETAHVAEQLRAYLEGTCVEWLRRYLENGKETLQRT

SEQ ID NO: 221 - protein, 181 aa, synthetic construct
  REGION 1..181: note = Q9MYF8
SHSMRYFFTSVSRPGRGEPRFIAVGYVDDTQFVRFDSDAASQRMEPRAPWIEQEGPEYWDGETRKVKAHSQTHRVDLGTLRGYYNQSEAGSHTVQRMYGCDVGSDWRFLRGYHQYAYDGKDYIALKEDLRSWTAADMAAQTTKHKWEAAHVAEQLRAYLEGTCVEWLRRYLENGKETLQRT

SEQ ID NO: 222 - protein, 234 aa, synthetic construct
  REGION 1..234: note = Q99801
MLRVPEPRPGEAKAEGAAPPTPSKPLTSFLIQDILRDGAQRQGGRTSSQRQRDPEPEPEPEPEGGRSRAGAQNDQLSTGPRAAPEEAETLAETEPERHLGSYLLDSENTSGALPRLPQTPKQPQKRSRAAFSHTQVIELERKFSHQKYLSAPERAHLAKNLKLTETQVKIWFQNRRYKTKRKQLSSELGDLEKHSSLPALKEEAFSRASLVSVYNSYPYYPYLYCVGSWSPAFW

SEQ ID NO: 223 - protein, 313 aa, synthetic construct
  REGION 1..313: note = B2RBQ6
MASFRKLTLSEKVPPNHPSRKKVNFLDMSLDDIIIYKELEGTNAEEEKNKRQNHSKKESPSRQQSKAHRHRHRRDYSRCRSNSEEGNHDKKPSQKPSGFKSGQHPLNGQPLIEQEKCSDNYEAQAEKNQGQSEGNQHQSEGNPDKSEESQGQPEENHHSERSRNHLERSLSQSDRSQGQLKRHHPQYERSHGQYKRSHGQSERSHGHSERSHGHSERSHGHSERSHGHSKRSRSQGDLVDTQSDLIATQRDLIATQKDLIATQRDLIATQRDLIVTQRDLVATERDLINQSGRSHGQSERHQRYSTGKNTITT

SEQ ID NO: 224 - protein, 313 aa, synthetic construct
  REGION 1..313: note = Q9P127
MASFRKLTLSEKVPPNHPSRKKVNFLDMSLDDIIIYKELEGTNAEEEKNKRQNHSKKESPSRQQSKAHRHRHRRGYSRCRSNSEEGNHDKKPSQKPSGFKSGQHPLNGQPLIEQEKCSDNYEAQAEKNQGQSEGNQHQSEGNPDKSEESQGQPEENHHSERSRNHLERSLSQSDRSQGQLKRHHPQYERSHGQYKRSHGQSERSHGHSERSHGHSERSHGHSERSHGHSKRSRSQGDLVDTQSDLIATQRDLIATQKDLIATQRDLIATQRDLIVTQRDLVATERDLINQSGRSHGQSERHQRYSTGKNTITT

SEQ ID NO: 225 - protein, 127 aa, synthetic construct
  REGION 1..127: note = 12543784
MIKKNLKKLGIEETYLNIIKAIYDRPTASIQKTENLSTKTGTSQEYHLSPLWFYIVLEILASTIRQEKNLKDIHTEKEEVKLSLFADAMILYLKKPNDSTRKLLELIKKIHSSCRIKINIHFAFCSQ

SEQ ID NO: 226 - protein, 641 aa, synthetic construct
  REGION 1..641: note = P0DMV8
MAKAAAIGIDLGTTYSCVGVFQHGKVEIIANDQGNRTTPSYVAFTDTERLIGDAAKNQVALNPQNTVFDAKRLIGRKFGDPVVQSDMKHWPFQVINDGDKPKVQVSYKGETKAFYPEEISSMVLTKMKEIAEAYLGYPVTNAVITVPAYFNDSQRQATKDAGVIAGLNVLRIINEPTAAAIAYGLDRTGKGERNVLIFDLGGGTFDVSILTIDDGIFEVKATAGDTHLGGEDFDNRLVNHFVEEFKRKHKKDISQNKRAVRRLRTACERAKRTLSSSTQASLEIDSLFEGIDFYTSITRARFEELCSDLFRSTLEPVEKALRDAKLDKAQIHDLVLVGGSTRIPKVQKLLQDFFNGRDLNKSINPDEAVAYGAAVQAAILMGDKSENVQDLLLLDVAPLSLGLETAGGVMTALIKRNSTIPTKQTQIFTTYSDNQPGVLIQVYEGERAMTKDNNLLGRFELSGIPPAPRGVPQIEVTFDIDANGILNVTATDKSTGKANKITITNDKGRLSKEEIERMVQEAEKYKAEDEVQRERVSAKNALESYAFNMKSAVEDEGLKGKISEADKKKVLDKCQEVISWLDANTLAEKDEFEHKRKELEQVCNPIISGLYQGAGGPGPGGFGAQGPKGGSGSGPTIEEVD

SEQ ID NO: 227 - protein, 641 aa, synthetic construct; identical to SEQ ID NO: 226
  REGION 1..641: note = P0DMV9

SEQ ID NO: 228 - protein, 208 aa, synthetic construct
  REGION 1..208: note = P10767
MALGQKLFITMSRGAGRLQGTLWALVFLGILVGMVVPSPAGTRANNTLLDSRGWGTLLSRSRAGLAGEIAGVNWESGYLVGIKRQRRLYCNVGIGFHLQVLPDGRISGTHEENPYSLLEISTVERGVVSLFGVRSALFVAMNSKGRLYATPSFQEECKFRETLLPNNYNAYESDLYQGTYIALSKYGRVKRGSKVSPIMTVTHFLPRI

SEQ ID NO: 229 - protein, 523 aa, synthetic construct
  REGION 1..523: note = O94807
MPRAPRCRAVRSLLRSHYREVLPLATFVRRLGPQGWRLVQRGDPAAFRALVAQCLVCVPWDARPPPAAPSFRQVSCLKELVARVLQRLCERGAKNVLAFGFALLDGARGGPPEAFTTSVRSYLPNTVTDALRGSGAWGLLLRRVGDDVLVHLLARCALFVLVAPSCAYQVCGPPLYQLGAATQARPPPHASGPRRRLGCERAWNHSVREAGVPLGLPAPGARRRGGSASRSLPLPKRPRRGAAPEPERTPVGQGSWAHPGRTRGPSDRGFCVVSPARPAEEATSLEGALSGTRHSHPSVGRQHHAGPPSTSRPPRPWDTPCPPVYAETKHFLYSSGDKEQLRPSFLLSSLRPILTGARRLVETIFLGSSPGCQGLPAGCPACPSATGKCGPCFWSCLGTTRSAPTGCSSRRTARCELRSPQQPVSVPGRSPRALWRPPRRRTQTPVAWCSCSASTAPLAGVRLRAGLPAPAGAPRPLGLQAQRRRFLRNTKKFISLGKHAKLSLQELTWKMSVRDCAWLRRSP

SEQ ID NO: 230 - protein, 559 aa, synthetic construct
  REGION 1..559: note = O00748
MRLHRLRARLSAVACGLLLLLVRGQGQDSASPIRTTHTGQVLGSLVHVKGANAGVQTFLGIPFAKPPLGPLRFAPPEPPESWSGVRDGTTHPAMCLQDLTAVESEFLSQFNMTFPSDSMSEDCLYLSIYTPAHSHEGSNLPVMVWIHGGALVFGMASLYDGSMLAALENVVVVIIQYRLGVLGFFSTGDKHATGNWGYLDQVAALRWVQQNIAHFGGNPDRVTIFGESAGGTSVSSLVVSPISQGLFHGAIMESGVALLPGLIASSADVISTVVANLSACDQVDSEALVGCLRGKSKEEILAINKPFKMIPGVVDGVFLPRHPQELLASADFQPVPSIVGVNNNEFGWLIPKVMRIYDTQKEMDREASQAALQKMLTLLMLPPTFGDLLREEYIGDNGDPQTLQAQFQEMMADSMFVIPALQVAHFQCSRAPVYFYEFQHQPSWLKNIRPPHMKADHGDELPFVFRSFFGGNYIKFTEEEEQLSRKMMKYWANFARNGNPNGEGLPHWPLFDQEEQYLQLNLQPAVGRALKAHRLQFWKKALPQKIQELEEPEERHTEL

SEQ ID NO: 231 - protein, 579 aa, synthetic construct
  REGION 1..579: note = O00425
MNKLYIGNLSENAAPSDLESIFKDAKIPVSGPFLVKTGYAFVDCPDESWALKAIEALSGKIELHGKPIEVEHSVPKRQRIRKLQIRNIPPHLQWEVLDSLLVQYGVVESCEQVNTDSETAVVNVTYSSKDQARQALDKLNGFQLENFTLKVAYIPDEMAAQQNPLQQPRGRRGLGQRGSSRQGSPGSVSKQKPCDLPLRLLVPTQFVGAIIGKEGATIRNITKQTQSKIDVHRKENAGAAEKSITILSTPEGTSAACKSILEIMHKEAQDIKFTEEIPLKILAHNNFVGRLIGKEGRNLKKIEQDTDTKITISPLQELTLYNPERTITVKGNVETCAKAEEEIMKKIRESYENDIASMNLQAHLIPGLNLNALGLFPPTSGMPPPTSGPPSAMTPPYPQFEQSETETVHLFIPALSVGAIIGKQGQHIKQLSRFAGASIKIAPAEAPDAKVRMVIITGPPEAQFKAQGRIYGKIKEENFVSPKEEVKLEAHIRVPSFAAGRVIGKGGKTVNELQNLSSAEVVVPRDQTPDENDQVVVKITGHFYACQVAQRKIQEILTQVKQHQQQKALQSGPPQSRRK

SEQ ID NO: 232 - protein, 178 aa, synthetic construct
  REGION 1..178: note = P22301
MHSSALLCCLVLLTGVRASPGQGTQSENSCTHFPGNLPNMLRDLRDAFSRVKTFFQMKDQLDNLLLKESLLEDFKGYLGCQALSEMIQFYLEEVMPQAENQDPDIKAHVNSLGENLKTLRLRLRRCHRFLPCENKSKAVEQVKNAFNKLQEKGIYKAMSEFDIFINYIEAYMTMKIRN

SEQ ID NO: 233 - protein, 380 aa, synthetic construct
  REGION 1..380: note = Q14627
MAFVCLAIGCLYTFLISTTFGCTSSSDTEIKVNPPQDFEIVDPGYLGYLYLQWQPPLSLDHFKECTVEYELKYRNIGSETWKTIITKNLHYKDGFDLNKGIEAKIHTLLPWQCTNGSEVQSSWAETTYWISPQGIPETKVQDMDCVYYNWQYLLCSWKPGIGVLLDTNYNLFYWYEGLDHALQCVDYIKADGQNIGCRFPYLEASDYKDFYICVNGSSENKPIRSSYFTFQLQNIVKPLPPVYLTFTRESSCEIKLKWSIPLGPIPARCFDYEIEIREDDTTLVTATVENETYTLKTTNETRQLCFVVRSKVNIYCSDDGIWSEWSDKQCWEGEDLSKKTLLRFWLPFGFILILVIFVTGLLLRKPNTYPKMIPEFFCDT

SEQ ID NO: 234 - protein, 272 aa, synthetic construct
  REGION 1..272: note = P01589
MDSYLLMWGLLTFIMVPGCQAELCDDDPPEIPHATFKAMAYKEGTMLNCECKRGFRRIKSGSLYMLCTGNSSHSSWDNQCQCTSSATRNTTKQVTPQPEEQKERKTTEMQSPMQPVDQASLPGHCREPPPWENEATERIYHFVVGQMVYYQCVQGYRALHRGPAESVCKMTHGKTRWTQPQLICTGEMETSQFPGEEKPQASPEGRPESETSCLVTTTDFQIQTEMAATMETSIFTTEYQVAVAGCVFLLISVLLLSGLTWQRRQRKSRRTI

SEQ ID NO: 235 - protein, 551 aa, synthetic construct
  REGION 1..551: note = P14784
MAAPALSWRLPLLILLLPLATSWASAAVNGTSQFTCFYNSRANISCVWSQDGALQDTSCQVHAWPDRRRWNQTCELLPVSQASWACNLILGAPDSQKLTTVDIVTLRVLCREGVRWRVMAIQDFKPFENLRLMAPISLQVVHVETHRCNISWEISQASHYFERHLEFEARTLSPGHTWEEAPLLTLKQKQEWICLETLTPDTQYEFQVRVKPLQGEFTTWSPWSQPLAFRTKPAALGKDTIPWLGHLLVGLSGAFGFIILVYLLINCRNTGPWLKKVLKCNTPDPSKFFSQLSSEHGGDVQKWLSSPFPSSSFSPGGLAPEISPLEVLERDKVTQLLLQQDKVPEPASLSSNHSLTSCFTNQGYFFFHLPDALEIEACQVYFTYDPYSEEDPDEGVAGAPTGSSPQPLQPLSGEDDAYCTFPSRDDLLLFSPSLLGGPSPPSTAPGGSGAGEERMPPSLQERVPRDWDPQPLGPPTPGVPDLVDFQPPPELVLREAGEEVPDAGPREGVSFPWSRPPGQGEFRALNARLPLNTDAYLSLQELQGQDPTHLV

SEQ ID NO: 236 - protein, 369 aa, synthetic construct
  REGION 1..369: note = P31785
MLKPSLPFTSLLFLQLPLLGVGLNTTILTPNGNEDTTADFFLTTMPTDSLSVSTLPLPEVQCFVFNVEYMNCTWNSSSEPQPTNLTLHYWYKNSDNDKVQKCSHYLFSEEITSGCQLQKKEIHLYQTFVVQLQDPREPRRQATQMLKLQNLVIPWAPENLTLHKLSESQLELNWNNRFLNHCLEHLVQYRTDWDHSWTEQSVDYRHKFSLPSVDGQKRYTFRVRSRFNPLCGSAQHWSEWSHPIHWGSNTSKENPFLFALEAVVISVGSMGLIISLLCVYFWLERTMPRIPTLKNLEDLVTEYHGNFSAWSGVSKGLAESLQPDYSERLCLVSEIPPKGGALGEGPGASPCNQHSPYWAPPCYTLKPET

SEQ ID NO: 237 - protein, 134 aa, synthetic construct
  REGION 1..134: note = P05113
MRMLLHLSLLALGAAYVYAIPTEIPTSALVKETLALLSTHRTLLIANETLRIPVPVHKNHQLCTEEIFQGIGTLESQTVQGGTVERLFKNLSLIKKYIDGQKKKCGEERRRVNQFLDYLQEFLGVMNTEWIIES

SEQ ID NO: 238 - protein, 184 aa, synthetic construct
  REGION 1..184: note = Q9NV31
MVRKLKFHEQKLLKQVDFLNWEVTDHNLHELRVLRRYRLQRREDYTRYNQLSRAVRELARRLRDLPERDQFRVRASAALLDKLYALGLVPTRGSLELCDFVTASSFCRRRLPTVLLKLRMAQHLQAAVAFVEQGHVRVGPDVVTDPAFLVTRSMEDFVTWVDSSKIKRHVLEYNEERDDFDLEA

SEQ ID NO: 239 - protein, 1049 aa, synthetic construct
  REGION 1..1049: note = P08648
MGSRTPESPLHAVQLRWGPRRRPPLLPLLLLLLPPPPRVGGFNLDAEAPAVLSGPPGSFFGFSVEFYRPGTDGVSVLVGAPKANTSQPGVLQGGAVYLCPWGASPTQCTPIEFDSKGSRLLESSLSSSEGEEPVEYKSLQWFGATVRAHGSSILACAPLYSWRTEKEPLSDPVGTCYLSTDNFTRILEYAPCRSDFSWAAGQGYCQGGFSAEFTKTGRVVLGGPGSYFWQGQILSATQEQIAESYYPEYLINLVQGQLQTRQASSIYDDSYLGYSVAVGEFSGDDTEDFVAGVPKGNLTYGYVTILNGSDIRSLYNFSGEQMASYFGYAVAATDVNGDGLDDLLVGAPLLMDRTPDGRPQEVGRVYVYLQHPAGIEPTPTLTLTGHDEFGRFGSSLTPLGDLDQDGYNDVAIGAPFGGETQQGVVFVFPGGPGGLGSKPSQVLQPLWAASHTPDFFGSALRGGRDLDGNGYPDLIVGSFGVDKAVVYRGRPIVSASASLTIFPAMFNPEERSCSLEGNPVACINLSFCLNASGKHVADSIGFTVELQLDWQKQKGGVRRALFLASRQATLTQTLLIQNGAREDCREMKIYLRNESEFRDKLSPIHIALNFSLDPQAPVDSHGLRPALHYQSKSRIEDKAQILLDCGEDNICVPDLQLEVFGEQNHVYLGDKNALNLTFHAQNVGEGGAYEAELRVTAPPEAEYSGLVRHPGNFSSLSCDYFAVNQSRLLVCDLGNPMKAGASLWGGLRFTVPHLRDTKKTIQFDFQILSKNLNNSQSDVVSFRLSVEAQAQVTLNGVSKPEAVLFPVSDWHPRDQPQKEEDLGPAVHHVYELINQGPSSISQGVLELSCPQALEGQQLLYVTRVTGLNCTTNHPINPKGLELDPEGSLHHQQKREAPSRSSASSGPQILKCPEAECFRLRCELGPLHQQESQSLQLHFRVWAKTFLQREHQPFSLQCEAVYKALKMPYRILPRQLPQKERQVATAVQWTKAEGSYGVPLWIIILAILFGLLLLGLLIYILYKLGFFKRSLPYGTAMEKAQLKPPATSDA

SEQ ID NO: 240 - protein, 798 aa, synthetic construct
  REGION 1..798: note = P05556
MNLQPIFWIGLISSVCCVFAQTDENRCLKANAKSCGECIQAGPNCGWCTNSTFLQEGMPTSARCDDLEALKKKGCPPDDIENPRGSKDIKKNKNVTNRSKGTAEKLKPEDITQIQPQQLVLRLRSGEPQTFTLKFKRAEDYPIDLYYLMDLSYSMKDDLENVKSLGTDLMNEMRRITSDFRIGFGSFVEKTVMPYISTTPAKLRNPCTSEQNCTSPFSYKNVLSLTNKGEVFNELVGKQRISGNLDSPEGGFDAIMQVAVCGSLIGWRNVTRLLVFSTDAGFHFAGDGKLGGIVLPNDGQCHLENNMYTMSHYYDYPSIAHLVQKLSENNIQTIFAVTEEFQPVYKELKNLIPKSAVGTLSANSSNVIQLIIDAYNSLSSEVILENGKLSEGVTISYKSYCKNGVNGTGENGRKCSNISIGDEVQFEISITSNKCPKKDSDSFKIRPLGFTEEVEVILQYICECECQSEGIPESPKCHEGNGTFECGACRCNEGRVGRHCECSTDEVNSEDMDAYCRKENSSEICSNNGECVCGQCVCRKRDNTNEIYSGKFCECDNFNCDRSNGLICGGNGVCKCRVCECNPNYTGSACDCSLDTSTCEASNGQICNGRGICECGVCKCTDPKFQGQTCEMCQTCLGVCAEHKECVQCRAFNKGEKKDTCTQECSYFNITKVESRDKLPQPVQPDPVSHCKEKDVDDCWFYFTYSVNGNNEVMVHVVENPECPTGPDIIPIVAGVVAGIVLIGLALLLIWKLLMIIHDRREFAKFEKEKMNAKWDTGENPIYKSAVTTVVNPKYEGK

SEQ ID NO: 241 - protein, 788 aa, synthetic construct
  REGION 1..788: note = P18564
MGIELLCLFFLFLGRNDHVQGGCALGGAETCEDCLLIGPQCAWCAQENFTHPSGVGERCDTPANLLAKGCQLNFIENPVSQVEILKNKPLSVGRQKNSSDIVQIAPQSLILKLRPGGAQTLQVHVRQTEDYPVDLYYLMDLSASMDDDLNTIKELGSRLSKEMSKLTSNFRLGFGSFVEKPVSPFVKTTPEEIANPCSSIPYFCLPTFGFKHILPLTNDAERFNEIVKNQKISANIDTPEGGFDAIMQAAVCKEKIGWRNDSLHLLVFVSDADSHFGMDSKLAGIVIPNDGLCHLDSKNEYSMSTVLEYPTIGQLIDKLVQNNVLLIFAVTQEQVHLYENYAKLIPGATVGLLQKDSGNILQLIISAYEELRSEVELEVLGDTEGLNLSFTAICNNGTLFQHQKKCSHMKVGDTASFSVTVNIPHCERRSRHIIIKPVGLGDALELLVSPECNCDCQKEVEVNSSKCHHGNGSFQCGVCACHPGHMGPRCECGEDMLSTDSCKEAPDHPSCSGRGDCYCGQCICHLSPYGNIYGPYCQCDNFSCVRHKGLLCGGNGDCDCGECVCRSGWTGEYCNCTTSTDSCVSEDGVLCSGRGDCVCGKCVCTNPGASGPTCERCPTCGDPCNSKRSCIECHLSAAGQAREECVDKCKLAGATISEEEDFSKDGSVSCSLQGENECLITFLITTDNEGKTIIHSINEKDCPKPPNIPMIMLGVSLAILLIGVVLLCIWKLLVSFHDRKEVAKFEAERSKAKWQTGTNPLYRGSTSTFKNVTYKHREKQKVDLSTDC

SEQ ID NO: 242 - protein, 261 aa, synthetic construct
  REGION 1..261: note = A0A024R4J4
MWDLVLSIALSVGCTGAVPLIQSRIVGGWECEKHSQPWQVAVYSHGWAHCGGVLVHPQWVLTAAHCLKKNSQVWLGRHNLFEPEDTGQRVPVSHSFPHPLYNMSLLKHQSLRPDEDSSHDLMLLRLSEPAKITDVVKVLGLPTQEPALGTTCYASGWGSIEPEEFLRPRSLQCVSLHLLSNDMCARAYSEKVTEFMLCAGLWTGGKDTCGGDSGGPLVCNGVLQGITSWGPEPCALPEKPAVYTKVVHYRKWIKDTIAANP

SEQ ID NO: 243 - protein, 223 aa, synthetic construct
  REGION 1..223: note = A0A024R4N3
MWDLVLSIALSVGCTGAVPLIQSRIVGGWECEKHSQPWQVAVYSHGWAHCGGVLVHPQWVLTAAHCLKKNSQVWLGRHNLFEPEDTGQRVPVSHSFPHPLYNMSLLKHQSLRPDEDSSHDLMLLRLSEPAKITDVVKVLGLPTQEPALGTTCYASGWGSIEPEEFLRPRSLQCVSLHLLSNDMCARAYSEKVTEFMLCAGLWTGGKDTCGVSHPYSQHLEGKG

SEQ ID NO: 244 - protein, 62 aa, synthetic construct
  REGION 1..62: note = B0AZU9
MSLLKHQSLRPDEDSSHDLMLLRLSEPAKITDVVKVLGLPTQEPALGTTCYASGWGSIEPEE

SEQ ID NO: 245 - protein, 244 aa, synthetic construct [sequence omitted]

SEQ ID NO: 246 - protein, 261 aa, synthetic construct; identical to SEQ ID NO: 242
  REGION 1..261: note = P20151

SEQ ID NO: 247 - protein, 49 aa, synthetic construct
  REGION 1..49: note = Q6T774
MWDLVLSIALSVGCTGIARSGWVGTTCLSLKTQARGSLSATASHTRSTI

SEQ ID NO: 248 - protein, 180 aa, synthetic construct
  REGION 1..180: note = Q6T775
MWDLVLSIALSVGCTGAVPLIQSRIVGGWECEKHSQPWQVAVYSHGWAHCGGVLVHPQWVLTAAHCLKKNSQVWLGRHNLFEPEDTGQRVPVSHSFPHPLYNMSLLKHQSLRPDEDSSHDLMLLRLSEPAKITDVVKVLGLPTQEPALGTTCYASGWGSIEPEECTPGPDGVAGSPDAWV

SEQ ID NO: 249 - protein, 254 aa, synthetic construct
  REGION 1..254: note = A0A0C4DFQ5
MATAGNPWGWFLGYLILGVAGSLVSGSCSQIINGEDCSPHSQPWQAALVMENELFCSGVLVHPQWVLSAAHCFQNSYTIGLGLHSLEADQEPGSQMVEASLSVRHPEYNRPLLANDLMLIKLDESVSESDTIRSISIASQCPTAGNSCLVSGWGLLANGRMPTVLQCVNVSVVSEEVCSKLYDPLYHPSMFCAGGGQDQKDSCNGDSGGPLICNGYLQGLVSFGKAPCGQVGVPGVYTNLCKFTEWIEKTVQAS

SEQ ID NO: 250 - protein, 75 aa, synthetic construct
  REGION 1..75: note = Q5BQA0
MATAGNPWGWFLGYLILGVAGSLVSGSCSQIINGEDCSPHSQPWQAALVMENELFCSGVLVHPQWVLSAAHCFQK

SEQ ID NO: 251 - protein, 195 aa, synthetic construct
  REGION 1..195: note = Q96PT0
MATAGNPWGWFLGYLILGVAGSLVSGSCSQIINGEDCSPHSQPWQAALVMENELFCSGVLVHPQWVLSAAHCFQNSYTIGLGLHSLEADQEPGSQMVEASLSVRHPEYNRPLLANDLMLIKLDESVSESDTIRSISIASQCPTAGNSCLVSGWGLLANGELTGVCLPSSRRSSAQSRGLTQSSASQAECLPCCSA

SEQ ID NO: 252 - protein, 159 aa, synthetic construct
  REGION 1..159: note = Q96PT1
MATAGNPWGWFLGYLILGVAGSLVSGSCSQIINGEDCSPHSQPWQAALVMENELFCSGVLVHPQWVLSAAHCFQNSYTIGLGLHSLEADQEPGSQMVEASLSVRHPEYNRPLLANDLMLIKLDESVSESDTIRSISIASQCPTAGNSCLVSGWGLLANG

SEQ ID NO: 253 - protein, 254 aa, synthetic construct
  REGION 1..254: note = Q9Y5K2
MATAGNPWGWFLGYLILGVAGSLVSGSCSQIINGEDCSPHSQPWQAALVMENELFCSGVLVHPQWVLSAAHCFQNSYTIGLGLHSLEADQEPGSQMVEASLSVRHPEYNRPLLANDLMLIKLDESVSESDTIRSISIASQCPTAGNSCLVSGWGLLANGRMPTVLQCVNVSVVSEEVCSKLYDPLYHPSMFCAGGGHDQKDSCNGDSGGPLICNGYLQGLVSFGKAPCGQVGVPGVYTNLCKFTEWIEKTVQAS

SEQ ID NO: 254 - protein, 890 aa, synthetic construct
  REGION 1..890: note = O95235
MSQGILSPPAGLLSDDDVVVSPMFESTAADLGSVVRKNLLSDCSVVSTSLEDKQQVPSEDSMEKVKVYLRVRPLLPSELERQEDQGCVRIENVETLVLQAPKDSFALKSNERGIGQATHRFTFSQIFGPEVGQASFFNLTVKEMVKDVLKGQNWLIYTYGVTNSGKTHTIQGTIKDGGILPRSLALIFNSLQGQLHPTPDLKPLLSNEVIWLDSKQIRQEEMKKLSLLNGGLQEEELSTSLKRSVYIESRIGTSTSFDSGIAGLSSISQCTSSSQLDETSHRWAQPDTAPLPVPANIRFSIWISFFEIYNELLYDLLEPPSQQRKRQTLRLCEDQNGNPYVKDLNWIHVQDAEEAWKLLKVGRKNQSFASTHLNQNSSRSHSIFSIRILHLQGEGDIVPKISELSLCDLAGSERCKDQKSGERLKEAGNINTSLHTLGRCIAALRQNQQNRSKQNLVPFRDSKLTRVFQGFFTGRGRSCMIVNVNPCASTYDETLHVAKFSAIASQLVHAPPMQLGFPSLHSFIKEHSLQVSPSLEKGAKADTGLDDDIENEADISMYGKEELLQVVEAMKTLLLKERQEKLQLEMHLRDEICNEMVEQMQQREQWCSEHLDTQKELLEEMYEEKLNILKESLTSFYQEEIQERDEKIEELEALLQEARQQSVAHQQSGSELALRRSQRLAASASTQQLQEVKAKLQQCKAELNSTTEELHKYQKMLEPPPSAKPFTIDVDKKLEEGQKNIRLLRTELQKLGESLQSAERACCHSTGAGKLRQALTTCDDILIKQDQTLAELQNNMVLVKLDLRKKAACIAEQYHTVLKLQGQVSAKKRLGTNQENQQPNQQPPGKKPFLRNLLPRTPTCQSSTDCSPYARILRSRRSPLLKSGPFGKKY

SEQ ID NO: 255 - protein, 370 aa, synthetic construct
  REGION 1..370: note = Q92604
MAITLEEAPWLGWLLVKALMRFAFMVVNNLVAIPSYICYVIILQPLRVLDSKRFWYIEGIMYKWLLGMVASWGWYAGYTVMEWGEDIKAVSKDEAVMLVNHQATGDVCTLMMCLQDKGLVVAQMMWLMDHIFKYTNFGIVSLVHGDFFIRQGRSYRDQQLLLLKKHLENNYRSRDRKWIVLFPEGGFLRKRRETSQAFAKKNNLPFLTNVTLPRSGATKIILNALVAQQKNGSPAGGDAKELDSKSKGLQWIIDTTIAYPKAEPIDIQTWILGYRKPTVTHVHYRIFPIKDVPLETDDLTTWLYQRFVEKEDLLSHFYETGAFPPSKGHKEAVSREMTLSNLWIFLIQSFAFLSGYMWYNIIQYFYHCLF

SEQ ID NO: 256 - protein, 725 aa, synthetic construct
  REGION 1..725: note = Q99661
MAMDSSLQARLFPGLAIKIQRSNGLIHSANVRTVNLEKSCVSVEWAEGGATKGKEIDFDDVAAINPELLQLLPLHPKDNLPLQENVTIQKQKRRSVNSKIPAPKESLRSRSTRMSTVSELRITAQENDMEVELPAAANSRKQFSVPPAPTRPSCPAVAEIPLRMVSEEMEEQVHSIRGSSSANPVNSVRRKSCLVKEVEKMKNKREEKKAQNSEMRMKRAQEYDSSFPNWEFARMIKEFRATLECHPLTMTDPIEEHRICVCVRKRPLNKQELAKKEIDVISIPSKCLLLVHEPKLKVDLTKYLENQAFCFDFAFDETASNEVVYRFTARPLVQTIFEGGKATCFAYGQTGSGKTHTMGGDLSGKAQNASKGIYAMASRDVFLLKNQPCYRKLGLEVYVTFFEIYNGKLFDLLNKKAKLRVLEDGKQQVQVVGLQEHLVNSADDVIKMIDMGSACRTSGQTFANSNSSRSHACFQIILRAKGRMHGKFSLVDLAGNERGADTSSADRQTRMEGAEINKSLLALKECIRALGQNKAHTPFRESKLTQVLRDSFIGENSRTCMIATISPGISSCEYTLNTLRYADRVKELSPHSGPSGEQLIQMETEEMEACSNGALIPGNLSKEEEELSSQMSSFNEAMTQIRELEEKAMEELKEIIQQGPDWLELSEMTEQPDYDLETFVNKAESALAQQAKHFSALRDVIKALRLAMQLEEQASRQISSKKRPQ

SEQ ID NO: 257 - protein, 113 aa, synthetic construct
  REGION 1..113: note = Q5H943
MNFYLLLASSILCALIVFWKYRRFQRNTGEMSSNSTALALVRPSSSGLINSNTDNNLAVYDLSRDILNNFPHSIARQKRILVNLSMVENKLVELEHTLLSKGFRGASPHRKST

SEQ ID NO: 258 - protein, 860 aa, synthetic construct [sequence omitted]

SEQ ID NO: 259 - protein, 433 aa, synthetic construct
  REGION 1..433: note = Q99538
MVWKVAVFLSVALGIGAVPIDDPEDGGKHWVVIVAGSNGWYNYRHQADACHAYQIIHRNGIPDEQIVVMMYDDIAYSEDNPTPGIVINRPNGTDVYQGVPKDYTGEDVTPQNFLAVLRGDAEAVKGIGSGKVLKSGPQDHVFIYFTDHGSTGILVFPNEDLHVKDLNETIHYMYKHKMYRKMVFYIEACESGSMMNHLPDNINVYATTAANPRESSYACYYDEKRSTYLGDWYSVNWMEDSDVEDLTKETLHKQYHLVKSHTNTSHVMQYGNKTISTMKVMQFQGMKRKASSPVPLPPVTHLDLTPSPDVPLTIMKRKLMNTNDLEESRQLTEEIQRHLDARHLIEKSVRKIVSLLAASEAEVEQLLSERAPLTGHSCYPEALLHFRTHCFNWHSPTYEYALRHLYVLVNLCEKPYPLHRIKLSMDHVCLGHY

SEQ ID NO: 260 - protein, 598 aa, synthetic construct
  REGION 1..598: note = Q8N423
MTPIVTVLICLGLSLGPRTHVQTGTIPKPTLWAEPDSVITQGSPVTLSCQGSLEAQEYRLYREKKSASWITRIRPELVKNGQFHIPSITWEHTGRYGCQYYSRARWSELSDPLVLVMTGAYPKPTLSAQPSPVVTSGGRVTLQCESQVAFGGFILCKEGEEEHPQCLNSQPHARGSSRAIFSVGPVSPNRRWSHRCYGYDLNSPYVWSSPSDLLELLVPGVSKKPSLSVQPGPVVAPGESLTLQCVSDVGYDRFVLYKEGERDLRQLPGRQPQAGLSQANFTLGPVSRSYGGQYRCYGAHNLSSECSAPSDPLDILITGQIRGTPFISVQPGPTVASGENVTLLCQSWRQFHTFLLTKAGAADAPLRLRSIHEYPKYQAEFPMSPVTSAHAGTYRCYGSLNSDPYLLSHPSEPLELVVSGPSMGSSPPPTGPISTPAGPEDQPLTPTGSDPQSGLGRHLGVVIGILVAVVLLLLLLLLLFLILRHRRQGKHWTSTQRKADFQHPAGAVGPEPTDRGLQWRSSPAADAQEENLYAAVKDTQPEDGVEMDTRAAASEAPQDVTYAQLHSLTLRRKATEPPPSQEREPPAEPSIYATLAIH

SEQ ID NO: 261 - protein, 165 aa, synthetic construct
  REGION 1..165: note = Q17RY6
MALLALLLVVALPRVWTDANLTARQRDPEDSQRTDEGDNRVWCHVCERENTFECQNPRRCKWTEPYCVIAAVKIFPRFFMVAKQCSAGCAAMERPKPEEKRFLLEEPMPFFYLKCCKIRYCNLEGPPINSSVFKEYAGSMGESCGGLWLAILLLLASIAAGLSLS

SEQ ID NO: 262 - protein, 124 aa, synthetic construct
  REGION 1..124: note = P43359
MSLEQKSQHCKPEEGLDTQEEALGLVGVQAATTEEQEAVSSSSPLVPGTLGEVPAAGSPGPLKSPQGASAIPTAIDFTLWRQSIKGSSNQEEEGPSTSPDPESVFRAALSKKVADLIHFLLLKY

SEQ ID NO: 263 - protein, 318 aa, synthetic construct
  REGION 1..318: note = P43361
MLLGQKSQRYKAEEGLQAQGEAPGLMDVQIPTAEEQKAASSSSTLIMGTLEEVTDSGSPSPPQSPEGASSSLTVTDSTLWSQSDEGSSSNEEEGPSTSPDPAHLESLFREALDEKVAELVRFLLRKYQIKEPVTKAEMLESVIKNYKNHFPDIFSKASECMQVIFGIDVKEVDPAGHSYILVTCLGLSYDGLLGDDQSTPKTGLLIIVLGMILMEGSRAPEEAIWEALSVMGLYDGREHSVYWKLRKLLTQEWVQENYLEYRQAPGSDPVRYEFLWGPRALAETSYVKVLEHVVRVNARVRISYPSLHEEALGEEKGV

SEQ ID NO: 264 - protein, 429 aa, synthetic construct
  REGION 1..429: note = P43364
METQFRRGGLGCSPASIKRKKKREDSGDFGLQVSTMFSEDDFQSTERAPYGPQLQWSQDLPRVQVFREQANLEDRSPRRTQRITGGEQVLWGPITQIFPTVRPADLTRVIMPLEQRSQHCKPEEGLQAQEEDLGLVGAQALQAEEQEAAFFSSTLNVGTLEELPAAESPSPPQSPQEESFSPTAMDAIFGSLSDEGSGSQEKEGPSTSPDLIDPESFSQDILHDKIIDLVHLLLRKYRVKGLITKAEMLGSVIKNYEDYFPEIFREASVCMQLLFGIDVKEVDPTSHSYVLVTSLNLSYDGIQCNEQSMPKSGLLIIVLGVIFMEGNCIPEEVMWEVLSIMGVYAGREHFLFGEPKRLLTQNWVQEKYLVYRQVPGTDPACYEFLWGPRAHAETSKMKVLEYIANANGRDPTSYPSLYEDALREEGEGV

SEQ ID NO: 265 - protein, 369 aa, synthetic construct
  REGION 1..369: note = A0A024RC14
MPRAPKRQRCMPEEDLQSQSETQGLEGAQAPLAVEEDASSSTSTSSSFPSSFPSSSSSSSSSCYPLIPSTPEEVSADDETPNPPQSAQIACSSPSVVASLPLDQSDEGSSSQKEESPSTLQVLPDSESLPRSEIDEKVTDLVQFLLFKYQMKEPITKAEILESVIKNYEDHFPLLFSEASECMLLVFGIDVKEVDPTGHSFVLVTSLGLTYDGMLSDVQSMPKTGILILILSIIFIEGYCTPEEVIWEALNMMGLYDGMEHLIYGEPRKLLTQDWVQENYLEYRQVPGSDPARYEFLWGPRAHAEIRKMSLLKFLAKVNGSDPRSFPLWYEEALKDEEERAQDRIATTDDTTAMASASSSATGSFSYPE

SEQ ID NO: 266 - protein, 314 aa, synthetic construct
  REGION 1..314: note = P43365
MPLEQRSQHCKPEEGLEAQGEALGLVGAQAPATEEQETASSSSTLVEVTLREVPAAESPSPPHSPQGASTLPTTINYTLWSQSDEGSSNEEQEGPSTFPDLETSFQVALSRKMAELVHFLLLKYRAREPFTKAEMLGSVIRNFQDFFPVIFSKASEYLQLVFGIEVVEVVRIGHLYILVTCLGLSYDGLLGDNQIVPKTGLLIIVLAIIAKEGDCAPEEKIWEELSVLEASDGREDSVFAHPRKLLTQDLVQENYLEYRQVPGSDPACYEFLWGPRALVETSYVKVLHHLLKISGGPHISYPPLHEWAFREGEE

SEQ ID NO: 267 - protein, 309 aa, synthetic construct
  REGION 1..309: note = P43355
MSLEQRSLHCKPEEALEAQQEALGLVCVQAATSSSSPLVLGTLEEVPTAGSTDPPQSPQGASAFPTTINFTRQRQPSEGSSSREEEGPSTSCILESLFRAVITKKVADLVGFLLLKYRAREPVTKAEMLESVIKNYKHCFPEIFGKASESLQLVFGIDVKEADPTGHSYVLVTCLGLSYDGLLGDNQIMPKTGFLIIVLVMIAMEGGHAPEEEIWEELSVMEVYDGREHSAYGEPRKLLTQDLVQEKYLEYRQVPDSDPARYEFLWGPRALAETSYVKVLEYVIKVSARVRFFFPSLREAALREEEEGV

SEQ ID NO: 268 - protein, 314 aa, synthetic construct
  REGION 1..314: note = P43356
MPLEQRSQHCKPEEGLEARGEALGLVGAQAPATEEQQTASSSSTLVEVTLGEVPAADSPSPPHSPQGASSFSTTINYTLWRQSDEGSSNQEEEGPRMFPDLESEFQAAISRKMVELVHFLLLKYRAREPVTKAEMLESVLRNCQDFFPVIFSKASEYLQLVFGIEVVEVVPISHLYILVTCLGLSYDGLLGDNQVMPKTGLLIIVLAIIAIEGDCAPEEKIWEELSMLEVFEGREDSVFAHPRKLLMQDLVQENYLEYRQVPGSDPACYEFLWGPRALIETSYVKVLHHTLKIGGEPHISYPPLHERALREGEE

SEQ ID NO: 269 - protein, 314 aa, synthetic construct
  REGION 1..314: note = P43357
MPLEQRSQHCKPEEGLEARGEALGLVGAQAPATEEQEAASSSSTLVEVTLGEVPAAESPDPPQSPQGASSLPTTMNYPLWSQSYEDSSNQEEEGPSTFPDLESEFQAALSRKVAELVHFLLLKYRAREPVTKAEMLGSVVGNWQYFFPVIFSKASSSLQLVFGIELMEVDPIGHLYIFATCLGLSYDGLLGDNQIMPKAGLLIIVLAIIAREGDCAPEEKIWEELSVLEVFEGREDSILGDPKKLLTQHFVQENYLEYRQVPGSDPACYEFLWGPRALVETSYVKVLHHMVKISGGPHISYPPLHEWVLREGEE

SEQ ID NO: 270 - protein, 317 aa, synthetic construct
  REGION 1..317: note = A0A024RC12
MSSEQKSQHCKPEEGVEAQEEALGLVGAQAPTTEEQEAAVSSSSPLVPGTLEEVPAAESAGPPQSPQGASALPTTISFTCWRQPNEGSSSQEEEGPSTSPDAESLFREALSNKVDELAHFLLRKYRAKELVTKAEMLERVIKNYKRCFPVIFGKASESLKMIFGIDVKEVDPASNTYTLVTCLGLSYDGLLGNNQIFPKTGLLIIVLGTIAMEGDSASEEEIWEELGVMGVYDGREHTVYGEPRKLLTQDWVQENYLEYRQVPGSNPARYEFLWGPRALAETSYVKVLEHVVRVNARVRIAYPSLREAALLEEEEGV

SEQ ID NO: 271 - protein, 317 aa, synthetic construct; identical to SEQ ID NO: 270
  REGION 1..317: note = P43358

SEQ ID NO: 272 - protein, 317 aa, synthetic construct
  REGION 1..317: note = Q1RN33
MSSEQKSQHCKPEEGVEAQEEALGLVGAQAPTTEEQEAAVSSSSPLVPGTLEEVPAAESAGPPQSPQGASALPTTISFTCWRQPNEGSSSQEEEGPSTSPDAESLFREALSNKVDELAHFLLRKYRAKELVTKAEMLERVIKNYKRCFPVIFGKASESLKMIFGIDVKEVDPTSNTYTLVTCLGLSYDGLLGNNQIFPKTGLLIIVLGTIAMEGDSASEEEIWEELGVMGVYDGREHTVYGEPRKLLTQDWVQENYLEYRQVPGSNPARYEFLWGPRALAETSYVKVLEHVVRVNARVRIAYPSLREAALLEEEEGV

SEQ ID NO: 273 - protein, 314 aa, synthetic construct [sequence omitted]

SEQ ID NO: 274 - protein, 314 aa, synthetic construct
  REGION 1..314: note = P43360
MPLEQRSQHCKPEEGLEARGEALGLVGAQAPATEEQEAASSSSTLVEVTLGEVPAAESPDPPQSPQGASSLPTTMNYPLWSQSYEDSSNQEEEGPSTFPDLESEFQAALSRKVAKLVHFLLLKYRAREPVTKAEMLGSVVGNWQYFFPVIFSKASDSLQLVFGIELMEVDPIGHVYIFATCLGLSYDGLLGDNQIMPKTGFLIIILAIIAKEGDCAPEEKIWEELSVLEVFEGREDSIFGDPKKLLTQYFVQENYLEYRQVPGSDPACYEFLWGPRALIETSYVKVLHHMVKISGGPRISYPLLHEWALREGEE

SEQ ID NO: 275 - protein, 314 aa, synthetic construct [sequence omitted]

SEQ ID NO: 276 - protein, 315 aa, synthetic construct
  REGION 1..315: note = P43362
MSLEQRSPHCKPDEDLEAQGEDLGLMGAQEPTGEEEETTSSSDSKEEEVSAAGSSSPPQSPQGGASSSISVYYTLWSQFDEGSSSQEEEEPSSSVDPAQLEFMFQEALKLKVAELVHFLLHKYRVKEPVTKAEMLESVIKNYKRYFPVIFGKASEFMQVIFGTDVKEVDPAGHSYILVTALGLSCDSMLGDGHSMPKAALLIIVLGVILTKDNCAPEEVIWEALSVMGVYVGKEHMFYGEPRKLLTQDWVQENYLEYRQVPGSDPAHYEFLWGSKAHAETSYEKVINYLVMLNAREPICYPSLYEEVLGEEQEGV

SEQ ID NO: 277 - protein, 347 aa, synthetic construct
  REGION 1..347: note = Q96LZ2
MPRGQKSKLRAREKRRQARGGLEDLIDALDILEEEEESPPSASACLKDVFQSSLDGASNNPHGLREAQSTSTSATAASHTRHPEGVNDQMEERPICTQDLEATDSFPRGPVDEKVIILVHYLLYKYQMKEPITKADMLRNVTQMSKSQFPVILSRASEHLELIFGLDLKEVEPNKHIYVLVNKLDLGCDAKLSDETGVPKTGLLMTVLGIIFTNGNCVAEEEVWKVFNTMGLYDGIEHFMFGEPRKLLTKDLVKENYLEYQQVPNSDPPRYQFLWGPRAHAETSKMKVLEFLAKVNDTAPSEFSNWYTEALQDEEERARARVAAKARVSATAGARSKVKSSKSSQLQ

SEQ ID NO: 278 - protein, 324 aa, synthetic construct
  REGION 1..324: note = A2A368
MSQDQESPRCTHDQHLQTFSETQSLEVAQVSKALEKTLLSSSHPLVPGKLKEAPAAKAESPLEVPQSFCSSSIAVTTTSSSESDEASSNQEEEDSPSSSEDTSDPRNVPADALDQKVAFLVNFMLHKCQMKKPITKADMLKIIIKDDESHFSEILLRASEHLEMIFGLDVVEVDPTTHCYGLFIKLGLTYDGMLSGEKGVPKTGLLIIVLGVIFMKGNRATEEEVWEVLNLTGVYSGKKHFIFGEPRMLITKDFVKEKYLEYQQVANSDPARYEFLWGPRAKAETSKMKVLEFVAKVHGSYPHSFPSQYAEALKEEEERARARI

SEQ ID NO: 279 - protein, 336 aa, synthetic construct
  REGION 1..336: note = A8MXT2
MPRGQASKRRAREKRRQARGEDQCLGGAQATAAEKEKLPSSSSPACQSPPQSFPNAGIPQESQRASYPSSPASAVSLTSSDEGAKGQKGESPNSFHGPSSSESTGRDLLNTKTGELVQFLLNKYIRKEPITREAMLKVINRKYKQHFPEILRRSTENVEVVFGLYLKEMDPSRQSYVLVGKLDFPNQGSLSDGGGFPLSGLLMVLLSTIFMHGNRATEEEMWECLNALGMYKGRKHFIYGEPQELVTKDLVREGYLEYQQVPSSDPPRYEFLWGPRARAETSKMKVLEFVAKLNDTVASTYKSRYEEALREEEEQARARAVARDSARARASRSFQP

SEQ ID NO: 280 - protein, 347 aa, synthetic construct [sequence omitted]

SEQ ID NO: 281 - protein, 319 aa, synthetic construct
  REGION 1..319: note = O15479
MPRGQKSKLRAREKRRKARDETRGLNVPQVTEAEEEEAPCCSSSVSGGAASSSPAAGIPQEPQRAPTTAAAAAAGVSSTKSKKGAKSHQGEKNASSSQASTSTKSPSEDPLTRKSGSLVQFLLYKYKIKKSVTKGEMLKIVGKRFREHFPEILKKASEGLSVVFGLELNKVNPNGHTYTFIDKVDLTDEESLLSSWDFPRRKLLMPLLGVIFLNGNSATEEEIWEFLNMLGVYDGEEHSVFGEPWKLITKDLVQEKYLEYKQVPSSDPPRFQFLWGPRAYAETSKMKVLEFLAKVNGTTPCAFPTHYEEALKDEEKAGV

SEQ ID NO: 282 - protein, 346 aa, synthetic construct
  REGION 1..346: note = O15480
MPRGQKSTLHAREKRQQTRGQTQDHQGAQITATNKKKVSFSSPLILGATIQKKSAGRSRSALKKPQRALSTTTSVDVSYKKSYKGANSKIEKKQSFSQGLSSTVQSRTDPLIMKTNMLVQFLMEMYKMKKPIMKADMLKIVQKSHKNCFPEILKKASFNMEVVFGVDLKKVDSTKDSYVLVSKMDLPNNGTVTRGRGFPKTGLLLNLLGVIFMKGNCATEEKIWEFLNKMRIYDGKKHFIFGEPRKLITQDLVKLKYLEYRQVPNSNPARYEFLWGPRAHAETSKMKVLEFWAKVNKTVPSAFQFWYEEALRDEEERVQAAAMLNDGSSAMGRKCSKAKASSSSHA

SEQ ID NO: 283 - protein, 346 aa, synthetic construct
  REGION 1..346: note = O15481
MPRGQKSKLRAREKRQRTRGQTQDLKVGQPTAAEKEESPSSSSSVLRDTASSSLAFGIPQEPQREPPTTSAAAAMSCTGSDKGDESQDEENASSSQASTSTERSLKDSLTRKTKMLVQFLLYKYKMKEPTTKAEMLKIISKKYKEHFPEIFRKVSQRTELVFGLALKEVNPTTHSYILVSMLGPNDGNQSSAWTLPRNGLLMPLLSVIFLNGNCAREEEIWEFLNMLGIYDGKRHLIFGEPRKLITQDLVQEKYLEYQQVPNSDPPRYQFLWGPRAHAETSKMKVLEFLAKVNDTTPNNFPLLYEEALRDEEERAGARPRVAARRGTTAMTSAYSRATSSSSSQPM

SEQ ID NO: 284 - protein, 275 aa, synthetic construct
  REGION 1..275: note = Q9BZ81
MTSAGVFNAGSDERANSRDEEYPCSSEVSPSTESSCSNFINIKVGLLEQFLLYKFKMKQRILKEDMLKIVNPRYQNQFAEIHRRASEHIEVVFAVDLKEVNPTCHLYDLVSKLKLPNNGRIHVGKVLPKTGLLMTFLVVIFLKGNCANKEDTWKFLDMMQIYDGKKYYIYGEPRKLITQDFVRLTYLEYHQVPCSYPAHYQFLWGPRAYTETSKMKVLEYLAKVNDIAPGAFSSQYEEALQDEEESPSQRCSRNWHYCSGQDCLRAKFSSFSQPY

SEQ ID NO: 285 - protein, 407 aa, synthetic construct
  REGION 1..407: note = Q8N7X4
MPRGHKSKLRTCEKRQETNGQPQGLTGPQATAEKQEESHSSSSSSRACLGDCRRSSDASIPQESQGVSPTGSPDAVVSYSKSDVAANGQDEKSPSTSRDASVPQESQGASPTGSPDAGVSGSKYDVAANGQDEKSPSTSHDVSVPQESQGASPTGSPDAGVSGSKYDVAAEGEDEESVSASQKAIIFKRLSKDAVKKKACTLAQFLQKKFEKKESILKADMLKCVRREYKPYFPQILNRTSQHLVVAFGVELKEMDSSGESYTLVSKLGLPSEGILSGDNALPKSGLLMSLLVVIFMNGNCATEEEVWEFLGLLGIYDGILHSIYGDARKIITEDLVQDKYVVYRQVCNSDPPCYEFLWGPRAYAETTKMRVLRVLADSSNTSPGLYPHLYEDALIDEVERALRLRA

SEQ ID NO: 286 - protein, 1142 aa, synthetic construct
  REGION 1..1142: note = O60732
MGDKDMPTAGMPSLLQSSSESPQSCPEGEDSQSPLQIPQSSPESDDTLYPLQSPQSRSEGEDSSDPLQRPPEGKDSQSPLQIPQSSPEGDDTQSPLQNSQSSPEGKDSLSPLEISQSPPEGEDVQSPLQNPASSFFSSALLSIFQSSPESTQSPFEGFPQSVLQIPVSAASSSTLVSIFQSSPESTQSPFEGFPQSPLQIPVSRSFSSTLLSIFQSSPERTQSTFEGFAQSPLQIPVSPSSSSTLLSLFQSFSERTQSTFEGFAQSSLQIPVSPSFSSTLVSLFQSSPERTQSTFEGFPQSPLQIPVSSSSSSTLLSLFQSSPERTHSTFEGFPQSLLQIPMTSSFSSTLLSIFQSSPESAQSTFEGFPQSPLQIPGSPSFSSTLLSLFQSSPERTHSTFEGFPQSPLQIPMTSSFSSTLLSILQSSPESAQSAFEGFPQSPLQIPVSSSFSYTLLSLFQSSPERTHSTFEGFPQSPLQIPVSSSSSSSTLLSLFQSSPECTQSTFEGFPQSPLQIPQSPPEGENTHSPLQIVPSLPEWEDSLSPHYFPQSPPQGEDSLSPHYFPQSPPQGEDSLSPHYFPQSPQGEDSLSPHYFPQSPPQGEDSMSPLYFPQSPLQGEEFQSSLQSPVSICSSSTPSSLPQSFPESSQSPPEGPVQSPLHSPQSPPEGMHSQSPLQSPESAPEGEDSLSPLQIPQSPLEGEDSLSSLHFPQSPPEWEDSLSPLHFPQFPPQGEDFQSSLQSPVSICSSSTSLSLPQSFPESPQSPPEGPAQSPLQRPVSSFFSYTLASLLQSSHESPQSPPEGPAQSPLQSPVSSFPSSTSSSLSQSSPVSSFPSSTSSSLSKSSPESPLQSPVISFSSSTSLSPFSEESSSPVDEYTSSSDTLLESDSLTDSESLIESEPLFTYTLDEKVDELARFLLLKYQVKQPITKAEMLTNVISRYTGYFPVIFRKAREFIEILFGISLREVDPDDSYVFVNTLDLTSEGCLSDEQGMSQNRLLILILSIIFIKGTYASEEVIWDVLSGIGVRAGREHFAFGEPRELLTKVWVQEHYLEYREVPNSSPPRYEFLWGPRAHSEVIKRKVVEFLAMLKNTVPITFPSSYKDALKDVEERAQAIIDTTDDSTATESASSSVMSPSFSSE

SEQ ID NO: 287 - protein, 373 aa, synthetic construct
  REGION 1..373: note = Q9UBF1
MPPVPGVPFRNVDNDSPTSVELEDWVDAQHPTDEEEEEASSASSTLYLVFSPSSFSTSSSLILGGPEEEEVPSGVIPNLTESIPSSPPQGPPQGPSQSPLSSCCSSFSWSSFSEESSSQKGEDTGTCQGLPDSESSFTYTLDEKVAELVEFLLLKYEAEEPVTEAEMLMIVIKYKDYFPVILKRAREFMELLFGLALIEVGPDHFCVFANTVGLTDEGSDDEGMPENSLLIIILSVIFIKGNCASEEVIWEVLNAVGVYAGREHFVYGEPRELLTKVWVQGHYLEYREVPHSSPPYYEFLWGPRAHSESIKKKVLEFLAKLNNTVPSSFPSWYKDALKDVEERVQATIDTADDATVMASESLSVMSSNVSFSE

SEQ ID NO: 288 - protein, 643 aa, synthetic construct
  REGION 1..643: note = Q8TD91
MLLPCHWVLDATFSDGSLGQWVKNTCATYALSPVVLPPQPQPRKKATDKDYSAFHLGHLREVRLFLRGGTSDQRMDSLVLCPTYFKLWRTLSGSPGLQLSDLHFGSQPEGKFSLRRAVSVKQREEPQDWPLNEKRTLWKDSDLPTWRRGTGYTLSLPAVSPGKRLWGEKAGSLPESEPLFTYTLDEKVDKLVQFLLLKYQAKEPLTRAEMQMNVINTYTGYFPMIFRKAREFIEILFGISLTEVDPDHFYVFVNTLDLTCEGSLSDEQGMPQNRLLILILSVIFIKGNCASEEVIWEVLNAIGPWSALAGFADVLSRLALWESEGPEAFCEESGLRSAEGSVLDLANPQGLAGHRQEDGRRGLTEASPQQKKGGEDEDMPAAGMPPLPQSPPEIPPQGPPKISPQGPPQSPPQSPLDSCSSPLLWTRLDEESSSEEEDTATWHALPESESLPRYALDEKVAELVQFLLLKYQTKEPVTKAEMLTTVIKKYKDYFPMIFGKAHEFIELIFGIALTDMDPDNHSYFFEDTLDLTYEGSLIDDQGMPKNCLLILILSMIFIKGSCVPEEVIWEVLSAIGPIQRPAREVLEFLSKLSSIIPSAFPSWYMDALKDMEDRAQAIIDTTDDATAMASASPSVMSTNFCPE

SEQ ID NO: 289 - protein, 778 aa, synthetic construct
  REGION 1..778: note = Q9Y5V3
MAQKMDCGAGLLGFQAEASVEDSALLMQTLMEAIQISEAPPTNQATAAASPQSSQPPTANEMADIQVSAAAARPKSAFKVQNATTKGPNGVYDFSQAHNAKDVPNTQPKAAFKSQNATPKGPNAAYDFSQAATTGELAANKSEMAFKAQNATTKVGPNATYNFSQSLNANDLANSRPKTPFKAWNDTTKAPTADTQTQNVNQAKMATSQADIETDPGISEPDGATAQTSADGSQAQNLESRTIIRGKRTRKINNLNVEENSSGDQRRAPLAAGTWRSAPVPVTTQNPPGAPPNVLWQTPLAWQNPSGWQNQTARQTPPARQSPPARQTPPAWQNPVAWQNPVIWPNPVIWQNPVIWPNPIVWPGPVVWPNPLAWQNPPGWQTPPGWQTPPGWQGPPDWQGPPDWPLPPDWPLPPDWPLPTDWPLPPDWIPADWPIPPDWQNLRPSPNLRPSPNSRASQNPGAAQPRDVALLQERANKLVKYLMLKDYTKVPIKRSEMLRDIIREYTDVYPEIIERACFVLEKKFGIQLKEIDKEEHLYILISTPESLAGILGTTKDTPKLGLLLVILGVIFMNGNRASEAVLWEALRKMGLRPGVRHPLLGDLRKLLTYEFVKQKYLDYRRVPNSNPPEYEFLWGLRSYHETSKMKVLRFIAEVQKRDPRDWTAQFMEAADEALDALDAAAAEAEARAEARTRMGIGDEAVSGPWSWDDIEFELLTWDEEGDFGDPWSRIPFTFWARYHQNARSRFPQTFAGPIIGPGGTASANFAANFGAIGFFWVE

SEQ ID NO: 290 - protein, 606 aa, synthetic construct
  REGION 1..606: note = Q9UNF1
MSDTSESGAGLTRFQAEASEKDSSSMMQTLLTVTQNVEVPETPKASKALEVSEDVKVSKASGVSKATEVSKTPEAREAPATQASSTTQLTDTQVLAAENKSLAADTKKQNADPQAVTMPATETKKVSHVADTKVNTKAQETEAAPSQAPADEPEPESAAAQSQENQDTRPKVKAKKARKVKHLDGEEDGSSDQSQASGTTGGRRVSKALMASMARRASRGPIAFWARRASRTRLAAWARRALLSLRSPKARRGKARRRAAKLQSSQEPEAPPPRDVALLQGRANDLVKYLLAKDQTKIPIKRSDMLKDIIKEYTDVYPEIIERAGYSLEKVFGIQLKEIDKNDHLYILLSTLEPTDAGILGTTKDSPKLGLLMVLLSIIFMNGNRSSEAVIWEVLRKLGLRPGIHHSLFGDVKKLITDEFVKQKYLDYARVPNSNPPEYEFFWGLRSYYETSKMKVLKFACKVQKKDPKEWAAQYREAMEADLKAAAEAAAEAKARAEIRARMGIGLGSENAAGPCNWDEADIGPWAKARIQAGAEAKAKAQESGSASTGASTSTNNSASASASTSGGFSAGASLTATLTFGLFAGLGGAGASTSGSSGACGFSYK

SEQ ID NO: 291 - protein, 741 aa, synthetic construct
  REGION 1..741: note = Q96JG8
MAEGSFSVQSESYSVEDMDEGSDEVGEEEMVEGNDYEEFGAFGGYGTLTSFDIHILRAFGSLGPGLRILSNEPWELENPVLAQTLVEALQLDPETLANETAARAANVARAAASNRAARAAAAAARTAFSQVVASHRVATPQVSGEDTQPTTYAAEAQGPTPEPPLASPQTSQMLVTSKMAAPEAPATSAQSQTGSPAQEAATEGPSSACAFSQAPCAREVDANRPSTAFLGQNDVFDFTQPAGVSGMAFPRPKRPAPAQEAATEGPSAASGVPQTGPGREVAATRPKTTKSGKALAKTRWVEPQNVVAAAAAKAKMATSIPEPEGAAAATAQHSAEPWARMGGKRTKKSKHLDDEYESSEEERETPAVPPTWRASQPSLTVRAQLAPRPPMAPRSQIPSRHVLCLPPRNVTLLQERANKLVKYLMIKDYKKIPIKRADMLKDVIREYDEHFPEIIERATYTLEKKFGIHLKEIDKEEHLYILVCTRDSSARLLGKTKDTPRLSLLLVILGVIFMNGNRASEAVLWEALRKMGLRPGVRHPFLGDLRKLITDDFVKQKYLEYKKIPNSNPPEYEFLWGLRARHETSKMRVLRFIAQNQNRDPREWKAHFLEAVDDAFKTMDVDMAEEHARAQMRAQMNIGDEALIGRWSWDDIQVELLTWDEDGDFGDAWARIPFAFWARYHQYILNSNRANRRATWRAGVSSGTNGGASTSVLDGPSTSSTIRTRNAARAGASFFSWIQHR

SEQ ID NO: 292 - protein, 373 aa, synthetic construct [sequence omitted]

SEQ ID NO: 293 - protein, 957 aa, synthetic construct
  REGION 1..957: note = Q9HCI5
MSLVSQNSRRRRRRVAKATAHNSSWGEMQAPNAPGLPADVPGSDVPQGPSDSQILQGLCASEGPSTSVLPTSAEGPSTFVPPTISEASSASGQPTISEGPGTSVLPTPSEGLSTSGPPTISKGLCTSVTLAASEGRNTSRPPTSSEEPSTSVPPTASEVPSTSLPPTPGEGTSTSVPPTAYEGPSTSVVPTPDEGPSTSVLPTPGEGPGTSVPLAATEGLSTSVQATPDEGPSTSVPPTATEGLSTPVPPTRDEGPSTSVPATPGEGPSTSVLPAASDGQSISLVPTRGKGSSTSVPPTATEGLSTSVQPTAGEGSSTSVPPTPGGGLSTSVPPTATEELSTSVPPTPGEGPSTSVLPIPGEGLSTSVPPTASDGSDTSVPPTPGEGASTLVQPTAPDGPGSSVLPNPGEGPSTLFSSSASVDRNPSKCSLVLPSPRVTKASVDSDSEGPKGAEGPIEFEVLRDCESPNSISIMGLNTSRVAITLKPQDPMEQNVAELLQFLLVKDQSKYPIRESEMREYIVKEYRNQFPEILRRAAAHLECIFRFELRELDPEAHTYILLNKLGPVPFEGLEESPNGPKMGLLMMILGQIFLNGNQAKEAEIWEMLWRMGVQRERRLSIFGNPKRLLSVEFVWQRYLDYRPVTDCKPVEYEFFWGPRSHLETTKMKILKFMAKIYNKDPMDWPEKYNEALEEDAARAFAEGWQALPHFRRPFFEEAAAEVPSPDSEVSSYSSKYAPHSWPESRLESKARKLVQLFLLMDSTKLPIPKKGILYYIGRECSKVFPDLLNRAARTLNHVYGTELVVLDPRNHSYTLYNRREMEETEEIVDSPNRPGNNFLMQVLSFIFIMGNHARESAVWAFLRGLGVQAGRKHVITCRYLSQRYIDSLRVPDSDPVQYEFVWGPRARLETSKMKALRYVARIHRKEPQDWPQQYREAMEDEANRADVGHRQIFVHNFR

SEQ ID NO: 294 - protein, 523 aa, synthetic construct
  REGION 1..523: note = Q8TD90
MSLVSQNARHCSAEITADYGDGRGEIQATNASGSPTSMLVVDAPQCPQAPINSQCVNTSQAVQDPNDLEVLIDEQSRRLGALRVHDPLEDRSIALVNFMRMKSQTEGSIQQSEMLEFLREYSDQFPEILRRASAHLDQVFGLNLRVIDPQADTYNLVSKRGFQITDRIAESLDMPKASLLALVLGHILLNGNRAREASIWDLLLKVDMWDKPQRINNLFGNTRNLLTTDFVCMRFLEYWPVYGTNPLEFEFLWGSRAHREITKMEALKFVSDAHDEEPWSWPEEYNKALEGDKTKERSLTAGLEFWSEDTMNDKANDLVQLAISVTEEMLPIHQDELLAHTGKEFEDVFPNILNRATLILDMFYGLSLIEVDTSEHIYLLVQQPESEEEQVMLESLGRPTQEYVMPILGLIFLMGNRVKEANVWNLLRRFSVDVGRKHSITRKLMRQRYLECRPLSYSNPVEYELLWGPRAHHETIKMKVLEYMARLYRKRPQNWPEQYREAVEDEEARAKSEATIMFFLDPT

SEQ ID NO: 295 - protein, 307 aa, synthetic construct
  REGION 1..307: note = Q9HAY2
MLQTPESRGLPVPQAEGEKDGGHDGETRAPTASQERPKEELGAGREEGAAEPALTRKGARALAAKALARRRAYRRLNRTVAELVQFLLVKDKKKSPITRSEMVKYVIGDLKILFPDIIARAAEHLRYVFGFELKQFDRKHHTYILINKLKPLEEEEEEDLGGDGPRLGLLMMILGLIYMRGNSAREAQVWEMLRRLGVQPSKYHFLFGYPKRLIMEDFVQQRYLSYRRVPHTNPPEYEFSWGPRSNLEISKMEVLGFVAKLHKKEPQHWPVQYREALADEADRARAKARAEASMRARASARAGIHLW

SEQ ID NO: 296 - protein, 219 aa, synthetic construct
  REGION 1..219: note = Q9H213
MPRGRKSRRRRNARAAEENRNNRKIQASEASETPMAASVVASTPEDDLSGPEEDPSTPEEASTTPEEASSTAQAQKPSVPRSNFQGTKKSLLMSILALIFIMGNSAKEALVWKVLGKLGMQPGRQHSIFGDPKKIVTEEFVRRGYLIYKPVPRSSPVEYEFFWGPRAHVESSKLKVMHFVARVRNRCSKDWPCNYDWDSDDDAEVEAILNSGARGYSAP

SEQ ID NO: 297 - protein, 1249 aa, synthetic construct
  REGION 1..1249: note = Q9UJ55
MSQLSKNLGDSSPPAEAPKPPVYSRPTVLMRAPPASSRAPPVPWDPPPIDLQASLAAWQAPQPAWEAPQGQLPAPVVPMTQPPALGGPIVPAPPLGGPMGKPPTPGVLMVHPPPPGAPMAQPPTPGVLMVHPSAPGAPMAHPPPPGTPMSHPPPPGTPMAHPPPPGTPMAHPPPPGTPMVHPPPPGTPMAHPPPPGTPMAHPPPPGTPMAHPPPPGTPMAHPPPPGTPMAQPPAPGVLMAQPLTPGVLMVQPAAPGAPMVQPPPAAMMTQPQPSGAPMAKPPGPGVLMIHPPGARAPMTQPPASGAPMAQPAAPPAQPMAPPAQPMASWAPQAQPLILQIQSQVIRAPPQVPQGPQAPPAQLATPPGWQATSPGWQATQQGWQATPLTWQTTQVTWQAPAVTWQVPPPMRQGPPPIRPGPPPIRPGPPPVRQAPPLIRQAPPVIRQAPPVIRQAPPVIRQAPAVIRQAPPVIRQAPPVIRQAPPVIRQAPPLIRQAPPPIRPAPQVLATQPPLWQALPPPPPLRQAPQARLPAPQVQAAPQVPTAPPATQVPAAPPAGPQVPQPVLPAPLSAPLSAPQAVHCPSIIWQAPKGQPPVPHEIPTSMEFQEVQQTQALAWQAQKAPTHIWQPLPAQEAQRQAPPLVQLEQPFQGAPPSQKAVQIQLPPQQAQASGPQAEVPTLPLQPSWQAPPAVLQAQPGPPVAAANFPLGSAKSLMTPSGECRASSIDRRGSSKERRTSSKERRAPSKDRMIFAATFCAPKAVSAARAHLPAAWKNLPATPETFAPSSSVFPATSQFQPASLNAFKGPSAASETPKSLPYALQDPFACVEALPAVPWVPQPNMNASKASQAVPTFLMATAAAPQATATTQEASKTSVEPPRRSGKATRKKKHLEAQEDSRGHTLAFHDWQGPRPWENLNLSDWEVQSPIQVSGDWEHPNTPRGLSGWEGPSTSRILSGWEGPSASWALSAWEGPSTSRALGLSESPGSSLPVVVSEVASVSPGSSATQDNSKVEAQPLSPLDERANALVQFLLVKDQAKVPVQRSEMVKVILREYKDECLDIINRANNKLECAFGYQLKEIDTKNHAYIIINKLGYHTGNLVASYLDRPKFGLLMVVLSLIFMKGNCVREDLIFNFLFKLGLDVRETNGLFGNTKKLITEVFVRQKYLEYRRIPYTEPAEYEFLWGPRAFLETSKMLVLRFLAKLHKKDPQSWPFHYLEALAECEWEDTDEDEPDTGDSAHGPTSRPPPR

SEQ ID NO: 298 - protein, 93 aa, synthetic construct
  REGION 1..93: note = Q13296
MKLLMVLMLAALSQHCYAGSGCPLLENVISKTINPQVSKTEYKELLQEFIDDNATTNAIDELKECFLNQTDETLSNVEVFMQLIYDSSLCDLF

SEQ ID NO: 299 - protein, 120 aa, synthetic construct
  REGION 1..120: note = Q6NX70
MKLLMVLMLAALSQHCYAGSGCPLLENVISKTINPQVSKTEYKELLQEFIDDNATTNAIDELKECFLNQTDETLSNVEVFMVISFSSYKLFKSPDQGQVGSSFLTDNAKATSEQAFSYIG

SEQ ID NO: 300 - protein, 118 aa, synthetic construct
  REGION 1..118: note = Q16655
MPREDAHFIYGYPKKGHGHSYTTAEEAAGIGILTVILGVLLLIGCWYCRRRNGYRALMDKSLHVGTQCALTRRCPQEGFDHRDSKVSLQEKNCEPVVPNAPPAYEKLSAEQSPPPYSP

SEQ ID NO: 301 - protein, 493 aa, synthetic construct
  REGION 1..493: note = Q5VTY9
MLPRWELALYLLASLGFHFYSFYEVYKVSREHEEELDQEFELETDTLFGGLKKDATDFEWSFWMEWGKQWLVWLLLGHMVVSQMATLLARKHRPWILMLYGMWACWCVLGTPGVAMVLLHTTISFCVAQFRSQLLTWLCSLLLLSTLRLQGVEEVKRRWYKTENEYYLLQFTLTVRCLYYTSFSLELCWQQLPAASTSYSFPWMLAYVFYYPVLHNGPILSFSEFIKQMQQQEHDSLKASLCVLALGLGRLLCWWWLAELMAHLMYMHAIYSSIPLLETVSCWTLGGLALAQVLFFYVKYLVLFGVPALLMRLDGLTPPALPRCVSTMFSFTGMWRYFDVGLHNFLIRYVYIPVGGSQHGLLGTLFSTAMTFAFVSYWHGGYDYLWCWAALNWLGVTVENGVRRLVETPCIQDSLARYFSPQARRRFHAALASCSTSMLILSNLVFLGGNEVGKTYWNRIFIQGWPWVTLSVLGFLYCYSHVGIAWAQTYATD

SEQ ID NO: 302 - protein, 317 aa, synthetic construct
  REGION 1..317: note = Q01726
MAVQGSQRRLLGSLNSTPTAIPQLGLAANQTGARCLEVSISDGLFLSLGLVSLVENALVVATIAKNRNLHSPMYCFICCLALSDLLVSGSNVLETAVILLLEAGALVARAAVLQQLDNVIDVITCSSMLSSLCFLGAIAVDRYISIFYALRYHSIVTLPRARRAVAAIWVASVVFSTLFIAYYDHVAVLLCLVVFFLAMLVLMAVLYVHMLARACQHAQGIARLHKRQRPVHQGFGLKGAVTLTILLGIFFLCWGPFFLHLTLIVLCPEHPTCGCIFKNFNLFLALIICNAIIDPLIYAFHSQELRRTLKEVLTCSW

SEQ ID NO: 303 - protein, 317 aa, synthetic construct; identical to SEQ ID NO: 302
  REGION 1..317: note = Q1JUL4

SEQ ID NO: 304 - protein, 317 aa, synthetic construct
  REGION 1..317: note = Q1JUL6
MAVQGSQRRLLGSLNSTPTAIPQLGLAANQTGARCLEVSISDGLFLSLGLVSLVENALVVATIAKNRNLHSPMYCFICCLALSDLLVSGSNVLETAVILLLEAGALVARAAVLQQLDNVIDVITCSSMLSSLCFLGAIAVDRYISIFYALRYHSIVTLPRARQAVAAIWVASVVFSTLFIAYYDHVAVLLCLVVFFLAMLVLMAVLYVHMLARACQHAQGIARLHKRQRPVHQGFGLKGAVTLTILLGIFFLCWGPFFLHLTLIVLCPEHPTCGCIFKNFNLFLALIICNAIIDPLIYAFHSQELRRTLKEVLTCSW

SEQ ID NO: 305 - protein, 317 aa, synthetic construct
  REGION 1..317: note = Q1JUL8
MAVQGSQRRLLGSLNSTPTAIPQLGLAANQTGARCLEVSISDGLFLSLGLVSLVENALVVATIAKNRNLHSPMYCFICCLALSDLLVSGSNVLETAVILLLEAGALVARAAVLQQLDNVTDVITCSSMLSSLCFLGAIAVDRYISIFYALRYHSIVTLPRARRAVAAIWVASVVFSTLFIAYYDHVAVLLCLVVFFLAMLVLMAVLYVHMLARACQHAQGIARLHKRQRPVHQGFGLKGAVTLTILLGIFFLCWGPFFLHLTLIVLCPEHPTCGCIFKNFNLFLALIICNAIIDPLIYAFHSQELRRTLKEVLTCSW

SEQ ID NO: 306 - protein, 317 aa, synthetic construct [sequence omitted]

SEQ ID NO: 307 - protein, 317 aa, synthetic construct [sequence omitted]

SEQ ID NO: 308 - protein, 317 aa, synthetic construct [sequence omitted]

SEQ ID NO: 309 - protein, 317 aa, synthetic construct [sequence omitted]

SEQ ID NO: 310 - protein, 317 aa, synthetic construct [sequence omitted]

SEQ ID NO: 311 - protein, 316 aa, synthetic construct
  REGION 1..316: note = Q1JUM5
MAVQGSQRRLLGSLNSTPTAIPQLGLAANQTGARCLEVSISDGLFLSLGLVSLVENALVVATIAKNRNLHSPMYCFICCLALSDLLVSGSNVLETAVILLLEAGALVARAAVLQQLDNVIDVITCSSMLSSLCFLGAIAVDRYISIYALRYHSIVTLPRARQAVAAIWVASVVFSTLFIAYYDHVAVLLCLVVFFLAMLVLMAVLYVHMLARACQHAQGIARLHKRQRPVHQGFGLKGAVTLTILLGIFFLCWGPFFLHLTLIVLCPEHPTCGCIFKNFNLFLALIICNAIIDPLIYAFHSQELRRTLKEVLTCSW

SEQ ID NO: 312 - protein, 317 aa, synthetic construct [sequence omitted]

SEQ ID NO: 313 - protein, 317 aa, synthetic construct [sequence omitted]

SEQ ID NO: 314 - protein, 317 aa, synthetic construct [sequence omitted]

SEQ ID NO: 315 - protein, 317 aa, synthetic construct [sequence omitted]

SEQ ID NO: 316 - protein, 317 aa, synthetic construct [sequence omitted]

SEQ ID NO: 317 - protein, 317 aa, synthetic construct [sequence omitted]

SEQ ID NO: 318 - protein, 317 aa, synthetic construct [sequence omitted]

SEQ ID NO: 319 - protein, 317 aa, synthetic construct [sequence omitted]

SEQ ID NO: 320 - protein, 317 aa, synthetic construct [sequence omitted]

SEQ ID NO: 321 - protein, 317 aa, synthetic construct [sequence omitted]

SEQ ID NO: 322 - protein, 317 aa, synthetic construct [sequence omitted]

SEQ ID NO: 323 - protein, 317 aa, synthetic construct [sequence omitted]

SEQ ID NO: 324 - protein, 317 aa, synthetic construct
  REGION 1..317: note = V9Q7F1
MAVQGSQRRLLGSLNSTPTAIPQLGLAANQTGARCLEVSISDGLFLSLGLVSLVENALVVATIAKNRNLHSPMYCFICCLALSDLLVSGSNVLETAVILLLEAGALVARAAVLQQLDNVIDVITCSSMLSSLCFLGAIAVDRYISIFYALRYHSTVTLPRARRAVAAIWVASVVFSTLFIAYYDHVAVLLCLVVFFLAMLVLMAVLYVHMLARACQHAQGIARLHKRQRPVHQGFGLKGAVTLTILLGIFFLCWGPFFLHLTLIVLCPEHPTCGCIFKNFNLFLALIICNAIIDPLIYAFHSQELRRTLKEVLTCSW

SEQ ID NO: 325 - protein, 317 aa, synthetic construct [sequence omitted]

SEQ ID NO: 326 - protein, 317 aa, synthetic construct [sequence omitted]

SEQ ID NO: 327 - protein, 317 aa, synthetic construct [sequence omitted]

SEQ ID NO: 328 - protein, 317 aa, synthetic construct [sequence omitted]

SEQ ID NO: 329 - protein, 317 aa, synthetic construct [sequence omitted]

SEQ ID NO: 330 - protein, 317 aa, synthetic construct [sequence omitted]

SEQ ID NO: 331 - protein, 317 aa, synthetic construct [sequence omitted]

SEQ ID NO: 332 - protein, 317 aa, synthetic construct [sequence omitted]

SEQ ID NO: 333 - protein, 317 aa, synthetic construct [sequence omitted]

SEQ ID NO: 334 - protein, 317 aa, synthetic construct [sequence omitted]

SEQ ID NO: 335 - protein, 317 aa, synthetic construct [sequence omitted]

SEQ ID NO: 336 - protein, 317 aa, synthetic construct [sequence omitted]

SEQ ID NO: 337 - protein, 317 aa, synthetic construct [sequence omitted]

SEQ ID NO: 338 - protein, 317 aa, synthetic construct [sequence omitted]

SEQ ID NO: 339 - protein, 317 aa, synthetic construct [sequence omitted]

SEQ ID NO: 340 - protein, 317 aa, synthetic construct [sequence omitted]

SEQ ID NO: 341 - protein, 554 aa, synthetic construct
  REGION 1..554: note = P09603
MTAPGAAGRCPPTTWLGSLLLLVCLLASRSITEEVSEYCSHMIGSGHLQSLQRLIDSQMETSCQITFEFVDQEQLKDPVCYLKKAFLLVQDIMEDTMRFRDNTPNAIAIVQLQELSLRLKSCFTKDYEEHDKACVRTFYETPLQLLEKVKNVFNETKNLLDKDWNIFSKNCNNSFAECSSQDVVTKPDCNCLYPKAIPSSDPASVSPHQPLAPSMAPVAGLTWEDSEGTEGSSLLPGEQPLHTVDPGSAKQRPPRSTCQSFEPPETPVVKDSTIGGSPQPRPSVGAFNPGMEDILDSAMGTNWVPEEASGEASEIPVPQGTELSPSRPGGGSMQTEPARPSNFLSASSPLPASAKGQQPADVTGTALPRVGPVRPTGQDWNHTPQKTDHPSALLRDPPEPGSPRISSLRPQGLSNPSTLSAQPQLSRSHSSGSVLPLGELEGRRSTRDRRSPAEPEGGPASEGAARPLPRFNSVPLTDTGHERQSEGSFSPQLQESVFHLLVPSVILVLLAVGGLLFYRWRRRSHQEPQRADSPLEQPEGSPLTQDDRQVELPV

SEQ ID NO: 342 - protein, 630 aa, synthetic construct
  REGION 1..630: note = Q13421
MALPTARPLLGSCGTPALGSLLFLLFSLGWVQPSRTLAGETGQEAAPLDGVLANPPNISSLSPRQLLGFPCAEVSGLSTERVRELAVALAQKNVKLSTEQLRCLAHRLSEPPEDLDALPLDLLLFLNPDAFSGPQACTRFFSRITKANVDLLPRGAPERQRLLPAALACWGVRGSLLSEADVRALGGLACDLPGRFVAESAEVLLPRLVSCPGPLDQDQQEAARAALQGGGPPYGPPSTWSVSTMDALRGLLPVLGQPIIRSIPQGIVAAWRQRSSRDPSWRQPERTILRPRFRREVEKTACPSGKKAREIDESLIFYKKWELEACVDAALLATQMDRVNAIPFTYEQLDVLKHKLDELYPQGYPESVIQHLGYLFLKMSPEDIRKWNVTSLETLKALLEVNKGHEMSPQAPRRPLPQVATLIDRFVKGRGQLDKDTLDTLTAFYPGYLCSLSPEELSSVPPSSIWAVRPQDLDTCDPRQLDVLYPKARLAFQNMNGSEYFVKIQSFLGGAPTEDLKALSQQNVSMDLATFMKLRTDAVLPLTVAEVQKLLGPHVEGLKAEERHRPVRDWILRQRQDDLDTLGLGLQGGIPNGYLVLDLSMQEALSGTPCLLGPGPVLTVLALLLASTLA

SEQ ID NO: 343 - protein, 504 aa, synthetic construct
  REGION 1..504: note = O75030-8
MEALRVQMFMPCSFESLYLSSAEHPGASKPPISSSSMTSRILLRQQLMREQMQEQERREQQQKLQAAQFMQQRVPVSQTPAINVSVPTTLPSATQVPMEVLKVQTHLENPTKYHIQQAQRQQVKQYLSTTLANKHANQVLSLPCPNQPGDHVMPPVPGSSAPNSPMAMLTLNSNCEKEGFYKFEEQNRAESECPGMNTHSRASCMQMDDVIDDIISLESSYNEEILGLMDPALQMANTLPVSGNLIDLYGNQGLPPPGLTISNSCPANLPNIKRELTESEARALAKERQKKDNHNLIERRRRFNINDRIKELGTLIPKSNDPDMRWNKGTILKASVDYIRKLQREQQRAKELENRQKKLEHANRHLLLRIQELEMQARAHGLSLIPSTGLCSPDLVNRIIKQEPVLENCSQDLLQHHADLTCTTTLDLTDGTITFNNNLGTGTEANQAYSVPTKMGSKLEDILMDDTLSPVGVTDPLLSSVSPGASKTSSRRSSMSMEETEHTC

SEQ ID NO: 344 - protein, 419 aa, synthetic construct
  REGION 1..419: note = O75030-9
MLEMLEYNHYQVQTHLENPTKYHIQQAQRQQVKQYLSTTLANKHANQVLSLPCPNQPGDHVMPPVPGSSAPNSPMAMLTLNSNCEKEGFYKFEEQNRAESECPGMNTHSRASCMQMDDVIDDIISLESSYNEEILGLMDPALQMANTLPVSGNLIDLYGNQGLPPPGLTISNSCPANLPNIKRELTACIFPTESEARALAKERQKKDNHNLIERRRRFNINDRIKELGTLIPKSNDPDMRWNKGTILKASVDYIRKLQREQQRAKELENRQKKLEHANRHLLLRIQELEMQARAHGLSLIPSTGLCSPDLVNRIIKQEPVLENCSQDLLQHHADLTCTTTLDLTDGTITFNNNLGTGTEANQAYSVPTKMGSKLEDILMDDTLSPVGVTDPLLSSVSPGASKTSSRRSSMSMEETEHTC

SEQ ID NO: 345 - protein, 526 aa, synthetic construct
  REGION 1..526: note = O75030
MQSESGIVPDFEVGEEFHEEPKTYYELKSQPLKSSSSAEHPGASKPPISSSSMTSRILLRQQLMREQMQEQERREQQQKLQAAQFMQQRVPVSQTPAINVSVPTTLPSATQVPMEVLKVQTHLENPTKYHIQQAQRQQVKQYLSTTLANKHANQVLSLPCPNQPGDHVMPPVPGSSAPNSPMAMLTLNSNCEKEGFYKFEEQNRAESECPGMNTHSRASCMQMDDVIDDIISLESSYNEEILGLMDPALQMANTLPVSGNLIDLYGNQGLPPPGLTISNSCPANLPNIKRELTACIFPTESEARALAKERQKKDNHNLIERRRRFNINDRIKELGTLIPKSNDPDMRWNKGTILKASVDYIRKLQREQQRAKELENRQKKLEHANRHLLLRIQELEMQARAHGLSLIPSTGLCSPDLVNRIIKQEPVLENCSQDLLQHHADLTCTTTLDLTDGTITFNNNLGTGTEANQAYSVPTKMGSKLEDILMDDTLSPVGVTDPLLSSVSPGASKTSSRRSSMSMEETEHTC

SEQ ID NO: 346 - protein, 354 aa, synthetic construct [sequence omitted]

SEQ ID NO: 347 - protein, 267 aa, synthetic construct
  REGION 1..267: note = P09237
MRLTVLCAVCLLPGSLALPLPQEAGGMSELQWEQAQDYLKRFYLYDSETKNANSLEAKLKEMQKFFGLPITGMLNSRVIEIMQKPRCGVPDVAEYSLFPNSPKWTSKVVTYRIVSYTRDLPHITVDRLVSKALNMWGKEIPLHFRKVVWGTADIMIGFARGAHGDSYPFDGPGNTLAHAFAPGTGLGGDAHFDEDERWTDGSSLGINFLYAATHELGHSLGMGHSSDPNAVMYPTYGNGDPQNFKLSQDDIKGIQKLYGKRSNSRKK

SEQ ID NO: 348 - protein, 1255 aa, synthetic construct
  REGION 1..1255: note = AAA60019
MTPGTQSPFFLLLLLTVLTVVTGSGHASSTPGGEKETSATQRSSVPSSTEKNAVSMTSSVLSSHSPGSGSSTTQGQDVTLAPATEPASGSAATWGQDVTSVPVTRPALGSTTPPAHDVTSAPDNKPAPGSTAPPAHGVTSAPDTRPAPGSTAPPAHGVTSAPDTRPAPGSTAPPAHGVTSAPDTRPAPGSTAPPAHGVTSAPDTRPAPGSTAPPAHGVTSAPDTRPAPGSTAPPAHGVTSAPDTRPAPGSTAPPAHGVTSAPDTRPAPGSTAPPAHGVTSAPDTRPAPGSTAPPAHGVTSAPDTRPAPGSTAPPAHGVTSAPDTRPAPGSTAPPAHGVTSAPDTRPAPGSTAPPAHGVTSAPDTRPAPGSTAPPAHGVTSAPDTRPAPGSTAPPAHGVTSAPDTRPAPGSTAPPAHGVTSAPDTRPAPGSTAPPAHGVTSAPDTRPAPGSTAPPAHGVTSAPDTRPAPGSTAPPAHGVTSAPDTRPAPGSTAPPAHGVTSAPDTRPAPGSTAPPAHGVTSAPDTRPAPGSTAPPAHGVTSAPDTRPAPGSTAPPAHGVTSAPDTRPAPGSTAPPAHGVTSAPDTRPAPGSTAPPAHGVTSAPDTRPAPGSTAPPAHGVTSAPDTRPAPGSTAPPAHGVTSAPDTRPAPGSTAPPAHGVTSAPDTRPAPGSTAPPAHGVTSAPDTRPAPGSTAPPAHGVTSAPDTRPAPGSTAPPAHGVTSAPDTRPAPGSTAPPAHGVTSAPDTRPAPGSTAPPAHGVTSAPDTRPAPGSTAPPAHGVTSAPDTRPAPGSTAPPAHGVTSAPDTRPAPGSTAPPAHGVTSAPDTRPAPGSTAPPAHGVTSAPDTRPAPGSTAPPAHGVTSAPDTRPAPGSTAPPAHGVTSAPDTRPAPGSTAPPAHGVTSAPDTRPAPGSTAPPAHGVTSAPDTRPAPGSTAPPAHGVTSAPDNRPALGSTAPPVHNVTSASGSASGSASTLVHNGTSARATTTPASKSTPFSIPSHHSDTPTTLASHSTKTDASSTHHSSVPPLTSSNHSTSPQLSTGVSFFFLSFHISNLQFNSSLEDPSTDYYQELQRDISEMFLQIYKQGGFLGLSNIKFRPGSVVVQLTLAFREGTINVHDVETQFNQYKTEAASRYNLTISDVSVSDVPFPFSAQSGAGVPGWGIALLVLVCVLVALAIVYLIALAVCQCRRKNYGQLDIFPARDTYHPMSEYPTYHTHGRYVPPSSTDRSPYEKVSAGNGGSSLSYTNPAVAAASANL

SEQ ID NO: 349 - protein, 711 aa, synthetic construct
  REGION 1..711: note = NP_116242
MMADAKYVLCRWEKRLWPAKVLARTATSTKNKRRKEYFLAVQILSLEEKIKVKSTEVEILEKSQIEAIASSLASQNEVPAAPLEELAYRRSLRVALDVLSEGSIWSQESSAGTGRADRSLRGKPMEHVSSPCDSNSSSLPRGDVLGSSRPHRRRPCVQQSLSSSFTCEKDPECKVDHKKGLRKSENPRGPLVLPAGGGAQDESGSRIHHKNWTLASKRGGNSAQKASLCLNGSSLSEDDTERDMGSKGGSWAAPSLPSGVREDDPCANAEGHDPGLPLGSLTAPPAPEPSACSEPGECPAKKRPRLDGSQRPPAVQLEPMAAGAAPSPGPGPGPRESVTPRSTARLGPPPSHASADATRCLPCPDSQKLEKECQSSEESMGSNSMRSILEEDEEDEEPPRVLLYHEPRSFEVGMLVWHKHKKYPFWPAVVKSVRQRDKKASVLYIEGHMNPKMKGFTVSLKSLKHFDCKEKQTLLNQAREDFNQDIGWCVSLITDYRVRLGCGSFAGSFLEYYAADISYPVRKSIQQDVLGTKLPQLSKGSPEEPVVGCPLGQRQPCRKMLPDRSRAARDRANQKLVEYIVKAKGAESHLRAILKSRKPSRWLQTFLSSSQYVTCVETYLEDEGQLDLVVKYLQGVYQEVGAKVLQRTNGDRIRFILDVLLPEAIICAISAVDEVDYKTAEEKYIKGPSLSYREKEIFDNQLLEERNRRRR

SEQ ID NO: 350 - protein, 145 aa, synthetic construct
  REGION 1..145: note = Q9Y5R8
MTVHNLYLFDRNGVCLHYSEWHRKKQAGIPKEEEYKLMYGMLFSIRSFVSKMSPLDMKDGFLAFQTSRYKLHYYETPTGIKVVMNTDLGVGPIRDVLHHIYSALYVELVVKNPLCPLGQTVQSELFRSRLDSYVRSLPFFSARAG

SEQ ID NO: 351 - protein, 464 aa, synthetic construct
  REGION 1..464: note = P04198
MPSCSTSTMPGMICKNPDLEFDSLQPCFYPDEDDFYFGGPDSTPPGEDIWKKFELLPTPPLSPSRGFAEHSSEPPSWVTEMLLENELWGSPAEEDAFGLGGLGGLTPNPVILQDCMWSGFSAREKLERAVSEKLQHGRGPPTAGSTAQSPGAGAASPAGRGHGGAAGAGRAGAALPAELAHPAAECVDPAVVFPFPVNKREPAPVPAAPASAPAAGPAVASGAGIAAPAGAPGVAPPRPGGRQTSGGDHKALSTSGEDTLSDSDDEDDEEEDEEEEIDVVTVEKRRSSSNTKAVTTFTITVRPKNAALGPGRAQSSELILKRCLPIHQQHNYAAPSPYVESEDAPPQKKIKSEASPRPLKSVIPPKAKSLSPRNSDSEDSERRRNHNILERQRRNDLRSSFLTLRDHVPELVKNEKAAKVVILKKATEYVHSLQAEEHQLLLEKEKLQARQQQLLKKIEHARTC

SEQ ID NO: 352 - protein, 1043 aa, synthetic construct
  REGION 1..1043: note = Q9UBC5
MPLLEGSVGVEDLVLLEPLVEESLLKNLQLRYENKEIYTYIGNVVISVNPYQQLPIYGPEFIAKYQDYTFYELKPHIYALANVAYQSLRDRDRDQCILITGESGSGKTEASKLVMSYVAAVCGKGEQVNSVKEQLLQSNPVLEAFGNAKTIRNNNSSRFGKYMDIEFDFKGSPLGGVITNYLLEKSRLVKQLKGERNFHIFYQLLAGADEQLLKALKLERDTTGYAYLNHEVSRVDGMDDASSFRAVQSAMAVIGFSEEEIRQVLEVTSMVLKLGNVLVADEFQASGIPASGIRDGRGVREIGEMVGLNSEEVERALCSRTMETAKEKVVTALNVMQAQYARDALAKNIYSRLFDWIVNRINESIKVGIGEKKKVMGVLDIYGFEILEDNSFEQFVINYCNEKLQQVFIEMTLKEEQEEYKREGIPWTKVDYFDNGIICKLIEHNQRGILAMLDEECLRPGVVSDSTFLAKLNQLFSKHGHYESKVTQNAQRQYDHTMGLSCFRICHYAGKVTYNVTSFIDKNNDLLFRDLLQAMWKAQHPLLRSLFPEGNPKQASLKRPPTAGAQFKSSVAILMKNLYSKSPNYIRCIKPNEHQQRGQFSSDLVATQARYLGLLENVRVRRAGYAHRQGYGPFLERYRLLSRSTWPHWNGGDREGVEKVLGELSMSSGELAFGKTKIFIRSPKTLFYLEEQRRLRLQQLATLIQKIYRGWRCRTHYQLMRKSQILISSWFRGNMQKKCYGKIKASVLLIQAFVRGWKARKNYRKYFRSEAALTLADFIYKSMVQKFLLGLKNNLPSTNVLDKTWPAAPYKCLSTANQELQQLFYQWKCKRFRDQLSPKQVEILREKLCASELFKGKKASYPQSVPIPFCGDYIGLQGNPKLQKLKGGEEGPVLMAEAVKKVNRGNGKTSSRILLLTKGHVILTDTKKSQAKIVIGLDNVAGVSVTSLKDGLFSLHLSEMSSVGSKGDFLLVSEHVIELLTKMYRAVLDATQRQLTVTVTEKFSVRFKENSVAVKVVQGPAGGDNSKLRYKKKGSHCLEVTVQ

SEQ ID NO: 353 - protein, 1136 aa, synthetic construct
  REGION 1..1136: note = O43795
MAKMEVKTSLLDNMIGVGDMVLLEPLNEETFINNLKKRFDHSEIYTYIGSVVISVNPYRSLPIYSPEKVEEYRNRNFYELSPHIFALSDEAYRSLRDQDKDQCILITGESGAGKTEASKLVMSYVAAVCGKGAEVNQVKEQLLQSNPVLEAFGNAKTVRNDNSSRFGKYMDIEFDFKGDPLGGVISNYLLEKSRVVKQPRGERNFHVFYQLLSGASEELLNKLKLERDFSRYNYLSLDSAKVNGVDDAANFRTVRNAMQIVGFMDHEAESVLAVVAAVLKLGNIEFKPESRVNGLDESKIKDKNELKEICELTGIDQSVLERAFSFRTVEAKQEKVSTTLNVAQAYYARDALAKNLYSRLFSWLVNRINESIKAQTKVRKKVMGVLDIYGFEIFEDNSFEQFIINYCNEKLQQIFIELTLKEEQEEYIREDIEWTHIDYFNNAIICDLIENNTNGILAMLDEECLRPGTVTDETFLEKLNQVCATHQHFESRMSKCSRFLNDTSLPHSCFRIQHYAGKVLYQVEGFVDKNNDLLYRDLSQAMWKASHALIKSLFPEGNPAKINLKRPPTAGSQFKASVATLMKNLQTKNPNYIRCIKPNDKKAAHIFNEALVCHQIRYLGLLENVRVRRAGYAFRQAYEPCLERYKMLCKQTWPHWKGPARSGVEVLFNELEIPVEEYSFGRSKIFIRNPRTLFKLEDLRKQRLEDLATLIQKIYRGWKCRTHFLLMKKSQIVIAAWYRRYAQQKRYQQTKSSALVIQSYIRGWKARKILRELKHQKRCKEAVTTIAAYWHGTQARRELRRLKEEARNKHAIAVIWAYWLGSKARRELKRLKEEARRKHAVAVIWAYWLGLKVRREYRKFFRANAGKKIYEFTLQRIVQKYFLEMKNKMPSLSPIDKNWPSRPYLFLDSTHKELKRIFHLWRCKKYRDQFTDQQKLIYEEKLEASELFKDKKALYPSSVGQPFQGAYLEINKNPKYKKLKDAIEEKIIIAEVVNKINRANGKSTSRIFLLTNNNLLLADQKSGQIKSEVPLVDVTKVSMSSQNDGFFAVHLKEGSEAASKGDFLFSSDHLIEMATKLYRTTLSQTKQKLNIEISDEFLVQFRQDKVCVKFIQGNQKNGSVPTCKRKNNRLLEVAVP

SEQ ID NO: 354 - protein, 1063 aa, synthetic construct
  REGION 1..1063: note = O00159
MALQVELVPTGEIIRVVHPHRPCKLALGSDGVRVTMESALTARDRVGVQDFVLLENFTSEAAFIENLRRRFRENLIYTYIGPVLVSVNPYRDLQIYSRQHMERYRGVSFYEVPPHLFAVADTVYRALRTERRDQAVMISGESGAGKTEATKRLLQFYAETCPAPERGGAVRDRLLQSNPVLEAFGNAKTLRNDNSSRFGKYMDVQFDFKGAPVGGHILSYLLEKSRVVHQNHGERNFHIFYQLLEGGEEETLRRLGLERNPQSYLYLVKGQCAKVSSINDKSDWKVVRKALTVIDFTEDEVEDLLSIVASVLHLGNIHFAANEESNAQVTTENQLKYLTRLLSVEGSTLREALTHRKIIAKGEELLSPLNLEQAAYARDALAKAVYSRTFTWLVGKINRSLASKDVESPSWRSTTVLGLLDIYGFEVFQHNSFEQFCINYCNEKLQQLFIELTLKSEQEEYEAEGIAWEPVQYFNNKIICDLVEEKFKGIISILDEECLRPGEATDLTFLEKLEDTVKHHPHFLTHKLADQRTRKSLGRGEFRLLHYAGEVTYSVTGFLDKNNDLLFRNLKETMCSSKNPIMSQCFDRSELSDKKRPETVATQFKMSLLQLVEILQSKEPAYVRCIKPNDAKQPGRFDEVLIRHQVKYLGLLENLRVRRAGFAYRRKYEAFLQRYKSLCPETWPTWAGRPQDGVAVLVRHLGYKPEEYKMGRTKIFIRFPKTLFATEDALEVRRQSLATKIQAAWRGFHWRQKFLRVKRSAICIQSWWRGTLGRRKAAKRKWAAQTIRRLIRGFVLRHAPRCPENAFFLDHVRTSFLLNLRRQLPQNVLDTSWPTPPPALREASELLRELCIKNMVWKYCRSISPEWKQQLQQKAVASEIFKGKKDNYPQSVPRLFISTRLGTDEISPRVLQALGSEPIQYAVPVVKYDRKGYKPRSRQLLLTPNAVVIVEDAKVKQRIDYANLTGISVSSLSDSLFVLHVQRADNKQKGDVVLQSDHVIETLTKTALSANRVNSININQGSITFAGGPGRDGTIDFTPGSELLITKAKNGHLAVVAPRLNSR

SEQ ID NO: 355 - protein, 1006 aa, synthetic construct
  REGION 1..1006: note = O94832
MAEQESLEFGKADFVLMDTVSMPEFMANLRLRFEKGRIYTFIGEVVVSVNPYKLLNIYGRDTIEQYKGRELYERPPHLFAIADAAYKAMKRRSKDTCIVISGESGAGKTEASKYIMQYIAAITNPSQRAEVERVKNMLLKSNCVLEAFGNAKTNRNDNSSRFGKYMDINFDFKGDPIGGHINNYLLEKSRVIVQQPGERSFHSFYQLLQGGSEQMLRSLHLQKSLSSYNYIHVGAQLKSSINDAAEFRVVADAMKVIGFKPEEIQTVYKILAAILHLGNLKFVVDGDTPLIENGKVVSIIAELLSTKTDMVEKALLYRTVATGRDIIDKQHTEQEASYGRDAFAKAIYERLFCWIVTRINDIIEVKNYDTTIHGKNTVIGVLDIYGFEIFDNNSFEQFCINYCNEKLQQLFIQLVLKQEQEEYQREGIPWKHIDYFNNQIIVDLVEQQHKGIIAILDDACMNVGKVTDEMFLEALNSKLGKHAHFSSRKLCASDKILEFDRDFRIRHYAGDVVYSVIGFIDKNKDTLFQDFKRLMYNSSNPVLKNMWPEGKLSITEVTKRPLTAATLFKNSMIALVDNLASKEPYYVRCIKPNDKKSPQIFDDERCRHQVEYLGLLENVRVRRAGFAFRQTYEKFLHRYKMISEFTWPNHDLPSDKEAVKKLIERCGFQDDVAYGKTKIFIRTPRTLFTLEELRAQMLIRIVLFLQKVWRGTLARMRYKRTKAALTIIRYYRRYKVKSYIHEVARRFHGVKTMRDYGKHVKWPSPPKVLRRFEEALQTIFNRWRASQLIKSIPASDLPQVRAKVAAVEMLKGQRADLGLQRAWEGNYLASKPDTPQTSGTFVPVANELKRKDKYMNVLFSCHVRKVNRFSKVEDRAIFVTDRHLYKMDPTKQYKVMKTIPLYNLTGLSVSNGKDQLVVFHTKDNKDLIVCLFSKQPTHESRIGELVGVLVNHFKSEKRHLQVNVTNPVQCSLHGKKCTVSVETRLNQPQPDFTKNRSGFILSVPGN

SEQ ID NO: 356 - protein, 1108 aa, synthetic construct
  REGION 1..1108: note = Q12965
MGSKGVYQYHWQSHNVKHSGVDDMVLLSKITENSIVENLKKRYMDDYIFTYIGSVLISVNPFKQMPYFGEKEIEMYQGAAQYENPPHIYALADNMYRNMIIDRENQCVIISGESGAGKTVAAKYIMSYISRVSGGGTKVQHVKDIILQSNPLLEAFGNAKTVRNNNSSRFGKYFEIQFSPGGEPDGGKISNFLLEKSRVVMRNPGERSFHIFYQLIEGASAEQKHSLGITSMDYYYYLSLSGSYKVDDIDDRREFQETLHAMNVIGIFAEEQTLVLQIVAGILHLGNISFKEVGNYAAVESEEFLAFPAYLLGINQDRLKEKLTSRQMDSKWGGKSESIHVTLNVEQACYTRDALAKALHARVFDFLVDSINKAMEKDHEEYNIGVLDIYGFEIFQKNGFEQFCINFVNEKLQQIFIELTLKAEQEEYVQEGIRWTPIEYFNNKIVCDLIENKVNPPGIMSILDDVCATMHAVGEGADQTLLQKLQMQIGSHEHFNSWNQGFIIHHYAGKVSYDMDGFCERNRDVLFMDLIELMQSSELPFIKSLFPENLQADKKGRPTTAGSKIKKQANDLVSTLMKCTPHYIRCIKPNETKKPRDWEESRVKHQVEYLGLKENIRVRRAGYAYRRIFQKFLQRYAILTKATWPSWQGEEKQGVLHLLQSVNMDSDQFQLGRSKVFIKAPESLFLLEEMRERKYDGYARVIQKSWRKFVARKKYVQMREEASDLLLNKKERRRNSINRNFIGDYIGMEEHPELQQFVGKREKIDFADTVTKYDRRFKGVKRDLLLTPKCLYLIGREKVKQGPDKGLVKEVLKRKIEIERILSVSLSTMQDDIFILHEQEYDSLLESVFKTEFLSLLAKRYEEKTQKQLPLKFSNTLELKLKKENWGPWSAGGSRQVQFHQGFGDLAVLKPSNKVLQVSIGPGLPKNSRPTRRNTTQNTGYSSGTQNANYPVRAAPPPPGYHQNGVIRNQYVPYPHAPGSQRSNQKSLYTSMARPPLPRQQSTSSDRVSQTPESLDFLKVPDQGAAGVRRQTTSRPPPAGGRPKPQPKPKPQVPQCKALYAYDAQDTDELSFNANDIIDIIKEDPSGWWTGRLRGKQGLFPNNYVTKI

SEQ ID NO: 357 - protein, 1098 aa, synthetic construct
  REGION 1..1098: note = O00160
MGSKERFHWQSHNVKQSGVDDMVLLPQITEDAIAANLRKRFMDDYIFTYIGSVLISVNPFKQMPYFTDREIDLYQGAAQYENPPHIYALTDNMYRNMLIDCENQCVIISGESGAGKTVAAKYIMGYISKVSGGGEKVQHVKDIILQSNPLLEAFGNAKTVRNNNSSRFGKYFEIQFSRGGEPDGGKISNFLLEKSRVVMQNENERNFHIYYQLLEGASQEQRQNLGLMTPDYYYYLNQSDTYQVDGTDDRSDFGETLSAMQVIGIPPSIQQLVLQLVAGILHLGNISFCEDGNYARVESVDLLAFPAYLLGIDSGRLQEKLTSRKMDSRWGGRSESINVTLNVEQAAYTRDALAKGLYARLFDFLVEAINRAMQKPQEEYSIGVLDIYGFEIFQKNGFEQFCINFVNEKLQQIFIELTLKAEQEEYVQEGIRWTPIQYFNNKVVCDLIENKLSPPGIMSVLDDVCATMHATGGGADQTLLQKLQAAVGTHEHFNSWSAGFVIHHYAGKVSYDVSGFCERNRDVLFSDLIELMQTSEQAFLRMLFPEKLDGDKKGRPSTAGSKIKKQANDLVATLMRCTPHYIRCIKPNETKRPRDWEENRVKHQVEYLGLKENIRVRRAGFAYRRQFAKFLQRYAILTPETWPRWRGDERQGVQHLLRAVNMEPDQYQMGSTKVFVKNPESLFLLEEVRERKFDGFARTIQKAWRRHVAVRKYEEMREEASNILLNKKERRRNSINRNFVGDYLGLEERPELRQFLGKRERVDFADSVTKYDRRFKPIKRDLILTPKCVYVIGREKVKKGPEKGQVCEVLKKKVDIQALRGVSLSTRQDDFFILQEDAADSFLESVFKTEFVSLLCKRFEEATRRPLPLTFSDTLQFRVKKEGWGGGGTRSVTFSRGFGDLAVLKVGGRTLTVSVGDGLPKSSKPTRKGMAKGKPRRSSQAPTRAAPAPPRGMDRNGVPPSARGGPLPLEIMSGGGTHRPPRGPPSTSLGASRRPRARPPSEHNTEFLNVPDQGMAGMQRKRSVGQRPVPGVGRPKPQPRTHGPRCRALYQYVGQDVDELSFNVNEVIEILMEDPSGWWKGRLHGQEGLFPGNYVEKI

SEQ ID NO: 358 - protein, 1018 aa, synthetic construct
  REGION 1..1018: note = B0I1T2
MEDEEGPEYGKPDFVLLDQVTMEDFMRNLQLRFEKGRIYTYIGEVLVSVNPYQELPLYGPEAIARYQGRELYERPPHLYAVANAAYKAMKHRSRDTCIVISGESGAGKTEASKHIMQYIAAVTNPSQRAEVERVKDVLLKSTCVLEAFGNARTNRNHNSSRFGKYMDINFDFKGDPIGGHIHSYLLEKSRVLKQHVGERNFHAFYQLLRGSEDKQLHELHLERNPAVYNFTHQGAGLNMTVHSALDSDEQSHQAVTEAMRVIGFSPEEVESVHRILAAILHLGNIEFVETEEGGLQKEGLAVAEEALVDHVAELTATPRDLVLRSLLARTVASGGRELIEKGHTAAEASYARDACAKAVYQRLFEWVVNRINSVMEPRGRDPRRDGKDTVIGVLDIYGFEVFPVNSFEQFCINYCNEKLQQLFIQLILKQEQEEYEREGITWQSVEYFNNATIVDLVERPHRGILAVLDEACSSAGTITDRIFLQTLDMHHRHHLHYTSRQLCPTDKTMEFGRDFRIKHYAGDVTYSVEGFIDKNRDFLFQDFKRLLYNSTDPTLRAMWPDGQQDITEVTKRPLTAGTLFKNSMVALVENLASKEPFYVRCIKPNEDKVAGKLDENHCRHQVAYLGLLENVRVRRAGFASRQPYSRFLLRYKMTCEYTWPNHLLGSDKAAVSALLEQHGLQGDVAFGHSKLFIRSPRTLVTLEQSRARLIPIIVLLLQKAWRGTLARWRCRRLRAIYTIMRWFRRHKVRAHLAELQRRFQAARQPPLYGRDLVWPLPPAVLQPFQDTCHALFCRWRARQLVKNIPPSDMPQIKAKVAAMGALQGLRQDWGCRRAWARDYLSSATDNPTASSLFAQRLKTLQDKDGFGAVLFSSHVRKVNRFHKIRNRALLLTDQHLYKLDPDRQYRVMRAVPLEAVTGLSVTSGGDQLVVLHARGQDDLVVCLHRSRPPLDNRVGELVGVLAAHCQGEGRTLEVRVSDCIPLSHRGVRRLISVEPRPEQPEPDFRCARGSFTLLWPSR

SEQ ID NO: 359 - protein, 1022 aa, synthetic construct
  REGION 1..1022: note = NP_001094891
MEGALTARDKVGVQDFVLLDAYTSESAFVDNLRKRFSENLIYTYIGTLLVSVNPYQELGIYTVSQMELYQGVNFFELPPHVYAIADNAYRMMCAELNNHFILISGESGAGKTEASKKILEYFAVTCPMTQSLQIARDRLLFSNPVLEAFGNARTLRNDNSSRFGKYMDIQFDFQGIPVGGHIISYLIEKSRVVYQNEGERNFHIFYQLLAGGEEERLSYLGLERDPQLYKYLSQGHCAKESSISDKNDWKTVSNAFSVIDFTEADLENLFGIIASVLHLGNIGFEEDDQGCATIPDTHEIKWIAKLLGVHPSVLLEALTHRKIEAKTEEVICPLTLELSVYARDAMAKAVYGRTFTWLVNKINSSLVNKDFTRKTVIGLLDIYGFEVFDKNGFEQFCINYCNEKLQQLLIERTLKAEQAEYEMEGIEWEPIKYFNNKIICDLVEERHKGIISILDEECIRPGPATDLSFLEKLEEKVGKHAHFETRKLAGPKGRKRIGWMEFRLLHYAGEVTYCTKGFLEKNNDLLYRHLKEVLCKSKNIILRECFLLAELENRRRPPTVGTQFKNSLSSLLETLISKEPSYIRCIKPNDRKEPSKFDDFLIRHQIKYLGLMEHLRVRRAGFAYRRKYEHFLQRYKSLCPDTWPHWHGPPAEGVERLIKYIGYKPEEYKLGKTKIFIRFPRTLFATEDAFEFSKHQLVARIQATYKRCLGRREYVKKRQAAIKLEAHWRGALARKAIQRRKWAVRIIRKFIKGFISRNKPLCPDNEEFIVFVRKNYILNLRYHLPKTVLDKSWLRPPGILENASDLLRKMCVRNLVQKYCRGITAERKAMMQQKVVTSEIFRGRKDGYTESLNQPFVNSRIDEGDINPKVLQLISHEKIQYGVPVIKYDRKGFKARQRQLILTQKAAYVVELAKIKQKIEYSALKGVSTSNLSDGILVIHVSPEDSKQKGDAVLQCGHVFEAVTKLVMLVKKENIVNVVQGSLQFFISPGKEGTIVFDTGLEEQVYKNKNGQLTVVSVRRKS

SEQ ID NO: 360 - protein, 792 aa, synthetic construct
  REGION 1..792: note = Q3V5L5
MITVNPDGKIMVRRCLVTLRPFRLFVLGIGFFTLCFLMTSLGGQFSARRLGDSPFTIRTEVMGGPESRGVLRKMSDLLELMVKRMDALARLENSSELHRAGGDLHFPADRMPPGAGLMERIQAIAQNVSDIAVKVDQILRHSLLLHSKVSEGRRDQCEAPSDPKFPDCSGKVEWMRARWTSDPCYAFFGVDGTECSFLIYLSEVEWFCPPLPWRNQTAAQRAPKPLPKVQAVFRSNLSHLLDLMGSGKESLIFMKKRTKRLTAQWALAAQRLAQKLGATQRDQKQILVHIGFLTEESGDVFSPRVLKGGPLGEMVQWADILTALYVLGHGLRVTVSLKELQSNLGVPPGRGSCPLTMPLPFDLIYTDYHGLQQMKRHMGLSFKKYRCRIRVIDTFGTEPAYNHEEYATLHGYRTNWGYWNLNPKQFMTMFPHTPDNSFMGFVSEELNETEKRLIKGGKASNMAVVYGKEASIWKLQGKEKFLGILNKYMEIHGTVYYESQRPPEVPAFVKNHGLLPQPEFQQLLRKAKLFIGFGFPYEGPAPLEAIANGCIFLQSRFSPPHSSLNHEFFRGKPTSREVFSQHPYAENFIGKPHVWTVDYNNSEEFEAAIKAIMRTQVDPYLPYEYTCEGMLERIHAYIQHQDFCRAPDPALPEAHAPQSPFVLAPNATHLEWARNTSLAPGAWPPAHALRAWLAVPGRACTDTCLDHGLICEPSFFPFLNSQDAFLKLQVPCDSTESEMNHLYPAFAQPGQECYLQKEPLLFSCAGSNTKYRRLCPCRDFRKGQVALCQGCL

SEQ ID NO: 361 - protein, 11 aa, synthetic construct
  REGION 1..11: note = 10790436
MTQGQHFLQKV

SEQ ID NO: 362 - protein, 736 aa, synthetic construct
  REGION 1..736: note = Q9BWT3
MKEMSANTVLDSQRQQKHYGITSPISLASPKEIDHIYTQKLIDAMKPFGVFEDEEELNHRLVVLGKLNNLVKEWISDVSESKNLPPSVVATVGGKIFTFGSYRLGVHTKGADIDALCVAPRHVERSDFFQSFFEKLKHQDGIRNLRAVEDAFVPVIKFEFDGIEIDLVFARLAIQTISDNLDLRDDSRLRSLDIRCIRSLNGCRVTDEILHLVPNKETFRLTLRAVKLWAKRRGIYSNMLGFLGGVSWAMLVARTCQLYPNAAASTLVHKFFLVFSKWEWPNPVLLKQPEESNLNLPVWDPRVNPSDRYHLMPIITPAYPQQNSTYNVSTSTRTVMVEEFKQGLAVTDEILQGKSDWSKLLEPPNFFQKYRHYIVLTASASTEENHLEWVGLVESKIRVLVGNLERNEFITLAHVNPQSFPGNKEHHKDNNYVSMWFLGIIFRRVENAESVNIDLTYDIQSFTDTVYRQANNINMLKEGMKIEATHVKKKQLHHYLPAEILQKKKKQSLSDVNRSSGGLQSKRLSLDSSCLDSSRDTDNGTPFNSPASKSDSPSVGETERNSAEPAAVIVEKPLSVPPAQGLSIPVIGAKVDSTVKTVSPPTVCTIPTVVGRNVIPRITTPHNPAQGQPHLNGMSNITKTVTPKRSHSPSIDGTPKRLKDVEKFIRLESTFKDPRTAEERKRKSVDAIGGESMPIPTIDTSRKKRLPSKELPDSSSPVPANNIRVIKNSIRLTLNR

SEQ ID NO: 363 - protein, 458 aa, synthetic construct
  REGION 1..458: note = Q13952
MSTEGGFGGTSSSDAQQSLQSFWPRVMEEIRNLTVKDFRVQELPLARIKKIMKLDEDVKMISAEAPVLFAKAAQIFITELTLRAWIHTEDNKRRTLQRNDIAMAITKFDQFDFLIDIVPRDELKPPKRQEEVRQSVTPAEPVQYYFTLAQQPTAVQVQGQQQGQQTTSSTTTIQPGQIIIAQPQQGQTTPVTMQVGEGQQVQIVQAQPQGQAQQAQSGTGQTMQVMQQIITNTGEIQQIPVQLNAGQLQYIRLAQPVSGTQVVQGQIQTLATNAQQGQRNASQGKPRRCLKETLQITQTEVQQGQQQFSQFTDGQRNSVQQARVSELTGEAEPREVKATGNSTPCTSSLPTTHPPSHRAGASCVCCSQPQQSSTSPPPSDALQWVVVEVSGTPNQLETHRELHAPLPGMTSLSPLHPSQQLYQIQQVTMPAGQDLAQPMFIQSANQPSDGQAPQVTGD

SEQ ID NO: 364 - protein, 933 aa, synthetic construct
  REGION 1..933: note = Q6IWH7
MRMAATAWAGLQGPPLPTLCPAVRTGLYCRDQAHAERWAMTSETSSGSHCARSRMLRRRAQEEDSTVLIDVSPPEAEKRGSYGSTAHASEPGGQQAAACRAGSPAKPRIADFVLVWEEDLKLDRQQDSAARDRTDMHRTWRETFLDNLRAAGLCVDQQDVQDGNTTVHYALLSASWAVLCYYAEDLRLKLPLQELPNQASNWSAGLLAWLGIPNVLLEVVPDVPPEYYSCRFRVNKLPRFLGSDNQDTFFTSTKRHQILFEILAKTPYGHEKKNLLGIHQLLAEGVLSAAFPLHDGPFKTPPEGPQAPRLNQRQVLFQHWARWGKWNKYQPLDHVRRYFGEKVALYFAWLGFYTGWLLPAAVVGTLVFLVGCFLVFSDIPTQELCGSKDSFEMCPLCLDCPFWLLSSACALAQAGRLFDHGGTVFFSLFMALWAVLLLEYWKRKSATLAYRWDCSDYEDTEERPRPQFAASAPMTAPNPITGEDEPYFPERSRARRMLAGSVVIVVMVAVVVMCLVSIILYRAIMAIVVSRSGNTLLAAWASRIASLTGSVVNLVFILILSKIYVSLAHVLTRWEMHRTQTKFEDAFTLKVFIFQFVNFYSSPVYIAFFKGRFVGYPGNYHTLFGVRNEECAAGGCLIELAQELLVIMVGKQVINNMQEVLIPKLKGWWQKFRLRSKKRKAGASAGASQGPWEDDYELVPCEGLFDEYLEMVLQFGFVTIFVAACPLAPLFALLNNWVEIRLDARKFVCEYRRPVAERAQDIGIWFHILAGLTHLAVISNAFLLAFSSDFLPRAYYRWTRAHDLRGFLNFTLARAPSSFAAAHNRTCRYRAFRDDDGHYSQTYWNLLAIRLAFVIVFEHVVFSVGRLLDLLVPDIPESVEIKVKREYYLAKQALAENEVLFGTNGTKDEQPEGSELSSHWTPFTVPKASQLQQ

SEQ ID NO: 365 - protein, 294 aa, synthetic construct
  REGION 1..294: note = P06748
MEDSMDMDMSPLRPQNYLFGCELKADKDYHFKVDNDENEHQLSLRTVSLGAGAKDELHIVEAEAMNYEGSPIKVTLATLKMSVQPTVSLGGFEITPPVVLRLKCGSGPVHISGQHLVAVEEDAESEDEEEEDVKLLSISGKRSAPGGGSKVPQKKVKLAADEDDDDDDEEDDDEDDDDDDFDDEEAEEKAPVKKSIRDTPAKNAQKSNQNGKDSKPSSTPRSKGQESFKKQEKTPKTPKGPSSVEDIKAKMQASIEKGGSLPKVEAKFINYVKNCFRMTDQEAIQDLWQWRKSL

SEQ ID NO: 366 - protein, 1304 aa, synthetic construct
  REGION 1..1304: note = Q92823
MQLKIMPKKKRLSAGRVPLILFLCQMISALEVPLDPKLLEDLVQPPTITQQSPKDYIIDPRENIVIQCEAKGKPPPSFSWTRNGTHFDIDKDPLVTMKPGTGTLIINIMSEGKAETYEGVYQCTARNERGAAVSNNIVVRPSRSPLWTKEKLEPITLQSGQSLVLPCRPPIGLPPPIIFWMDNSFQRLPQSERVSQGLNGDLYFSNVLPEDTREDYICYARFNHTQTIQQKQPISVKVISVDELNDTIAANLSDTEFYGAKSSRERPPTFLTPEGNASNKEELRGNVLSLECIAEGLPTPIIYWAKEDGMLPKNRTVYKNFEKTLQIIHVSEADSGNYQCIAKNALGAIHHTISVRVKAAPYWITAPQNLVLSPGEDGTLICRANGNPKPRISWLTNGVPIEIAPDDPSRKIDGDTIIFSNVQERSSAVYQCNASNEYGYLLANAFVNVLAEPPRILTPANTLYQVIANRPALLDCAFFGSPLPTIEWFKGAKGSALHEDIYVLHENGTLEIPVAQKDSTGTYTCVARNKLGMAKNEVHLEIKDPTWIVKQPEYAVVQRGSMVSFECKVKHDHTLSLTVLWLKDNRELPSDERFTVDKDHLVVADVSDDDSGTYTCVANTTLDSVSASAVLSVVAPTPTPAPVYDVPNPPFDLELTDQLDKSVQLSWTPGDDNNSPITKFIIEYEDAMHKPGLWHHQTEVSGTQTTAQLKLSPYVNYSFRVMAVNSIGKSLPSEASEQYLTKASEPDKNPTAVEGLGSEPDNLVITWKPLNGFESNGPGLQYKVSWRQKDGDDEWTSVVVANVSKYIVSGTPTFVPYLIKVQALNDMGFAPEPAVVMGHSGEDLPMVAPGNVRVNVVNSTLAEVHWDPVPLKSIRGHLQGYRIYYWKTQSSSKRNRRHIEKKILTFQGSKTHGMLPGLEPFSHYTLNVRVVNGKGEGPASPDRVFNTPEGVPSAPSSLKIVNPTLDSLTLEWDPPSHPNGILTEYTLKYQPINSTHELGPLVDLKIPANKTRWTLKNLNFSTRYKFYFYAQTSAGSGSQITEEAVTTVDEAGILPPDVGAGKVQAVNPRISNLTAAAAETYANISWEYEGPEHVNFYVEYGVAGSKEEWRKEIVNGSRSFFGLKGLMPGTAYKVRVGAVGDSGFVSSEDVFETGPAMASRQVDIATQGWFIGLMCAVALLILILLIVCFIRRNKGGKYPVKEKEDAHADPEIQPMKEDDGTFGEYSDAEDHKPLKKGSRTPSDRTVKKEDSDDSLVDYGEGVNGQFNEDGSFIGQYSGKKEKEPAEGNESSEAPSPVNAMNSFV

SEQ ID NO: 367 - protein, 434 aa, synthetic construct
  REGION 1..434: note = P09104
MSIEKIWAREILDSRGNPTVEVDLYTAKGLFRAAVPSGASTGIYEALELRDGDKQRYLGKGVLKAVDHINSTIAPALISSGLSVVEQEKLDNLMLELDGTENKSKFGANAILGVSLAVCKAGAAERELPLYRHIAQLAGNSDLILPVPAFNVINGGSHAGNKLAMQEFMILPVGAESFRDAMRLGAEVYHTLKGVIKDKYGKDATNVGDEGGFAPNILENSEALELVKEAIDKAGYTEKIVIGMDVAASEFYRDGKYDLDFKSPTDPSRYITGDQLGALYQDFVRDYPVVSIEDPFDQDDWAAWSKFTANVGIQIVGDDLTVTNPKRIERAVEEKACNCLLLKVNQIGSVTEAIQACKLAQENGWGVMVSHRSGETEDTFIADLVVGLCTGQIKTGAPCRSERLAKYNQLMRIEEELGDEARFAGHNFRNPSVL

SEQ ID NO: 368 - protein, 464 aa, synthetic construct
  REGION 1..464: note = Q9BZD4
METLSFPRYNVAEIVIHIRNKILTGADGKNLTKNDLYPNPKPEVLHMIYMRALQIVYGIRLEHFYMMPVNSEVMYPHLMEGFLPFSNLVTHLDSFLPICRVNDFETADILCPKAKRTSRFLSGIINFIHFREACRETYMEFLWQYKSSADKMQQLNAAHQEALMKLERLDSVPVEEQEEFKQLSDGIQELQQSLNQDFHQKTIVLQEGNSQKKSNISEKTKRLNELKLSVVSLKEIQESLKTKIVDSPEKLKNYKEKMKDTVQKLKNARQEVVEKYEIYGDSVDCLPSCQLEVQLYQKKIQDLSDNREKLASILKESLNLEDQIESDESELKKLKTEENSFKRLMIVKKEKLATAQFKINKKHEDVKQYKRTVIEDCNKVQEKRGAVYERVTTINQEIQKIKLGIQQLKDAAEREKLKSQEIFLNLKTALEKYHDGIEKAAEDSYAKIDEKTAELKRKMFKMST

SEQ ID NO: 369 - protein, 180 aa, synthetic construct
  REGION 1..180: note = P78358
MQAEGRGTGGSTGDADGPGGPGIPDGPGGNAGGPGEAGATGGRGPRGAGAARASGPGGGAPRGPHGGAASGLNGCCRCGARGPESRLLEFYLAMPFATPMEAELARRSLAQDAPPLPVPGVLLKEFTVSGNILTIRLTAADHRQLQLSISSCLQQLSLLMWITQCFLPVFLAQPPSGQRR

SEQ ID NO: 370 - protein, 404 aa, synthetic construct
  REGION 1..404: note = P51810
MASPRLGTFCCPTRDAATQLVLSFQPRAFHALCLGSGGLRLALGLLQLLPGRRPAGPGSPATSPPASVRILRAAAACDLLGCLGMVIRSTVWLGFPNFVDSVSDMNHTEIWPAAFCVGSAMWIQLLYSACFWWLFCYAVDAYLVIRRSAGLSTILLYHIMAWGLATLLCVEGAAMLYYPSVSRCERGLDHAIPHYVTMYLPLLLVLVANPILFQKTVTAVASLLKGRQGIYTENERRMGAVIKIRFFKIMLVLIICWLSNIINESLLFYLEMQTDINGGSLKPVRTAAKTTWFIMGILNPAQGFLLSLAFYGWTGCSLGFQSPRKEIQWESLTTSAAEGAHPSPLMPHENPASGKVSQVGGQTSDEALSMLSEGSDASTIEIHTASESCNKNEGDPALPTHGDL

SEQ ID NO: 371 - protein, 1046 aa, synthetic construct
  REGION 1..1046: note = O15294
MASSVGNVADSTEPTKRMLSFQGLAELAHREYQAGDFEAAERHCMQLWRQEPDNTGVLLLLSSIHFQCRRLDRSAHFSTLAIKQNPLLAEAYSNLGNVYKERGQLQEAIEHYRHALRLKPDFIDGYINLAAALVAAGDMEGAVQAYVSALQYNPDLYCVRSDLGNLLKALGRLEEAKACYLKAIETQPNFAVAWSNLGCVFNAQGEIWLAIHHFEKAVTLDPNFLDAYINLGNVLKEARIFDRAVAAYLRALSLSPNHAVVHGNLACVYYEQGLIDLAIDTYRRAIELQPHFPDAYCNLANALKEKGSVAEAEDCYNTALRLCPTHADSLNNLANIKREQGNIEEAVRLYRKALEVFPEFAAAHSNLASVLQQQGKLQEALMHYKEAIRISPTFADAYSNMGNTLKEMQDVQGALQCYTRAIQINPAFADAHSNLASIHKDSGNIPEAIASYRTALKLKPDFPDAYCNLAHCLQIVCDWTDYDERMKKLVSIVADQLEKNRLPSVHPHHSMLYPLSHGFRKAIAERHGNLCLDKINVLHKPPYEHPKDLKLSDGRLRVGYVSSDFGNHPTSHLMQSIPGMHNPDKFEVFCYALSPDDGTNFRVKVMAEANHFIDLSQIPCNGKAADRIHQDGIHILVNMNGYTKGARNELFALRPAPIQAMWLGYPGTSGALFMDYIITDQETSPAEVAEQYSEKLAYMPHTFFIGDHANMFPHLKKKAVIDFKSNGHIYDNRIVLNGIDLKAFLDSLPDVKIVKMKCPDGGDNADSSNTALNMPVIPMNTIAEAVIEMINRGQIQITINGFSISNGLATTQINNKAATGEEVPRTIIVTTRSQYGLPEDAIVYCNFNQLYKIDPSTLQMWANILKRVPNSVLWLLRFPAVGEPNIQQYAQNMGLPQNRIIFSPVAPKEEHVRRGQLADVCLDTPLCNGHTTGMDVLWAGTPMVTMPGETLASRVAASQLTCLGCLELIAKNRQEYEDIAVKLGTDLEYLKKVRGKVWKQRISSPLFNTKQYTMELERLYLQMWEHYAAGNKPDHMIKPVEVTESA

SEQ ID NO: 372 - protein, 146 aa, synthetic construct [sequence omitted]

SEQ ID NO: 373 - protein, 406 aa, synthetic construct
  REGION 1..406: note = B4E321
MAAETLLSSLLGLLLLGLLLPASLTGGVGSLNLEELSEMRYGIEILPLPVMGGQSQSSDVVIVSSKYKQRYECRLPAGAIHFQREREEETPAYQGPGIPELLSPMRDAPCLLKTKDWWTYEFCYGRHIQQYHMEDSASGAPNDFQNNVQVKVIRSPADLIRFIEELKGGTKKGKPNIGQEQPVDDAAEVPQREPEKERGDPERQREMEEEEDEDEDEDEDEDERQLLGEFEKELEGILLPSDRDRLRSEVKAGMERELENIIQETEKELDPDGLKKESERDRAMLALTSTLNKLIKRLEEKQSPELVKKHKKKRVVPKKPPPSPQPTGKIEIKIVRPWAEGTEEGARWLTDEDTRNLKEIFFNILVPGAEEAQKERQRQKELESNYRRVWGSPGGEGTGDLDEFDF

SEQ ID NO: 374 - protein, 740 aa, synthetic construct
  REGION 1..740: note = B7Z8E7
MAVETLLSSLLGLLLLGLLLPASLTGGVGSLNLEELSEMRYGIEILPLPVMGGQSQSSDVVIVSSKYKQRYECRLPAGAIHFQREREEETPAYQGPGIPELLSPMRDAPCLLKTKDWWTYEFCYGRHIQQYHMEDSEIKGEVLYLGYYQSAFDWDDETAKASKQHRLKRYHSQTYGNGSKCDLNGRPREAEVRFLCDEGAGISGDYIDRVDEPLSCSYVLTIRTPRLCPHPLLRPPPSAAPQAILCHPSLQPEEYMAYVQRQADSKQYGDKIIEELQDLGPQVWSETKSGVAPQKMAGRTLFHLFREIHFHFFPSPDLTVLTDWWGGGGVEKYHGPSSLGDRGGEGTPSYLLPSVSPLLSDQSLPVLCTLGASPTKDDSKDSDFWKMLNEPEDQAPGGEEVPAEEQDPSPEAADSASGAPNDFQNNVQVKVIRSPADLIRFIEELKGGTKKGKPNIGQEQPVDDAAEVPQREPEKERGDPERQREMEEEEDEDEDEDEDEDERQLLGEFEKELEGILLPSDRDRLRSEVKAGMERELENIIQETEKELDPDGLKKESERDRAMLALTSTLNKLIKRLEEKQSPELVKKHKKKRVVPKKPPPSPQPTEEDPEHRVRVRVTKLRLGGPNQDLTVLEMKRENPQLKQIEGLVKELLEREGLTAAGKIEIKIVRPWAEGTEEGARWLTDEDTRNLKEIFFNILVPGAEEAQKERQRQKELESNYRRVWGSPGGEGTGDLDEFDF

SEQ ID NO: 375 - protein, 667 aa, synthetic construct
  REGION 1..667: note = Q13438
MAAETLLSSLLGLLLLGLLLPASLTGGVGSLNLEELSEMRYGIEILPLPVMGGQSQSSDVVIVSSKYKQRYECRLPAGAIHFQREREEETPAYQGPGIPELLSPMRDAPCLLKTKDWWTYEFCYGRHIQQYHMEDSEIKGEVLYLGYYQSAFDWDDETAKASKQHRLKRYHSQTYGNGSKCDLNGRPREAEVRFLCDEGAGISGDYIDRVDEPLSCSYVLTIRTPRLCPHPLLRPPPSAAPQAILCHPSLQPEEYMAYVQRQADSKQYGDKIIEELQDLGPQVWSETKSGVAPQKMAGASPTKDDSKDSDFWKMLNEPEDQAPGGEEVPAEEQDPSPEAADSASGAPNDFQNNVQVKVIRSPADLIRFIEELKGGTKKGKPNIGQEQPVDDAAEVPQREPEKERGDPERQREMEEEEDEDEDEDEDEDERQLLGEFEKELEGILLPSDRDRLRSEVKAGMERELENIIQETEKELDPDGLKKESERDRAMLALTSTLNKLIKRLEEKQSPELVKKHKKKRVVPKKPPPSPQPTEEDPEHRVRVRVTKLRLGGPNQDLTVLEMKRENPQLKQIEGLVKELLEREGLTAAGKIEIKIVRPWAEGTEEGARWLTDEDTRNLKEIFFNILVPGAEEAQKERQRQKELESNYRRVWGSPGGEGTGDLDEFDF

SEQ ID NO: 376 - protein, 100 aa, synthetic construct
  REGION 1..100: note = P02818
MRALTLLALLALAALCIAGQAGAKPSGAESSKGAAFVSKQEGSEVVKRPRRYLYQWLGAPVPYPDPLEPRREVCELNPDCDELADHIGFQEAYRRFYGPV

SEQ ID NO: 377 - protein, 314 aa, synthetic construct
  REGION 1..314: note = A0A024RDE2
MRIAVICFCLLGITCAIPVKQADSGSSEEKQLYNKYPDAVATWLNPDPSQKQNLLAPQNAVSSEETNDFKQETLPSKSNESHDHMDDMDDEDDDDHVDSQDSIDSNDSDDVDDTDDSHQSDESHHSDESDELVTDFPTDLPATEVFTPVVPTVDTYDGRGDSVVYGLRSKSKKFRRPDIQYPDATDEDITSHMESEELNGAYKAIPVAQDLNAPSDWDSRGKDSYETSQLDDQSAETHSHKQSRLYKRKANDESNEHSDVIDSQELSKVSREFHSHEFHSHEDMLVVDPKSKEEDKHLKFRISHELDSASSEVN

SEQ ID NO: 378 - protein, 300 aa, synthetic construct
  REGION 1..300: note = A0A024RDE6
MRIAVICFCLLGITCAIPVKQADSGSSEEKQLYNKYPDAVATWLNPDPSQKQNLLAPQTLPSKSNESHDHMDDMDDEDDDDHVDSQDSIDSNDSDDVDDTDDSHQSDESHHSDESDELVTDFPTDLPATEVFTPVVPTVDTYDGRGDSVVYGLRSKSKKFRRPDIQYPDATDEDITSHMESEELNGAYKAIPVAQDLNAPSDWDSRGKDSYETSQLDDQSAETHSHKQSRLYKRKANDESNEHSDVIDSQELSKVSREFHSHEFHSHEDMLVVDPKSKEEDKHLKFRISHELDSASSEVN

SEQ ID NO: 379 - protein, 287 aa, synthetic construct
  REGION 1..287: note = A0A024RDJ0
MRIAVICFCLLGITCAIPVKQADSGSSEEKQNAVSSEETNDFKQETLPSKSNESHDHMDDMDDEDDDDHVDSQDSIDSNDSDDVDDTDDSHQSDESHHSDESDELVTDFPTDLPATEVFTPVVPTVDTYDGRGDSVVYGLRSKSKKFRRPDIQYPDATDEDITSHMESEELNGAYKAIPVAQDLNAPSDWDSRGKDSYETSQLDDQSAETHSHKQSRLYKRKANDESNEHSDVIDSQELSKVSREFHSHEFHSHEDMLVVDPKSKEEDKHLKFRISHELDSASSEVN

SEQ ID NO: 380 - protein, 327 aa, synthetic construct
  REGION 1..327: note = B7Z351
MGIVPRSLDKKAHRVQFQLNRIKAKIELPWGSLQLDCLMKTLKELYNKYPDAVATWLNPDPSQKQNLLAPQNAVSSEETNDFKQETLPSKSNESHDHMDDMDDEDDDDHVDSQDSIDSNDSDDVDDTDDSHQSDESHHSDESDELVTDFPTDLPATEVFTPVVPTVDTYDGRGDSVVYGLRSKSKKFRRPDIQYPDATDEDITSHMESEELNGAYKAIPVAQDLNAPSDWDSRGKDSYETSQLDDQSAETHSHKQSRLYKRKANDESNEHSDVIDSQELSKVSREFHSHEFHSHEDMLVVDPKSKEEDKHLKFRISHELDSASSEVN

SEQ ID NO: 381 - protein, 292 aa, synthetic construct
  REGION 1..292: note = F2YQ21
MRIAVICFCLLGITCAIPVKQADSGSSEEKQLYNKYPDAVATWLNPDPSQKQNLLAPQNAVSSEETNDFKQETLPSKSNESHDHMDDMDDEDDDSHQSDESHHSDESDELVTDFPTDLPATEVFTPVVPTVDTYDGRGDSVVYGLRSKSKKFRRPDIQYPDATDEDITSHMESEELNGAYKAIPVAQDLNAPSDWDSRGKDSYETSQLDDQSAETHSHKQSRLYKRKANDESNEHSDVIDSQELSKVSREFHSHEFHSHEDMLVVDPKSKEEDKHLKFRISHELDSASSEVN

SEQ ID NO: 382 - protein, 314 aa, synthetic construct; identical to SEQ ID NO: 377
  REGION 1..314: note = P10451

SEQ ID NO: 383 - protein, 393 aa, synthetic construct [sequence omitted]

SEQ ID NO: 384 - protein, 102 aa, synthetic construct
  REGION 1..102: note = O60829
MSARVRSRSRGRGDGQEAPDVVAFVAPGESQQEEPPTDNQDIEPGQEREGTPPIEERKVEGDCQEMDLEKTRSERGDGSDVKEKTPPNPKHAKTKEAGDGQP

SEQ ID NO: 385 - protein, 402 aa, synthetic construct [sequence omitted]

SEQ ID NO: 386 - protein, 415 aa, synthetic construct
  REGION 1..415: note = P05120
MEDLCVANTLFALNLFKHLAKASPTQNLFLSPWSISSTMAMVYMGSRGSTEDQMAKVLQFNEVGANAVTPMTPENFTSCGFMQQIQKGSYPDAILQAQAADKIHSSFRSLSSAINASTGNYLLESVNKLFGEKSASFREEYIRLCQKYYSSEPQAVDFLECAEEARKKINSWVKTQTKGKIPNLLPEGSVDGDTRMVLVNAVYFKGKWKTPFEKKLNGLYPFRVNSAQRTPVQMMYLREKLNIGYIEDLKAQILELPYAGDVSMFLLLPDEIADVSTGLELLESEITYDKLNKWTSKDKMAEDEVEVYIPQFKLEEHYELRSILRSMGMEDAFNKGRANFSGMSERNDLFLSEVFHQAMVDVNEEGTEAAAGTGGVMTGRTGHGGPQFVADHPFLFLIMHKITNCILFFGRFSSP

SEQ ID NO: 387 - protein, 175 aa, synthetic construct
  REGION 1..175: note = Q06141
MLPPMALPSVSWMLLSCLMLLSQVQGEEPQRELPSARIRCPKGSKAYGSHCYALFLSPKSWTDADLACQKRPSGNLVSVLSGAEGSFVSSLVKSIGNSYSYVWIGLHDPTQGTEPNGEGWEWSSSDVMNYFAWERNPSTISSPGHCASLSRSTAFLRWKDYNCNVRLPYVCKFTD

SEQ ID NO: 388 - protein, 175 aa, synthetic construct; identical to SEQ ID NO: 387
  REGION 1..175: note = Q53S56

SEQ ID NO: 389 - protein, 126 aa, synthetic construct
  REGION 1..126: note = Q8WXA2
MDKSLLLELPILLCCFRALSGSLSMRNDAVNEIVAVKNNFPVIEIVQCRMCHLQFPGEKCSRGRGICTATTEEACMVGRMFKRDGNPWLTFMGCLKNCADVKGIRWSVYLVNFRCCRSHDLCNEDL

SEQ ID NO: 390 - protein, 479 aa, synthetic construct
  REGION 1..479: note = P23760
MTTLAGAVPRMMRPGPGQNYPRSGFPLEVSTPLGQGRVNQLGGVFINGRPLPNHIRHKIVEMAHHGIRPCVISRQLRVSHGCVSKILCRYQETGSIRPGAIGGSKPKQVTTPDVEKKIEEYKRENPGMFSWEIRDKLLKDAVCDRNTVPSVSSISRILRSKFGKGEEEEADLERKEAEESEKKAKHSIDGILSERASAPQSDEGSDIDSEPDLPLKRKQRRSRTTFTAEQLEELERAFERTHYPDIYTREELAQRAKLTEARVQVWFSNRRARWRKQAGANQLMAFNHLIPGGFPPTAMPTLPTYQLSETSYQPTSIPQAVSDPSSTVHRPQPLPPSTVHQSTIPSNPDSSSAYCLPSTRHGFSSYTDSFVPPSGPSNPMNPTIGNGLSPQVMGLLTNHGGVPHQPQTDYALSPLTGGLEPTTTVSASCSQRLDHMKSLDSLPTSQSYCPPTYSTTGYSMDPVTGYQYGQYGQSKPWTF

SEQ ID NO: 391 - protein, 391 aa, synthetic construct
  REGION 1..391: note = Q02548
MDLEKNYPTPRTSRTGHGGVNQLGGVFVNGRPLPDVVRQRIVELAHQGVRPCDISRQLRVSHGCVSKILGRYYETGSIKPGVIGGSKPKVATPKVVEKIAEYKRQNPTMFAWEIRDRLLAERVCDNDTVPSVSSINRIIRTKVQQPPNQPVPASSHSIVSTGSVTQVSSVSTDSAGSSYSISGILGITSPSADTNKRKRDEGIQESPVPNGHSLPGRDFLRKQMRGDLFTQQQLEVLDRVFERQHYSDIFTTTEPIKPEQTTEYSAMASLAGGLDDMKANLASPTPADIGSSVPGPQSYPIVTGRDLASTTLPGYPPHVPPAGQGSYSAPTLTGMVPGSEFSGSPYSHPQYSSYNDSWRFPNPGLLGSPYYYSAAARGAAPPAAATAYDRH

SEQ ID NO: 392 - protein, 290 aa, synthetic construct
  REGION 1..290: note = Q9NZQ7
MRIFAVFIFMTYWHLLNAFTVTVPKDLYVVEYGSNMTIECKFPVEKQLDLAALIVYWEMEDKNIIQFVHGEEDLKVQHSSYRQRARLLKDQLSLGNAALQITDVKLQDAGVYRCMISYGGADYKRITVKVNAPYNKINQRILVVDPVTSEHELTCQAEGYPKAEVIWTSSDHQVLSGKTTTTNSKREEKLFNVTSTLRINTTTNEIFYCTFRRLDPEENHTAELVIPELPLAHPPNERTHLVILGAILLCLGVALTFIFRLRKGRMMDVKKCGIQDTNSKKQSDTHLEET

SEQ ID NO: 393 - protein, 288 aa, synthetic construct
  REGION 1..288: note = Q15116
MQIPQAPWPVVWAVLQLGWRPGWFLDSPDRPWNPPTFSPALLVVTEGDNATFTCSFSNTSESFVLNWYRMSPSNQTDKLAAFPEDRSQPGQDCRFRVTQLPNGRDFHMSVVRARRNDSGTYLCGAISLAPKAQIKESLRAELRVTERRAEVPTAHPSPSPRPAGQFQTLVVGVVGGLLGSLVLLVWVLAVICSRAARGTIGARRTGQPLKEDPSAVPVFSVDYGELDFQWREKTPEPPVPCVPEQTEYATIVFPSGMGTSSPARRGSADGPRSAQPLRPEDGHCSWPL

SEQ ID NO: 394 - protein, 335 aa, synthetic construct
  REGION 1..335: note = O95238
MGSASPGLSSVSPSHLLLPPDTVSRTGLEKAAAGAVGLERRDWSPSPPATPEQGLSAFYLSYFDMLYPEDSSWAAKAPGASSREEPPEEPEQCPVIDSQAPAGSLDLVPGGLTLEEHSLEQVQSMVVGEVLKDIETACKLLNITADPMDWSPSNVQKWLLWTEHQYRLPPMGKAFQELAGKELCAMSEEQFRQRSPLGGDVLHAHLDIWKSAAWMKERTSPGAIHYCASTSEESWTDSEVDSSCSGQPIHLWQFLKELLLKPHSYGRFIRWLNKEKGIFKIEDSAQVARLWGIRKNRPAMNYDKLSRSIRQYYKKGIIRKPDISQRLVYQFVHPI

SEQ ID NO: 395 - protein, 738 aa, synthetic construct
  REGION 1..738: note = P16284
MQPRWAQGATMWLGVLLTLLLCSSLEGQENSFTINSVDMKSLPDWTVQNGKNLTLQCFADVSTTSHVKPQHQMLFYKDDVLFYNISSMKSTESYFIPEVRIYDSGTYKCTVIVNNKEKTTAEYQLLVEGVPSPRVTLDKKEAIQGGIVRVNCSVPEEKAPIHFTIEKLELNEKMVKLKREKNSRDQNFVILEFPVEEQDRVLSFRCQARIISGIHMQTSESTKSELVTVTESFSTPKFHISPTGMIMEGAQLHIKCTIQVTHLAQEFPEIIIQKDKAIVAHNRHGNKAVYSVMAMVEHSGNYTCKVESSRISKVSSIVVNITELFSKPELESSFTHLDQGERLNLSCSIPGAPPANFTIQKEDTIVSQTQDFTKIASKSDSGTYICTAGIDKVVKKSNTVQIVVCEMLSQPRISYDAQFEVIKGQTIEVRCESISGTLPISYQLLKTSKVLENSTKNSNDPAVFKDNPTEDVEYQCVADNCHSHAKMLSEVLRVKVIAPVDEVQISILSSKVVESGEDIVLQCAVNEGSGPITYKFYREKEGKPFYQMTSNATQAFWTKQKASKEQEGEYYCTAFNRANHASSVPRSKILTVRVILAPWKKGLIAVVIIGVIIALLIIAAKCYFLRKAKAKQMPVEMSRPAVPLLNSNNEKMSDPNMEANSHYGHNDDVRNHAMKPINDNKEPLNSDVQYTEVQVSSAESHKDLGKKDTETVYSEVRKAVPDAVESRYSRTEGSLDGT

SEQ ID NO: 396 - protein, 911 aa, synthetic construct
  REGION 1..911: note = Q96GW7
MAQLFLPLLAALVLAQAPAALADVLEGDSSEDRAFRVRIAGDAPLQGVLGGALTIPCHVHYLRPPPSRRAVLGSPRVKWTFLSRGREAEVLVARGVRVKVNEAYRFRVALPAYPASLTDVSLALSELRPNDSGIYRCEVQHGIDDSSDAVEVKVKGVVFLYREGSARYAFSFSGAQEACARIGAHIATPEQLYAAYLGGYEQCDAGWLSDQTVRYPIQTPREACYGDMDGFPGVRNYGVVDPDDLYDVYCYAEDLNGELFLGDPPEKLTLEEARAYCQERGAEIATTGQLYAAWDGGLDHCSPGWLADGSVRYPIVTPSQRCGGGLPGVKTLFLFPNQTGFPNKHSRFNVYCFRDSAQPSAIPEASNPASNPASDGLEAIVTVTETLEELQLPQEATESESRGAIYSIPIMEDGGGGSSTPEDPAEAPRTLLEFETQSMVPPTGFSEEEGKALEEEEKYEDEEEKEEEEEEEEVEDEALWAWPSELSSPGPEASLPTEPAAQEESLSQAPARAVLQPGASPLPDGESEASRPPRVHGPPTETLPTPRERNLASPSPSTLVEAREVGEATGGPELSGVPRGESEETGSSEGAPSLLPATRAPEGTRELEAPSEDNSGRTAPAGTSVQAQPVLPTDSASRGGVAVVPASGDCVPSPCHNGGTCLEEEEGVRCLCLPGYGGDLCDVGLRFCNPGWDAFQGACYKHFSTRRSWEEAETQCRMYGAHLASISTPEEQDFINNRYREYQWIGLNDRTIEGDFLWSDGVPLLYENWNPGQPDSYFLSGENCVVMVWHDQGQWSDVPCNYHLSYTCKMGLVSCGPPPELPLAQVFGRPRLRYEVDTVLRYRCREGLAQRNLPLIRCQENGRWEAPQISCVPRRPARALHPEEDPEGRQGRLLGRWKALLIPPSSPMPGP

SEQ ID NO: 397 - protein, 1106 aa, synthetic construct
  REGION 1..1106: note = P09619
MRLPGAMPALALKGELLLLSLLLLLEPQISQGLVVTPPGPELVLNVSSTFVLTCSGSAPVVWERMSQEPPQEMAKAQDGTFSSVLTLTNLTGLDTGEYFCTHNDSRGLETDERKRLYIFVPDPTVGFLPNDAEELFIFLTEITEITIPCRVTDPQLVVTLHEKKGDVALPVPYDHQRGFSGIFEDRSYICKTTIGDREVDSDAYYVYRLQVSSINVSVNAVQTVVRQGENITLMCIVIGNEVVNFEWTYPRKESGRLVEPVTDFLLDMPYHIRSILHIPSAELEDSGTYTCNVTESVNDHQDEKAINITVVESGYVRLLGEVGTLQFAELHRSRTLQVVFEAYPPPTVLWFKDNRTLGDSSAGEIALSTRNVSETRYVSELTLVRVKVAEAGHYTMRAFHEDAEVQLSFQLQINVPVRVLELSESHPDSGEQTVRCRGRGMPQPNIIWSACRDLKRCPRELPPTLLGNSSEEESQLETNVTYWEEEQEFEVVSTLRLQHVDRPLSVRCTLRNAVGQDTQEVIVVPHSLPFKVVVISAILALVVLTIISLIILIMLWQKKPRYEIRWKVIESVSSDGHEYIYVDPMQLPYDSTWELPRDQLVLGRTLGSGAFGQVVEATAHGLSHSQATMKVAVKMLKSTARSSEKQALMSELKIMSHLGPHLNVVNLLGACTKGGPIYIITEYCRYGDLVDYLHRNKHTFLQHHSDKRRPPSAELYSNALPVGLPLPSHVSLTGESDGGYMDMSKDESVDYVPMLDMKGDVKYADIESSNYMAPYDNYVPSAPERTCRATLINESPVLSYMDLVGFSYQVANGMEFLASKNCVHRDLAARNVLICEGKLVKICDFGLARDIMRDSNYISKGSTFLPLKWMAPESIFNSLYTTLSDVWSFGILLWEIFTLGGTPYPELPMNEQFYNAIKRGYRMAQPAHASDEIYEIMQKCWEEKFEIRPPFSQLVLLLERLLGEGYKKKYQQVDEEFLRSDHPAILRSQARLPGFHGLRSPLDTSSVLYTAVQPNEGDNDYIIPLPDPKPEVADEGPLEGSPSLASSTLNEVNTSSTISCDSPLEPQDEPEPEPQLELQVEPEPELEQLPDSGCPAPRAEAEDSFL

SEQ ID NO: 398 - protein, 313 aa, synthetic construct
  REGION 1..313: note = A0A024RD25
MLLSKINSLAHLRAAPCNDLHATKLAPGKEKEPLESQYQVGPLLGSGGFGSVYSGIRVSDNLPVAIKHVEKDRISDWGELPNGTRVPMEVVLLKKVSSGFSGVIRLLDWFERPDSFVLILERPEPVQDLFDFITERGALQEELARSFFWQVLEAVRHCHNCGVLHRDIKDENILIDLNRGELKLIDFGSGALLKDTVYTDFDGTRVYSPPEWIRYHRYHGRSAAVWSLGILLYDMVCGDIPFEHDEEIIRGQVFFRQRVSSECQHLIRWCLALRPSDRPTFEEIQNHPWMQDVLLPQETAEIHLHSLSPGPSK

SEQ ID NO: 399 - protein, 100 aa, synthetic construct
  REGION 1..100: note = O15428
MADEEKLPPGWEKRMSRPSGRGYYFNHITNPSQWERPSGNSSSGGKIWQGEPARVRRSHLLVKPVKAALDLAAGNHPDQGGGPGADQRLHPEDQGRREGL

SEQ ID NO: 400 - protein, 163 aa, synthetic construct
  REGION 1..163: note = Q13526
MADEEKLPPGWEKRMSRSSGRVYYFNHITNASQWERPSGNSSSGGKNGQGEPARVRCSHLLVKHSQSRRPSSWRQEKITRTKEEALELINGYIQKIKSGEEDFESLASQFSDCSSAKARGDLGAFSRGQMQKPFEDASFALRTGEMSGPVFTDSGIHIILRTE

SEQ ID NO: 401 - protein, 45 aa, synthetic construct
  REGION 1..45: note = Q49AR7
MQKPFEDASFALRTGEMSGPVFTDSGIHIILRTECWRQTRGPNCF

SEQ ID NO: 402 - protein, 212 aa, synthetic construct
  REGION 1..212: note = Q9HBJ0
MKVFKFIGLMILLTSAFSAGSGQSPMTVLCSIDWFMVTVHPFMLNNDVCVHFHELHLGLGCPPNHVQPHAYQFTYRVTECGIRAKAVSQDMVIYSTEIHYSSKGTPSKFVIPVSCAAPQKSPWLTKPCSMRVASKSRATAQKDEKCYEVFSLSQSSQRPNCDCPPCVFSEEEHTQVPCHQAGAQEAQPLQPSHFLDISEDWSLHTDDMIGSM

SEQ ID NO: 403 - protein, 661 aa, synthetic construct
  REGION 1..661: note = P40967
MDLVLKRCLLHLAVIGALLAVGATKVPRNQDWLGVSRQLRTKAWNRQLYPEWTEAQRLDCWRGGQVSLKVSNDGPTLIGANASFSIALNFPGSQKVLPDGQVIWVNNTIINGSQVWGGQPVYPQETDDACIFPDGGPCPSGSWSQKRSFVYVWKTWGQYWQVLGGPVSGLSIGTGRAMLGTHTMEVTVYHRRGSRSYVPLAHSSSAFTITDQVPFSVSVSQLRALDGGNKHFLRNQPLTFALQLHDPSGYLAEADLSYTWDFGDSSGTLISRALVVTHTYLEPGPVTAQVVLQAAIPLTSCGSSPVPGTTDGHRPTAEAPNTTAGQVPTTEVVGTTPGQAPTAEPSGTTSVQVPTTEVISTAPVQMPTAESTGMTPEKVPVSEVMGTTLAEMSTPEATGMTPAEVSIVVLSGTTAAQVTTTEWVETTARELPIPEPEGPDASSIMSTESITGSLGPLLDGTATLRLVKRQVPLDCVLYRYGSFSVTLDIVQGIESAEILQAVPSGEGDAFELTVSCQGGLPKEACMEISSPGCQPPAQRLCQPVLPSPACQLVLHQILKGGSGTYCLNVSLADTNSLAVVSTQLIMPGQEAGLGQVPLIVGILLVLMAVVLASLIYRRRLMKQDFSVPQLPHSSSHWLRLPRIFCSCPIGENSPLLSGQQV

SEQ ID NO: 404 - protein, 882 aa, synthetic construct
  REGION 1..882: note = P29590
MEPAPARSPRPQQDPARPQEPTMPPPETPSEGRQPSPSPSPTERAPASEEEFQFLRCQQCQAEAKCPKLLPCLHTLCSGCLEASGMQCPICQAPWPLGADTPALDNVFFESLQRRLSVYRQIVDAQAVCTRCKESADFWCFECEQLLCAKCFEAHQWFLKHEARPLAELRNQSVREFLDGTRKTNNIFCSNPNHRTPTLTSIYCRGCSKPLCCSCALLDSSHSELKCDISAEIQQRQEELDAMTQALQEQDSAFGAVHAQMHAAVGQLGRARAETEELIRERVRQVVAHVRAQERELLEAVDARYQRDYEEMASRLGRLDAVLQRIRTGSALVQRMKCYASDQEVLDMHGFLRQALCRLRQEEPQSLQAAVRTDGFDEFKVRLQDLSSCITQGKDAAVSKKASPEAASTPRDPIDVDLPEEAERVKAQVQALGLAEAQPMAVVQSVPGAHPVPVYAFSIKGPSYGEDVSNTTTAQKRKCSQTQCPRKVIKMESEEGKEARLARSSPEQPRPSTSKAVSPPHLDGPPSPRSPVIGSEVFLPNSNHVASGAGEAEERVVVISSSEDSDAENSSSRELDDSSSESSDLQLEGPSTLRVLDENLADPQAEDRPLVFFDLKIDNETQKISQLAAVNRESKFRVVIQPEAFFSIYSKAVSLEVGLQHFLSFLSSMRRPILACYKLWGPGLPNFFRALEDINRLWEFQEAISGFLAALPLIRERVPGASSFKLKNLAQTYLARNMSERSAMAAVLAMRDLCRLLEVSPGPQLAQHVYPFSSLQCFASLQPLVQAAVLPRAEARLLALHNVSFMELLSAHRRDRQGGLKKYSRYLSLQTTTLPPAQPAFNLQALGTYFEGLLEGPALARAEGVSTPLAGRGLAERASQQS

SEQ ID NO: 405 - protein, 1075 aa, synthetic construct
  REGION 1..1075: note = A5A3E0
MVVEVDSMPAASSVKKPFGLRSKMGKWCCRCFPCCRESGKSNVGTSGDHDDSAMKTLRSKMGKWCRHCFPCCRGSGKSNVGASGDHDDSAMKTLRNKMGKWCCHCFPCCRGSSKSKVGAWGDYDDSAFMEPRYHVRGEDLDKLHRAAWWGKVPRKDLIVMLRDTDVNKQDKQKRTALHLASANGNSEVVKLLLDRRCQLNVLDNKKRTALIKAVQCQEDECALMLLEHGTDPNIPDEYGNTTLHYAIYNEDKLMAKALLLYGADIESKNKHGLTPLLLGVHEQKQQVVKFLIKKKANLNALDRYGRTALILAVCCGSASIVSLLLEQNIDVSSQDLSGQTAREYAVSSHHHVICQLLSDYKEKQMLKISSENSNPEQDLKLTSEEESQRFKGSENSQPEKMSQEPEINKDGDREVEEEMKKHESNNVGLLENLTNGVTAGNGDNGLIPQRKSRTPENQQFPDNESEEYHRICELLSDYKEKQMPKYSSENSNPEQDLKLTSEEESQRLKGSENGQPEKRSQEPEINKDGDRELENFMAIEEMKKHRSTHVGFPENLTNGATAGNGDDGLIPPRKSRTPESQQFPDTENEEYHSDEQNDTQKQFCEEQNTGILHDEILIHEEKQIEVVEKMNSELSLSCKKEKDILHENSTLREEIAMLRLELDTMKHQSQLREKKYLEDIESVKKRNDNLLKALQLNELTMDDDTAVLVIDNGSGMCKAGFAGDDAPRAVFPSIVGRPRQQGMMGGMHQKESYVGKEAQSKRGILTLKYPMEHGIITNWDDMEKIWHHTFYNELRVAPEEHPVLLTEATLNPKANREKMTQIMFETFNTPAMYVAIQAVLSLYTSGRTTGIVMDSGDGVTHTVPIYEGNALPHATLRLDLAGRELPDYLMKILTEHGYRFTTMAEREIVRDIKEKLCYVALDFEQEMATVASSSSLEKSYELPDGQVITIGNERFRCPEALFQPCFLGMESCGIHETTFNSIMKSDVDIRKDLYTNTVLSGGTTMYPGMAHRMQKEIAALAPSMMKIRIIAPPKRKYSVWVGGSILASLSTFQQMWISKQEYDESGPSIVHRKCL

SEQ ID NO: 406 - protein, 584 aa, synthetic construct
  REGION 1..584: note = Q86YR6
MVAEVCSMPTASTVKKPFDLRSKMGKWCHHRFPCCRGSGKSNMGTSGDHDDSFMKMLRSKMGKCCRHCFPCCRGSGTSNVGTSGDHENSFMKMLRSKMGKWCCHCFPCCRGSGKSNVGAWGDYDHSAFMEPRYHIRREDLDKLHRAAWWGKVPRKDLIVMLRDTDMNKRDKEKRTALHLASANGNSEVVQLLLDRRCQLNVLDNKKRTALIKAIQCQEDECVLMLLEHGADRNIPDEYGNTALHYAIYNEDKLMAKALLLYGADIESKNKCGLTPLLLGVHEQKQQVVKFLIKKKANLNVLDRYGRTALILAVCCGSASIVNLLLEQNVDVSSQDLSGQTAREYAVSSHHHVICELLSDYKEKQMLKISSENSNPEQDLKLTSEEESQRLKVSENSQPEKMSQEPEINKDCDREVEEEIKKHGSNPVGLPENLTNGASAGNGDDGLIPQRRSRKPENQQFPDTENEEYHSDEQNDTRKQLSEEQNTGISQDEILTNKQKQIEVAEQKMNSELSLSHKKEEDLLRENSVLQEEIAMLRLELDETKHQNQLRENKILEEIESVKEKTDKLLRAMQLNEEALTKTNI

SEQ ID NO: 407 - protein, 509 aa, synthetic construct
  REGION 1..509: note = A0A024R1E6
MERRRLWGSIQSRYISMSVWTSPRRLVELAGQSLLKDEALAIAALELLPRELFPPLFMAAFDGRHSQTLKAMVQAWPFTCLPLGVLMKGQHLHLETFKAVLDGLDVLLAQEVRPRRWKLQVLDLRKNSHQDFWTVWSGNRASLYSFPEPEAAQPMTKKRKVDGLSTEAEQPFIPVEVLVDLFLKEGACDELFSYLIEKVKRKKNVLRLCCKKLKIFAMPMQDIKMILKMVQLDSIEDLEVTCTWKLPTLAKFSPYLGQMINLRRLLLSHIHASSYISPEKEEQYIAQFTSQFLSLQCLQALYVDSLFFLRGRLDQLLRHVMNPLETLSITNCRLSEGDVMHLSQSPSVSQLSVLSLSGVMLTDVSPEPLQALLERASATLQDLVFDECGITDDQLLALLPSLSHCSQLTTLSFYGNSISISALQSLLQHLIGLSNLTHVLYPVPLESYEDIHGTLHLERLAYLHARLRELLCELGRPSMVWLSANPCPHCGDRTFYDPEPILCPCFMPN

SEQ ID NO: 408 - protein, 509 aa, synthetic construct; identical to SEQ ID NO: 407
  REGION 1..509: note = P78395

SEQ ID NO: 409 - protein, 214 aa, synthetic construct
  REGION 1..214: note = P30044
MGLAGVCALRRSAGYILVGGAGGQSAAAAARRYSEGEWASGGVRSFSRAAAAMAPIKVGDAIPAVEVFEGEPGNKVNLAELFKGKKGVLFGVPGAFTPGCSKTHLPGFVEQAEALKAKGVQVVACLSVNDAFVTGEWGRAHKAEGKVRLLADPTGAFGKETDLLLDDSLVSIFGNRRLKRFSMVVQDGIVKALNVEPDGTGLTCSLAPNIISQL

SEQ ID NO: 410 - protein, 102 aa, synthetic construct
  REGION 1..102: note = P04554
MVRYRVRSLSERSHEVYRQQLHGQEQGHHGQEEQGLSPEHVEVYERTHGQSHYRRRHCSRRRLHRIHRRQHRSCRRRKRRSCRHRRRHRRGCRTRKRTCRRH

SEQ ID NO: 411 - protein, 553 aa, synthetic construct
  REGION 1..553: note = Q96JT2
MVQRLWVSRLLRHRKAQLLLVNLLTFGLEVCLAAGITYVPPLLLEVGVEEKFMTMVLGIGPVLGLVCVPLLGSASDHWRGRYGRRRPFIWALSLGILLSLFLIPRAGWLAGLLCPDPRPLELALLILGVGLLDFCGQVCFTPLEALLSDLFRDPDHCRQAYSVYAFMISLGGCLGYLLPAIDWDTSALAPYLGTQEECLFGLLTLIFLTCVAATLLVAEEAALGPTEPAEGLSAPSLSPHCCPCRARLAFRNLGALLPRLHQLCCRMPRTLRRLFVAELCSWMALMTFTLFYTDFVGEGLYQGVPRAEPGTEARRHYDEGVRMGSLGLFLQCAISLVFSLVMDRLVQRFGTRAVYLASVAAFPVAAGATCLSHSVAVVTASAALTGFTFSALQILPYTLASLYHREKQVFLPKYRGDTGGASSEDSLMTSFLPGPKPGAPFPNGHVGAGGSGLLPPPPALCGASACDVSVRVVVGEPTEARVVPGRGICLDLAILDSAFLLSQVAPSLFMGSIVQLSQSVTAYMVSAAGLGLVAIYFATQVVFDKSDLAKYSA

SEQ ID NO: 412 - protein, 215 aa, synthetic construct [sequence omitted]

SEQ ID NO: 413 - protein, 256 aa, synthetic construct
  REGION 1..256: note = P24158
MAHRPPSPALASVLLALLLSGAARAAEIVGGHEAQPHSRPYMASLQMRGNPGSHFCGGTLIHPSFVLTAAHCLRDIPQRLVNVVLGAHNVRTQEPTQQHFSVAQVFLNNYDAENKLNDVLLIQLSSPANLSASVATVQLPQQDQPVPHGTQCLAMGWGRVGAHDPPAQVLQELNVTVVTFFCRPHNICTFVPRRKAGICFGDSGGPLICDGIIQGIDSFVIWGCATRLFPDFFTRVALYVDWIRSTLRRVEAKGRP

SEQ ID NO: 414 - protein, 919 aa, synthetic construct
  REGION 1..919: note = P55786
MWLAAAAPSLARRLLFLGPPPPPLLLLVFSRSSRRRLHSLGLAAMPEKRPFERLPADVSPINYSLCLKPDLLDFTFEGKLEAAAQVRQATNQIVMNCADIDIITASYAPEGDEEIHATGFNYQNEDEKVTLSFPSTLQTGTGTLKIDFVGELNDKMKGFYRSKYTTPSGEVRYAAVTQFEATDARRAFPCWDEPAIKATFDISLVVPKDRVALSNMNVIDRKPYPDDENLVEVKFARTPVMSTYLVAFVVGEYDFVETRSKDGVCVRVYTPVGKAEQGKFALEVAAKTLPFYKDYFNVPYPLPKIDLIAIADFAAGAMENWGLVTYRETALLIDPKNSCSSSRQWVALVVGHELAHQWFGNLVTMEWWTHLWLNEGFASWIEYLCVDHCFPEYDIWTQFVSADYTRAQELDALDNSHPIEVSVGHPSEVDEIFDAISYSKGASVIRMLHDYIGDKDFKKGMNMYLTKFQQKNAATEDLWESLENASGKPIAAVMNTWTKQMGFPLIYVEAEQVEDDRLLRLSQKKFCAGGSYVGEDCPQWMVPITISTSEDPNQAKLKILMDKPEMNVVLKNVKPDQWVKLNLGTVGFYRTQYSSAMLESLLPGIRDLSLPPVDRLGLQNDLFSLARAGIISTVEVLKVMEAFVNEPNYTVWSDLSCNLGILSTLLSHTDFYEEIQEFVKDVFSPIGERLGWDPKPGEGHLDALLRGLVLGKLGKAGHKATLEEARRRFKDHVEGKQILSADLRSPVYLTVLKHGDGTTLDIMLKLHKQADMQEEKNRIERVLGATLLPDLIQKVLTFALSEEVRPQDTVSVIGGVAGGSKHGRKAAWKFIKDNWEELYNRYQGGFLISRLIKLSVEGFAVDKMAGEVKAFFESHPAPSAERTIQQCCENILLNAAWLKRDAESIHQYLLQRKASPPTV

SEQ ID NO: 415 - protein, 219 aa, synthetic construct
  REGION 1..219: note = P28065
MLRAGAPTGDLPRAGEVHTGTTIMAVEFDGGVVMGSDSRVSAGEAVVNRVFDKLSPLHERIYCALSGSAADAQAVADMAAYQLELHGIELEEPPLVLAAANVVRNISYKYREDLSAHLMVAGWDQREGGQVYGTLGGMLTRQPFAIGGSGSTFIYGYVDAAYKPGMSPEECRRFTTDAIALAMSRDGSSGGVIYLVTITAAGVDHRVILGNELPKFYDE

SEQ ID NO: 416 - protein, 114 aa, synthetic construct
  REGION 1..114: note = D3DWI6
MAGLALQPGTALLCYSCKAQVSNEDCLQVENCTQLGEQCWTARIRAVGLLTVISKGCSLNCVDDSQDYYVGKKNITCCDTDLCNASGAHALQPAAAILALLPALGLLLWGPGQL

SEQ ID NO: 417 - protein, 123 aa, synthetic construct
  REGION 1..123: note = O43653
MKAVLLALLMAGLALQPGTALLCYSCKAQVSNEDCLQVENCTQLGEQCWTARIRAVGLLTVISKGCSLNCVDDSQDYYVGKKNITCCDTDLCNASGAHALQPAAAILALLPALGLLLWGPGQL

SEQ ID NO: 418 - protein, 320 aa, synthetic construct
  REGION 1..320: note = Q9H255
MSSCNFTHATFVLIGIPGLEKAHFWVGFPLLSMYVVAMFGNCIVVFIVRTERSLHAPMYLFLCMLAAIDLALSTSTMPKILALFWFDSREISFEACLTQMFFIHALSAIESTILLAMAFDRYVAICHPLRHAAVLNNTVTAQIGIVAVVRGSLFFFPLPLLIKRLAFCHSNVLSHSYCVHQDVMKLAYADTLPNVVYGLTAILLVMGVDVMFISLSYFLIIRTVLQLPSKSERAKAFGTCVSHIGVVLAFYVPLIGLSVVHRFGNSLHPIVRVVMGDIYLLLPPVINPIIYGAKTKQIRTRVLAMFKISCDKDLQAVGGK

SEQ ID NO: 419 - protein, 750 aa, synthetic construct
  REGION 1..750: note = Q04609
MWNLLHETDSAVATARRPRWLCAGALVLAGGFFLLGFLFGWFIKSSNEATNITPKHNMKAFLDELKAENIKKFLYNFTQIPHLAGTEQNFQLAKQIQSQWKEFGLDSVELAHYDVLLSYPNKTHPNYISIINEDGNEIFNTSLFEPPPPGYENVSDIVPPFSAFSPQGMPEGDLVYVNYARTEDFFKLERDMKINCSGKIVIARYGKVFRGNKVKNAQLAGAKGVILYSDPADYFAPGVKSYPDGWNLPGGGVQRGNILNLNGAGDPLTPGYPANEYAYRRGIAEAVGLPSIPVHPIGYYDAQKLLEKMGGSAPPDSSWRGSLKVPYNVGPGFTGNFSTQKVKMHIHSTNEVTRIYNVIGTLRGAVEPDRYVILGGHRDSWVFGGIDPQSGAAVVHEIVRSFGTLKKEGWRPRRTILFASWDAEEFGLLGSTEWAEENSRLLQERGVAYINADSSIEGNYTLRVDCTPLMYSLVHNLTKELKSPDEGFEGKSLYESWTKKSPSPEFSGMPRISKLGSGNDFEVFFQRLGIASGRARYTKNWETNKFSGYPLYHSVYETYELVEKFYDPMFKYHLTVAQVRGGMVFELANSIVLPFDCRDYAVVLRKYADKIYSISMKHPQEMKTYSVSFDSLFSAVKNFTEIASKFSERLQDFDKSNPIVLRMMNDQLMFLERAFIDPLGLPDRPFYRHVIYAPSSHNKYAGESFPGIYDALFDIESKVDPSKAWGEVKRQIYVAAFTVQAAAETLSEVA

SEQ ID NO: 420 - protein, 1306 aa, synthetic construct
  REGION 1..1306: note = NP_002829
MTMYLWLKLLAFGFAFLDTEVFVTGQSPTPSPTGLTTAKMPSVPLSSDPLPTHTTAFSPASTFERENDFSETTTSLSPDNTSTQVSPDSLDNASAFNTTGVSSVQTPHLPTHADSQTPSAGTDTQTFSGSAANAKLNPTPGSNAISDVPGERSTASTFPTDPVSPLTTTLSLAHHSSAALPARTSNTTITANTSDAYLNASETTTLSPSGSAVISTTTIATTPSKPTCDEKYANITVDYLYNKETKLFTAKLNVNENVECGNNTCTNNEVHNLTECKNASVSISHNSCTAPDKTLILDVPPGVEKFQLHDCTQVEKADTTICLKWKNIETFTCDTQNITYRFQCGNMIFDNKEIKLENLEPEHEYKCDSEILYNNHKFTNASKIIKTDFGSPGEPQIIFCRSEAAHQGVITWNPPQRSFHNFTLCYIKETEKDCLNLDKNLIKYDLQNLKPYTKYVLSLHAYIIAKVQRNGSAAMCHFTTKSAPPSQVWNMTVSMTSDNSMHVKCRPPRDRNGPHERYHLEVEAGNTLVRNESHKNCDFRVKDLQYSTDYTFKAYFHNGDYPGEPFILHHSTSYNSKALIAFLAFLIIVTSIALLVVLYKIYDLHKKRSCNLDEQQELVERDDEKQLMNVEPIHADILLETYKRKIADEGRLFLAEFQSIPRVFSKFPIKEARKPFNQNKNRYVDILPYDYNRVELSEINGDAGSNYINASYIDGFKEPRKYIAAQGPRDETVDDFWRMIWEQKATVIVMVTRCEEGNRNKCAEYWPSMEEGTRAFGDVVVKINQHKRCPDYIIQKLNIVNKKEKATGREVTHIQFTSWPDHGVPEDPHLLLKLRRRVNAFSNFFSGPIVVHCSAGVGRTGTYIGIDAMLEGLEAENKVDVYGYVVKLRRQRCLMVQVEAQYILIHQALVEYNQFGETEVNLSELHPYLHNMKKRDPPSEPSPLEAEFQRLPSYRSWRTQHIGNQEENKSKNRNSNVIPYDYNRVPLKHELEMSKESEHDSDESSDDDSDSEEPSKYINASFIMSYWKPEVMIAAQGPLKETIGDFWQMIFQRKVKVIVMLTELKHGDQEICAQYWGEGKQTYGDIEVDLKDTDKSSTYTLRVFELRHSKRKDSRTVYQYQYTNWSVEQLPAEPKELISMIQVVKQKLPQKNSSEGNKHHKSTPLLIHCRDGSQQTGIFCALLNLLESAETEEVVDIFQVVKALRKARPGMVSTFEQYQFLYDVIASTYPAQNGQVKKNNHQEDKIEFDNEVDKVKQDANCVNPLGAPEKLPEAKEQAEGSEPTSGTEGPEHSVNGPASPALNQGS

SEQ ID NO: 421 - protein, 207 aa, synthetic construct
  REGION 1..207: note = P61006
MAKTYDYLFKLLLIGDSGVGKTCVLFRFSEDAFNSTFISTIGIDFKIRTIELDGKRIKLQIWDTAGQERFRTITTAYYRGAMGIMLVYDITNEKSFDNIRNWIRNIEEHASADVEKMILGNKCDVNDKRQVSKERGEKLALDYGIKFMETSAKANINVENAFFTLARDIKAKMDKKLEGNSPQGSNQGVKITPDQQKRSSFFRCVLL

SEQ ID NO: 422 - protein, 419 aa, synthetic construct
  REGION 1..419: note = Q9UQ07
MKNYKAIGKIGEGTFSEVMKMQSLRDGNYYACKQMKQRFESIEQVNNLREIQALRRLNPHPNILMLHEVVFDRKSGSLALICELMDMNIYELIRGRRYPLSEKKIMHYMYQLCKSLDHIHRNGIFHRDVKPENILIKQDVLKLGDFGSCRSVYSKQPYTEYISTRWYRAPECLLTDGFYTYKMDLWSAGCVFYEIASLQPLFPGVNELDQISKIHDVIGTPAQKILTKFKQSRAMNFDFPFKKGSGIPLLTTNLSPQCLSLLHAMVAYDPDERIAAHQALQHPYFQEQRKTEKRALGSHRKAGFPEHPVAPEPLSNSCQISKEGRKQKQSLKQEEDRPKRRGPAYVMELPKLKLSGVVRLSSYSSPTLQSVLGSGTNGRVPVLRPLKCIPASKKTDPQKDLKPAPQQCRLPTIVRKGGR

SEQ ID NO: 423 - protein, 462 aa, synthetic construct
  REGION 1..462: note = P10276
MASNSSSCPTPGGGHLNGYPVPPYAFFFPPMLGGLSPPGALTTLQHQLPVSGYSTPSPATIETQSSSSEEIVPSPPSPPPLPRIYKPCFVCQDKSSGYHYGVSACEGCKGFFRRSIQKNMVYTCHRDKNCIINKVTRNRCQYCRLQKCFEVGMSKESVRNDRNKKKKEVPKPECSESYTLTPEVGELIEKVRKAHQETFPALCQLGKYTTNNSSEQRVSLDIDLWDKFSELSTKCIIKTVEFAKQLPGFTTLTIADQITLLKAACLDILILRICTRYTPEQDTMTFSDGLTLNRTQMHNAGFGPLTDLVFAFANQLLPLEMDDAETGLLSAICLICGDRQDLEQPDRVDMLQEPLLEALKVYVRKRRPSRPHMFPKMLMKITDLRSISAKGAERVITLKMEIPGSMPPLIQEMLENSEGLDTLSGQPGGGGRDGGGLAPPPGSCSPSLSPSSNRSSPATHSP

SEQ ID NO: 424 - protein, 189 aa, synthetic construct
  REGION 1..189: note = P01112
MTEYKLVVVGAGGVGKSALTIQLIQNHFVDEYDPTIEDSYRKQVVIDGETCLLDILDTAGQEEYSAMRDQYMRTGEGFLCVFAINNTKSFEDIHQYREQIKRVKDSDDVPMVLVGNKCDLAARTVESRQAQDLARSYGIPYIETSAKTRQGVEDAFYTLVREIRQHKLRKLNPPDESGPGCMSCKCVLS

SEQ ID NO: 425 - protein, 189 aa, synthetic construct [sequence omitted]

SEQ ID NO: 426 - protein, 189 aa, synthetic construct
  REGION 1..189: note = P01111
MTEYKLVVVGAGGVGKSALTIQLIQNHFVDEYDPTIEDSYRKQVVIDGETCLLDILDTAGQEEYSAMRDQYMRTGEGFLCVFAINNSKSFADINLYREQIKRVKDSDDVPMVLVGNKCDLPTRTVDTKQAHELAKSYGIPFIETSAKTRQGVEDAFYTLVREIRQYRMKKLNSSDDGTQGCMGLPCVVM

SEQ ID NO: 427 - protein, 181 aa, synthetic construct
  REGION 1..181: note = O15539
MCKGLAALPHSCLERAKEIKIKLGILLQKPDSVGDLVIPYNEKPEKPAKTQKTSLDEALQWRDSLDKLLQNNYGLASFKSFLKSEFSEENLEFWIACEDYKKIKSPAKMAEKAKQIYEEFIQTEAPKEVNIDHFTKDITMKNLVEPSLSSFDMAQKRIHALMEKDSLPRFVRSEFYQELIK

SEQ ID NO: 428 - protein, 724 aa, synthetic construct
  REGION 1..724: note = O75330
MSFPKAPLKRFNDPSGCAPSPGAYDVKTLEVLKGPVSFQKSQRFKQQKESKQNLNVDKDTTLPASARKVKSSESKESQKNDKDLKILEKEIRVLLQERGAQDRRIQDLETELEKMEARLNAALREKTSLSANNATLEKQLIELTRTNELLKSKFSENGNQKNLRILSLELMKLRNKRETKMRGMMAKQEGMEMKLQVTQRSLEESQGKIAQLEGKLVSIEKEKIDEKSETEKLLEYIEEISCASDQVEKYKLDIAQLEENLKEKNDEILSLKQSLEENIVILSKQVEDLNVKCQLLEKEKEDHVNRNREHNENLNAEMQNLKQKFILEQQEREKLQQKELQIDSLLQQEKELSSSLHQKLCSFQEEMVKEKNLFEEELKQTLDELDKLQQKEEQAERLVKQLEEEAKSRAEELKLLEEKLKGKEAELEKSSAAHTQATLLLQEKYDSMVQSLEDVTAQFESYKALTASEIEDLKLENSSLQEKAAKAGKNAEDVQHQILATESSNQEYVRMLLDLQTKSALKETEIKEITVSFLQKITDLQNQLKQQEEDFRKQLEDEEGRKAEKENTTAELTEEINKWRLLYEELYNKTKPFQLQLDAFEVEKQALLNEHGAAQEQLNKIRDSYAKLLGHQNLKQKIKHVVKLKDENSQLKSEVSKLRCQLAKKKQSETKLQEELNKVLGIKHFDPSKAFHHESKENFALKTPLKEGNTNCYRAPMECQESWK

SEQ ID NO: 429 - protein, 193 aa, synthetic construct
  REGION 1..193: note = P08134
MAAIRKKLVIVGDGACGKTCLLIVFSKDQFPEVYVPTVFENYIADIEVDGKQVELALWDTAGQEDYDRLRPLSYPDTDVILMCFSIDSPDSLENIPEKWTPEVKHFCPNVPIILVGNKKDLRQDEHTRRELAKMKQEPVRSEEGRDMANRISAFGYLECSAKTKEGVREVFEMATRAGLQVRKNKRRRGCPIL

SEQ ID NO: 430 - protein, 295 aa, synthetic construct [sequence omitted]

SEQ ID NO: 431 - protein, 866 aa, synthetic construct
  REGION 1..866: note = Q9UHJ3
MNGEQQLDADAGSGMEEVELSWEDYLEETGSTAVPYGSFKHVDTRLQNGFAPGMKLEVAVRTDPETYWVATVITTCEQLLLLRYDGYGEDRRADFWCDIRKADLYPIGWCEQNKKTLEAPEGIRDKVSDWDEFLRQTLIGACSPPVPLLEGLRNGRNPLDLIAPGSRLECQAFQDSLSTWIVTVVENIGGRLKLRYEGLESSDNYEHWLYYLDPFLHHVGWAAQQGYELQPPSAIRHLKNEAEWQEILAKVKEEEEEPLPSYLFKDKQVIGIHTFSVNMKLEAVDPWSPFGISPATVVKVFDEKYFLVEMDDLRPENHARRSFVCHADSPGIFPVQWSLKNGLHISPPPGYPSQDFDWADYLKQCGAEAAPQRCFPPLISEHEFKENMKLEAVNPILPEEVCVATITAVRGSYLWLQLEGSKKPIPECIVSVESMDIFPLGWCETNGHPLSTPRRARVYKQRKIAVVQPEKQVPSSRTVHEGLRNQELNSTESVMINGKYCCPKIYFNHRCFSGPYLNKGRIAELPQCVGPGNCVLVLREVLTLLINAAYKPSRVLRELQLDKDSVWHGCGEVLKAKYKGKSYRATVEIVKTADRVTEFCRQTCIKLECCPNLFGPRMVLDKCSENCSVLTKTKYTHYYGKKKNKRIGRPPGGHSNLACALKKASKRRKRRKNVFVHKKKRSSASVDNTPAGSPQGSGGEDEDDPDEGDDDSLSEGSTSEQQDELQEESEMSEKKSCSSSPTQSEISTSLPPDRQRRKRELRTFSFSDDENKPPSPKEIRIEVAERLHLDSNPLKWSVADVVRFIRSTDCAPLARIFLDQEIDGQALLLLTLPTVQECMDLKLGPAIKLCHHIERIKFAFYEQFAN

SEQ ID NO: 432 - protein, 476 aa, synthetic construct
  REGION 1..476: note = Q9UHG0
MSGSSARSSHLSQPVVKSVLVYRNGDPFYAGRRVVIHEKKVSSFEVFLKEVTGGVQAPFGAVRNIYTPRTGHRIRKLDQIQSGGNYVAGGQEAFKKLNYLDIGEIKKRPMEVVNTEVKPVIHSRINVSARFRKPLQEPCTIFLIANGDLINPASRLLIPRKTLNQWDHVLQMVTEKITLRSGAVHRLYTLEGKLVESGAELENGQFYVAVGRDKFKKLPYSELLFDKSTMRRPFGQKASSLPPIVGSRKSKGSGNDRHSKSTVGSSDNSSPQPLKRKGKKEDVNSEKLTKLKQNVKLKNSQETIPNSDEGIFKAGAERSETRGAAEVQEDEDTQVEVPVDQRPAEIVDEEEDGEKANKDAEQKEDFSGMNGDLEEEGGREATDAPEQVEEILDHSEQQARPARVNGGTDEENGEELQQVNNELQLVLDKERKSQGAGSGQDEADVDPQRPPRPEVKITSPEENENNQQNKDYAAVA

SEQ ID NO: 433 - protein, 453 aa, synthetic construct
  REGION 1..453: note = Q01196
MRIPVDASTSRRFTPPSTALSPGKMSEALPLGAPDAGAALAGKLRSGDRSMVEVLADHPGELVRTDSPNFLCSVLPTHWRCNKTLPIAFKVVALGDVPDGTLVTVMAGNDENYSAELRNATAAMKNQVARFNDLRFVGRSGRGKSFTLTITVFTNPPQVATYHRAIKITVDGPREPRRHRQKLDDQTKPGSLSFSERLSELEQLRRTAMRVSPHHPAPTPNPRASLNHSTAFNPQPQSQMQDTRQIQPSPPWSYDQSYQYLGSIASPSVHPATPISPGRASGMTTLSAELSSRLSTAPDLTAFSDPRQFPALPSISDPRMHYPGAFTYSPTPVTSGIGIGMSAMGSATRYHTYLPPPYPGSSQAQGGPFQASSPSYHLYYGASAGSYQFSMVGGERSPPRILPPCTNASTGSALLNPSLPNQSDVVEAEGSHSNSPTNMAPSARLEEAVWRPY

SEQ ID NO: 434 - protein, 359 aa, synthetic construct [sequence omitted]

SEQ ID NO: 435 - protein, 904 aa, synthetic construct
  REGION 1..904: note = Q9NXZ1
MQASPLQTSQPTPPEELHAAAYVFTNDGQQMRSDEVNLVATGHQSKKKHSRKSKRHSSSKRRKSMSSWLDKQEDAAVTHSICEERINNGQPVADNVLSTAPPWPDATIAHNIREERMENGQSRTDKVLSTAPPQLVHMAAAGIPSMSTRDLHSTVTHNIREERMENGQPQPDNVLSTGPTGLINMAATPIPAMSARDLYATVTHNVCEQKMENVQPAPDNVLLTLRPRRINMTDTGISPMSTRDPYATITYNVPEEKMEKGQPQPDNILSTASTGLINVAGAGTPAISTNGLYSTVPHNVCEEKMENDQPQPNNVLSTVQPVIIYLTATGIPGMNTRDQYATITHNVCEERVVNNQPLPSNALSTVLPGLAYLATADMPAMSTRDQHATIIHNLREEKKDNSQPTPDNVLSAVTPELINLAGAGIPPMSTRDQYATVNHHVHEARMENGQRKQDNVLSNVLSGLINMAGASIPAMSSRDLYATITHSVREEKMESGKPQTDKVISNDAPQLGHMAAGGIPSMSTKDLYATVTQNVHEERMENNQPQPSYDLSTVLPGLTYLTVAGIPAMSTRDQYATVTHNVHEEKIKNGQAASDNVFSTVPPAFINMAATGVSSMSTRDQYAAVTHNIREEKINNSQPAPGNILSTAPPWLRHMAAAGISSTITRDLYVTATHSVHEEKMTNGQQAPDNSLSTVPPGCINLSGAGISCRSTRDLYATVIHDIQEEEMENDQTPPDGFLSNSDSPELINMTGHCMPPNALDSFSHDFTSLSKDELLYKPDSNEFAVGTKNYSVSAGDPPVTVMSLVETVPNTPQISPAMAKKINDDIKYQLMKEVRRFGQNYERIFILLEEVQGSMKVKRQFVEFTIKEAARFKKVVLIQQLEKALKEIDSHCHLRKVKHMRKR

SEQ ID NO: 436 - protein, 800 aa, synthetic construct
  REGION 1..800: note = O43290
MGSSKKHRGEKEAAGTTAAAGTGGATEQPPRHREHKKHKHRSGGSGGSGGERRKRSRERGGERGSGRRGAEAEARSSTHGRERSQAEPSERRVKREKRDDGYEAAASSKTSSGDASSLSIEETNKLRAKLGLKPLEVNAIKKEAGTKEEPVTADVINPMALRQREELREKLAAAKEKRLLNQKLGKIKTLGEDDPWLDDTAAWIERSRQLQKEKDLAEKRAKLLEEMDQEFGVSTLVEEEFGQRRQDLYSARDLQGLTVEHAIDSFREGETMILTLKDKGVLQEEEDVLVNVNLVDKERAEKNVELRKKKPDYLPYAEDESVDDLAQQKPRSILSKYDEELEGERPHSFRLEQGGTADGLRERELEEIRAKLRLQAQSLSTVGPRLASEYLTPEEMVTFKKTKRRVKKIRKKEKEVVVRADDLLPLGDQTQDGDFGSRLRGRGRRRVSEVEEEKEPVPQPLPSDDTRVENMDISDEEEGGAPPPGSPQVLEEDEAELELQKQLEKGRRLRQLQQLQQLRDSGEKVVEIVKKLESRQRGWEEDEDPERKGAIVFNATSEFCRTLGEIPTYGLAGNREEQEELMDFERDEERSANGGSESDGEENIGWSTVNLDEEKQQQDFSASSTTILDEEPIVNRGLAAALLLCQNKGLLETTVQKVARVKAPNKSLPSAVYCIEDKMAIDDKYSRREEYRGFTQDFKEKDGYKPDVKIEYVDETGRKLTPKEAFRQLSHRFHGKGSGKMKTERRMKKLDEEALLKKMSSSDTPLGTVALLQEKQKAQKTPYIVLSGSGKSMNANTITK

SEQ ID NO: 437 - protein, 958 aa, synthetic construct [sequence omitted]

SEQ ID NO: 438 - protein, 963 aa, synthetic construct
  REGION 1..963: note = Q15020
MATAAETSASEPEAESKAGPKADGEEDEVKAARTRRKVLSRAVAAATYKTMGPAWDQQEEGVSESDGDEYAMASSAESSPGEYEWEYDEEEEKNQLEIERLEEQLSINVYDYNCHVDLIRLLRLEGELTKVRMARQKMSEIFPLTEELWLEWLHDEISMAQDGLDREHVYDLFEKAVKDYICPNIWLEYGQYSVGGIGQKGGLEKVRSVFERALSSVGLHMTKGLALWEAYREFESAIVEAARLEKVHSLFRRQLAIPLYDMEATFAEYEEWSEDPIPESVIQNYNKALQQLEKYKPYEEALLQAEAPRLAEYQAYIDFEMKIGDPARIQLIFERALVENCLVPDLWIRYSQYLDRQLKVKDLVLSVHNRAIRNCPWTVALWSRYLLAMERHGVDHQVISVTFEKALNAGFIQATDYVEIWQAYLDYLRRRVDFKQDSSKELEELRAAFTRALEYLKQEVEERFNESGDPSCVIMQNWARIEARLCNNMQKARELWDSIMTRGNAKYANMWLEYYNLERAHGDTQHCRKALHRAVQCTSDYPEHVCEVLLTMERTEGSLEDWDIAVQKTETRLARVNEQRMKAAEKEAALVQQEEEKAEQRKRARAEKKALKKKKKIRGPEKRGADEDDEKEWGDDEEEQPSKRRRVENSIPAAGETQNVEVAAGPAGKCAAVDVEPPSKQKEKAASLKRDMPKVLHDSSKDSITVFVSNLPYSMQEPDTKLRPLFEACGEVVQIRPIFSNRGDFRGYCYVEFKEEKSALQALEMDRKSVEGRPMFVSPCVDKSKNPDFKVFRYSTSLEKHKLFISGLPFSCTKEELEEICKAHGTVKDLRLVTNRAGKPKGLAYVEYENESQASQAVMKMDGMTIKENIIKVAISNPPQRKVPEKPETRKAPGGPMLLPQTYGARGKGRTQLSLLPRALQRPSAAAPQAENGPAAAPAVAAPAATEAPKMSNADFAKLFLRK

SEQ ID NO: 439 - protein, 760 aa, synthetic construct
  REGION 1..760: note = Q12884
MKTWVKIVFGVATSAVLALLVMCIVLRPSRVHNSEENTMRALTLKDILNGTFSYKTFFPNWISGQEYLHQSADNNIVLYNIETGQSYTILSNRTMKSVNASNYGLSPDRQFVYLESDYSKLWRYSYTATYYIYDLSNGEFVRGNELPRPIQYLCWSPVGSKLAYVYQNNIYLKQRPGDPPFQITFNGRENKIFNGIPDWVYEEEMLATKYALWWSPNGKFLAYAEFNDTDIPVIAYSYYGDEQYPRTINIPYPKAGAKNPVVRIFIIDTTYPAYVGPQEVPVPAMIASSDYYFSWLTWVTDERVCLQWLKRVQNVSVLSICDFREDWQTWDCPKTQEHIEESRTGWAGGFFVSTPVFSYDAISYYKIFSDKDGYKHIHYIKDTVENAIQITSGKWEAINIFRVTQDSLFYSSNEFEEYPGRRNIYRISIGSYPPSKKCVTCHLRKERCQYYTASFSDYAKYYALVCYGPGIPISTLHDGRTDQEIKILEENKELENALKNIQLPKEEIKKLEVDEITLWYKMILPPQFDRSKKYPLLIQVYGGPCSQSVRSVFAVNWISYLASKEGMVIALVDGRGTAFQGDKLLYAVYRKLGVYEVEDQITAVRKFIEMGFIDEKRIAIWGWSYGGYVSSLALASGTGLFKCGIAVAPVSSWEYYASVYTERFMGLPTKDDNLEHYKNSTVMARAEYFRNVDYLLIHGTADDNVHFQNSAQIAKALVNAQVDFQAMWYSDQNHGLSGLSTNHLYTHMTHFLKQCFSLSD

SEQ ID NO: 440 - protein, 375 aa, synthetic construct
  REGION 1..375: note = P36952
MDALQLANSAFAVDLFKQLCEKEPLGNVLFSPICLSTSLSLAQVGAKGDTANEIGQVLHFENVKDVPFGFQTVTSDVNKLSSFYSLKLIKRLYVDKSLNLSTEFISSTKRPYAKELETVDFKDKLEETKGQINNSIKDLTDGHFENILADNSVNDQTKILVVNAAYFVGKWMKKFSESETKECPFRVNKTDTKPVQMMNMEATFCMGNIDSINCKIIELPFQNKHLSMFILLPKDVEDESTGLEKIEKQLNSESLSQWTNPSTMANAKVKLSIPKFKVEKMIDPKACLENLGLKHIFSEDTSDFSGMSETKGVALSNVIHKVCLEITEDGGDSIEVPGARILQHKDELNADHPFIYIIRHNKTRNIIFFGKFCSP

SEQ ID NO: 441 - protein, 333 aa, synthetic construct
  REGION 1..333: note = Q969X2
MACSRPPSQCEPTSLPPGPPAGRRHLPLSRRRREMSSNKEQRSAVFVILFALITILILYSSNSANEVFHYGSLRGRSRRPVNLKKWSITDGYVPILGNKTLPSRCHQCVIVSSSSHLLGTKLGPEIERAECTIRMNDAPTTGYSADVGNKTTYRVVAHSSVFRVLRRPQEFVNRTPETVFIFWGPPSKMQKPQGSLVRVIQRAGLVFPNMEAYAVSPGRMRQFDDLFRGETGKDREKSHSWLSTGWFTMVIAVELCDHVHVYGMVPPNYCSQRPRLQRMPYHYYEPKGPDECVTYIQNEHSRKGNHHRFITEKRVFSSWAQLYGITFSHPSWT

SEQ ID NO: 442 - protein, 356 aa, synthetic construct
  REGION 1..356: note = Q92185
MSPCGRARRQTSRGAMAVLAWKFPRTRLPMGASALCVVVLCWLYIFPVYRLPNEKEIVQGVLQQGTAWRRNQTAARAFRKQMEDCCDPAHLFAMTKMNSPMGKSMWYDGEFLYSFTIDNSTYSLFPQATPFQLPLKKCAVVGNGGILKKSGCGRQIDEANFVMRCNLPPLSSEYTKDVGSKSQLVTANPSIIRQRFQNLLWSRKTFVDNMKIYNHSYIYMPAFSMKTGTEPSLRVYYTLSDVGANQTVLFANPNFLRSIGKFWKSRGIHAKRLSTGLFLVSAALGLCEEVAIYGFWPFSVNMHEQPISHHYYDNVLPFSGFHAMPEEFLQLWYLHKIGALRMQLDPCEDTSLQPTS

SEQ ID NO: 443 - protein, 418 aa, synthetic construct
  REGION 1..418: note = Q9UNP4
MRTKAAGCAERRPLQPRTEAAAAPAGRAMPSEYTYVKLRSDCSRPSLQWYTRAQSKMRRPSLLLKDILKCTLLVFGVWILYILKLNYTTEECDMKKMHYVDPDHVKRAQKYAQQVLQKECRPKFAKTSMALLFEHRYSVDLLPFVQKAPKDSEAESKYDPPFGFRKFSSKVQTLLELLPEHDLPEHLKAKTCRRCVVIGSGGILHGLELGHTLNQFDVVIRLNSAPVEGYSEHVGNKTTIRMTYPEGAPLSDLEYYSNDLFVAVLFKSVDFNWLQAMVKKETLPFWVRLFFWKQVAEKIPLQPKHFRILNPVIIKETAFDILQYSEPQSRFWGRDKNVPTIGVIAVVLATHLCDEVSLAGFGYDLNQPRTPLHYFDSQCMAAMNFQTMHNVTTETKFLLKLVKEGVVKDLSGGIDREF

SEQ ID NO: 444 - protein, 352 aa, synthetic construct
  REGION 1..352: note = A0A024R0G8
MDFLRNLFSQTLSLGSQKERLLDELTLEGVARYMQSERCRRVICLVGAGISTSAGIPDFRSPSTGLYDNLEKYHLPYPEAIFEISYFKKHPEPFFALAKELYPGQFKPTICHYFMRLLKDKGLLLRCYTQNIDTLERIAGLEQEDLVEAHGTFYTSHCVSASCRHEYPLSWMKEKIFSEVTPKCEDCQSLVKPDIVFFGESLPARFFSCMQSDFLKVDLLLVMGTSLQVQPFASLISKAPLSTPRLLINKEKAGQSDPFLGMIMGLGGGMDFDSKKAYRDVAWLGECDQGCLALAELLGWKKELEDLVRREHASIDAQSGAGVPNPSTSASPKKSPPPAKDEARTTEREKPQ

SEQ ID NO: 445 - protein, 389 aa, synthetic construct
  REGION 1..389: note = Q8IXJ6
MAEPDPSHPLETQAGKVQEAQDSDSDSEGGAAGGEADMDFLRNLFSQTLSLGSQKERLLDELTLEGVARYMQSERCRRVICLVGAGISTSAGIPDFRSPSTGLYDNLEKYHLPYPEAIFEISYFKKHPEPFFALAKELYPGQFKPTICHYFMRLLKDKGLLLRCYTQNIDTLERIAGLEQEDLVEAHGTFYTSHCVSASCRHEYPLSWMKEKIFSEVTPKCEDCQSLVKPDIVFFGESLPARFFSCMQSDFLKVDLLLVMGTSLQVQPFASLISKAPLSTPRLLINKEKAGQSDPFLGMIMGLGGGMDFDSKKAYRDVAWLGECDQGCLALAELLGWKKELEDLVRREHASIDAQSGAGVPNPSTSASPKKSPPPAKDEARTTEREKPQ

SEQ ID NO: 446 - protein, 466 aa, synthetic construct
  REGION 1..466: note = P56693
MAEEQDLSEVELSPVGSEEPRCLSPGSAPSLGPDGGGGGSGLRASPGPGELGKVKKEQQDGEADDDKFPVCIREAVSQVLSGYDWTLVPMPVRVNGASKSKPHVKRPMNAFMVWAQAARRKLADQYPHLHNAELSKTLGKLWRLLNESDKRPFIEEAERLRMQHKKDHPDYKYQPRRRKNGKAAQGEAECPGGEAEQGGTAAIQAHYKSAHLDHRHPGEGSPMSDGNPEHPSGQSHGPPTPPTTPKTELQSGKADPKRDGRSMGEGGKPHIDFGNVDIGEISHEVMSNMETFDVAELDQYLPPNGHPGHVSSYSAAGYGLGSALAVASGHSAWISKPPGVALPTVSPPGVDAKAQVKTETAGPQGPPHYTDQPSTSQIAYTSLSLPHYGSAFPSISRPQFDYSDHQPSGPYYGHSGQASGLYSAFSYMGPSQRPLYTAISDPSPSGPQSHSPTHWEQPVYTTLSRP

SEQ ID NO: 447 - protein, 151 aa, synthetic construct
  REGION 1..151: note = Q15506
MSIPFSNTHYRIPQGFGNLLEGLTREILREQPDNIPAFAAAYFESLLEKREKTNFDPAEWGSKVEDRFYNNHAFEEQEPPEKSDPKQEESQISGKEEETSVTILDSSEEDKEKEEVAAVKIQAAFRGHIAREEAKKMKTNSLQNEEKEENK

SEQ ID NO: 448 - protein, 97 aa, synthetic construct
  REGION 1..97: note = Q9NS26
MDKQSSAGGVKRSVPCDSNEANEMMPETPTGDSDPQPAPKKMKTSESSTILVVRYRRNFKRTSPEELLNDHARENRINPLQMEEEEFMEIMVEIPAK

SEQ ID NO: 449 - protein, 141 aa, synthetic construct
  REGION 1..141: note = Q5MJ09
MEQPTSSTNGEKTKSPCESNNKKNDEMQEVPNRVLAPEQSLKKTKTSEYPIIFVYYLRKGKKINSNQLENEQSQENSINPIQKEEDEGVDLSEGSSNEDEDLGPCEGPSKEDKDLDSSEGSSQEDEDLGLSEGSSQDSGED

SEQ ID NO: 450 - protein, 188 aa, synthetic construct
  REGION 1..188: note = Q16384
MNGDDTFAKRPRDDAKASEKRSKAFDDIATYFSKKEWKKMKYSEKISYVYMKRNYKAMTKLGFKVTLPPFMCNKQATDFQGNDFDNDHNRRIQVEHPQMTFGRLHRIIPKIMPKKPAEDENDSKGVSEASGPQNDGKQLHPPGKANISEKINKRSGPKRGKHAWTHRLRERKQLVIYEEISDPEEDDE

SEQ ID NO: 451 - protein, 188 aa, synthetic construct
  REGION 1..188: note = Q16385
MNGDDAFARRPTVGAQIPEKIQKAFDDIAKYFSKEEWEKMKASEKIFYVYMKRKYEAMTKLGFKATLPPFMCNKRAEDFQGNDLDNDPNRGNQVERPQMTFGRLQGISPKIMPKKPAEEGNDSEEVPEASGPQNDGKELCPPGKPTTSEKIHERSGPKRGEHAWTHRLRERKQLVIYEEISDPEEDDE

SEQ ID NO: 452 - protein, 188 aa, synthetic construct
  REGION 1..188: note = Q99909
MNGDDTFARRPTVGAQIPEKIQKAFDDIAKYFSKEEWEKMKVSEKIVYVYMKRKYEAMTKLGFKAILPSFMRNKRVTDFQGNDFDNDPNRGNQVQRPQMTFGRLQGIFPKIMPKKPAEEGNVSKEVPEASGPQNDGKQLCPPGKPTTSEKINMISGPKRGEHAWTHRLRERKQLVIYEEISDPEEDDE

SEQ ID NO: 453 - protein, 188 aa, synthetic construct
  REGION 1..188: note = O60224
MNGDDAFARRPRDDAQISEKLRKAFDDIAKYFSKKEWEKMKSSEKIVYVYMKLNYEVMTKLGFKVTLPPFMRSKRAADFHGNDFGNDRNHRNQVERPQMTFGSLQRIFPKIMPKKPAEEENGLKEVPEASGPQNDGKQLCPPGNPSTLEKINKTSGPKRGKHAWTHRLRERKQLVVYEEISDPEEDDE

SEQ ID NO: 454 - protein, 295 aa, synthetic construct
  REGION 1..295: note = P50225
MELIQDTSRPPLEYVKGVPLIKYFAEALGPLQSFQARPDDLLISTYPKSGTTWVSQILDMIYQGGDLEKCHRAPIFMRVPFLEFKAPGIPSGMETLKDTPAPRLLKTHLPLALLPQTLLDQKVKVVYVARNAKDVAVSYYHFYHMAKVHPEPGTWDSFLEKFMVGEVSYGSWYQHVQEWWELSRTHPVLYLFYEDMKENPKREIQKILEFVGRSLPEETVDFVVQHTSFKEMKKNPMTNYTTVPQEFMDHSISPFMRKGMAGDWKTTFTVAQNERFDADYAEKMAGCSLSFRSEL

SEQ ID NO: 455 - protein, 1268 aa, synthetic construct
  REGION 1..1268: note = Q8N3U4-2
MIAAPEIPTDFNLLQESETHFSSDTDFEDIEGKNQKQGKGKTCKKGKKGPAEKGKGGNGGGKPPSGPNRMNGHHQQNGVENMMLFEVVKMGKSAMQSVVDDWIESYKHDRDIALLDLINFFIQCSGCKGVVTAEMFRHMQNSEIIRKMTEEFDEDSGDYPLTMAGPQWKKFKSSFCEFIGVLVRQCQYSIIYDEYMMDTVISLLTGLSDSQVRAFRHTSTLAAMKLMTALVNVALNLSINMDNTQRQYEAERNKMIGKRANERLELLLQKRKELQENQDEIENMMNAIFKGVFVHRYRDAIAEIRAICIEEIGIWMKMYSDAFLNDSYLKYVGWTMHDKQGEVRLKCLTALQGLYYNKELNSKLELFTSRFKDRIVSMTLDKEYDVAVQAIKLLTLVLQSSEEVLTAEDCENVYHLVYSAHRPVAVAAGEFLYKKLFSRRDPEEDGMMKRRGRQGPNANLVKTLVFFFLESELHEHAAYLVDSMWDCATELLKDWECMNSLLLEEPLSGEEALTDRQESALIEIMLCTIRQAAECHPPVGRGTGKRVLTAKEKKTQLDDRTKITELFAVALPQLLAKYSVDAEKVTNLLQLPQYFDLEIYTTGRLEKHLDALLRQIRNIVEKHTDTDVLEACSKTYHALCNEEFTIFNRVDISRSQLIDELADKFNRLLEDFLQEGEEPDEDDAYQVLSTLKRITAFHNAHDLSKWDLFACNYKLLKTGIENGDMPEQIVIHALQCTHYVILWQLAKITESSSTKEDLLRLKKQMRVFCQICQHYLTNVNTTVKEQAFTILCDILMIFSHQIMSGGRDMLEPLVYTPDSSLQSELLSFILDHVFIEQDDDNNSADGQQEDEASKIEALHKRRNLLAAFCKLIVYTVVEMNTAADIFKQYMKYYNDYGDIIKETMSKTRQIDKIQCAKTLILSLQQLFNEMIQENGYNFDRSSSTFSGIKELARRFALTFGLDQLKTREAIAMLHKDGIEFAFKEPNPQGESHPPLNLAFLDILSEFSSKLLRQDKRTVYVYLEKFMTFQMSLRREDVWLPLMSYRNSLLAGGDDDTMSVISGISSRGSTVRSKKSKPSTGKRKVVEGMQLSLTEESSSSDSMWLSREQTLHTPVMMQTPQLTSTIMREPKRLRPEDSFMSVYPMQTEHHQTPLDYNTQVTWMLAQRQQEEARQQQERAAMSYVKLRTNLQHAIRRGTSLMEDDEEPIVEDVMMSSEGRIEDLNEGMDFDTMDIDLPPSKNRRERTELKPDFFDPASIMDESVLGVSMF

SEQ ID NO: 456 - protein, 490 aa, synthetic construct
  REGION 1..490: note = Q8NFT2
MESISMMGSPKSLSETFLPNGINGIKDARKVTVGVIGSGDFAKSLTIRLIRCGYHVVIGSRNPKFASEFFPHVVDVTHHEDALTKTNIIFVAIHREHYTSLWDLRHLLVGKILIDVSNNMRINQYPESNAEYLASLFPDSLIVKGFNVVSAWALQLGPKDASRQVYICSNNIQARQQVIELARQLNFIPIDLGSLSSAREIENLPLRLFTLWRGPVVVAISLATFFFLYSFVRDVIHPYARNQQSDFYKIPIEIVNKTLPIVAITLLSLVYLAGLLAAAYQLYYGTKYRRFPPWLETWLQCRKQLGLLSFFFAMVHVAYSLCLPMRRSERYLFLNMAYQQVHANIENSWNEEEVWRIEMYISFGIMSLGLLSLLAVTSIPSVSNALNWREFSFIQSTLGYVALLISTFHVLIYGWKRAFEEEYYRFYTPPNFVLALVLPSIVILGKIILFLPCISRKLKRIKKGWEKSQFLEEGMGGTIPHVSPERVTVM

SEQ ID NO: 457 - protein, 258 aa, synthetic construct [sequence omitted]

SEQ ID NO: 458 - protein, 339 aa, synthetic construct
  REGION 1..339: note = Q9UHE8
MESRKDITNQEELWKMKPRRNLEEDDYLHKDTGETSMLKRPVLLHLHQTAHADEFDCPSELQHTQELFPQWHLPIKIAAIIASLTFLYTLLREVIHPLATSHQQYFYKIPILVINKVLPMVSITLLALVYLPGVIAAIVQLHNGTKYKKFPHWLDKWMLTRKQFGLLSFFFAVLHAIYSLSYPMRRSYRYKLLNWAYQQVQQNKEDAWIEHDVWRMEIYVSLGIVGLAILALLAVTSIPSVSDSLTWREFHYIQSKLGIVSLLLGTIHALIFAWNKWIDIKQFVWYTPPTFMIAVFLPIVVLIFKSILFLPCLRKKILKIRHGWEDVTKINKTEICSQL

SEQ ID NO: 459 - protein, 165 aa, synthetic construct
  REGION 1..165: note = O15392-2
MGAPTLPPAWQPFLKDHRISTFKNWPFLEGCACTPERMAEAGFIHCPTENEPDLAQCFFCFKELEGWEPDDDPIGPGTVAYACNTSTLGGRGGRITREEHKKHSSGCAFLSVKKQFEELTLGEFLKLDRERAKNKIAKETNNKKKEFEETAEKVRRAIEQLAAMD

SEQ ID NO: 460 - protein, 142 aa, synthetic construct
  REGION 1..142: note = O15392
MGAPTLPPAWQPFLKDHRISTFKNWPFLEGCACTPERMAEAGFIHCPTENEPDLAQCFFCFKELEGWEPDDDPIEEHKKHSSGCAFLSVKKQFEELTLGEFLKLDRERAKNKIAKETNNKKKEFEETAKKVRRAIEQLAAMD

SEQ ID NO: 461 - protein, 976 aa, synthetic construct
  REGION 1..976: note = A0A024R0I2
MEKQKPFALFVPPRSSSSQVSAVKPQTLGGDSTFFKSFNKCTEDDFEFPFAKTNLSKNGENIDSDPALQKVNFLPVLEQVGNSDCHYQEGLKDSDLENSEGLSRVYSKLYKEAEKIKKWKVSTEAELRQKESKLQENRKIIEAQRKAIQELQFGNEKVSLKLEEGIQENKDLIKENNATRHLCNLLKETCARSAEKTKKYEYEREETRQVYMDLNNNIEKMITAFEELRVQAENSRLEMHFKLKEDYEKIQHLEQEYKKEINDKEKQVSLLLIQITEKENKMKDLTFLLEESRDKVNQLEEKTKLQSENLKQSIEKQHHLTKELEDIKVSLQRSVSTQKALEEDLQIATKTICQLTEEKETQMEESNKARAAHSFVVTEFETTVCSLEELLRTEQQRLEKNEDQLKILTMELQKKSSELEEMTKLTNNKEVELEELKKVLGEKETLLYENKQFEKIAEELKGTEQELIGLLQAREKEVHDLEIQLTAITTSEQYYSKEVKDLKTELENEKLKNTELTSHCNKLSLENKELTQETSDMTLELKNQQEDINNNKKQEERMLKQIENLQETETQLRNELEYVREELKQKRDEVKCKLDKSEENCNNLRKQVENKNKYIEELQQENKALKKKGTAESKQLNVYEIKVNKLELELESAKQKFGEITDTYQKEIEDKKISEENLLEEVEKAKVIADEAVKLQKEIDKRCQHKIAEMVALMEKHKHQYDKIIEERDSELGLYKSKEQEQSSLRASLEIELSNLKAELLSVKKQLEIEREEKEKLKREAKENTATLKEKKDKKTQTFLLETPEIYWKLDSKAVPSQTVSRNFTSVDHGISKDKRDYLWTSAKNTLSTPLPKAYTVKTPTKPKLQQRENLNIPIEESKKKRKMAFEFDINSDSSETTDLLSMVSEEETLKTLYRNNNPPASHLCVKTPKKAPSSLTTPGSTLKFGAIRKMREDRWAVIAKMDRKKKLKEAEKLFV

SEQ ID NO: 462 - protein, 976 aa, synthetic construct [sequence omitted]

SEQ ID NO: 463 - protein, 976 aa, synthetic construct; identical to SEQ ID NO: 461
  REGION 1..976: note = Q15431

SEQ ID NO: 464 - protein, 109 aa, synthetic construct [sequence omitted]

SEQ ID NO: 465 - protein, 488 aa, synthetic construct
  REGION 1..488: note = A4PIV7
MSVAFAAPRQRGKGEITPAAIQKMLDDNNHLIQCIMDSQNKGKTSECSQYQQMLHTNLVYLATIADSNQNMQSLLPAPPTQNMPMGPGGMNQSGPPPPPRSHNMPSDGMVGGGPPAPHMQNQMNGQMPGPNHMPMQGPGPNQLNMTNSSMNMPSSSHGSMGGYNHSVPSSQSMPVQNQMTMSQGQPMGNYGPRPNMSMQPNQGPMMHQQPPSQQYNMPQGGGQHYQGQQPPMGMMGQVNQGNHMMGQRQIPPYRPPQQGPPQQYSGQEDYYGDQYSHGGQGPPEGMNQQYYPDGHNDYGYQQPSYPEQGYDRPYEDSSQHYYEGGNSQYGQQQDAYQGPPPQQGYPPQQQQYPGQQGYPGQQQGYGPSQGGPGPQYPNYPQGQGQQYGGYRPTQPGPPQPPQQRPYGYDQIMPKKPAEDENDSKGVSEASGPQNDGKQLHPPGKANISEKINKRSGPKRGKHAWTHRLRERKQLVIYEEISDPEEDDE

SEQ ID NO: 466 - protein, 457 aa, synthetic construct
  REGION 1..457: note = A4PIV8
MSVAFAAPRQRGKGEITPAAIQKMLDDNNHLIQCIMDSQNKGKTSECSQYQQMLHTNLVYLATIADSNQNMQSLLPAPPTQNMPMGPGGMNQSGPPPPPRSHNMPSDGMVGGGPPAPHMQNQMNGQMPGPNHMPMQGPGPNQLNMTNSSMNMPSSSHGSMGGYNHSVPSSQSMPVQNQMTMSQGQPMGNYGPRPNMSMQPNQGPMMHQQPPSQQYNMPQGGGQHYQGQQPPMGMMGQVNQGNHMMGQRQIPPYRPPQQGPPQQYSGQEDYYGDQYSHGGQGPPEGMNQQYYPDGNSQYGQQQDAYQGPPPQQGYPPQQQQYPGQQGYPGQQQGYGPSQGGPGPQYPNYPQGQGQQYGGYRPTQPGPPQPPQQRPYGYDQIMPKKPAEDENDSKGVSEASGPQNDGKQLHPPGKANISEKINKRSGPKRGKHAWTHRLRERKQLVIYEEISDPEEDDE

SEQ ID NO: 467 - protein, 488 aa, synthetic construct
  REGION 1..488: note = A4PIV9
MSVAFAAPRQRGKGEITPAAIQKMLDDNNHLIQCIMDSQNKGKTSECSQYQQMLHTNLVYLATIADSNQNMQSLLPAPPTQNMPMGPGGMNQSGPPPPPRSHNMPSDGMVGGGPPAPHMQNQMNGQMPGPNHMPMQGPGPNQLNMTNSSMNMPSSSHGSMGGYNHSVPSSQSMPVQNQMTMSQGQPMGNYGPRPNMSMQPNQGPMMHQQPPSQQYNMPQGGGQHYQGQQPPMGMMGQVNQGNHMMGQRQIPPYRPPQQGPPQQYSGQEDYYGDQYSHGGQGPPEGMNQQYYPDGHNDYGYQQPSYPEQGYDRPYEDSSQHYYEGGNSQYGQQQDAYQGPPPQQGYPPQQQQYPGQQGYPGQQQGYGPSQGGPGPQYPNYPQGQGQQYGGYRPTQPGPPQPPQQRPYGYDQIMPKKPAEEGNDSEEVPEASGPQNDGKELCPPGKPTTSEKIHERSGPKRGEHAWTHRLRERKQLVIYEEISDPEEDDE

SEQ ID NO: 468 - protein, 457 aa, synthetic construct
  REGION 1..457: note = A4PIW0
MSVAFAAPRQRGKGEITPAAIQKMLDDNNHLIQCIMDSQNKGKTSECSQYQQMLHTNLVYLATIADSNQNMQSLLPAPPTQNMPMGPGGMNQSGPPPPPRSHNMPSDGMVGGGPPAPHMQNQMNGQMPGPNHMPMQGPGPNQLNMTNSSMNMPSSSHGSMGGYNHSVPSSQSMPVQNQMTMSQGQPMGNYGPRPNMSMQPNQGPMMHQQPPSQQYNMPQGGGQHYQGQQPPMGMMGQVNQGNHMMGQRQIPPYRPPQQGPPQQYSGQEDYYGDQYSHGGQGPPEGMNQQYYPDGNSQYGQQQDAYQGPPPQQGYPPQQQQYPGQQGYPGQQQGYGPSQGGPGPQYPNYPQGQGQQYGGYRPTQPGPPQPPQQRPYGYDQIMPKKPAEEGNDSEEVPEASGPQNDGKELCPPGKPTTSEKIHERSGPKRGEHAWTHRLRERKQLVIYEEISDPEEDDE

SEQ ID NO: 469 - protein, 111 aa, synthetic construct
  REGION 1..111: note = Q0VGM3
MKTNDTYMKFSWLTVPEKSLDKEHRCIVRHENNKNGVDQEIIFPPIKTDVITMDPKDNCSKDANDTLLLQLTNTSAYYMYLLLLLKSVVYFAIITCCLLRRTAFCCNGEKS

SEQ ID NO: 470 - protein, 58 aa, synthetic construct
  REGION 1..58: note = A2JGV3
MQMFPPSPLFFFLQLLKQSSRRLEHTFVFLRNFSLMLLRYIGKKRRATRFWDPRRGTP

SEQ ID NO: 471 - protein, 376 aa, synthetic construct
  REGION 1..376: note = P52655
MANSANTNTVPKLYRSVIEDVINDVRDIFLDDGVDEQVLMELKTLWENKLMQSRAVDGFHSEEQQLLLQVQQQHQPQQQQHHHHHHHQQAQPQQTVPQQAQTQQVLIPASQQATAPQVIVPDSKLIQHMNASNMSAAATAATLALPAGVTPVQQILTNSGQLLQVVRAANGAQYIFQPQQSVVLQQQVIPQMQPGGVQAPVIQQVLAPLPGGISPQTGVIIQPQQILFTGNKTQVIPTTVAAPTPAQAQITATGQQQPQAQPAQTQAPLVLQVDGTGDTSSEEDEDEEEDYDDDEEEDKEKDGAEDGQVEEEPLNSEDDVSDEEGQELFDTENVVVCQYDKIHRSKNKWKFHLKDGIMNLNGRDYIFSKAIGDAEW

SEQ ID NO: 472 - protein, 390 aa, synthetic construct
  REGION 1..390: note = P01137
MPPSGLRLLLLLLPLLWLLVLTPGRPAAGLSTCKTIDMELVKRKRIEAIRGQILSKLRLASPPSQGEVPPGPLPEAVLALYNSTRDRVAGESAEPEPEPEADYYAKEVTRVLMVETHNEIYDKFKQSTHSIYMFFNTSELREAVPEPVLLSRAELRLLRLKLKVEQHVELYQKYSNNSWRYLSNRLLAPSDSPEWLSFDVTGVVRQWLSRGGEIEGFRLSAHCSCDSRDNTLQVDINGFTTGRRGDLATIHGMNRPFLLLMATPLERAQHLQSSRHRRALDTNYCFSSTEKNCCVRQLYIDFRKDLGWKWIHEPKGYHANFCLGPCPYIWSLDTQYSKVLALYNQHNPGASAAPCCVPQALEPLPIVYYVGRKPKVEQLSNMIVRSCKCS

SEQ ID NO: 473 - protein, 567 aa, synthetic construct
  REGION 1..567: note = P37173
MGRGLLRGLWPLHIVLWTRIASTIPPHVQKSVNNDMIVTDNNGAVKFPQLCKFCDVRFSTCDNQKSCMSNCSITSICEKPQEVCVAVWRKNDENITLETVCHDPKLPYHDFILEDAASPKCIMKEKKKPGETFFMCSCSSDECNDNIIFSEEYNTSNPDLLLVIFQVTGISLLPPLGVAISVIIIFYCYRVNRQQKLSSTWETGKTRKLMEFSEHCAIILEDDRSDISSTCANNINHNTELLPIELDTLVGKGRFAEVYKAKLKQNTSEQFETVAVKIFPYEEYASWKTEKDIFSDINLKHENILQFLTAEERKTELGKQYWLITAFHAKGNLQEYLTRHVISWEDLRKLGSSLARGIAHLHSDHTPCGRPKMPIVHRDLKSSNILVKNDLTCCLCDFGLSLRLDPTLSVDDLANSGQVGTARYMAPEVLESRMNLENVESFKQTDVYSMALVLWEMTSRCNAVGEVKDYEPPFGSKVREHPCVESMKDNVLRDRGRPEIPSFWLNHQGIQMVCETLTECWDHDPEARLTAQCVAERFSELEHLDRLSGRSCSEEKIPEDGSLNTTK

SEQ ID NO: 474 - protein, 684 aa, synthetic construct [sequence omitted]

SEQ ID NO: 475 - protein, 1124 aa, synthetic construct
  REGION 1..1124: note = Q02763
MDSLASLVLCGVSLLLSGTVEGAMDLILINSLPLVSDAETSLTCIASGWRPHEPITIGRDFEALMNQHQDPLEVTQDVTREWAKKVVWKREKASKINGAYFCEGRVRGEAIRIRTMKMRQQASFLPATLTMTVDKGDNVNISFKKVLIKEEDAVIYKNGSFIHSVPRHEVPDILEVHLPHAQPQDAGVYSARYIGGNLFTSAFTRLIVRRCEAQKWGPECNHLCTACMNNGVCHEDTGECICPPGFMGRTCEKACELHTFGRTCKERCSGQEGCKSYVFCLPDPYGCSCATGWKGLQCNEACHPGFYGPDCKLRCSCNNGEMCDRFQGCLCSPGWQGLQCEREGIQRMTPKIVDLPDHIEVNSGKFNPICKASGWPLPTNEEMTLVKPDGTVLHPKDFNHTDHFSVAIFTIHRILPPDSGVWVCSVNTVAGMVEKPFNISVKVLPKPLNAPNVIDTGHNFAVINISSEPYFGDGPIKSKKLLYKPVNHYEAWQHIQVTNEIVTLNYLEPRTEYELCVQLVRRGEGGEGHPGPVRRFTTASIGLPPPRGLNLLPKSQTTLNLTWQPIFPSSEDDFYVEVERRSVQKSDQQNIKVPGNLTSVLLNNLHPREQYVVRARVNTKAQGEWSEDLTAWTLSDILPPQPENIKISNITHSSAVISWTILDGYSISSITIRYKVQGKNEDQHVDVKIKNATITQYQLKGLEPETAYQVDIFAENNIGSSNPAFSHELVTLPESQAPADLGGGKMLLIAILGSAGMTCLTVLLAFLIILQLKRANVQRRMAQAFQNVREEPAVQFNSGTLALNRKVKNNPDPTIYPVLDWNDIKFQDVIGEGNFGQVLKARIKKDGLRMDAAIKRMKEYASKDDHRDFAGELEVLCKLGHHPNIINLLGACEHRGYLYLAIEYAPHGNLLDFLRKSRVLETDPAFAIANSTASTLSSQQLLHFAADVARGMDYLSQKQFIHRDLAARNILVGENYVAKIADFGLSRGQEVYVKKTMGRLPVRWMAIESLNYSVYTTNSDVWSYGVLLWEIVSLGGTPYCGMTCAELYEKLPQGYRLEKPLNCDDEVYDLMRQCWREKPYERPSFAQILVSLNRMLEERKTYVNTTLYEKFTYAGIDCSAEEAA

SEQ ID NO: 476 - protein, 596 aa, synthetic construct
  REGION 1..596: note = P51854
MADAEARAEFPEEARPDRGTLQVLQDMASRLRIHSIRATCSTSSGHPTSCSSSSEIMSVLFFYIMRYKQSDPENPDNDRFVLAKRLSFVDVATGWLGQGLGVACGMAYTGKYFDRASYRVFCLMSDGESSEGSVWEAMAFASYYSLDNLVAIFDVNRLGHSGALPAEHCINIYQRRCEAFGWNTYVVDGRDVEALCQVFWQASQVKHKPTAVVAKTFKGRGTPSIEDAESWHAKPMPRERADAIIKLIESQIQTSRNLDPQPPIEDSPEVNITDVRMTSPPDYRVGDKIATRKACGLALAKLGYANNRVVVLDGDTRYSTFSEIFNKEYPERFIECFMAEQNMVSVALGCASRGRTIAFASTFAAFLTRAFDHIRIGGLAESNINIIGSHCGVSVGDDGASQMALEDIAMFRTIPKCTIFYPTDAVSTEHAVALAANAKGMCFIRTTRPETMVIYTPQERFEIGQAKVLRHCVSDKVTVIGAGITVYEALAAADELSKQDIFIRVIDLFTIKPLDVATIVSSAKATEGRIITVEDHYPQGGIGEAVCAAVSMDPDIQVHSLAVSGVPQSGKSEELLDMYGISARHIIVAVKCMLLN

SEQ ID NO: 477 - protein, 286 aa, synthetic construct
  REGION 1..286: note = P60174
MAEDGEEAEFHFAALYISGQWPRLRADTDLQRLGSSAMAPSRKFFVGGNWKMNGRKQSLGELIGTLNAAKVPADTEVVCAPPTAYIDFARQKLDPKIAVAAQNCYKVTNGAFTGEISPGMIKDCGATWVVLGHSERRHVFGESDELIGQKVAHALAEGLGVIACIGEKLDEREAGITEKVVFEQTKVIADNVKDWSKVVLAYEPVWAIGTGKTATPQQAQEVHEKLRGWLKSNVSDAVAQSTRIIYGGSVTGATCKELASQPDVDGFLVGGASLKPEFVDIINAKQ

SEQ ID NO: 478 - protein, 119 aa, synthetic construct
  REGION 1..119: note = Q99601
MPLVVAVIFFSLWVFALGQLEQPEISISRPANKSAHISWKASIQGFSSKIIHWYWQKPNKGLEYLLHVFLTISAQDCSGGKTKKLEVSKNAHTSTSTLKIKFLEKEDEVVYHCACWIRH

SEQ ID NO: 479 - protein, 137 aa, synthetic construct
  REGION 1..137: note = A4D1X2
MLSLLHTSTLAVLGALCVYGAGHLEQPQISSTKTLSKTARLECVVSGITISATSVYWYRERPGEVIQFLVSISYDGTVRKESGIPSGKFEVDRIPETSTSTLTIHNVEKQDIATYYCALWEVHSSRQFEPSHSINVY

SEQ ID NO: 480 - protein, 122 aa, synthetic construct
  REGION 1..122: note = Q99603
MLSLLHTSTLAVLGALCVYGAGHLEQPQISSTKTLSKTARLECVVSGITISATSVYWYRERPGEVIQFLVSISYDGTVRKESGIPSGKFEVDRIPETSTSTLTIHNVEKQDIATYYCALWEV

SEQ ID NO: 481 - protein, 122 aa, synthetic construct
  REGION 1..122: note = Q99604
MLSLLHTSTLAVLGALCVYGAGHLEQPQISSTKTLSKTARLECVVSGIKISATSVYWYRERPGEVIQFLVSISYDGTVRKESGIPSGKFEVDRIPETSTSTLTIHNVEKQDIATYYCALWEV

SEQ ID NO: 482 - protein, 793 aa, synthetic construct
  REGION 1..793: note = P48995
MMAALYPSTDLSGASSSSLPSSPSSSSPNEVMALKDVREVKEENTLNEKLFLLACDKGDYYMVKKILEENSSGDLNINCVDVLGRNAVTITIENENLDILQLLLDYGCQSADALLVAIDSEVVGAVDILLNHRPKRSSRPTIVKLMERIQNPEYSTTMDVAPVILAAHRNNYEILTMLLKQDVSLPKPHAVGCECTLCSAKNKKDSLRHSRFRLDIYRCLASPALIMLTEEDPILRAFELSADLKELSLVEVEFRNDYEELARQCKMFAKDLLAQARNSRELEVILNHTSSDEPLDKRGLLEERMNLSRLKLAIKYNQKEFVSQSNCQQFLNTVWFGQMSGYRRKPTCKKIMTVLTVGIFWPVLSLCYLIAPKSQFGRIIHTPFMKFIIHGASYFTFLLLLNLYSLVYNEDKKNTMGPALERIDYLLILWIIGMIWSDIKRLWYEGLEDFLEESRNQLSFVMNSLYLATFALKVVAHNKFHDFADRKDWDAFHPTLVAEGLFAFANVLSYLRLFFMYTTSSILGPLQISMGQMLQDFGKFLGMFLLVLFSFTIGLTQLYDKGYTSKEQKDCVGIFCEQQSNDTFHSFIGTCFALFWYIFSLAHVAIFVTRFSYGEELQSFVGAVIVGTYNVVVVIVLTKLLVAMLHKSFQLIANHEDKEWKFARAKLWLSYFDDKCTLPPPFNIIPSPKTICYMISSLSKWICSHTSKGKVKRQNSLKEWRNLKQKRDENYQKVMCCLVHRYLTSMRQKMQSTDQATVENLNELRQDLSKFRNEIRDLLGFRTSKYAMFYPRN

SEQ ID NO: 483 - protein, 1104 aa, synthetic construct
  REGION 1..1104: note = Q7Z2W7
MSFRAARLSMRNRRNDTLDSTRTLYSSASRSTDLSYSESDLVNFIQANFKKRECVFFTKDSKATENVCKCGYAQSQHMEGTQINQSEKWNYKKHTKEFPTDAFGDIQFETLGKKGKYIRLSCDTDAEILYELLTQHWHLKTPNLVISVTGGAKNFALKPRMRKIFSRLIYIAQSKGAWILTGGTHYGLMKYIGEVVRDNTISRSSEENIVAIGIAAWGMVSNRDTLIRNCDAEGYFLAQYLMDDFTRDPLYILDNNHTHLLLVDNGCHGHPTVEAKLRNQLEKYISERTIQDSNYGGKIPIVCFAQGGGKETLKAINTSIKNKIPCVVVEGSGQIADVIASLVEVEDALTSSAVKEKLVRFLPRTVSRLPEEETESWIKWLKEILECSHLLTVIKMEEAGDEIVSNAISYALYKAFSTSEQDKDNWNGQLKLLLEWNQLDLANDEIFTNDRRWESADLQEVMFTALIKDRPKFVRLFLENGLNLRKFLTHDVLTELFSNHFSTLVYRNLQIAKNSYNDALLTFVWKLVANFRRGFRKEDRNGRDEMDIELHDVSPITRHPLQALFIWAILQNKKELSKVIWEQTRGCTLAALGASKLLKTLAKVKNDINAAGESEELANEYETRAVELFTECYSSDEDLAEQLLVYSCEAWGGSNCLELAVEATDQHFIAQPGVQNFLSKQWYGEISRDTKNWKIILCLFIIPLVGCGFVSFRKKPVDKHKKLLWYYVAFFTSPFVVFSWNVVFYIAFLLLFAYVLLMDFHSVPHPPELVLYSLVFVLFCDEVRQWYVNGVNYFTDLWNVMDTLGLFYFIAGIVFRLHSSNKSSLYSGRVIFCLDYIIFTLRLIHIFTVSRNLGPKIIMLQRMLIDVFFFLFLFAVWMVAFGVARQGILRQNEQRWRWIFRSVIYEPYLAMFGQVPSDVDGTTYDFAHCTFTGNESKPLCVELDEHNLPRFPEWITIPLVCIYMLSTNILLVNLLVAMFGYTVGTVQENNDQVWKFQRYFLVQEYCSRLNIPFPFIVFAYFYMVVKKCFKCCCKEKNMESSVCCFKNEDNETLAWEGVMKENYLVKINTKANDTSEEMRHRFRQLDTKLNDLKGLLKEIANKIK

SEQ ID NO: 484 - protein, 698 aa, synthetic construct
  REGION 1..698: note = Q9BZW7
MMRSRSKSPRRPSPTARGANCDVELLKTTTRDREELKCMLEKYERHLAEIQGNVKVLKSERDKIFLLYEQAQEEITRLRREMMKSCKSPKSTTAHAILRRVETERDVAFTDLRRMTTERDSLRERLKIAQETAFNEKAHLEQRIEELECTVHNLDDERMEQMSNMTLMKETISTVEKEMKSLARKAMDTESELGRQKAENNSLRLLYENTEKDLSDTQRHLAKKKYELQLTQEKIMCLDEKIDNFTRQNIAQREEISILGGTLNDLAKEKECLQACLDKKSENIASLGESLAMKEKTISGMKNIIAEMEQASRQCTEALIVCEQDVSRMRRQLDETNDELAQIARERDILAHDNDNLQEQFAKAKQENQALSKKLNDTHNELNDIKQKVQDTNLEVNKLKNILKSEESENRQMMEQLRKANEDAENWENKARQSEADNNTLKLELITAEAEGNRLKEKVDSLNREVEQHLNAERSYKSQISTLHKSVVKMEEELQKVQFEKVSALADLSSTRELCIKLDSSKELLNRQLVAKDQEIEMRENELDSAHSEIELLRSQMANERISMQNLEALLVANRDKEYQSQIALQEKESEIQLLKEHLCLAENKMAIQSRDVAQFRNVVTQLEADLDITKRQLGTERFERERAVQELRRQNYSSNAYHMSSTMKPNTKCHSPERAHHRSPDRGLDRSLEENLCYRDF

SEQ ID NO: 485 - protein, 308 aa, synthetic construct
  REGION 1..308: note = Q01534
MRPEGSLTYRVPERLRQGFCGVGRAAQALVCASAKEGTAFRMEAVQEGAAGVESEQAALGEEAVLLLDDIMAEVEVVAEEEGLVERREEAQRAQQAVPGPGPMTPESAPEELLAVQVELEPVNAQARKAFSRQREKMERRRKPHLDRRGAVIQSVPGFWANVIANHPQMSALITDEDEDMLSYMVSLEVGEEKHPVHLCKIMLFFRSNPYFQNKVITKEYLVNITEYRASHSTPIEWYPDYEVEAYRRRHHNSSLNFFNWFSDHNFAGSNKIAEILCKDLWRNPLQYYKRMKPPEEGTETSGDSQLLS

SEQ ID NO: 486 - protein, 122 aa, synthetic construct
  REGION 1..122: note = M13231.1
MRWALLVLLAFLSPASQKSSNLEGRTKSVTRQTGSSAEITCDLTVTNTFYIHWYLHQEGKAPQRLLYYDVSTARDVLESGLSPGKYYTHTPRRWSWILRLQNLIENDSGVYYCATWDRQKLL

SEQ ID NO: 487 - protein, 267 aa, synthetic construct
  REGION 1..267: note = Q9BY14-2
MGARQIQTSSSQTSPEEAMGTPRIQHLLILLVLGASLLTSGLELYCQKGLSMTVEADPANMFNWTTEEVETCDKGALCQETILIIKAGTETAILATKGCIPEGEEAITIVQHSSPPGLIVTSYSNYCEDSFCNDKDSLSQFWEFSETTASTVSTTLHCPTCVALGTCFSAPSLPCPNGTTRCYQGKLEITGGGIESSVEVKGCTAMIGCRLMSGILAVGPMFVREACPHQLLTQPRKTENGATCLPIPVWGLQLLLPLLLPSFIHFS

SEQ ID NO: 488 - protein, 529 aa, synthetic construct [sequence omitted]

SEQ ID NO: 489 - protein, 529 aa, synthetic construct [sequence omitted]

SEQ ID NO: 490 - protein, 529 aa, synthetic construct [sequence omitted]

SEQ ID NO: 491 - protein, 529 aa, synthetic construct [sequence omitted]

SEQ ID NO: 492 - protein, 237 aa, synthetic construct [sequence omitted]

SEQ ID NO: 493 - protein, 529 aa, synthetic construct [sequence omitted]

SEQ ID NO: 494 - protein, 529 aa, synthetic construct [sequence omitted]

SEQ ID NO: 495 - protein, 529 aa, synthetic construct [sequence omitted]

SEQ ID NO: 496 - protein, 529 aa, synthetic construct [sequence omitted]

SEQ ID NO: 497 - protein, 537 aa, synthetic construct
  REGION 1..537: note = P17643
MSAPKLLSLGCIFFPLLLFQQARAQFPRQCATVEALRSGMCCPDLSPVSGPGTDRCGSSSGRGRCEAVTADSRPHSPQYPHDGRDDREVWPLRFFNRTCHCNGNFSGHNCGTCRPGWRGAACDQRVLIVRRNLLDLSKEEKNHFVRALDMAKRTTHPLFVIATRRSEEILGPDGNTPQFENISIYNYFVWTHYYSVKKTFLGVGQESFGEVDFSHEGPAFLTWHRYHLLRLEKDMQEMLQEPSFSLPYWNFATGKNVCDICTDDLMGSRSNFDSTLISPNSVFSQWRVVCDSLEDYDTLGTLCNSTEDGPIRRNPAGNVARPMVQRLPEPQDVAQCLEVGLFDTPPFYSNSTNSFRNTVEGYSDPTGKYDPAVRSLHNLAHLFLNGTGGQTHLSPNDPIFVLLHTFTDAVFDEWLRRYNADISTFPLENAPIGHNRQYNMVPFWPPVTNTEMFVTAPDNLGYTYEIQWPSREFSVPEIIAIAVVGALLLVALIFGTASYLIRARRSMDEANQPLLTDQYQCYAEEYEKLQNPNQSVV

SEQ ID NO: 498 - protein, 519 aa, synthetic construct
  REGION 1..519: note = P40126
MSPLWWGFLLSCLGCKILPGAQGQFPRVCMTVDSLVNKECCPRLGAESANVCGSQQGRGQCTEVRADTRPWSGPYILRNQDDRELWPRKFFHRTCKCTGNFAGYNCGDCKFGWTGPNCERKKPPVIRQNIHSLSPQEREQFLGALDLAKKRVHPDYVITTQHWLGLLGPNGTQPQFANCSVYDFFVWLHYYSVRDTLLGPGRPYRAIDFSHQGPAFVTWHRYHLLCLERDLQRLIGNESFALPYWNFATGRNECDVCTDQLFGAARPDDPTLISRNSRFSSWETVCDSLDDYNHLVTLCNGTYEGLLRRNQMGRNSMKLPTLKDIRDCLSLQKFDNPPFFQNSTFSFRNALEGFDKADGTLDSQVMSLHNLVHSFLNGTNALPHSAANDPIFVVLHSFTDAIFDEWMKRFNPPADAWPQELAPIGHNRMYNMVPFFPPVTNEELFLTSDQLGYSYAIDLPVSVEETPGWPTTLLVVMGTLVALVGLFVLLAFLQYRRLRKGYTPLMETHLSSKRYTEEA

SEQ ID NO: 499 - protein, 151 aa, synthetic construct
  REGION 1..151: note = Q96NZ9
MRRLLLVTSLVVVLLWEAGAVPAPKVPIKMQVKHWPSEQDPEKAWGARVVEPPEKDDQLVVLFPVQKPKLLTTEEKPRGQGRGPILPGTKAWMETEDTLGHVLSPEPDHDSLYHPPPEEDQGEERPRLWVMPNHQVLLGPEEDQDHIYHPQ

SEQ ID NO: 500 - protein, 174 aa, synthetic construct [sequence omitted]

SEQ ID NO: 501 - protein, 249 aa, synthetic construct
  REGION 1..249: note = A0A0H5AUY0
MGSDVRDLNALLPAVPSLGGGGGCALPVSGAAQWAPVLDFAPPGASAYGSLGGPAPPPAPPPPPPPPPHSFIKQEPSWGGAEPHEEQCLSAFTVHFSGQFTGTAGACRYGPFGPPPPSQASSGQARMFPNAPYLPSCLESQPAIRNQGYSTVTFDGTPSYGHTPSHHAAQFPNHSFKHEDPMGQQGSLGEQQYSVPPPVYGCHTPTDSCTGSQALLLRTPYSSDNLYQMTSQLECMTWNQMNLGATLKG

SEQ ID NO: 502 - protein, 449 aa, synthetic construct
  REGION 1..449: note = P19544
MGSDVRDLNALLPAVPSLGGGGGCALPVSGAAQWAPVLDFAPPGASAYGSLGGPAPPPAPPPPPPPPPHSFIKQEPSWGGAEPHEEQCLSAFTVHFSGQFTGTAGACRYGPFGPPPPSQASSGQARMFPNAPYLPSCLESQPAIRNQGYSTVTFDGTPSYGHTPSHHAAQFPNHSFKHEDPMGQQGSLGEQQYSVPPPVYGCHTPTDSCTGSQALLLRTPYSSDNLYQMTSQLECMTWNQMNLGATLKGVAAGSSSSVKWTEGQSNHSTGYESDNHTTPILCGAQYRIHTHGVFRGIQDVRRVPGVAPTLVRSASETSEKRPFMCAYPGCNKRYFKLSHLQMHSRKHTGEKPYQCDFKDCERRFSRSDQLKRHQRRHTGVKPFQCKTCQRKFSRSDHLKTHTRTHTGKTSEKPFSCRWPSCQKKFARSDELVRHHNMHQRNMTKLQLAL

SEQ ID NO: 503 - protein, 92 aa, synthetic construct
  REGION 1..92: note = Q06250
MQRRGQPLENHVALIHWQSAGIPASKVHNYCNMKKSRLGRSRAVRISQPLLSPRRCPLHLTERGAGLLQPQPQGPVRTPGPPSGSHPAAADN

SEQ ID NO: 504 - protein, 81 aa, synthetic construct
  REGION 1..81: note = Q9HD64
MESPKKKNQQLKVGILHLGSRQKKIRIQLRSQCATWKVICKSCISQTPGINLDLGSGVKVKIIPKEEHCKMPEAGEEQPQV

SEQ ID NO: 505 - RNA, 1098 nt, synthetic construct
  misc_feature 1..1098: note = AAA59652
  source 1..1098: mol_type = other RNA
atggccgtcatggcgccccgaaccctcctcctgctactctcgggggccctggccctgacccagacctgggcgggctcccactccatgaggtatttcttcacatccgtgtcccggcccggccgcggggagccccgcttcatcgccgtgggctacgtggacgacacgcagttcgtgcggttcgacagcgacgccgcgagccagaagatggagccgcgggcgccgtggatagagcaggaggggccggagtattgggaccaggagacacggaatatgaaggcccactcacagactgaccgagcgaacctggggaccctgcgcggctactacaaccagagcgaggacggttctcacaccatccagataatgtatggctgcgacgtggggccggacgggcgcttcctccgcgggtaccggcaggacgcctacgacggcaaggattacatcgccctgaacgaggacctgcgctcttggaccgcggcggacatggcagctcagatcaccaagcgcaagtgggaggcggtccatgcggcggagcagcggagagtctacctggagggccggtgcgtggacgggctccgcagatacctggagaacgggaaggagacgctgcagcgcacggacccccccaagacacatatgacccaccaccccatctctgaccatgaggccaccctgaggtgctgggccctgggcttctaccctgcggagatcacactgacctggcagcgggatggggaggaccagacccaggacacggagctcgtggagaccaggcctgcaggggatggaaccttccagaagtgggcggctgtggtggtgccttctggagaggagcagagatacacctgccatgtgcagcatgagggtctgcccaagcccctcaccctgagatgggagctgtcttcccagcccaccatccccatcgtgggcatcattgctggcctggttctccttggagctgtgatcactggagctgtggtcgctgccgtgatgtggaggaggaagagctcagatagaaaaggagggagttacactcaggctgcaagcagtgacagtgcccagggctctgatgtgtctctcacagcttgtaaagtgtga

SEQ ID NO: 506 - RNA, 1098 nt, synthetic construct
  misc_feature 1..1098: note = AAA59606
  source 1..1098: mol_type = other RNA
atggccgtcatggcgccccgaaccctcgtcctgctactctcgggggctctggccctgacccagacctgggcgggctctcactccatgaggtatttcttcacatccgtgtcccggcccggccgcggggagccccgcttcatcgcagtgggctacgtggacgacacgcagttcgtgcggttcgacagcgacgccgcgagccagaggatggagccgcgggcgccgtggatagagcaggagggtccggagtattgggacggggagacacggaaagtgaaggcccactcacagactcaccgagtggacctggggaccctgcgcggctactacaaccagagcgaggccggttctcacaccgtccagaggatgtatggctgcgacgtggggtcggactggcgcttcctccgcgggtaccaccagtacgcctacgacggcaaggattacatcgccctgaaagaggacctgcgctcttggaccgcggcggacatggcagctcagaccaccaagcacaagtgggaggcggcccatgtggcggagcagttgagagcctacctggagggcacgtgcgtggagtggctccgcagatacctggagaacgggaaggagacgctgcagcgcacggacgcccccaaaacgcatatgactcaccacgctgtctctgaccatgaagccaccctgaggtgctgggccctgagcttctaccctgcggagatcacactgacctggcagcgggatggggaggaccagacccaggacacggagctcgtggagaccaggcctgcaggggatggaaccttccagaagtgggcggctgtggtggtgccttctggacaggagcagagatacacctgccatgtgcagcatgagggtttgcccaagcccctcaccctgagatgggagccgtcttcccagcccaccatccccatcgtgggcatcattgctggcctggttctctttggagctgtgatcactggagctgtggtcgctgctgtgatgtggaggaggaagagctcagatagaaaaggagggagctactctcaggctgcaagcagtgacagtgcccagggctctgatgtgtctctcacagcttgtaaagtgtga

SEQ ID NO: 507 - RNA, 1263 nt, synthetic construct
  misc_feature 1..1263: note = AAH37161
  source 1..1263: mol_type = other RNA
atgcctggggggtgctcccggggccccgccgccggggacgggcgtctgcggctggcgcgactagcgctggtactcctgggctgggtctcctcgtcttctcccacctcctcggcatcctccttctcctcctcggcgccgttcctggcttccgccgtgtccgcccagcccccgctgccggaccagtgccccgcgctgtgcgagtgctccgaggcagcgcgcacagtcaagtgcgttaaccgcaatctgaccgaggtgcccacggacctgcccgcctacgtgcgcaacctcttccttaccggcaaccagctggccgtgctccctgccggcgccttcgcccgccggccgccgctggcggagctggccgcgctcaacctcagcggcagccgcctggacgaggtgcgcgcgggcgccttcgagcatctgcccagcctgcgccagctcgacctcagccacaacccactggccgacctcagtcccttcgctttctcgggcagcaatgccagcgtctcggcccccagtccccttgtggaactgatcctgaaccacatcgtgccccctgaagatgagcggcagaaccggagcttcgagggcatggtggtggcggccctgctggcgggccgtgcactgcaggggctccgccgcttggagctggccagcaaccacttcctttacctgccgcgggatgtgctggcccaactgcccagcctcaggcacctggacttaagtaataattcgctggtgagcctgacctacgtgtccttccgcaacctgacacatctagaaagcctccacctggaggacaatgccctcaaggtccttcacaatggcaccctggctgagttgcaaggtctaccccacattagggttttcctggacaacaatccctgggtctgcgactgccacatggcagacatggtgacctggctcaaggaaacagaggtagtgcagggcaaagaccggctcacctgtgcatatccggaaaaaatgaggaatcgggtcctcttggaactcaacagtgctgacctggactgtgacccgattcttcccccatccctgcaaacctcttatgtcttcctgggtattgttttagccctgataggcgctattttcctcctggttttgtatttgaaccgcaaggggataaaaaagtggatgcataacatcagagatgcctgcagggatcacatggaagggtatcattacagatatgaaatcaatgcggaccccagattaacgaacctcagttctaactcggatgtctga

SEQ ID NO: 508 - RNA, 1632 nt, synthetic construct
  misc_feature 1..1632: note = AAH33010
  source 1..1632: mol_type = other RNA
atgaggaagccagccgctggcttccttccctcactcctgaaggtgctgctcctgcctctggcacctgccgcagcccaggattcgactcaggcctccactccaggcagccctctctctcctaccgaatacgaacgcttcttcgcactgctgactccaacctggaaggcagagactacctgccgtctccgtgcaacccacggctgccggaatcccacactcgtccagctggaccaatatgaaaaccacggcttagtgcccgatggtgctgtctgctccaacctcccttatgcctcctggtttgagtctttctgccagttcactcactaccgttgctccaaccacgtctactatgccaagagagtcctgtgttcccagccagtctctattctctcacctaacactctcaaggagatagaagcttcagctgaagtctcacccaccacgatgacctcccccatctcaccccacttcacagtgacagaacgccagaccttccagccctggcctgagaggctcagcaacaacgtggaagagctcctacaatcctccttgtccctgggaggccaggagcaagcgccagagcacaagcaggagcaaggagtggagcacaggcaggagccgacacaagaacacaagcaggaagaggggcagaaacaggaagagcaagaagaggaacaggaagaggagggaaagcaggaagaaggacaggggactaaggagggacgggaggctgtgtctcagctgcagacagactcagagcccaagtttcactctgaatctctatcttctaacccttcctcttttgctccccgggtacgagaagtagagtctactcctatgataatggagaacatccaggagctcattcgatcagcccaggaaatagatgaaatgaatgaaatatatgatgagaactcctactggagaaaccaaaaccctggcagcctcctgcagctgccccacacagaggccttgctggtgctgtgctattcgatcgtggagaatacctgcatcataacccccacagccaaggcctggaagtacatggaggaggagatccttggtttcgggaagtcggtctgtgacagccttgggcggcgacacatgtctacctgtgccctctgtgacttctgctccttgaagctggagcagtgccactcagaggccagcctgcagcggcaacaatgcgacacctcccacaagactccctttgtcagccccttgcttgcctcccagagcctgtccatcggcaaccaggtagggtccccagaatcaggccgcttttacgggctggatttgtacggtgggctccacatggacttctggtgtgcccggcttgccacgaaaggctgtgaagatgtccgagtctctgggtggctccagactgagttccttagcttccaggatggggatttccctaccaagatttgtgacacagactatatccagtacccaaactactgttccttcaaaagccagcagtgtctgatgagaaaccgcaatcggaaggtgtcccgcatgagatgtctgcagaatgagacttacagtgcgctgagccctggcaaaagtgaggacgttgtgcttcgatggagccaggagttcagcaccttgactctaggccagttcggatga

SEQ ID NO: 509 - RNA, 1830 nt, synthetic construct
  misc_feature 1..1830: note = AAB58754
  source 1..1830: mol_type = other RNA
atgaagtgggtggaatcaatttttttaattttcctactaaattttactgaatccagaacactgcatagaaatgaatatggaatagcttccatattggattcttaccaatgtactgcagagataagtttagctgacctggctaccatattttttgcccagtttgttcaagaagccacttacaaggaagtaagcaaaatggtgaaagatgcattgactgcaattgagaaacccactggagatgaacagtcttcagggtgtttagaaaaccagctacctgcctttctggaagaactttgccatgagaaagaaattttggagaagtacggacattcagactgctgcagccaaagtgaagagggaagacataactgttttcttgcacacaaaaagcccactccagcatcgatcccacttttccaagttccagaacctgtcacaagctgtgaagcatatgaagaagacagggagacattcatgaacaaattcatttatgagatagcaagaaggcatcccttcctgtatgcacctacaattcttctttgggctgctcgctatgacaaaataattccatcttgctgcaaagctgaaaatgcagttgaatgcttccaaacaaaggcagcaacagttacaaaagaattaagagaaagcagcttgttaaatcaacatgcatgtgcagtaatgaaaaattttgggacccgaactttccaagccataactgttactaaactgagtcagaagtttaccaaagttaattttactgaaatccagaaactagtcctggatgtggcccatgtacatgagcactgttgcagaggagatgtgctggattgtctgcaggatggggaaaaaatcatgtcctacatatgttctcaacaagacactctgtcaaacaaaataacagaatgctgcaaactgaccacgctggaacgtggtcaatgtataattcatgcagaaaatgatgaaaaacctgaaggtctatctccaaatctaaacaggtttttaggagatagagattttaaccaattttcttcaggggaaaaaaatatcttcttggcaagttttgttcatgaatattcaagaagacatcctcagcttgctgtctcagtaattctaagagttgctaaaggataccaggagttattggagaagtgtttccagactgaaaaccctcttgaatgccaagataaaggagaagaagaattacagaaatacatccaggagagccaagcattggcaaagcgaagctgcggcctcttccagaaactaggagaatattacttacaaaatgcgtttctcgttgcttacacaaagaaagccccccagctgacctcgtcggagctgatggccatcaccagaaaaatggcagccacagcagccacttgttgccaactcagtgaggacaaactattggcctgtggcgagggagcggctgacattattatcggacacttatgtatcagacatgaaatgactccagtaaaccctggtgttggccagtgctgcacttcttcatatgccaacaggaggccatgcttcagcagcttggtggtggatgaaacatatgtccctcctgcattctctgatgacaagttcattttccataaggatctgtgccaagctcagggtgtagcgctgcaaacgatgaagcaagagtttctcattaaccttgtgaagcaaaagccacaaataacagaggaacaacttgaggctgtcattgcagatttctcaggcctgttggagaaatgctgccaaggccaggaacaggaagtctgctttgctgaagagggacaaaaactgatttcaaaaactcgtgctgctttgggagtttaa

SEQ ID NO: 510 - RNA, 2565 nt, synthetic construct
  misc_feature 1..2565: note = AAI26251
  source 1..2565: mol_type = other RNA
atgatggcgtactctgatactacaatgatgtctgatgatattgactggttacgcagccacaggggtgtgtgcaaggtagatctctacaacccagaaggacagcaagatcaggaccggaaagtgatatgctttgtcgatgtgtccaccctgaatgtagaagataaagattacaaggatgctgctagttccagctcagaaggcaacttaaacctgggaagtctggaagaaaaagagattatcgtgatcaaggacactgagaagaaagaccagtctaagacagagggatctgtatgccttttcaaacaagctccctctgatcctgtaagtgtcctcaactggcttctcagtgatctccagaagtatgccttgggtttccaacatgcactgagcccctcaacctctacctgtaaacataaagtaggagacacagagggcgaatatcacagagcatcctctgagaactgctacagtgtctatgccgatcaagtgaacatagattatttgatgaacagacctcaaaacctacgtctagaaatgacagcagctaaaaacaccaacaataatcaaagtccttcagctcctccagccaaacctcctagcactcagagagcagtcatttcccctgatggagaatgttctatagatgacctttccttctacgtcaaccgactatcttctctggtaatccagatggcccataaggaaatcaaggagaagttggaaggtaaaagcaaatgccttcatcattcaatctgtccatcccctgggaacaaagagagaatcagtccccgaactcctgcgagcaagattgcttctgaaatggcctatgaagctgtggaactgacagctgcagaaatgcgtggcactggagaggagtccagggaaggtggccagaaaagctttctatatagcgaattatccaacaagagcaaaagtggagacaaacagatgtcccagagagagagcaaagaatttgcagattccatcagcaaggggctcatggtttatgcaaatcaggtggcatctgacatgatggtctctctcatgaagaccttgaaagtgcacagctctgggaagccaattccagcatctgtggtcctgaagagggtgttgctaaggcacaccaaggagattgtgtccgatttgattgattcttgcatgaagaacctgcataatattactggggtcctgatgactgactcagactttgtctcagctgtcaagagaaatctgttcaaccagtggaaacaaaatgctacagacatcatggaggccatgctgaagcgcttggtcagtgcccttataggtgaggagaaggagactaagtctcagagtctgtcatatgcatctttaaaagctgggtcccatgatcccaaatgcaggaatcagagtcttgaattctccaccatgaaagctgaaatgaaagagagggacaaaggcaaaatgaaatcagacccatgcaagtcactgactagtgctgagaaagtcggtgaacacattctcaaagagggcctaaccatctggaaccaaaagcaaggaaactcatgcaaggtggctaccaaagcatgcagcaataaagatgagaaaggagaaaagatcaatgcttccacagattcactggccaaggacctgattgtctctgcccttaagctgatccagtaccatctgacccagcagactaagggcaaagatacatgtgaagaagactgtcctggttccaccatgggctatatggctcagagtactcaatatgaaaagtgtggaggtggccaaagtgccaaagcactttcagtgaaacaactagaatctcacagagcccctggaccatccacctgtcaaaaggagaaccaacacctggactcccagaaaatggatatgtcaaacatcgttctaatgctgattcagaaactgcttaatgagaaccccttcaaatgtgaggatccatgcgaaggtgagaacaagtgttctgagcccagggcaagcaaagcagcttccatgtccaacagatctgacaaagcggaagaacaatgccaggagcatcaagaacttgactgtaccagtgggatgaagcaagcgaacgggcaatttatagataaactagtagaatctgtgatgaagctctgccttatcatggctaagtatagcaacgatggggcagcccttgctgagttggaagaacaagcagcctcggcaaataagcccaatttcaggggcaccagatgcattcacagtggtgcaatgccacagaactatcaagactctcttggacatgaagtaattgtcaataatcagtgctctacaaatagcttgcagaagcagctccaggctgtcctgcagtggattgcagcctcccagtttaacgtgcccatgctctacttcatgggagataaggatggacaactggaaaagcttcctcaggtttcagctaaagcagcagagaaggggtacagtgtaggaggtcttcttcaagaggtcatgaagtttgccaaggaacggcaaccagatgaagctgtgggaaaggtggccaggaaacagttgctggactggctgctcgctaacctgtga

SEQ ID NO: 511 - RNA, 1251 nt, synthetic construct
  misc_feature 1..1251: note = BAG61782
  source 1..1251: mol_type = other RNA
atggtggactaccacgcggcgaaccagtcgtaccagtacggccccagcagcgcgggcaatggcgctggcggcgggggcagcatgggcgactacatggcccaggaggacgactgggaccgggacctgctgctggacccggcctgggagaagcagcagcgcaagaccttcacggcatggtgcaactcccacctgcggaaggcaggcacacagatcgagaacattgatgaggacttccgagacgggctcaagctcatgctgctcctggaggtcatatcaggggagcggttacctaagccggagcgggggaagatgagagtgcacaaaatcaacaatgtgaacaaagcgctggactttattgccagcaaaggcgtcaagctggtctccatcggggcagaagagattgtggacggcaacgcaaagatgaccctgggaatgatctggaccatcatccttaggttcgccatccaggacatctccgtggaagagacctcggccaaggaagggctccttctctggtgccagagaaagacagccccgtataagaacgtcaatgtgcagaacttccacatcagctggaaggatggtcttgccttcaatgccctgatccaccggcacagaccagagctgattgagtatgacaagctgaggaaggacgaccctgtcaccaacctgaacaatgccttcgaagtggctgagaaatacctcgacatccccaagatgctggatgcagaggacatcgtgaacacggcccggcccgacgagaaggccataatgacctatgtgtccagcttctaccatgccttttcaggagcgcagaaggctgaaactgccgccaaccggatctgtaaggtgctggctgtcaaccaagagaacgagcacctgatggaggactacgagaagctggccagcgacctcctggagtggatccggcgcaccatcccctggctggaggaccgtgtgccccaaaagactatccaggagatgcagcagaagctggaggacttccgcgactaccggcgtgtgcacaagccgcccaaggtgcaggagaagtgccagctggagatcaacttcaacacgctgcagaccaagctgcgcctcagcaaccggcccgccttcatgccctcctggaggagcagagcaagcagcagtccaacgagcacctgcgccgccagttcgccagccaggccaatgttgtggggccctggatccagaccaagatggaggagatcgggcgcatctccattgagatga

SEQ ID NO: 512 - RNA, 1689 nt, synthetic construct
  misc_feature 1..1689: note = BAG65349
  source 1..1689: mol_type = other RNA
atggtggactaccacgcggcgaaccagtcgtaccagtacggccccagcagcgcgggcaatggcgctggcggcgggggcagcatgggcgactacatggcccaggaggacgactgggaccgggacctgctgctggacccggcctgggagaagcagcagcgcaagaccttcacggcatggtgcaactcccacctgcggaaggcaggcacacagatcgagaacattgatgaggacttccgagacgggctcaagctcatgctgctcctggaggtcatatcaggggagcggttacctaagccggagcgggggaagatgagagtgcacaaaatcaacaatgtgaacaaagcgctggactttattgccagcaaaggcgtcaagctggtctccatcggggcagaagagattgtggacggcaacgcaaagatgaccctgggaatgatctggaccatcatccttaggttcgccatccaggacatctccgtggaagagacctcggccaaggaagggctccttctctggtgccagagaaagacagccccatataagaacgtcaatgtgcagaacttccacatcagctggaaggatggtcttgccttcaatgccctgatccaccggcacagaccagagctgattgagtatgacaagctgaggaaggacgaccctgtcaccaacctgaacaatgccttcgaagtggctgagaaatacctcgacatccccaagatgctggatgcagaggacatcgtgaacacggcccggcccgacgagaaggccataatgacctatgtgtccagcttctaccatgccttttcaggagcgcagaaggctgaaactgccgccaaccggatctgtaaggtgctggctgtcaaccaagagaacgagcacctgatggaggactacgagaagctggccagcgacctcctggagtggatccagcgcaccatcccctggctggaggaccgtgtgccccaaaaggctatccaggagatgcagcagaagctggaggacttccgcgactaccggcgtgtgcacaagccgcccaaggtgcaggagaagtgccagctggagatcaacttcaacacgctgcagaccaagctgcgcctcagcaaccggcccgccttcatgccctccgagggcaagatggtctcggacatcaacaatggctggcagcacttggagcaggctgagaagggctacgaggagtggctgctgaatgagatccgcaggctggagcggctcgaccacctggcagagaagttccggcagaaggcctccatccacgaggcctggactgacgggaaggaagccatgctgaagcaccgggactacgagacggccacactatcggacatcaaagccctcattcgcaagcacgaggccttcgagagcgacctggctgcgcaccaggaccgcgtggagcagatcgccgccattgcccaggagctcaacgagctggattactacgactcccacaatgtcaacacccccgacggcctccaggaggggcctgggcagccccacagtcccattcctccactctgtatctatgcaaagcactctctgcagtcctccggggtgggtgggtgggcagggaggggctggggcaggctctctcctctctctctttgtgggttggccaggaggttcccccgaccaggttggggagacttggggccagcgcttctggtctggtaa

SEQ ID NO: 513 - RNA, 2736 nt, synthetic construct
  misc_feature 1..2736: note = AAH05033
  source 1..2736: mol_type = other RNA
atggtggactaccacgcggcgaaccagtcgtaccagtacggccccagcagcgcgggcaatggcgctggcggcgggggcagcatgggcgactacatggcccaggaggacgactgggaccgggacctgctgctggacccggcctgggagaagcagcagcgcaagaccttcacggcatggtgcaactcccacctgcggaaggcaggcacacagatcgagaacattgatgaggacttccgagacgggctcaagctcatgctgctcctggaggtcatatcaggggagcggttacctaagccggagcgggggaagatgagagtgcacaaaatcaacaatgtgaacaaagcgctggactttattgccagcaaaggcgtcaagctggtctccatcggggcagaagagattgtggacggcaacgcaaagatgaccctgggaatgatctggaccatcatccttaggttcgccatccaggacatctccgtggaagagacctcggccaaggaagggctccttctctggtgccagagaaagacagccccgtataagaacgtcaatgtgcagaacttccacatcagctggaaggatggtcttgccttcaatgccctgatccaccggcacagaccagagctgattgagtatgacaagctgaggaaggacgaccctgtcaccaacctgaacaatgccttcgaagtggctgagaaatacctcgacatccccaagatgctggatgcagaggacatcgtgaacacggcccggcccgacgagaaggccataatgacctatgtgtccagcttctaccatgccttttcaggagcgcagaaggctgaaactgccgccaaccggatctgtaaggtgctggctgtcaaccaagagaacgagcacctgatggaggactacgagaagctggccagcgacctcctggagtggatccggcgcaccatcccctggctggaggaccgtgtgccccaaaagactatccaggagatgcagcagaagctggaggacttccgcgactaccggcgtgtgcacaagccgcccaaggtgcaggagaagtgccagctggagatcaacttcaacacgctgcagaccaagctgcgcctcagcaaccggcccgccttcatgccctccgagggcaagatggtctcggacatcaacaatggctggcagcacttggagcaggctgagaagggctacgaggagtggctgctgaatgagatccgcaggctggagcggctcgaccacctggcagagaagttccggcagaaggcctccatccacgaggcctggactgacgggaaggaagccatgctgaagcaccgggactacgagacggccacactatcggacatcaaagccctcattcgcaagcacgaggccttcgagagcgacctggctgcgcaccaggaccgcgtggagcagatcgccgccattgcccaggagctcaacgagctggattactacgactcccacaatgtcaacacccggtgccagaagatctgtgaccagtgggacgccctcggctctctgacacatagtcgcagggaagccctggagaaaacagagaagcagctggaggccatcgaccagctgcacctggaatacgccaagcgcgcggcccccttcaacaactggatggagagcgccatggaggacctccaggacatgttcatcgtccataccatcgaggagattgagggcctgatctcagcccatgaccagttcaagtccaccctgccggacgccgatagggagcgcgaggccatcctggccatccacaaggaggcccagaggatcgctgagagcaaccacatcaagctgtcgggcagcaacccctacaccaccgtcaccccgcaaatcatcaactccaagtgggagaaggtgcagcagctggtgccaaaacgggaccatgccctcctggaggagcagagcaagcagcagtccaacgagcacctgcgccgccagttcgccagccaggccaatgttgtggggccctggatccagaccaagatggaggagatcgggcgcatctccattgagatgaacgggaccctggaggaccagctgagccacctgaagcagtatgaacgcagcatcgtggactacaagcccaacctggacctgctggagcagcagcaccagctcatccaggaggccctcatcttcgacaacaagcacaccaactataccatggagcacatccgcgtgggctgggagcagctgctcaccaccattgcccgcaccatcaacgaggtggagaaccagatcctcacccgcgacgccaagggcatcagccaggagcagatgcaggagttccgggcgtccttcaaccacttcgacaaggatcatggcggggcgctggggcccgaggagttcaaggcctgcctcatcagcctgggctacgacgtggagaacgaccggcagggtgaggccgagttcaaccgcatcatgagcctggtcgaccccaaccatagcggccttgtgaccttccaagccttcatcgacttcatgtcgcgggagaccaccgacacggacacggctgaccaggtcatcgcttccttcaaggtcttagcaggggacaagaacttcatcacagctgaggagctgcggagagagctgccccccgaccaggccgagtactgcatcgcccgcatggcgccataccagggccctgacgccgtgcccggtgccctcgactacaagtccttctccacggccttgtatggcgagagcgacctgtga

SEQ ID NO: 514 - RNA, 597 nt, synthetic construct
  misc_feature 1..597: note = EAX10817
  source 1..597: mol_type = other RNA
atggcactgcagggcatctcggtcatggagctgtccggcctggccccgggcccgttctgtgctatggtcctggctgacttcggggcgcgtgtggtacgcgtggaccggcccggctcccgctacgacgtgagccgcttgggccggggcaagcgctcgctagtgctggacctgaagcagccgcggggagccgccgtgctgcggcgtctgtgcaagcggtcggatgtgctgctggagcccttccgccgcggtgtcatggagaaactccagctgggcccagagattctgcagcgggaaaatccaaggcttatttatgccaggctgagtggatttggccagtcaggaagcttctgccggttagctggccacgatatcaactatttggctttgtcaggtggaaggaacagcatatttaagttcttttctgtggaaaactcagaaatcgagtctgtgggaagcacctcgaggacagaacatgttggatggtggagcacctttctatacgacttacaggacagcagatggggaattcatggctgttggagcaatagaaccccagttctacgagctgctgatcaaaggacttggactaaagtctga

SEQ ID NO: 515 - RNA, 597 nt, synthetic construct
  misc_feature 1..597: note = BAF85677
  source 1..597: mol_type = other RNA
atggcactgcagggcatctcggtcgtggagctgtccggcctggccccgggcccgttctgtgctatggtcctggctgacttcggggcgcgtgtggtacgcgtggaccggcccggctcccgctacgacgtgagccgcttgggccggggcaagcgctcgctagtgctggacctgaagcagccgcggggagccgccgtgctgcggcgtctgtgcaagcggtcggatgtgctgctggagcccttccgccgcggtgtcatggagaaactccagctgggcccagagattctgcagcgggaaaatccaaggcttatttatgccaggctgagtggatttggccagtcaggaagcttctgccggttagctggccacgatatcaactatttggctttgtcaggtggaaggaacagcatatttaagttcttttctgtggaaaactcagaaatcgagtctgtgggaagcacctcgaggacagaacatgttggatggtggagcacctttctatacgacttacaggacagcagatggggaattcatggctgttggagcaatagaaccccatttctacgagctgctgatcaaaggacttggactaaagtctga

SEQ ID NO: 516 - RNA, 2763 nt, synthetic construct
  misc_feature 1..2763: note = EAX05380
  source 1..2763: mol_type = other RNA
atggaagtgcagttagggctgggaagggtctaccctcggccgccgtccaagacctaccgaggagctttccagaatctgttccagagcgtgcgcgaagtgatccagaacccgggccccaggcacccagaggccgcgagcgcagcacctcccggcgccagtttgctgctgctgcagcagcagcagcagcagcagcagcagcagcagcagcagcagcagcagcagcagcagcagcagcagcaagagactagccccaggcagcagcagcagcagcagggtgaggatggttctccccaagcccatcgtagaggccccacaggctacctggtcctggatgaggaacagcaaccttcacagccgcagtcggccctggagtgccaccccgagagaggttgcgtcccagagcctggagccgccgtggccgccagcaaggggctgccgcagcagctgccagcacctccggacgaggatgactcagctgccccatccacgttgtccctgctgggccccactttccccggcttaagcagctgctccgctgaccttaaagacatcctgagcgaggccagcaccatgcaactccttcagcaacagcagcaggaagcagtatccgaaggcagcagcagcgggagagcgagggaggcctcgggggctcccacttcctccaaggacaattacttagggggcacttcgaccatttctgacaacgccaaggagttgtgtaaggcagtgtcggtgtccatgggcctgggtgtggaggcgttggagcatctgagtccaggggaacagcttcggggggattgcatgtacgccccacttttgggagttccacccgctgtgcgtcccactccttgtgccccattggccgaatgcaaaggttctctgctagacgacagcgcaggcaagagcactgaagatactgctgagtattcccctttcaagggaggttacaccaaagggctagaaggcgagagcctaggctgctctggcagcgctgcagcagggagctccgggacacttgaactgccgtctaccctgtctctctacaagtccggagcactggacgaggcagctgcgtaccagagtcgcgactactacaactttccactggctctggccggaccgccgccccctccgccgcctccccatccccacgctcgcatcaagctggagaacccgctggactacggcagcgcctgggcggctgcggcggcgcagtgccgctatggggacctggcgagcctgcatggcgcgggtgcagcgggacccggttctgggtcaccctcagccgccgcttcctcatcctggcacactctcttcacagccgaagaaggccagttgtatggaccgtgtggtggtggtgggggtggtggcggcggcggcggcggcggcggcggcggcggcggcggcggcggcggcggcgaggcgggagctgtagccccctacggctacactcggccccctcaggggctggcgggccaggaaagcgacttcaccgcacctgatgtgtggtaccctggcggcatggtgagcagagtgccctatcccagtcccacttgtgtcaaaagcgaaatgggcccctggatggatagctactccggaccttacggggacatgcgtttggagactgccagggaccatgttttgcccattgactattactttccaccccagaagacctgcctgatctgtggagatgaagcttctgggtgtcactatggagctctcacatgtggaagctgcaaggtcttcttcaaaagagccgctgaagggaaacagaagtacctgtgcgccagcagaaatgattgcactattgataaattccgaaggaaaaattgtccatcttgtcgtcttcggaaatgttatgaagcagggatgactctgggagcccggaagctgaagaaacttggtaatctgaaactacaggaggaaggagaggcttccagcaccaccagccccactgaggagacaacccagaagctgacagtgtcacacattgaaggctatgaatgtcagcccatctttctgaatgtcctggaagccattgagccaggtgtagtgtgtgctggacacgacaacaaccagcccgactcctttgcagccttgctctctagcctcaatgaactgggagagagacagcttgtacacgtggtcaagtgggccaaggccttgcctggcttccgcaacttacacgtggacgaccagatggctgtcattcagtactcctggatggggctcatggtgtttgccatgggctggcgatccttcaccaatgtcaactccaggatgctctacttcgcccctgatctggttttcaatgagtaccgcatgcacaagtcccggatgtacagccagtgtgtccgaatgaggcacctctctcaagagtttggatggctccaaatcaccccccaggaattcctgtgcatgaaagcactgctactcttcagcattattccagtggatgggctgaaaaatcaaaaattctttgatgaacttcgaatgaactacatcaaggaactcgatcgtatcattgcatgcaaaagaaaaaatcccacatcctgctcaagacgcttctaccagctcaccaagctcctggactccgtgcagcctattgcgagagagctgcatcagttcacttttgacctgctaatcaagtcacacatggtgagcgtggactttccggaaatgatggcagagatcatctctgtgcaagtgcccaagatcctttctgggaaagtcaagcccatctatttccacacccagtga

SEQ ID NO: 517 - RNA, 1239 nt, synthetic construct
  misc_feature 1..1239: note = AAH64630
  source 1..1239: mol_type = other RNA
atggctccagtggagcacgttgtggcggatgctggggctttcctgcggcatgcggctctgcaggacatcgggaagaacatttacaccatccgggaggtggtcactgagattcgggacaaggccacacgcaggcggctcgctgtcctgccctacgagctgcggttcaaggagcccttaccggaatacgtgcggctggtgactgagttttcaaagaaaacaggagactaccccagcctctctgccacggacatccaagtgcttgcactcacataccagttggaagcagagtttgttggggtgtctcacctaaaacaagaaccacagaaggttaaggtgagctcatcgattcagcacccagaaacacctctgcacatttctggtttccatctgccctacaagcctaaacccccacaagaaacagaaaaaggacactcagcttgtgagcctgagaacctggaatttagttccttcatgttctggagaaaccctttgcccaacatcgatcatgaactgcaggagctgctgattgacagaggtgaggacgttccaagtgaggaggaggaggaggaagaaaacgggtttgaagacagaaaagatgacagcgatgacgacgggggtggctggataacccccagtaacatcaagcagatccagcaggagctggagcagtgtgacgtccccgaggacgtgcgggttggctgcctgaccacagacttcgccatgcagaatgttctgctgcagatggggctgcacgtgctggcggtgaacggcatgctgattcgtgaggcccggagctacatcttgcgctgccatggctgtttcaagacaacgtctgacatgagccgagtgttctgctcacactgtgggaacaagaccctgaagaaagtgtccgtgaccgtcagcgacgacggcaccctgcacatgcacttctcccgcaaccccaaggtgctgaacccccgcggcctccggtactcgcttcccactcccaaagggggcaaatacgccatcaacccccatctcaccgaggatcagcgcttccctcagctgcgactctcccaaaaggccaggcagaaaaccaacgtgttcgcccctgactacatcgccggggtgtcaccctttgtcgagaatgacatctccagccgctcagctaccctgcaggtccgggacagcaccttgggagctgggcggagacgcttaaatcccaacgcttccagaaagaagtttgtgaagaaaaggtga

SEQ ID NO: 518 - RNA, 984 nt, synthetic construct
  misc_feature 1..984: note = AAH69102
  source 1..984: mol_type = other RNA
atgcagatgcctgctatgatgtctctgcttcttgtgtctgtgggcctcatggaagcacttcaggcccagagccaccccatcacacgacgagacctcttctctcaagagattcagctggacatggccctggcctcctttgatgaccagtacgctggctgtgctgctgccatgacagctgctctcccggatctcaaccacacggagttccaggccaaccaggtgtatgcagacagctggacactggcaagcagccaatggcaggagcgtcaggccaggtggccagagtggagtctcagccccacccgtccatccccgccacccctgggcttccgcgatgagcatggggtggccctcctggcctacacagccaacagccccctgcacaaggagttcaatgcagccgtgcgtgaggcgggccgctcccgggcccactacctccaccacttctccttcaagacactccatttcctgctgactgaggccctgcagctcctgggcagcggccagcgtccaccccggtgccaccaggtgttccgaggtgtgcacggcctgcgcttccggccagcagggccccgggccaccgtgaggctggggggctttgcttctgcctccctgaagcatgttgcagcccagcagtttggtgaggacaccttcttcggcatctggacctgccttggggcccctatcaagggctactccttcttccctggagaggaagaggtgctgatccccccctttgagaccttccaagtgatcaatgccagcagactggcccagggccccgcccgcatctacctccgagccctgggcaagcacagcacctacaactgcgagtacatcaaagacaagaagtgcaagtctgggccttgccatctggataattcagccatgggtcagagccccctctctgcagtctggtctttgctgctgctgctctggttcctcgtggtgagggcctttccagatggtccaggcctcctttga

SEQ ID NO: 519 - RNA, 1035 nt, synthetic construct
  misc_feature 1..1035: note = AAH09751
  source 1..1035: mol_type = other RNA
atggcccagaaggagaactcctacccctggccctacggccgacagacggctccatctggcctgagcaccctgccccagcgagtcctccggaaagagcctgtcaccccatctgcacttgtcctcatgagccgctccaatgtccagcccacagctgcccctggccagaaggtgatggagaatagcagtgggacacccgacatcttaacgcggcacttcacaattgatgactttgagattgggcgtcctctgggcaaaggcaagtttggaaacgtgtacttggctcgggagaagaaaagccatttcatcgtggcgctcaaggtcctcttcaagtcccagatagagaaggagggcgtggagcatcagctgcgcagagagatcgaaatccaggcccacctgcaccatcccaacatcctgcgtctctacaactatttttatgaccggaggaggatctacttgattctagagtatgccccccgcggggagctctacaaggagctgcagaagagctgcacatttgacgagcagcgaacagccacgatcatggaggagttggcagatgctctaatgtactgccatgggaagaaggtgattcacagagacataaagccagaaaatctgctcttagggctcaagggagagctgaagattgctgacttcggctggtctgtgcatgcgccctccctgaggaggaagacaatgtgtggcaccctggactacctgcccccagagatgattgaggggcgcatgcacaatgagaaggtggatctgtggtgcattggagtgctttgctatgagctgctggtggggaacccaccctttgagagtgcatcacacaacgagacctatcgccgcatcgtcaaggtggacctaaagttccccgcttccgtgcccatgggagcccaggacctcatctccaaactgctcaggcataacccctcggaacggctgcccctggcccaggtctcagcccacccttgggtccgggccaactctcggagggtgctgcctccctctgcccttcaatctgtcgcctga

SEQ ID NO: 520 - RNA, 360 nt, synthetic construct
  misc_feature 1..360: note = AAD48083
  source 1..360: mol_type = other RNA
atgtctcgctccgtggccttagctgtgctcgcgctactctctctttctggcctggaggctatccagcgtactccaaagattcaggtttactcacgtcatccagcagagaatggaaagtcaaatttcctgaattgctatgtgtctgggtttcatccatccgacattgaagttgacttactgaagaatggagagagaattgaaaaagtggagcattcagacttgtctttcagcaaggactggtctttctatctcttgtactacactgaattcacccccactgaaaaagatgagtatgcctgccgtgtgaaccatgtgactttgtcacagcccaagatagttaagtgggatcgagacatgtaa

SEQ ID NO: 521 - RNA, 1137 nt, synthetic construct
  misc_feature 1..1137: note = AAH28058
  source 1..1137: mol_type = other RNA
atgagaatgttggttagtggcagaagagtcaaaaaatggcagttaattattcagttatttgctacttgttttttagcgagcctcatgtttttttgggaaccaatcgataatcacattgtgagccatatgaagtcatattcttacagatacctcataaatagctatgactttgtgaatgataccctgtctcttaagcacacctcagcggggcctcgctaccaatacttgattaaccacaaggaaaagtgtcaagctcaagacgtcctccttttactgtttgtaaaaactgctcctgaaaactatgatcgacgttccggaattagaaggacgtggggcaatgaaaattatgttcggtctcagctgaatgccaacatcaaaactctgtttgccttaggaactcctaatccactggagggagaagaactacaaagaaaactggcttgggaagatcaaaggtacaatgatataattcagcaagactttgttgattctttctacaatcttactctgaaattacttatgcagttcagttgggcaaatacctattgtccacatgccaaatttcttatgactgctgatgatgacatatttattcacatgccaaatctgattgagtaccttcaaagtttagaacaaattggtgttcaagacttttggattggtcgtgttcatcgtggtgcccctcccattagagataaaagcagcaaatactacgtgtcctatgaaatgtaccagtggccagcttaccctgactacacagccggagctgcctatgtaatctccggtgatgtagctgccaaagtctatgaggcatcacagacactaaattcaagtctttacatagacgatgtgttcatgggcctctgtgccaataaaatagggatagtaccgcaggaccatgtgtttttttctggagagggtaaaactccttatcatccctgcatctatgaaaaaatgatgacatctcatggacacttagaagatctccaggacctttggaagaatgctacagatcctaaagtaaaaaccatttccaaaggtttttttggtcaaatatactgcagattaatgaagataattctcctttgtaaaattagctatgtggacacatacccttgtagggctgcgtttatctaa

SEQ ID NO: 522 - RNA, 1602 nt, synthetic construct
  misc_feature 1..1602: note = AAA35516
  source 1..1602: mol_type = other RNA
atgtggctgggccgccgggccctgtgcgctctggtccttctgctcgcctgcgcctcgctggggctcctgtacgcgagcacccgggacgcgcccggcctccggctacctcttgcgccgtgggcgcccccgcaaagcccccgcaggcccgagctgccagatcttgctcctgagccccgctacgcacacatcccggtcaggatcaaggagcaagtagtggggctgctggcttggaacaactgcagttgtgagtccagtggggggggcctccccctccccttccagaaacaagtccgagctattgacctcaccaaggcctttgaccctgcagagctgagggctgcctctgccacaagagagcaggagttccaggcctttctgtcgaggagccagtccccagctgaccagctgctcatagcccctgccaactccccgctccagtaccccctacagggtgtggaagttcagcccctcaggagcatcttggtgccagggctgagccttcaggcagcttctggtcaggaggtataccaggtgaacctgactgcctccctaggcacctgggacgtggcaggggaagtgactggagttactctcactggagagggtcaggcagatctcacccttgtcagcccagggctggaccaactcaacaggcaactacaactggtcacttacagcagccgaagctaccagaccaacacagcagacacagtccggttctccaccgagggacatgaggctgctttcactatccgcataagacacccgcccaaccctcggctgtacccacctgggtctctaccccagggagcccagtacaacatcagcgctctagtcacgattgccaccaagaccttcctccgttatgatcggctacgggctctcatcaccagtatccgccgcttctacccaacggttaccgtggtcatcgctgacgacagcgacaagccagagcgcgttagtggcccctacgtggaacactatctcatgcccttcggcaagggctggttcgcaggccggaacctggccgtgtctcaagtaaccaccaagtacgtgctgtgggtggacgacgacttcgtcttcacggcgcggacgcggctggagaggcttgtggacgtgctggagcggacgccgctggacctggtggggggcgcggtgcgcgagatctccggctttgccaccacttatcggcagctgctgagcgtggagcccggcgccccaggcctcgggaactgcctccggcaaaggcgcggcttccaccacgagctcgtcggcttcccaggctgcgtggtcaccgacggcgtggttaacttcttcctggcgcggactgacaaggtgcgcgaggtcggtttcgacccccgcctcagccgcgtggctcatctggaattcttcttggatgggcttggttcccttcgggttggctcctgctccgacgtcgtggtggatcatgcatccaaactgaagctgccttggacatcaagggatgccggagcagagacttacgcccggtaccgttacccaggatcactggacgagagccagatggccaaacaccggctgctcttcttcaaacaccggctgcagtgcatgacctcccagtga

SEQ ID NO: 523 - RNA, 849 nt, synthetic construct
  misc_feature 1..849: note = AAH74729
  source 1..849: mol_type = other RNA
atggcttccctggggcagatcctcttctggagcataattagcatcatcattattctggctggagcaattgcactcatcattggctttggtatttcagggagacactccatcacagtcactactgtcgcctcagctgggaacattggggaggatggaatcctgagctgcacttttgaacctgacatcaaactttctgatatcgtgatacaatggctgaaggaaggtgttttaggcttggtccatgagttcaaagaaggcaaagatgagctgtcggagcaggatgaaatgttcagaggccggacagcagtgtttgctgatcaagtgatagttggcaatgcctctttgcggctgaaaaacgtgcaactcacagatgctggcacctacaaatgttatatcatcacttctaaaggcaaggggaatgctaaccttgagtataaaactggagccttcagcatgccggaagtgaatgtggactataatgccagctcagagaccttgcggtgtgaggctccccgatggttcccccagcccacagtggtctgggcatcccaagttgaccagggagccaacttctcggaagtctccaataccagctttgagctgaactctgagaatgtgaccatgaaggttgtgtctgtgctctacaatgttacgatcaacaacacatactcctgtatgattgaaaatgacattgccaaagcaacaggggatatcaaagtgacagaatcggagatcaaaaggcggagtcacctacagctgctaaactcaaaggcttctctgtgtgtctcttctttctttgccatcagctgggcacttctgcctctcagcccttacctgatgctaaaataa

SEQ ID NO: 524 - RNA, 132 nt, synthetic construct
  misc_feature 1..132: note = AAC50123
  source 1..132: mol_type = other RNA
atggcggccagagcggtttttctggcattgtctgcccagctgctccaagccaggctgatgaaggaggagtcccctgtggtgagctggaggttggagcctgaagacggcacagctctgtgcttcatcttctga

SEQ ID NO: 525 - RNA, 1158 nt, synthetic construct
  misc_feature 1..1158: note = AAN40694
  source 1..1158: mol_type = other RNA
atggcggctgcgctgttcgtgctgctgggattcgcgctgctgggcacccacggagcctccggggctgccggcttcgtccaggcgccgctgtcccagcagaggtgggtggggggcagtgtggagctgcactgcgaggccgtgggcagcccggtgcccgagatccagtggtggtttgaagggcagggtcccaacgacacctgctcccagctctgggacggcgcccggctggaccgcgtccacatccacgccacctaccaccagcacgcggccagcaccatctccatcgacacgctcgtggaggaggacacgggcacttacgagtgccgggccagcaacgacccggatcgcaaccacctgacccgggcgcccagggtcaagtgggtccgcgcccaggcagtcgtgctagtcctggaacccggcacagtcttcactaccgtagaagaccttggctccaagatactcctcacctgctccttgaatgacagcgccacagaggtcacagggcaccgctggctgaaggggggcgtggtgctgaaggaggacgcgctgcccggccagaaaacggagttcaaggtggactccgacgaccagtggggagagtactcctgcgtcttcctccccgagcccatgggcacggccaacatccagctccacgggcctcccagagtgaaggccgtgaagtcgtcagaacacatcaacgagggggagacggccatgctggtctgcaagtcagagtccgtgccacctgtcactgactgggcctggtacaagatcactgactctgaggacaaggccctcatgaacggctccgagagcaggttcttcgtgagttcctcgcagggccggtcagagctacacattgagaacctgaacatggaggccgaccccggccagtaccggtgcaacggcaccagctccaagggctccgaccaggccatcatcacgctccgcgtgcgcagccacctggccgccctctggcccttcctgggcatcgtggctgaggtgctggtgctggtcaccatcatcttcatctacgagaagcgccggaagcccgaggacgtcctggatgatgacgacgccggctctgcacccctgaagagcagcgggcagcaccagaatgacaaaggcaagaacgtccgccagaggaactcttcctga

SEQ ID NO: 526 - RNA, 720 nt, synthetic construct
  misc_feature 1..720: note = ABX60202
  source 1..720: mol_type = other RNA
atggcgcacgctgggagaacggggtacgataaccgggagatagtgatgaagtacatccattataagctgtcgcagaggggctacgagtgggatgcgggagatgtgggcgccgcgcccccgggggccgcccccgcaccgggcatcttctcctcccagcccgggcacacgccccatccagccgcatcccgggacccggtcgccaggacctcgccgctgcagaccccggctgcccccggcgccgccgcggggcctgcgctcagcccggtgccacctgtggtccacctgaccctccgccaggccggcgacgacttctcccgccgctaccgccgcgacttcgccgagatgtccagccagctgcacctgacgcccttcaccgcgcggggacgctttgccacggtggtggaggagctcttcagggacggggtgaactgggggaggattgtggccttctttgagttcggtggggtcatgtgtgtggagagcgtcaaccgggagatgtcgcccctggtggacaacatcgccctgtggatgactgagtacctgaaccggcacctgcacacctggatccaggataacggaggctgggatgcctttgtggaactgtacggccccagcatgcggcctctgtttgatttctcctggctgtctctgaagactctgctcagtttggccctggtgggagcttgcatcaccctgggtgcctatctgagccacaagtga

SEQ ID NO: 527 - RNA, 1290 nt, synthetic construct
  misc_feature 1..1290: note = ABX82700
  source 1..1290: mol_type = other RNA
atggtggacccggtgggcttcgcggaggcgtggaaggcgcagttcccggactcagagcccccgcgcatggagctgcgctcagtgggcgacatcgagcaggagctggagcgctgcaaggcctccattcggcgcctggagcaggaggtgaaccaggagcgcttccgcatgatctacctgcagacgttgctggccaaggaaaagaagagctatgaccggcagcgatggggcttccggcgcgcggcgcaggcccccgacggcgcctccgagccccgagcgtccgcgtcgcgcccgcagccagcgcccgccgacggagccgacccgccgcccgccgaggagcccgaggcccggcccgacggcgagggttctccgggtaaggccaggcccgggaccgcccgcaggcccggggcagccgcgtcgggggaacgggacgaccggggaccccccgccagcgtggcggcgctcaggtccaacttcgagcggatccgcaagggccatggccagcccggggcggacgccgagaagcccttctacgtgaacgtcgagtttcaccacgagcgcggcctggtgaaggtcaacgacaaagaggtgtcggaccgcatcagctccctgggcagccaggccatgcagatggagcgcaaaaagtcccagcacggcgcgggctcgagcgtgggggatgcatccaggcccccttaccggggacgctcctcggagagcagctgcggcgtcgacggcgactacgaggacgccgagttgaacccccgcttcctgaaggacaacctgatcgacgccaatggcggtagcaggcccccttggccgcccctggagtaccagccctaccagagcatctacgtcgggggcatgatggaaggggagggcaagggcccgctcctgcgcagccagagcacctctgagcaggagaagcgccttacctggccccgcaggtcctactccccccggagttttgaggattgcggaggcggctataccccggactgcagctccaatgagaacctcacctccagcgaggaggacttctcctctggccagtccagccgcgtgtccccaagccccaccacctaccgcatgttccgggacaaaagccgctctccctcgcagaactcgcaacagtccttcgacagcagcagtccccccacgccgcagtgccataagcggcaccggcactgcccggttgtcgtgtccgaggccaccatcgtgggcgtccgcaagaccgggcagatctggcccaacgatggcgagggcgccttccatggagacgcagatggtggatga

SEQ ID NO: 528 - RNA, 1665 nt, synthetic construct
  misc_feature 1..1665: note = ABX82703
  source 1..1665: mol_type = other RNA
atggtggacccggtgggcttcgcggaggcgtggaaggcgcagttcccggactcagagcccccgcgcatggagctgcgctcagtgggcgacatcgagcaggagctggagcgctgcaaggcctccattcggcgcctggagcaggaggtgaaccaggagcgcttccgcatgatctacctgcagacgttgctggccaaggaaaagaagagctatgaccggcagcgatggggcttccggcgcgcggcgcaggcccccgacggcgcctccgagccccgagcgtccgcgtcgcgcccgcagccagcgcccgccgacggagccgacccgccgcccgccgaggagcccgaggcccggcccgacggcgagggttctccgggtaaggccaggcccgggaccgcccgcaggcccggggcagccgcgtcgggggaacgggacgaccggggaccccccgccagcgtggcggcgctcaggtccaacttcgagcggatccgcaagggccatggccagcccggggcggacgccgagaagcccttctacgtgaacgtcgagtttcaccacgagcgcggcctggtgaaggtcaacgacaaagaggtgtcggaccgcatcagctccctgggcagccaggccatgcagatggagcgcaaaaagtcccagcacggcgcgggctcgagcgtgggggatgcatccaggcccccttaccggggacgctcctcggagagcagctgcggcgtcgacggcgactacgaggacgccgagttgaacccccgcttcctgaaggacaacctgatcgacgccaatggcggtagcaggcccccttggccgcccctggagtaccagccctaccagagcatctacgtcgggggcatgatggaaggggagggcaagggcccgctcctgcgcagccagagcacctctgagcaggagaagcgccttacctggccccgcaggtcctactccccccggagttttgaggattgcggaggcggctataccccggactgcagctccaatgagaacctcacctccagcgaggaggacttctcctctggccagtccagccgcgtgtccccaagccccaccacctaccgcatgttccgggacaaaagccgctctccctcgcagaactcgcaacagtccttcgacagcagcagtccccccacgccgcagtgccataagcggcaccggcactgcccggttgtcgtgtccgaggccaccatcgtgggcgtccgcaagaccgggcagatctggcccaacgatggcgagggcgccttccatggagacgcagatggctcgttcggaacaccacctggatacggctgcgctgcagaccgggcagaggagcagcgccggcaccaagatgggctgccctacattgatgactcgccctcctcatcgccccacctcagcagcaagggcaggggcagccgggatgcgctggtctcgggagccctggagtccactaaagcgagtgagctggacttggaaaagggcttggagatgagaaaatgggtcctgtcgggaatcctggctagcgaggagacttacctgagccacctggaggcactgctgctgcccatgaagcctttgaaagccgctgccaccacctctcagccggtgctgacgagtcagcagatcgagaccatcttcttcaaagtgcctgatctcctctga

SEQ ID NO: 529 - RNA, 1545 nt, synthetic construct
  misc_feature 1..1545: note = ABX82704
  source 1..1545: mol_type = other RNA
atggtggacccggtgggcttcgcggaggcgtggaaggcgcagttcccggactcagagcccccgcgcatggagctgcgctcagtgggcgacatcgagcaggagctggagcgctgcaaggcctccattcggcgcctggagcaggaggtgaaccaggagcgcttccgcatgatctacctgcagacgttgctggccaaggaaaagaagagctatgaccggcagcgatggggcttccggcgcgcggcgcaggcccccgacggcgcctccgagccccgagcgtccgcgtcgcgcccgcagccagcgcccgccgacggagccgacccgccgcccgccgaggagcccgaggcccggcccgacggcgagggttctccgggtaaggccaggcccgggaccgcccgcaggcccggggcagccgcgtcgggggaacgggacgaccggggaccccccgccagcgtggcggcgctcaggtccaacttcgagcggatccgcaagggccatggccagcccggggcggacgccgagaagcccttctacgtgaacgtcgagtttcaccacgagcgcggcctggtgaaggtcaacgacaaagaggtgtcggaccgcatcagctccctgggcagccaggccatgcagatggagcgcaaaaagtcccagcacggcgcgggctcgagcgtgggggatgcatccaggcccccttaccggggacgctcctcggagagcagctgcggcgtcgacggcgactacgaggacgccgagttgaacccccgcttcctgaaggacaacctgatcgacgccaatggcggtagcaggcccccttggccgcccctggagtaccagccctaccagagcatctacgtcgggggcatgatggaaggggagggcaagggcccgctcctgcgcagccagagcacctctgagcaggagaagcgccttacctggccccgcaggtcctactccccccggagttttgaggattgcggaggcggctataccccggactgcagctccaatgagaacctcacctccagcgaggaggacttctcctctggccagtccagccgcgtgtccccaagccccaccacctaccgcatgttccgggacaaaagccgctctccctcgcagaactcgcaacagtccttcgacagcagcagtccccccacgccgcagtgccataagcggcaccggcactgcccggttgtcgtgtccgaggccaccatcgtgggcgtccgcaagaccgggcagatctggcccaacgatggcgagggcgccttccatggagacgcagatggctcgttcggaacaccacctggatacggctgcgctgcagaccgggcagaggagcagcgccggcaccaagatgggctgccctacattgatgactcgccctcctcatcgccccacctcagcagcaagggcaggggcagccgggatgcgctggtctcgggagccctggagtccactaaagcgagtgagctggacttggaaaagggcttggagatgagaaaatgggtcctgtcgggaatcctggctagcgaggagataacactctaa

SEQ ID NO: 530 - RNA, 1326 nt, synthetic construct
  misc_feature 1..1326: note = ABX82705
  source 1..1326: mol_type = other RNA
atggtggacccggtgggcttcgcggaggcgtggaaggcgcagttcccggactcagagcccccgcgcatggagctgcgctcagtgggcgacatcgagcaggagctggagcgctgcaaggcctccattcggcgcctggagcaggaggtgaaccaggagcgcttccgcatgatctacctgcagacgttgctggccaaggaaaagaagagctatgaccggcagcgatggggcttccggcgcgcggcgcaggcccccgacggcgcctccgagccccgagcgtccgcgtcgcgcccgcagccagcgcccgccgacggagccgacccgccgcccgccgaggagcccgaggcccggcccgacggcgagggttctccgggtaaggccaggcccgggaccgcccgcaggcccggggcagccgcgtcgggggaacgggacgaccggggaccccccgccagcgtggcggcgctcaggtccaacttcgagcggatccgcaagggccatggccagcccggggcggacgccgagaagcccttctacgtgaacgtcgagtttcaccacgagcgcggcctggtgaaggtcaacgacaaagaggtgtcggaccgcatcagctccctgggcagccaggccatgcagatggagcgcaaaaagtcccagcacggcgcgggctcgagcgtgggggatgcatccaggcccccttaccggggacgctcctcggagagcagctgcggcgtcgacggcgactacgaggacgccgagttgaacccccgcttcctgaaggacaacctgatcgacgccaatggcggtagcaggcccccttggccgcccctggagtaccagccctaccagagcatctacgtcgggggcatgatggaaggggagggcaagggcccgctcctgcgcagccagagcacctctgagcaggagaagcgccttacctggccccgcaggtcctactccccccggagttttgaggattgcggaggcggctataccccggactgcagctccaatgagaacctcacctccagcgaggaggacttctcctctggccagtccagccgcgtgtccccaagccccaccacctaccgcatgttccgggacaaaagccgctctccctcgcagaactcgcaacagtccttcgacagcagcagtccccccacgccgcagtgccataagcggcaccggcactgcccggttgtcgtgtccgaggccaccatcgtgggcgtccgcaagaccgggcagatctggcccaacgatggcgagggcgccttccatggagacgcagatggctcgttggaactccaaggaaaaccttctcgctggacccagtga

SEQ ID NO: 531 - RNA, 1575 nt, synthetic construct
  misc_feature 1..1575: note = ABX82706
  source 1..1575: mol_type = other RNA
atggtggacccggtgggcttcgcggaggcgtggaaggcgcagttcccggactcagagcccccgcgcatggagctgcgctcagtgggcgacatcgagcaggagctggagcgctgcaaggcctccattcggcgcctggagcaggaggtgaaccaggagcgcttccgcatgatctacctgcagacgttgctggccaaggaaaagaagagctatgaccggcagcgatggggcttccggcgcgcggcgcaggcccccgacggcgcctccgagccccgagcgtccgcgtcgcgcccgcagccagcgcccgccgacggagccgacccgccgcccgccgaggagcccgaggcccggcccgacggcgagggttctccgggtaaggccaggcccgggaccgcccgcaggcccggggcagccgcgtcgggggaacgggacgaccggggaccccccgccagcgtggcggcgctcaggtccaacttcgagcggatccgcaagggccatggccagcccggggcggacgccgagaagcccttctacgtgaacgtcgagtttcaccacgagcgcggcctggtgaaggtcaacgacaaagaggtgtcggaccgcatcagctccctgggcagccaggccatgcagatggagcgcaaaaagtcccagcacggcgcgggctcgagcgtgggggatgcatccaggcccccttaccggggacgctcctcggagagcagctgcggcgtcgacggcgactacgaggacgccgagttgaacccccgcttcctgaaggacaacctgatcgacgccaatggcggtagcaggcccccttggccgcccctggagtaccagccctaccagagcatctacgtcgggggcatgatggaaggggagggcaagggcccgctcctgcgcagccagagcacctctgagcaggagaagcgccttacctggccccgcaggtcctactccccccggagttttgaggattgcggaggcggctataccccggactgcagctccaatgagaacctcacctccagcgaggaggacttctcctctggccagtccagccgcgtgtccccaagccccaccacctaccgcatgttccgggacaaaagccgctctccctcgcagaactcgcaacagtccttcgacagcagcagtccccccacgccgcagtgccataagcggcaccggcactgcccggttgtcgtgtccgaggccaccatcgtgggcgtccgcaagaccgggcagatctggcccaacgatggcgagggcgccttccatggagacgcagatggctcgttcggaacaccacctggatacggctgcgctgcagaccgggcagaggagcagcgccggcaccaagatgggctgccctacattgatgactcgccctcctcatcgccccacctcagcagcaagggcaggggcagccgggatgcgctggtctcgggagccctggagtccactaaagcgagtgagctggacttggaaaagggcttggagatgagaaaatgggacccagtgaaaatgaccccaaccttttcgttgcactgtatgattttgtggccagtggagataacactctaa

SEQ ID NO: 532 - RNA, 1398 nt, synthetic construct
  misc_feature 1..1398: note = ABX82707
  source 1..1398: mol_type = other RNA
atggtggacccggtgggcttcgcggaggcgtggaaggcgcagttcccggactcagagcccccgcgcatggagctgcgctcagtgggcgacatcgagcaggagctggagcgctgcaaggcctccattcggcgcctggagcaggaggtgaaccaggagcgcttccgcatgatctacctgcagacgttgctggccaaggaaaagaagagctatgaccggcagcgatggggcttccggcgcgcggcgcaggcccccgacggcgcctccgagccccgagcgtccgcgtcgcgcccgcagccagcgcccgccgacggagccgacccgccgcccgccgaggagcccgaggcccggcccgacggcgagggttctccgggtaaggccaggcccgggaccgcccgcaggcccggggcagccgcgtcgggggaacgggacgaccggggaccccccgccagcgtggcggcgctcaggtccaacttcgagcggatccgcaagggccatggccagcccggggcggacgccgagaagcccttctacgtgaacgtcgagtttcaccacgagcgcggcctggtgaaggtcaacgacaaagaggtgtcggaccgcatcagctccctgggcagccaggccatgcagatggagcgcaaaaagtcccagcacggcgcgggctcgagcgtgggggatgcatccaggcccccttaccggggacgctcctcggagagcagctgcggcgtcgacggcgactacgaggacgccgagttgaacccccgcttcctgaaggacaacctgatcgacgccaatggcggtagcaggcccccttggccgcccctggagtaccagccctaccagagcatctacgtcgggggcatgatggaaggggagggcaagggcccgctcctgcgcagccagagcacctctgagcaggagaagcgccttacctggccccgcaggtcctactccccccggagttttgaggattgcggaggcggctataccccggactgcagctccaatgagaacctcacctccagcgaggaggacttctcctctggccagtccagccgcgtgtccccaagccccaccacctaccgcatgttccgggacaaaagccgctctccctcgcagaactcgcaacagtccttcgacagcagcagtccccccacgccgcagtgccataagcggcaccggcactgcccggttgtcgtgtccgaggccaccatcgtgggcgtccgcaagaccgggcagatctggcccaacgatggcgagggcgccttccatggagaacatccgggagcagcagaagaagtgtttcagaagcttctccctgacatccgtggagctgcagatgctgaccaactcgtgtgtgaaactccagactgtccacagcattccgctgaccatcaataa

SEQ ID NO: 533 - RNA, 1377 nt, synthetic construct
  misc_feature 1..1377: note = ABX82709
  source 1..1377: mol_type = other RNA
atggtggacccggtgggcttcgcggaggcgtggaaggcgcagttcccggactcagagcccccgcgcatggagctgcgctcagtgggcgacatcgagcaggagctggagcgctgcaaggcctccattcggcgcctggagcaggaggtgaaccaggagcgcttccgcatgatctacctgcagacgttgctggccaaggaaaagaagagctatgaccggcagcgatggggcttccggcgcgcggcgcaggcccccgacggcgcctccgagccccgagcgtccgcgtcgcgcccgcagccagcgcccgccgacggagccgacccgccgcccgccgaggagcccgaggcccggcccgacggcgagggttctccgggtaaggccaggcccgggaccgcccgcaggcccggggcagccgcgtcgggggaacgggacgaccggggaccccccgccagcgtggcggcgctcaggtccaacttcgagcggatccgcaagggccatggccagcccggggcggacgccgagaagcccttctacgtgaacgtcgagtttcaccacgagcgcggcctggtgaaggtcaacgacaaagaggtgtcggaccgcatcagctccctgggcagccaggccatgcagatggagcgcaaaaagtcccagcacggcgcgggctcgagcgtgggggatgcatccaggcccccttaccggggacgctcctcggagagcagctgcggcgtcgacggcgactacgaggacgccgagttgaacccccgcttcctgaaggacaacctgatcgacgccaatggcggtagcaggcccccttggccgcccctggagtaccagccctaccagagcatctacgtcgggggcatgatggaaggggagggcaagggcccgctcctgcgcagccagagcacctctgagcaggagaagcgccttacctggccccgcaggtcctactccccccggagttttgaggattgcggaggcggctataccccggactgcagctccaatgagaacctcacctccagcgaggaggacttctcctctggccagtccagccgcgtgtccccaagccccaccacctaccgcatgttccgggacaaaagccgctctccctcgcagaactcgcaacagtccttcgacagcagcagtccccccacgccgcagtgccataagcggcaccggcactgcccggttgtcgtgtccgaggccaccatcgtgggcgtccgcaagaccgggcagatctggcccaacgatggcgagggcgccttccatggagacgcagatggctcgttcggaacaccacctggatactgctgcttatgtctcccagcatggccttcagggtgcacagccgcaacggcaagagttacacgttcctga

SEQ ID NO: 534 - RNA, 1365 nt, synthetic construct
  misc_feature 1..1365: note = ABX82710
  source 1..1365: mol_type = other RNA
atggtggacccggtgggcttcgcggaggcgtggaaggcgcagttcccggactcagagcccccgcgcatggagctgcgctcagtgggcgacatcgagcaggagctggagcgctgcaaggcctccattcggcgcctggagcaggaggtgaaccaggagcgcttccgcatgatctacctgcagacgttgctggccaaggaaaagaagagctatgaccggcagcgatggggcttccggcgcgcggcgcaggcccccgacggcgcctccgagccccgagcgtccgcgtcgcgcccgcagccagcgcccgccgacggagccgacccgccgcccgccgaggagcccgaggcccggcccgacggcgagggttctccgggtaaggccaggcccgggaccgcccgcaggcccggggcagccgcgtcgggggaacgggacgaccggggaccccccgccagcgtggcggcgctcaggtccaacttcgagcggatccgcaagggccatggccagcccggggcggacgccgagaagcccttctacgtgaacgtcgagtttcaccacgagcgcggcctggtgaaggtcaacgacaaagaggtgtcggaccgcatcagctccctgggcagccaggccatgcagatggagcgcaaaaagtcccagcacggcgcgggctcgagcgtgggggatgcatccaggcccccttaccggggacgctcctcggagagcagctgcggcgtcgacggcgactacgaggacgccgagttgaacccccgcttcctgaaggacaacctgatcgacgccaatggcggtagcaggcccccttggccgcccctggagtaccagccctaccagagcatctacgtcgggggcatgatggaaggggagggcaagggcccgctcctgcgcagccagagcacctctgagcaggagaagcgccttacctggccccgcaggtcctactccccccggagttttgaggattgcggaggcggctataccccggactgcagctccaatgagaacctcacctccagcgaggaggacttctcctctggccagtccagccgcgtgtccccaagccccaccacctaccgcatgttccgggacaaaagccgctctccctcgcagaactcgcaacagtccttcgacagcagcagtccccccacgccgcagtgccataagcggcaccggcactgcccggttgtcgtgtccgaggccaccatcgtgggcgtccgcaagaccgggcagatctggcccaacgatggcgagggcgccttccatggagacgcagatggctcgttcggaacaccacctggatacggctgcgctgcaggacgccctccgcatctcacagaacttcctgtccagcatcaatga

SEQ ID NO: 535 - RNA, 1404 nt, synthetic construct
  misc_feature 1..1404: note = ABX82711
  source 1..1404: mol_type = other RNA
atggtggacccggtgggcttcgcggaggcgtggaaggcgcagttcccggactcagagcccccgcgcatggagctgcgctcagtgggcgacatcgagcaggagctggagcgctgcaaggcctccattcggcgcctggagcaggaggtgaaccaggagcgcttccgcatgatctacctgcagacgttgctggccaaggaaaagaagagctatgaccggcagcgatggggcttccggcgcgcggcgcaggcccccgacggcgcctccgagccccgagcgtccgcgtcgcgcccgcagccagcgcccgccgacggagccgacccgccgcccgccgaggagcccgaggcccggcccgacggcgagggttctccgggtaaggccaggcccgggaccgcccgcaggcccggggcagccgcgtcgggggaacgggacgaccggggaccccccgccagcgtggcggcgctcaggtccaacttcgagcggatccgcaagggccatggccagcccggggcggacgccgagaagcccttctacgtgaacgtcgagtttcaccacgagcgcggcctggtgaaggtcaacgacaaagaggtgtcggaccgcatcagctccctgggcagccaggccatgcagatggagcgcaaaaagtcccagcacggcgcgggctcgagcgtgggggatgcatccaggcccccttaccggggacgctcctcggagagcagctgcggcgtcgacggcgactacgaggacgccgagttgaacccccgcttcctgaaggacaacctgatcgacgccaatggcggtagcaggcccccttggccgcccctggagtaccagccctaccagagcatctacgtcgggggcatgatggaaggggagggcaagggcccgctcctgcgcagccagagcacctctgagcaggagaagcgccttacctggccccgcaggtcctactccccccggagttttgaggattgcggaggcggctataccccggactgcagctccaatgagaacctcacctccagcgaggaggacttctcctctggccagtccagccgcgtgtccccaagccccaccacctaccgcatgttccgggacaaaagccgctctccctcgcagaactcgcaacagtccttcgacagcagcagtccccccacgccgcagtgccataagcggcaccggcactgcccggttgtcgtgtccgaggccaccatcgtgggcgtccgcaagaccgggcagatctggcccaacgatggcgagggcgccttccatggagacgcagttctgaagactgaagtcccacatcaaggtgtccgcagggccaggctgtctctggaggctctaggggaggatccttcctttctgttcccagcatctgatggcccacggcattcctcgacctggtga

SEQ ID NO: 536 - RNA, 1542 nt, synthetic construct
  misc_feature 1..1542: note = ABX82712
  source 1..1542: mol_type = other RNA
atggtggacccggtgggcttcgcggaggcgtggaaggcgcagttcccggactcagagcccccgcgcatggagctgcgctcagtgggcgacatcgagcaggagctggagcgctgcaaggcctccattcggcgcctggagcaggaggtgaaccaggagcgcttccgcatgatctacctgcagacgttgctggccaaggaaaagaagagctatgaccggcagcgatggggcttccggcgcgcggcgcaggcccccgacggcgcctccgagccccgagcgtccgcgtcgcgcccgcagccagcgcccgccgacggagccgacccgccgcccgccgaggagcccgaggcccggcccgacggcgagggttctccgggtaaggccaggcccgggaccgcccgcaggcccggggcagccgcgtcgggggaacgggacgaccggggaccccccgccagcgtggcggcgctcaggtccaacttcgagcggatccgcaagggccatggccagcccggggcggacgccgagaagcccttctacgtgaacgtcgagtttcaccacgagcgcggcctggtgaaggtcaacgacaaagaggtgtcggaccgcatcagctccctgggcagccaggccatgcagatggagcgcaaaaagtcccagcacggcgcgggctcgagcgtgggggatgcatccaggcccccttaccggggacgctcctcggagagcagctgcggcgtcgacggcgactacgaggacgccgagttgaacccccgcttcctgaaggacaacctgatcgacgccaatggcggtagcaggcccccttggccgcccctggagtaccagccctaccagagcatctacgtcgggggcatgatggaaggggagggcaagggcccgctcctgcgcagccagagcacctctgagcaggagaagcgccttacctggccccgcaggtcctactccccccggagttttgaggattgcggaggcggctataccccggactgcagctccaatgagaacctcacctccagcgaggaggacttctcctctggccagtccagccgcgtgtccccaagccccaccacctaccgcatgttccgggacaaaagccgctctccctcgcagaactcgcaacagtccttcgacagcagcagtccccccacgccgcagtgccataagcggcaccggcactgcccggttgtcgtgtccgaggccaccatcgtgggcgtccgcaagaccgggcagatctggcccaacgatggcgagggcgccttccatggagacgcagatggctcgttcggaacaccacctggatacggctgcgctgcagaccgggcagaggagcagcgccggcaccaagatgggctgccctacattgatgactcgccctcctcatcgccccacctcagcagcaagggcaggggcagccgggatgcgctggtctcgggagccctggagtccactaaagcgagtgagctggacccagtgaaaatgaccccaaccttttcgttgcactgtatgattttgtggccagtggagataacactctaa

SEQ ID NO: 537 - RNA, 1221 nt, synthetic construct
  misc_feature 1..1221: note = ABX82714
  source 1..1221: mol_type = other RNA
atggtggacccggtgggcttcgcggaggcgtggaaggcgcagttcccggactcagagcccccgcgcatggagctgcgctcagtgggcgacatcgagcaggagctggagcgctgcaaggcctccattcggcgcctggagcaggaggtgaaccaggagcgcttccgcatgatctacctgcagacgttgctggccaaggaaaagaagagctatgaccggcagcgatggggcttccggcgcgcggcgcaggcccccgacggcgcctccgagccccgagcgtccgcgtcgcgcccgcagccagcgcccgccgacggagccgacccgccgcccgccgaggagcccgaggcccggcccgacggcgagggttctccgggtaaggccaggcccgggaccgcccgcaggcccggggcagccgcgtcgggggaacgggacgaccggggaccccccgccagcgtggcggcgctcaggtccaacttcgagcggatccgcaagggccatggccagcccggggcggacgccgagaagcccttctacgtgaacgtcgagtttcaccacgagcgcggcctggtgaaggtcaacgacaaagaggtgtcggaccgcatcagctccctgggcagccaggccatgcagatggagcgcaaaaagtcccagcacggcgcgggctcgagcgtgggggatgcatccaggcccccttaccggggacgctcctcggagagcagctgcggcgtcgacggcgactacgaggacgccgagttgaacccccgcttcctgaaggacaacctgatcgacgccaatggcggtagcaggcccccttggccgcccctggagtaccagccctaccagagcatctacgtcgggggcatgatggaaggggagggcaagggcccgctcctgcgcagccagagcacctctgagcaggagaagcgccttacctggccccgcaggtcctactccccccggagttttgaggattgcggaggcggctataccccggactgcagctccaatgagaacctcacctccagcgaggaggacttctcctctggccagtccagccgcgtgtccccaagccccaccacctaccgcatgttccgggacaaaagccgctctccctcgcagaactcgcaacagtccttcgacagcagcagtccccccacgccgcagtgccataagcggcaccggcactgcccggttgtcgtgtccgaggccaccagcggccagtag

SEQ ID NO: 538 - RNA, 2346 nt, synthetic construct
  misc_feature 1..2346: note = AAH58926
  source 1..2346: mol_type = other RNA
atggctactcaagctgatttgatggagttggacatggccatggaaccagacagaaaagcggctgttagtcactggcagcaacagtcttacctggactctggaatccattctggtgccactaccacagctccttctctgagtggtaaaggcaatcctgaggaagaggatgtggatacctcccaagtcctgtatgagtgggaacagggattttctcagtccttcactcaagaacaagtagctgatattgatggacagtatgcaatgactcgagctcagagggtacgagctgctatgttccctgagacattagatgagggcatgcagatcccatctacacagtttgatgctgctcatcccactaatgtccagcgtttggctgaaccatcacagatgctgaaacatgcagttgtaaacttgattaactatcaagatgatgcagaacttgccacacgtgcaatccctgaactgacaaaactgctaaatgacgaggaccaggtggtggttaataaggctgcagttatggtccatcagctttctaaaaaggaagcttccagacacgctatcatgcgttctcctcagatggtgtctgctattgtacgtaccatgcagaatacaaatgatgtagaaacagctcgttgtaccgctgggaccttgcataacctttcccatcatcgtgagggcttactggccatctttaagtctggaggcattcctgccctggtgaaaatgcttggttcaccagtggattctgtgttgttttatgccattacaactctccacaaccttttattacatcaagaaggagctaaaatggcagtgcgtttagctggtgggctgcagaaaatggttgccttgctcaacaaaacaaatgttaaattcttggctattacgacagactgccttcaaattttagcttatggcaaccaagaaagcaagctcatcatactggctagtggtggaccccaagctttagtaaatataatgaggacctatacttacgaaaaactactgtggaccacaagcagagtgctgaaggtgctatctgtctgctctagtaataagccggctattgtagaagctggtggaatgcaagctttaggacttcacctgacagatccaagtcaacgtcttgttcagaactgtctttggactctcaggaatctttcagatgctgcaactaaacaggaagggatggaaggtctccttgggactcttgttcagcttctgggttcagatgatataaatgtggtcacctgtgcagctggaattctttctaacctcacttgcaataattataagaacaagatgatggtctgccaagtgggtggtatagaggctcttgtgcgtactgtccttcgggctggtgacagggaagacatcactgagcctgccatctgtgctcttcgtcatctgaccagccgacaccaagaagcagagatggcccagaatgcagttcgccttcactatggactaccagttgtggttaagctcttacacccaccatcccactggcctctgataaaggctactgttggattgattcgaaatcttgccctttgtcccgcaaatcatgcacctttgcgtgagcagggtgccattccacgactagttcagttgcttgttcgtgcacatcaggatacccagcgccgtacgtccatgggtgggacacagcagcaatttgtggagggggtccgcatggaagaaatagttgaaggttgtaccggagcccttcacatcctagctcgggatgttcacaaccgaattgttatcagaggactaaataccattccattgtttgtgcagctgctttattctcccattgaaaacatccaaagagtagctgcaggggtcctctgtgaacttgctcaggacaaggaagctgcagaagctattgaagctgagggagccacagctcctctgacagagttacttcactctaggaatgaaggtgtggcgacatatgcagctgctgttttgttccgaatgtctgaggacaagccacaagattacaagaaacggctttcagttgagctgaccagctctctcttcagaacagagccaatggcttggaatgagactgctgatcttggacttgatattggtgcccagggagaaccccttggatatcgccaggatgatcctagctatcgttcttttcactctggtggatatggccaggatgccttgggtatggaccccatgatggaacatgagatgggtggccaccaccctggtgctgactatccagttgatgggctgccagatctggggcatgcccaggacctcatggatgggctgcctccaggtgacagcaatcagctggcctggtttgatactgacctgtaa

SEQ ID NO: 539 - RNA, 1692 nt, synthetic construct
  misc_feature 1..1692: note = AAI21007
  source 1..1692: mol_type = other RNA
atggacgtgggcgaacttctgagctaccagcccaataggggcacaaaacgtccccgggatgatgaagaggaggagcagaagatgcgtcggaaacaaactggtactcgagaacgcggccgctatcgggaagaagaaatgactgtggtggaggaagcggatgatgacaaaaaaaggctgctgcagattattgacagagatggggaagaggaagaggaagaggaggagccattggatgaaagctcagtgaagaaaatgatcctcacatttgaaaagagatcatataaaaaccaagaattgcggattaagtttccagacaatccagagaagttcatggaatccgagctggacctaaatgacatcattcaggagatgcacgtggtggccaccatgccagacctgtaccaccttctggtggagctgaatgctgtacagtcgcttctcggcttgctcggacacgataatacagatgtgtccatagctgtggtcgatttgcttcaggaattaacagatatagacaccctccatgagagtgaagagggagcagaagtgctcatcgatgctctggtggatgggcaggtggtagcactgctggtacagaatctggagcgcctggatgagtctgtgaaagaggaggcagatggcgtccacaacactctggctattgtggaaaacatggctgagttccggcctgagatgtgtacagagggtgcccagcagggtcttctacagtggctgttgaagaggctgaaggcaaagatgccttttgatgccaacaaactgtattgcagtgaagtgctggccatattgctccaggacaatgatgaaaacagggaattgcttggggagctggatggaatcgatgtgcttcttcagcagttatccgtgtttaaaagacacaatcccagcacggctgaggagcaggagatgatggagaatctgtttgattccctctgctcctgtctaatgcttagttccaatcgtgagcgcttcctgaagggcgagggtcttcagctgatgaatctcatgctcagggaaaagaagatctcccggagcagtgccctgaaagtgctggaccatgccatgattggccccgaaggcacagacaactgccataagtttgttgacattcttggcttacgaaccatctttcccctctttatgaaatctcccaggaagatcaagaaagtgggaaccactgagaaggaacatgaagagcatgtctgttcgatcctggcttccctcctgcggaacctgagagggcagcagcggacccggcttctgaataaattcactgaaaatgacagtgagaaggttgacagactaatggagttgcattttaaatatctgggtgcaatgcaggtggcggacaagaagattgaaggggaaaaacacgacatggtccggcgaggagagatcatcgacaatgacaccgaggaggagttctacctccggcgcctggatgcggggctctttgttctccagcacatctgctacatcatggccgagatctgcaatgccaatgtcccccagattcgccagagggttcaccagatcctaaacatgcgaggaagctccatcaaaattgtcaggcatatcatcaaggagtatgcagagaacatcggggacggccggagcccggagttccgggagaacgagcaaaagcgcatcctgggcttgctggagaacttctag

SEQ ID NO: 540 - RNA, 1833 nt, synthetic construct
  misc_feature 1..1833: note = CCDS4772.1
  source 1..1833: mol_type = other RNA
atggagacagcccccaagccgggcaaggatgtcccgcccaagaaagacaaacttcagaccaagagaaagaaaccgcggcgatactgggaggaagagaccgttccgaccacagccggagcctctccagggcctcctcgtaacaagaagaatcgggagctccgtcctcagagaccaaaaaatgcttacatcttaaagaagtctcggatctctaagaagcctcaggtcccgaagaaaccccgagaatggaagaacccggagtcccagcgcggcttgtccgggacccaagatccattcccaggccccgcccccgtccctgtggaagtggtccagaagttctgtcgcattgacaaatcccgaaagctaccacattctaaagccaaaactcgaagccgacttgaggtggctgaagctgaggaagaggaaacaagtatcaaagctgctcgttctgagctgctgcttgctgaagaacctgggtttctggaaggggaggatggggaagacacagcaaagatatgccaggctgacattgtggaggctgtggacattgcaagtgcagccaagcactttgacttgaatctgcggcagtttggaccctacagactaaactactctcgaactggaagacacctggcttttggagggcgccgaggtcatgtggctgcccttgattgggtaacaaagaagcttatgtgcgagatcaacgtcatggaggcggtgcgggacatccggtttctccattctgaggcactgcttgctgttgctcagaaccgctggctccacatctatgacaatcagggcattgagctccactgtatccgccgctgtgaccgagtaacacggcttgagttcctgcccttccacttcctcctggctacagcttcagaaacagggtttctaacctacctggatgtgtcagtggggaagattgtggcagctctgaatgctcgagctgggcggctcgatgttatgagtcagaacccttacaatgccgtcatccatctcggacacagcaatggtactgtgtctttatggagtccagctatgaaggagccactggcaaagattctctgtcatcgtggtggggtccgggctgtggcagtagattctacaggcacgtacatggccacctctggcctagaccaccagctgaagatctttgacttgcgagggacgtaccagcctctgagcactcggaccctgccccatggagcagggcacctggccttctcccagaggggactgctggtggcgggaatgggtgacgttgtcaacatctgggcagggcagggcaaggccagcccaccctcccttgaacagccctacctcacccaccggctctcaggccctgtgcatggccttcagttctgcccctttgaagatgtgctgggggtggggcacactgggggcatcaccagcatgctggtccctggggccggtgagcccaacttcgatggcctggagagtaatccatacagaagccggaagcagcgccaggagtgggaggtgaaggccctgctagagaaggtacctgcagagcttatttgtctggacccacgagccctggccgaggtggatgtcatctccctggagcagggaaagaaggagcagatagagaggctgggctatgacccgcaggctaaggctcccttccagccaaagccaaagcagaagggccgcagctccacggcaagcctggtgaagaggaagaggaaggtcatggatgaggaacacagggacaaggtccggcagagccttcagcagcagcatcataaggaggcgaaggccaagcccacgggggcccggccatctgccctggacagatttgtgcgctga

SEQ ID NO: 541 - RNA, 897 nt, synthetic construct
  misc_feature 1..897: note = AAG37878
  source 1..897: mol_type = other RNA
atgggacctaaagacagtgccaagtgcctgcaccgtggaccacagccgagccactgggcagccggtgatggtcccacgcaggagcgctgtggaccccgctctctgggcagccctgtcctaggcctggacacctgcagagcctgggaccacgtggatgggcagatcctgggccagctgcggcccctgacagaggaggaagaggaggagggcgccggggccaccttgtccagggggcctgccttccccggcatgggctctgaggagttgcgtctggcctccttctatgactggccgctgactgctgaggtgccacccgagctgctggctgctgccggcttcttccacacaggccatcaggacaaggtgaggtgcttcttctgctatgggggcctgcagagctggaagcgcggggacgacccctggacggagcatgccaagtggttccccagctgtcagttcctgctccggtcaaaaggaagagactttgtccacagtgtgcaggagactcactcccagctgctgggctcttgggacccgtgggaagaaccggaagacgcagcccctgtggccccctccgtccctgcctctgggtaccctgagctgcccacacccaggagagaggtccagtctgaaagtgcccaggagccaggaggggtcagtccagccgaggcccagagggcgtggtgggttcttgagcccccaggagccagggatgtggaggcgcagctgcggcggctgcaggaggagaggacgtgcaaggtgtgcctggaccgcgccgtgtccatcgtctttgtgccgtgcggccacctggtctgtgctgagtgtgcccccggcctgcagctgtgccccatctgcagagcccccgtccgcagccgcgtgcgcaccttcctgtcctag

SEQ ID NO: 542 - RNA, 2280 nt, synthetic construct
  misc_feature 1..2280: note = EAW60925
  source 1..2280: mol_type = other RNA
atggatttatctgctcttcgcgttgaagaagtacaaaatgtcattaatgctatgcagaaaatcttagagtgtcccatctgtctggagttgatcaaggaacctgtctccacaaagtgtgaccacatattttgcaaattttgcatgctgaaacttctcaaccagaagaaagggccttcacagtgtcctttatgtaagaatgatataaccaaaaggagcctacaagaaagtacgagatttagtcaacttgttgaagagctattgaaaatcatttgtgcttttcagcttgacacaggtttggagtatgcaaacagctataattttgcaaaaaaggaaaataactctcctgaacatctaaaagatgaagtttctatcatccaaagtatgggctacagaaaccgtgccaaaagacttctacagagtgaacccgaaaatccttccttgcaggaaaccagtctcagtgtccaactctctaaccttggaactgtgagaactctgaggacaaagcagcggatacaacctcaaaagacgtctgtctacattgaattgggatctgattcttctgaagataccgttaataaggcaacttattgcagtgtgggagatcaagaattgttacaaatcacccctcaaggaaccagggatgaaatcagtttggattctgcaaaaaaggctgcttgtgaattttctgagacggatgtaacaaatactgaacatcatcaacccagtaataatgatttgaacaccactgagaagcgtgcagctgagaggcatccagaaaagtatcagggtgaagcagcatctgggtgtgagagtgaaacaagcgtctctgaagactgctcagggctatcctctcagagtgacattttaaccactcagcagagggataccatgcaacataacctgataaagctccagcaggaaatggctgaactagaagctgtgttagaacagcatgggagccagccttctaacagctacccttccatcataagtgactcttctgcccttgaggacctgcgaaatccagaacaaagcacatcagaaaaagtattaacttcacagaaaagtagtgaataccctataagccagaatccagaaggcctttctgctgacaagtttgaggtgtctgcagatagttctaccagtaaaaataaagaaccaggagtggaaaggtcatccccttctaaatgcccatcattagatgataggtggtacatgcacagttgctctgggagtcttcagaatagaaactacccatctcaagaggagctcattaaggttgttgatgtggaggagcaacagctggaagagtctgggccacacgatttgacggaaacatcttacttgccaaggcaagatctagagggaaccccttacctggaatctggaatcagcctcttctctgatgaccctgaatctgatccttctgaagacagagccccagagtcagctcgtgttggcaacataccatcttcaacctctgcattgaaagttccccaattgaaagttgcagaatctgcccagagtccagctgctgctcatactactgatactgctgggtataatgcaatggaagaaagtgtgagcagggagaagccagaattgacagcttcaacagaaagggtcaacaaaagaatgtccatggtggtgtctggcctgaccccagaagaatttatgctcgtgtacaagtttgccagaaaacaccacatcactttaactaatctaattactgaagagactactcatgttgttatgaaaacagatgctgagtttgtgtgtgaacggacactgaaatattttctaggaattgcgggaggaaaatgggtagttagctatttctgggtgacccagtctattaaagaaagaaaaatgctgaatgagcatgattttgaagtcagaggagatgtggtcaatggaagaaaccaccaaggtccaaagcgagcaagagaatcccaggacagaaagatcttcagggggctagaaatctgttgctatgggcccttcaccaacatgcccacagatcaactggaatggatggtacagctgtgtggtgcttctgtggtgaaggagctttcatcattcacccttggcacaggtgtccacccaattgtggttgtgcagccagatgcctggacagaggacaatggcttccatgcaattgggcagatgtgtgaggcacctgtggtgacccgagagtgggtgttggacagtgtagcactctaccagtgccaggagctggacacctacctgataccccagatcccccacagccactactga

SEQ ID NO: 543 - RNA, 2160 nt, synthetic construct
  misc_feature 1..2160: note = EAW60922
  source 1..2160: mol_type = other RNA
atggatttatctgctcttcgcgttgaagaagtacaaaatgtcattaatgctatgcagaaaatcttagagtgtcccatctgtctggagttgatcaaggaacctgtctccacaaagtgtgaccacatattttgcaaattttgcatgctgaaacttctcaaccagaagaaagggccttcacagtgtcctttatgtaagaatgatataaccaaaaggagcctacaagaaagtacgagatttagtcaacttgttgaagagctattgaaaatcatttgtgcttttcagcttgacacaggtttggagtatgcaaacagctataattttgcaaaaaaggaaaataactctcctgaacatctaaaagatgaagtttctatcatccaaagtatgggctacagaaaccgtgccaaaagacttctacagagtgaacccgaaaatccttccttgcaggaaaccagtctcagtgtccaactctctaaccttggaactgtgagaactctgaggacaaagcagcggatacaacctcaaaagacgtctgtctacattgaattggctgcttgtgaattttctgagacggatgtaacaaatactgaacatcatcaacccagtaataatgatttgaacaccactgagaagcgtgcagctgagaggcatccagaaaagtatcagggtgaagcagcatctgggtgtgagagtgaaacaagcgtctctgaagactgctcagggctatcctctcagagtgacattttaaccactcagcagagggataccatgcaacataacctgataaagctccagcaggaaatggctgaactagaagctgtgttagaacagcatgggagccagccttctaacagctacccttccatcataagtgactcttctgcccttgaggacctgcgaaatccagaacaaagcacatcagaaaaagcagtattaacttcacagaaaagtagtgaataccctataagccagaatccagaaggcctttctgctgacaagtttgaggtgtctgcagatagttctaccagtaaaaataaagaaccaggagtggaaaggtcatccccttctaaatgcccatcattagatgataggtggtacatgcacagttgctctgggagtcttcagaatagaaactacccatctcaagaggagctcattaaggttgttgatgtggaggagcaacagctggaagagtctgggccacacgatttgacggaaacatcttacttgccaaggcaagatctagagggaaccccttacctggaatctggaatcagcctcttctctgatgaccctgaatctgatccttctgaagacagagccccagagtcagctcgtgttggcaacataccatcttcaacctctgcattgaaagttccccaattgaaagttgcagaatctgcccagagtccagctgctgctcatactactgatactgctgggtataatgcaatggaagaaagtgtgagcagggagaagccagaattgacagcttcaacagaaagggtcaacaaaagaatgtccatggtggtgtctggcctgaccccagaagaatttatgctcgtgtacaagtttgccagaaaacaccacatcactttaactaatctaattactgaagagactactcatgttgttatgaaaacagatgctgagtttgtgtgtgaacggacactgaaatattttctaggaattgcgggaggaaaatgggtagttagctatttctgggtgacccagtctattaaagaaagaaaaatgctgaatgagcatgattttgaagtcagaggagatgtggtcaatggaagaaaccaccaaggtccaaagcgagcaagagaatcccaggacagaaagatcttcagggggctagaaatctgttgctatgggcccttcaccaacatgcccacagatcaactggaatggatggtacagctgtgtggtgcttctgtggtgaaggagctttcatcattcacccttggcacaggtgtccacccaattgtggttgtgcagccagatgcctggacagaggacaatggcttccatgcaattgggcagatgtgtgaggcacctgtggtgacccgagagtgggtgttggacagtgtagcactctaccagtgccaggagctggacacctacctgataccccagatcccccacagccactactga

SEQ ID NO: 544 - RNA, 2166 nt, synthetic construct
  misc_feature 1..2166: note = EAW60923
  source 1..2166: mol_type = other RNA
atggatttatctgctcttcgcgttgaagaagtacaaaatgtcattaatgctatgcagaaaatcttagagtgtcccatctgtctggagttgatcaaggaacctgtctccacaaagtgtgaccacatattttgcaaattttgcatgctgaaacttctcaaccagaagaaagggccttcacagtgtcctttatgtaagaatgatataaccaaaaggagcctacaagaaagtacgagatttagtcaacttgttgaagagctattgaaaatcatttgtgcttttcagcttgacacaggtttggagtatgcaaacagctataattttgcaaaaaaggaaaataactctcctgaacatctaaaagatgaagtttctatcatccaaagtatgggctacagaaaccgtgccaaaagacttctacagagtgaacccgaaaatccttccttgcaggaaaccagtctcagtgtccaactctctaaccttggaactgtgagaactctgaggacaaagcagcggatacaacctcaaaagacgtctgtctacattgaattgggatctgattcttctgaagataccgttaataaggcaacttattgcagtgtgggagatcaagaattgttacaaatcacccctcaaggaaccagggatgaaatcagtttggattctgcaaaaaagggtgaagcagcatctgggtgtgagagtgaaacaagcgtctctgaagactgctcagggctatcctctcagagtgacattttaaccactcagcagagggataccatgcaacataacctgataaagctccagcaggaaatggctgaactagaagctgtgttagaacagcatgggagccagccttctaacagctacccttccatcataagtgactcttctgcccttgaggacctgcgaaatccagaacaaagcacatcagaaaaagcagtattaacttcacagaaaagtagtgaataccctataagccagaatccagaaggcctttctgctgacaagtttgaggtgtctgcagatagttctaccagtaaaaataaagaaccaggagtggaaaggtcatccccttctaaatgcccatcattagatgataggtggtacatgcacagttgctctgggagtcttcagaatagaaactacccatctcaagaggagctcattaaggttgttgatgtggaggagcaacagctggaagagtctgggccacacgatttgacggaaacatcttacttgccaaggcaagatctagagggaaccccttacctggaatctggaatcagcctcttctctgatgaccctgaatctgatccttctgaagacagagccccagagtcagctcgtgttggcaacataccatcttcaacctctgcattgaaagttccccaattgaaagttgcagaatctgcccagagtccagctgctgctcatactactgatactgctgggtataatgcaatggaagaaagtgtgagcagggagaagccagaattgacagcttcaacagaaagggtcaacaaaagaatgtccatggtggtgtctggcctgaccccagaagaatttatgctcgtgtacaagtttgccagaaaacaccacatcactttaactaatctaattactgaagagactactcatgttgttatgaaaacagatgctgagtttgtgtgtgaacggacactgaaatattttctaggaattgcgggaggaaaatgggtagttagctatttctgggtgacccagtctattaaagaaagaaaaatgctgaatgagcatgattttgaagtcagaggagatgtggtcaatggaagaaaccaccaaggtccaaagcgagcaagagaatcccaggacagaaagatcttcagggggctagaaatctgttgctatgggcccttcaccaacatgcccacagatcaactggaatggatggtacagctgtgtggtgcttctgtggtgaaggagctttcatcattcacccttggcacaggtgtccacccaattgtggttgtgcagccagatgcctggacagaggacaatggcttccatgcaattgggcagatgtgtgaggcacctgtggtgacccgagagtgggtgttggacagtgtagcactctaccagtgccaggagctggacacctacctgataccccagatcccccacagccactactga

SEQ ID NO: 545 - RNA, 36 nt, synthetic construct
  misc_feature 1..36: note = AIC83575
  source 1..36: mol_type = other RNA
atggatttatctgctcttcgcgttgaagaagtataa

SEQ ID NO: 546 - RNA, 522 nt, synthetic construct
  misc_feature 1..522: note = ABC59810
  source 1..522: mol_type = other RNA
atggatgctgagtttgtgtgtgaacggacactgaaatattttctaggaattgcgggaggaaaatgggtagttagctatttctgggtgacccagtctattaaagaaagaaaaatgctgaatgagcatgattttgaagtcagaggagatgtggtcaatggaagaaaccaccaaggtccaaagcgagcaagagaatcccaggacagaaagatcttcagggggctagaaatctgttgctatgggcccttcaccaacatgcccacagatcaactggaatggatggtacagctgtgtggtgcttctgtggtgaaggagctttcatcattcacccttggcacaggtgtccacccaattgtggttgtgcagccagatgcctggacagaggacaatggcttccatgcaattgggcagatgtgtgaggcacctgtggtgacccgagagtgggtgttggacagtgtagcactctaccagtgccaggagctggacacctacctgataccccagatcccccacagccactactga

SEQ ID NO: 547 - RNA, 1065 nt, synthetic construct
  misc_feature 1..1065: note = ABC88652
  source 1..1065: mol_type = other RNA
atgcacagttgctctgggagtcttcagaatagaaactacccatctcaagaggagctcattaaggttgttgatgtggaggagcaacagctggaagagtctgggccacacgatttgacggaaacatcttacttgccaaggcaagatctagagggaaccccttacctggaatctggaatcagcctcttctctgatgaccctgaatctgatccttctgaagacagagccccagagtcagctcgtgttggcaacataccatcttcaacctctgcattgaaggttccccaattgaaagttgcagaatctgcccagggtccagctgctgctcacactactgatactgctgggtataatgcaatggaagaaagtgtgagcagggagaagccagaattgacagcttcaacagaaagggtcaacaaaagaatgtccatggtggtgtctggcctgaccccagaagaatttatgctcgtgtacaagtttgccagaaaacaccacatcactttaactaatctaattactgaagagactactcatgttgttatgaaaacagatgctgagtttgtgtgtgaacggacactgaaatattttctaggaattgcgggaggaaaatgggtagttagctatttctgggtgacccagtctattaaagaaagaaaaatgctgaatgagcatgattttgaagtcagaggagatgtggtcaatggaagaaaccaccaaggtccaaagcgagcaagagaatcccaggacagaaagatcttcagggggctagaaatctgttgctatgggcccttcaccaacatgcccacagatcaactggaatggatggtacagctgtgtggtgcttctgtggtgaaggagctttcatcattcacccttggcacaggtgtccacccaattgtggttgtgcagccagatgcctggacagaggacaatggcttccatgcaattgggcagatgtgtgagacacctgtggtgacccgagagtgggtgttggacagtgtagcactctaccagtgccaggagctggacacctacctgataccccagatcccccacagtcactactga

SEQ ID NO: 548 - RNA, 2043 nt, synthetic construct
  misc_feature 1..2043: note = EAW60939
  source 1..2043: mol_type = other RNA
atggatttatctgctcttcgcgttgaagaagtacaaaatgtcattaatgctatgcagaaaatcttagagtgtcccatctgtctggagttgatcaaggaacctgtctccacaaagtgtgaccacatattttgcaaattttgcatgctgaaacttctcaaccagaagaaagggccttcacagtgtcctttatgtaagaatgatataaccaaaaggagcctacaagaaagtacgagatttagtcaacttgttgaagagctattgaaaatcatttgtgcttttcagcttgacacaggtttggagtatgcaaacagctataattttgcaaaaaaggaaaataactctcctgaacatctaaaagatgaagtttctatcatccaaagtatgggctacagaaaccgtgccaaaagacttctacagagtgaacccgaaaatccttccttgcaggaaaccagtctcagtgtccaactctctaaccttggaactgtgagaactctgaggacaaagcagcggatacaacctcaaaagacgtctgtctacattgaattgggtgaagcagcatctgggtgtgagagtgaaacaagcgtctctgaagactgctcagggctatcctctcagagtgacattttaaccactcagcagagggataccatgcaacataacctgataaagctccagcaggaaatggctgaactagaagctgtgttagaacagcatgggagccagccttctaacagctacccttccatcataagtgactcttctgcccttgaggacctgcgaaatccagaacaaagcacatcagaaaaagcagtattaacttcacagaaaagtagtgaataccctataagccagaatccagaaggcctttctgctgacaagtttgaggtgtctgcagatagttctaccagtaaaaataaagaaccaggagtggaaaggtcatccccttctaaatgcccatcattagatgataggtggtacatgcacagttgctctgggagtcttcagaatagaaactacccatctcaagaggagctcattaaggttgttgatgtggaggagcaacagctggaagagtctgggccacacgatttgacggaaacatcttacttgccaaggcaagatctagagggaaccccttacctggaatctggaatcagcctcttctctgatgaccctgaatctgatccttctgaagacagagccccagagtcagctcgtgttggcaacataccatcttcaacctctgcattgaaagttccccaattgaaagttgcagaatctgcccagagtccagctgctgctcatactactgatactgctgggtataatgcaatggaagaaagtgtgagcagggagaagccagaattgacagcttcaacagaaagggtcaacaaaagaatgtccatggtggtgtctggcctgaccccagaagaatttatgctcgtgtacaagtttgccagaaaacaccacatcactttaactaatctaattactgaagagactactcatgttgttatgaaaacagatgctgagtttgtgtgtgaacggacactgaaatattttctaggaattgcgggaggaaaatgggtagttagctatttctgggtgacccagtctattaaagaaagaaaaatgctgaatgagcatgattttgaagtcagaggagatgtggtcaatggaagaaaccaccaaggtccaaagcgagcaagagaatcccaggacagaaagatcttcagggggctagaaatctgttgctatgggcccttcaccaacatgcccacagatcaactggaatggatggtacagctgtgtggtgcttctgtggtgaaggagctttcatcattcacccttggcacaggtgtccacccaattgtggttgtgcagccagatgcctggacagaggacaatggcttccatgcaattgggcagatgtgtgaggcacctgtggtgacccgagagtgggtgttggacagtgtagcactctaccagtgccaggagctggacacctacctgataccccagatcccccacagccactactga

SEQ ID NO: 549 - RNA, 546 nt, synthetic construct
  misc_feature 1..546: note = AAC72302
  source 1..546: mol_type = other RNA
atgctgttggaacccggcagaggctgctgtgccctggccatcctgctggcaattgtggacatccagtctggtggatgcattaacatcaccagctcagcttcccaggaaggaacgcgactaaacttaatctgtactgtatggcataagaaagaagaggctgaggggtttgtagtgtttttgtgcaaggacaggtctggagactgttctcctgagaccagtttaaaacagctgagacttaaaagggatcctgggatagatggtgttggtgaaatatcatctcagttgatgttcaccataagccaagtcacaccgttgcacagtgggacctaccagtgttgtgccagaagccagaagtcaggtatccgccttcagggccattttttctccattctattcacagagacagggaactacacagtgacgggattgaaacaaagacaacaccttgagttcagccataatgaaggcactctcagttcaggcttcctacaagaaaaggtctgggtaatgctggtcaccagccttgtggcccttcaagctttgtaa

SEQ ID NO: 550 - RNA, 639 nt, synthetic construct
  misc_feature 1..639: note = BAG58223
  source 1..639: mol_type = other RNA
atgctgctatccgtctacttcaaggagcagtttctggacggagacgggtggacttcccgctggatcgaatccaaacacaagtcagattttggcaaattcgttctcagttccggcaagttctacggtgacgaggagaaagataaaggtttgcagacaagccaggatgcacgcttttatgctctgtcggccagtttcgagcctttcagcaacaaaggccagacgctggtggtgcagttcacggtgaaacatgagcagaacatcgactgtgggggcggctatgtgaagctgtttcctaatagtttggaccagacagacatgcacggagactcagaatacaacatcatgtttggtcccgacatctgtggccctggcaccaagaaggttcatgtcatcttcaactacaagggcaagaacgtgctgatcaacaaggacatccgttgcaaggatgatgagtttacacacctgtacacactgattgtgcggccagacaacacctatgaggtgaagattgacaacagccaggtggagtccggctccttggaagacgattgggacttcctgccacccaagaagataaaggatcctgatgcttcaaaaccggaagactgggatgagcgggccaagatcgatgatccctga

SEQ ID NO: 551 - RNA, 891 nt, synthetic construct
  misc_feature 1..891: note = BAG65301
  source 1..891: mol_type = other RNA
atgcacggagactcagaatacaacatcatgtttggtcccgacatctgtggccctggcaccaagaaggttcatgtcatcttcaactacaagggcaagaacgtgctgatcaacaaggacatccgttgcaaggatgatgagtttacacacctgtacacactgattgtgcggccagacaacacctatgaggtgaagattgacaacagccaggtggagtccggctccttggaagacgattgggacttcctgccacccaagaagataaaggatcctgatgcttcaaaaccggaagactgggatgagcgggccaagatcgatgatcccacagactccaagcctgaggactgggacaagcccgagcatatccctgaccctgatgctaagaagcccgaggactgggatgaagagatggacggagagtgggaacccccagtgattcagaaccctgagtacaagggtgagtggaagccccggcagatcgacaacccagattacaagggcacttggatccacccagaaattgacaaccccgagtattctcccgatcccagtatctatgcctatgataactttggcgtgctgggcctggacctctggcaggtcaagtctggcaccatctttgacaacttcctcatcaccaacgatgaggcatacgctgaggagtttggcaacgagacgtggggcgtaacaaaggcagcagagaaacaaatgaaggacaaacaggacgaggagcagaggcttaaggaggaggaagaagacaagaaacgcaaagaggaggaggaggcagaggacaaggaggatgatgaggacaaagatgaggatgaggaggatgaggaggacaaggaggaagatgaggaggaagatgtccccggccaggccaaggacgagctgtag

SEQ ID NO: 552 - RNA, 1254 nt, synthetic construct
  misc_feature 1..1254: note = AAA36582
  source 1..1254: mol_type = other RNA
atgctgctatccgtgccgctgctgctcggcctcctcggcctggccgtcgccgagcccgccgtctacttcaaggagcagtttctggacggagacgggtggacttcccgctggatcgaatccaaacacaagtcagattttggcaaattcgttctcagttccggcaagttctacggtgacgaggagaaagataaaggtttgcagacaagccaggatgcacgcttttatgctctgtcggccagtttcgagcctttcagcaacaaaggccagacgctggtggtgcagttcacggtgaaacatgagcagaacatcgactgtgggggcggctatgtgaagctgtttcctaatagtttggaccagacagacatgcacggagactcagaatacaacatcatgtttggtcccgacatctgtggccctggcaccaagaaggttcatgtcatcttcaactacaagggcaagaacgtgctgatcaacaaggacatccgttgcaaggatgatgagtttacacacctgtacacactgattgtgcggccagacaacacctatgaggtgaagattgacaacagccaggtggagtccggctccttggaagacgattgggacttcctgccacccaagaagataaaggatcctgatgcttcaaaaccggaagactgggatgagcgggccaagatcgatgatcccacagactccaagcctgaggactgggacaagcccgagcatatccctgaccctgatgctaagaagcccgaggactgggatgaagagatggacggagagtgggaacccccagtgattcagaaccctgagtacaagggtgagtggaagccccggcagatcgacaacccagattacaagggcacttggatccacccagaaattgacaaccccgagtattctcccgatcccagtatctatgcctatgataactttggcgtgctgggcctggacctctggcaggtcaagtctggcaccatctttgacaacttcctcatcaccaacgatgaggcatacgctgaggagtttggcaacgagacgtggggcgtaacaaaggcagcagagaaacaaatgaaggacaaacaggacgaggagcagaggcttaaggaggaggaagaagacaagaaacgcaaagaggaggaggaggcagaggacaaggaggatgatgaggacaaagatgaggatgaggaggatgaggaggacaaggaggaagatgaggaggaagatgtccccggccaggccaaggacgagctgtag

SEQ ID NO: 553 - RNA, 1155 nt, synthetic construct
  misc_feature 1..1155: note = BAB71655
  source 1..1155: mol_type = other RNA
atggcccgggctttggtccagctctgggccatatgcatgctgcgagtggcgctggctaccgtctatttccaagaggaatttctagacggagagcattggagaaaccgatggttgcagtccaccaatgactcccgatttgggcattttagactttcgtcgggcaagttttatggtcataaagagaaagataaaggtctgcaaaccactcagaatggccgattctatgccatctctgcacgcttcaaaccgttcagcaataaagggaaaactctggttattcagtacacagtaaaacatgagcagaagatggactgtggagggggctacattaaggtctttcctgcagacattgaccagaagaacctgaatggaaaatcgcaatactatattatgtttggacccgatatttgtggatttgatatcaagaaagttcatgttattttacatttcaagaataagtatcacgaaaacaagaaactgatcaggtgtaaggttgatggcttcacacacctgtacactctaattttaagaccagatctttcttatgatgtgaaaattgatggtcagtcaattgaatccggcagcatagagtacgactggaacttaacatcactcaagaaggaaacgtccccggcagaatcgaaggattgggaacagactaaagacaacaaagcccaggactgggagaagcattttctggacgccagcaccagcaagcagagcgactggaacggtgacctggatggggactggccagcgccgatgctccagaagcccccgtaccaggatggcctgaaaccagaaggtattcataaagacgtctggctccaccgtaagatgaagaataccgactatttgacgcagtatgacctctcagaatttgagaacattggtgccattggcctggagctttggcaggtgagatctggaaccatttttgataactttctgatcacagatgatgaagagtatgcagataattttggcaaggccacctggggcgaaaccaagggtccagaaagggagatggatgccatacaggccaaggaggaaatgaagaaggcccgcgaggaagaggaggaagagctgctgtcgggaaaaattaacaggcacgaacattacttcaatcaatttcacagaaggaatgaactttag

SEQ ID NO: 554 - RNA, 330 nt, synthetic construct
  misc_feature 1..330: note = CAA10193
  source 1..330: mol_type = other RNA
atgctgatggcccaggaggccctggcattcctgatggcccagggggcaatgctggcggcccaggagaggcgggtgccacgggcggcagaggtccccggggcgcaggggcagcaagggcctcggggccgagaggaggcgccccgcggggtccgcatggcggtgccgcttctgcgcaggatggaaggtgcccctgcggggccaggaggccggacagccgcctgcttcagttgcacatcacgatgcctttctcgtcgcccatggaagcggagctggtccgcaggatcctgtcccgggatgccgcacctctcccccgaccaggggcggttctga

SEQ ID NO: 555 - RNA, 1440 nt, synthetic construct
  misc_feature 1..1440: note = CAA66853
  source 1..1440: mol_type = other RNA
atggacttcagcagaaatctttatgatattggggaacaactggacagtgaagatctggcctccctcaagttcctgagcctggactacattccgcaaaggaagcaagaacccatcaaggatgccttgatgttattccagagactccaggaaaagagaatgttggaggaaagcaatctgtccttcctgaaggagctgctcttccgaattaatagactggatttgctgattacctacctaaacactagaaaggaggagatggaaagggaacttcagacaccaggcagggctcaaatttctgcctacagggtcatgctctatcagatttcagaagaagtgagcagatcagaattgaggtcttttaagtttcttttgcaagaggaaatctccaaatgcaaactggatgatgacatgaacctgctggatattttcatagagatggagaagagggtcatcctgggagaaggaaagttggacatcctgaaaagagtctgtgcccaaatcaacaagagcctgctgaagataatcaacgactatgaagaattcagcaaagagagaagcagcagccttgaaggaagtcctgatgaattttcaaatggggaggagttgtgtggggtaatgacaatctcggactctccaagagaacaggatagtgaatcacagactttggacaaagtttaccaaatgaaaagcaaacctcggggatactgtctgatcatcaacaatcacaattttgcaaaagcacgggagaaagtgcccaaacttcacagcattagggacaggaatggaacacacttggatgcaggggctttgaccacgacctttgaagagcttcattttgagatcaagccccacgatgactgcacagtagagcaaatctatgagattttgaaaatctaccaactcatggaccacagtaacatggactgcttcatctgctgtatcctctcccatggagacaaaggcatcatctatggcactgatggacaggaggcccccatctatgagctgacatctcagttcactggtttgaagtgcccttcccttgctggaaaacccaaagtgttttttattcaggcttgtcagggggataactaccagaaaggtatacctgttgagactgattcagaggagcaaccctatttagaaatggatttatcatcacctcaaacgagatatatcccggatgaggctgactttctgctggggatggccactgtgaataactgtgtttcctaccgaaaccctgcagagggaacctggtacatccagtcactttgccagagcctgagagagcgatgtcctcgaggcgatgatattctcaccatcctgactgaagtgaactatgaagtaagcaacaaggatgacaagaaaaacatggggaaacagatgcctcagcctactttcacactaagaaaaaaacttgtcttcccttctgattga

SEQ ID NO: 556 - RNA, 1569 nt, synthetic construct
  misc_feature 1..1569: note = CCDS2340.1
  source 1..1569: mol_type = other RNA
atgaaatctcaaggtcaacattggtattccagttcagataaaaactgtaaagtgagctttcgtgagaagcttctgattattgattcaaacctgggggtccaagatgtggagaacctcaagtttctctgcataggattggtccccaacaagaagctggagaagtccagctcagcctcagatgtttttgaacatctcttggcagaggatctgctgagtgaggaagaccctttcttcctggcagaactcctctatatcatacggcagaagaagctgctgcagcacctcaactgtaccaaagaggaagtggagcgactgctgcccacccgacaaagggtttctctgtttagaaacctgctctacgaactgtcagaaggcattgactcagagaacttaaaggacatgatcttccttctgaaagactcgcttcccaaaactgaaatgacctccctaagtttcctggcatttctagagaaacaaggtaaaatagatgaagataatctgacatgcctggaggacctctgcaaaacagttgtacctaaacttttgagaaacatagagaaatacaaaagagagaaagctatccagatagtgacacctcctgtagacaaggaagccgagtcgtatcaaggagaggaagaactagtttcccaaacagatgttaagacattcttggaagccttaccgcaggagtcctggcaaaataagcatgcaggtagtaatggtaacagagccacaaatggtgcaccaagcctggtctccagggggatgcaaggagcatctgctaacactctaaactctgaaaccagcacaaagagggcagctgtgtacaggatgaatcggaaccacagaggcctctgtgtcattgtcaacaaccacagctttacctccctgaaggacagacaaggaacccataaagatgctgagatcctgagtcatgtgttccagtggcttgggttcacagtgcatatacacaataatgtgacgaaagtggaaatggagatggtcctgcagaagcagaagtgcaatccagcccatgccgacggggactgcttcgtgttctgtattctgacccatgggagatttggagctgtctactcttcggatgaggccctcattcccattcgggagatcatgtctcacttcacagccctgcagtgccctagactggctgaaaaacctaaactctttttcatccaggcctgccaaggtgaagagatacagccttccgtatccatcgaagcagatgctctgaaccctgagcaggcacccacttccctgcaggacagtattcctgccgaggctgacttcctacttggtctggccactgtcccaggctatgtatcctttcggcatgtggaggaaggcagctggtatattcagtctctgtgtaatcatctgaagaaattggtcccaagacatgaagacatcttatccatcctcactgctgtcaacgatgatgtgagtcgaagagtggacaaacagggaacaaagaaacagatgccccagcctgctttcacactaaggaaaaaactagtattccctgtgcccctggatgcactttcattatag

SEQ ID NO: 557 - RNA, 1020 nt, synthetic construct
  misc_feature 1..1020: note = EAW65632
  source 1..1020: mol_type = other RNA
atgtggcagctctgggcctccctctgctgcctgctggtgttggccaatgcccggagcaggccctctttccatcccctgtcggatgagctggtcaactatgtcaacaaacggaataccacgtggcaggccgggcacaacttctacaacgtggacatgagctacttgaagaggctatgtggtaccttcctgggtgggcccaagccaccccagagagttatgtttaccgaggacctgaagctgcctgcaagcttcgatgcacgggaacaatggccacagtgtcccaccatcaaagagatcagagaccagggctcctgtggctcctgctgggccttcggggctgtggaagccatctctgaccggatctgcatccacaccaatgcgcacgtcagcgtggaggtgtcggcggaggacctgctcacctgctgtggcagcatgtgtggggacggctgtaatggtggctatcctgctgaagcttggaacttctggacaagaaaaggcctggtttctggtggcctctatgaatcccatgtagggtgcagaccgtactccatccctccctgtgagcaccacgtcaacggctcccggcccccatgcacgggggagggagatacccccaagtgtagcaagatctgtgagcctggctacagcccgacctacaaacaggacaagcactacggatacaattcctacagcgtctccaatagcgagaaggacatcatggccgagatctacaaaaacggccccgtggagggagctttctctgtgtattcggacttcctgctctacaagtcaggagtgtaccaacacgtcaccggagagatgatgggtggccatgccatccgcatcctgggctggggagtggagaatggcacaccctactggctggttgccaactcctggaacactgactggggtgacaatggcttctttaaaatactcagaggacaggatcactgtggaatcgaatcagaagtggtggctggaattccacgcaccgatcagtactgggaaaagatctaa

SEQ ID NO: 558 - RNA, 1020 nt, synthetic construct
  misc_feature 1..1020: note = AAC37547
  source 1..1020: mol_type = other RNA
atgtggcagctctgggcctccctctgctgcctgctggtgttggccaatgcccggagcaggccctctttccatcccctgtcggatgagctggtcaactatgtcaacaaacggaataccacgtggcaggccgggcacaacttctacaacgtggacatgagctacttgaagaggctatgtggtaccttcctgggtgggcccaagccaccccagagagttatgtttaccgaggacctgaagctgcctgcaagcttcgatgcacgggaacaatggccacagtgtcccaccatcaaagagatcagagaccagggctcctgtggctcctgctgggccttcggggctgtggaagccatctctgaccggatctgcatccacaccaatgcgcacgtcagcgtggaggtgtcggcggaggacctgctcacatgctgtggcagcatgtgtggggacggctgtaatggtggctatcctgctgaagcttggaacttctggacaagaaaaggcctggtttctggtggcctctatgaatcccatgtagggtgcagaccgtactccatccctccctgtgagcaccacgtcaacggctcccggcccccatgcacgggggagggagatacccccaagtgtagcaagatctgtgagcctggctacagcccgacctacaaacaggacaagcactacggatacaattcctacagcgtctccaatagcgagaaggacatcatggccgagatctacaaaaacggccccgtggagggagctttctctgtgtattcggacttcctgctctacaagtcaggagtgtaccaacacgtcaccggagagatgatgggtggccatgccatccgcatcctgggctggggagtggagaatggcacaccctactggctggttgccaactcctggaacactgactggggtgacaatggcttctttaaaatactcagaggacaggatcactgtggaatcgaatcagaagtggtggctggaattccacgcaccgatcagtactgggaaaagatctaa

SEQ ID NO: 559 - RNA, 1002 nt, synthetic construct
  misc_feature 1..1002: note = EAW62731
  source 1..1002: mol_type = other RNA
atgaatcctacactcatccttgctgccttttgcctgggaattgcctcagctactctaacatttgatcacagtttagaggcacagtggaccaagtggaaggcgatgcacaacagattatacggcatgaatgaagaaggatggaggagagcagtgtgggagaagaacatgaagatgattgaactgcacaatcaggaatacagggaagggaaacacagcttcacaatggccatgaacgcctttggagacatgaccagtgaagaattcaggcaggtgatgaatggctttcaaaaccgtaagcccaggaaggggaaagtgttccaggaacctctgttttatgaggcccccagatctgtggattggagagagaaaggctacgtgactcctgtgaagaatcagggtcagtgtggttcttgttgggcttttagtgctactggtgctcttgaaggacagatgttccggaaaactgggaggcttatctcactgagtgagcagaatctggtagactgctctgggcctcaaggcaatgaaggctgcaatggtggcctaatggattatgctttccagtatgttcaggataatggaggcctggactctgaggaatcctatccatatgaggcaacagaagaatcctgtaagtacaatcccaagtattctgttgctaatgacaccggctttgtggacatccctaagcaggagaaggccctgatgaaggcagttgcaactgtggggcccatttctgttgctattgatgcaggtcatgagtccttcctgttctataaagaaggcatttattttgagccagactgtagcagtgaagacatggatcatggtgtgctggtggttggctacggatttgaaagcacagaatcagataacaataaatattggctggtgaagaacagctggggtgaagaatggggcatgggtggctacgtaaagatggccaaagaccggagaaaccattgtggaattgcctcagcagccagctaccccactgtgtga

SEQ ID NO: 560 - RNA, 1002 nt, synthetic construct; identical to SEQ ID NO: 559
  misc_feature 1..1002: note = AAA66974
  source 1..1002: mol_type = other RNA

SEQ ID NO: 561 - RNA, 456 nt, synthetic construct
  misc_feature 1..456: note = AAG17239
  source 1..456: mol_type = other RNA
atggattatgctttccagtatgttcaggataatggaggcctggactctgaggaatcctatccatatgaggcaacagaagaatcctgtaagtacaatcccaagtattctgttgctaatgacaccggctttgtggacatccctaagcaggagaaggccctgatgaaggcagttgcaactgtggggcccatttctgttgctattgatgcaggtcatgagtccttcctgttctataaagaaggcatttattttgagccagactgtagcagtgaagacatggatcatggtgtgctggtggttggctacggatttgaaagcacagaatcagataacaataaatattggctggtgaagaacagctggggtgaagaatggggcatgggtggctacgtaaagatggccaaagaccggagaaaccattgtggaattgcctcagcagccagctaccccactgtgtga

SEQ ID NO: 562 - RNA, 984 nt, synthetic construct
  misc_feature 1..984: note = AAA51932
  source 1..984: mol_type = other RNA
atgctgtttttgctacttccattgttagctgttctcccaggtgatggcaatgcagacgggctcaaggagcctctctccttccatgtcacctggatcgcatccttttacaaccattcctggaaacaaaatctggtctcaggttggctgagtgatttgcagactcatacctgggacagcaattccagcaccatcgttttcctgtgcccctggtccaggggaaacttcagcaatgaggagtggaaggaactggaaacattattccgtatacgcaccattcggtcatttgagggaattcgtagatacgcccatgaattgcagtttgaatatccttttgagatacaggtgacaggaggctgtgagctgcactctggaaaggtctcaggaagcttcttgcagttagcttatcaaggatcagactttgtgagcttccagaacaattcatggttgccatatccagtggctgggaatatggccaagcatttctgcaaagtgctcaatcagaatcagcatgaaaatgacataacacacaatcttctcagtgacacctgcccacgtttcatcttgggtcttcttgatgcaggaaaggcacatctccagcggcaagtgaagcccgaggcctggctgtcccatggccccagtcctggccctggccatctgcagcttgtgtgccatgtctcaggattctacccaaagcccgtgtgggtgatgtggatgcggggtgagcaggagcagcagggcactcagcgaggggacatcttgcccagtgctgatgggacatggtatctccgcgcaaccctggaggtggccgctggggaggcagctgacctgtcctgtcgggtgaagcacagcagtctagagggccaggacatcgtcctctactgggagcatcacagttccgtgggcttcatcatcttggcggtgatagtgcctttacttcttctgataggtcttgcgctttggttcaggaaacgctgtttctgttaa

SEQ ID NO: 563 - RNA, 1002 nt, synthetic construct
  misc_feature 1..1002: note = AAA51939
  source 1..1002: mol_type = other RNA
atgctgctgctgccatttcaactgttagctgttctctttcctggtggtaacagtgaacatgccttccaggggccgacctcctttcatgttatccagacctcgtcctttaccaatagtacctgggcacaaactcaaggctcaggctggttggatgatttgcagattcatggctgggatagcgactcaggcactgccatattcctgaagccttggtctaaaggtaactttagtgataaggaggttgctgagttagaggagatattccgagtctacatctttggattcgctcgagaagtacaagactttgccggtgatttccagatgaaatacccctttgagatccagggcatagcaggctgtgagctacattctggaggtgccatagtaagcttcctgaggggagctctaggaggattggatttcctgagtgtcaagaatgcttcatgtgtgccttccccagaaggtggcagcagggcacagaaattctgtgcactaatcatacaatatcaaggtatcatggaaactgtgagaattctcctctatgaaacctgcccccgatatctcttgggcgtcctcaatgcaggaaaagcagatctgcaaagacaagtgaagcctgaggcctggctgtccagtggccccagtcctggacctggccgtctgcagcttgtgtgccatgtctcaggattctacccaaagcccgtgtgggtgatgtggatgcggggtgagcaggagcagcagggcactcagctaggggacatcctgcccaatgctaactggacatggtatctccgagcaaccctggatgtggcagatggggaggcggctggcctgtcctgtcgggtgaagcacagcagtttagagggccaggacatcatcctctactggagaaaccccacctccattggctcaattgttttggcaataatagtgccttccttgctccttttgctatgccttgcattatggtatatgaggcgccggtcatatcagaatatcccatga

SEQ ID NO: 564 - RNA, 1002 nt, synthetic construct
  misc_feature 1..1002: note = AAI26466
  source 1..1002: mol_type = other RNA
atgctgtttctgcagtttctgctgctagctcttcttctcccaggtggtgacaatgcagacgcatcccaggaacacgtctccttccatgtcatccagatcttctcatttgtcaaccaatcctgggcacgaggtcagggctcaggatggctggacgagttgcagactcatggctgggacagtgaatcaggcacaataattttcctgcataactggtccaagggcaacttcagcaatgaagagttgtcagacctagagttgttatttcgtttctacctctttggattaactcgggagattcaagaccatgcaagtcaagattactcgaaatatccctttgaagtacaggtgaaagcgggctgtgagctgcattctggaaagagcccagaaggcttctttcaggtagctttcaacggattagatttactgagtttccagaatacaacatgggtgccatctccaggctgtggaagtttggcccaaagtgtctgtcatctactcaatcatcagtatgaaggcgtcacagaaacagtgtataatctcataagaagcacttgcccccgatttctcttgggtctcctggatgcagggaagatgtatgtacacaggcaagtgaggccagaagcctggctgtccagtcgccccagccttgggtctggccagctgttgctggtttgtcatgcctccggcttctacccaaagcctgtttgggtgacatggatgcggaatgaacaggagcaactgggcactaaacatggtgatattcttcctaatgctgatgggacatggtatcttcaggtgatcctggaggtggcatctgaggagcctgctggcctgtcttgtcgagtgagacacagcagtctaggaggccaggacatcatcctctactggggacaccacttttccatgaattggattgccttggtagtgatagtgcccttggtgattctaatagtccttgtgttatggtttaagaagcactgctcatatcaggacatcctgtga

SEQ ID NO: 565 - RNA, 1008 nt, synthetic construct
  misc_feature 1..1008: note = AAA59672
  source 1..1008: mol_type = other RNA
atggggtgcctgctgtttctgctgctctgggcgctcctccaggcttggggaagcgctgaagtcccgcaaaggcttttccccctccgctgcctccagatctcgtccttcgccaatagcagctggacgcgcaccgacggcttggcgtggctgggggagctgcagacgcacagctggagcaacgactcggacaccgtccgctctctgaagccttggtcccagggcacgttcagcgaccagcagtgggagacgctgcagcatatatttcgggtttatcgaagcagcttcaccagggacgtgaaggaattcgccaaaatgctacgcttatcctatcccttggagctccaggtgtccgctggctgtgaggtgcaccctgggaacgcctcaaataacttcttccatgtagcatttcaaggaaaagatatcctgagtttccaaggaacttcttgggagccaacccaagaggccccactttgggtaaacttggccattcaagtgctcaaccaggacaagtggacgagggaaacagtgcagtggctccttaatggcacctgcccccaatttgtcagtggcctccttgagtcagggaagtcggaactgaagaagcaagtgaagcccaaggcctggctgtcccgtggccccagtcctggccctggccgtctgctgctggtgtgccatgtctcaggattctacccaaagcctgtatgggtgaagtggatgcggggtgagcaggagcagcagggcactcagccaggggacatcctgcccaatgctgacgagacatggtatctccgagcaaccctggatgtggtggctggggaggcagctggcctgtcctgtcgggtgaagcacagcagtctagagggccaggacatcgtcctctactggggtgggagctacacctccatgggcttgattgccttggcagtcctggcgtgcttgctgttcctcctcattgtgggctttacctcccggtttaagaggcaaacttcctatcagggcgtcctgtga

SEQ ID NO: 566 - RNA, 1167 nt, synthetic construct
  misc_feature 1..1167: note = EAW52830
  source 1..1167: mol_type = other RNA
atgctgctcctgttcctcctcttcgagggtctctgctgtcctggggaaaatacagcagctccccaggctctacaatcctatcatctagcagcagaggagcagctgtccttccgcatgctccaaacttcctcctttgccaaccacagctgggcacacagtgagggctcaggatggctgggtgacctgcagactcatggctgggacactgtcttgggcaccatccgctttctgaagccctggtcccatggaaacttcagcaagcaggagctgaaaaacttacagtcactgttccagttatacttccatagttttatccagatagtgcaagcttctgctggtcaatttcagcttgaataccccttcgagatccagatattagctggctgtagaatgaatgccccacaaatcttcttaaatatggcatatcaagggtcagatttcctgagtttccaaggaatttcctgggagccatctccaggagcagggatccgggcccagaacatctgtaaagtgctcaatcgctacctagatattaaggaaatactgcaaagccttcttggtcacacctgccctcgatttctagcggggctcatggaagcaggggagtcagaactgaaacggaaagtgaagccagaggcctggctgtcctgtggccccagtcctggccctggccgtctgcagcttgtgtgccatgtctcaggattctacccaaagcccgtgtgggtgatgtggatgcggggtgagcaggagcagcggggcactcagcgaggggacgtcctgcctaatgctgacgagacatggtatctccgagcaaccctggatgtggcggctggggaggcagctggcctgtcctgtcgggtgaaacacagcagtctagggggccatgatctaatcatccattggggtggatattccatctttctcatcctgatctgtttgactgtgatagttaccctggtcatattggttgtagttgactcacggttaaaaaaacagagttcaaataagaacattctttctccccacacacccagccctgtctttctcatgggagccaacactcaggacaccaagaattcaagacatcagttctgcttggcacaagtatcgtggatcaaaaacagagtattgaagaagtggaagacacgcctaaaccaactctggtga

SEQ ID NO: 567 - RNA, 894 nt, synthetic construct
  misc_feature 1..894: note = AAA35581
  source 1..894: mol_type = other RNA
atgacaacacccagaaattcagtaaatgggactttcccggcagagccaatgaaaggccctattgctatgcaatctggtccaaaaccactcttcaggaggatgtcttcactggtgggccccacgcaaagcttcttcatgagggaatctaagactttgggggctgtccagattatgaatgggctcttccacattgccctggggggtcttctgatgatcccagcagggatctatgcacccatctgtgtgactgtgtggtaccctctctggggaggcattatgtatattatttccggatcactcttggcagcaacggagaaaaactctaggaagtgtttggtcaaaggaaaaatgataatgaattcattgagcctctttgctgccatttctggaatgattctttcaatcatggacatacttaatattaaaatttcccattttttaaaaatggagagtctgaattttattagagctcacacaccatatattaacatatacaactgtgaaccagctaatccctctgagaaaaactccccatctacccaatactgttacagcatacaatctctgttcttgggcattttgtcagtgatgctgatctttgccttcttccaggaacttgtaatagctggcatcgttgagaatgaatggaaaagaacgtgctccagacccaaatctaacatagttctcctgtcagcagaagaaaaaaaagaacagactattgaaataaaagaagaagtggttgggctaactgaaacatcttcccaaccaaagaatgaagaagacattgaaattattccaatccaagaagaggaagaagaagaaacagagacgaactttccagaacctccccaagatcaggaatcctcaccaatagaaaatgacagctctccttaa

SEQ ID NO: 568 - RNA, 1989 nt, synthetic construct
  misc_feature 1..1989: note = AAC18956
  source 1..1989: mol_type = other RNA
atggagtccaagactgagaaatggatggaacgaatacacctcaatgtctctgaaaggccttttccacctcatatccagctccctccagaaattcaagagtcccaggaagtcactctgacctgcttgctgaatttctcctgctatgggtatccgatccaattgcagtggctcctagagggggttccaatgaggcaggctgctgtcacctcgacctccttgaccatcaagtctgtcttcacccggagcgagctcaagttctccccacagtggagtcaccatgggaagattgtgacctgccagcttcaggatgcagatgggaagttcctctccaatgacacggtgcagctgaacgtgaagcacaccccgaagttggagatcaaggtcactcccagtgatgccatagtgagggagggggactctgtgaccatgacctgcgaggtcagcagcacgaacccggagtacacgacggtatcctggctcaaggatgggacctcgctgaagaagcagaatacattcacgctaaacctgcgcgaagtgaccaaggaccagagtgggaagtactgctgtcaggtctccaatgacgtgggcccgggaaggtcggaagaagtgttcctgcaagtgcagtatgccccggaaccttccacggttcagatcctccactcaccggctgtggagggaagtcaagtcgagtttctttgcatgtcactggccaatcctcttccaacaaattacacgtggtaccacaatgggaaagaaatgcagggaaggacagaggagaaagtccacatcccaaagatcctcccctggcacgctgggacttattcctgtgtggcagaaaacattcttggtactggacagaggggcccgggagctgagctggatgtccagtatcctcccaagaaggtgaccacagtgattcaaaaccccatgccgattcgagaaggagacacagtgaccctttcctgtaactacaattccagtaaccccagtgttacccggtatgaatggaaaccccatggcgcctgggaggagccatcgcttggggtgctgaagatccaaaaggttggctgggacaacacaaccatcgcctgcgcacgttgtaatagttggtgctcgtgggcctcccctgtcgccctgaatgtccagtatgccccccgagacgtgagggtccggaaaatcaagcccctttccgagattcactctggaaactcggtcagcctccaatgtgacttctcaagcagccaccccaaagaagtccagttcttctgggagaaaaatggcaggcttctggggaaagaaagccagctgaattttgactccatctccccagaagatgctgggagttacagctgctgggtgaacaactccataggacagacagcgtccaaggcctggacacttgaagtgctgtatgcacccaggaggctgcgtgtgtccatgagcccgggggaccaagtgatggaggggaagagtgcaaccctgaggtgtgagagcgacgccaaccctcccgtctcccactacacctggtttgactggaataaccaaagcctcccctaccacagccagaagctgagattggagccggtgaaggtccagcactcgggtgcctactggtgccaggggaccaacagtgtgggcaagggccgttcgcctctcagcaccctcaccgtctactatagcccggagaccatcggcaggcgagtggctgtgggactcgggtcctgcctcgccatcctcatcctggcaatctgtgggctcaagctccagcgacgagatgcagagtcctcagagatgcagagacctccccggacctgcgatgacacggtcacttattcagcattgcacaagcgccaagtgggcgactatgagaacgtcattccagattttccagaagatgaggggattcattactcagagctgatccagtttggggtcggggagcggcctcaggcacaagaaaatgtggactatgtgatcctcaaacattga

SEQ ID NO: 569 - RNA, 2544 nt, synthetic construct
  misc_feature 1..2544: note = AAB06448
  source 1..2544: mol_type = other RNA
atgcatctcctcggcccctggctcctgctcctggttctagaatacttggctttctctgactcaagtaaatgggtttttgagcaccctgaaaccctctacgcctgggagggggcctgcgtctggatcccctgcacctacagagccctagatggtgacctggaaagcttcatcctgttccacaatcctgagtataacaagaacacctcgaagtttgatgggacaagactctatgaaagcacaaaggatgggaaggttccttctgagcagaaaagggtgcaattcctgggagacaagaataagaactgcacactgagtatccacccggtgcacctcaatgacagtggtcagctggggctgaggatggagtccaagactgagaaatggatggaacgaatacacctcaatgtctctgaaaggccttttccacctcatatccagctccctccagaaattcaagagtcccaggaagtcactctgacctgcttgctgaatttctcctgctatgggtatccgatccaattgcagtggctcctagagggggttccaatgaggcaggctgctgtcacctcgacctccttgaccatcaagtctgtcttcacccggagcgagctcaagttctccccacagtggagtcaccatgggaagattgtgacctgccagcttcaggatgcagatgggaagttcctctccaatgacacggtgcagctgaacgtgaagcacaccccgaagttggagatcaaggtcactcccagtgatgccatagtgagggagggggactctgtgaccatgacctgcgaggtcagcagcagcaacccggagtacacgacggtatcctggctcaaggatgggacctcgctgaagaagcagaatacattcacgctaaacctgcgcgaagtgaccaaggaccagagtgggaagtactgctgtcaggtctccaatgacgtgggcccgggaaggtcggaagaagtgttcctgcaagtgcagtatgccccggaaccttccacggttcagatcctccactcaccggctgtggagggaagtcaagtcgagtttctttgcatgtcactggccaatcctcttccaacaaattacacgtggtaccacaatgggaaagaaatgcagggaaggacagaggagaaagtccacatcccaaagatcctcccctggcacgctgggacttattcctgtgtggcagaaaacattcttggtactggacagaggggcccgggagctgagctggatgtccagtatcctcccaagaaggtgaccacagtgattcaaaaccccatgccgattcgagaaggagacacagtgaccctttcctgtaactacaattccagtaaccccagtgttacccggtatgaatggaaaccccatggcgcctgggaggagccatcgcttggggtgctgaagatccaaaacgttggctgggacaacacaaccatcgcctgcgcagcttgtaatagttggtgctcgtgggcctcccctgtcgccctgaatgtccagtatgccccccgagacgtgagggtccggaaaatcaagcccctttccgagattcactctggaaactcggtcagcctccaatgtgacttctcaagcagccaccccaaagaagtccagttcttctgggagaaaaatggcaggcttctggggaaagaaagccagctgaattttgactccatctccccagaagatgctgggagttacagctgctgggtgaacaactccataggacagacagcgtccaaggcctggacacttgaagtgctgtatgcacccaggaggctgcgtgtgtccatgagcccgggggaccaagtgatggaggggaagagtgcaaccctgacctgtgagagcgacgccaaccctcccgtctcccactacacctggtttgactggaataaccaaagcctcccctaccacagccagaagctgagattggagccggtgaaggtccagcactcgggtgcctactggtgccaggggaccaacagtgtgggcaagggccgttcgcctctcagcaccctcaccgtctactatagcccggagaccatcggcaggcgagtggctgtgggactcgggtcctgcctcgccatcctcatcctggcaatctgtgggctcaagctccagcgacgttggaagaggacacagagccagcaggggcttcaggagaattccagcggccagagcttctttgtgaggaataaaaaggttagaagggcccccctctctgaaggcccccactccctgggatgctacaatccaatgatggaagatggcattagctacaccaccctgcgctttcccgagatgaacataccacgaactggagatgcagagtcctcagagatgcagagacctcccccggactgcgatgacacggtcacttattcagcattgcacaagcgccaagtgggcgactatgagaacgtcattccagattttccagaagatgaggggattcattactcagagctgatccagtttggggtcggggagcggcctcaggcacaagaaaatgtggactatgtgatcctcaaacattga

SEQ ID NO: 570 - RNA, 2544 nt, synthetic construct; identical to SEQ ID NO: 569
  misc_feature 1..2544: note = ABK41939
  source 1..2544: mol_type = other RNA

SEQ ID NO: 571 - RNA, 1605 nt, synthetic construct
  misc_feature 1..1605: note = CAE47548
  source 1..1605: mol_type = other RNA
atgctgcgtcggcggggcagccctggcatgggtgtgcatgtgggtgcagccctgggagcactgtggttctgcctcacaggagccctggaggtccaggtccctgaagacccagtggtggcactggtgggcaccgatgccaccctgtgctgctccttctcccccgagcctggcttcagcctggcacagctcaacctcatctggcagctgacagataccaaacagctggtgcacagctttgctgagggccaggaccagggcagcgcctatgccaaccgcacggccctcttcccggacctgctggcacagggcaacgcatccctgaggctgcagcgcgtgcgtgtggcggacgagggcagcttcacctgcttcgtgagcatccgggatttcggcagcgctgccgtcagcctgcaggtggccgctccctactcgaagcccagcatgaccctggagcccaacaaggacctgcggccaggggacacggtgaccatcacgtgctccagctaccagggctaccctgaggctgaggtgttctggcaggatgggcagggtgtgcccctgactggcaacgtgaccacgtcgcagatggccaacgagcagggcttgtttgatgtgcacagcatcctgcgggtggtgctgggtgcaaatggcacctacagctgcctggtgcgcaaccccgtgctgcagcaggatgcgcacagctctgtcaccatcacaccccagagaagccccacaggagccgtggaggtccaggtccctgaggacccggtggtggccctagtgggcaccgatgccaccctgcgctgctccttctcccccgagcctggcttcagcctggcacagctcaacctcatctggcagctgacagacaccaaacagctggtgcacagtttcaccgaaggccgggaccagggcagcgcctatgccaaccgcacggccctcttcccggacctgctggcacaaggcaatgcatccctgaggctgcagcgcgtgcgtgtggcggacgagggcagcttcacctgcttcgtgagcatccgggatttcggcagcgctgccgtcagcctgcaggtggccgctccctactcgaagcccagcatgaccctggagcccaacaaggacctgcggccaggggacacggtgaccatcacgtgctccagctaccggggctaccctgaggctgaggtgttctggcaggatgggcagggtgtgcccctgactggcaacgtgaccacgtcgcagatggccaacgagcagggcttgtttgatgtgcacagcgtcctgcgggtggtgctgggtgcgaatggcacctacagctgcctggtgcgcaaccccgtgctgcagcaggatgcgcacggctctgtcaccatcacagggcagcctatgacattccccccagaggccctgtgggtgaccgtggggctgtctgtctgtctcattgcactgctggtggccctggctttcgtgtgctggagaaagatcaaacagagctgtgaggaggagaatgcaggagctgaggaccaggatggggagggagaaggctccaagacagccctgcagcctctgaaacactctgacagcaaagaagatgatggacaagaaatagcctga

SEQ ID NO: 572 - RNA, 639 nt, synthetic construct
  misc_feature 1..639: note = BAG57312
  source 1..639: mol_type = other RNA
atgccgctgctgctactgctgcccctgctgtgggcagacttgacccacaggcccaaaatcctcatccctggcactctagaacccggccactccaaaaacctgacctgctctgtgtcctgggcctgtgagcagggaacacccccgatcttctcctggttgtcagctgcccccacctccctgggccccaggactactcactcctcggtgctcataatcaccccacggccccaggaccacggcaccaacctgacctgtcaggtgaagttcgctggagctggtgtgactacggagagaaccatccagctcaacgtcacctatgttccacagaacccaacaactggtatctttccaggagatggctcagggaaacaagagaccagagcaggagtggttcatggggccattggaggagctggtgttacagccctgctcgctctttgtctctgcctcatcttcttcatagtgaagacccacaggaggaaagcagccaggacagcagtgggcaggaatgacacccaccctaccacagggtcagcctccccggtgagtgatggggcatcctggcatccagtctgtcctgcagacacctcctcccaatgtggcccaccgtcatgccccattcagcatttccagaactga

SEQ ID NO: 573 - RNA, 1095 nt, synthetic construct
  misc_feature 1..1095: note = AAK83654
  source 1..1095: mol_type = other RNA
atgccgctgctgctactgctgcccctgctgtgggcaggggccctggctatggatccaaatttctggctgcaagtgcaggagtcagtgacggtacaggagggtttgtgcgtcctcgtgccctgcactttcttccatcccataccctactacgacaagaactccccagttcatggttactggttccgggaaggagccattatatccagggactctccagtggccacaaacaagctagatcaagaagtacaggaggagactcagggcagattccgcctccttggggatcccagtaggaacaactgctccctgagcatcgtagacgccaggaggagggataatggttcatacttctttcggatggagagaggaagtaccaaatacagttacaaatctccccagctctctgtgcatgtgacagacttgacccacaggcccaaaatcctcatccctggcactctagaacccggccactccaaaaacctgacctgctctgtgtcctgggcctgtgagcagggaacacccccgatcttctcctggttgtcagctgcccccacctccctgggccccaggactactcactcctcggtgctcataatcaccccacggccccaggaccacggcaccaacctgacctgtcaggtgaagttcgctggagctggtgtgactacggagagaaccatccagctcaacgtcacctatgttccacagaacccaacaactggtatctttccaggagatggctcagggaaacaagagaccagagcaggagtggttcatggggccattggaggagctggtgttacagccctgctcgctctttgtctctgcctcatcttcttcatagtgaagacccacaggaggaaagcagccaggacagcagtgggcaggaatgacacccaccctaccacagggtcagcctccccgaaacaccagaagaagtccaagttacatggccccactgaaacctcaagctgttcaggtgccgcccctactgtggagatggatgaggagctgcattatgcttccctcaactttcatgggatgaatccttccaaggacacctccaccgaatactcagaggtcaggacccagtga

SEQ ID NO: 574 - RNA, 1095 nt, synthetic construct; identical to SEQ ID NO: 573
  misc_feature 1..1095: note = CAD36509
  source 1..1095: mol_type = other RNA

SEQ ID NO: 575 - RNA, 624 nt, synthetic construct
  misc_feature 1..624: note = AAA52295
  source 1..624: mol_type = other RNA
atgcagtcgggcactcactggagagttctgggcctctgcctcttatcagttggtgtttgggggcaagatggtaatgaagaaatgggtggtattacacagacaccatataaagtctccatctctggaaccacagtaatattgacatgccctcagtatcctggatctgaaatactatggcaacacaatgataaaaacataggcggtgatgaggatgataaaaacataggcagtgatgaggatcacctgtcactgaaggaattttcagaattggagcaaagtggttattatgtctgctaccccagaggaagcaaaccagaagatgcgaacttttatctctacctgagggcaagagtgtgtgagaactgcatggagatggatgtgatgtcggtggccacaattgtcatagtggacatctgcatcactgggggcttgctgctgctggtttactactggagcaagaatagaaaggccaaggccaagcctgtgacacgaggagcgggtgctggcggcaggcaaaggggacaaaacaaggagaggccaccacctgttcccaacccagactatgagcccatccggaaaggccagcgggacctgtattctggcctgaatcagagacgcatctga

SEQ ID NO: 576 - RNA, 495 nt, synthetic construct
  misc_feature 1..495: note = AAH25703
  source 1..495: mol_type = other RNA
atgaagtggaaggcgcttttcaccgcggccatcctgcaggcacagttgccgattacagaggcacagagctttggcctgctggatcccaaactctgctacctgctggatggaatcctcttcatctatggtgtcattctcactgccttgttcctgagagtgaagttcagcaggagcgcagacgcccccgcgtaccagcagggccagaaccagctctataacgagctcaatctaggacgaagagaggagtacgatgttttggacaagagacgtggccgggaccctgagatggggggaaagccgcagagaaggaagaaccctcaggaaggcctgtacaatgaactgcagaaagataagatggcggaggcctacagtgagattgggatgaaaggcgagcgccggaggggcaaggggcacgatggcctttaccagggtctcagtacagccaccaaggacacctacgacgcccttcacatgcaggccctgccccctcgctaa

SEQ ID NO: 577 - RNA, 2229 nt, synthetic construct
  misc_feature 1..2229: note = CCDS7897.1
  source 1..2229: mol_type = other RNA
atggacaagttttggtggcacgcagcctggggactctgcctcgtgccgctgagcctggcgcagatcgatttgaatataacctgccgctttgcaggtgtattccacgtggagaaaaatggtcgctacagcatctctcggacggaggccgctgacctctgcaaggctttcaatagcaccttgcccacaatggcccagatggagaaagctctgagcatcggatttgagacctgcaggtatgggttcatagaagggcacgtggtgattccccggatccaccccaactccatctgtgcagcaaacaacacaggggtgtacatcctcacatccaacacctcccagtatgacacatattgcttcaatgcttcagctccacctgaagaagattgtacatcagtcacagacctgcccaatgcctttgatggaccaattaccataactattgttaaccgtgatggcacccgctatgtccagaaaggagaatacagaacgaatcctgaagacatctaccccagcaaccctactgatgatgacgtgagcagcggctcctccagtgaaaggagcagcacttcaggaggttacatcttttacaccttttctactgtacaccccatcccagacgaagacagtccctggatcaccgacagcacagacagaatccctgctaccactttgatgagcactagtgctacagcaactgagacagcaaccaagaggcaagaaacctgggattggttttcatggttgtttctaccatcagagtcaaagaatcatcttcacacaacaacacaaatggctggtacgtcttcaaataccatctcagcaggctgggagccaaatgaagaaaatgaagatgaaagagacagacacctcagtttttctggatcaggcattgatgatgatgaagattttatctccagcaccatttcaaccacaccacgggcttttgaccacacaaaacagaaccaggactggacccagtggaacccaagccattcaaatccggaagtgctacttcagacaaccacaaggatgactgatgtagacagaaatggcaccactgcttatgaaggaaactggaacccagaagcacaccctcccctcattcaccatgagcatcatgaggaagaagagaccccacattctacaagcacaatccaggcaactcctagtagtacaacggaagaaacagctacccagaaggaacagtggtttggcaacagatggcatgagggatatcgccaaacacccaaagaagactcccattcgacaacagggacagctgcagcctcagctcataccagccatccaatgcaaggaaggacaacaccaagcccagaggacagttcctggactgatttcttcaacccaatctcacaccccatgggacgaggtcatcaagcaggaagaaggatggatatggactccagtcatagtataacgcttcagcctactgcaaatccaaacacaggtttggtggaagatttggacaggacaggacctctttcaatgacaacgcagcagagtaattctcagagcttctctacatcacatgaaggcttggaagaagataaagaccatccaacaacttctactctgacatcaagcaataggaatgatgtcacaggtggaagaagagacccaaatcattctgaaggctcaactactttactggaaggttatacctctcattacccacacacgaaggaaagcaggaccttcatcccagtgacctcagctaagactgggtcctttggagttactgcagttactgttggagattccaactctaatgtcaatcgttccttatcaggagaccaagacacattccaccccagtggggggtcccataccactcatggatctgaatcagatggacactcacatgggagtcaagaaggtggagcaaacacaacctctggtcctataaggacaccccaaattccagaatggctgatcatcttggcatccctcttggccttggctttgattcttgcagtttgcattgcagtcaacagtcgaagaaggtgtgggcagaagaaaaagctagtgatcaacagtggcaatggagctgtggaggacagaaagccaagtggactcaacggagaggccagcaagtctcaggaaatggtgcatttggtgaacaaggagtcgtcagaaactccagaccagtttatgacagctgatgagacaaggaacctgcagaatgtggacatgaagattggggtgtaa

SEQ ID NO: 578 - RNA, 2100 nt, synthetic construct
  misc_feature 1..2100: note = XM_006718388.1
  source 1..2100: mol_type = other RNA
atggacaagttttggtggcacgcagcctggggactctgcctcgtgccgctgagcctggcgcagatcgatttgaatataacctgccgctttgcaggtgtattccacgtggagaaaaatggtcgctacagcatctctcggacggaggccgctgacctctgcaaggctttcaatagcaccttgcccacaatggcccagatggagaaagctctgagcatcggatttgagacctgcaggtatgggttcatagaagggcacgtggtgattccccggatccaccccaactccatctgtgcagcaaacaacacaggggtgtacatcctcacatccaacacctcccagtatgacacatattgcttcaatgcttcagctccacctgaagaagattgtacatcagtcacagacctgcccaatgcctttgatggaccaattaccataactattgttaaccgtgatggcacccgctatgtccagaaaggagaatacagaacgaatcctgaagacatctaccccagcaaccctactgatgatgacgtgagcagcggctcctccagtgaaaggagcagcacttcaggaggttacatcttttacaccttttctactgtacaccccatcccagacgaagacagtccctggatcaccgacagcacagacagaatccctgctaccactttgatgagcactagtgctacagcaactgagacagcaaccaagaggcaagaaacctgggattggttttcatggttgtttctaccatcagagtcaaagaatcatcttcacacaacaacacaaatggctggtacgtcttcaaataccatctcagcaggctgggagccaaatgaagaaaatgaagatgaaagagacagacacctcagtttttctggatcaggcattgatgatgatgaagattttatctccagcaccatttcaaccacaccacgggcttttgaccacacaaaacagaaccaggactggacccagtggaacccaagccattcaaatccggaagtgctacttcagacaaccacaaggatgactgatgtagacagaaatggcaccactgcttatgaaggaaactggaacccagaagcacaccctcccctcattcaccatgagcatcatgaggaagaagagaccccacattctacaagcacaacagcttcagctcataccagccatccaatgcaaggaaggacaacaccaagcccagaggacagttcctggactgatttcttcaacccaatctcacaccccatgggacgaggtcatcaagcaggaagaaggatggatatggactccagtcatagtataacgcttcagcctactgcaaatccaaacacaggtttggtggaagatttggacaggacaggacctctttcaatgacaacgcagcagagtaattctcagagcttctctacatcacatgaaggcttggaagaagataaagaccatccaacaacttctactctgacatcaagcaataggaatgatgtcacaggtggaagaagagacccaaatcattctgaaggctcaactactttactggaaggttatacctctcattacccacacacgaaggaaagcaggaccttcatcccagtgacctcagctaagactgggtcctttggagttactgcagttactgttggagattccaactctaatgtcaatcgttccttatcaggagaccaagacacattccaccccagtggggggtcccataccactcatggatctgaatcagatggacactcacatgggagtcaagaaggtggagcaaacacaacctctggtcctataaggacaccccaaattccagaatggctgatcatcttggcatccctcttggccttggctttgattcttgcagtttgcattgcagtcaacagtcgaagaaggtgtgggcagaagaaaaagctagtgatcaacagtggcaatggagctgtggaggacagaaagccaagtggactcaacggagaggccagcaagtctcaggaaatggtgcatttggtgaacaaggagtcgtcagaaactccagaccagtttatgacagctgatgagacaaggaacctgcagaatgtggacatgaagattggggtgtaa

SEQ ID NO: 579 - RNA, 1377 nt, synthetic construct
  misc_feature 1..1377: note = AAA35572
  source 1..1377: mol_type = other RNA
atgaaccggggagtcccttttaggcacttgcttctggtgctgcaactggcgctcctcccagcagccactcagggaaagaaagtggtgctgggcaaaaaaggggatacagtggaactgacctgtacagcttcccagaagaagagcatacaattccactggaaaaactccaaccagataaagattctgggaaatcagggctccttcttaactaaaggtccatccaagctgaatgatcgcgctgactcaagaagaagcctttgggaccaaggaaacttccccctgatcatcaagaatcttaagatagaagactcagatacttacatctgtgaagtggaggaccagaaggaggaggtgcaattgctagtgttcggattgactgccaactctgacacccacctgcttcaggggcagagcctgaccctgaccttggagagcccccctggtagtagcccctcagtgcaatgtaggagtccaaggggtaaaaacatacagggggggaagaccctctccgtgtctcagctggagctccaggatagtggcacctggacatgcactgtcttgcagaaccagaagaaggtggagttcaaaatagacatcgtggtgctagctttccagaaggcctccagcatagtctataagaaagagggggaacaggtggagttctccttcccactcgcctttacagttgaaaagctgacgggcagtggcgagctgtggtggcaggcggagagggcttcctcctccaagtcttggatcacctttgacctgaagaacaaggaagtgtctgtaaaacgggttacccaggaccctaagctccagatgggcaagaagctcccgctccacctcaccctgccccaggccttgcctcagtatgctggctctggaaacctcaccctggcccttgaagcgaaaacaggaaagttgcatcaggaagtgaacctggtggtgatgagagccactcagctccagaaaaatttgacctgtgaggtgtggggacccacctcccctaagctgatgctgagcttgaaactggagaacaaggaggcaaaggtctcgaagcgggagaaggcggtgtgggtgctgaaccctgaggcggggatgtggcagtgtctgctgagtgactcgggacaggtcctgctggaatccaacatcaaggttctgcccacatggtccaccccggtgcagccaatggccctgattgtgctggggggcgtcgccggcctcctgcttttcattgggctaggcatcttcttctgtgtcaggtgccggcaccgaaggcgccaagcagagcggatgtctcagatcaagagactcctcagtgagaagaagacctgccagtgccctcaccggtttcagaagacatgtagccccatttga

SEQ ID NO: 580 - RNA, 186 nt, synthetic construct
  misc_feature 1..186: note = CAA44323
  source 1..186: mol_type = other RNA
atgaagcgcttcctcttcctcctactcaccatcagcctcctggttatggtacagatacaaactggactctcaggacaaaacgacaccagccaaaccagcagcccctcagcatccagcaacataagcggaggcattttccttttcttcgtggccaatgccataatccacctcttctgcttcagttga

SEQ ID NO: 581 - RNA, 186 nt, synthetic construct
  misc_feature 1..186: note = AAP35780
  source 1..186: mol_type = other RNA
atgaagcgcttcctcttcctcctactcaccatcagcctcctggttatggtacagatacaaactggactctcaggacaaaacgacaccagccaaaccagcagcccctcagcatccagcagcatgagcggaggcattttccttttcttcgtggccaatgccataatccacctcttctgcttcagttag

SEQ ID NO: 582 - RNA, 186 nt, synthetic construct; identical to SEQ ID NO: 580
  misc_feature 1..186: note = ACS44650
  source 1..186: mol_type = other RNA

SEQ ID NO: 583 - RNA, 954 nt, synthetic construct
  misc_feature 1..954: note = EAW93489
  source 1..954: mol_type = other RNA
atgaccgtcgcgcggccgagcgtgcccgcggcgctgcccctcctcggggagctgccccggctgctgctgctggtgctgttgtgcctgccggccgtgtggggtgactgtggccttcccccagatgtacctaatgcccagccagctttggaaggccgtacaagttttcccgaggatactgtaataacgtacaaatgtgaagaaagctttgtgaaaattcctggcgagaaggactcagtgatctgccttaagggcagtcaatggtcagatattgaagagttctgcaatcagaaatcatgccctaatccgggagaaatacgaaatggtcagattgatgtaccaggtggcatattatttggtgcaaccatctccttctcatgtaacacagggtacaaattatttggctcgacttctagtttttgtcttatttcaggcagctctgtccagtggagtgacccgttgccagagtgcagagaaatttattgtccagcaccaccacaaattgacaatggaataattcaaggggaacgtgaccattatggatatagacagtctgtaacgtatgcatgtaataaaggattcaccatgattggagagcactctatttattgtactgtgaataatgatgaaggagagtggagtggcccaccacctgaatgcagaggaaaatctctaacttccaaggtcccaccaacagttcagaaacctaccacagtaaatgttccaactacagaagtctcaccaacttctcagaaaaccaccacaaaaaccaccacaccaaatgctcaagcaacacggagtacacctgtttccaggacaaccaagcattttcatgaaacaaccccaaataaaggaagtggaaccacttcaggtactacccgtcttctatctgggcacacgtgtttcacgttgacaggtttgcttgggacgctagtaaccatgggcttgctgacttag

SEQ ID NO: 584 - RNA, 882 nt, synthetic construct
  misc_feature 1..882: note = EAW93497
  source 1..882: mol_type = other RNA
atgattggagagcactctatttattgtactgtgaataatgatgaaggagagtggagtggcccaccacctgaatgcagaggaaaatctctaacttccaaggtcccaccaacagttcagaaacctaccacagtaaatgttccaactacagaagtctcaccaacttctcagaaaaccaccacaaaaaccaccacaccaaatgctcaaggtacagagactccatcagttcttcaaaaacacaccacagaaaatgtttcagctacaagaaccccaccaactcctcagaaacccaccacagtaaatgtcccagctacaatagtcacaccaacacctcagaaacccaccacaataaatgttccagctacaggagtctcatcaacacctcaaagacacaccatagtaaatgtttcagctacaggaaccctaccaactcttcagaaacccaccagagcaaatgattcagccaccaaatccccagcagcagctcagacatctttcatatcaaaaaccctatctacaaagaccccttctgcagctcagaatcccatgatgacaaatgcttctgctacacaggccacactaacagcccaaaaattcaccacagcaaaagttgcatttacgcagagtccttcagcagcacgtaagtccactaatgtacattccccagtgactaatggtctcaagagtacacaaagattcccttctgctcatattacagcaacacggagtacacctgtttccaggacaaccaagcattttcatgaaacaaccccaaataaaggaagtggaaccacttcaggtactacccgtcttctatctgggcacacgtgtttcacgttgacaggtttgcttgggacgctagtaaccatgggcttgctgacttag

SEQ ID NO: 585 - RNA, 804 nt, synthetic construct
  misc_feature 1..804: note = EAW93493
  source 1..804: mol_type = other RNA
atgattggagagcactctatttattgtactgtgaataatgatgaaggagagtggagtggcccaccacctgaatgcagaggaaaatctctaacttccaaggtcccaccaacagttcagaaacctaccacagtaaatgttccaactacagaagtctcaccaacttctcagaaaaccaccacaaaaaccaccacaccaaatgctcaaggtacagagactccatcagttcttcaaaaacacaccacagaaaatgtttcagctacaagaaccccaccaactcctcagaaacccaccacagtaaatgtcccagctacaatagtcacaccaacacctcagaaacccaccacaataaatgttccagctacaggagtctcatcaacacctcaaagacacaccatagtaaatgtttcagctacaggaaccctaccaactcttcagaaacccaccagagcaaatgattcagccaccaaatccccagcagcagctcagacatctttcatatcaaaaaccctatctacaaagaccccttctgcagctcagaatcccatgatgacaaatgcttctgctacacaggccacactaacagcccaaaaattcaccacagcaaaagttgcatttacgcagagtccttcagcagcaccaacacggagtacacctgtttccaggacaaccaagcattttcatgaaacaaccccaaataaaggaagtggaaccacttcaggtactacccgtcttctatctgggcacacgtgtttcacgttgacaggtttgcttgggacgctagtaaccatgggcttgctgacttag

SEQ ID NO: 586 - RNA, 1146 nt, synthetic construct
  misc_feature 1..1146: note = AAA52168
  source 1..1146: mol_type = other RNA
atgaccgtcgcgcggccgagcgtgcccgcggcgctgcccctcctcggggagctgccccggctgctgctgctggtgctgttgtgcctgccggccgtgtggggtgactgtggccttcccccagatgtacctaatgcccagccagctttggaaggccgtacaagttttcccgaggatactgtaataacgtacaaatgtgaagaaagctttgtgaaaattcctggcgagaaggactcagtgatctgccttaagggcagtcaatggtcagatattgaagagttctgcaatcgtagctgcgaggtgccaacaaggctaaattctgcatccctcaaacagccttatatcactcagaattattttccagtcggtactgttgtggaatatgagtgccgtccaggttacagaagagaaccttctctatcaccaaaactaacttgccttcagaatttaaaatggtccacagcagtcgaattttgtaaaaagaaatcatgccctaatccgggagaaatacgaaatggtcagattgatgtaccaggtggcatattatttggtgcaaccatctccttctcatgtaacacagggtacaaattatttggctcgacttctagtttttgtcttatttcaggcagctctgtccagtggagtgacccgttgccagagtgcagagaaatttattgtccagcaccaccacaaattgacaatggaataattcaaggggaacgtgaccattatggatatagacagtctgtaacgtatgcatgtaataaaggattcaccatgattggagagcactctatttattgtactgtgaataatgatgaaggagagtggagtggcccaccacctgaatgcagaggaaaatctctaacttccaaggtcccaccaacagttcagaaacctaccacagtaaatgttccaactacagaagtctcaccaacttctcagaaaaccaccacaaaaaccaccacaccaaatgctcaagcaacacggagtacacctgtttccaggacaaccaagcattttcatgaaacaaccccaaataaaggaagtggaaccacttcaggtactacccgtcttctatctgggcacacgtgtttcacgttgacaggtttgcttgggacgctagtaaccatgggcttgctgacttag

SEQ ID NO: 587 - RNA, 2577 nt, synthetic construct
  misc_feature 1..2577: note = CCDS73385.1
  source 1..2577: mol_type = other RNA
atgctgcaaactaaggatctcatctggactttgtttttcctgggaactgcagtttctctgcaggtggatattgttcccagccagggggagatcagcgttggagagtccaaattcttcttatgccaagtggcaggagatgccaaagataaagacatctcctggttctcccccaatggagaaaagctcaccccaaaccagcagcggatctcagtggtgtggaatgatgattcctcctccaccctcaccatctataacgccaacatcgacgacgccggcatttacaagtgtgtggttacaggcgaggatggcagtgagtcagaggccaccgtcaacgtgaagatctttcagaagctcatgttcaagaatgcgccaaccccacaggagttccgggagggggaagatgccgtgattgtgtgtgatgtggtcagctccctcccaccaaccatcatctggaaacacaaaggccgagatgtcatcctgaaaaaagatgtccgattcatagtcctgtccaacaactacctgcagatccggggcatcaagaaaacagatgagggcacttatcgctgtgagggcagaatcctggcacggggggagatcaacttcaaggacattcaggtcattgtgaatgtgccacctaccatccaggccaggcagaatattgtgaatgccaccgccaacctcggccagtccgtcaccctggtgtgcgatgccgaaggcttcccagagcccaccatgagctggacaaaggatggggaacagatagagcaagaggaagacgatgagaagtacatcttcagcgacgatagttcccagctgaccatcaaaaaggtggataagaacgacgaggctgagtacatctgcattgctgagaacaaggctggcgagcaggatgcgaccatccacctcaaagtctttgcaaaacccaaaatcacatatgtagagaaccagactgccatggaattagaggagcaggtcactcttacctgtgaagcctccggagaccccattccctccatcacctggaggacttctacccggaacatcagcagcgaagaaaaggcttcgtggactcgaccagagaagcaagagactctggatgggcacatggtggtgcgtagccatgcccgtgtgtcgtcgctgaccctgaagagcatccagtacactgatgccggagagtacatctgcaccgccagcaacaccatcggccaggactcccagtccatgtaccttgaagtgcaatatgccccaaagctacagggccctgtggctgtgtacacttgggaggggaaccaggtgaacatcacctgcgaggtatttgcctatcccagtgccacgatctcatggtttcgggatggccagctgctgccaagctccaattacagcaatatcaagatctacaacaccccctctgccagctatctggaggtgaccccagactctgagaatgattttgggaactacaactgtactgcagtgaaccgcattgggcaggagtccttggaattcatccttgttcaagcagacaccccctcttcaccatccatcgaccaggtggagccatactccagcacagcccaggtgcagtttgatgaaccagaggccacaggtggggtgcccatcctcaaatacaaagctgagtggagagcagttggtgaagaagtatggcattccaagtggtatgatgccaaggaagccagcatggagggcatcgtcaccatcgtgggcctgaagcccgaaacaacgtacgccgtaaggctggcggcgctcaatggcaaagggctgggtgagatcagcgcggcctccgagttcaagacgcagccagtccaaggggaacccagtgcacctaagctcgaagggcagatgggagaggatggaaactctattaaagtgaacctgatcaagcaggatgacggcggctcccccatcagacactatctggtcaggtaccgagcgctctcctccgagtggaaaccagagatcaggctcccgtctggcagtgaccacgtcatgctgaagtccctggactggaatgctgagtatgaggtctacgtggtggctgagaaccagcaaggaaaatccaaggcggctcattttgtgttcaggacctcggcccagcccacagccatcccagccaacggcagccccacctcaggcctgagcaccggggccatcgtgggcatcctcatcgtcatcttcgtcctgctcctggtggttgtggacatcacctgctacttcctgaacaagtgtggcctgttcatgtgcattgcggtcaacctgtgtggaaaagccgggcccggggccaagggcaaggacatggaggagggcaaggccgccttctcgaaagatgagtccaaggagcccatcgtggaggttcgaacggaggaggagaggaccccaaaccatgatggagggaaacacacagagcccaacgagaccacgccactgacggagcccgagaagggccccgtagaagcaaagccagagtgccaggagacagaaacgaagccagcgccagccgaagtcaagacggtccccaatgacgccacacagacaaaggagaacgagagcaaagcatga

SEQ ID NO: 588 - RNA, 867 nt, synthetic construct
  misc_feature 1..867: note = ABK41933
  source 1..867: mol_type = other RNA
atgggccacacacggaggcagggaacatcaccatccaagtgtccatacctcaatttctttcagctcttggtgctggctggtctttctcacttctgttcaggtgttatccacgtgaccaaggaagtgaaagaagtggcaacgctgtcctgtggtcacaatgtttctgttgaagagctggcacaaactcgcatctactggcaaaaggagaagaaaatggtgctgactatgatgtctggggacatgaatatatggcccgagtacaagaaccggaccatctttgatatcactaataacctctccattgtgatcctggctctgcgcccatctgacgagggcacatacgagtgtgttgttctgaagtatgaaaaagacgctttcaagcgggaacacctggctgaagtgacgttatcagtcaaagctgacttccctacacctagtatatctgactttgaaattccaacttctaatattagaaggataatttgctcaacctctggaggttttccagagcctcacctctcctggttggaaaatggagaagaattaaatgccatcaacacaacagtttcccaagatcctgaaactgagctctatgctgttagcagcaaactggatttcaatatgacaaccaaccacagcttcatgtgtctcatcaagtatggacatttaagagtgaatcagaccttcaactggaatacaaccaagcaagagcattttcctgataacctgctcccatcctgggccattaccttaatctcagtaaatggaatttttgtgatatgctgcctgacctactgctttgccccaagatgcagagagagaaggaggaatgagagattgagaagggaaagtgtacgccctgtataa

SEQ ID NO: 589 - RNA, 867 nt, synthetic construct; identical to SEQ ID NO: 588
  misc_feature 1..867: note = AAA36045
  source 1..867: mol_type = other RNA

SEQ ID NO: 590 - RNA, 990 nt, synthetic construct
  misc_feature 1..990: note = CCDS3009.1
  source 1..990: mol_type = other RNA
atggatccccagtgcactatgggactgagtaacattctctttgtgatggccttcctgctctctggtgctgctcctctgaagattcaagcttatttcaatgagactgcagacctgccatgccaatttgcaaactctcaaaaccaaagcctgagtgagctagtagtattttggcaggaccaggaaaacttggttctgaatgaggtatacttaggcaaagagaaatttgacagtgttcattccaagtatatgggccgcacaagttttgattcggacagttggaccctgagacttcacaatcttcagatcaaggacaagggcttgtatcaatgtatcatccatcacaaaaagcccacaggaatgattcgcatccaccagatgaattctgaactgtcagtgcttgctaacttcagtcaacctgaaatagtaccaatttctaatataacagaaaatgtgtacataaatttgacctgctcatctatacacggttacccagaacctaagaagatgagtgttttgctaagaaccaagaattcaactatcgagtatgatggtgttatgcagaaatctcaagataatgtcacagaactgtacgacgtttccatcagcttgtctgtttcattccctgatgttacgagcaatatgaccatcttctgtattctggaaactgacaagacgcggcttttatcttcacctttctctatagagcttgaggaccctcagcctcccccagaccacattccttggattacagctgtacttccaacagttattatatgtgtgatggttttctgtctaattctatggaaatggaagaagaagaagcggcctcgcaactcttataaatgtggaaccaacacaatggagagggaagagagtgaacagaccaagaaaagagaaaaaatccatatacctgaaagatctgatgaagcccagcgtgtttttaaaagttcgaagacatcttcatgcgacaaaagtgatacatgtttttaa

SEQ ID NO: 591 - RNA, 708 nt, synthetic construct
  misc_feature 1..708: note = AAA59674
  source 1..708: mol_type = other RNA
atggccttaccagtgaccgccttgctcctgccgctggccttgctgctccacgccgccaggccgagccagttccgggtgtcgccgctggatcggacctggaacctgggcgagacagtggagctgaagtgccaggtgctgctgtccaacccgacgtcgggctgctcgtggctcttccagccgcgcggcgccgccgccagtcccaccttcctcctatacctctcccaaaacaagcccaaggcggccgaggggctggacacccagcggttctcgggcaagaggttgggggacaccttcgtcctcaccctgagcgacttccgccgagagaacgagggctactatttctgctcggccctgagcaactccatcatgtacttcagccacttcgtgccggtcttcctgccagcgaagcccaccacgacgccagcgccgcgaccaccaacaccggcgcccaccatcgcgtcgcagcccctgtccctgcgcccagaggcgtgccggccagcggcggggggcgcagtgcacacgagggggctggacttcgcctgtgatatctacatctgggcgcccctggccgggacttgtggggtccttctcctgtcactggttatcaccctttactgcaaccacaggaaccgaagacgtgtttgcaaatgtccccggcctgtggtcaaatcgggagacaagcccagcctttcggcgagatacgtctaa

SEQ ID NO: 592 - RNA, 2472 nt, synthetic construct
  misc_feature 1..2472: note = EAW57688
  source 1..2472: mol_type = other RNA
atgacggtgctgcaggaacccgtccaggctgctatatggcaagcactaaaccactatgcttaccgagatgcggttttcctcgcagaacgcctttatgcagaagtacactcagaagaagccttgtttttactggcaacctgttattaccgctcaggaaaggcatataaagcatatagactcttgaaaggacacagttgtactacaccgcaatgcaaatacctgcttgcaaaatgttgtgttgatctcagcaagcttgcagaaggggaacaaatcttatctggtggagtgtttaataagcagaaaagccatgatgatattgttactgagtttggtgattcagcttgctttactctttcattgttgggacatgtatattgcaagacagatcggcttgccaaaggatcagaatgttaccaaaagagccttagtttaaatcctttcctctggtctccctttgaatcattatgtgaaataggtgaaaagccagatcctgaccaaacatttaaattcacatctttacagaactttagcaactgtctgcccaactcttgcacaacacaagtacctaatcatagtttatctcacagacagcctgagacagttcttacggaaacaccccaggacacaattgaattaaacagattgaatttagaatcttccaattcaaagtactccttgaatacagattcctcagtgtcttatattgattcagctgtaatttcacctgatactgtcccactgggaacaggaacttccatattatctaaacaggttcaaaataaaccaaaaactggtcgaagtttattaggaggaccagcagctcttagtccattaaccccaagttttgggattttgccattagaaaccccaagtcctggagatggatcctatttacaaaactacactaatacacctcctgtaattgatgtgccatccaccggagccccttcaaaaaagtctgttgccagaatcggccaaactggaacaaagtctgtcttctcacagagtggaaatagccgagaggtaactccaattcttgcacaaacacaaagttctggtccacaaacaagtacaacacctcaggtattgagccccactattacatctcccccaaacgcactgcctcgaagaagttcacgactctttactagtgacagctccacaaccaaggagaatagcaaaaaattaaaaatgaagtttccacctaaaatcccaaacagaaaaacaaaaagtaaaactaataaaggaggaataactcaacctaacataaatgatagcctggaaattacaaaattggactcttccatcatttcagaagggaaaatatccacaatcacacctcagattcaggcctttaatctacaaaaagcagcagcaggtttgatgagccttcttcgtgaaatggggaaaggttatttagctttgtgttcatacaactgcaaagaagctataaatattttgagccatctaccttctcaccactacaatactggttgggtactgtgccaaattggaagggcctattttgaactttcagagtacatgcaagctgaaagaatattctcagaggttagaaggattgagaattatagagttgaaggcatggagatctactctacaacactttggcatcttcaaaaagatgttgctctttcagttctgtcaaaagacttaacagacatggataaaaattcgccagaggcctggtgtgctgcagggaactgtttcagtctgcaacgggaacatgatattgcaattaaattcttccagagagctatccaagttgatccaaattacgcttatgcctatactctattagggcatgagtttgtcttaactgaagaattggacaaagcattagcttgttttcgaaatgctatcagagtcaatcctagacattataatgcatggtatggtttaggaatgatttattacaagcaagaaaaattcagccttgcagaaatgcatttccaaaaagcgcttgatatcaaccctcaaagttcagttttactttgccacattggagtagttcaacatgcactgaaaaaatcagagaaggctttggataccctaaacaaagccattgtcattgatcccaagaaccctctatgcaaatttcacagagcctcagttttatttgcaaatgaaaaatataagtctgctttacaagaacttgaagaattgaaacaaattgttcccaaagaatccctcgtttacttcttaataggaaaggtttacaagaagttaggtcaaacgcacctcgccctgatgaatttctcttgggctatggatttagatcctaaaggagccaataaccagattaaagaggcaattgataagcgttatcttccagatgatgaggagccaataacccaagaagaacagatcatgggaacagatgaatcccaggagagcagcatgacagatgcggatgacacacaacttcatgcagctgaaagtgatgaattttaa

SEQ ID NO: 593 - RNA, 2475 nt, synthetic construct
  misc_feature 1..2475: note = AAB34378
  source 1..2475: mol_type = other RNA
atgacggtgctgcaggaacccgtccaggctgctatatggcaagcactaaaccactatgcttaccgagatgcggttttcctcgcagaacgcctttatgcagaagtacactcagaagaagccttgtttttactggcaacctgttattaccgctcaggaaaggcatataaagcatatagactcttgaaaggacacagttgtactacaccgcaatgcaaatacctgcttgcaaaatgttgtgttgatctcagcaagcttgcagaaggggaacaaatcttatctggtggagtgtttaataagcagaaaagccatgatgatattgttactgagtttggtgattcagcttgctttactctttcattgttgggacatgtatattgcaagacagatcggcttgccaaaggatcagaatgttaccaaaagagccttagtttaaatcctttcctctggtctccctttgaatcattatgtgaaataggtgaaaagccagatcctgaccaaacatttaaattcacatctttacagaactttagcaactgtctgcccaactcttgcacaacacaagtacctaatcatagtttatctcacagacagcctgagacagttcttacggaaacaccccaggacacaattgaattaaacagattgaatttagaatcttccaattcaaagtactccttgaatacagattcctcagtgtcttatattgattcagctgtaatttcacctgatactgtcccactgggaacaggaacttccatattatctaaacaggttcaaaataaaccaaaaactggtcgaagtttattaggaggaccagcagctcttagtccattaaccccaagttttgggattttgccattagaaaccccaagtcctggagatggatcctatttacaaaactacactaatacacctcctgtaattgatgtgccatccaccggagccccttcaaaaaagtctgttgccagaatcggccaaactggaacaaagtctgtcttctcacagagtggaaatagccgagaggtaactccaattcttgcacaaacacaaagttctggtccacaaacaagtacaacacctcaggtattgagccccactattacatctcccccaaacgcactgcctcgaagaagttcacgactctttactagtgacagctccacaaccaaggagaatagcaaaaaattaaaaatgaagtttccacctaaaatcccaaacagaaaaacaaaaagtaaaactaataaaggaggaataactcaacctaacataaatgatagcctggaaattacaaaattggactcttccatcatttcagaagggaaaatatccacaatcacacctcagattcaggcctttaatctacaaaaagcagcagcagaaggtttgatgagccttcttcgtgaaatggggaaaggttatttagctttgtgttcatacaactgcaaagaagctataaatattttgagccatctaccttctcaccactacaatactggttgggtactgtgccaaattggaagggcctattttgaactttcagagtacatgcaagctgaaagaatattctcagaggttagaaggattgagaattatagagttgaaggcatggagatctactctacaacactttggcatcttcaaaaagatgttgctctttcagttctgtcaaaagacttaacagacatggataaaaattcgccagaggcctggtgtgctgcagggaactgtttcagtctgcaacgggaacatgatattgcaattaaattcttccagagagctatccaagttgatccaaattacgcttatgcctatactctattagggcatgagtttgtcttaactgaagaattggacaaagcattagcttgttttcgaaatgctatcagagtcaatcctagacattataatgcatggtatggtttaggaatgatttattacaagcaagaaaaattcagccttgcagaaatgcatttccaaaaagcgcttgatatcaaccctcaaagttcagttttactttgccacattggagtagttcaacatgcactgaaaaaatcagagaaggctttggataccctaaacaaagccattgtcattgatcccaagaaccctctatgcaaatttcacagagcctcagttttatttgcaaatgaaaaatataagtctgctttacaagaacttgaagaattgaaacaaattgttcccaaagaatccctcgtttacttcttaataggaaaggtttacaagaagttaggtcaaacgcacctcgccctgatgaatttctcttgggctatggatttagatcctaaaggagccaataaccagattaaagaggcaattgataagcgttatcttccagatgatgaggagccaataacccaagaagaacagatcatgggaacagatgaatcccaggagagcagcatgacagatgcggatgacacacaacttcatgcagctgaaagtgatgaattttaa

SEQ ID NO: 594 - RNA, 1788 nt, synthetic construct
  misc_feature 1..1788: note = AAA51947
  source 1..1788: mol_type = other RNA
atgcgcgtcctcctcgccgcgctgggactgctgttcctgggggcgctacgagccttcccacaggatcgacccttcgaggacacctgtcatggaaaccccagccactactatgacaaggctgtcaggaggtgctgttaccgctgccccatggggctgttcccgacacagcagtgcccacagaggcctactgactgcaggaagcagtgtgagcctgactactacctggatgaggccgaccgctgtacagcctgcgtgacttgttctcgagatgacctcgtggagaagacgccgtgtgcatggaactcctcccgtgtctgcgaatgtcgacccggcatgttctgttccacgtctgccgtcaactcctgtgcccgctgcttcttccattctgtctgtccggcagggatgattgtcaagttcccaggcacggcgcagaagaacacggtctgtgagccggcttccccaggggtcagccctgcctgtgccagcccagagaactgcaaggaaccctccagtggcaccatcccccaggccaagcccaccccggtgtccccagcaacctccagtgccagcaccatgcctgtaagagggggcacccgcctcgcccaggaagctgcttctaaactgacgagggctcccgactctccctcctctgtgggaaggcctagttcagatccaggtctgtccccaacacagccatgcccagaggggtctggtgattgcagaaagcagtgtgagcccgactactacctggacgaggccggccgctgcacagcctgcgtgagctgttctcgagatgaccttgtggagaagacgccatgtgcatggaactcctcccgcacctgcgaatgtcgacctggcatgatctgtgccacatcagccaccaactcctgtgcccgctgtgtcccctacccaatctgtgcagcagagacggtcaccaagccccaggatatggctgagaaggacaccacctttgaggcgccacccctggggacccagccggactgcaaccccaccccagagaatggcgaggcgcctgccagcaccagccccactcagagcttgctggtggactcccaggccagtaagacgctgcccatcccaaccagcgctcccgtcgctctctcctccacggggaagcccgttctggatgcagggccagtgctcttctgggtgatcctggtgttggttgtggtggtcggctccagcgccttcctcctgtgccaccggagggcctgcaggaagcgaattcggcagaagctccacctgtgctacccggtccagacctcccagcccaagctagagcttgtggattccagacccaggaggagctcaacgcagctgaggagtggtgcgtcggtgacagaacccgtcgcggaagagcgagggttaatgagccagccactgatggagacctgccacagcgtgggggcagcctacctggagagcctgccgctgcaggatgccagcccggccgggggcccctcgtcccccagggaccttcctgagccccgggtgtccacggagcacaccaataacaagattgagaaaatctacatcatgaaggctgacaccgtgatcgtggggaccgtgaaggctgagctgccggagggccggggcctggcggggccagcagagcccgagttggaggaggagctggaggcggaccataccccccactaccccgagcaggagacagaaccgcctctgggcagctgcagcgatgtcatgctctcagtggaagaggaagggaaagaagaccccttgcccacagctgcctctggaaagtga

SEQ ID NO: 595 - RNA, 912 nt, synthetic construct
  misc_feature 1..912: note = EAW97060
  source 1..912: mol_type = other RNA
atggctacctctcgatatgagccagtggctgaaattggtgtcggtgcctatgggacagtgtacaaggcccgtgatccccacagtggccactttgtggccctcaagagtgtgagagtccccaatggaggaggaggtggaggaggccttcccatcagcacagttcgtgaggtggctttactgaggcgactggaggcttttgagcatcccaatgttgtccggctgatggacgtctgtgccacatcccgaactgaccgggagatcaaggtaaccctggtgtttgagcatgtagaccaggacctaaggacatatctggacaaggcacccccaccaggcttgccagccgaaacgatcaaggatctgatgcgccagtttctaagaggcctagatttccttcatgccaattgcatcgttcaccgagatctgaagccagagaacattctggtgacaagtggtggaacagtcaagctggctgactttggcctggccagaatctacagctaccagatggcacttacacccgtggttgttacactctggtaccgagctcccgaagttcttctgcagtccacatatgcaacacctgtggacatgtggagtgttggctgtatctttgcagagatgtttcgtcgaaagcctctcttctgtggaaactctgaagccgaccagttgggcaaaatctttgacctgattgggctgcctccagaggatgactggcctcgagatgtatccctgccccgtggagcctttccccccagagggccccgcccagtgcagtcggtggtacctgagatggaggagtcgggagcacagctgctgctggaaatgctgacttttaacccacacaagcgaatctctgcctttcgagctctgcagcactcttatctacataaggatgaaggtaatccggagtga

SEQ ID NO: 596 - RNA, 912 nt, synthetic construct; identical to SEQ ID NO: 595
  misc_feature 1..912: note = AAA35673
  source 1..912: mol_type = other RNA

SEQ ID NO: 597 - RNA, 690 nt, synthetic construct
  misc_feature 1..690: note = AAB50213
  source 1..690: mol_type = other RNA
atggacgtctgtgccacatcccgaactgaccgggagatcaaggtaaccctggtgtttgagcatgtagaccaggacctaaggacatatctggacaaggcacccccaccaggcttgccagccgaaacgatcaaggatctgatgcgccagtttctaagaggcctagatttccttcatgccaattgcatcgttcaccgagatctgaagccagagaacattctggtgacaagtggtggaacagtcaagctggctgactttggcctggccagaatctacagctaccagatggcacttacacccgtggttgttacactctggtaccgagctcccgaagttcttctgcagtccacatatgcaacacctgtggacatgtggagtgttggctgtatctttgcagagatgtttcgtcgaaagcctctcttctgtggaaactctgaagccgaccagttgggcaaaatctttgacctgattgggctgcctccagaggatgactggcctcgagatgtatccctgccccgtggagcctttccccccagagggccccgcccagtgcagtcggtggtacctgagatggaggagtcgggagcacagctgctgctggaaatgctgacttttaacccacacaagcgaatctctgcctttcgagctctgcagcactcttatctacataaggatgaaggtaatccggagtga

SEQ ID NO: 598 - RNA, 336 nt, synthetic construct
  misc_feature 1..336: note = AAH15669
  source 1..336: mol_type = other RNA
atggctacctctcgatatgagccagtggctgaaattggtgtcggtgcctatgggacagtgtacaaggcccgtgatccccacagtggccactttgtggccctcaagagtgtgagagtccccaatggaggaggaggtggaggaggccttcccatcagcacagttcgtgaggtggctttactgaggcgactggaggcttttgagcatcccaatgttgtccggctgatggacgtctgtgccacatcccgaactgaccgggagatcaagagatgtttcgtcgaaagcctctcttctgtggaaactctgaagccgaccagttgggcaaaatctttgacctga

SEQ ID NO: 599 - RNA, 429 nt, synthetic construct
  misc_feature 1..429: note = ACY78326
  source 1..429: mol_type = other RNA
atggagccggcggcggggagcagcatggagccttcggctgactggctggccacggccgcggcccggggtcgggtagaggaggtgcgggcgctgctggaggcgggggcgctgcccaacgcaccgaatagttacggtcggaggccgatccaggtcatgatgatgggcagcgcccgagtggcggagctgctgctgctccacggcgcggagcccaactgcgccgaccccgccactctcacccgacccgtgcacgacgctgcccgggagggcttcctggacacgctggtggtgctgcaccgggccggggcgccgtgcgcgatgcctggggccgtctgcccgtggacctggctgaggagctgggccatcgcgatgtcgcacggtacctgcgcgcggctgcggggggcaccagaggcagtaaccatgcccgcatag

SEQ ID NO: 600 - RNA, 351 nt, synthetic construct
  misc_feature 1..351: note = EAW58598
  source 1..351: mol_type = other RNA
atggagccggcggcggggagcagcatggagccttcggctgactggctggccacggccgcggcccggggtcgggtagaggaggtgcgggcgctgctggaggcgggggcgctgcccaacgcaccgaatagttacggtcggaggccgatccaggtgggtagagggtctgcagcgggagcaggggatggcgggcgactctggaggacgaagtttgcaggggaattggaatcaggtagcgcttcgattctccggaaaaaggggaggcttcctggggagttttcagaaggggtttgtaatcacagacctcctcctggcgacgccctgggggcttgggaagccaaggaagaggaatga

SEQ ID NO: 601 - RNA, 471 nt, synthetic construct
  misc_feature 1..471: note = AFN61598
  source 1..471: mol_type = other RNA
atggagccggcggcggggagcagcatggagccttcggctgactggctggccacggccgcggcccggggtcgggtagaggaggtgcgggcgctgctggaggcgggggcgctgcccaacgcaccgaatagttacggtcggaggccgatccaggtcatgatgatgggcagcgcccgagtggcggagctgctgctgctccacggcgcggagcccaactgcgccgaccccgccactctcacccgacccgtgcacgacgctgcccgggagggcttcctggacacgctggtggtgctgcaccgggccggggcgcggctggacgtgcgcgatgcctggggccgtctgcccgtggacctggctgaggagctgggccatcgcgatgtcgcacggtacctgcgcgcggctgcggggggcaccagaggcagtaaccatgcccgcatagatgccgcggaaggtccctcagacatccccgattga

SEQ ID NO: 602 - RNA, 327 nt, synthetic construct
  misc_feature 1..327: note = CCQ43815
  source 1..327: mol_type = other RNA
atggaagtcatgatgatgggcagcgcccgagtggcggagctgctgctgctccacggcgcggagcccaactgcgccgaccccgccactctcacccgacccgtgcacgacgctgcccgggagggcttcctggacacgctggtggtgctgcaccgggccggggcgcggctggacgtgcgcgatgcctggggccgtctgcccgtggacctggctgaggagctgggccatcgcgatgtcgcacggtacctgcgcgcggctgcggggggcaccagaggcagtaaccatgcccgcatagatgccgcggaaggtccctcagacatccccgattga

SEQ ID NO: 603 - RNA, 399 nt, synthetic construct
  misc_feature 1..399: note = AAA82236
  source 1..399: mol_type = other RNA
atggtgcgcaggttcttggtgaccctccggattcggcgcgcgtgcggcccgccgcgagtgagggttttcgtggttcacatcccgcggctcacgggggagtgggcagcgccaggggcgcccgccgctgtggccctcgtgctgatgctactgaggagccagcgtctagggcagcagccgcttcctagaagaccaggtcatgatgatgggcagcgcccgagtggcggagctgctgctgctccacggcgcggagcccaactgcgccgaccccgccactctcacccgacccgtgcacgacgctgcccgggagggcttcctggacacgctggtggtgctgcaccgggccggggcgcggctggacgtgcgcgatgcctggggccgtctgcccgtggacctggctga

SEQ ID NO: 604 - RNA, 2109 nt, synthetic construct
  misc_feature 1..2109: note = CCDS12584.1
  source 1..2109: mol_type = other RNA
atggagtctccctcggcccctccccacagatggtgcatcccctggcagaggctcctgctcacagcctcacttctaaccttctggaacccgcccaccactgccaagctcactattgaatccacgccgttcaatgtcgcagaggggaaggaggtgcttctacttgtccacaatctgccccagcatctttttggctacagctggtacaaaggtgaaagagtggatggcaaccgtcaaattataggatatgtaataggaactcaacaagctaccccagggcccgcatacagtggtcgagagataatataccccaatgcatccctgctgatccagaacatcatccagaatgacacaggattctacaccctacacgtcataaagtcagatcttgtgaatgaagaagcaactggccagttccgggtatacccggagctgcccaagccctccatctccagcaacaactccaaacccgtggaggacaaggatgctgtggccttcacctgtgaacctgagactcaggacgcaacctacctgtggtgggtaaacaatcagagcctcccggtcagtcccaggctgcagctgtccaatggcaacaggaccctcactctattcaatgtcacaagaaatgacacagcaagctacaaatgtgaaacccagaacccagtgagtgccaggcgcagtgattcagtcatcctgaatgtcctctatggcccggatgcccccaccatttcccctctaaacacatcttacagatcaggggaaaatctgaacctctcctgccacgcagcctctaacccacctgcacagtactcttggtttgtcaatgggactttccagcaatccacccaagagctctttatccccaacatcactgtgaataatagtggatcctatacgtgccaagcccataactcagacactggcctcaataggaccacagtcacgacgatcacagtctatgcagagccacccaaacccttcatcaccagcaacaactccaaccccgtggaggatgaggatgctgtagccttaacctgtgaacctgagattcagaacacaacctacctgtggtgggtaaataatcagagcctcccggtcagtcccaggctgcagctgtccaatgacaacaggaccctcactctactcagtgtcacaaggaatgatgtaggaccctatgagtgtggaatccagaacgaattaagtgttgaccacagcgacccagtcatcctgaatgtcctctatggcccagacgaccccaccatttccccctcatacacctattaccgtccaggggtgaacctcagcctctcctgccatgcagcctctaacccacctgcacagtattcttggctgattgatgggaacatccagcaacacacacaagagctctttatctccaacatcactgagaagaacagcggactctatacctgccaggccaataactcagccagtggccacagcaggactacagtcaagacaatcacagtctctgcggagctgcccaagccctccatctccagcaacaactccaaacccgtggaggacaaggatgctgtggccttcacctgtgaacctgaggctcagaacacaacctacctgtggtgggtaaatggtcagagcctcccagtcagtcccaggctgcagctgtccaatggcaacaggaccctcactctattcaatgtcacaagaaatgacgcaagagcctatgtatgtggaatccagaactcagtgagtgcaaaccgcagtgacccagtcaccctggatgtcctctatgggccggacacccccatcatttcccccccagactcgtcttacctttcgggagcgaacctcaacctctcctgccactcggcctctaacccatccccgcagtattcttggcgtatcaatgggataccgcagcaacacacacaagttctctttatcgccaaaatcacgccaaataataacgggacctatgcctgttttgtctctaacttggctactggccgcaataattccatagtcaagagcatcacagtctctgcatctggaacttctcctggtctctcagctggggccactgtcggcatcatgattggagtgctggttggggttgctctgatatag

SEQ ID NO: 605 - RNA, 1035 nt, synthetic construct
  misc_feature 1..1035: note = AAA51739
  source 1..1035: mol_type = other RNA
atgggacccccctcagcccctccctgcagattgcatgtcccctggaaggaggtcctgctcacagcctcacttctaaccttctggaacccacccaccactgccaagctcactattgaatccacgccattcaatgtcgcagaggggaaggaggttcttctactcgcccacaacctgccccagaatcgtattggttacagctggtacaaaggcgaaagagtggatggcaacagtctaattgtaggatatgtaataggaactcaacaagctaccccagggcccgcatacagtggtcgagagacaatataccccaatgcatccctgctgatccagaacgtcacccagaatgacacaggattctataccctacaagtcataaagtcagatcttgtgaatgaagaagcaaccggacagttccatgtatacccggagctgcccaagccctccatctccagcaacaactccaaccccgtggaggacaaggatgctgtggccttcacctgtgaacctgaggttcagaacacaacctacctgtggtgggtaaatggtcagagcctcccggtcagtcccaggctgcagctgtccaatggcaacatgaccctcactctactcagcgtcaaaaggaacgatgcaggatcctatgaatgtgaaatacagaacccagcgagtgccaaccgcagtgacccagtcaccctgaatgtcctctatggcccagatggccccaccatttccccctcaaaggccaattaccgtccaggggaaaatctgaacctctcctgccacgcagcctctaacccacctgcacagtactcttggtttatcaatgggacgttccagcaatccacacaagagctctttatccccaacatcactgtgaataatagcggatcctatatgtgccaagcccataactcagccactggcctcaataggaccacagtcacgatgatcacagtctctggaagtgctcctgtcctctcagctgtggccaccgtcggcatcacgattggagtgctggccagggtcgctctgatatag

SEQ ID NO: 606 - RNA, 1173 nt, synthetic construct
  misc_feature 1..1173: note = AAB04533
  source 1..1173: mol_type = other RNA
atgggagcaaccaccatggaccagaagtctctctgggcaggtgtagtggtcttgctgcttctccagggaggatctgcctacaaactggtttgctactttaccaactggtcccaggaccggcaggaaccaggaaaattcacccctgagaatattgaccccttcctatgctctcatctcatctattcattcgccagcatcgaaaacaacaaggttatcatcaaggacaagagtgaagtgatgctctaccagaccatcaacagtctcaaaaccaagaatcccaaactgaaaattctcttgtccattggagggtacctgtttggttccaaagggttccaccctatggtggattcttctacatcacgcttggaattcattaactccataatcctgtttctgaggaaccataactttgatggactggatgtaagctggatctacccagatcagaaagaaaacactcatttcactgtgctgattcatgagttagcagaagcctttcagaaggacttcacaaaatccaccaaggaaaggcttctcttgactgcgggcgtatctgcagggaggcaaatgattgataacagctatcaagttgagaaactggcaaaagatctggatttcatcaacctcctgtcctttgacttccatgggtcttgggaaaagccccttatcactggccacaacagccctctgagcaaggggtggcaggacagagggccaagctcctactacaatgtggaatatgctgtggggtactggatacataagggaatgccatcagagaaggtggtcatgggcatccccacatatgggcactccttcacactggcctctgcagaaaccaccgtgggggcccctgcctctggccctggagctgctggacccatcacagagtcttcaggcttcctggcctattatgagatctgccagttcctgaaaggagccaagatcacgcggctccaggatcagcaggttccctacgcagtcaaggggaaccagtgggtgggctatgatgatgtgaagagtatggagaccaaggttcagttcttaaagaatttaaacctgggaggagccatgatctggtctattgacatggatgacttcactggcaaatcctgcaaccagggcccttaccctcttgtccaagcagtcaagagaagccttggctccctgtga

SEQ ID NO: 607 - RNA, 2832 nt, synthetic construct
  misc_feature 1..2832: note = AAD40367
  source 1..2832: mol_type = other RNA
atgacccaaaggagcattgcaggtcctatttgcaacctgaagtttgtgactctcctggttgccttaagttcagaactcccattcctgggagctggagtacagcttcaagacaatgggtataatggattgctcattgcaattaatcctcaggtacctgagaatcagaacctcatctcaaacattaaggaaatgataactgaagcttcattttacctatttaatgctaccaagagaagagtatttttcagaaatataaagattttaatacctgccacatggaaagctaataataacagcaaaataaaacaagaatcatatgaaaaggcaaatgtcatagtgactgactggtatggggcacatggagatgatccatacaccctacaatacagagggtgtggaaaagagggaaaatacattcatttcacacctaatttcctactgaatgataacttaacagctggctacggatcacgaggccgagtgtttgtccatgaatgggcccacctccgttggggtgtgttcgatgagtataacaatgacaaacctttctacataaatgggcaaaatcaaattaaagtgacaaggtgttcatctgacatcacaggcatttttgtgtgtgaaaaaggtccttgcccccaagaaaactgtattattagtaagctttttaaagaaggatgcacctttatctacaatagcacccaaaatgcaactgcatcaataatgttcatgcaaagtttatcttctgtggttgaattttgtaatgcaagtacccacaaccaagaagcaccaaacctacagaaccagatgtgcagcctcagaagtgcatgggatgtaatcacagactctgctgactttcaccacagctttcccatgaatgggactgagcttccacctcctcccacattctcgcttgtacaggctggtgacaaagtggtctgtttagtgctggatgtgtccagcaagatggcagaggctgacagactccttcaactacaacaagccgcagaattttatttgatgcagattgttgaaattcataccttcgtgggcattgccagtttcgacagcaaaggagagatcagagcccagctacaccaaattaacagcaatgatgatcgaaagttgctggtttcatatctgcccaccactgtatcagctaaaacagacatcagcatttgttcagggcttaagaaaggatttgaggtggttgaaaaactgaatggaaaagcttatggctctgtgatgatattagtgaccagcggagatgataagcttcttggcaattgcttacccactgtgctcagcagtggttcaacaattcactccattgccctgggttcatctgcagccccaaatctggaggaattatcacgtcttacaggaggtttaaagttctttgttccagatatatcaaactccaatagcatgattgatgctttcagtagaatttcctctggaactggagacattttccagcaacatattcagcttgaaagtacaggtgaaaatgtcaaacctcaccatcaattgaaaaacacagtgactgtggataatactgtgggcaacgacactatgtttctagttacgtggcaggccagtggtcctcctgagattatattatttgatcctgatggacgaaaatactacacaaataattttatcaccaatctaacttttcggacagctagtctttggattccaggaacagctaagcctgggcactggacttacaccctgaacaatacccatcattctctgcaagccctgaaagtgacagtgacctctcgcgcctccaactcagctgtgcccccagccactgtggaagcctttgtggaaagagacagcctccattttcctcatcctgtgatgatttatgccaatgtgaaacagggattttatcccattcttaatgccactgtcactgccacagttgagccagagactggagatcctgttacgctgagactccttgatgatggagcaggtgctgatgttataaaaaatgatggaatttactcgaggtattttttctcctttgctgcaaatggtagatatagcttgaaagtgcatgtcaatcactctcccagcataagcaccccagcccactctattccagggagtcatgctatgtatgtaccaggttacacagcaaacggtaatattcagatgaatgctccaaggaaatcagtaggcagaaatgaggaggagcgaaagtggggctttagccgagtcagctcaggaggctccttttcagtgctgggagttccagctggcccccaccctgatgtgtttccaccatgcaaaattattgacctggaagctgtaaaagtagaagaggaattgaccctatcttggacagcacctggagaagactttgatcagggccaggctacaagctatgaaataagaatgagtaaaagtctacagaatatccaagatgactttaacaatgctattttagtaaatacatcaaagcgaaatcctcagcaagctggcatcagggagatatttacgttctcaccccagatttccacgaatggacctgaacatcagccaaatggagaaacacatgaaagccacagaatttatgttgcaatacgagcaatggataggaactccttacagtctgctgtatctaacattgcccaggcgcctctgtttattccccccaattctgatcctgtacctgccagagattatcttatattgaaaggagttttaacagcaatgggtttgataggaatcatttgccttattatagttgtgacacatcatactttaagcaggaaaaagagagcagacaagaaagagaatggaacaaaattattataa

SEQ ID NO: 608 - RNA, 708 nt, synthetic construct
  misc_feature 1..708: note = AAF82135
  source 1..708: mol_type = other RNA
atggaggaggagacgcatactgacgccaaaatccgtgctgaaaatggaacagggtccagccctcggggtcctggctgcagcctccggcactttgcctgcgaacagaacctgctgtcgcggccagatggctctgcttccttcctgcaaggtgacacctctgtcctggcgggtgtgtacgggccggccgaggtgaaggtcagcaaagagattttcaacaaggccacactcgaagtgatcctgaggccgaagattgggctgcctggtgttgcagagaagagccgggagcggctgatcaggaacacgtgcgaggcggtggtgctgggcacgttgcacccccgcacctccatcaccgtggtgctgcaggttgtcagcgatgccggctctctcctggcctgttgtctgaatgccgcctgcatggcattggtggatgcaggtgtgcccatgcgggctctcttctgtggggtcgcctgcgccctggactctgatgggaccctcgtgctggatcctacatccaagcaagaaaaggaggcccgggcagtcctgacctttgccctggacagcgtggaacggaagctgctgatgtccagcaccaaggggctctactcagacactgagctccagcagtgcctggctgcggcccaggccgcttcgcaacacgtcttccgtttctaccgggaatcgctgcagaggcgttactccaagagctga

SEQ ID NO: 609 - RNA, 1752 nt, synthetic construct
  misc_feature 1..1752: note = CCDS6312.1
  source 1..1752: mol_type = other RNA
atggaggtggcggctaattgctccctacgggtgaagagacctctgttggatccccgcttcgagggttacaagctctctcttgagccgctgccttgttaccagctggagcttgacgcagctgtggcagaggtaaaacttcgagatgatcaatatacactggaacacatgcatgcttttggaatgtataattacctgcactgtgattcatggtatcaagacagtgtctactatattgatacccttggaagaattatgaatttaacagtaatgctggacactgccttaggaaaaccacgagaggtgtttcgacttcctacagatttgacagcatgtgacaaccgtctttgtgcatctatccatttctcatcttctacctgggttaccttgtcagatggaactggaagattgtatgtcattggaacaggtgaacgtggaaatagcgcttctgaaaaatgggagattatgtttaatgaagaacttggggatccttttattataattcacagtatctcactgctaaatgctgaagaacattctatagctaccctacttcttcgaatagagaaagaggaattggatatgaaaggaagtggtttctatgtttctctggagtgggtcactatcagtaagaaaaatcaagataataaaaaatatgaaattattaagcgtgatattctccgtggaaagtcagtgccacattatgctgctattgagcctgatggaaatggtctaatgattgtatcctacaagtctttaacatttgttcaggctggtcaagatcttgaagaaaatatggatgaagacatatcagagaaaatcaaagaacctctgtattactggcaacagactgaagatgatttgacagtaaccatacggcttccagaagacagtactaaggaggacattcaaatacagtttttgcctgatcacatcaacattgtactgaaggatcaccagtttttagaaggaaaactctattcatctattgatcatgaaagcagtacatggataattaaagagagtaatagcttggagatttccttgattaagaagaatgaaggactgacctggccagagctagtaattggagataaacaaggggaacttataagagattcagcccagtgtgctgcaatagctgaacgtttgatgcatttgacctctgaagaactgaatccaaatccagataaagaaaaaccaccttgcaatgctcaagagttagaagaatgtgatattttctttgaagagagctccagtttatgcagatttgatggcaatacattaaaaactactcatgtggtgaatcttggaagcaaccagtaccttttctctgtcatagtggatcctaaagaaatgccctgcttctgtttgcgccatgatgttgatgccctactctggcaaccacactccagcaaacaagatgatatgtgggagcacatcgcaactttcaatgctttaggctatgtccaagcatcaaagagagacaaaaaattttttgcctgtgctccaaattactcgtatgcagccctttgtgagtgccttcgtcgagtattcatctatcgtcagcctgctcccatgtccactgtactttacaacagaaaggaaggcaggcaagtaggacaggttgctaagcagcaagtagcaagcctagaaaccaatgatcctattttaggatttcaggcaacaaatgagagattatttgttcttactaccaaaaacctctttttaataaaagtaaatacagagaattaa

SEQ ID NO: 610 - RNA, 1563 nt, synthetic construct
  misc_feature 1..1563: note = CCDS41288.1
  source 1..1563: mol_type = other RNA
atgagctcacctttggcctcccttagcaagacccgaaaagtgcccctgccctcggagcctatgaatcctgggaggcgaggaatccgcatctatggagatgaagatgaggtggacatgttgagtgatgggtgtggctcagaagaaaagatctcagtcccttcctgctatggcggcataggtgcccctgtgagtcggcaagtccctgcatcccatgactcggagctgatggccttcatgacgaggaagttgtgggacctggagcagcaggtgaaggcccagactgatgagatactgtccaaggatcagaagatagcggccctagaggacctggtgcagaccctccggccacacccagccgaggcaaccctgcagcggcaggaggaactggagacgatgtgtgtgcagctgcagcggcaggtcagggagatggagcggttcctcagtgactatggcctgcagtgggtgggcgagcccatggaccaggaggactcagagagcaagacagtctcagagcatggcgagagggactggatgacagccaagaagttctggaagccaggggactcattggcgccccctgaggtggactttgacaggctgctggccagcctgcaggatcttagtgagctggtggtagagggtgacacccaagtgacaccagtgcccggcggggcacggctgcgtaccctcgagcccatcccgctgaagctctaccggaatggcatcatgatgttcgacgggcccttccagcccttctacgatccctccacacagcgctgcctccgagacatattggatggcttctttccctcagagctccagcgactgtaccccaatggggtcccctttaaggtgagtgacttgcgcaatcaggtctacctggaggatggactggaccccttcccaggcgagggccgtgtggtgggcaggcagctgatgcacaaggccttggacagggtggaggagcacccaggctccaggatgactgctgagaaatttctgaacaggctccccaagtttgtgatccggcaaggcgaggtgattgacatccggggccccatcagggacaccttgcagaactgctgcccattgcctgcccggatccaggagattgtggtggagacgcccaccttggccgctgagcgagagaggagccaggagtcacccaacacgccggcacccccgctctccatgctgcgcatcaagtctgagaatggggaacaggccttcctactgatgatgcagcctgacaacaccattggggacgtgcgagctctgctagcgcaggccagggtcatggatgcctctgcctttgagatcttcagcacattcccgcccaccctctaccaggacgatacactcacgctgcaggctgcaggccttgtgcccaaagcagcactgctgctgcgggcacgccgagccccgaagtccagcctgaaattcagtcctggtccctgtcccggtcccggtcccggccccagtcccggtcccggtcccggccccagtcccggtcccggtcccggccccagtccctgtcctggacccagtcccagcccccaataa

SEQ ID NO: 611 - RNA, 429 nt, synthetic construct
  misc_feature 1..429: note = AAA88022
  source 1..429: mol_type = other RNA
atggccaccaagatcgacaaagaggcttgccgggcggcgtacaacctggtgcgcgacgacggctcggccgtcatctgggtgacttttaaatatgacggctccaccatcgtccccggcgagcagggagcggagtaccagcacttcatccagcagtgcacagatgacgtccggttgtttgccttcgtgcgcttcaccaccggggatgccatgagcaagaggtccaagtttgccctcatcacgtggatcggtgagaacgtcagcgggctgcagcgcgccaaaaccgggacggacaagaccctggtgaaggaggtcgtacagaatttcgctaaggagtttgtgatcagtgatcggaaggagctggaggaagatttcatcaagagcgagctgaagaaggcggggggagccaattacgacgcccagacggagtaa

SEQ ID NO: 612 - RNA, 495 nt, synthetic construct
  misc_feature 1..495: note = CCQ43891
  source 1..495: mol_type = other RNA
atggctacccgggacccctgggtttggatggcaagcccggacttccaggcccgaaaggggaaaagggtgcaccaggagactttggcccccggggagaccaaggacaagatggagctgctgggcctccggggccccctggacctcctggggcccggggccctcctggcgacactgggaaagatggccccaggggagcacaaggcccagcgggccccaaaggagagcccggacaagacggcgagatgggcccaaagggacccccagggcccaagggtgagcctggagtacctggaaagaagggcgacgatgggacaccaagccagcctggaccaccagggcccaagggcgagccagggagcatggggcctcggggagagaacggtgtggacggtgccccaggaccgaagggggagcctggccaccgaggcacggatggagctgcagggccccggggtgccccaggcctcaagggcgagcagggagacacagtggtga

SEQ ID NO: 613 - RNA, 1623 nt, synthetic construct
  misc_feature 1..1623: note = AAO18361
  source 1..1623: mol_type = other RNA
atgggcccaggcgagcgcgccggtggcggcggcgacgcggggaagggcaatgcggcgggcggcggcggcggagggcgctcggcgacgacggccgggtcccgggcggtgagcgcgctgtgcctgctgctctccgtgggctcggcggctgcctgcctgctgctgggtgtccaggcggccgcgctgcagggccgggtggcggcgctcgaggaggagcgggagctgctgcggcgcgcggggccgccaggcgccctggacgcctgggccgagccgcacctggagcgcctgctgcgggagaagttggacggactagcgaagatccggactgctcgggaagctccatccgaatgtgtctgccccccagggccccctggacggcgcggcaagcctgggagaagaggcgaccctggtcctccagggcaatcaggacgagatggctacccgggacccctgggtttggatggcaagcccggacttccaggcccgaaaggggaaaagggtgcaccaggagactttggcccccggggagaccaaggacaagatggagctgctgggcctccggggccccctggacctcctggggcccggggccctcctggcgacactgggaaagatggccccaggggagcacaaggcccagcgggccccaaaggagagcccggacaagacggcgagatgggcccaaagggacccccagggcccaagggtgagcctggagtacctggaaagaagggcgacgatgggacaccaagccagcctggaccaccagggcccaagggcgagccagggagcatggggcctcggggagagaacggtgtggacggtgccccaggaccgaagggggagcctggccaccgaggcacggatggagctgcagggccccggggtgccccaggcctcaagggcgagcagggagacacagtggtgatcgactatgatggcaggatcttggatgccctcaaggggcctcccggaccacaggggcccccagggccaccagggatccctggagccaagggcgagcttggattgcccggtgccccaggaatcgatggagagaagggccccaaaggacagaaaggagacccaggagagcctgggccagcaggactcaaaggggaagcaggcgagatgggcttgtccggcctcccgggcgctgacggcctcaagggggagaagggggagtcggcgtctgacagcctacaggagagcctggctcagctcatagtggagccagggccccctggcccccctggccccccaggcccgatgggcctccagggaatccagggtcccaagggcttggatggagcaaagggagagaagggtgcgtcgggtgagagaggccccagcggcctgcctgggccagttggcccaccgggccttattgggctgccaggaaccaaaggagagaagggcagacccggggagccaggactagatggtttccctggaccccgaggagagaaaggtgatcggagcgagcgtggagagaagggagaacgaggggtccccggccggaaaggagtgaagggccagaagggcgagccgggaccaccaggcctggaccagccgtgtcccgtgggccccgacgggctgcctgtgcctggctgctggcataagtga

SEQ ID NO: 614 - RNA, 492 nt, synthetic construct
  misc_feature 1..492: note = CAG25548
  source 1..492: mol_type = other RNA
atgctcgcccgcgccctgctgctgtgcgcggtcctggcgctcagccatacagcaaatccttgctgttcccacccatgtcaaaaccgaggtgtatgtatgagtgtgggatttgaccagtataagtgcgattgtacccggacaggattctatggagaaaactgctcaacaccggaatttttgacaagaataaaattatttctgaaacccactccaaacacagtgcactacatacttacccacttcaagggattttggaacgttgtgaataacattcccttccttcgaaatgcaattatgagttatgtgttgacatccagatcacatttgattgacagtccaccaacttacaatgctgactatggctacaaaagctgggaagccttctctaacctctcctattatactagagcccttcctcctgtgcctgatgattgcccgactcccttgggtgtcaaagcacttcacgcatcagtttttcaagacagatcataa

SEQ ID NO: 615 - RNA, 1632 nt, synthetic construct
  misc_feature 1..1632: note = AAC50809
  source 1..1632: mol_type = other RNA
atgggcaccagcctcagcccgaacgacccttggccgctaaacccgctgtccatccagcagaccacgctcctgctactcctgtcggtgctggccactgtgcatgtgggccagcggctgctgaggcaacggaggcggcagctccggtccgcgcccccgggcccgtttgcgtggccactgatcggaaacgcggcggcggtgggccaggcggctcacctctcgttcgctcgcctggcgcggcgctacggcgacgttttccagatccgcctgggcagctgccccatagtggtgctgaatggcgagcgcgccatccaccaggccctggtgcagcagggctcggccttcgccgaccggccggccttcgcctccttccgtgtggtgtccggcggccgcagcatggctttcggccactactcggagcactggaaggtgcagcggcgcgcagcccacagcatgatgcgcaacttcttcacgcgccagccgcgcagccgccaagtcctcgagggccacgtgctgagcgaggcgcgcgagctggtggcgctgctggtgcgcggcagcgcggacggcgccttcctcgacccgaggccgctgaccgtcgtggccgtggccaacgtcatgagtgccgtgtgtttcggctgccgctacagccacgacgaccccgagttccgtgagctgctcagccacaacgaagagttcgggcgcacggtgggcgcgggcagcctggtggacgtgatgccctggctgcagtacttccccaacccggtgcgcaccgttttccgcgaattcgagcagctcaaccgcaacttcagcaacttcatcctggacaagttcttgaggcactgcgaaagccttcggcccggggccgccccccgcgacatgatggacgcctttatcctctctgcggaaaagaaggcggccggggactcgcacggtggtggcgcgcggctggatttggagaacgtaccggccactatcactgacatcttcggcgccagccaggacaccctgtccaccgcgctgcagtggctgctcctcctcttcaccaggtatcctgatgtgcagactcgagtgcaggcagaattggatcaggtcgtggggagggaccgtctgccttgtatgggtgaccagcccaacctgccctatgtcctggccttcctttatgaagccatgcgcttctccagctttgtgcctgtcactattcctcatgccaccactgccaacacctctgtcttgggctaccacattcccaaggacactgtggtttttgtcaaccagtggtctgtgaatcatgacccactgaagtggcctaacccggagaactttgatccagctcgattcttggacaaggacggcctcatcaacaaggacctgaccagcagagtgatgattttttcagtgggcaaaaggcggtgcattggcgaagaactttctaagatgcagctttttctcttcatctccatcctggctcaccagtgcgatttcagggccaacccaaatgagcctgcgaaaatgaatttcagttatggtctaaccattaaacccaagtcatttaaagtcaatgtcactctcagagagtccatggagctccttgatagtgctgtccaaaatttacaagccaaggaaacttgccaataa

SEQ ID NO: 616 - RNA, 333 nt, synthetic construct
  misc_feature 1..333: note = NM_001129828
  source 1..333: mol_type = other RNA
atgtggatgggcctcatccaattagttgaaggtgttaagagaaaagaccaaggtttcctggaaaaggaattctaccacaagactaacataaaaatgcgctgtgagtttctagcctgctggcctgccttcactgtcctgggggaggcttggagagaccaggtggactggagtagactgttgagagacgctggtctggtgaagatgtccaggaaaccacgagcctccagcccattgtccaacaaccacccaccaacaccaaagaggttcccaagacaacccggaagggaaaagggacccatcaaggaagttccaggaacaaaaggctctccctaa

SEQ ID NO: 617 - RNA, 384 nt, synthetic construct
  misc_feature 1..384: note = NM_001129826
  source 1..384: mol_type = other RNA
atgtggatgggcctcatccaattagttgaaggtgttaagagaaaagaccaaggtttcctggaaaaggaattctaccacaagactaacataaaaatgcgctgtgagtttctagcctgctggcctgccttcactgtcctgggggaggcttggagagaccaggtggactggagtagactgttgagagacgctggtctggtgaagatgtccaggaaaccacgagcctccagcccattgtccaacaaccacccaccaacaccaaagaggcgaggaagtggaaggcatcctctcaaccctggcccagaagccctatcaaagttcccaagacaacccggaagggaaaagggacccatcaaggaagttccaggaacaaaaggctctccctaa

SEQ ID NO: 618 - RNA, 570 nt, synthetic construct
  misc_feature 1..570: note = AAI40914
  source 1..570: mol_type = other RNA
atgaccgataaaacagagaaggtggctgtagatcctgaaactgtgtttaaacgtcccagggaatgtgacagtccttcgtatcagaaaaggcagaggatggccctgttggcaaggaaacaaggagcaggagacagccttattgcaggctctgccatgtccaaagcaaagaagcttatgacaggacatgctattccacccagccaattggattctcagattgatgacttcactggtttcagcaaagataggatgatgcagaaacctggtagcaatgcacctgtgggaggaaacgttaccagcagtttctctggagatgacctagaatgcagagaaacagcctcctctcccaaaagccaacgagaaattaatgctgatataaaacgtaaattagtgaaggaactccgatgcgttggacaaaaatatgaaaaaatcttcgaaatgcttgaaggagtgcaaggacctactgcagtcaggaagcgattttttgaatccatcatcaaggaagcagcaagatgtatgagacgagactttgttaagcaccttaagaagaaactgaaacgtatgatttga

SEQ ID NO: 619 - RNA, 795 nt, synthetic construct
  misc_feature 1..795: note = AAH20662
  source 1..795: mol_type = other RNA
atgctcaggcttctgagacttgctttggccttctacgggaggacggccgaccctgcagagcgacagggcccacagcagcagggcctcccacaaggtgacacccagttgacaactgtgcagggagttgtcacaagtttctgtggtgattatggcatgattgatgagtcgatctacttcagtagtgatgttgtgactggcaacgtgcctctaaaagttggacaaaaagttaatgtggttgtggaagaagataaaccacattatggattgagagcaatcaaggtggatgttgtgcctcgccatctttatggtgctggaccctcagactcaggaaccagagttttaattggatgtgttacttctataaatgaagataatatttatattagtaacagcatttatttttccatagccattgtttctgaagattttgtgccttataagggtgacttgttagaagttgaatattccactgagccaggcatctcaaacatcaaggcaacttctgtgaagcccatccgttgtattcatacggaagaggtctgcattactagcgtacatggaagaaatggggtgatagattatactatttttttcaccttggattctgtgaaacttcctgatggatacgtacctcaagtagatgatatcgtcaatgtggtcatggtggagagcattcagttctgctttatttggagagcgatttctatcaccccagtgcataaatccagcagcggattccaggatgacggaggcctgggacggcccaaaagggaacgtcggagccaaagcatttaa

SEQ ID NO: 620 - RNA, 2844 nt, synthetic construct
  misc_feature 1..2844: note = CCDS735.1
  source 1..2844: mol_type = other RNA
atgtctctgccaagtcgacaaacagctattattgttaaccctcctccaccagaatatataaatactaagaaaaatgggcgattgacaaatcaacttcagtatctacaaaaagttgtcctaaaggatttatggaagcatagtttttcatggccctttcaacgtcctgtggatgctgtgaaactacagttgcctgattattataccattataaaaaacccaatggatttaaatacaattaagaagcgcttggagaataaatattatgcgaaggcttcagaatgtatagaagacttcaatacaatgttctcaaattgttatttatataacaagcctggagatgacattgttcttatggcacaagctctagagaagctgtttatgcagaaattatctcagatgccacaagaagagcaagttgtgggtgttaaggaaagaatcaagaaaggcactcaacagaatatagctgtttcttctgctaaagaaaaatcatcacccagcgcaacagaaaaagtatttaagcagcaagaaattccttctgtatttcctaagacatctatttctcccttgaacgtggtacagggagcttcagtcaactccagttcacaaactgcggcccaagttacaaaaggtgtgaagaggaaagcagatacaacaactcctgcaacttcagcagttaaagcaagtagtgaattttctccaacattcacagaaaaatcagtggcactgccacctataaaagaaaatatgccaaagaatgttttgccagattctcagcaacaatataatgttgtgaagactgttaaagtaactgaacaattaaggcactgtagtgagattcttaaagaaatgcttgcaaagaaacatttttcatatgcatggcccttttataatcctgttgacgttaatgctttgggactccataactactatgacgttgtcaaaaatccgatggatcttggaactattaaggagaaaatggataaccaagaatataaggatgcatacaaatttgcggcagatgttagattaatgttcatgaattgctacaagtacaatcctccagatcacgaagttgtgacaatggcaagaatgcttcaggatgttttcgaaacgcatttttcaaagatcccgattgaacctgttgagagtatgcctttatgttacatcaaaacagatatcacagaaaccactggtagagagaacactaatgaagcctcctctgaagggaactcttctgatgattctgaagatgagcgagttaagcgtcttgcaaagcttcaggagcagcttaaagctgtacatcaacagctccaggttttgtcccaagtacctttccgtaagctaaataaaaagaaagagaagtctaaaaaggaaaagaaaaaagaaaaggttaataacagcaatgaaaatccaagaaaaatgtgtgagcaaatgaggctaaaggaaaagtccaagagaaatcagccaaagaaaaggaaacaacagttcattggtctaaaatctgaagatgaagataatgctaaacctatgaactatgatgagaaaaggcagttaagtctgaatataaacaaactccctggagataaacttgggcgagtagttcacataatacaatcaagagagccttctctgagcaattccaatcctgatgagatagagatagactttgaaacactgaaagcatcaacactaagagaattagaaaaatatgtttcggcatgtctaagaaagagaccattaaaacctcctgctaagaaaataatgatgtccaaagaagaacttcactcacagaaaaaacaggaattggaaaagcggttactggatgttaataatcagttaaattctagaaaacgtcaaacaaaatctgataaaacgcaaccatccaaagctgttgaaaatgtttcccgactgagtgagagcagcagcagcagcagcagctcatcagagtctgaaagtagcagcagtgacttaagctcttcagacagcagtgattctgaatcagaaatgttccctaagtttacagaagtaaaaccaaatgattctccttctaaagagaatgtaaagaaaatgaagaatgaatgcataccgcctgaaggaagaacaggcgtcacacagataggatattgtgtgcaagacacaacctctgccaatactacccttgttcatcagaccacaccttcacatgtaatgccaccaaatcaccaccaattagcatttaattatcaagaattagaacatttacagactgtgaaaaacatttcacctttacaaattctgcctccctcaggtgattctgaacagctctcaaatggcataactgtgatgcatccatctggtgatagtgacacaacgatgttagaatctgaatgtcaagctcctgtacagaaggatataaagattaagaatgcagattcatggaaaagtttaggcaaaccagtgaaaccatcaggtgtaatgaaatcctcagatgagctcttcaaccaatttagaaaagcagccatagaaaaggaagtaaaagctcggacacaggaactcatacggaagcatttggaacaaaatacaaaggaactaaaagcatctcaagaaaatcagagggatcttgggaatggattgactgtagaatctttttcaaataaaatacaaaacaagtgctctggagaagagcagaaagaacatcagcagtcatcagaagctcaagataaatccaaactctggcttctcaaagaccgtgatttagcaaggcagaaagaacaagagaggaggaggagagaagcaatggtgggtaccattgatatgacccttcaaagtgacattatgacaatgtttgaaaacaactttgattaa

SEQ ID NO: 621 - RNA, 543 nt, synthetic construct
  misc_feature 1..543: note = CCDS35455.1
  source 1..543: mol_type = other RNA
atgcaggccgaaggccggggcacagggggttcgacgggcgatgctgatggcccaggaggccctggcattcctgatggcccagggggcaatgctggcggcccaggagaggcgggtgccacgggcggcagaggtccccggggcgcaggggcagcaagggcctcggggccgagaggaggcgccccgcggggtccgcatggcggtgccgcttctgcgcaggatggaaggtgcccctgcggggccaggaggccggacagccgcctgcttgagttgcacatcacgatgcctttctcgtcgcccatggaagcggagctggtccgcaggatcctgtcccgggatgccgcaccgctcccccgaccaggggcggttctgaaggacttcaccgtgtccggcaacctactgtttatccgactgactgctgcagaccaccgccaactgcagctctccatcagctcctgtctccagcagctttccctgttgatgtggatcacgcagtgctttctgcccgtgtttttggctcaggctccctcagggcagaggcgctaa

SEQ ID NO: 622 - RNA, 633 nt, synthetic construct
  misc_feature 1..633: note = CAA10196
  source 1..633: mol_type = other RNA
atgcaggccgaaggccagggcacagggggttcgacgggcgatgctgatggcccaggaggccctggcattcctgatggcccagggggcaatgctggcggcccaggagaggcgggtgccacgggcggcagaggtccccggggcgcaggggcagcaagggcctcggggccgagaggaggcgccccgcggggtccgcatggcggtgccgcttctgcgcaggatggaaggtgcccctgcggggccaggaggccggacagccgcctgcttcagttgcacatcacgatgcctttctcgtcgcccatggaagcggagctggtccgcaggatcctgtcccgggatgccgcacctctcccccgaccaggggcggttctgaaggacttcaccgtgtccggcaacctactgtttatgtcagttcgggaccaggacagggaaggcgctgggcggatgagggtggtgggttgggggctgggatccgcctccccggaggggcagaaagctagagatctcagaacacccaaacacaaggtctcagaacagagacctggtacaccaggcccgccgccacccgagggagcccagggagatgggtgcagaggtgtcgcctttaatgtgatgttctctgcccctcacatttag

SEQ ID NO: 623 - RNA, 1992 nt, synthetic construct
  misc_feature 1..1992: note = CCDS13459.1
  source 1..1992: mol_type = other RNA
atggcagccactgagatctctgtcctttctgagcaattcaccaagatcaaagaactcgagttgatgccggaaaaaggcctgaaggaggaggaaaaagacggagtgtgcagagagaaagaccatcggagccctagtgagttggaggccgagcgtacctctggggccttccaggacagcgtcctggaggaagaagtggagctggtgctggccccctcggaggagagcgagaagtacatcctgaccctgcagacggtgcacttcacttctgaagctgtggagttgcaggatatgagcttgctgagcatacagcagcaagaaggggtgcaggtggtggtgcaacagcctggccctgggttgctgtggcttgaggaagggccccggcagagcctgcagcagtgtgtggccattagtatccagcaagagctgtactccccgcaagagatggaggtgttgcagttccacgctctagaggagaatgtgatggtggccagtgaagacagtaagttagcggtgagcctggctgaaactactggactgatcaagctcgaggaagagcaggagaagaaccagttattggctgaaagaacaaaggagcagctcttttttgtggaaacaatgtcaggagatgaaagaagtgacgaaattgttctcacagtttcaaattcaaatgtggaagaacaagaggatcaacctacagctggtcaagcagatgctgaaaaggccaaatctacaaaaaatcaaagaaagacaaagggagcaaaaggaaccttccactgtgatgtctgcatgttcacctcttctagaatgtcaagttttaatcgtcatatgaaaactcacaccagtgagaagcctcacctgtgtcacctctgcctgaaaaccttccgtacggtcactctgctgcggaaccatgttaacacccacacaggaaccaggccctacaagtgtaacgactgcaacatggcatttgtcaccagtggagaactcgtccgacacaggcgctataaacatactcatgagaaaccctttaaatgttccatgtgcaagtatgccagtgtggaggcaagtaaattgaagcgccatgtccgatcccacactggggagcgcccctttcagtgttgccagtgcagctatgccagcagagatacctacaagctgaaacgccacatgagaacgcactcaggtgagaagccttacgaatgccacatctgccacacccgcttcacccagagcgggaccatgaaaatacatattctgcagaaacacggcgaaaatgtccccaaataccagtgtccccattgtgccaccatcattgcacggaaaagcgacctacgtgtgcatatgcgcaacttgcatgcttacagcgctgcagagctgaaatgccgctactgttctgctgtcttccatgaacgctatgccctcattcagcaccagaaaactcataagaatgagaagaggttcaagtgcaaacactgcagttatgcctgcaagcaggaacgtcatatgaccgctcacattcgtacccacactggagagaaaccattcacctgcctttcttgcaataaatgtttccgacagaagcaacttctaaacgctcacttcaggaaataccacgatgcaaatttcatcccgactgtttacaaatgctccaagtgtggcaaaggcttttcccgctggattaacctgcacagacattcggagaagtgtggatcaggggaagcaaagtcggctgcttcaggaaagggaagaagaacaagaaagaggaagcagaccatcctgaaggaagccacaaagggtcagaaggaagctgcgaagggatggaaggaagccgcgaacggagacgaagctgctgctgaggaggcttccaccacgaagggagaacagttcccaggagagatgtttcctgtcgcctgcagagaaaccacagccagagtcaaagaggaagtggatgaaggcgtgacctgtgaaatgctcctcaacacgatggataagtga

SEQ ID NO: 624 - RNA, 2148 nt, synthetic construct
  misc_feature 1..2148: note = CCDS11368.1
  source 1..2148: mol_type = other RNA
atgtcccaggtgatgtccagcccactgctggcaggaggccatgctgtcagcttggcgccttgtgatgagcccaggaggaccctgcacccagcacccagccccagcctgccaccccagtgttcttactacaccacggaaggctggggagcccaggccctgatggcccccgtgccctgcatggggccccctggccgactccagcaagccccacaggtggaggccaaagccacctgcttcctgccgtcccctggtgagaaggccttggggaccccagaggaccttgactcctacattgacttctcactggagagcctcaatcagatgatcctggaactggaccccaccttccagctgcttcccccagggactgggggctcccaggctgagctggcccagagcaccatgtcaatgagaaagaaggaggaatctgaagccttggacataaagtacatcgaggtgacctccgccagatcaaggtgccacgatggcccccagcactgctccagcccctctgtcaccccgcccttcggctcccttcgcagtggtggcctcctcctttccagagacgtcccccgagagacacgaagcagcagtgagagcctcatcttctctgggaaccagggcagggggcaccagcgccctctgcccccctcagagggtctctcccctcgacccccaaattcccccagcatctcaatcccttgcatggggagcaaggcctcgagcccccatggtttgggctccccgctggtggcttctccaagactggagaagcggctgggaggcctggccccacagcggggcagcaggatctctgtgctgtcagccagcccagtgtctgatgtcagctatatgtttggaagcagccagtccctcctgcactccagcaactccagccatcagtcatcttccagatccttggaaagtccagccaactcttcctccagcctccacagccttggctcagtgtccctgtgtacaagacccagtgacttccaggctcccagaaaccccaccctaaccatgggccaacccagaacaccccactctccaccactggccaaagaacatgccagcagctgccccccatccatcaccaactccatggtggacatacccattgtgctgatcaacggctgcccagaaccagggtcttctccaccccagcggaccccaggacaccagaactccgttcaacctggagctgcttctcccagcaacccctgtccagccaccaggagcaacagccagaccctgtcagatgccccctttaccacatgcccagagggtcccgccagggacatgcagcccaccatgaagttcgtgatggacacatctaaatactggtttaagccaaacatcacccgagagcaagcaatcgagctgctgaggaaggaggagccaggggcttttgtcataagggacagctcttcataccgaggctccttcggcctggccctgaaggtgcaggaggttcccgcgtctgctcagagtcgaccaggtgaggacagcaatgacctcatccgacacttcctcatcgagtcgtctgccaaaggagtgcatctcaaaggagcagatgaggagccctactttgggagcctctctgccttcgtgtgccagcattccatcatggccctggccctgccctgcaaactcaccatcccacagagagaactgggaggtgcagatggggcctcggactctacagacagcccagcctcctgccagaagaaatctgcgggctgccacaccctgtacctgagctcagtgagcgtggagaccctgactggagccctggccgtgcagaaagccatctccaccacctttgagagggacatcctccccacgcccaccgtggtccacttcaaagtcacagagcagggcatcactctgactgatgtccagaggaaggtgtttttccggcgccattacccactcaccaccctccgcttctgtggtatggaccctgagcaacggaagtggcagaagtactgcaaaccctcctggatctttgggtttgtggccaagagccagacagagcctcaggagaacgtatgccacctctttgcggagtatgacatggtccagccagcctcgcaggtcatcggcctggtgactgctctgctgcaggacgcagaaaggatgtag

SEQ ID NO: 625 - RNA, 1302 nt, synthetic construct
  misc_feature 1..1302: note = AAH06510
  source 1..1302: mol_type = other RNA
atggcgctccgagtcaccaggaactcgaaaattaatgctgaaaataaggcgaagatcaacatggcaggcgcaaagcgcgttcctacggcccctgctgcaacctccaagcccggactgaggccaagaacagctcttggggacattggtaacaaagtcagtgaacaactgcaggccaaaatgcctatgaagaaggaagcaaaaccttcagctactggaaaagtcattgataaaaaactaccaaaacctcttgaaaaggtacctatgctggtgccagtgccagtgtctgagccagtgccagagccagaacctgagccagaacctgagcctgttaaagaagaaaaactttcgcctgagcctattttggttgatactgcctctccaagcccaatggaaacatctggatgtgcccctgcagaagaagacctgtgtcaggctttctctgatgtaattcttgcagtaaatgatgtggatgcagaagatggagctgatccaaacctttgtagtgaatatgtgaaagatatttatgcttatctgagacaacttgaggaagagcaagcagtcagaccaaaatacctactgggtcgggaagtcactggaaacatgagagccatcctaattgactggctagtacaggttcaaatgaaattcaggttgttgcaggagaccatgtacatgactgtctccattattgatcggttcatgcagaataattgtgtgcccaagaagatgctgcagctggttggtgtcactgccatgtttattgcaagcaaatatgaagaaatgtaccctccagaaattggtgactttgcttttgtgactgacaacacttatactaagcaccaaatcagacagatggaaatgaagattctaagagctttaaactttggtctgggtcggcctctacctttgcacttccttcggagagcatctaagattggagaggttgatgtcgagcaacatactttggccaaatacctgatggaactaactatgttggactatgacatggtgcactttcctccttctcaaattgcagcaggagctttttgcttagcactgaaaattctggataatggtgaatggacaccaactctacaacattacctgtcatatactgaagaatctcttcttccagttatgcagcacctggctaagaatgtagtcatggtaaatcaaggacttacaaagcacatgactgtcaagaacaagtatgccacatcgaagcatgctaagatcagcactctaccacagctgaattctgcactagttcaagatttagccaaggctgtggcaaaggtgtaa

SEQ ID NO: 626 - RNA, 888 nt, synthetic construct
  misc_feature 1..888: note = AAA58392
  source 1..888: mol_type = other RNA
atggaacaccagctcctgtgctgcgaagtggaaaccatccgccgcgcgtaccccgatgccaacctcctcaacgaccgggtgctgcgggccatgctgaaggcggaggagacctgcgcgccctcggtgtcctacttcaaatgtgtgcagaaggaggtcctgccgtccatgcggaagatcgtcgccacctggatgctggaggtctgcgaggaacagaagtgcgaggaggaggtcttcccgctggccatgaactacctggaccgcttcctgtcgctggagcccgtgaaaaagagccgcctgcagctgctgggggccacttgcatgttcgtggcctctaagatgaaggagaccatccccctgacggccgagaagctgtgcatctacaccgacaactccatccggcccgaggagctgctgcaaatggagctgctcctggtgaacaagctcaagtggaacctggccgcaatgaccccgcacgatttcattgaacacttcctctccaaaatgccagaggcggaggagaacaaacagatcatccgcaaacacgcgcagaccttcgttgccctctgtgccacagatgtgaagttcatttccaatccgccctccatggtggcagcggggagcgtggtggccgcagtgcaaggcctgaacctgaggagccccaacaacttcctgtcctactaccgcctcacacgcttcctctccagagtgatcaagtgtgacccggactgcctccgggcctgccaggagcagatcgaagccctgctggagtcaagcctgcgccaggcccagcagaacatggaccccaaggccgccgaggaggaggaagaggaggaggaggaggtggacctggcttgcacacccaccgacgtgcgggacgtggacatctga

SEQ ID NO: 627 - RNA, 651 nt, synthetic construct
  misc_feature 1..651: note = AAA36601
  source 1..651: mol_type = other RNA
atgctgcgcctctccgaacgcaacatgaaggtgctccttgccgccgccctcatcgcggggtccgtcttcttcctgctgctgccgggaccttctgcggccgatgagaagaagaaggggcccaaagtcaccgtcaaggtgtattttgacctacgaattggagatgaagatgtaggccgggtgatctttggtctcttcggaaagactgttccaaaaacagtggataattttgtggccttagctacaggagagaaaggatttggctacaaaaacagcaaattccatcgtgtaatcaaggacttcatgatccagggcggagacttcaccaggggagatggcacaggaggaaagagcatctacggtgagcgcttccccgatgagaacttcaaactgaagcactacgggcctggctgggtgagcatggccaacgcaggcaaagacaccaacggctcccagttcttcatcacgacagtcaagacagcctggctagatggcaagcatgtggtgtttggcaaagttctagagggcatggaggtggtgcggaaggtggagagcaccaagacagacagccgggataaacccctgaaggatgtgatcatcgcagactgcggcaagatcgaggtggagaagccctttgccatcgccaaggagtag

SEQ ID NO: 628 - RNA, 1044 nt, synthetic construct
  misc_feature 1..1044: note = AAD10634
  source 1..1044: mol_type = other RNA
atgcctcggggtcagaagagtaagctccgtgctcgtgagaaacgccgcaaggcgcgagaggagacccagggtctcaaggttgctcacgccactgcagcagagaaagaggagtgcccctcctcctctcctgttttaggggatactcccacaagctcccctgctgctggcattccccagaagcctcagggagctccacccaccaccactgctgctgcagctgtgtcatgtaccgaatctgacgaaggtgccaaatgccaaggtgaggaaaatgcaagtttctcccaggccacaacatccactgagagctcagtcaaagatcctgtagcctgggaggcaggaatgctgatgcacttcattctacgtaagtataaaatgagagagcccattatgaaggcagatatgctgaaggttgttgatgaaaagtacaaggatcacttcactgagatcctcaatggagcctctcgccgcttggagctcgtctttggccttgatttgaaggaagacaaccctagtggccacacctacaccctcgtcagtaagctaaacctcaccaatgatggaaacctgagcaatgattgggactttcccaggaatgggcttctgatgcctctcctgggtgtgatcttcttaaagggcaactctgccaccgaggaagagatctggaaattcatgaatgtgttgggagcctatgatggagaggagcacttaatctatggggaaccccgtaagttcatcacccaagatctggtgcaggaaaaatatctgaagtacgagcaggtgcccaacagtgatcccccacgctatcaattcctatggggtccgagagcctatgctgaaaccaccaagatgaaagtcctcgagtttttggccaagatgaatggtgccactccccgtgacttcccatcccattatgaagaggctttgagagatgaggaagagagagcccaagtccgatccagtgttagagccaggcgtcgcactactgccacgacttttagagcgcgttctagagccccattcagcaggtcctcccaccccatgtga

SEQ ID NO: 629 - RNA, 2436 nt, synthetic construct
  misc_feature 1..2436: note = BAF91373
  source 1..2436: mol_type = other RNA
atggagagtcagggtgtgcctcccgggccttatcgggccaccaagctgtggaatgaagttaccacatcttttcgagcaggaatgcctctaagaaaacacagacaacactttaaaaaatatggcaattgtttcacagcaggagaagcagtggattggctttatgacctattaagaaataatagcaattttggtcctgaagttacaaggcaacagactatccaactgttgaggaaatttcttaagaatcatgtaattgaagatatcaaagggaggtggggatcagaaaatgttgatgataacaaccagctcttcagatttcctgcaacttcgccacttaaaactctaccacgaaggtatccagaattgagaaaaaacaacatagagaacttttccaaagataaagatagcatttttaaattacgaaacttatctcgtagaactcctaaaaggcatggattacatttatctcaggaaaatggcgagaaaataaagcatgaaataatcaatgaagatcaagaaaatgcaattgataatagagaactaagccaggaagatgttgaagaagtttggagatatgttattctgatctacctgcaaaccattttaggtgtgccatccctagaagaagtcataaatccaaaacaagtaattccccaatatataatgtacaacatggccaatacaagtaaacgtggagtagttatactacaaaacaaatcagatgacctccctcactgggtattatctgccatgaagtgcctagcaaattggccaagaagcaatgatatgaataatccaacttatgttggatttgaacgagatgtattcagaacaatcgcagattattttctagatctccctgaacctctacttacttttgaatattacgaattatttgtaaacattttggttgtttgtggctacatcacagtttcagatagatccagtgggatacataaaattcaagatgatccacagtcttcaaaattccttcacttaaacaatttgaattccttcaaatcaactgagtgccttcttctcagtctgcttcatagagaaaaaaacaaagaagaatcagattctactgagagactacagataagcaatccaggatttcaagaaagatgtgctaagaaaatgcagctagttaatttaagaaacagaagagtgagtgctaatgacataatgggaggaagttgtcataatttaatagggttaagtaatatgcatgatctatcctctaacagcaaaccaaggtgctgttctttggaaggaattgtagatgtgccagggaattcaagtaaagaggcatccagtgtctttcatcaatcttttccgaacatagaaggacaaaataataaactgtttttagagtctaagcccaaacaggaattcctgttgaatcttcattcagaggaaaatattcaaaagccattcagtgctggttttaagagaacctctactttgactgttcaagaccaagaggagttgtgtaatgggaaatgcaagtcaaaacagctttgtaggtctcagagtttgcttttaagaagtagtacaagaaggaatagttatatcaatacaccagtggctgaaattatcatgaaaccaaatgttggacaaggcagcacaagtgtgcaaacagctatggaaagtgaactcggagagtctagtgccacaatcaataaaagactctgcaaaagtacaatagaactttcagaaaattctttacttccagcttcttctatgttgactggcacacaaagcttgctgcaacctcatttagagagggttgccatcgatgctctacagttatgttgtttgttacttcccccaccaaatcgtagaaagcttcaacttttaatgcgtatgatttcccgaatgagtcaaaatgttgatatgcccaaacttcatgatgcaatgggtacgaggtcactgatgatacataccttttctcgatgtgtgttatgctgtgctgaagaagtggatcttgatgagcttcttgctggaagattagtttctttcttaatggatcatcatcaggaaattcttcaagtaccctcttacttacagactgcagtggaaaaacatcttgactacttaaaaaagggacatattgaaaatcctggagatggactatttgctcctttgccaacttactcatactgtaagcagattagtgctcaggagtttgatgagcaaaaagtttctacctctcaagctgcaattgcagaacttttagaaaatattattaaaaacaggagtttacctctaaaggagaaaagaaaaaaactaaaacagtttcagaaggaatatcctttgatatatcagaaaagatttccaaccacggagagtgaagcagcactttttggtgacaaacctacaatcaagcaaccaatgctgattttaagaaaaccaaagttccgtagtctaagataa

SEQ ID NO: 630 - RNA, 297 nt, synthetic construct
  misc_feature 1..297: note = AAA46940
  source 1..297: mol_type = other RNA
atgcatggagatacacctacattgcatgaatatatgttagatttgcaaccagagacaactgatctctactgttatgagcaattaaatgacagctcagaggaggaggatgaaatagatggtccagctggacaagcagaaccggacagagcccattacaatattgtaaccttttgttgcaagtgtgactctacgcttcggttgtgcgtacaaagcacacacgtagacattcgtactttggaagacctgttaatgggcacactaggaattgtgtgccccatctgttctcagaaaccataa

SEQ ID NO: 631 - RNA, 318 nt, synthetic construct
  misc_feature 1..318: note = AAA46947
  source 1..318: mol_type = other RNA
atgcatggacctaaggcaacattgcaagacattgtattgcatttagagccccaaaatgaaattccggttgaccttctatgtcacgagcaattaagcgactcagaggaagaaaacgatgaaatagatggagttaatcatcaacatttaccagcccgacgagctgaaccacaacgtcacacaatgttgtgtatgtgttgtaagtgtgaagccagaattaagctagtagtagaaagctcagcagacgaccttcgagcattccagcagctgtttctgaacaccctgtcctttgtgtgtccgtggtgtgcatcccagcagtaa

SEQ ID NO: 632 - RNA, 297 nt, synthetic construct
  misc_feature 1..297: note = AAA46951
  source 1..297: mol_type = other RNA
atgcgtggagaaacacctacgttgcaagactatgtgttagatttgcaacctgaggcaactgacctccactgttatgagcaattacccgacagctcagatgaggaggatgtcatagacagtccagctggacaagcagaaccggacacatccaattacaatatcgttaccttttgttgtcagtgtaagtctacacttcgtttgtgtgtacagagcacacaagtagatattcgcatattgcaagagctgttaatgggctcatttggaatcgtgtgccccaactgttctactagactgtaa

SEQ ID NO: 633 - RNA, 294 nt, synthetic construct
  misc_feature 1..294: note = AAA46959
  source 1..294: mol_type = other RNA
atgagaggacacaagccaacgttaaaggaatatgttttagatttatatcctgaaccaactgacctatactgctatgagcaattaagtgacagctcagatgaggatgaaggcttggaccggccagatggacaagcacaaccagccacagctgattactacattgtaacctgttgtcacacttgtaacaccacagttcgtttatgtgtcaacagtacagcaagtgacctacgaaccatacagcaactacttatgggcacagtgaatattgtgtgccctacctgtgcacaacaataa

SEQ ID NO: 634 - RNA, 300 nt, synthetic construct
  misc_feature 1..300: note = AAA46967
  source 1..300: mol_type = other RNA
atgcatggagaaataactacattgcaagactatgttttagatttggaacccgaggcaactgacctatactgttatgagcaattgtgtgacagctcagaggaggaggaagatactattgacggtccagctggacaagcaaaaccagacacctccaattataatattgtaacgtcctgttgtaaatgtgaggcgacactacgtctgtgtgtacagagcacacacattgacatacgtaaattggaagatttattaatgggcacatttggaatagtgtgccccggctgttcacagagagcataa

SEQ ID NO: 635 - RNA, 330 nt, synthetic construct
  misc_feature 1..330: note = AAA47051
  source 1..330: mol_type = other RNA
atgcgtggaccaaagcccaccttgcaggaaattgtattagatttatgtccttacaatgaaatacagccggttgaccttgtatgtcacgagcaattaggagagtcagaggatgaaatagatgaacccgaccatgcagttaatcaccaacatcaactactagccagacgggatgaaccacagcgtcacacaatacagtgttcgtgttgtaagtgtaacaacacactgcagctggtagtagaagcctcacgggatactctgcgacaactacagcagctgtttatggactcactaggatttgtgtgtccgtggtgtgcaactgcaaaccagtaa

SEQ ID NO: 636 - RNA, 321 nt, synthetic construct
  misc_feature 1..321: note = CAA52574
  source 1..321: mol_type = other RNA
atgcatggaccccgggaaacactgcaagaaattgtattgcatttggaacctcagaatgaattagatcctgttgacctgttgtgttacgagcaattaagcgagtcagaggaggaaaacgatgaagcagatggagttagtcatgcacaactaccagcccgacgagccgaaccacagcgtcacaaaattttgtgtgtatgttgtaagtgtgacggcagaattgagcttacagtagagagctcggcagaggaccttagaacactacagcagctgtttttgagcaccttgtcctttgtgtgtccgtggtgtgcaactaaccaataa

SEQ ID NO: 637 - RNA, 306 nt, synthetic construct
  misc_feature 1..306: note = M62877.1
  source 1..306: mol_type = other RNA
atgcgtggtaatgtaccacaattaaaagatgtagtattgcatttaacaccacagactgaaattgacttgcaatgctacgagcaatttgacagctcagaggaggaggatgaagtagataatatgcgtgaccagctaccagaaagacgggctggacaggctacgtgttacagaattgaagctccgtgttgcaggtgttcaagtgtagtacaactggcagtggaaagcagtggagacacccttcgcgttgtacagcagatgttaatgggcgaactaagcctggtttgcccgtgttgtgcgaacaactag

SEQ ID NO: 638 - RNA, 300 nt, synthetic construct
  misc_feature 1..300: note = CAA52586
  source 1..300: mol_type = other RNA
atgcgtggagacaaagcaactataaaagattatatattagatctgcaacctgaaacaactgacctacactgctatgagcaattaggtgacagctcagatgaggaggatacagatggtgtggaccggccagatggacaagcagaacaagccacaagcaattactacattgtgacatattgtcacagttgtgatagcacactacggctatgcattcatagcactgcgacggaccttcgtactctacagcaaatgctgttgggcacattacaagttgtgtgccccggctgtgcacggctataa

SEQ ID NO: 639 - RNA, 318 nt, synthetic construct
  misc_feature 1..318: note = CAA52597
  source 1..318: mol_type = other RNA
atgcatggtaaagtaccaacgctgcaagacgttgtattagaactaacacctcaaacagaaattgacctacagtgcaatgagcaattggacagctcagaggatgaggatgaggatgaagtagaccatttgcaggagcggccacagcaagctagacaagctaaacaacatacgtgttacctaatacacgtaccttgttgtgagtgtaagtttgtggtgcagttggacattcagagtaccaaagaggacctgcgtgttgtacaacagctgcttatgggtgcgttaacagtaacgtgcccactctgcgcatcaagtaactaa

SEQ ID NO: 640 - RNA, 297 nt, synthetic construct
  misc_feature 1..297: note = AAF13691
  source 1..297: mol_type = other RNA
atgagaggaaacaacccaacgctaagagaatatattttagatttacatcctgaaccaactgacctattctgctatgagcaattatgtgacagctcagacgaggatgaaataggcttggacaggccagatggacaagcacaaccggccacagctaattactacattgtaacgtgttgttacacttgtgacaccacggttcgtttgtgtatcaacagtacaacaaccgacgtacgaaccctacagcagctgcttatgggcacatgtaccattgtgtgccctagctgtgcacagcaataa

SEQ ID NO: 641 - RNA, 324 nt, synthetic construct
  misc_feature 1..324: note = ACL12335
  source 1..324: mol_type = other RNA
atgcatggaccaaaagcaacactttgtgacattgttttagatttggaaccacaaaattatgaggaagttgaccttgtgtgctacgagcaattacctgactccgactccgagaatgaaaaagatgaaccagatggagttaatcatcctttgctactagctagacgagctgaaccacagcgtcacaacattgtgtgtgtgtgttgtaagtgtaataatcaacttcagctagtagtagaaacctcgcaagacggattgcgagccttacagcagctgtttatggacacactatcctttgtgtgtcctttgtgtgcagcaaaccagtaa

SEQ ID NO: 642 - RNA, 318 nt, synthetic construct
  misc_feature 1..318: note = AAA79500
  source 1..318: mol_type = other RNA
atgcatggtaaagtaccaacgttgcaagaggttatattagaacttgcaccgcaaacggaaattgacctacaatgcaatgagcaattggacagctcagaggatgaggatgaggatgaaatagaccatttgctggagcggccacagcaagctagacaagctgaacaacataagtgttacctaattcacgtaccttgttgtaagtgtgagttggtggtgcagttggacattcagagtaccaaagaggagctacgtgtggtacaacagctgcttatgggtgcgttaacagtaacgtgcccactctgcgcatcatctaaataa

SEQ ID NO: 643 - RNA, 1392 nt, synthetic construct
  misc_feature 1..1392: note = AAF80488
  source 1..1392: mol_type = other RNA
atgggcaaggagaagacccacatcaacatcgtggtcatcggccacgtggactccggaaagtccaccaccacgggccacctcatctacaaatgcggaggtattgacaaaaggaccattgagaagttcgagaaggaggcggctgagatggggaagggatccttcaagtatgcctgggtgctggacaagctgaaggcggagcgtgagcgcggcatcaccatcgacatctccctctggaagttcgagaccaccaagtactacatcaccatcatcgatgcccccggccaccgcgacttcatcaagaacatgatcacgggtacatcccaggcggactgcgcagtgctgatcgtggcggcgggcgtgggcgagttcgaggcgggcatctccaagaatgggcagacgcgggagcatgccctgctggcctacacgctgggtgtgaagcagctcatcgtgggcgtgaacaaaatggactccacagagccggcctacagcgagaagcgctacgacgagatcgtcaaggaagtcagcgcctacatcaagaagatcggctacaacccggccaccgtgccctttgtgcccatctccggctggcacggcgacaacatgctggagccctcccccaacatgccgtggttcaagggctggaaggtggagcgtaaggagggcaacgcaagcggcgtgtccctgctggaggccctggacaccatcctgccccccacgcgccccacggacaagcccctgcgcctgccgctgcaggacgtgtacaagattggcggcattggcacggtgcccgtgggccgggtggagaccggcatcctgcggccgggcatggtggtgacctttgcgccagtgaacatcaccactgaggtgaagtcagtggagatgcaccacgaggctctgagcgaagctctgcccggcgacaacgtcggcttcaatgtgaagaacgtgtcggtgaaggacatccggcggggcaacgtgtgtggggacagcaagtctgacccgccgcaggaggctgctcagttcacctcccaggtcatcatcctgaaccacccggggcagattagcgccggctactccccggtcatcgactgccacacagcccacatcgcctgcaagtttgcggagctgaaggagaagattgaccggcgctctggcaagaagctggaggacaaccccaagtccctgaagtctggagacgcggccatcgtggagatggtgccgggaaagcccatgtgtgtggagagcttctcccagtacccgcctctcggccgcttcgccgtgcgcgacatgaggcagacggtggccgtaggcgtcatcaagaacgtggaaaagaagagcggcggcgccggcaaggtcaccaagtcggcgcagaaggcgcagaaggcgggcaagtga

SEQ ID NO: 644 - RNA, 2919 nt, synthetic construct
  misc_feature 1..2919: note = EAW51573
  source 1..2919: mol_type = other RNA
atggataccgacttatatgatgagtttgggaattatattggaccagagcttgattctgatgaagatgatgatgaattgggtagagagaccaaagatcttgatgagatggatgatgatgacgacgacgatgacgtaggagatcatgacgatgaccaccctgggatggaggtggtgctgcatgaggacaagaagtactacccaacagccgaggaggtgtatggtcctgaggtggagaccatagttcaagaggaagacactcagcctctcacagaacccattattaagccagtgaaaaccaagaaattcactctgatggagcagacattacctgttacggtgtatgagatggatttcttggcggatctgatggataactcagagctcatcagaaatgtgaccctttgtggacatctccaccatggcaagacatgttttgtggattgtttaattgaacagactcacccggaaatcagaaagcgctatgaccaagatctgtgctatactgacatcctcttcacagagcaagagagaggtgtaggcatcaaaagcactcctgtgacagtggtcttgccagacaccaaaggaaaatcttatctcttcaatatcatggacactccaggacatgtgaatttctctgatgaggtcacagctggcttgcgcatctcagatggagtggtccttttcattgatgctgctgagggggtgatgctgaacacagagcggctgatcaagcatgcggtgcaggagaggctggcagtcactgtgtgcatcaacaagattgaccggctgatcctggagctgaagctgcctccaactgatgcttattacaagctgcgccacattgtggatgaggtcaatggattaataagcatgtattccactgatgagaacctgatcctttccccactcctgggtaacgtctgcttctccagctcccagtacagcatctgcttcacgctgggctcctttgccaagatctatgccgacacctttggtgacattaattaccaagaatttgctaaaagactctggggtgacatctacttcaaccctaagacgcgaaagttcaccaaaaaggccccaactagcagctcccagagaagtttcgtggagtttatcttggagcctctttataagatcctcgcccaggttgtaggtgacgtggacaccagcctcccacggaccctagacgagcttggcatccacctgacgaaggaggagctgaagctgaacatccgccccttgctcaggctggtctgcaaaaagttctttggcgagttcacaggctttgtggacatgtgtgtgcagcatatcccttctccaaaggtgggcgccaagcccaagattgagcacacctacaccggtggtgtggactccgacctcggcgaggctatgagtgactgtgaccctgatggccccctgatgtgccacactactaagatgtacagcacagatgatggagtccagtttcacgcctttggccgggtgctgagtggcaccattcatgctgggcagcctgtgaaggtactgggggagaactacaccctggaggatgaggaagactcccagatatgcaccgtgggccgcctttggatctctgtggccaggtaccacatcgaggtgaaccgtgttcctgctggcaactgggttctgattgaaggtgttgatcaaccaattgtgaagacagcaaccataaccgaaccccgaggcaatgaggaggctcagattttccgacccttgaagttcaataccacatctgttatcaagattgctgtggagccagtcaacccctcagagctgcccaagatgcttgatggcctgcgcaaggtcaacaagagctatccatccctcaccaccaaggtggaggagtctggcgagcatgtgatcctgggcactggggagctctacctggactgtgtgatgcatgatttgcggaagatgtactcagagatagacatcaaggtggctgacccagttgtcacgttttgtgagacggtggtggaaacatcctccctcaagtgctttgctgaaacgcctaataagaagaacaagatcaccatgattgctgagcctcttgagaagggcctggcagaggacatagagaatgaggtggtccagattacgtggaacaggaagaagctgggagagttcttccagaccaagtacgattgggatctgctggctgcccgttccatctgggcttttggccctgatgcgactggccccaacattctggtggatgatactctgccctctgaggtggacaaggctcttcttggttcagtgaaggacagcatcgttcaaggtttccagtggggaaccagggagggccccctctgtgatgaattgattcggaatgtcaagtttaagatcctggatgcggtggttgcccaggagcccctgcaccggggcgggggccagatcatccccacagccaggagagtcgtctactctgccttcctcatggctactcctcgtctgatggagccttactactttgtagaggtccaggcccctgcagattgcgtctctgcagtttataccgtcctggccaggcgcagggggcacgtgactcaggatgcacccatcccaggctcccctctgtacaccatcaaagcttttatcccggccatcgactcttttggctttgagactgatctccggactcacacccagggacaagccttttctctgtctgtcttccaccactggcagattgtgcctggtgatcccctggacaagagcattgtcatccgccccttggagccacagccagctcctcacctggcccgggaattcatgatcaaaacccgccgtaggaagggcctcagtgaagatgtgagcatcagcaaattcttcgatgatcctatgttgctggaacttgccaaacaggatgttgtgctcaattaccccatgtga

SEQ ID NO: 645 - RNA, 1971 nt, synthetic construct
  misc_feature 1..1971: note = EAW50963
  source 1..1971: mol_type = other RNA
atgcgaccctccgggacggccggggcagcgctcctggcgctgctggctgcgctctgcccggcgagtcgggctctggaggaaaagaaagtttgccaaggcacgagtaacaagctcacgcagttgggcacttttgaagatcattttctcagcctccagaggatgttcaataactgtgaggtggtccttgggaatttggaaattacctatgtgcagaggaattatgatctttccttcttaaagaccatccaggaggtggctggttatgtcctcattgccctcaacacagtggagcgaattcctttggaaaacctgcagatcatcagaggaaatatgtactacgaaaattcctatgccttagcagtcttatctaactatgatgcaaataaaaccggactgaaggagctgcccatgagaaatttacaggaaatcctgcatggcgccgtgcggttcagcaacaaccctgccctgtgcaacgtggagagcatccagtggcgggacatagtcagcagtgactttctcagcaacatgtcgatggacttccagaaccacctgggcagctgccaaaagtgtgatccaagctgtcccaatgggagctgctggggtgcaggagaggagaactgccagaaactgaccaaaatcatctgtgcccagcagtgctccgggcgctgccgtggcaagtcccccagtgactgctgccacaaccagtgtgctgcaggctgcacaggcccccgggagagcgactgcctggtctgccgcaaattccgagacgaagccacgtgcaaggacacctgccccccactcatgctctacaaccccaccacgtaccagatggatgtgaaccccgagggcaaatacagctttggtgccacctgcgtgaagaagtgtccccgtaattatgtggtgacagatcacggctcgtgcgtccgagcctgtggggccgacagctatgagatggaggaagacggcgtccgcaagtgtaagaagtgcgaagggccttgccgcaaagtgtgtaacggaataggtattggtgaatttaaagactcactctccataaatgctacgaatattaaacacttcaaaaactgcacctccatcagtggcgatctccacatcctgccggtggcatttaggggtgactccttcacacatactcctcctctggatccacaggaactggatattctgaaaaccgtaaaggaaatcacagggtttttgctgattcaggcttggcctgaaaacaggacggacctccatgcctttgagaacctagaaatcatacgcggcaggaccaagcaacatggtcagttttctcttgcagtcgtcagcctgaacataacatccttgggattacgctccctcaaggagataagtgatggagatgtgataatttcaggaaacaaaaatttgtgctatgcaaatacaataaactggaaaaaactgtttgggacctccggtcagaaaaccaaaattataagcaacagaggtgaaaacagctgcaaggccacaggccaggtctgccatgccttgtgctcccccgagggctgctggggcccggagcccagggactgcgtctcttgccggaatgtcagccgaggcagggaatgcgtggacaagtgcaaccttctggagggtgagccaagggagtttgtggagaactctgagtgcatacagtgccacccagagtgcctgcctcaggccatgaacatcacctgcacaggacggggaccagacaactgtatccagtgtgcccactacattgacggcccccactgcgtcaagacctgcccggcaggagtcatgggagaaaacaacaccctggtctggaagtacgcagacgccggccatgtgtgccacctgtgccatccaaactgcacctacggatgcactgggccaggtcttgaaggctgtccaacgaatggaagctacatagtgtctcactttccaagatcattctacaagatgtcagtgcac

SEQ ID NO: 646 - RNA, 3411 nt, synthetic construct
  misc_feature 1..3411: note = ADL28125
  source 1..3411: mol_type = other RNA
atgcgaccctccgggacggccggggcagcgctcctggcgctgctggctgcgctctgcccggcgagtcgggctctggaggaaaagaaagtttgccaaggcacgagtaacaagctcacgcagttgggcacttttgaagatcattttctcagcctccagaggatgttcaataactgtgaggtggtccttgggaatttggaaattacctatgtgcagaggaattatgatctttccttcttaaagaccatccaggaggtggctggttatgtcctcattgccctcaacacagtggagcgaattcctttggaaaacctgcagatcatcagaggaaatatgtactacgaaaattcctatgccttagcagtcttatctaactatgatgcaaataaaaccggactgaaggagctgcccatgagaaatttacaggaaatcctgcatggcgccgtgcggttcagcaacaaccctgccctgtgcaacgtggagagcatccagtggcgggacatagtcagcagtgactttctcagcaacatgtcgatggacttccagaaccacctgggcagctgccaaaagtgtgatccaagctgtcccaatgggagctgctggggtgcaggagaggagaactgccagaaactgaccaaaatcatctgtgcccagcagtgctccgggcgctgccgtggcaagtcccccagtgactgctgccacaaccagtgtgctgcaggctgcacaggcccccgggagagcgactgcctggtctgccgcaaattccgagacgaagccacgtgcaaggacacctgccccccactcatgctctacaaccccaccacgtaccagatggatgtgaaccccgagggcaaatacagctttggtgccacctgcgtgaagaagtgtccccgtaattatgtggtgacagatcacggctcgtgcgtccgagcctgtggggccgacagctatgagatggaggaagacggcgtccgcaagtgtaagaagtgcgaagggccttgccgcaaagtgtgtaacggaataggtattggtgaatttaaagactcactctccataaatgctacgaatattaaacacttcaaaaactgcacctccatcagtggcgatctccacatcctgccggtggcatttaggggtgactccttcacacatactcctcctctggatccacaggaactggatattctgaaaaccgtaaaggaaatcacagggtttttgctgattcaggcttggcctgaaaacaggacggacctccatgcctttgagaacctagaaatcatacgcggcaggaccaagcaacatggtcagttttctcttgcagtcgtcagcctgaacataacatccttgggattacgctccctcaaggagataagtgatggagatgtgataatttcaggaaacaaaaatttgtgctatgcaaatacaataaactggaaaaaactgtttgggacctccggtcagaaaaccaaaattataagcaacagaggtgaaaacagctgcaaggccacaggccaggtctgccatgccttgtgctcccccgagggctgctggggcccggagcccagggactgcgtctcttgccggaatgtcagccgaggcagggaatgcgtggacaagtgcaaccttctggagggtgagccaagggagtttgtggagaactctgagtgcatacagtgccacccagagtgcctgcctcaggccatgaacatcacctgcacaggacggggaccagacaactgtatccagtgtgcccactacattgacggcccccactgcgtcaagacctgcccggcaggagtcatgggagaaaacaacaccctggtctggaagtacgcagacgccggccatgtgtgccacctgtgccatccaaactgcacctacggatgcactgggccaggtcttgaaggctgtccaacgaatgggcctaagatcccgtccatcgccactgggatggtgggggccctcctcttgctgctggtggtggccctggggatcggcctcttcatgcgaaggcgccacatcgttcggaagcgcacgctgcggaggctgctgcaggagagggagcttgtggagcctcttacacccagtggagaagctcccaaccaagctctcttgaggatcttgaaggaaactgaattcaaaaagatcaaagtgctgggctccggtgcgttcggcacggtgtataagggactctggatcccagaaggtgagaaagttaaaattcccgtcgctatcaaggaattaagagaagcaacatctccgaaagccaacaaggaaatcctcgatgaagcctacgtgatggccagcgtggacaacccccacgtgtgccgcctgctgggcatctgcctcacctccaccgtgcagctcatcacgcagctcatgcccttcggctgcctcctggactatgtccgggaacacaaagacaatattggctcccagtacctgctcaactggtgtgtgcagatcgcaaagggcatgaactacttggaggaccgtcgcttggtgcaccgcgacctggcagccaggaacgtactggtgaaaacaccgcagcatgtcaagatcacagattttgggctggccaaactgctgggtgcggaagagaaagaataccatgcagaaggaggcaaagtgcctatcaagtggatggcattggaatcaattttacacagaatctatacccaccagagtgatgtctggagctacggggtgaccgtttgggagttgatgacctttggatccaagccatatgacggaatccctgccagcgagatctcctccatcctggagaaaggagaacgcctccctcagccacccatatgtaccatcgatgtctacatgatcatggtcaagtgctggatgatagacgcagatagtcgcccaaagttccgtgagttgatcatcgaattctccaaaatggcccgagacccccagcgctaccttgtcattcagggggatgaaagaatgcatttgccaagtcctacagactccaacttctaccgtgccctgatggatgaagaagacatggacgacgtggtggatgccgacgagtacctcatcccacagcagggcttcttcagcagcccctccacgtcacggactcccctcctgagctctctgagtgcaaccagcaacaattccaccgtggcttgcattgatagaaatgggctgcaaagctgtcccatcaaggaagacagcttcttgcagcgatacagctcagaccccacaggcgccttgactgaggacagcatagacgacaccttcctcccagtgcctggtgagtggcttgtctggaaacagtcctgctcctcaacctcctcgacccactcagcagcagccagtctccagtgtccaagccaggtgctccctccagcatctccagagggggaaacagtggcagatttgcagacacagtga

SEQ ID NO: 647 - RNA, 150 nt, synthetic construct
  misc_feature 1..150: note = CCO13722
  source 1..150: mol_type = other RNA
atgtgtgccacctgtgccatccaaactgcacctacgggtcctaataaatcttcactgtctgactttagtctcccactaaaactgcatttcctttctacaatttcaatttctccctttgcttcaaataaagtcctgacactattcatttga

SEQ ID NO: 648 - RNA, 1218 nt, synthetic construct
  misc_feature 1..1218: note = CCDS47587.1
  source 1..1218: mol_type = other RNA
atgcgaccctccgggacggccggggcagcgctcctggcgctgctggctgcgctctgcccggcgagtcgggctctggaggaaaagaaagtttgccaaggcacgagtaacaagctcacgcagttgggcacttttgaagatcattttctcagcctccagaggatgttcaataactgtgaggtggtccttgggaatttggaaattacctatgtgcagaggaattatgatctttccttcttaaagaccatccaggaggtggctggttatgtcctcattgccctcaacacagtggagcgaattcctttggaaaacctgcagatcatcagaggaaatatgtactacgaaaattcctatgccttagcagtcttatctaactatgatgcaaataaaaccggactgaaggagctgcccatgagaaatttacaggaaatcctgcatggcgccgtgcggttcagcaacaaccctgccctgtgcaacgtggagagcatccagtggcgggacatagtcagcagtgactttctcagcaacatgtcgatggacttccagaaccacctgggcagctgccaaaagtgtgatccaagctgtcccaatgggagctgctggggtgcaggagaggagaactgccagaaactgaccaaaatcatctgtgcccagcagtgctccgggcgctgccgtggcaagtcccccagtgactgctgccacaaccagtgtgctgcaggctgcacaggcccccgggagagcgactgcctggtctgccgcaaattccgagacgaagccacgtgcaaggacacctgccccccactcatgctctacaaccccaccacgtaccagatggatgtgaaccccgagggcaaatacagctttggtgccacctgcgtgaagaagtgtccccgtaattatgtggtgacagatcacggctcgtgcgtccgagcctgtggggccgacagctatgagatggaggaagacggcgtccgcaagtgtaagaagtgcgaagggccttgccgcaaagtgtgtaacggaataggtattggtgaatttaaagactcactctccataaatgctacgaatattaaacacttcaaaaactgcacctccatcagtggcgatctccacatcctgccggtggcatttaggggtgactccttcacacatactcctcctctggatccacaggaactggatattctgaaaaccgtaaaggaaatcacaggtttgagctga

SEQ ID NO: 649 - RNA, 3633 nt, synthetic construct
  misc_feature 1..3633: note = AAG35789
  source 1..3633: mol_type = other RNA
atgcgaccctccgggacggccggggcagcgctcctggcgctgctggctgcgctctgcccggcgagtcgggctctggaggaaaagaaagtttgccaaggcacgagtaacaagctcacgcagttgggcacttttgaagatcattttctcagcctccagaggatgttcaataactgtgaggtggtccttgggaatttggaaattacctatgtgcagaggaattatgatctttccttcttaaagaccatccaggaggtggctggttatgtcctcattgccctcaacacagtggagcgaattcctttggaaaacctgcagatcatcagaggaaatatgtactacgaaaattcctatgccttagcagtcttatctaactatgatgcaaataaaaccggactgaaggagctgcccatgagaaatttacaggaaatcctgcatggcgccgtgcggttcagcaacaaccctgccctgtgcaacgtggagagcatccagtggcgggacatagtcagcagtgactttctcagcaacatgtcgatggacttccagaaccacctgggcagctgccaaaagtgtgatccaagctgtcccaatgggagctgctggggtgcaggagaggagaactgccagaaactgaccaaaatcatctgtgcccagcagtgctccgggcgctgccgtggcaagtcccccagtgactgctgccacaaccagtgtgctgcaggctgcacaggcccccgggagagcgactgcctggtctgccgcaaattccgagacgaagccacgtgcaaggacacctgccccccactcatgctctacaaccccaccacgtaccagatggatgtgaaccccgagggcaaatacagctttggtgccacctgcgtgaagaagtgtccccgtaattatgtggtgacagatcacggctcgtgcgtccgagcctgtggggccgacagctatgagatggaggaagacggcgtccgcaagtgtaagaagtgcgaagggccttgccgcaaagtgtgtaacggaataggtattggtgaatttaaagactcactctccataaatgctacgaatattaaacacttcaaaaactgcacctccatcagtggcgatctccacatcctgccggtggcatttaggggtgactccttcacacatactcctcctctggatccacaggaactggatattctgaaaaccgtaaaggaaatcacagggtttttgctgattcaggcttggcctgaaaacaggacggacctccatgcctttgagaacctagaaatcatacgcggcaggaccaagcaacatggtcagttttctcttgcagtcgtcagcctgaacataacatccttgggattacgctccctcaaggagataagtgatggagatgtgataatttcaggaaacaaaaatttgtgctatgcaaatacaataaactggaaaaaactgtttgggacctccggtcagaaaaccaaaattataagcaacagaggtgaaaacagctgcaaggccacaggccaggtctgccatgccttgtgctcccccgagggctgctggggcccggagcccagggactgcgtctcttgccggaatgtcagccgaggcagggaatgcgtggacaagtgcaaccttctggagggtgagccaagggagtttgtggagaactctgagtgcatacagtgccacccagagtgcctgcctcaggccatgaacatcacctgcacaggacggggaccagacaactgtatccagtgtgcccactacattgacggcccccactgcgtcaagacctgcccggcaggagtcatgggagaaaacaacaccctggtctggaagtacgcagacgccggccatgtgtgccacctgtgccatccaaactgcacctacggatgcactgggccaggtcttgaaggctgtccaacgaatgggcctaagatcccgtccatcgccactgggatggtgggggccctcctcttgctgctggtggtggccctggggatcggcctcttcatgcgaaggcgccacatcgttcggaagcgcacgctgcggaggctgctgcaggagagggagcttgtggagcctcttacacccagtggagaagctcccaaccaagctctcttgaggatcttgaaggaaactgaattcaaaaagatcaaagtgctgggctccggtgcgttcggcacggtgtataagggactctggatcccagaaggtgagaaagttaaaattcccgtcgctatcaaggaattaagagaagcaacatctccgaaagccaacaaggaaatcctcgatgaagcctacgtgatggccagcgtggacaacccccacgtgtgccgcctgctgggcatctgcctcacctccaccgtgcagctcatcacgcagctcatgcccttcggctgcctcctggactatgtccgggaacacaaagacaatattggctcccagtacctgctcaactggtgtgtgcagatcgcaaagggcatgaactacttggaggaccgtcgcttggtgcaccgcgacctggcagccaggaacgtactggtgaaaacaccgcagcatgtcaagatcacagattttgggctggccaaactgctgggtgcggaagagaaagaataccatgcagaaggaggcaaagtgcctatcaagtggatggcattggaatcaattttacacagaatctatacccaccagagtgatgtctggagctacggggtgaccgtttgggagttgatgacctttggatccaagccatatgacggaatccctgccagcgagatctcctccatcctggagaaaggagaacgcctccctcagccacccatatgtaccatcgatgtctacatgatcatggtcaagtgctggatgatagacgcagatagtcgcccaaagttccgtgagttgatcatcgaattctccaaaatggcccgagacccccagcgctaccttgtcattcagggggatgaaagaatgcatttgccaagtcctacagactccaacttctaccgtgccctgatggatgaagaagacatggacgacgtggtggatgccgacgagtacctcatcccacagcagggcttcttcagcagcccctccacgtcacggactcccctcctgagctctctgagtgcaaccagcaacaattccaccgtggcttgcattgatagaaatgggctgcaaagctgtcccatcaaggaagacagcttcttgcagcgatacagctcagaccccacaggcgccttgactgaggacagcatagacgacaccttcctcccagtgcctgaatacataaaccagtccgttcccaaaaggcccgctggctctgtgcagaatcctgtctatcacaatcagcctctgaaccccgcgcccagcagagacccacactaccaggacccccacagcactgcagtgggcaaccccgagtatctcaacactgtccagcccacctgtgtcaacagcacattcgacagccctgcccactgggcccagaaaggcagccaccaaattagcctggacaaccctgactaccagcaggacttctttcccaaggaagccaagccaaatggcatctttaagggctccacagctgaaaatgcagaatacctaagggtcgcgccacaaagcagtgaatttattggagcatga

SEQ ID NO: 650 - RNA, 1395 nt, synthetic construct
  misc_feature 1..1395: note = AAI18666
  source 1..1395: mol_type = other RNA
atggcagctgaagacgttatcatctgtgcccagcagtgctccgggcgctgccgtggcaagtcccccagtgactgctgccacaaccagtgtgctgcaggctgcacaggcccccgggagagcgactgcctggtctgccgcaaattccgagacgaagccacgtgcaaggacacctgccccccactcatgctctacaaccccaccacgtaccagatggatgtgaaccccgagggcaaatacagctttggtgccacctgcgtgaagaagtgtccccgtaattatgtggtgacagatcacggctcgtgcgtccgagcctgtggggccgacagctatgagatggaggaagacggcgtccgcaagtgtaagaagtgcgaagggccttgccgcaaagtgtgtaacggaataggtattggtgaatttaaagactcactctccataaatgctacgaatattaaacacttcaaaaactgcacctccatcagtggcgatctccacatcctgccggtggcatttaggggtgactccttcacacatactcctcctctggatccacaggaactggatattctgaaaaccgtaaaggaaatcacagggtttttgctgattcaggcttggcctgaaaacaggacggacctccatgcctttgagaacctagaaatcatacgcggcaggaccaagcaacatggtcagttttctcttgcagtcgtcagcctgaacataacatccttgggattacgctccctcaaggagataagtgatggagatgtgataatttcaggaaacaaaaatttgtgctatgcaaatacaataaactggaaaaaactgtttgggacctccggtcagaaaaccaaaattataagcaacagaggtgaaaacagctgcaaggccacaggccaggtctgccatgccttgtgctcccccgagggctgctggggcccggagcccagggactgcgtctcttgccggaatgtcagccgaggcagggaatgcgtggacaagtgcaaccttctggagggtgagccaagggagtttgtggagaactctgagtgcatacagtgccacccagagtgcctgcctcaggccatgaacatcacctgcacaggacggggaccagacaactgtatccagtgtgcccactacattgacggcccccactgcgtcaagacctgcccggcaggagtcatgggagaaaacaacaccctggtctggaagtacgcagacgctggccatgtgtgccacctgtgccatccaaactgcacctacggatgcacagggccaggtcttgaaggctgtccaacgaatgggcctaagatcccgtccatcgccactgggatggtgggggccctcctcttgctgctggtggtggccctggggatcgggcctcttcatggaagatag

SEQ ID NO: 651 - RNA, 3276 nt, synthetic construct
  misc_feature 1..3276: note = AAH94761
  source 1..3276: mol_type = other RNA
atgcgaccctccgggacggccggggcagcgctcctggcgctgctggctgcgctctgcccggcgagtcgggctctggaggaaaagaaagtttgccaaggcacgagtaacaagctcacgcagttgggcacttttgaagatcattttctcagcctccagaggatgttcaataactgtgaggtggtccttgggaatttggaaattacctatgtgcagaggaattatgatctttccttcttaaagaccatccaggaggtggctggttatgtcctcattgccctcaacacagtggagcgaattcctttggaaaacctgcagatcatcagaggaaatatgtactacgaaaattcctatgccttagcagtcttatctaactatgatgcaaataaaaccggactgaaggagctgcccatgagaaatttacagggacaaaagtgtgatccaagctgtcccaatgggagctgctggggtgcaggagaggagaactgccagaaactgaccaaaatcatctgtgcccagcagtgctccgggcgctgccgtggcaagtcccccagtgactgctgccacaaccagtgtgctgcaggctgcacaggcccccgggagagcgactgcctggtctgccgcaaattccgagacgaagccacgtgcaaggacacctgccccccactcatgctctacaaccccaccacgtaccagatggatgtgaaccccgagggcaaatacagctttggtgccacctgcgtgaagaagtgtccccgtaattatgtggtgacagatcacggctcgtgcgtccgagcctgtggggccgacagctatgagatggaggaagacggcgtccgcaagtgtaagaagtgcgaagggccttgccgcaaagtgtgtaacggaataggtattggtgaatttaaagactcactctccataaatgctacgaatattaaacacttcaaaaactgcacctccatcagtggcgatctccacatcctgccggtggcatttaggggtgactccttcacacatactcctcctctggatccacaggaactggatattctgaaaaccgtaaaggaaatcacagggtttttgctgattcaggcttggcctgaaaacaggacggacctccatgcctttgagaacctagaaatcatacgcggcaggaccaagcaacatggtcagttttctcttgcagtcgtcagcctgaacataacatccttgggattacgctccctcaaggagataagtgatggagatgtgataatttcaggaaacaaaaatttgtgctatgcaaatacaataaactggaaaaaactgtttgggacctccggtcagaaaaccaaaattataagcaacagaggtgaaaacagctgcaaggccacaggccaggtctgccatgccttgtgctcccccgagggctgctggggcccggagcccagggactgcgtctcttgccggaatgtcagccgaggcagggaatgcgtggacaagtgcaaccttctggagggtgagccaagggagtttgtggagaactctgagtgcatacagtgccacccagagtgcctgcctcaggccatgaacatcacctgcacaggacggggaccagacaactgtatccagtgtgcccactacattgacggcccccactgcgtcaagacctgcccggcaggagtcatgggagaaaacaacaccctggtctggaagtacgcagacgccggccatgtgtgccacctgtgccatccaaactgcacctacggatgcactgggccaggtcttgaaggctgtccaacgaatgggcctaagatcccgtccatcgccactgggatggtgggggccctcctcttgctgctggtggtggccctggggatcggcctcttcatgcgaaggcgccacatcgttcggaagcgcacgctgcggaggctgctgcaggagagggagcttgtggagcctcttacacccagtggagaagctcccaaccaagctctcttgaggatcttgaaggaaactgaattcaaaaagatcaaagtgctgggctccggtgcgttcggcacggtgtataagggactctggatcccagaaggtgagaaagttaaaattcccgtcgctatcaaggaattaagagaagcaacatctccgaaagccaacaaggaaatcctcgatgaagcctacgtgatggccagcgtggacaacccccacgtgtgccgcctgctgggcatctgcctcacctccaccgtgcagctcatcacgcagctcatgcccttcggctgcctcctggactatgtccgggaacacaaagacaatattggctcccagtacctgctcaactggtgtgtgcagatcgcaaagggcatgaactacttggaggaccgtcgcttggtgcaccgcgacctggcagccaggaacgtactggtgaaaacaccgcagcatgtcaagatcacagattttgggctggccaaactgctgggtgcggaagagaaagaataccatgcagaaggaggcaaagtgcctatcaagtggatggcattggaatcaattttacacagaatctatacccaccagagtgatgtctggagctacggggtgaccgtttgggagttgatgacctttggatccaagccatatgacggaatccctgccagcgagatctcctccatcctggagaaaggagaacgcctccctcagccacccatatgtaccatcgatgtctacatgatcatggtcaagtgctggatgatagacgcagatagtcgcccaaagttccgtgagttgatcatcgaattctccaaaatggcccgagacccccagcgctaccttgtcattcagggggatgaaagaatgcatttgccaagtcctacagactccaacttctaccgtgccctgatggatgaagaagacatggacgacgtggtggatgccgacgagtacctcatcccacagcagggcttcttcagcagcccctccacgtcacggactcccctcctgagctctctgagtgcaaccagcaacaattccaccgtggcttgcattgatagaaatgggctgcaaagctgtcccatcaaggaagacagcttcttgcagcgatacagctcagaccccacaggcgccttgactgaggacagcatagacgacaccttcctcccagtgcctggtgagtggcttgtctggaaacagtcctgctcctcaacctcctcgacccactcagcagcagccagtctccagtgtccaagccaggtgctccctccagcatctccagagggggaaacagtggcagatttgcagacacagtga

SEQ ID NO: 652 - RNA, 216 nt, synthetic construct
  misc_feature 1..216: note = CAA34902
  source 1..216: mol_type = other RNA
atgcgaccctccgggacggccggggcagcgctcctggcgctgctggctgcgctctgcccggcgagtcgggctctggaggaaaagaaaggtaagggcgtgtctcgccggctcccgcgccgcccccggatcgcgccccggaccccgcagcccgcccaaccgcgcaccggcgcaccggctcgcgcccgcgcccccgcccgtcctttcctgtttccttga

SEQ ID NO: 653 - RNA, 720 nt, synthetic construct
  misc_feature 1..720: note = AAH10992
  source 1..720: mol_type = other RNA
atgcccctgggacacatcatgaggctggacctggagaaaattgccctggagtacatcgtgccctgtctgcacgaggtgggcttctgctacctggacaacttcctgggcgaggtggtgggcgactgcgtcctggagcgcgtcaagcagctgcactgcaccggggccctgcgggacggccagctggcggggccgcgcgccggcgtctccaagcgacacctgcggggcgaccagatcacgtggatcgggggcaacgaggagggctgcgaggccatcagcttcctcctgtccctcatcgacaggctggtcctctactgcgggagccggctgggcaaatactacgtcaaggagaggtctaaggcaatggtggcttgctatccgggaaatggaacaggttatgttcgccacgtggacaaccccaacggtgatggtcgctgcatcacctgcatctactatctgaacaagaattgggatgccaagctacatggtgggatcctgcggatatttccagaggggaaatcattcatagcagatgtggagcccatttttgacagactcctgttcttctggtcagatcgtaggaacccacacgaagtgcagccctcttacgcaaccagatatgctatgactgtctggtactttgatgctgaagaaagggcagaagccaaaaagaaattcaggaatttaactaggaaaactgaatctgccctcactgaagactga

SEQ ID NO: 654 - RNA, 1566 nt, synthetic construct
  misc_feature 1..1566: note = BAH13456
  source 1..1566: mol_type = other RNA
atggcgacgtctctgcatgagggacccacgaaccagctggatctgctcatccgggccgtggaagcatcagttcacagcagtaatgcacactgtacagataagacaattgaagctgctgaagccctgcttcatatggaatctcctacctgcttgagggattcaagaagtcctgaattcatccatgctgctatgaggccagatgtcattacagaaactgtagtggaggtgtcaactgaagagtctgaacccatggatacctctcctattccaacatcaccagatagccatgaaccaatgaaaaagaaaaaagttggccgtaaaccaaagacccagcaatcaccaatttccaatgggtctcctgagttaggtataaagaagaaaccaagagaaggaaaaggaaacacaacctatttgtgggagtttcttttagatctacttcaagataaaaatacttgtcccaggtatattaaatggactcagagagaaaaaggcatattcaagctggtggattcaaaggctgtctctaagctttggggaaagcataagaacaaaccagacatgaactatgaaaccatgggacgagctttgagatactactaccaaaggggaattcttgcaaaggttgaaggacagaggcttgtatatcagttcaaggatatgccgaaaaacatagtggtcatagatgatgacaaaagtgaaacctgtaatgaagatttagcaggaactactgatgaaaaatcattagaacgagtgtcactgtctgcagaaagtctcctgaaagcagcatcctctgttcgcagtggaaaaaattcatcccctataaactgctccagagcagagaagggtgtagctagagttgtgaatatcacttcccctgggcacgatgcttcatccaggtctcctactaccactgcatctgtgtcagcaacagcagctccaaggacagttcgtgtggcaatgcaggtacctgttgtaatgacatcattgggtcagaaaatttcaactgtggcagttcagtcagttaatgcaggtgcaccattaataaccagcactagtccaacaacagcgacctctccaaaggtagtcattcagacaatccctactgtgatgccagcttctactgaaaatggagacaaaatcaccatgcagcctgccaaaattattaccatcccagctacacagcttgcacagtgtcaactgcagacaaagtcaaatctgactggatcaggaagcattaacattgttggaaccccattggctgtgagagcacttacccctgtttcaatagcccatggtacacctgtaatgagactatcaatgcctactcagcaggcatctggccagactcctcctcgagttatcagtgcagtcataaaggggccagaggttaaatcggaagcagtggcaaaaaagcaagaacatgatgtgaaaactttgcagctagtagaagaaaaaccagcagatggaaataagacagtgacccacgtagtggttgtcagtgcgccttcagctattgcccttcctgtaactatgaaaacagaaggactagtgacatgtgagaaataa

SEQ ID NO: 655 - RNA, 810 nt, synthetic construct
  misc_feature 1..810: note = BAC67168
  source 1..810: mol_type = other RNA
atggcggctgcgctgttcgtgctgctgggattcgcgctgctgggcacccacggagcctccggggctgccggcacagtcttcactaccgtagaagaccttggctccaagatactcctcacctgctccttgaatgacagcgccacagaggtcacagggcaccgctggctgaaggggggcgtggtgctgaaggaggacgcgctgcccggccagaaaacggagttcaaggtggactccgacgaccagtggggagagtactcctgcgtcttcctccccgagcccatgggcacggccaacatccagctccacgggcctcccagagtgaaggctgtgaagtcgtcagaacacatcaacgagggggagacggccatgctggtctgcaagtcagagtccgtgccacctgtcactgactgggcctggtacaagatcactgactctgaggacaaggccctcatgaacggctccgagagcaggttcttcgtgagttcctcgcagggccggtcagagctacacattgagaacctgaacatggaggccgaccccggccagtaccggtgcaacggcaccagctccaagggctccgaccaggccatcatcacgctccgcgtgcgcagccacctggccgccctctggcccttcctgggcatcgtggctgaggtgctggtgctggtcaccatcatcttcatctacgagaagcgccggaagcccgaggacgtcctggatgatgacgacgccggctctgcacccctgaagagcagcgggcagcaccagaatgacaaaggcaagaacgtccgccagaggaactcttcctga

SEQ ID NO: 656 - RNA, 945 nt, synthetic construct
  misc_feature 1..945: note = AAA35723
  source 1..945: mol_type = other RNA
atggcgcccccgcaggtcctcgcgttcgggcttctgcttgccgcggcgacggcgacttttgccgcagctcaggaagaatgtgtctgtgaaaactacaagctggccgtaaactgctttgtgaataataatcgtcaatgccagtgtacttcagttggtgcacaaaatactgtcatttgctcaaagctggctgccaaatgtttggtgatgaaggcagaaatgaatggctcaaaacttgggagaagagcaaaacctgaaggggccctccagaacaatgatgggctttatgatcctgactgcgatgagagcgggctctttaaggccaagcagtgcaacggcacctccatgtgctggtgtgtgaacactgctggggtcagaagaacagacaaggacactgaaataacctgctctgagcgagtgagaacctactggatcatcattgaactaaaacacaaagcaagagaaaaaccttatgatagtaaaagtttgcggactgcacttcagaaggagatcacaacgcgttatcaactggatccaaaatttatcacgagtattttgtatgagaataatgttatcactattgatctggttcaaaattcttctcaaaaaactcagaatgatgtggacatagctgatgtggcttattattttgaaaaagatgttaaaggtgaatccttgtttcattctaagaaaatggacctgacagtaaatggggaacaactggatctggatcctggtcaaactttaatttattatgttgatgaaaaagcacctgaattctcaatgcagggtctaaaagctggtgttattgctgttattgtggttgtggtgatagcagttgttgctggaattgttgtgctggttatttccagaaagaagagaatggcaaagtatgagaaggctgagataaaggagatgggtgagatgcatagggaactcaatgcataa

SEQ ID NO: 657 - RNA, 2931 nt, synthetic construct
  misc_feature 1..2931: note = CCDS169.1
  source 1..2931: mol_type = other RNA
atggagctccaggcagcccgcgcctgcttcgccctgctgtggggctgtgcgctggccgcggccgcggcggcgcagggcaaggaagtggtactgctggactttgctgcagctggaggggagctcggctggctcacacacccgtatggcaaagggtgggacctgatgcagaacatcatgaatgacatgccgatctacatgtactccgtgtgcaacgtgatgtctggcgaccaggacaactggctccgcaccaactgggtgtaccgaggagaggctgagcgtatcttcattgagctcaagtttactgtacgtgactgcaacagcttccctggtggcgccagctcctgcaaggagactttcaacctctactatgccgagtcggacctggactacggcaccaacttccagaagcgcctgttcaccaagattgacaccattgcgcccgatgagatcaccgtcagcagcgacttcgaggcacgccacgtgaagctgaacgtggaggagcgctccgtggggccgctcacccgcaaaggcttctacctggccttccaggatatcggtgcctgtgtggcgctgctctccgtccgtgtctactacaagaagtgccccgagctgctgcagggcctggcccacttccctgagaccatcgccggctctgatgcaccttccctggccactgtggccggcacctgtgtggaccatgccgtggtgccaccggggggtgaagagccccgtatgcactgtgcagtggatggcgagtggctggtgcccattgggcagtgcctgtgccaggcaggctacgagaaggtggaggatgcctgccaggcctgctcgcctggattttttaagtttgaggcatctgagagcccctgcttggagtgccctgagcacacgctgccatcccctgagggtgccacctcctgcgagtgtgaggaaggcttcttccgggcacctcaggacccagcgtcgatgccttgcacacgacccccctccgccccacactacctcacagccgtgggcatgggtgccaaggtggagctgcgctggacgccccctcaggacagcgggggccgcgaggacattgtctacagcgtcacctgcgaacagtgctggcccgagtctggggaatgcgggccgtgtgaggccagtgtgcgctactcggagcctcctcacggactgacccgcaccagtgtgacagtgagcgacctggagccccacatgaactacaccttcaccgtggaggcccgcaatggcgtctcaggcctggtaaccagccgcagcttccgtactgccagtgtcagcatcaaccagacagagccccccaaggtgaggctggagggccgcagcaccacctcgcttagcgtctcctggagcatccccccgccgcagcagagccgagtgtggaagtacgaggtcacttaccgcaagaagggagactccaacagctacaatgtgcgccgcaccgagggtttctccgtgaccctggacgacctggccccagacaccacctacctggtccaggtgcaggcactgacgcaggagggccagggggccggcagcaaggtgcacgaattccagacgctgtccccggagggatctggcaacttggcggtgattggcggcgtggctgtcggtgtggtcctgcttctggtgctggcaggagttggcttctttatccaccgcaggaggaagaaccagcgtgcccgccagtccccggaggacgtttacttctccaagtcagaacaactgaagcccctgaagacatacgtggacccccacacatatgaggaccccaaccaggctgtgttgaagttcactaccgagatccatccatcctgtgtcactcggcagaaggtgatcggagcaggagagtttggggaggtgtacaagggcatgctgaagacatcctcggggaagaaggaggtgccggtggccatcaagacgctgaaagccggctacacagagaagcagcgagtggacttcctcggcgaggccggcatcatgggccagttcagccaccacaacatcatccgcctagagggcgtcatctccaaatacaagcccatgatgatcatcactgagtacatggagaatggggccctggacaagttccttcgggagaaggatggcgagttcagcgtgctgcagctggtgggcatgctgcggggcatcgcagctggcatgaagtacctggccaacatgaactatgtgcaccgtgacctggctgcccgcaacatcctcgtcaacagcaacctggtctgcaaggtgtctgactttggcctgtcccgcgtgctggaggacgaccccgaggccacctacaccaccagtggcggcaagatccccatccgctggaccgccccggaggccatttcctaccggaagttcacctctgccagcgacgtgtggagctttggcattgtcatgtgggaggtgatgacctatggcgagcggccctactgggagttgtccaaccacgaggtgatgaaagccatcaatgatggcttccggctccccacacccatggactgcccctccgccatctaccagctcatgatgcagtgctggcagcaggagcgtgcccgccgccccaagttcgctgacatcgtcagcatcctggacaagctcattcgtgcccctgactccctcaagaccctggctgactttgacccccgcgtgtctatccggctccccagcacgagcggctcggagggggtgcccttccgcacggtgtccgagtggctggagtccatcaagatgcagcagtatacggagcacttcatggcggccggctacactgccatcgagaaggtggtgcagatgaccaacgacgacatcaagaggattggggtgcggctgcccggccaccagaagcgcatcgcctacagcctgctgggactcaaggaccaggtgaacactgtggggatccccatctga

SEQ ID NO: 658 - RNA, 2952 nt, synthetic construct
  misc_feature 1..2952: note = AAG43576
  source 1..2952: mol_type = other RNA
atggattgtcagctctccatcctcctccttctcagctgctctgttctcgacagcttcggggaactgattccgcagccttccaatgaagtcaatctactggattcaaaaacaattcaaggggagctgggctggatctcttatccatcacatgggtgggaagagatcagtggtgtggatgaacattacacacccatcaggacttaccaggtgtgcaatgtcatggaccacagtcaaaacaattggctgagaacaaactgggtccccaggaactcagctcagaagatttatgtggagctcaagttcactctacgagactgcaatagcattccattggttttaggaacttgcaaggagacattcaacctgtactacatggagtctgatgatgatcatggggtgaaatttcgagagcatcagtttacaaagattgacaccattgcagctgatgaaagtttcactcaaatggatcttggggaccgtattctgaagctcaacactgagattagagaagtaggtcctgtcaacaagaagggattttatttggcatttcaagatgttggtgcttgtgttgccttggtgtctgtgagagtatacttcaaaaagtgcccatttacagtgaagaatctggctatgtttccagacacggtacccatggactcccagtccctggtggaggttagagggtcttgtgtcaacaattctaaggaggaagatcctccaaggatgtactgcagtacagaaggcgaatggcttgtacccattggcaagtgttcctgcaatgctggctatgaagaaagaggttttatgtgccaagcttgtcgaccaggtttctacaaggcattggatggtaatatgaagtgtgctaagtgcccgcctcacagttctactcaggaagatggttcaatgaactgcaggtgtgagaataattacttccgggcagacaaagaccctccatccatggcttgtacccgacctccatcttcaccaagaaatgttatctctaatataaacgagacctcagttatcctggactggagttggcccctggacacaggaggccggaaagatgttaccttcaacatcatatgtaaaaaatgtgggtggaatataaaacagtgtgagccatgcagcccaaatgtccgcttcctccctcgacagtttggactcaccaacaccacggtgacagtgacagaccttctggcacatactaactacacctttgagattgatgccgttaatggggtgtcagagctgagctccccaccaagacagtttgctgcggtcagcatcacaactaatcaggctgctccatcacctgtcctgacgattaagaaagatcggacctccagaaatagcatctctttgtcctggcaagaacctgaacatcctaatgggatcatattggactacgaggtcaaatactatgaaaagcaggaacaagaaacaagttataccattctgagggcaagaggcacaaatgttaccatcagtagcctcaagcctgacactatatacgtattccaaatccgagcccgaacagccgctggatatgggacgaacagccgcaagtttgagtttgaaactagtccagactctttctccatctctggtgaaagtagccaagtggtcatgatcgccatttcagcggcagtagcaattattctcctcactgttgtcatctatgttttgattgggaggttctgtggctataagtcaaaacatggggcagatgaaaaaagacttcattttggcaatgggcatttaaaacttccaggtctcaggacttatgttgacccacatacatatgaagaccctacccaagctgttcatgagtttgccaaggaattggatgccaccaacatatccattgataaagttgttggagcaggtgaatttggagaggtgtgcagtggtcgcttaaaacttccttcaaaaaaagagatttcagtggccattaagaccctgaaagttggctacacagaaaagcagaggagagacttcctgggagaagcaagcattatgggacagtttgaccaccccaatatcattcgactggaaggagttgttaccaaaagtaagccagttatgattgtcacagaatacatggagaatggttccttggatagtttcctacgtaaacacgatgcccagtttactgtcattcagctagtggggatgcttcgagggatagcatctggcatgaagtacctgtcagacatgggctatgttcaccgagacctcgctgctcggaacatcttgatcaacagtaacttggtgtgtaaggtttctgatttcggactttcgcgtgtcctggaggatgacccagaagctgcttatacaacaagaggagggaagatcccaatcaggtggacatcaccagaagctatagcctaccgcaagttcacgtcagccagcgatgtatggagttatgggattgttctctgggaggtgatgtcttatggagagagaccatactgggagatgtccaatcaggatgtaattaaagctgtagatgagggctatcgactgccaccccccatggactgcccagctgccttgtatcagctgatgctggactgctggcagaaagacaggaacaacagacccaagtttgagcagattgttagtattctggacaagcttatccggaatcccggcagcctgaagatcatcaccagtgcagccgcaaggccatcaaaccttcttctggaccaaagcaatgtggatatcactaccttccgcacaacaggtgactggcttaatggtgtctggacagcacactgcaaggaaatcttcacgggtgtggagtacagttcttgtgacacaatagccaagatttccacagatgacatgaaaaaggttggtgtcaccgtggttgggccacagaagaagatcatcagtagcattaaagctctagaaacgcaatcaaagaatggcccagttcccgtgtaa

SEQ ID NO: 659 - RNA, 2952 nt, synthetic construct
  misc_feature 1..2952: note = AAH63282
  source 1..2952: mol_type = other RNA
atggattgtcagctctccatcctcctccttctcagctgctctgttctcgacagcttcggggaactgattccgcagccttccaatgaagtcaatctactggattcaaaaacaattcaaggggagctgggctggatctcttatccatcacatgggtgggaagagatcagtggtgtggatgaacattacacacccatcaggacttaccaggtgtgcaatgtcatggaccacagtcaaaacaattggctgagaacaaactgggtccccaggaactcagctcagaagatttatgtggagctcaagttcactctacgagactgcaatagcattccattggttttaggaacttgcaaggagacattcaacctgtactacatggagtctgatgatgatcatggggtgaaatttcgagagcatcagtttacaaagattgacaccattgcagctgatgaaagtttcactcaaatggatcttggggaccgtattctgaagctcaacactgagattagagaagtaggtcctgtcaacaagaagggattttatttggcatttcaagatgttggtgcttgtgttgccttggtgtctgtgagagtatacttcaaaaagtgcccatttacagtgaagaatctggctatgtttccagacacggtacccatggactcccagtccctggtggaggttagagggtcttgtgtcaacaattctaaggaggaagatcctccaaggatgtactgcagtacagaaggcgaatggcttgtacccattggcaagtgttcctgcaatgctggctatgaagaaagaggttttatgtgccaagcttgtcgaccaggtttctacaaggcattggatggtaatatgaagtgtgctaagtgcccgcctcacagttctactcaggaagatggttcaatgaactgcaggtgtgagaataattacttccgggcagacaaagaccctccatccatggcttgtacccgacctccatcttcaccaagaaatgttatctctaatataaacgagacctcagttatcctggactggagttggcccctggacacaggaggccggaaagatgttaccttcaacatcatatgtaaaaaatgtgggtggaatataaaacagtgtgagccatgcagcccaaatgtccgcttcctccctcgacagtttggactcaccaacaccacggtgacagtgacagaccttctggcacatactaactacacctttgagattgatgccgttaatggggtgtcagagctgagctccccaccaagacagtttgctgcggtcagcatcacaactaatcaggctgctccatcacctgtcctgacgattaagaaagatcggacctccagaaatagcatctctttgtcctggcaagaacctgaacatcctaatgggatcatattggactacgaggtcaaatactatgaaaagcaggaacaagaaacaagttataccattctgagggcaagaggcacaaatgttaccatcagtagcctcaagcctgacactatatacgtattccaaatccgagcccgaacagccgctggatatgggacgaacagccgcaagtttgagtttgaaactagtccagactctttctccatctctggtgaaagtagccaagtggtcatgatcgccatttcagcggcagtagcaattattctcctcactgttgtcatctatgttttgattgggaggttctgtggctataagtcaaaacatggggcagatgaaaaaagacttcattttggcaatgggcatttaaaacttccaggtctcaggacttatgttgacccacatacatatgaagaccctacccaaactgttcatgagtttgccaaggaattggatgccaccaacatatccattgataaagttgttggagcaggtgaatttggagaggtgtgcagtggtcgcttaaaacttccttcaaaaaaagagatttcagtggccattaagaccctgaaagttggctacacagaaaagcagaggagagacttcctgggagaagcaagcattatgggacagtttgaccaccccaatatcattcgactggaaggagttgttaccaaaagtaagccagttatgattgtcacagaatacatggagaatggttccttggatagtttcctacgtaaacacgatgcccagtttactgtcattcagctagtggggatgcttcgagggatagcatctggcatgaagtacctgtcagacatgggctatgttcaccgagacctcgctgctcggaacatcttgatcaacagtaacttggtgtgtaaggtttctgatttcggactttcgcgtgtcctggaggatgacccagaagctgcttatacaacaagaggagggaagatcccaatcaggtggacatcaccagaagctatagcctaccgcaagttcacgtcagccagcgatgtatggagttatgggattgttctctgggaggtgatgtcttatggagagagaccatactgggagatgtccaatcaggatgtaattaaagctgtagatgagggctatcgactgccaccccccatggactgcccagctgccttgtatcagctgatgctggactgctggcagaaagacaggaacaacagacccaagtttgagcagattgttagtattctggacaagcttatccggaatcccggcagcctgaagatcatcaccagtgcagccgcaaggccatcaaaccttcttctggaccaaagcaatgtggatatcactaccttccgcacaacaggtgactggcttaatggtgtctggacagcacactgcaaggaaatcttcacgggtgtggagtacagttcttgtgacacaatagccaagatttccacagatgacatgaaaaaggttggtgtcaccgtggttgggccacagaagaagatcatcagtagcattaaagctctagaaacgcaatcaaagaatggcccagttcccgtgtaa

SEQ ID NO: 660 - RNA, 1389 nt, synthetic construct
  misc_feature 1..1389: note = BAG54127
  source 1..1389: mol_type = other RNA
atgcccatgtctactattttgccagtgactagtccatgtcttcctgcaacaggtgtgacagtttgggagttgatgaccttcggggcagagccctatgcagggctacgattggctgaagtaccagacctgctagagaagggggagcggttggcacagccccagatctgcacaattgatgtctacatggtgatggtcaagtgttggatgattgatgagaacattcgcccaacctttaaagaactagccaatgagttcaccaggatggcccgagacccaccacggtatctggtcataaagagagagagtgggcctggaatagcccctgggccagagccccatggtctgacaaacaagaagctagaggaagtagagctggagccagaactagacctagacctagacttggaagcagaggaggacaacctggcaaccaccacactgggctccgccctcagcctaccagttggaacacttaatcggccacgtgggagccagagccttttaagtccatcatctggatacatgcccatgaaccagggtaatcttggggagtcttgccaggagtctgcagtttctgggagcagtgaacggtgcccccgtccagtctctctacacccaatgccacggggatgcctggcatcagagtcatcagaggggcatgtaacaggctctgaggctgagctccaggagaaagtgtcaatgtgtagaagccggagcaggagccggagcccacggccacgcggagatagcgcctaccattcccagcgccacagtctgctgactcctgttaccccactctccccacccgggttagaggaagaggatgtcaacggttatgtcatgccagatacacacctcaaaggtactccctcctcccgggaaggcaccctttcttcagtgggtctcagttctgtcctgggtactgaagaagaagatgaagatgaggagtatgaatacatgaaccggaggagaaggcacagtccacctcatccccctaggccaagttcccttgaggagctgggttatgagtacatggatgtggggtcagacctcagtgcctctctgggcagcacacagagttgcccactccaccctgtacccatcatgcccactgcaggcacaactccagatgaagactatgaatatatgaatcggcaacgagatggaggtggtcctgggggtgattatgcagccatgggggcctgcccagcatctgagcaagggtatgaagagatgagagcttttcaggggcctggacatcaggccccccatgtccattatgcccgcctaaaaactctacgtagcttagaggctacagactctgcctttgataaccctgattactggcatagcaggcttttccccaaggctaatgcccagagaacgtaa

SEQ ID NO: 661 - RNA, 2766 nt, synthetic construct
  misc_feature 1..2766: note = BAG57868
  source 1..2766: mol_type = other RNA
atgagggcgaacgacgctctgcaggtgctgggcttgcttttcagcctggcccggggctccgaggtgggcaactctcaggcagtgtgtcctgggactctgaatggcctgagtgtgaccggcgatgctgagaaccaataccagacactgtacaagctctacgagaggtgtgaggtggtgatggggaaccttgagattgtgctcacgggacacaatgccgacctctccttcctgcagtggattcgagaagtgacaggctatgtcctcgtggccatgaatgaattctctactctaccattgcccaacctccgcgtggtgcgagggacccaggtctacgatgggaagtttgccatcttcgtcatgttgaactataacaccaactccagccacgctctgcgccagctccgcttgactcagctcaccgagattctgtcagggggtgtttatattgagaagaacgataagctttgtcacatggacacaattgactggagggacatcgtgagggaccgagatgctgagatagtggtgaaggacaatggcagaagctgtcccccctgtcatgaggtttgcaaggggcgatgctggggtcctggatcagaagactgccagacattgaccaagaccatctgtgctcctcagtgtaatggtcactgctttgggcccaaccccaaccagtgctgccatgatgagtgtgccgggggctgctcaggccctcaggacacagactgctttgcctgccggcacttcaatgacagtggagcctgtgtacctcgctgtccacagcctcttgtctacaacaagctaactttccagctggaacccaatccccacaccaagtatcagtatggaggagtttgtgtagccagctgtccccataactttgtggtggatcaaacatcctgtgtcagggcctgtcctcctgacaagatggaagtagataaaaatgggctcaagatgtgtgagccttgtgggggactatgtcccaaagcctgtgagggaacaggctctgggagccgcttccagactgtggactcgagcaacattgatggatttgtgaactgcaccaagatcctgggcaacctggactttctgatcaccggcctcaatggagacccctggcacaagatccctgccctggacccagagaagctcaatgtcttccggacagtacgggagatcacaggttacctgaacatccagtcctggccgccccacatgcacaacttcagtgttttttccaatttgacaaccattggaggcagaagcctctacaaccggggcttctcattgttgatcatgaagaacttgaatgtcacatctctgggcttccgatccctgaaggaaattagtgctgggcgtatctatataagtgccaataggcagctctgctaccaccactctttgaactggaccaaggtgcttcgggggcctacggaagagcgactagacatcaagcataatcggccgcgcagagactgcgtggcagagggcaaagtgtgtgacccactgtgctcctctgggggatgctggggcccaggccctggtcagtgcttgtcctgtcgaaattatagccgaggaggtgtctgtgtgacccactgcaactttctgaatggggagcctcgagaatttgcccatgaggccgaatgcttctcctgccacccggaatgccaacccatggagggcactgccacatgcaatggctcgggctctgatacttgtgctcaatgtgcccattttcgagatgggccccactgtgtgagcagctgcccccatggagtcctaggtgccaagggcccaatctacaagtacccagatgttcagaatgaatgtcggccctgccatgagaactgcacccaggggtgtaaaggaccagagcttcaagactgtttaggacaaacactggtgctgatcggcaaaacccatctgacaatggctttgacagtgatagcaggattggtagtgattttcatgatgctgggcggcacttttctctactggcgtgggcgccggattcagaataaaagggctatgaggcgatacttggaacggggtgagagcatagagcctctggaccccagtgagaaggctaacaaagtcttggccagaatcttcaaagagacagagctaaggaagcttaaagtgcttggctcgggtgtctttggaactgtgcacaaaggagtgtggatccctgagggtgaatcaatcaagattccagtctgcattaaagtcattgaggacaagagtggacggcagagttttcaagctgtgacagatcatatgctggccattggcagcctggaccatgcccacattgtaaggctgctgggactatgcccagggtcatctctgcagcttgtcactcaatatttgcctctgggttctctgctggatcatgtgagacaacaccggggggcactggggccacagctgctgctcaactggggagtacaaattgccaagggaatgtactaccttgaggaacatggtatggtgcatagaaacctggctgcccgaaacgtgctactcaagtcacccagtcaggttcaggtggcagattttggtgtggctgacctgctgcctcctgatgataagcagctgctatacagtgaggccaagactccaattaagtggatggcccttgagagtatccactttgggaaatacacacaccagagtgatgtctggagctatggtcagtgcatctggatgccctctctaccatcactggccccagtttcaaatttaccttttgagaccccctcttag

SEQ ID NO: 662 - RNA, 3927 nt, synthetic construct
  misc_feature 1..3927: note = AAB59446
  source 1..3927: mol_type = other RNA
atgaagccggcgacaggactttgggtctgggtgagccttctcgtggcggcggggaccgtccagcccagcgattctcagtcagtgtgtgcaggaacggagaataaactgagctctctctctgacctggaacagcagtaccgagccttgcgcaagtactatgaaaactgtgaggttgtcatgggcaacctggagataaccagcattgagcacaaccgggacctctccttcctgcggtctgttcgagaagtcacaggctacgtgttagtggctcttaatcagtttcgttacctgcctctggagaatttacgcattattcgtgggacaaaactttatgaggatcgatatgccttggcaatatttttaaactacagaaaagatggaaactttggacttcaagaacttggattaaagaacttgacagaaatcctaaatggtggagtctatgtagaccagaacaaattcctttgttatgcagacaccattcattggcaagatattgttcggaacccatggccttccaacttgactcttgtgtcaacaaatggtagttcaggatgtggacgttgccataagtcctgtactggccgttgctggggacccacagaaaatcattgccagactttgacaaggacggtgtgtgcagaacaatgtgacggcagatgctacggaccttacgtcagtgactgctgccatcgagaatgtgctggaggctgctcaggacctaaggacacagactgctttgcctgcatgaatttcaatgacagtggagcatgtgttactcagtgtccccaaacctttgtctacaatccaaccacctttcaactggagcacaatttcaatgcaaagtacacatatggagcattctgtgtcaagaaatgtccacataactttgtggtagattccagttcttgtgtgcgtgcctgccctagttccaagatggaagtagaagaaaatgggattaaaatgtgtaaaccttgcactgacatttgcccaaaagcttgtgatggcattggcacaggatcattgatgtcagctcagactgtggattccagtaacattgacaaattcataaactgtaccaagatcaatgggaatttgatctttctagtcactggtattcatggggacccttacaatgcaattgaagccatagacccagagaaactgaacgtctttcggacagtcagagagataacaggtttcctgaacatacagtcatggccaccaaacatgactgacttcagtgttttttctaacctggtgaccattggtggaagagtactctatagtggcctgtccttgcttatcctcaagcaacagggcatcacctctctacagttccagtccctgaaggaaatcagcgcaggaaacatctatattactgacaacagcaacctgtgttattatcataccattaactggacaacactcttcagcacaatcaaccagagaatagtaatccgggacaacagaaaagctgaaaattgtactgctgaaggaatggtgtgcaaccatctgtgttccagtgatggctgttggggacctgggccagaccaatgtctgtcgtgtcgccgcttcagtagaggaaggatctgcatagagtcttgtaacctctatgatggtgaatttcgggagtttgagaatggctccatctgtgtggagtgtgacccccagtgtgagaagatggaagatggcctcctcacatgccatggaccgggtcctgacaactgtacaaagtgctctcattttaaagatggcccaaactgtgtggaaaaatgtccagatggcttacagggggcaaacagtttcattttcaagtatgctgatccagatcgggagtgccacccatgccatccaaactgcacccaagggtgtaacggtcccactagtcatgactgcatttactacccatggacgggccattccactttaccacaacatgctagaactcccctgattgcagctggagtaattggtgggctcttcattctggtcattgtgggtctgacatttgctgtttatgttagaaggaagagcatcaaaaagaaaagagccttgagaagattcttggaaacagagttggtggaaccattaactcccagtggcacagcacccaatcaagctcaacttcgtattttgaaagaaactgagctgaagagggtaaaagtccttggctcaggtgcttttggaacggtttataaaggtatttgggtacctgaaggagaaactgtgaagattcctgtggctattaagattcttaatgagacaactggtcccaaggcaaatgtggagttcatggatgaagctctgatcatggcaagtatggatcatccacacctagtccggttgctgggtgtgtgtctgagcccaaccatccagctggttactcaacttatgccccatggctgcctgttggagtatgtccacgagcacaaggataacattggatcacaactgctgcttaactggtgtgtccagatagctaagggaatgatgtacctggaagaaagacgactcgttcatcgggatttggcagcccgtaatgtcttagtgaaatctccaaaccatgtgaaaatcacagattttgggctagccagactcttggaaggagatgaaaaagagtacaatgctgatggaggaaagatgccaattaaatggatggctctggagtgtatacattacaggaaattcacccatcagagtgacgtttggagctatggagttactatatgggaactgatgacctttggaggaaaaccctatgatggaattccaacgcgagaaatccctgatttattagagaaaggagaacgtttgcctcagcctcccatctgcactattgacgtttacatggtcatggtcaaatgttggatgattgatgctgacagtagacctaaatttaaggaactggctgctgagttttcaaggatggctcgagaccctcaaagatacctagttattcagggtgatgatcgtatgaagcttcccagtccaaatgacagcaagttctttcagaatctcttggatgaagaggatttggaagatatgatggatgctgaggagtacttggtccctcaggctttcaacatcccacctcccatctatacttccagagcaagaattgactcgaataggagtgaaattggacacagccctcctcctgcctacacccccatgtcaggaaaccagtttgtataccgagatggaggttttgctgctgaacaaggagtgtctgtgccctacagagccccaactagcacaattccagaagctcctgtggcacagggtgctactgctgagatttttgatgactcctgctgtaatggcaccctacgcaagccagtggcaccccatgtccaagaggacagtagcacccagaggtacagtgctgaccccaccgtgtttgccccagaacggagcccacgaggagagctggatgaggaaggttacatgactcctatgcgagacaaacccaaacaagaatacctgaatccagtggaggagaacccttttgtttctcggagaaaaaatggagaccttcaagcattggataatcccgaatatcacaatgcatccaatggtccacccaaggccgaggatgagtatgtgaatgagccactgtacctcaacacctttgccaacaccttgggaaaagctgagtacctgaagaacaacatactgtcaatgccagagaaggccaagaaagcgtttgacaaccctgactactggaaccacagcctgccacctcggagcacccttcagcacccagactacctgcaggagtacagcacaaaatatttttataaacagaatgggcggatccggcctattgtggcagagaatcctgaatacctctctgagttctccctgaagccaggcactgtgctgccgcctccaccttacagacaccggaatactgtggtgtaa

SEQ ID NO: 663 - RNA, 1461 nt, synthetic construct
  misc_feature 1..1461: note = CCDS46648.1
  source 1..1461: mol_type = other RNA
atgattcagactgtcccggacccagcagctcatatcaaggaagccttatcagttgtgagtgaggaccagtcgttgtttgagtgtgcctacggaacgccacacctggctaagacagagatgaccgcgtcctcctccagcgactatggacagacttccaagatgagcccacgcgtccctcagcaggattggctgtctcaacccccagccagggtcaccatcaaaatggaatgtaaccctagccaggtgaatggctcaaggaactctcctgatgaatgcagtgtggccaaaggcgggaagatggtgggcagcccagacaccgttgggatgaactacggcagctacatggaggagaagcacatgccacccccaaacatgaccacgaacgagcgcagagttatcgtgccagcagatcctacgctatggagtacagaccatgtgcggcagtggctggagtgggcggtgaaagaatatggccttccagacgtcaacatcttgttattccagaacatcgatgggaaggaactgtgcaagatgaccaaggacgacttccagaggctcacccccagctacaacgccgacatccttctctcacatctccactacctcagagagactcctcttccacatttgacttcagatgatgttgataaagccttacaaaactctccacggttaatgcatgctagaaacacagggggtgcagcttttattttcccaaatacttcagtatatcctgaagctacgcaaagaattacaactaggccagatttaccatatgagccccccaggagatcagcctggaccggtcacggccaccccacgccccagtcgaaagctgctcaaccatctccttccacagtgcccaaaactgaagaccagcgtcctcagttagatccttatcagattcttggaccaacaagtagccgccttgcaaatccaggcagtggccagatccagctttggcagttcctcctggagctcctgtcggacagctccaactccagctgcatcacctgggaaggcaccaacggggagttcaagatgacggatcccgacgaggtggcccggcgctggggagagcggaagagcaaacccaacatgaactacgataagctcagccgcgccctccgttactactatgacaagaacatcatgaccaaggtccatgggaagcgctacgcctacaagttcgacttccacgggatcgcccaggccctccagccccaccccccggagtcatctctgtacaagtacccctcagacctcccgtacatgggctcctatcacgcccacccacagaagatgaactttgtggcgccccaccctccagccctccccgtgacatcttccagtttttttgctgccccaaacccatactggaattcaccaactgggggtatataccccaacactaggctccccaccagccatatgccttctcatctgggcacttactactaa

SEQ ID NO: 664 - RNA, 1359 nt, synthetic construct
  misc_feature 1..1359: note = AAA19786
  source 1..1359: mol_type = other RNA
atgtctgagactcctgctcagtgtagcattaagcaggaacgaatttcatatacacctccagagagcccagtgccgagttacgcttcctcgacgccacttcatgttccagtgcctcgagcgctcaggatggaggaagactcgatccgcctgcctgcgcacctgcgcttgcagccaatttactggagcagggatgacgtagcccagtggctcaagtgggctgaaaatgagttttctttaaggccaattgacagcaacacgtttgaaatgaatggcaaagctctcctgctgctgaccaaagaggactttcgctatcgatctcctcattcaggtgatgtgctctatgaactccttcagcatattctgaagcagaggaaacctcggattcttttttcaccattcttccaccctggaaactctatacacacacagccggaggtcatactgcatcagaaccatgaagaagataactgtgtccagaggacccccaggccatccgtggataatgtgcaccataaccctcccaccattgaactgttgcaccgctccaggtcacctatcacgacaaatcaccggccttctcctgaccccgagcagcggcccctccggtcccccctggacaacatgatccgccgcctctccccggctgagagagctcagggacccaggccgcaccaggagaacaaccaccaggagtcctaccctctgtcagtgtctcccatggagaataatcactgcccagcgtcctccgagtcccacccgaagccatccagcccccggcaggagagcacacgcgtgatccagctgatgcccagccccatcatgcaccctctgatcctgaacccccggcactccgtggatttcaaacagtccaggctctccgaggacgggctgcatagggaagggaagcccatcaacctctctcatcgggaagacctggcttacatgaaccacatcatggtctctgtctccccgcctgaagagcacgccatgcccattgggagaatagcagactgtagactgctttgggattacgtctatcagttgctttctgacagccggtacgaaaacttcatccgatgggaggacaaagaatccaaaatattccggatagtggatcccaacggactggctcgactgtggggaaaccataagaacagaacaaacatgacctatgagaaaatgtccagagccctgcgccactactacaaactaaacattatcaggaaggagccaggacaaaggcttttgttcaggtttatgaaaaccccagatgaaatcatgagtggccgaacagaccgtctggagcacctagagtcccaggagctggatgaacaaatataccaagaagatgaatgctga

SEQ ID NO: 665 - RNA, 1971 nt, synthetic construct
  misc_feature 1..1971: note = AAH04817
  source 1..1971: mol_type = other RNA
atggcgtccacggattacagtacctatagccaagctgcagcgcagcagggctacagtgcttacaccgcccagcccactcaaggatatgcacagaccacccaggcatatgggcaacaaagctatggaacctatggacagcccactgatgtcagctatacccaggctcagaccactgcaacctatgggcagaccgcctatgcaacttcttatggacagcctcccactggttatactactccaactgccccccaggcatacagccagcctgtccaggggtatggcactggtgcttatgataccaccactgctacagtcaccaccacccaggcctcctatgcagctcagtctgcatatggcactcagcctgcttatccagcctatgggcagcagccagcagccactgcacctacaagaccgcaggatggaaacaagcccactgagactagtcaacctcaatctagcacagggggttacaaccagcccagcctaggatatggacagagtaactacagttatccccaggtacctgggagctaccccatgcagccagtcactgcacctccatcctaccctcctaccagctattcctctacacagccgactagttatgatcagagcagttactctcagcagaacacctatgggcaaccgagcagctatggacagcagagtagctatggtcaacaaagcagctatgggcagcagcctcccactagttacccaccccaaactggatcctacagccaagctccaagtcaatatagccaacagagcagcagctacgggcagcagagttcattccgacaggaccaccccagtagcatgggtgtttatgggcaggagtctggaggattttccggaccaggagagaaccggagcatgagtggccctgataaccggggcaggggaagagggggatttgatcgtggaggcatgagcagaggtgggcggggaggaggacgcggtggaatgggcagcgctggagagcgaggtggcttcaataagcctggtggacccatggatgaaggaccagatcttgatctaggcccacctgtagatccagatgaagactctgacaacagtgcaatttatgtacaaggattaaatgacagtgtgactctagatgatctggcagacttctttaagcagtgtggggttgttaagatgaacaagagaactgggcaacccatgatccacatctacctggacaaggaaacaggaaagcccaaaggcgatgccacagtgtcctatgaagacccacccactgccaaggctgccgtggaatggtttgatgggaaagattttcaagggagcaaacttaaagtctcccttgctcggaagaagcctccaatgaacagtatgcggggtggtctgccaccccgtgagggcagaggcatgccaccaccactccgtggaggtccaggaggcccaggaggtcctgggggacccatgggtcgcatgggaggccgtggaggagatagaggaggcttccctccaagaggaccccggggttcccgagggaacccctctggaggaggaaacgtccagcaccgagctggagactggcagtgtcccaatccgggttgtggaaaccagaacttcgcctggagaacagagtgcaaccagtgtaaggccccaaagcctgaaggcttcctcccgccaccctttccgcccccgggtggtgatcgtggcagaggtggccctggtggcatgcggggaggaagaggtggcctcatggatcgtggtggtcccggtggaatgttcagaggtggccgtggtggagacagaggtggcttccgtggtggccggggcatggaccgaggtggctttggtggaggaagacgaggtggccctggggggccccctggacctttgatggaacagatgggaggaagaagaggaggacgtggaggacctggaaaaatggataaaggcgagcaccgtcaggagcgcagagatcggccctactag

SEQ ID NO: 666 - RNA, 1998 nt, synthetic construct
  misc_feature 1..1998: note = AEA07595
  source 1..1998: mol_type = other RNA
atgggccagactgggaagaaatctgagaagggaccagtttgttggcggaagcgtgtaaaatcagagtacatgcgactgagacagctcaagaggttcagacgagctgatgaagtaaagagtatgtttagttccaatcgtcagaaaattttggaaagaacggaaatcttaaaccaagaatggaaacagcgaaggatacagcctgtgcacatcctgacttctgtgagctcattgcgcgggactagggaggtggaagatgaaactgttttacataacattccttatatgggagatgaagttttagatcaggatggtactttcattgaagaactaataaaaaattatgatgggaaagtacacggggatagagaatgtgggtttataaatgatgaaatttttgtggagttggtgaatgcccttggtcaatataatgatgatgacgatgatgatgatggagacgatcctgaagaaagagaagaaaagcagaaagatctggaggatcaccgagatgataaagaaagccgcccacctcggaaatttccttctgataaaatttttgaagccatttcctcaatgtttccagataagggcacagcagaagaactaaaggaaaaatataaagaactcaccgaacagcagctcccaggcgcacttcctcctgaatgtacccccaacatagatggaccaaatgctaaatctgttcagagagagcaaagcttacactcctttcatacgcttttctgtaggcgatgttttaaatatgactgcttcctacatccttttcatgcaacacccaacacttataagcggaagaacacagaaacagctctagacaacaaaccttgtggaccacagtgttaccagcatttggagggagcaaaggagtttgctgctgctctcaccgctgagcggataaagaccccaccaaaacgtccaggaggccgcagaagaggacggcttcccaataacagtagcaggcccagcacccccaccattaatgtgctggaatcaaaggatacagacagtgatagggaagcagggactgaaacggggggagagaacaatgataaagaagaagaagagaagaaagatgaaacttcgagctcctctgaagcaaattctcggtgtcaaacaccaataaagatgaagccaaatattgaacctcctgagaatgtggagtggagtggtgctgaagcctcaatgtttagagtcctcattggcacttactatgacaatttctgtgccattgctaggttaattgggaccaaaacatgtagacaggtgtatgagtttagagtcaaagaatctagcatcatagctccagctcccgctgaggatgtggatactcctccaaggaaaaagaagaggaaacaccggttgtgggctgcacactgcagaaagatacagctgaaaaagggtcaaaaccgctttccgggatgccgctgcaaagcacagtgcaacaccaagcagtgcccgtgctacctggctgtccgagagtgtgaccctgacctctgtcttacttgtggagccgctgaccattgggacagtaaaaatgtgtcctgcaagaactgcagtattcagcggggctccaaaaagcatctattgctggcaccatctgacgtggcaggctgggggatttttatcaaagatcctgtgcagaaaaatgaattcatctcagaatactgtggagagattatttctcaagatgaagctgacagaagagggaaagtgtatgataaatacatgtgcagctttctgttcaacttgaacaatgattttgtggtggatgcaacccgcaagggtaacaaaattcgttttgcaaatcattcggtaaatccaaactgctatgcaaaagttatgatggttaacggtgatcacaggataggtatttttgccaagagagccatccagactggcgaagagctgttttttgattacagatacagccaggctgatgccctgaagtatgtcggcatcgaaagagaaatggaaatcccttga

SEQ ID NO: 667 - RNA, 1005 nt, synthetic construct
  misc_feature 1..1005: note = EAW80068
  source 1..1005: mol_type = other RNA
atgggccagactgggaagaaatctgagaagggaccagtttgttggcggaagcgtgtaaaatcagagtacatgcgactgagacagctcaagaggttcagacgagctgatgaagtaaagagtatgtttagttccaatcgtcagaaaattttggaaagaacggaaatcttaaaccaagaatggaaacagcgaaggatacagcctgtgcacatcctgacttctgtgagctcattgcgcgggactagggagtgttcggtgaccagtgacttggattttccaacacaagtcatcccattaaagactctgaatgcagttgcttcagtacccataatgtattcttggtctcccctacagcagaattttatggtggaagatgaaactgttttacataacattccttatatgggagatgaagttttagatcaggatggtactttcattgaagaactaataaaaaattatgatgggaaagtacacggggatagagaatgtgggtttataaatgatgaaatttttgtggagttggtgaatgcccttggtcaatataatgatgatgacgatgatgatgatggagacgatcctgaagaaagagaagaaaagcagaaagatctggaggatcaccgagatgataaagaaagccgcccacctcggaaatttccttctgataaaatttttgaagccatttcctcaatgtttccagataagggcacagcagaagaactaaaggaaaaatataaagaactcaccgaacagcagctcccaggcgcacttcctcctgaatgtacccccaacatagatggaccaaatgctaaatctgttcagagagagcaaagcttacactcctttcatacgcttttctgtaggcgatgttttaaatatgactgcttcctacatccttttcatgcaacacccaacacttataagcggaagaacacagaaacagctctagacaacaaaccttgtggaccacagtgttaccagcatttgccactcctacctaggaactaa

SEQ ID NO: 668 - RNA, 195 nt, synthetic construct
  misc_feature 1..195: note = CCO13726
  source 1..195: mol_type = other RNA
atgcccttggtcaatataatgatgatgacgatgatgatgatggagacgatcctgaagaaagagaagaaaagcagaaagatctggaggatcaccgagatgataaagaaagccgcccacctcggaaatttccttctgataaaatttttgaagccatttcctcaatgtttccagataagggcacagcagaagaactaa

SEQ ID NO: 669 - RNA, 2241 nt, synthetic construct
  misc_feature 1..2241: note = AAC51520
  source 1..2241: mol_type = other RNA
atgggccagactgggaagaaatctgagaagggaccagtttgttggcggaagcgtgtaaaatcagagtacatgcgactgagacagctcaagaggttcagacgagctgatgaagtaaagagtatgtttagttccaatcgtcagaaaattttggaaagaacggaaatcttaaaccaagaatggaaacagcgaaggatacagcctgtgcacatcctgacttctgtgagctcattgcgcgggactagggagtgttcggtgaccagtgacttggattttccaacacaagtcatcccattaaagactctgaatgcagttgcttcagtacccataatgtattcttggtctcccctacagcagaattttatggtggaagatgaaactgttttacataacattccttatatgggagatgaagttttagatcaggatggtactttcattgaagaactaataaaaaattatgatgggaaagtacacggggatagagaatgtgggtttataaatgatgaaatttttgtggagttggtgaatgcccttggtcaatataatgatgatgacgatgatgatgatggagacgatcctgaagaaagagaagaaaagcagaaagatctggaggatcaccgagatgataaagaaagccgcccacctcggaaatttccttctgataaaatttttgaagccatttcctcaatgtttccagataagggcacagcagaagaactaaaggaaaaatataaagaactcaccgaacagcagctcccaggcgcacttcctcctgaatgtacccccaacatagatggaccaaatgctaaatctgttcagagagagcaaagcttacactcctttcatacgcttttctgtaggcgatgttttaaatatgactgcttcctacatccttttcatgcaacacccaacacttataagcggaagaacacagaaacagctctagacaacaaaccttgtggaccacagtgttaccagcatttggagggagcaaaggagtttgctgctgctctcaccgctgagcggataaagaccccaccaaaacgtccaggaggccgcagaagaggacggcttcccaataacagtagcaggcccagcacccccaccattaatgtgctggaatcaaaggatacagacagtgatagggaagcagggactgaaacggggggagagaacaatgataaagaagaagaagagaagaaagatgaaacttcgagctcctctgaagcaaattctcggtgtcaaacaccaataaagatgaagccaaatattgaacctcctgagaatgtggagtggagtggtgctgaagcctcaatgtttagagtcctcattggcacttactatgacaatttctgtgccattgctaggttaattgggaccaaaacatgtagacaggtgtatgagtttagagtcaaagaatctagcatcatagctccagctcccgctgaggatgtggatactcctccaaggaaaaagaagaggaaacaccggttgtgggctgcacactgcagaaagatacagctgaaaaaggacggctcctctaaccatgtttacaactatcaaccctgtgatcatccacggcagccttgtgacagttcgtgcccttgtgtgatagcacaaaatttttgtgaaaagttttgtcaatgtagttcagagtgtcaaaaccgctttccgggatgccgctgcaaagcacagtgcaacaccaagcagtgcccgtgctacctggctgtccgagagtgtgaccctgacctctgtcttacttgtggagccgctgaccattgggacagtaaaaatgtgtcctgcaagaactgcagtattcagcggggctccaaaaagcatctattgctggcaccatctgacgtggcaggctgggggatttttatcaaagatcctgtgcagaaaaatgaattcatctcagaatactgtggagagattatttctcaagatgaagctgacagaagagggaaagtgtatgataaatacatgtgcagctttctgttcaacttgaacaatgattttgtggtggatgcaacccgcaagggtaacaaaattcgttttgcaaatcattcggtaaatccaaactgctatgcaaaagttatgatggttaacggtgatcacaggataggtatttttgccaagagagccatccagactggcgaagagctgttttttgattacagatacagccaggctgatgccctgaagtatgtcggcatcgaaagagaaatggaaatcccttga

SEQ ID NO: 670 - RNA, 2124 nt, synthetic construct
  misc_feature 1..2124: note = AEN79481
  source 1..2124: mol_type = other RNA
atgggccagactgggaagaaatctgagaagggaccagtttgttggcggaagcgtgtaaaatcagagtacatgcgactgagacagctcaagaggttcagacgagctgatgaagtaaagagtatgtttagttccaatcgtcagaaaattttggaaagaacggaaatcttaaaccaagaatggaaacagcgaaggatacagcctgtgcacatcctgacttctgtgagctcattgcgcgggactagggaggtggaagatgaaactgttttacataacattccttatatgggagatgaagttttagatcaggatggtactttcattgaagaactaataaaaaattatgatgggaaagtacacggggatagagaatgtgggtttataaatgatgaaatttttgtggagttggtgaatgcccttggtcaatataatgatgatgacgatgatgatgatggagacgatcctgaagaaagagaagaaaagcagaaagatctggaggatcaccgagatgataaagaaagccgcccacctcggaaatttccttctgataaaatttttgaagccatttcctcaatgtttccagataagggcacagcagaagaactaaaggaaaaatataaagaactcaccgaacagcagctcccaggcgcacttcctcctgaatgtacccccaacatagatggaccaaatgctaaatctgttcagagagagcaaagcttacactcctttcatacgcttttctgtaggcgatgttttaaatatgactgcttcctacatccttttcatgcaacacccaacacttataagcggaagaacacagaaacagctctagacaacaaaccttgtggaccacagtgttaccagcatttggagggagcaaaggagtttgctgctgctctcaccgctgagcggataaagaccccaccaaaacgtccaggaggccgcagaagaggacggcttcccaataacagtagcaggcccagcacccccaccattaatgtgctggaatcaaaggatacagacagtgatagggaagcagggactgaaacggggggagagaacaatgataaagaagaagaagagaagaaagatgaaacttcgagctcctctgaagcaaattctcggtgtcaaacaccaataaagatgaagccaaatattgaacctcctgagaatgtggagtggagtggtgctgaagcctcaatgtttagagtcctcattggcacttactatgacaatttctgtgccattgctaggttaattgggaccaaaacatgtagacaggtgtatgagtttagagtcaaagaatctagcatcatagctccagctcccgctgaggatgtggatactcctccaaggaaaaagaagaggaaacaccggttgtgggctgcacactgcagaaagatacagctgaaaaaggacggctcctctaaccatgtttacaactatcaaccctgtgatcatccacggcagccttgtgacagttcgtgcccttgtgtgatagcacaaaatttttgtgaaaagttttgtcaatgtagttcagagtgtcaaaaccgctttccgggatgccgctgcaaagcacagtgcaacaccaagcagtgcccgtgctacctggctgtccgagagtgtgaccctgacctctgtcttacttgtggagccgctgaccattgggacagtaaaaatgtgtcctgcaagaactgcagtattcagcggggctccaaaaagcatctattgctggcaccatctgacgtggcaggctgggggatttttatcaaagatcctgtgcagaaaaatgaattcatctcagaatactgtggagagattatttctcaagatgaagctgacagaagagggaaagtgtatgataaatacatgtgcagctttctgttcaacttgaacaatgattttgtggtggatgcaacccgcaagggtaacaaaattcgttttgcaaatcattcggtaaatccaaactgctatgcaaaagttatgatggttaacggtgatcacaggataggtatttttgccaagagagccatccagactggcgaagagctgttttttgattacagatacagccaggctgatgccctgaagtatgtcggcatcgaaagagaaatggaaatcccttga

SEQ ID NO: 671 - RNA, 399 nt, synthetic construct
  misc_feature 1..399: note = AAB87141
  source 1..399: mol_type = other RNA
atggtggaggctttctgtgctacctggaagctgaccaacagtcagaactttgatgagtacatgaaggctctaggcgtgggctttgccactaggcaggtgggaaatgtgaccaaaccaacggtaattatcagtcaagaaggagacaaagtggtcatcaggactctcagcacattcaagaacacggagattagtttccagctgggagaagagtttgatgaaaccactgcagatgatagaaactgtaagtctgttgttagcctggatggagacaaacttgttcacatacagaaatgggatggcaaagaaacaaattttgtaagagaaattaaggatggcaaaatggttatgacccttacttttggtgatgtggttgctgttcgccactatgagaaggcataa

SEQ ID NO: 672 - RNA, 765 nt, synthetic construct
  misc_feature 1..765: note = CAA36870
  source 1..765: mol_type = other RNA
atgtggcagctgctcctcccaactgctctgctacttctagtttcagctggcatgcggactgaagatctcccaaaggctgtggtgttcctggagcctcaatggtacagggtgctcgagaaggacagtgtgactctgaagtgccagggagcctactcccctgaggacaattccacacagtggtttcacaatgagagcctcatctcaagccaggcctcgagctacttcattgacgctgccacagtcgacgacagtggagagtacaggtgccagacaaacctctccaccctcagtgacccggtgcagctagaagtccatatcggctggctgttgctccaggcccctcggtgggtgttcaaggaggaagaccctattcacctgaggtgtcacagctggaagaacactgctctgcataaggtcacatatttacagaatggcaaaggcaggaagtattttcatcataattctgacttctacattccaaaagccacactcaaagacagcggctcctacttctgcagggggctttttgggagtaaaaatgtgtcttcagagactgtgaacatcaccatcactcaaggtttggcagtgtcaaccatctcatcattctttccacctgggtaccaagtctctttctgcttggtgatggtactcctttttgcagtggacacaggactatatttctctgtgaagacaaacattcgaagctcaacaagagactggaaggaccataaatttaaatggagaaaggaccctcaagacaaatga

SEQ ID NO: 673 - RNA, 873 nt, synthetic construct
  misc_feature 1..873: note = CCDS1232.1
  source 1..873: mol_type = other RNA
atgggtggaggggctggggaaaggctgtttacttcctcctgtctagtcggtttggtccctttagggctccggatatctttggtgacttgtccactccagtgtggcatcatgtggcagctgctcctcccaactgctctgctacttctagtttcagctggcatgcggactgaagatctcccaaaggctgtggtgttcctggagcctcaatggtacagggtgctcgagaaggacagtgtgactctgaagtgccagggagcctactcccctgaggacaattccacacagtggtttcacaatgagagcctcatctcaagccaggcctcgagctacttcattgacgctgccacagtcgacgacagtggagagtacaggtgccagacaaacctctccaccctcagtgacccggtgcagctagaagtccatatcggctggctgttgctccaggcccctcggtgggtgttcaaggaggaagaccctattcacctgaggtgtcacagctggaagaacactgctctgcataaggtcacatatttacagaatggcaaaggcaggaagtattttcatcataattctgacttctacattccaaaagccacactcaaagacagcggctcctacttctgcagggggctttttgggagtaaaaatgtgtcttcagagactgtgaacatcaccatcactcaaggtttggcagtgtcaaccatctcatcattctttccacctgggtaccaagtctctttctgcttggtgatggtactcctttttgcagtggacacaggactatatttctctgtgaagacaaacattcgaagctcaacaagagactggaaggaccataaatttaaatggagaaaggaccctcaagacaaatga

SEQ ID NO: 674 - RNA, 807 nt, synthetic construct
  misc_feature 1..807: note = AAH74858
  source 1..807: mol_type = other RNA
atgagcttgtccttcctcctcctcctcttcttcagccacctgatcctcagcgcctgggctcacggggagaagcgtctcgcccccaaagggcaacccggacccgctgccactgataggaaccctagaggctccagcagcagacagagcagcagtagcgctatgtcttcctcttctgcctcctcctcccccgcagcttctctgggcagccaaggaagtggcttggagcagagcagtttccagtggagcccctcggggcgccggaccggcagcctctactgcagagtgggcatcggtttccatctgcagatctacccggatggcaaagtcaatggatcccacgaagccaatatgttaagtgttttggaaatatttgctgtgtctcaggggattgtaggaatacgaggagttttcagcaacaaatttttagcgatgtcaaaaaaaggaaaactccatgcaagtgccaagttcacagatgactgcaagttcagggagcgttttcaagaaaatagctataatacctatgcctcagcaatacatagaactgaaaaaacagggcgggagtggtatgtggccctgaataaaagaggaaaagccaaacgagggtgcagcccccgggttaaaccccagcatatctctacccattttctgccaagattcaagcagtcggagcagccagaactttctttcacggttactgttcctgaaaagaaaaagccacctagccctatcaagccaaagattcccctttctgcacctcggaaaaataccaactcagtgaaatacagactcaagtttcgctttggataa

SEQ ID NO: 675 - RNA, 117 nt, synthetic construct
  misc_feature 1..117: note = AAB06462
  source 1..117: mol_type = other RNA
atgtccacccggtgcggcgaggcgggcagagccagaggcacgcagccgcacaggggctacagagcccagaatcagccctacaagatgcacttaggacccccgcggctggaagaatga

SEQ ID NO: 676 - RNA, 2466 nt, synthetic construct
  misc_feature 1..2466: note = AAA59470
  source 1..2466: mol_type = other RNA
atggtcagctggggtcgtttcatctgcctggtcgtggtcaccatggcaaccttgtccctggcccggccctccttcagtttagttgaggataccacattagagccagaagagccaccaaccaaataccaaatctctcaaccagaagtgtacgtggctgcgccaggggagtcgctagaggtgcgctgcctgttgaaagatgccgccgtgatcagttggactaaggatggggtgcacttggggcccaacaataggacagtgcttattggggagtacttgcagataaagggcgccacgcctagagactccggcctctatgcttgtactgccagtaggactgtagacagtgaaacttggtacttcatggtgaatgtcacagatgccatctcatccggagatgatgaggatgacaccgatggtgcggaagattttgtcagtgagaacagtaacaacaagagagcaccatactggaccaacacagaaaagatggaaaagcggctccatgctgtgcctgcggccaacactgtcaagtttcgctgcccagccggggggaacccaatgccaaccatgcggtggctgaaaaacgggaaggagtttaagcaggagcatcgcattggaggctacaaggtacgaaaccagcactggagcctcattatggaaagtgtggtcccatctgacaagggaaattatacctgtgtggtggagaatgaatacgggtccatcaatcacacgtaccacctggatgttgtggagcgatcgcctcaccggcccatcctccaagccggactgccggcaaatgcctccacagtggtcggaggagacgtagagtttgtctgcaaggtttacagtgatgcccagccccacatccagtggatcaagcacgtggaaaagaacggcagtaaatacgggcccgacgggctgccctacctcaaggttctcaaggccgccggtgttaacaccacggacaaagagattgaggttctctatattcggaatgtaacttttgaggacgctggggaatatacgtgcttggcgggtaattctattgggatatcctttcactctgcatggttgacagttctgccagcgcctggaagagaaaaggagattacagcttccccagactacctggagatagccatttactgcataggggtcttcttaatcgcctgtatggtggtaacagtcatcctgtgccgaatgaagaacacgaccaagaagccagacttcagcagccagccggctgtgcacaagctgaccaaacgtatccccctgcggagacaggtaacagtttcggctgagtccagctcctccatgaactccaacaccccgctggtgaggataacaacacgcctctcttcaacggcagacacccccatgctggcaggggtctccgagtatgaacttccagaggacccaaaatgggagtttccaagagataagctgacactgggcaagcccctgggagaaggttgctttgggcaagtggtcatggcggaagcagtgggaattgacaaagacaagcccaaggaggcggtcaccgtggccgtgaagatgttgaaagatgatgccacagagaaagacctttctgatctggtgtcagagatggagatgatgaagatgattgggaaacacaagaatatcataaatcttcttggagcctgcacacaggatgggcctctctatgtcatagttgagtatgcctctaaaggcaacctccgagaatacctccgagcccggaggccacccgggatggagtactcctatgacattaaccgtgttcctgaggagcagatgaccttcaaggacttggtgtcatgcacctaccagctggccagaggcatggagtacttggcttcccaaaaatgtattcatcgagatttagcagccagaaatgttttggtaacagaaaacaatgtgatgaaaatagcagactttggactcgccagagatatcaacaatatagactattacaaaaagaccaccaatgggcggcttccagtcaagtggatggctccagaagccctgtttgatagagtatacactcatcagagtgatgtctggtccttcggggtgttaatgtgggagatcttcactttagggggctcgccctacccagggattcccgtggaggaactttttaagctgctgaaggaaggacacagaatggataagccagccaactgcaccaacgaactgtacatgatgatgagggactgttggcatgcagtgccctcccagagaccaacgttcaagcagttggtagaagacttggatcgaattctcactctcacaaccaatgaggaatacttggacctcagccaacctctcgaacagtattcacctagttaccctgacacaagaagttcttgttcttcaggagatgattctgttttttctccagaccccatgccttacgaaccatgccttcctcagtatccacacataaacggcagtgttaaaacatga

SEQ ID NO: 677 - RNA, 1908 nt, synthetic construct
  misc_feature 1..1908: note = EAW74574
  source 1..1908: mol_type = other RNA
atggccccgccgctcctgctgctgctgctggccagtggagcggccgcctgcccgctgccctgcgtctgccagaacctgtccgagtcgctcagcaccctctgtgcccaccgaggcctgctgtttgtgccgcccaacgtggaccggcgcacagtggagctgcggctggctgacaacttcatccaggccctggggccccctgacttccgcaacatgacgggactggtggacctgacactgtctcgcaatgccatcacccgcattggggcccgcgcctttggggacctcgagagcctgcgttccctccaccttgacggcaacaggctggtggagctgggcaccgggagcctccggggccccgtcaatctgcagcacctcatcctcagcggcaaccagctgggccgcatcgcgccgggagccttcgacgacttcctagagagcctggaggacctggacctgtcctacaacaacctccggcaggtgccctgggccggcatcggcgccatgcctgccctgcacaccctcaacctggaccataaccttattgacgcactgcccccaggcgccttcgcccagctcggtcagctctcccgcctggacctcacctccaaccgcctggccacgctggctccggacccgcttttctctcgtgggcgtgatgcagaggcctctcccgcccccctggtgctgagctttagcgggaaccccctgcactgcaactgtgagctgctgtggctgcggcggctggcgcggccggacgacctggaaacgtgcgcctccccgcccggcctggccggccgctacttctgggcagtgcccgagggcgagttctcctgtgagccgcccctcattgcccgccacacgcagcgcctctgggtgctggaaggccagcgggccacgctgcggtgccgggccctgggtgaccccgcgcctaccatgcactgggtcggtcctgacgaccggttggttggcaactcctcccgagcccgggctttccccaacgggaccttagagattggggtgaccggcgctggggacgctgggggctacacctgcatcgccaccaaccctgctggtgaggccacagcccgagtagaactgcgggtgctggccttgccccatggtgggaacagcagtgccgaggggggccgccccgggccctcggacatcgccgcctccgctcgcactgctgccgagggtgaggggacgctggagtctgagccagccgtgcaggtgacggaggtgaccgccacctcagggctggtgagctggggtcccgggcggccagccgacccagtgtggatgttccaaatccagtacaacagcagcgaagatgagaccctcatctaccggattgtcccagcctccagccaccacttcctgctgaagcacctcgtccccggcgctgactatgacctctgcctgctggccttgtcaccggccgctgggccctctgacctcacggccaccaggctgctgggctgtgcccatttctccacgctgccggcctcgcccctgtgccacgccctgcaggcccacgtgctgggcgggaccctgaccgtggccgtggggggtgtgctggtggctgccttactggtcttcactgtggccttgctggttcggggccggggggccggaaatggccgcctccccctcaagctcagccacgtccagtcccagaccaatggaggccccagccccacacccaaggcccacccgccgcggagccccccgccccggccgcagcgcagctgctctctggacctgggagatgccgggtgctacggttatgccaggcgcctgggaggagcttgggcccgacggagccactctgtgcatggggggctgctcggggcagggtgccggggggtaggaggcagcgccgagcggctggaagagagtgtggtgtga

SEQ ID NO: 678 - RNA, 3297 nt, synthetic construct
  misc_feature 1..3297: note = EAW96782
  source 1..3297: mol_type = other RNA
atgcccccccgccagccccctcggcaggcggggggagggctcagccgggagtttggcaaactcctccccgcgttgagtcattcgcctctgggaggtttaggaagcggctccgggtcggtggccccaggacagggaagagcgggcgctatggggagccggacgccagagtcccctctccacgccgtgcagctgcgctggggcccccggcgccgacccccgctgctgccgctgctgttgctgctgctgccgccgccacccagggtcgggggcttcaacttagacgcggaggccccagcagtactctcggggcccccgggctccttcttcggattctcagtggagttttaccggccgggaacagacggggtcagtgtgctggtgggagcacccaaggctaataccagccagccaggagtgctgcagggtggtgctgtctacctctgtccttggggtgccagccccacacagtgcacccccattgaatttgacagcaaaggctctcggctcctggagtcctcactgtccagctcagagggagaggagcctgtggagtacaagtccttgcagtggttcggggcaacagttcgagcccatggctcctccatcttggcatgcgctccactgtacagctggcgcacagagaaggagccactgagcgaccccgtgggcacctgctacctctccacagataacttcacccgaattctggagtatgcaccctgccgctcagatttcagctgggcagcaggacagggttactgccaaggaggcttcagtgccgagttcaccaagactggccgtgtggttttaggtggaccaggaagctatttctggcaaggccagatcctgtctgccactcaggagcagattgcagaatcttattaccccgagtacctgatcaacctggttcaggggcagctgcagactcgccaggccagttccatctatgatgacagctacctaggatactctgtggctgttggtgaattcagtggtgatgacacagaagactttgttgctggtgtgcccaaagggaacctcacttacggctatgtcaccatccttaatggctcagacattcgatccctctacaacttctcaggggaacagatggcctcctactttggctatgcagtggccgccacagacgtcaatggggacgggctggatgacttgctggtgggggcacccctgctcatggatcggacccctgacgggcggcctcaggaggtgggcagggtctacgtctacctgcagcacccagccggcatagagcccacgcccacccttaccctcactggccatgatgagtttggccgatttggcagctccttgacccccctgggggacctggaccaggatggctacaatgatgtggccatcggggctccctttggtggggagacccagcagggagtagtgtttgtatttcctgggggcccaggagggctgggctctaagccttcccaggttctgcagcccctgtgggcagccagccacaccccagacttctttggctctgcccttcgaggaggccgagacctggatggcaatggatatcctgatctgattgtggggtcctttggtgtggacaaggctgtggtatacaggggccgccccatcgtgtccgctagtgcctccctcaccatcttccccgccatgttcaacccagaggagcggagctgcagcttagaggggaaccctgtggcctgcatcaaccttagcttctgcctcaatgcttctggaaaacacgttgctgactccattggtttcacagtggaacttcagctggactggcagaagcagaagggaggggtacggcgggcactgttcctggcctccaggcaggcaaccctgacccagaccctgctcatccagaatggggctcgagaggattgcagagagatgaagatctacctcaggaacgagtcagaatttcgagacaaactctcgccgattcacatcgctctcaacttctccttggacccccaagccccagtggacagccacggcctcaggccagccctacattatcagagcaagagccggatagaggacaaggctcagatcttgctggactgtggagaagacaacatctgtgtgcctgacctgcagctggaagtgtttggggagcagaaccatgtgtacctgggtgacaagaatgccctgaacctcactttccatgcccagaatgtgggtgagggtggcgcctatgaggctgagcttcgggtcaccgcccctccagaggctgagtactcaggactcgtcagacacccagggaacttctccagcctgagctgtgactactttgccgtgaaccagagccgcctgctggtgtgtgacctgggcaaccccatgaaggcaggagccagtctgtggggtggccttcggtttacagtccctcatctccgggacactaagaaaaccatccagtttgacttccagatcctcagcaagaatctcaacaactcgcaaagcgacgtggtttcctttcggctctccgtggaggctcaggcccaggtcaccctgaacggtgtctccaagcctgaggcagtgctattcccagtaagcgactggcatccccgagaccagcctcagaaggaggaggacctgggacctgctgtccaccatgtctatgagctcatcaaccaaggccccagctccattagccagggtgtgctggaactcagctgtccccaggctctggaaggtcagcagctcctatatgtgaccagagttacgggactcaactgcaccaccaatcaccccattaacccaaagggcctggagttggatcccgagggttccctgcaccaccagcaaaaacgggaagctccaagccgcagctctgcttcctcgggacctcagatcctgaaatgcccggaggctgagtgtttcaggctgcgctgtgagctcgggcccctgcaccaacaagagagccaaagtctgcagttgcatttccgagtctgggccaagactttcttgcagcgggagcaccagccatttagcctgcagtgtgaggctgtgtacaaagccctgaagatgccctaccgaatcctgcctcggcagctgccccaaaaagagcgtcaggtggccacagctgtgcaatggaccaaggcagaaggcagctatggcgtcccactgtggatcatcatcctagccatcctgtttggcctcctgctcctaggtctactcatctacatcctctacaagcttggattcttcaaacgctccctcccatatggcaccgccatggaaaaagctcagctcaagcctccagccacctctgatgcctga

SEQ ID NO: 679 - RNA, 3597 nt, synthetic construct
  misc_feature 1..3597: note = EAX08808
  source 1..3597: mol_type = other RNA
atggcagaacatccaccactactggatacaactcagatcttaagtagtgatatttctcttttgtctgcccctattgtaagtgcagatggaacacaacaggttattctggtacaagttaacccaggagaagcatttacaataagaagagaagatggacagtttcagtgcattacaggtcctgctcaggttccaatgatgtccccaaatggttctgtgcctcctatctatgtgcctcctggatatgccccacaggttattgaagacaatggtgttcgaagagttgtcgtggtccctcaggcaccagagtttcaccctggtagtcacacagttctccaccgttctccacatcctcctctacctggtttcattcctgtcccaactatgatgccgcctccaccacgtcatatgtactcacccgtgactggagctggagacatgacaacacagtatatgccacagtatcagtcttcacaagtctatggagatgtagatgctcactctacacatggaaggtccaactttagagatgaacgatctagtaaaacatatgaacgtttgcagaaaaaattgaaggatcgccaaggaacacagaaagataaaatgagcagtccaccatcatcaccccagaaatgcccttctcccattaatgaacataatggacttataaaaggacaaattgctggtggtataaacacaggatcagcaaaaatcaagtctgggaaggggaaaggtggtacacaagttgatacagaaattgaagaaaaagatgaagaaactaaagcatttgaagcacttctttccaacattgtcaaaccagtggcctccgacatccaggcaaggacagtagtacttacctggtcaccaccttccagcctcattaatggtgaaacagatgaaagtagtgtaccagagctctatggttatgaagttctgatctcaagtactggaaaagatgggaaatacaaaagtgtatatgtaggagaagaaacaaatatcactttaaatgatctcaagccagccatggattaccatgcaaaagtccaggcagaatataattctataaagggaactccttcagaggctgaaatctttaccaccttgagctgtgaacctgatatacctaatccaccaaggatagccaatcggaccaaaaattcactcactttgcaatggaaggcacctagtgacaatggttctaaaatccaaaactttgtattagaatgggatgaaggaaaaggaaatggagaattttgtcagtgttacatgggctcacagaaacaatttaaaattactaaactttcaccagcaatgggctgtaaattcagactatcggccagaaatgactatggtacaagtggttttagtgaagaagtcttatattacacctcaggctgtgctccttctatgccagcaagtcctgtattaaccaaggctggaattacttggttatccttacaatggagtaagccctcaggaacaccatcagatgaaggaatttcttacattttagagatggaggaagaaacttcaggatatggttttaagcctaaatatgatggagaagatcttgcttacacagtgaaaaatctcagacgtagtactaagtataaatttaaggttattgcttacaactcagaaggtaaaagtaatccaagtgaagtagtagaatttactacttgccctgataaaccaggcatacctgtaaagccttcagtgaaaggaaagatacattcacacagttttaaaataacctgggatccaccaaaagacaatggcggagcaaccatcaataaatatgtagtggagatggcagaaggttctaacggaaacaaatgggaaatgatatacagtggtgctaccagggaacatctttgtgatcgactgaatccaggctgtttctatcgtttacgagtttactgcatcagtgatggaggacagagtgcggtctctgaatctttacttgtgcagactccagctgtgcctcctggcccatgcctccctcccagattacagggtagacccaaagcaaaagaaatacagttacgatggggaccccctctggttgatggtggatcacccatttcctgttacagtgtggaaatgtctcctatagaaaaagatgaacctagagaagtttaccaaggttctgaagtagaatgtacagtgagcagccttcttcctggaaagacatacagcttcagactacgtgcagctaacaaaatggggtttggaccattttcagaaaaatgtgatattactacagcccctgggccaccagatcagtgcaagccccctcaagtgacatgtagatctgcaacttgtgcacaagtgaattgggaggttcctttgagtaatggaacagatgtcactgaatatcgactggagtggggaggagttgaaggaagtatgcagatatgttactgtgggcctggtctcagttatgaaataaaaggactttcaccagcaactacctattattgcagggtccaggctctgagtgttgtgggtgcaggccctttcagtgaagtagtagcctgtgtgactccaccatcagttcctggcattgtgacctgtcttcaagaaataagcgatgatgagatagaaaatccccattattcaccttctacatgccttgcaataagctgggaaaagccttgtgatcatggttcggaaatccttgcctacagcatagactttggagataaacaatccctaacagtgggaaaggttacaagctatattatcaacaatttgcaaccagatacaacatacagaatacgaattcaagccttgaatagccttggagctggtcctttcagccatatgataaaattaaaaactaagcctctccctcctgatccacctcgtctggaatgtgttgcctttagccaccagaaccttaagctgaaatggggagaaggaactccaaagacattgtcaaccgattctattcagtaccaccttcagatggaggataagaatggacggtttgtatccctatacagaggaccatgtcatacatacaaagtacaaagacttaatgagtcaacatcctataaattctgtattcaagcttgtaatgaagctggggaaggtcccctctcccaagaatatattttcactactccaaaatctgtcccagctgccttgaaagcccccaaaatagagaaagtaaatgatcacatttgtgaaattacatgggagtgtttacagccaatgaaaggtgatccagttatttacagtcttcaagttatgttgggaaaagattcagaattcaaacagatttacaagggtcccgactcttccttccggtattccagccttcagctgaactgtgaatatcgcttccgtgtatgtgccattcgccagtgccaagactctctgggacaccaggacctcgtaggtccctacagcaccacagtgctcttcatctctcagaggactgaaccaccagccagcaccaacagagacactgtggaaagcacaaggacccgacgggcactgagtgacgagcagtgtgctgccgtcatccttgtgctgtttgctttcttttccattttgattgcctttatcattcagtactttgtaatcaagtga

SEQ ID NO: 680 - RNA, 3429 nt, synthetic construct
  misc_feature 1..3429: note = EAX08809
  source 1..3429: mol_type = other RNA
atgagtggtcctgctcaggttccaatgatgtccccaaatggttctgtgcctcctatctatgtgcctcctggatatgccccacaggttattgaagacaatggtgttcgaagagttgtcgtggtccctcaggcaccagagtttcaccctggtagtcacacagttctccaccgttctccacatcctcctctacctggtttcattcctgtcccaactatgatgccgcctccaccacgtcatatgtactcacccgtgactggagctggagacatgacaacacagtatatgccacagtatcagtcttcacaagtctatggagatgtagatgctcactctacacatggaaggtccaactttagagatgaacgatctagtaaaacatatgaacgtttgcagaaaaaattgaaggatcgccaaggaacacagaaagataaaatgagcagtccaccatcatcaccccagaaatgcccttctcccattaatgaacataatggacttataaaaggacaaattgctggtggtataaacacaggatcagcaaaaatcaagtctgggaaggggaaaggtggtacacaagttgatacagaaattgaagaaaaagatgaagaaactaaagcatttgaagcacttctttccaacattgtcaaaccagtggcctccgacatccaggcaaggacagtagtacttacctggtcaccaccttccagcctcattaatggtgaaacagatgaaagtagtgtaccagagctctatggttatgaagttctgatctcaagtactggaaaagatgggaaatacaaaagtgtatatgtaggagaagaaacaaatatcactttaaatgatctcaagccagccatggattaccatgcaaaagtccaggcagaatataattctataaagggaactccttcagaggctgaaatctttaccaccttgagctgtgaacctgatatacctaatccaccaaggatagccaatcggaccaaaaattcactcactttgcaatggaaggcacctagtgacaatggttctaaaatccaaaactttgtattagaatgggatgaaggaaaaggaaatggagaattttgtcagtgttacatgggctcacagaaacaatttaaaattactaaactttcaccagcaatgggctgtaaattcagactatcggccagaaatgactatggtacaagtggttttagtgaagaagtcttatattacacctcaggctgtgctccttctatgccagcaagtcctgtattaaccaaggctggaattacttggttatccttacaatggagtaagccctcaggaacaccatcagatgaaggaatttcttacattttagagatggaggaagaaacttcaggatatggttttaagcctaaatatgatggagaagatcttgcttacacagtgaaaaatctcagacgtagtactaagtataaatttaaggttattgcttacaactcagaaggtaaaagtaatccaagtgaagtagtagaatttactacttgccctgataaaccaggcatacctgtaaagccttcagtgaaaggaaagatacattcacacagttttaaaataacctgggatccaccaaaagacaatggcggagcaaccatcaataaatatgtagtggagatggcagaaggttctaacggaaacaaatgggaaatgatatacagtggtgctaccagggaacatctttgtgatcgactgaatccaggctgtttctatcgtttacgagtttactgcatcagtgatggaggacagagtgcggtctctgaatctttacttgtgcagactccagctgtgcctcctggcccatgcctccctcccagattacagggtagacccaaagcaaaagaaatacagttacgatggggaccccctctggttgatggtggatcacccatttcctgttacagtgtggaaatgtctcctatagaaaaagatgaacctagagaagtttaccaaggttctgaagtagaatgtacagtgagcagccttcttcctggaaagacatacagcttcagactacgtgcagctaacaaaatggggtttggaccattttcagaaaaatgtgatattactacagcccctgggccaccagatcagtgcaagccccctcaagtgacatgtagatctgcaacttgtgcacaagtgaattgggaggttcctttgagtaatggaacagatgtcactgaatatcgactggagtggggaggagttgaaggaagtatgcagatatgttactgtgggcctggtctcagttatgaaataaaaggactttcaccagcaactacctattattgcagggtccaggctctgagtgttgtgggtgcaggccctttcagtgaagtagtagcctgtgtgactccaccatcagttcctggcattgtgacctgtcttcaagaaataagcgatgatgagatagaaaatccccattattcaccttctacatgccttgcaataagctgggaaaagccttgtgatcatggttcggaaatccttgcctacagcatagactttggagataaacaatccctaacagtgggaaaggttacaagctatattatcaacaatttgcaaccagatacaacatacagaatacgaattcaagccttgaatagccttggagctggtcctttcagccatatgataaaattaaaaactaagcctctccctcctgatccacctcgtctggaatgtgttgcctttagccaccagaaccttaagctgaaatggggagaaggaactccaaagacattgtcaaccgattctattcagtaccaccttcagatggaggataagaatggacggtttgtatccctatacagaggaccatgtcatacatacaaagtacaaagacttaatgagtcaacatcctataaattctgtattcaagcttgtaatgaagctggggaaggtcccctctcccaagaatatattttcactactccaaaatctgtcccagctgccttgaaagcccccaaaatagagaaagtaaatgatcacatttgtgaaattacatgggagtgtttacagccaatgaaaggtgatccagttatttacagtcttcaagttatgttgggaaaagattcagaattcaaacagatttacaagggtcccgactcttccttccggtattccagccttcagctgaactgtgaatatcgcttccgtgtatgtgccattcgccagtgccaagactctctgggacaccaggacctcgtaggtccctacagcaccacagtgctcttcatctctcagaggactgaaccaccagccagcaccaacagagacactgtggaaagcacaaggacccgacgggcactgagtgacgagcagtgtgctgccgtcatccttgtgctgtttgctttcttttccattttgattgcctttatcattcagtactttgtaatcaagtga

SEQ ID NO: 681 - RNA, 1020 nt, synthetic construct
  misc_feature 1..1020: note = EAW49214
  source 1..1020: mol_type = other RNA
atgccaccctcaaagcctcatccacctgtcgtgggcaaagtgactcatcacagcattgaattatactgggatctggaaaagaaagccaaacgccaaggacctcaagagcagtggttcaggttctcgattgaagaagaagaccccaaaatgcacacttatggtatcatttatacgggatatgcaacgaagcatgttgttgaaggtctggaaccaaggacgctgtacagatttcgcctgaaggtcaccagcccctctggggagtgtgagtacagcccactcgtctcagtgtctacaaccagagagcccataagtagtgagcacttgcaccgggctgtcagtgtgaatgatgaagatttgctggtccgaatacttcaaggaggccgtgttaaggttgatgttcccaataagtttggctttaccgctctgatggttgctgcccagaaaggatacaccaggcttgtgaaaatcctagtttctaatggcacagacgtgaatctgaagaatggaagtggcaaggacagtctaatgctggcgtgctatgcgggacacctagatgttgtgaaatatctccgaagacatggcgcttcttggcaggctagagacctgggaggctgtacagctctgcactgggctgcagatggaggccactgcagtgtgattgagtggatgataaaggatggctgtgaggtagacgtcgtggacactggttcaggatggaccccactcatgagagtctctgcggtgtcgggaaatcagagggtggcctctcttctaattgatgctggggccaatgtgaatgtgaaggacagaaatggaaagacgccccttatggtggctgtgttaaataatcatgaagagttagttcagttacttcttgacaaaggggcagatgcaagtgtaaaaaatgagttcggcaaaggtgtcctagaaatggccagagtttttgacagacagagtgtagtctccttattagaagaaaggaaaaaaaagcagaggccaaagaagtcttgtgtctgctga

SEQ ID NO: 682 - RNA, 3150 nt, synthetic construct
  misc_feature 1..3150: note = BAF84259
  source 1..3150: mol_type = other RNA
atggggagccggacgccagagtcccctctccacgccgtgcagctgcgctggggcccccggcgccgacccccgctgctgccgctgctgttgctgctgctgccgccgccacccagggtcgggggcttcaacttagacgcggaggccccagcagtactctcggggcccccgggctccttcttcggattctcagtggagttttaccggccgggaacagacggggtcagtgtgctggtgggagcacccaaggctaataccagccagccaggagtgctgcagggtggtgctgtctacctctgtccttggggtgccagccccactcagtgcacccccattgaatttgacagcaaaggctctcggctcctggagtcctcactgtccagctcagagggagaggagcctgtggagtacaagtccttgcagtggttcggggcaacagttcgagcccatggctcctccatcttggcatgcgctccactgtacagctggcgcacagagaaggagccactgagcgaccccgtgggcacctgctacctctccacagataacttcacccgaattctggagtatgcaccctgccgctcagatttcagctgggcagcaggacagggttactgccaaggaggcttcagtgccgagttcaccaagactggccgtgtggttttaggtggaccaggaagctatttctggcaaggccagatcctgtctgccactcaggagcagattgcagaatcttattaccccgagtacctgatcaacctggttcaggggcagctgcagactcgccaggccagttccatctatgatgacagctacctaggatactctgtggctgttggtgaattcagtggtgatgacacagaagactttgttgctggtgtgcccaaagggaacctcacttacggctatgtcaccatccttaatggctcagacattcgatccctctacaacttctcaggggaacagatggcctcctactttgcctatgcagtggccgccacagacgtcaatggggacgggctggatgacttgctggtgggggcacccctgctcatggatcggacccctgacgggcggcctcaggaggtgggcagggtctacgtctacctgcagcacccagccggcatagagtccacgcccacccttaccctcactggccatgatgagtttggccgatttggcagctccttgacccccctgggggacctggaccaggatggctacaatgatgtggccatcggggctccctttggtggggagacccagcagggagtagtgtttgtatttcctgggggcccaggagggctgggctctaagccttcccaggttctgcagcccctgtgggcagccagccacaccccagacttctttggctctgcccttcgaggaggccgagacctggatggcaatggatatcctgatctgattgtggggtcctttggtgtggacaaggctgtggtatacaggggccgccccatcgtgtccgctagtgcctccctcaccatcttccccgccatgttcaacccagaggagcggagctgcagcttagaggggaaccctgtggcctgcatcaaccttagcttctgcctcaatgcttctggaaaacacgttgctgactccattggtttcacagtggaacttcagctggactggcagaagcagaagggaggggtacggcgggcactgttcctggcctccaggcaggcaaccctgacccagaccctgctcatccagaatggggctcgagaggattgcagagagatgaagatctacctcaggaacgagtcagaatttcgagacaaactctcgccgattcacatcgctctcaacttctccttggacccccaagccccagtggacagccacggcctcaggccagccctacattatcagagcaagagccggatagaggacaaggctcagatcttgctgggctgtggagaagacaacatctgtgtgcctgacctgcagctggaagtgtttggggagcagaaccatgtgtacctgggtgacaagaatgccctgaacctcactttccatgcccagaatgtgggtgagggtggcgcctatgaggctgagcttcgggtcaccgcccctccagaggctgagtactcaggactcgtcagacacccagggaacttctccagcctgagctgtgactactttgccgtgaaccagagccgcctgctggtgtgtgacctgggcaaccccatgaaggcaggagccagtctgtggggtggccttcggtttacagtccctcatctccgggacactaagaaaaccatccagtttgacttccagatcctcagcaagaatctcaacaactcgcaaagcgacgtggtttcctttcggctctccgtggaggctcaggcccaggtcaccctgaacggtgtctccaagcctgaggcagtgctattcccagtaagcgactggcatccccgagaccagcctcaggaggaggaggacctgggacctgctgtccaccatgtctatgagctcatcaaccaaggccccagctccattagccagggtgtgctggaactcagctgtccccaggctctggaaggtcagcagctcctatatgtgaccagagttacgggactcaactgcaccaccaatcaccccattaacccaaagggcctggagttggatcccgagggttccctgcaccaccagcaaaaacgggaagctccaagccgcagctctgcttcctcgggacctcagatcctgaaatgcccggaggctgagtgtttcaggctgcgctgtgagctcgggcccctgcaccaacaagagagccaaagtctgcagttgcatttccgagtctgggccaagactttcttgcagcgggagcaccagccatttagcctgcagtgtgaggctgtgtacaaagccctgaagatgccctaccgaatcctgcctcggcagctgccccaaaaagagcgtcaggtggccacagctgtgcaatggaccaaggcagaaggcagctatggcgtcccactgtggatcatcatcctagccatcctgtttggcctcctgctcctaggtctactcatctacatcctctacaagcttggattcttcaaacgctccctcccatatggcaccgccatggaaaaagctcagctcaagcctccagccacctctgatgcctga

SEQ ID NO: 683 - RNA, 3150 nt, synthetic construct
  misc_feature 1..3150: note = BAG35324
  source 1..3150: mol_type = other RNA
atggggagccggacgccagagtcccctctccacgccgtgcagctgcgctggggcccccggcgccgacccccgctgctgccgctgctgttgctgctgctgccgccgccacccagggtcgggggcttcaacttagacgcggaggccccagcagtactctcggggcccccgggctccttcttcggattctcagtggagttttaccggccgggaacagacggggtcagtgtgctggtgggagcacccaaggctaataccagccagccaggagtgctgcagggtggtgctgtctacctctgtccttggggtgccagccccacacagtgcacccccattgaatttgacagcaaaggctctcggctcctggagtcctcactgtccagctcagagggagaggagcctgtggagtacaagtccttgcagtggttcggggcaacagttcgagcccatggctcctccatcttggcatgcgctccactgtacagctggcgcacagagaaggagccactgagcgaccccgtgggcacctgctacctctccacagataacttcacccgaattctggagtatgcaccctgccgctcagatttcagctgggcagcaggacagggttactgccaaggaggcttcagtgccgagttcaccaagactggccgtgtggttttaggtggaccaggaagctatttctggcaaggccagatcctgtctgccactcaggagcagattgcagaatcttattaccccgagtacctgatcaacctggttcaggggcagctgcagactcgccaggccagttccatctatgatgacagctacctaggatactctgtggctgttggtgaattcagtggtgatgacacagaagactttgttgctggtgtgcccaaagggaacctcacttacggctatgtcaccatccttaatggctcagacattcgatccctctacaacttctcaggggaacagatggcctcctactttggctatgcagtggccgccacagacgtcaatggggacgggctggatgacttgctggtgggggcacccctgctcatggatcggacccctgacgggcggcctcagggggtgggcagggtctacgtctacctgcagcacccagccggcatagagcccacgcccacccttaccctcactggccatgatgagtttggccgatttggcagctccttgacccccctgggggacctggaccaggatggctacaatgatgtggccatcggggctccctttggtggggagacccagcagggagtagtgtttgtatttcctgggggcccaggagggctgggctctaagctttcccaggttctgcagcccctgtgggcagccagccacaccccagacttctttggctctgcccttcgaggaggccgagacctggatggcaatggatatcctgatctgattgtggggtcctttggtgtggacaaggctgtggtatacaggggccgccccatcgtgtccgctagtgcctccctcaccatcttccccgccatgttcaacccagaggagcggagctgcagcttagaggggaaccctgtggcctgcatcaaccttagcttctgcctcaatgcttctggaaaacacgttgctgactccattggtttcacagtggaacttcagctggactggcagaagcagaagggaggggtacggcgggcactgttcctggcctccaggcaggcaaccctgacccagaccctgctcatccagaatggggctcgagaggattgcagagagatgaagatctacctcaggaacgagtcagaatttcgagacaaactctcgccgattcacatcgctctcaacttctccttggacccccaagccccagtggacagccacggcctcaggccagccctacattatcagagcaagagccggatagaggacaaggctcagatcttgctggactgtggagaagacaacatctgtgtgcctgacctgcagctggaagtgtttggggagcagaaccatgtgtacctgggtgacaagaatgccctgaacctcactttccatgcccagaatgtgggtgagggtggcgcctatgaggctgagcttcgggtcaccgcccctccagaggctgagtactcaggactcgtcagacacccagggaacttctccagcctgagctgtgactactttgccgtgaaccagagccgcctgctggtgtgtgacctgggcaaccccatgaaggcaggagccagtctgtggggtggccttcggtttacagtccctcatctccgggacactaagaaaaccatccagtttgacttccagatcctcagcaagaatctcaacaactcgcaaagcgacgtggtttcctttcggctctccgtggaggctcaggcccaggtcaccctgaacggtgtctccaagcctgaggcagtgctattcccagtaagcgactggcatccccgagaccagcctcagaaggaggaggacctgggacctgctgtccaccatgtctatgagctcatcaaccaaggccccagctccattagccagggtgtgctggaactcagctgtccccaggctctggaaggtcagcagctcctatatgtgaccagagttacgggactcaactgcaccaccaatcaccccattaacccaaagggcctggagttggatcccgagggttccctgcaccaccagcaaaaacgggaagctccaagccgcagctctgcttcctcgggacctcagatcctgaaatgcccggaggctgagtgtttcaggctgcgctgtgagctcgggcccctgcaccaacaagagagccaaagtctgcagttgcatttccgagtctgggccaagactttcttgcagcgggagcaccagccatttagcctgcagtgtgaggctgtgtacaaagccctgaagatgccctaccgaatcctgcctcggcagctgccccaaaaagagcgtcaggtggccacagctgtgcaatggaccaaggcagaaggcagctatggcgtcccactgtggatcatcatcctagccatcctgtttggcctcctgctcctaggtctactcatctacatcctctacaagcttggattcttcaaacgctccctcccatatggcaccgccatggaaaaagctcagctcaagcctccagccacctctgatgcctga

SEQ ID NO: 684 - RNA, 1401 nt, synthetic construct
  misc_feature 1..1401: note = BAG54537
  source 1..1401: mol_type = other RNA
atgctgtccttgcgccagaggatgatgcatgccagattccgtaaccctctctcccgacagcctgccagaccctcttacagacaaggttataatggcagaccaaatgtagaagggaaagtccttcctggtagtaatggaaaaccgaatggacagagaattatcaatggccctcaaggaacaaagtgggttgtggaccttgatcgtgggttagtattgaatgcagaaggaaggtacctccaagattcacatggaaatcctcttcggattaaactaggaggagatggtcgaaccattgtagatctggaagggacccccgtggtgagtcctgacggcctcccactctttgggcaggggcgacatggcacacctctggccaatgcccaagataagccaattttgagtcttggaggaaagccgctggtgggcttggaggtcatcaaaaaaaccacccatccccctaccactaccatgcagcccaccactactacgacgcccctgcctaccactacaaccccgaggcccaccactgccaccacccgccgcacgaccaccaggcgtccaacaaccacagtccgaaccactacgcggacaaccaccaccaccacccccaaacccaccactcccatccccacctgtccccctgggaccttggaacggcacgacgatgatggcaacctgataatgagctccaatgggatcccagagtgctacgctgaagaagatgagttctcaggcttggagactgacactgcagtacctacggaagaggcctacgttatatatgatgaagattatgaatttgagacgtcaaggccaccaaccaccactgagccttcgaccactgctaccacaccgagggtgatcccagaggaaggcgccatcagttcctttcctgaagaagaatttgatctggctggaaggaaacgatttgttgctccttacgtgacgtacctaaataaagacccatcagccccgtgctctctgactgatgcactggatcacttccaagtggacagcctggatgaaatcatccccaatgacctgaagaagagtgacctgcctccccagcatgctccccgcaacatcaccgtggtggccgtggaaggttgccactcatttgtcattgtggactgggacaaagccaccccaggagatgtggtcacaggttacttggtttacagtgcatcctatgaagacttcatcaggaacaagtggtccactcaagcttcatcagtaactcacttgcccattgagaacctaaagcccaacacgaggtattattttaaagtgcaagcacaaaatcctcatggctacggacctatcagcccttcggtctcatttgtcaccgaatcagataatcctctgcttgttgtgaggcccccaggcggtgagcctatctag

SEQ ID NO: 685 - RNA, 471 nt, synthetic construct
  misc_feature 1..471: note = BAG58437
  source 1..471: mol_type = other RNA
atggaagaacagaggaatgaagaaattcagagctttatctactccctgaaacagatgctgctgaacgtggaggcgaactcggcgaaggtgcaggaggacctcgaagcagagttccagtccctcttctccctcctggaggagctgaaagaaggcatgcttatgaagataaaacaggaccgtgccagccgcacctacgagctgcagaaccagctggctgcctgcacgcgggccctggagagctccgaggagcttctggagacagccaaccagactctgcaggccatggacagcgaggactttcctcaggctgccaagcaaatcaaagatggagtgaccatggcccctgccttccggctatcattgaaagcgaaggtcagtgacaacatgagtcacctcatggtggacttcgcgcaagagcggcagatgctacaggcactcaagttcctgcctggtgagaggggcacgcactag

SEQ ID NO: 686 - RNA, 921 nt, synthetic construct
  misc_feature 1..921: note = BAH14721
  source 1..921: mol_type = other RNA
atgatctttgaggaacatggttttaggcggaccacaccgcccacaacggccacccccataaggcataggccaagaccatacccgccgaatgtaggacaagaagctctctctcagacaaccatctcatgggccccattccaggacacttctgagtacatcatttcatgtcatcctgttggcactgatgaagaacccttacagttcagggttcctggaacttctaccagtgccactctgacaggcctcaccagaggtgccacctacaacatcatagtggaggcactgaaagaccagcagaggcataaggttcgggaagaggttgttaccgtgggcaactctgtcaacgaaggcttgaaccaacctacggatgactcgtgctttgacccctacacagtttcccattatgccgttggagatgagtgggaacgaatgtctgaatcaggctttaaactgttgtgccagtgcttaggctttggaagtggtcatttcagatgtgattcatctagatggtgccatgacaatggtgtgaactacaagattggagagaagtgggaccgtcagggagaaaatggccagatgatgagctgcacatgtcttgggaacggaaaaggagaattcaagtgtgaccctcatgaggcaacgtgttatgatgatgggaagacataccacgtaggagaacagtggcagaaggaatatctcggtgccatttgctcctgcacatgctttggaggccagcggggctggcgctgtgacaactgccgcagacctgggggtgaacccagtcccgaaggcactactggccagtcctacaaccagtattctcagagataccatcagagaacaaacactaatgttaattgcccaattgagtgcttcatgcctttagatgtacaggctgacagagaagattcccgagagtaa

SEQ ID NO: 687 - RNA, 1920 nt, synthetic construct
  misc_feature 1..1920: note = BAG61560
  source 1..1920: mol_type = other RNA
atggaaaaaattcttttttatctgtttctcattggcatagcagtgaaagctcagatctgtccaaagcgttgtgtctgtcagattttgtctcctaatcttgcaaccctttgtgccaagaaagggcttttatttgttccaccaaacattgacagaagaactgtggaactgcggttggcagacaattttgttacaaatattaaaaggaaagattttgccaatatgaccagcttggtggacctgactctatccaggaatacaataagttttattacacctcatgctttcgctgacctacgaaatttgaggtctttgcatttgaatagcaacagattgactaaaattacaaatgatatgttcagtggtctttccaatcttcatcatttgatactgaacaacaatcagctgactttaatttcctctacagcgtttgatgatgtcttcgcccttgaggagctggatctgtcctataataatctagaaaccattccttgggatgctgttgagaagatggttagcttgcatacccttagtttggatcacaatatgattgataacattcctaaggggaccttctcccatttgcacaagatgactcggttagatgtgacatcaaataaattgcagaagctaccacctgaccctctctttcagcgagctcaggtactagcaacctcaggaatcataagcccatctacttttgcattaagttttggtggaaaccccttgcattgcaattgtgaattgttgtggttgaggcgtctgtccagagaatatgacttagagacctgtgcttctcctccacttttaactggccgctacttttggtcaattcctgaagaagagtttttgtgtgagcctcctctcattactcgtcatacacatgagatgagagtcctggagggacaaagggcaacactgaggtgcaaagccaggggagaccctgagcctgcaattcactggatttctcctgaagggaagcttatttcaaatgcaacaagatctctggtgtatgataacggaacacttgacattcttatcacaactgtaaaggatacaggtgcttttacctgcattgcttccaatcctgctggggaagcaacacaaatagtggatcttcatataattaagctccctcacttactaaatagtacaaaccatatccatgagcctgatcctggttcttcagatatctcaacttctaccaagtcaggttctaatacaagcagtagtaatgatggcatcacttccctcactgccacaagagtcgtgggttgcatccagtttactacggaacaggattatgtgcgttgccatttcatgcagtcccagtttttgggaggcaccatgattattattattggtggaatcattgtagcatctgtgctggtattcatcattattctgatgatccggtataaggtttgcaacaataatgggcaacacaaggtcaccaaggttagcaatgtttattcccaaactaacggggctcaaatacaaggctgtagtgtaacgctgccccagtccgtgtccaaacaagctgtgggacacgaagagaatgcccagtgttgtaaagctaccagtgacaatgtgattcaatcttcagaaacttgttcgagtcaggactccgctaccactacctctgctttgcctccttcctggacttcaagcacttctgtgtcccaaaagcagaaaagaaagactggcacaaagccaagtacagaaccacagaatgaagccgtcacaaatgttgaatcccaaaacactaacaggaacaactcaactgccttgcagttagctagccgtcctcccgattctgtcacagaggggcccacgtctaaaagagcacatataaagccaaatgctttgctgactaatgttgaccagattgtccaggaaacacagaggctggagttaatctga

SEQ ID NO: 688 - RNA, 1014 nt, synthetic construct
  misc_feature 1..1014: note = BAG61984
  source 1..1014: mol_type = other RNA
atgatctttgaggaacatggttttaggcggaccacaccgcccacaacggccacccccataaggcataggccaagaccatacccgccgaatgtaggtgaggaaatccaaattggtcacatccccagggaagatgtagactatcacctgtacccacacggtccgggactcaatccaaatgcctctacaggacaagaagctctctctcagacaaccatctcatgggccccattccaggacacttctgagtacatcatttcatgtcatcctgttggcactgatgaagaacccttacagttcagggttcctggaacttctaccagtgccactctgacaggcctcaccagaggtgccacctacaacatcatagtggaggcactgaaagaccagcagaggcataaggttcgggaagaggttgttaccgtgggcaactctgtcaacgaaggcttgaaccaacctacggatgactcgtgctttgacccctacacagtttcccattatgccgttggagatgagtgggaacgaatgtctgaatcaggctttaaactgttgtgccagtgcttaggctttggaagtggtcatttcagatgtgattcatctagatggtgccatgacaatggtgtgaactacaagattggagagaagtgggaccgtcagggagaaaatggccagatgatgagctgcacatgtcttgggaacggaaaaggagaattcaagtgtgaccctcatgaggcaacgtgttatgatgatgggaagacataccacgtaggagaacagtggcagaaggaatatctcggtgccatttgctcctgcacatgctttggaggccagcggggctggcgctgtgacaactgccgcagacctgggggtgaacccagtcccgaaggcactactggccagtcctacaaccagtattctcagagataccatcagagaacaaacactaatgttaattgcccaattgagtgcttcatgcctttagatgtacaggctgacagagaagattcccgagagtaa

SEQ ID NO: 689 - RNA, 3045 nt, synthetic construct
  misc_feature 1..3045: note = BAG62013
  source 1..3045: mol_type = other RNA
atgcgtgtcacctgggctccacccccatccattgatttaaccaacttcctggtgcgttactcacctgtgaaaaatgaggaagatgttgcagagttgtcaatttctccttcagacaatgcagtggtcttaacaaatctcctgcctggtacagaatatgtagtgagtgtctccagtgtctacgaacaacatgagagcacacctcttagaggaagacagaaaacaggtcttgattccccaactggcattgacttttctgatattactggcaactcttttactgtgcactggattgctcctcgagccaccatcactggctacaggatccgccatcatcccgagcacttcagtgggagacctcgagaagatcgggtgccccactctcggaattccatcaccctcaccaacctcactccaggcacagagtatgtggtcagcatcgttgctcttaatggcagagaggaaagtcccttattgattggccaacaatcaacagtttctgatgttccgagggacctggaagttgttgctgcgacccccaccagcctactgatcagctgggatgctcctgctgtcacagtgagatattacaggatcacttacggagaaacaggaggaaatagccctgtccaggagttcactgtgcctgggagcaagtctacagctaccatcagcggccttaaacctggagttgattataccatcactgtgtatgctgtcactggccgtggagacagccccgcaagcagcaagccaatttccattaattaccgaacagaaattgacaaaccatcccagatgcaagtgaccgatgttcaggacaacagcattagtgtcaagtggctgccttcaagttcccctgttactggttacagagtaaccaccactcccaaaaatggaccaggaccaacaaaaactaaaactgcaggtccagatcaaacagaaatgactattgaaggcttgcagcccacagtggagtatgtggttagtgtctatgctcagaatccaagcggagagagtcagcctctggttcagactgcagtaaccactattcctgcaccaactgacctgaagttcactcaggtcacacccacaagcctgagcgcccagtggacaccacccaatgttcagctcactggatatcgagtgcgggtgacccccaaggagaagaccggaccaatgaaagaaatcaaccttgctcctgacagctcatccgtggttgtatcaggacttatggtggccaccaaatatgaagtgagtgtctatgctcttaaggacactttgacaagcagaccagctcagggtgttgtcaccactctggagaatgtcagcccaccaagaagggctcgtgtgacagatgctactgagaccaccatcaccattagctggagaaccaagactgagacgatcactggcttccaagttgatgccgttccagccaatggccagactccaatccagagaaccatcaagccagatgtcagaagctacaccatcacaggtttacaaccaggcactgactacaagatctacctgtacaccttgaatgacaatgctcggagctcccctgtggtcatcgacgcctccactgccattgatgcaccatccaacctgcgtttcctggccaccacacccaattccttgctggtatcatggcagccgccacgtgccaggattaccggctacatcatcaagtatgagaagcctgggtctcctcccagagaagtggtccctcggccccgccctggtgtcacagaggctactattactggcctggaaccgggaaccgaatatacaatttatgtcattgccctgaagaataatcagaagagcgagcccctgattggaaggaaaaagacagacgagcttccccaactggtaacccttccacaccccaatcttcatggaccagagatcttggatgttccttccacagttcaaaagacccctttcgtcacccaccctgggtatgacactggaaatggtattcagcttcctggcacttctggtcagcaacccagtgttgggcaacaaatgatctttgaggaacatggttttaggcggaccacaccgcccacaacggccacccccataaggcataggccaaggccatacccgccgaatgtaggtgaggaaatccaaattggtcacatccccagggaagatgtagactatcacctgtacccacacggtccgggactcaatccaaatgcctctacaggacaagaagctctctctcagacaaccatctcatgggccccattccaggacacttctgagtacatcatttcatgtcatcctgttggcactgatgaagaacccttacagttcagggttcctggaacttctaccagtgccactctgacaggcctcaccagaggtgccacctacaacatcatagtggaggcactgaaagaccagcagaggcataaggttcgggaagaggttgttaccgtgggcaactctgtcaacgaaggcttgaaccaacctacggatgactcgtgctttgacccctacacagtttcccattatgccgttggagatgagtgggaacgaatgtctgaatcaggctttaaactgttgtgccagtgcttaggctttggaagtggccatttcagatgtgattcatctagatggtgccatgacaatggtgtgaactacaagattggagagaagtgggaccgtcagggagaaaatggccagatgatgagctgcacatgtcttgggaacggaaaaggagaattcaagtgtgaccctcatgaggcaacgtgttacgatgatgggaagacataccacgtaggagaacagtggcagaaggaatatctcggtgccatttgctcctgcacatgctttggaggccagcggggctggcgctgtgacaactgccgcagacctgggggtgaacccagtcccgaaggcactactggccagtcctacaaccagtattctcagagataccatcagagaacaaacactaatgttaattgcccaattgagtgcttcatgcctttagatgtacaggctgacagagaagattcccgagagtaa

SEQ ID NO: 690 - RNA, 2685 nt, synthetic construct
  misc_feature 1..2685: note = BAG62178
  source 1..2685: mol_type = other RNA
atgcgtgtcacctgggctccacccccatccattgatttaaccaacttcctggtgcgttactcacctgtgaaaaatgaggaagatgttgcagagttgtcaatttctccttcagacaatgcagtggtcttaacaaatctcctgcctggtacagaatatgtagtgagtgtctccagtgtctacgaacaacatgagagcacacctcttagaggaagacagaaaacaggtcttgattccccaactggcattgacttttctgatattactgccaactcttttactgtgcactggattgctcctcgagccaccatcactggctacaggatccgccatcatcccgagcacttcagtgggagacctcgagaagatcgggtgccccactctcggaattccatcaccctcaccaacctcactccaggcacagagtatgtggtcagcatcgttgctcttaatggcagagaggaaagtcccttattgattggccaacaatcaacagtttctgatgttccgagggacctggaagttgttgctgcgacccccaccagcctactgatcagctgggatgctcctgctgtcacagtgagatattacaggatcacttacggagaaacaggaggaaatagccctgtccaggagttcactgtgcctgggagcaagtctacagctaccatcagcggccttaaacctggagttgattataccatcactgtgtatgctgtcactggccgtggagacagccccgcaagcagcaagccaatttccattaattaccgaacagaaattgacaaaccatcccagatgcaagtgaccgatgttcaggacaacagcattagtgtcaagtggctgccttcaagttcccctgttactggttacagagtaaccaccactcccaaaaatggaccaggaccaacaaaaactaaaactgcaggtccagatcaaacagaaatgactattgaaggcttgcatcccacagtggagtatgtggttagtgtctatgctcagaatccaagcggagagagtcagcctctggttcagactgcagtaaccactattcctgcaccaactgacctgaagttcactcaggtcacacccacaagcctgagcgcccagtggacaccacccaatgttcagctcactggatatcgagtgcgggtgacccccaaggagaagaccggaccaatgaaagaaatcaaccttgctcctgacagctcatccgtggttgtatcaggacttatggtggccaccaaatatgaagtgagtgtctatgctcttaaggacactttgacaagcagaccagctcagggtgttgtcaccactctggagaatgtcagcccaccaagaagggctcgtgtgacagatgctactgagaccaccatcaccattagctggagaaccaagactgagacgatcactggcttccaagttgatgccgttccagccaatggccagactccaatccagagaaccatcaagccagatgttagaagctacaccatcacaggtttacaaccaggcactgactacaagatctacctgtacaccttgaatgacaatgctcggagctcccctgtggtcatcgacgcctccactgccattgatgcaccatccaacctgcgtttcctggccaccacacccaattccttgctggtatcatggcagccgccacgtgccaggattaccggctacatcatcaagtatgagaagcctgggtctcctcccagagaagtggtccctcggccccgccctggtgtcacagaggctactattactggcctggaaccgggaaccgaatatacaatttatgtcattgccctgaagaataatcagaagagcgagcccctgattggaaggaaaaagacaggacaagaagctctctctcagacaaccatctcatgggccccattccaggacacttctgagtacatcatttcatgtcatcctgttggcactgatgaagaacccttacagttcagggttcctggaacttctaccagtgccactctgacaggcctcaccagaggtgccacctacaacatcatagtggaggcactgaaagaccagcagaggcataaggttcgggaagaggttattaccgtgggcaactctgtcaacgaaggcttgaaccaacctacggatgactcgtgctttgacccctacacagtttcccattatgccgttggagatgagtgggaacgaatgtctgaatcaggctttaaactgttgtgccagtgcttaggctttggaagtggtcatttcagatgtgattcatctagatggtgccatgacaatggtgtgaactacaagattggagagaagtgggaccgtcagggagaaaatggccagatgatgagctgcacatgtcttgggaacggaaaaggagaattcaagtgtgaccctcatgaggcaacgtgttacgatgatgggaagacataccacgtaggagaacagtggcagaaggaatatctcggtgccatttgctcctgcacatgctttggaggccagcggggctggcgctgtgacaactgccgcagacctgggggtgaacccagtcccgaaggcactactggccagtcctacaaccagtattctcagagataccatcagagaacaaacactaatgttaattgcccaattgagtgcttcatgcctttagatgtacaggctgacagagaagattcccgagagtaa

SEQ ID NO: 691 - RNA, 1152 nt, synthetic construct
  misc_feature 1..1152: note = BAH12351
  source 1..1152: mol_type = other RNA
atggcttcagcctttcgcctttctttgaaaccaaaggtcagtgacaacatgactcatttaatggtggatttctcacaggaaagacagatgctgcaaactttgaagtttttgccagtccccaaagctccagagatagatccagtagagtgtttggtggcagataactctgtaacagtggcttggagaatgccagaagaagataataagattgaccattttatactggaacataggaagactaattttgatggacttccacgtgtaaaggatgagcgatgctgggagataattgataatattaagggtactgaatatacactatcaggcttaaaatttgattcaaagtatatgaatttcagagtgcgagcttgtaacaaggctgtggctggagagtattctgatccagtgactctagagaccaaagcacttaacttcaatttggataactcctcatcccatttgaacctgaaagttgaagatacatgtgtagagtgggatcctactggaggaaaaggtcaagaaagtaaaattaaaggaaaagagaacaagggcagtgtccatgttacttcactgaagaaacatacaagtggtacaccatccccaaaacgaacatctgtaggctccaggccaccagcagtaagaggcagtagagatcgttttactggagaatcatacacagtgctgggagacactgctattgaaagtggacaacattattgggaggtcaaggcccagaaggattgtaaatcctacagtgtgggagtagcatacaaaacgttggggaaatttgaccaattgggaaagacaaacactagttggtgtatccatgtcaacaactggctacaaaacacatttgcagcaaagcataataataaagtcaaagctttggatgttactgttcctgaaaaaataggtgtattttgtgattttgatgggggtcaactttcattctatgatgcaaattctaaacagttgctatattcctttaagacaaaatttactcagccagtactacctggtttcatggtatggtgtggtggactttctttgagtactgggatgcaggttccaagtgctgtgagaacacttcagaaaagtgaaaatggaatgactggttcagctagcagcctgaacaatgttgttactcaatag

SEQ ID NO: 692 - RNA, 441 nt, synthetic construct
  misc_feature 1..441: note = BAH14175
  source 1..441: mol_type = other RNA
atgccaccctcaaagcctcatccacctgtcgtgggcaaagtgactcatcacagcattgaattatactgggatctggaaaagaaagccaaacgccaaggacctcaagagcagtggttcaggttctcgattgaagaagaagaccccaaaatgcacacttatggtatcatttatacgggatatgcaacgaagcatgttgttgaaggtctggaaccaaggacgctgtacagatttcgcctgaaggtcaccagcccctctggggagtgtgagtacagcccactcgtctcagtgtctacaaccagtgagtattcagaccgtccacactcacctctctctagatcaatggagatgacaagcaatttagaaaaaatattctgcctctcgtttggccttaccagaagcagaaatgatacaatttttaaacactgcaataatatttgctag

SEQ ID NO: 693 - RNA, 2055 nt, synthetic construct
  misc_feature 1..2055: note = EAX08810
  source 1..2055: mol_type = other RNA
atggcagaacatccaccactactggatacaactcagatcttaagtagtgatatttctcttttgtctgcccctattgtaagtgcagatggaacacaacaggttattctggtacaagttaacccaggagaagcatttacaataagaagagaagatggacagtttcagtgcattacaggtcctgctcaggttccaatgatgtccccaaatggttctgtgcctcctatctatgtgcctcctggatatgccccacaggttattgaagacaatggtgttcgaagagttgtcgtggtccctcaggcaccagagtttcaccctggtagtcacacagttctccaccgttctccacatcctcctctacctggtttcattcctgtcccaactatgatgccgcctccaccacgtcatatgtactcacccgtgactggagctggagacatgacaacacagtatatgccacagtatcagtcttcacaagtctatggagatgtagatgctcactctacacatggaaggtccaactttagagatgaacgatctagtaaaacatatgaacgtttgcagaaaaaattgaaggatcgccaaggaacacagaaagataaaatgagcagtccaccatcatcaccccagaaatgcccttctcccattaatgaacataatggacttataaaaggacaaattgctggtggtataaacacaggatcagcaaaaatcaagtctgggaaggggaaaggtggtacacaagttgatacagaaattgaagaaaaagatgaagaaactaaagcatttgaagcacttctttccaacattgtcaaaccagtggcctccgacatccaggcaaggacagtagtacttacctggtcaccaccttccagcctcattaatggtgaaacagatgaaagtagtgtaccagagctctatggttatgaagttctgatctcaagtactggaaaagatgggaaatacaaaagtgtatatgtaggagaagaaacaaatatcactttaaatgatctcaagccagccatggattaccatgcaaaagtccaggcagaatataattctataaagggaactccttcagaggctgaaatctttaccaccttgagctgtgaacctgatatacctaatccaccaaggatagccaatcggaccaaaaattcactcactttgcaatggaaggcacctagtgacaatggttctaaaatccaaaactttgtattagaatgggatgaaggaaaaggaaatggagaattttgtcagtgttacatgggctcacagaaacaatttaaaattactaaactttcaccagcaatgggctgtaaattcagactatcggccagaaatgactatggtacaagtggttttagtgaagaagtcttatattacacctcaggctgtgctccttctatgccagcaagtcctgtattaaccaaggctggaattacttggttatccttacaatggagtaagccctcaggaacaccatcagatgaaggaatttcttacattttagagatggaggaagaaacttcaggatatggttttaagcctaaatatgatggagaagatcttgcttacacagtgaaaaatctcagacgtagtactaagtataaatttaaggttattgcttacaactcagaaggtaaaagtaatccaagtgaagtagtagaatttactacttgccctgataaaccaggcatacctgtaaagccttcagtgaaaggaaagatacattcacacagttttaaaataacctgggatccaccaaaagacaatggcggagcaaccatcaataaatatgtagtggagatggcagaaggttctaacggaaacaaatgggaaatgatatacagtggtgctaccagggaacatctttgtgatcgactgaatccaggctgtttctatcgtttacgagtttactgcatcagtgatggaggacagagtgcggtctctgaatctttacttgtgcagactccagctgtgcctcctggcccatgcctccctcccagattacagggtagacccaaagcaaaagaaatacagaccccctctggttga

SEQ ID NO: 694 - RNA, 492 nt, synthetic construct
  misc_feature 1..492: note = AAG35520
  source 1..492: mol_type = other RNA
atgtctgaatcaggctttaaactgttgtgccagtgcttaggctttggaagtggtcatttcagatgtgattcatctagatggtgccatgacaatggtgtgaactacaagattggagagaagtgggaccgtcagggagaaaatggccagatgatgagctgcacatgtcttgggaacggaaaaggagaattcaagtgtgaccctcatgaggcaacgtgttatgatgatgggaagacataccacgtaggagaacagtggcagaaggaatatctcggtgccatttgctcctgcacatgctttggaggccagcggggctggcgctgtgacaactgccgcagacctgggggtgaacccagtcccgaaggcactactggccagtcctacaaccagtattctcagagataccatcagagaacaaacactaatgttaattgcccaattgagtgcttcatgcctttagatgtacaggctgacagagaagattcccgagagtaa

SEQ ID NO: 695 - RNA, 1143 nt, synthetic construct
  misc_feature 1..1143: note = AAA52471
  source 1..1143: mol_type = other RNA
atgatgttctcgggcttcaacgcagactacgaggcgtcatcctcccgctgcagcagcgcgtccccggccggggatagcctctcttactaccactcacccgcagactccttctccagcatgggctcgcctgtcaacgcgcaggacttctgcacggacctggccgtctccagtgccaacttcattcccacggtcactgccatctcgaccagtccggacctgcagtggctggtgcagcccgccctcgtctcctctgtggccccatcgcagaccagagcccctcaccctttcggagtccccgccccctccgctggggcttactccagggctggcgttgtgaagaccatgacaggaggccgagcgcagagcattggcaggaggggcaaggtggaacagttatctccagaagaagaagagaaaaggagaatccgaagggaaaggaataagatggctgcagccaaatgccgcaaccggaggagggagctgactgatacactccaagcggagacagaccaactagaagatgagaagtctgctttgcagaccgagattgccaacctgctgaaggagaaggaaaaactagagttcatcctggcagctcaccgacctgcctgcaagatccctgatgacctgggcttcccagaagagatgtctgtggcttcccttgatctgactgggggcctgccagaggttgccaccccggagtctgaggaggccttcaccctgcctctcctcaatgaccctgagcccaagccctcagtggaacctgtcaagagcatcagcagcatggagctgaagaccgagccctttgatgacttcctgttcccagcatcatccaggcccagtggctctgagacagcccgctccgtgccagacatggacctatctgggtccttctatgcagcagactgggagcctctgcacagtggctccctggggatggggcccatggccacagagctggagcccctgtgcactccggtggtcacctgtactcccagctgcactgcttacacgtcttccttcgtcttcacctaccccgaggctgactccttccccagctgtgcagctgcccaccgcaagggcagcagcagcaatgagccttcctctgactcgctcagctcacccacgctgctggccctgtga

SEQ ID NO: 696 - RNA, 1296 nt, synthetic construct
  misc_feature 1..1296: note = AAG53607
  source 1..1296: mol_type = other RNA
atgcccaaccccaggcctggcaagccctcggccccttccttggcccttggcccatccccaggagcctcgcccagctggagggctgcacccaaagcctcagacctgctgggggcccggggcccagggggaaccttccagggccgagatcttcgaggcggggcccatgcctcctcttcttccttgaaccccatgccaccatcgcagctgcagctgcccacactgcccctagtcatggtggcaccctccggggcacggctgggccccttgccccacttacaggcactcctccaggacaggccacatttcatgcaccagctctcaacggtggatgcccacgcccggacccctgtgctgcaggtgcaccccctggagagcccagccatgatcagcctcacaccacccaccaccgccactggggtcttctccctcaaggcccggcctggcctcccacctgggatcaacgtggccagcctggaatgggtgtccagggagccggcactgctctgcaccttcccaaatcccagtgcacccaggaaggacagcaccctttcggctgtgccccagagctcctacccactgctggcaaatggtgtctgcaagtggcccggatgtgagaaggtcttcgaagagccagaggacttcctcaagcactgccaggcggaccatcttctggatgagaagggcagggcacaatgtctcctccagagagagatggtacagtctctggagcagcagctggtgctggagaaggagaagctgagtgccatgcaggcccacctggctgggaaaatggcactgaccaaggcttcatctgtggcatcatccgacaagggctcctgctgcatcgtagctgctggcagccaaggccctgtcgtcccagcctggtctggcccccgggaggcccctgacagcctgtttgctgtccggaggcacctgtggggtagccatggaaacagcacattcccagagttcctccacaacatggactacttcaagttccacaacatgcgaccccctttcacctacgccacgctcatccgctgggccatcctggaggctccagagaagcagcggacactcaatgagatctaccactggttcacacgcatgtttgccttcttcagaaaccatcctgccacctggaagaacgccatccgccacaacctgagtctgcacaagtgctttgtgcgggtggagagcgagaagggggctgtgtggaccgtggatgagctggagttccgcaagaaacggagccagaggcccagcaggtgttccaaccctacacctggcccctga

SEQ ID NO: 697 - RNA, 1098 nt, synthetic construct
  misc_feature 1..1098: note = AAA52639
  source 1..1098: mol_type = other RNA
atgtggctccggagccatcgtcagctctgcctggccttcctgctagtctgtgtcctctctgtaatcttcttcctccatatccatcaagacagctttccacatggcctaggcctgtcgatcctgtgtccagaccgccgcctggtgacacccccagtggccatcttctgcctgccgggtactgcgatgggccccaacgcctcctcttcctgtccccagcaccctgcttccctctccggcacctggactgtctaccccaatggccggtttggtaatcagatgggacagtatgccacgctgctggctctggcccagctcaacggccgccgggcctttatcctgcctgccatgcatgccgccctggccccggtattccgcatcaccctgcccgtgctggccccagaagtggacagccgcacgccgtggcgggagctgcagcttcacgactggatgtcggaggagtacgcggacttgagagatcctttcctgaagctctctggcttcccctgctcttggactttcttccaccatctccgggaacagatccgcagagagttcaccctgcacgaccaccttcgggaagaggcgcagagtgtgctgggtcagctccgcctgggccgcacaggggaccgcccgcgcacctttgtcggcgtccacgtgcgccgtggggactatctgcaggttatgcctcagcgctggaagggtgtggtgggcgacagcgcctacctccggcaggccatggactggttccgggcacggcacgaagcccccgttttcgtggtcaccagcaacggcatggagtggtgtaaagaaaacatcgacacctcccagggcgatgtgacgtttgctggcgatggacaggaggctacaccgtggaaagactttgccctgctcacacagtgcaaccacaccattatgaccattggcaccttcggcttctgggctgcctacctggctggcggagacactgtctacctggccaacttcaccctgccagactctgagttcctgaagatctttaagccggaggcggccttcctgcccgagtgggtgggcattaatgcagacttgtctccactctggacattggctaagccttga

SEQ ID NO: 698 - RNA, 1380 nt, synthetic construct
  misc_feature 1..1380: note = EAW58359
  source 1..1380: mol_type = other RNA
atggctcccctgtgccccagcccctggctccctctgttgatcccggcccctgctccaggcctcactgtgcaactgctgctgtcactgctgcttctggtgcctgtccatccccagaggttgccccggatgcaggaggattcccccttgggaggaggctcttctggggaagatgacccactgggcgaggaggatctgcccagtgaagaggattcacccagagaggaggatccacccggagaggaggatctacctggagaggaggatctacctggagaggaggatctacctgaagttaagcctaaatcagaagaagagggctccctgaagttagaggatctacctactgttgaggctcctggagatcctcaagaaccccagaataatgcccacagggacaaagaaggggatgaccagagtcattggcgctatggaggcgacccgccctggccccgggtgtccccagcctgcgcgggccgcttccagtccccggtggatatccgcccccagctcgccgccttctgcccggccctgcgccccctggaactcctgggcttccagctcccgccgctcccagaactgcgcctgcgcaacaatggccacagtgtgcaactgaccctgcctcctgggctagagatggctctgggtcccgggcgggagtaccgggctctgcagctgcatctgcactggggggctgcaggtcgtccgggctcggagcacactgtggaaggccaccgtttccctgccgagatccacgtggttcacctcagcaccgcctttgccagagttgacgaggccttggggcgcccgggaggcctggccgtgttggccgcctttctggaggagggcccggaagaaaacagtgcctatgagcagttgctgtctcgcttggaagaaatcgctgaggaaggctcagagactcaggtcccaggactggacatatctgcactcctgccctctgacttcagccgctacttccaatatgaggggtctctgactacaccgccctgtgcccagggtgtcatctggactgtgtttaaccagacagtgatgctgagtgctaagcagctccacaccctctctgacaccctgtggggacctggtgactctcggctacagctgaacttccgagcgacgcagcctttgaatgggcgagtgattgaggcctccttccctgctggagtggacagcagtcctcgggctgctgagccagtccagctgaattcctgcctggctgctggtgacatcctagccctggtttttggcctcctttttgctgtcaccagcgtcgcgttccttgtgcagatgagaaggcagcacagaaggggaaccaaagggggtgtgagctaccgcccagcagaggtagccgagactggagcctag

SEQ ID NO: 699 - RNA, 417 nt, synthetic construct
  misc_feature 1..417: note = U19142.1
  source 1..417: mol_type = other RNA
atgagttggcgaggaagatcgacctatcggcctagaccaagacgctacgtagagcctcctgaaatgattgggcctatgcggcccgagcagttcagtgatgaagtggaaccagcaacacctgaagaaggggaaccagcaactcaacgtcaggatcctgcagctgctcaggagggagaggatgagggagcatctgcaggtcaagggccgaagcctgaagctgatagccaggaacagggtcacccacagactgggtgtgagtgtgaagatggtcctgatgggcaggagatggacccgccaaatccagaggaggtgaaaacgcctgaagaagagatgaggtctcactatgttgcccagactgggattctctggcttttaatgaacaattgcttcttaaatctttccccacggaaaccttga

SEQ ID NO: 700 - RNA, 351 nt, synthetic construct
  misc_feature 1..351: note = AAH69397
  source 1..351: mol_type = other RNA
atgagttggcgaggaagatcgacctatcggcctagaccaagacgctacgtagagcctcctgaaatgattgggcctatgcggcccgagcagttcagtgatgaagtggaaccagcaacacctgaagaaggggaaccagcaactcaacgtcaggatcctgcagctgctcaggagggacaggatgagggagcatctgcaggtcaagggccgaagcctgaagctcatagccaggaacagggtcacccacagactgggtgtgagtgtgaagatggtcctgatgggcaggagatggacccgccaaatccagaggaggtgaaaacgcctgaagaaggtgaaaagcaatcacagtgttaa

SEQ ID NO: 701 - RNA, 357 nt, synthetic construct
  misc_feature 1..357: note = AAA82746
  source 1..357: mol_type = other RNA
atgaatctcagtagaggaaaatcgacctattattggcctagaccaaggcgctatgtacagcctcctgaagtgattgggcctatgcggcccgagcagttcagtgatgaagtggaaccagcaacacctgaagaaggggaaccagcaactcaacgtcaggatcctgcagctgctcaggagggagaggatgagggagcatctgcaggtcaagggccgaagcctgaagctgatagccaggaacagggtcacccacagactgggtgtgagtgtgaagatggtcctgatgggcaggagatggacccgccaaatccagaggaggtgaaaacgcctgaagaaggtgaaaagcaatcacagtgttaa

SEQ ID NO: 702 - RNA, 354 nt, synthetic construct
  misc_feature 1..354: note = AAH69470
  source 1..354: mol_type = other RNA
atgagttggcgaggaagatcgacctattattggcctagaccaaggcgctatgtacagcctcctgaaatgattgggcctatgcggcccgagcagttcagtgatgaagtggaaccagcaacacctgaagaaggggaaccagcaactcaacgtcaggatcctgcagctgctcaggagggagaggatgagggagcatctgcaggtcaagggccgaagcctgaagctgatagccaggaacagggtcacccacagactgggtgtgagtgtgaagatggtcctgatgggcaggagatggacccgccaaatccagaggaggtgaaaacgcctgaagaaggtgaagggcaatcacagtgttaa

SEQ ID NO: 703 - RNA, 354 nt, synthetic construct
  misc_feature 1..354: note = AAA82748
  source 1..354: mol_type = other RNA
atgagttggcgaggaagatcgacctattattggcctagaccaaggcgctatgtacagcctcctgaagtgattgggcctatgcggcccgagcagttcagtgatgaagtggaaccagcaacacctgaagaaggggaaccagcaactcaacgtcaggatcctgcagctgctcaggagggagaggatgagggagcatctgcaggtcaagggccgaagcctgaagctgatagccaggaacagggtcacccacagactgggtgtgagtgtgaagatggtcctgatgggcaggagatggacccgccaaatccagaggaggtgaaaacgcctgaagaaggtgaaaagcaatcacagtgttaa

SEQ ID NO: 704 - RNA, 354 nt, synthetic construct
  misc_feature 1..354: note = AAA82749
  source 1..354: mol_type = other RNA
atgagttggcgaggaagatcgacctattattggcctagaccaaggcgctatgtacagcctcctgaagtgattgggcctatgcggcccgagcagttcagtgatgaagtggaaccagcaacacctgaagaaggggaaccagcaactcaacgtcaggatcctgcagctgctcaggagggagaggatgagggagcatctgcaggtcaagggccgaagcctgaagctgatagccaggaacagggtcacccacagactgggtgtgagtgtgaagatggtcctgatgggcaggaggtggacccgccaaatccagaggaggtgaaaacgcctgaagaaggtgaaaagcaatcacagtgttaa

SEQ ID NO: 705 - RNA, 354 nt, synthetic construct
  misc_feature 1..354: note = AAC25989
  source 1..354: mol_type = other RNA
atgagttggcgaggaagatcgacctattattggcctagaccaaggcgctatgtacagcctcctgaaatgattgggcctatgcggcccgagcagttcagtgatgaagtggaaccagcaacacctgaagaaggggaaccagcaactcaacgtcaggatcctgcagctgctcaggagggagaggatgagggagcatctgcaggtcaagggccgaagcctgaagctcatagccaggaacagggtcacccacagactgggtgtgagtgtgaagatggtcctgatgggcaggagatggacccgccaaatccagaggaggtgaaaacgcctgaagaaggtgaaaagcaatcacagtgttaa

SEQ ID NO: 706 - RNA, 351 nt, synthetic construct
  misc_feature 1..351: note = AAC33676
  source 1..351: mol_type = other RNA
atgagttggcgaggaagatcgacctatcggcctagaccaagacgctacgtagagcctcctgaaatgattgggcctatgcggcccgagcagttcagtgatgaagtggaaccagcaacacctgaagaaggggaaccagcaactcaacgtcaggatcctgcagctgctcaggagggagaggatgagggagcatctgcaggtcaagggccgaagcctgaagctgatagccaggaacagggtcacccacagactgggtgtgagtgtgaagatggtcctgatgggcaggagatggacccgccaaatccagaggaggtgaaaacgcctgaagaaggtgaaaagcaatcacagtgttaa

SEQ ID NO: 707 - RNA, 1344 nt, synthetic construct
  misc_feature 1..1344: note = AAA35657
  source 1..1344: mol_type = other RNA
atggagctgctaaagctgaaccggagcgtgcagggaaccggacccgggccgggggcttccctgtgccgcccgggggcgcctctcctcaacagcagcagtgtgggcaacctcagctgcgagccccctcgcattcgcggagccgggacacgagaattggagctggccattagaatcactctttacgcagtgatcttcctgatgagcgttggaggaaatatgctcatcatcgtggtcctgggactgagccgccgcctgaggactgtcaccaatgccttcctcctctcactggcagtcagcgacctcctgctggctgtggcttgcatgcccttcaccctcctgcccaatctcatgggcacattcatctttggcaccgtcatctgcaaggcggtttcctacctcatgggggtgtctgtgagtgtgtccacgctaagcctcgtggccatcgcactggagcggtacagcgccatctgccgaccactgcaggcacgagtgtggcagacgcgctcccacgcggctcgcgtgattgtagccacgtggctgctgtccggactactcatggtgccctaccccgtgtacactgtcgtgcaaccagtggggcctcgtgtgctgcagtgcgtgcatcgctggcccagtgcgcgggtccgccagacctggtccgtactgctgcttctgctcttgttcttcatcccgggtgtggttatggccgtggcctacgggcttatctctcgcgagctctacttagggcttcgctttgacggcgacagtgacagcgacagccaaagcagggtccgaaaccaaggcgggctgccaggggctgttcaccagaacgggcgttgccggcctgagactggcgcggttggcgaagacagcgatggctgctacgtgcaacttccacgttcccggcctgccctggagctgacggcgctgacggctcctgggccgggatccggctcccggcccacccaggccaagctgctggctaagaagcgcgtggtgcgaatgttgctggtgatcgttgtgcttttttttctgtgttggttgccagtttatagtgccaacacgtggcgcgcctttgatggcccgggtgcacaccgagcactctcgggtgctcctatctccttcattcacttgctgagctacgcctcggcctgtgtcaaccccctggtctactgcttcatgcaccgtcgctttcgccaggcctgcctggaaacttgcgctcgctgctgcccccggcctccacgagctcgccccagggctcttcccgatgaggaccctcccactccctccattgcttcgctgtccaggcttagctacaccaccatcagcacactgggccctggctga

SEQ ID NO: 708 - RNA, 2226 nt, synthetic construct
  misc_feature 1..2226: note = AAD22449
  source 1..2226: mol_type = other RNA
atggctctcttcactccgtggaagttgtcctctcagaagctgggctttttcctggtgacttttggcttcatttggggtatgatgcttctgcactttaccatccagcagcgaactcagcctgaaagcagctccatgctgcgcgagcagatcctggacctcagcaaaaggtacatcaaggcactggcagaagaaaacaggaatgtggtggatgggccatacgctggagtcatgacagcttatgatctgaagaaaacccttgctgtgttattagataacattttgcagcgcattggcaagttggagtcgaaggtggacaatcttgttgtcaatggcaccggaacaaactcaaccaactccactacagctgttcccagcttggttgcacttgagaaaattaatgtggcagatatcattaacggagctcaagaaaaatgtgtattgcctcctatggacggctaccctcactgtgagggaaagatcaagtggatgaaagacatgtggcgttcagatccctgctacgcagactatggagtggatggatccacctgctctttttttatttacctcagtgaggttgaaaattggtgtcctcatttaccttggagagcaaaaaatccctacgaagaagctgatcataattcattggcggaaattcgtacagattttaatattctctacagtatgatgaaaaagcatgaagaattccggtggatgagactacggatccggcgaatggctgacgcatggatccaagcaatcaagtccctggcagaaaagcagaaccttgaaaagagaaagcggaagaaagtcctcgttcacctgggactcctgaccaaggaatctggatttaagattgcagagacagctttcagtggtggccctcttggtgaattagttcaatggagtgatttaattacatctctgtacttactgggccatgacattaggatttcagcttcactggctgagctcaaggaaatcatgaagaaggttgtaggaaaccgatctggctgcccaactgtaggagacagaattgttgagctcatttacattgatattgtaggacttgctcaattcaagaaaactcttggaccatcctgggttcattaccagtgcatgctccgagtgctggattcctttggaacagaacctgagttcaatcacgcaaattatgcccaatcgaaaggccacaagaccccttggggaaaatggaatctgaaccctcagcagttttataccatgttccctcataccccagacaacagctttctggggtttgtggttgagcagcacctgaactccagtgatatccaccacattaatgaaatcaaaaggcagaaccagtcccttgtgtatggcaaagtggatagcttctggaagaataagaagatctacttggacattattcacacatacatggaagtgcatgcaactgtttatggctccagcacaaagaatattcccagttacgtgaaaaaccatggtatcctcagtggacgggacctgcagttccttcttcgagaaaccaagttgtttgttggacttgggttcccttacgagggcccagctcccctggaagctatcgcaaatggatgtgcttttctgaatcccaagttcaacccacccaaaagcagcaaaaacacagacttcttcattggcaagccaacactgagagagctcacatcccagcatccttacgctgaagttttcatcgggcggccacatgtgtggactgttgacctcaacaatcaggaggaagtagaggatgcagtgaaagccatcttaaaccagaagattgagccatacatgccatatgaatttacgtgcgaggggatgctacagagaatcaatgctttcattgaaaaacaggacttctgccatgggcaagtgatgtggccacccctcagcgccctacaggtcaagcttgctgagcccgggcagtcctgcaagcaggtgtgccaggagagccagctcatctgcgagccttctttcttccagcacctcaacaaggacaaggacatgctgaagtacaaggtgacctgccaaagctcagagctggccaaggacatcctggtgccctcctttgaccctaagaataagcactgtgtgtttcaaggtgacctcctgctcttcagctgtgcaggcgcccaccccaggcaccagagggtctgcccctgccgggacttcatcaagggccaggtggctctctgcaaagactgcctatag

SEQ ID NO: 709 - RNA, 1743 nt, synthetic construct
  misc_feature 1..1743: note = EAX11770
  source 1..1743: mol_type = other RNA
atggccgggaccgtgcgcaccgcgtgcttggtggtggcgatgctgctcagcttggacttcccgggacaggcgcagcccccgccgccgccgccggacgccacctgtcaccaagtccgctccttcttccagagactgcagcccggactcaagtgggtgccagaaactcccgtgccaggatcagatttgcaagtatgtctccctaagggcccaacatgctgctcaagaaagatggaagaaaaataccaactaacagcacgattgaacatggaacagctgcttcagtctgcaagtatggagctcaagttcttaattattcagaatgctgcggttttccaagaggcctttgaaattgttgttcgccatgccaagaactacaccaatgccatgttcaagaacaactacccaagcctgactccacaagcttttgagtttgtgggtgaatttttcacagatgtgtctctctacatcttgggttctgacatcaatgtagatgacatggtcaatgaattgtttgacagcctgtttccagtcatctatacccagctaatgaacccaggcctgcctgattcagccttggacatcaatgagtgcctccgaggagcaagacgtgacctgaaagtatttgggaatttccccaagcttattatgacccaggtttccaagtcactgcaagtcactaggatcttccttcaggctctgaatcttggaattgaagtgatcaacacaactgatcacctgaagttcagtaaggactgtggccgaatgctcaccagaatgtggtactgctcttactgccagggactgatgatggttaaaccctgtggcggttactgcaatgtggtcatgcaaggctgtatggcaggtgtggtggagattgacaagtactggagagaatacattctgtcccttgaagaacttgtgaatggcatgtacagaatctatgacatggagaacgtactgcttggtctcttttcaacaatccatgattctatccagtatgtccagaagaatgcaggaaagctgaccaccactattggcaagttatgtgcccattctcaacaacgccaatatagatctgcttattatcctgaagatctctttattgacaagaaagtattaaaagttgctcatgtagaacatgaagaaaccttatccagccgaagaagggaactaattcagaagttgaagtctttcatcagcttctatagtgctttgcctggctacatctgcagccatagccctgtggcggaaaacgacaccctttgctggaatggacaagaactcgtggagagatacagccaaaaggcagcaaggaatggaatgaaaaaccagttcaatctccatgagctgaaaatgaagggccctgagccagtggtcagtcaaattattgacaaactgaagcacattaaccagctcctgagaaccatgtctatgcccaaaggtagagttctggataaaaacctggatgaggaagggtttgaaagtggagactgcggtgatgatgaagatgagtgcattggaggctctggtgatggaatgataaaagtgaagaatcagctccgcttccttgcagaactggcctatgatctggatgtggatgatgcgcctggaaacagtcagcaggcaactccgaaggacaacgagataagcacctttcacaacctcgggaacgttcattccccgctgaagcttctcaccagcatggccatctcggtggtgtgcttcttcttcctggtgcactga

SEQ ID NO: 710 - RNA, 1743 nt, synthetic construct
  misc_feature 1..1743: note = AAA93471
  source 1..1743: mol_type = other RNA
atggccgggaccgtgcgcaccgcgtgcttggtggtggcgatgctgctcagcttggacttcccgggacaggcgcagcccccgccgccgccgccggacgccacctgtcaccaagtccgctccttcttccagagactgcagcccggactcaagtgggtgccagaaactcccgtgccaggatcagatttgcaagtatgtctccctaagggcccaacatgctgctcaagaaagatggaagaaaaataccaactaacagctcgattgaacatggaacagctgcttcagtctgcaagtatggagctcaagttcttaattattcagaatgctgcggttttccaagaggcctttgaaattgttgttcgccatgccaagaactacaccaatgccatgttcaagaacaactacccaagcctgactccacaagcttttgagtttgtgggtgaatttttcacagatgtgtctctctacatcttgggttctgacatcaatgtagatgacatggtcaatgaattgtttgacagcctgtttccagtcatctatacccagctaatgaacccaggcctgcctgattcagccttggacatcaatgagtgcctccgaggagcaagacgtgacctgaaagtatttgggaatttccccaagcttattatgacccaggtttccaagtcactgcaagtcactaggatcttccttcaggctctgaatcttggaattgaagtgatcaacacaactgatcacctgaagttcagtaaggactgtggccgaatgctcaccagaatgtggtactgctcttactgccagggactgatgatggttaaaccctgtggcggttactgcaatgtggtcatgcaaggctgtatggcaggtgtggtggagattgacaagtactggagagaatacattctgtcccttgaagaacttgtgaatggcatgtacagaatctatgacatggagaacgtactgcttggtctcttttcaacaatccatgattctatccagtatgtccagaagaatgcaggaaagctgaccaccactattggcaagttatgtgcccattctcaacaacgccaatatagatctgcttattatcctgaagatctctttattgacaagaaagtattaaaagttgctcatgtagaacatgaagaaaccttatccagccgaagaagggaactaattcagaagttgaagtctttcatcagcttctatagtgctttgcctggctacatctgcagccatagccctgtggcggaaaacgacaccctttgctggaatggacaagaactcgtggagagatacagccaaaaggcagcaaggaatggaatgaaaaaccagttcaatctccatgagctgaaaatgaagggccctgagccagtggtcagtcaaattattgacaaactgaagcacattaaccagctcctgagaaccatgtctatgcccaaaggtagagttctggataaaaacctggatgaggaagggtttgaaagtggagactgcggtgatgatgaagatgagtgcattggagggtctggtgatggaatgataaaagtgaagaatcagctccgcttccttgcagaactggcctatgatctggatgtggatgatgcgcctggaaacagtcagcaggcaactccgaaggacaacgagataagcacctttcacaacctcgggaacgttcattccccgctgaagcttctcaccagcatggccatctcggtggtgtgcttcttcttcctggtgcactga

SEQ ID NO: 711 - RNA, 1743 nt, synthetic construct
  misc_feature 1..1743: note = AAH35972
  source 1..1743: mol_type = other RNA
atggccgggaccgtgcgcaccgcgtgcttggtggtggcgatgctgctcagcttggacttcccgggacaggcgcagcccccgccgccgccgccggacgccacctgtcaccaagtccgctccttcttccagagactgcagcccggactcaagtgggtgccagaaactcccgtgccaggatcagatttgcaagtatgtctccctaagggcccaacatgctgctcaagaaagatggaagaaaaataccaactaacagcacgattgaacatggaacagctgcttcagtctgcaagtatggagctcaagttcttaattattcagaatgctgcggttttccaagaggcctttgaaattgttgttcgccatgccaagaactacaccaatgccatgttcaagaacaactacccaagcctgactccacaagcttttgagtttgtgggtgaatttttcacagatgtgtctctctacatcttgggttctgacatcaatgtagatgacatggtcaatgaattgtttgacagcctgtttccagtcatctatacccagctaatgaacccaggcctgcctgattcagccttggacatcaatgagtgcctccgaggagcaagacgtgacctgaaagtatttgggaatttccccaagcttattatgacccaggtttccaagtcactgcaagtcactaggatcttccttcaggctctgaatcttggaattgaagtgatcaacacaactgatcacctgaagttcagtaaggactgtggccgaatgctcaccagaatgtggtactgctcttactgccagggactgatgatggttaaaccctgtggcggttactgcaatgtggtcatgcaaggctgtatggcaggtgtggtggagattgacaagtactggagagaatacattctgtcccttgaagaacttgtgaatggcatgtacagaatctatgacatggagaacgtactgcttggtctcttttcaacaatccatgattctatccagtatgtccagaagaatgcaggaaagctgaccaccactattggcaagttatgtgcccattctcaacaacgccaatatagatttgcttattatcctgaagatctctttattgacaagaaagtattaaaagttgctcatgtagaacatgaagaaaccttatccagccgaagaagggaactaattcagaagttgaagtctttcatcagcttctatagtgctttgcctggctacatctgcagccatagccctgtggcggaaaacgacaccctttgctggaatggacaagaactcgtggagagatacagccaaaaggcagcaaggaatggaatgaaaaaccagttcaatctccatgagctgaaaatgaagggccctgagccagtggtcagtcaaattattgacaaactgaagcacattaaccagctcctgagaaccatgtctatgcccaaaggtagagttctggataaaaacctggatgaggaagggtttgaaagtggagactgcggtgatgatgaagatgagtgcattggaggctctggtgatggaatgataaaagtgaagaatcagctccgcttccttgcagaactggcctatgatctggatgtggatgatgcgcctggaaacagtcagcaggcaactccgaaggacaacgagataagcacctttcacaacctcgggaacgttcattccccgctgaagcttctcaccagcatggccatctcggtggtgtgcttcttcttcctggtgcactga

SEQ ID NO: 712 - RNA, 1683 nt, synthetic construct
  misc_feature 1..1683: note = EAW93784
  source 1..1683: mol_type = other RNA
atggaatgtctctactatttcctgggatttctgctcctggctgcaagattgccacttgatgccgccaaacgatttcatgatgtgctgggcaatgaaagaccttctgcttacatgagggagcacaatcaattaaatggctggtcttctgatgaaaatgactggaatgaaaaactctacccagtgtggaagcggggagacatgaggtggaaaaactcctggaagggaggccgtgtgcaggcggtcctgaccagtgactcaccagccctcgtgggctcaaatataacatttgcggtgaacctgatattccctagatgccaaaaggaagatgccaatggcaacatagtctatgagaagaactgcagaaatgaggctggtttatctgctgatccgtatgtttacaactggacagcatggtcagaggacagtgacggggaaaatggcaccggccaaagccatcataacgtcttccctgatgggaaaccttttcctcaccaccccggatggagaagatggaatttcatctacgtcttccacacacttggtcagtatttccagaaattgggacgatgttcagtgagagtttctgtgaacacagccaatgtgacacttgggcctcaactcatggaagtgactgtctacagaagacatggacgggcatatgttcccatcgcacaagtgaaagatgtgtacgtggtaacagatcagattcctgtgtttgtgactatgttccagaagaacgatcgaaattcatccgacgaaaccttcctcaaagatctccccattatgtttgatgtcctgattcatgatcctagccacttcctcaattattctaccattaactacaagtggagcttcggggataatactggcctgtttgtttccaccaatcatactgtgaatcacacgtatgtgctcaatggaaccttcagccttaacctcactgtgaaagctgcagcaccaggaccttgtccgccaccgccaccaccacccagaccttcaaaacccaccccttctttaggacctgctggtgacaaccccctggagctgagtaggattcctgatgaaaactgccagattaacagatatggccactttcaagccaccatcacaattgtagagggaatcttagaggttaacatcatccagatgacagacgtcctgatgccggtgccatggcctgaaagctccctaatagactttgtcgtgacctgccaagggagcattcccacggaggtctgtaccatcatttctgaccccacctgcgagatcacccagaacacagtctgcagccctgtggatgtggatgagatgtgtctgctgactgtgagacgaaccttcaatgggtctgggacgtactgtgtgaacctcaccctgggggatgacacaagcctggctctcacgagcaccctgatttctgttcctgacagagacccagcctcgcctttaaggatggcaaacagtgccctgatctccgttggctgcttggccatatttgtcactgtgatctccctcttggtgtacaaaaaacacaaggaatacaacccaatagaaaatagtcctgggaatgtggtcagaagcaaaggcctgagtgtctttctcaaccgtgcaaaagccgtgttcttcccgggaaaccaggaaaaggatccgctactcaaaaaccaagaatttaaaggagtttcttaa

SEQ ID NO: 713 - RNA, 1719 nt, synthetic construct
  misc_feature 1..1719: note = AAH32783
  source 1..1719: mol_type = other RNA
atggaatgtctctactatttcctgggatttctgctcctggctgcaagattgccacttgatgccgccaaacgatttcatgatgtgctgggcaatgaaagaccttctgcttacatgagggagcacaatcaattaaatggctggtcttctgatgaaaatgactggaatgaaaaactctacccagtgtggaagcggggagacatgaggtggaaaaactcctggaagggaggccgtgtgcaggcggtcctgaccagtgactcaccagccctcgtgggctcaaatataacatttgcggtgaacctgatattccctagatgccaaaaggaagatgccaatggcaacatagtctatgagaagaactgcagaaatgaggctggtttatctgctgatccgtatgtttacaactggacagcatggtcagaggacagtgacggggaaaatggcaccggccaaagccatcataacgtcttccctgatgggaaaccttttcctcaccaccccggatggagaagatggaatttcatctacgtcttccacacacttggtcagtatttccagaaattgggacgatgttcagtgagagtttctgtgaacacagccaatgtgacacttgggcctcaactcatggaagtgactgtctacagaagacatggacgggcatatgttcccatcgcacaagtgaaagatgtgtacgtggtaacagatcagattcctgtgtttgtgactatgttccagaagaacgatcgaaattcatccgacgaaaccttcctcaaagatctccccattatgtttgatgtcctgattcatgatcctagccacttcctcaattattctaccattaactacaagtggagcttcggggataatactggcctgtttgtttccaccaatcatactgtgaatcacacgtatgtgctcaatggaaccttcagccttaacctcactgtgaaagctgcagcaccaggaccttgtccgccaccgccaccaccacccagaccttcaaaacccaccccttctttagcaactactctaaaatcttatgattcaaacaccccaggacctgctggtgacaaccccctggagctgagtaggattcctgatgaaaactgccagattaacagatatggccactttcaagccaccatcacaattgtagagggaatcttagaggttaacatcatccagatgacagacgtcctgatgccggtgccatggcctgaaagctccctaatagactttgtcgtgacctgccaagggagcattcccacggaggtctgtaccatcatttctgaccccacctgcgagatcacccagaacacagtctgcagccctgtggatgtggatgagatgtgtctgctgactgtgagacgaaccttcaatgggtctgggacgtactgtgtgaacctcaccctgggggatgacacaagcctggctctcacgagcaccctgatttctgttcctgacagagacccagcctcgcctttaaggatggcaaacagcgccctgatctccgttggctgcttggccatatttgtcactgtgatctccctcttggtgtacaaaaaacacaaggaatacaacccaatagaaaatagtcctgggaatgtggtcagaagcaaaggcctgagtgtctttctcaaccgtgcaaaagccgtgttcttcccgggaaaccaggaaaaggatccgctactcaaaaaccaagaatttaaaggagtttcttaa

SEQ ID NO: 714 - RNA, 621 nt, synthetic construct
  misc_feature 1..621: note = CAD43718
  source 1..621: mol_type = other RNA
atggaatgtctctactatttcctgggatttctgctcctggctgcaagattgccacttgatgccgccaaacgatttcatgatgtgctgggcaatgaaagaccttctgcttacatgagggagcacaatcaattaaatggctggtcttctgatgaaaatgactggaatgaaaaactctacccagtgtggaagcggggagacatgaggtggaaaaactcctggaagggaggccgtgtgcaggcggtcctgaccagtgactcaccagccctcgtgggctcaaatataacatttgcggtgaacctgatattccctagatgccaaaaggaagatgccaatggcaacatagtctatgagaagaactgcagaaatgaggctggtttatctgctgatccgtatgtttacaactggacagcatggtcagaggacagtgacggggaaaatggcaccggccaaagccatcataacgtcttccctgatgggaaaccttttcctcaccaccccggatggagaagatggaatttcatctacgtcttccacacacttgattggcttttacaaacccctaagcttcttctttacctttccttaaaatttcaaccttctcttttcttactctataattga

SEQ ID NO: 715 - RNA, 621 nt, synthetic construct
  misc_feature 1..621: note = AAH11595
  source 1..621: mol_type = other RNA
atggaatgtctctactatttcctgggatttctgctcctggctgcaagattgccacttgatgccgccaaacgatttcatgatgtgctgggcaatgaaagaccttctgcttacatgagggagcacaatcaattaaatggctggtcttctgatgaaaatgactggaatgaaaaactctacccagtgtggaagcggggagacatgaggtggaaaaactcctggaagggaggccgtgtgcaggcggtcctgaccagtgactcaccagccctcgtgggctcaaatataacatttgcggtgaacctgatattccctagatgccaaaaggaagatgccaatggcaacatagtctatgagaagaactgcagaaatgaggctggtttatctgctgatccatatgtttacaactggacagcatggtcagaggacagtgacggggaaaatggcaccggccaaagccatcataacgtcttccctgatgggaaaccttttcctcaccaccccggatggagaagatggaatttcatctacgtcttccacacacttggttggcttttacaaacccctaagcttcttctttacctttccttaaaatttcaaccttctcttttcttactctataattga

SEQ ID NO: 716 - RNA, 2640 nt, synthetic construct
  misc_feature 1..2640: note = CCDS5600.1
  source 1..2640: mol_type = other RNA
atgaagatgttgacaagactgcaagttcttaccttagctttgttttcaaagggatttttactctctttaggggaccataactttctaaggagagagattaaaatagaaggtgaccttgttttagggggcctgtttcctattaacgaaaaaggcactggaactgaagaatgtgggcgaatcaatgaagaccgagggattcaacgcctggaagccatgttgtttgctattgatgaaatcaacaaagatgattacttgctaccaggagtgaagttgggtgttcacattttggatacatgttcaagggatacctatgcattggagcaatcactggagtttgtcagggcatctttgacaaaagtggatgaagctgagtatatgtgtcctgatggatcctatgccattcaagaaaacatcccacttctcattgcaggggtcattggtggctcttatagcagtgtttccatacaggtggcaaacctgctgcggctcttccagatccctcagatcagctacgcatccaccagcgccaaactcagtgataagtcgcgctatgattactttgccaggaccgtgccccccgacttctaccaggccaaagccatggctgagatcttgcgcttcttcaactggacctacgtgtccacagtagcctccgagggtgattacggggagacagggatcgaggccttcgagcaggaagcccgcctgcgcaacatctgcatcgctacggcggagaaggtgggccgctccaacatccgcaagtcctacgacagcgtgatccgagaactgttgcagaagcccaacgcgcgcgtcgtggtcctcttcatgcgcagcgacgactcgcgggagctcattgcagccgccagccgcgccaatgcctccttcacctgggtggccagcgacggctggggcgcgcaggagagcatcatcaagggcagcgagcatgtggcctacggcgccatcaccctggagctggcctcccagcctgtccgccagttcgaccgctacttccagagcctcaacccctacaacaaccaccgcaacccctggttccgggacttctgggagcaaaagtttcagtgcagcctccagaacaaacgcaaccacaggcgcgtctgcgacaagcacctggccatcgacagcagcaactacgagcaagagtccaagatcatgtttgtggtgaacgcggtgtatgccatggcccacgctttgcacaaaatgcagcgcaccctctgtcccaacactaccaagctttgtgatgctatgaagatcctggatgggaagaagttgtacaaggattacttgctgaaaatcaacttcacggctccattcaacccaaataaagatgcagatagcatagtcaagtttgacacttttggagatggaatggggcgatacaacgtgttcaatttccaaaatgtaggtggaaagtattcctacttgaaagttggtcactgggcagaaaccttatcgctagatgtcaactctatccactggtcccggaactcagtccccacttcccagtgcagcgacccctgtgcccccaatgaaatgaagaatatgcaaccaggggatgtctgctgctggatttgcatcccctgtgaaccctacgaatacctggctgatgagtttacctgtatggattgtgggtctggacagtggcccactgcagacctaactggatgctatgaccttcctgaggactacatcaggtgggaagacgcctgggccattggcccagtcaccattgcctgtctgggttttatgtgtacatgcatggttgtaactgtttttatcaagcacaacaacacacccttggtcaaagcatcgggccgagaactctgctacatcttattgtttggggttggcctgtcatactgcatgacattcttcttcattgccaagccatcaccagtcatctgtgcattgcgccgactcgggctggggagttccttcgctatctgttactcagccctgctgaccaagacaaactgcattgcccgcatcttcgatggggtcaagaatggcgctcagaggccaaaattcatcagccccagttctcaggttttcatctgcctgggtctgatcctggtgcaaattgtgatggtgtctgtgtggctcatcctggaggccccaggcaccaggaggtatacccttgcagagaagcgggaaacagtcatcctaaaatgcaatgtcaaagattccagcatgttgatctctcttacctacgatgtgatcctggtgatcttatgcactgtgtacgccttcaaaacgcggaagtgcccagaaaatttcaacgaagctaagttcataggttttaccatgtacaccacgtgcatcatctggttggccttcctccctatattttatgtgacatcaagtgactacagagtgcagacgacaaccatgtgcatctctgtcagcctgagtggctttgtggtcttgggctgtttgtttgcacccaaggttcacatcatcctgtttcaaccccagaagaatgttgtcacacacagactgcacctcaacaggttcagtgtcagtggaactgggaccacatactctcagtcctctgcaagcacgtatgtgccaacggtgtgcaatgggcgggaagtcctcgactccaccacctcatctctgtga

SEQ ID NO: 717 - RNA, 1947 nt, synthetic construct
  misc_feature 1..1947: note = CCDS4977.1
  source 1..1947: mol_type = other RNA
atgtcccaccacggaggagctcccaaggcctctacgtgggtcgttgctagtcggcgaagctcgacagtgtcccgagcgccagagaggaggccggcggaggagttgaatcgaacaggtcctgagggatatagtgtcggcagaggtggtcgctggagaggcacctctaggcccccggaggccgtggccgctggtcacgaggaactgccgctgtgttttgctttgaagagccactttgttggcgcggtaatcggtcgtggtgggtcaaaaataaagaatatacaaagtacaacaaacaccacaatccaaataatacaagaacaaccagaatcattagtcaaaatttttggcagcaaggcaatgcaaacgaaagcaaaagcagtgatagacaattttgttaaaaagctagaagaaaattacaattcagaatgcggaattgatactgcattccaaccttctgttggaaaagatggaagcacagataacaatgttgttgcaggagatcggccattgatagattgggatcaaattagagaggaaggtttgaaatggcaaaaaacaaagtgggcagatttaccaccaattaagaaaaacttttataaagagtccactgccacaagtgccatgtcaaaagtagaagcagatagttggaggaaagaaaattttaatataacgtgggatgacttgaaggatggggagaaacgacctatccccaatcctacctgcacatttgatgacgcctttcaatgttatcctgaggttatggaaaacattaaaaaggcaggttttcaaaagccaacacctattcagtcacaggcatggcccattgtgttgcaaggaatagatcttataggagtagcccagactggaacaggaaagacattgtgttatttaatgcctggatttattcatctggtccttcaacccagccttaaaggtcaaaggaatagacccggcatgttagttctaactcccactcgggaattagcacttcaagtagaaggagaatgttgcaaatattcatataaagggcttcggagtgtttgtgtatatggtggtggaaatagagatgaacaaatagaagagcttaaaaaaggtgtagatatcataattgcaactcccggaagattgaatgatctgcaaatgagtaacttcgtcaatctgaagaatataacctacttggttttagatgaagcagacaagatgttggacatgggatttgaaccccagataatgaagattttgttagatgtgcgcccagataggcagacagttatgaccagtgctacatggcctcattcagttcatcgcctcgcacaatcttatttgaaagaaccaatgattgtctatgttggtacattggatctagttgctgtaagttcagtgaagcaaaatataattgtaaccaccgaggaagagaaatggagtcacatgcaaacttttctacagagtatgtcatccacagacaaagtcattgtcttcgtttctcgaaaagctgttgcggatcacttatcaagtgacctaatacttggaaatatatcagtagagtctctgcatggagatagagaacagagagatcgggagaaagcattagagaactttaaaacaggcaaagtgagaatactaattgcaactgatctagcctctagaggacttgatgtccatgacgttacacatgtctataattttgactttccacggaatattgaagaatacgtacaccgaatagggcgcacgggaagagcagggaggactggtgtttccattacaactttgactagaaatgattggagggttgcctctgaattgattaatattctggaaagagcaaatcagagtattccagaggagcttgtatcaatggctgagaggtttaaggcacatcaacagaaaagggaaatggaaagaaaaatggaaagacctcaaggaaggcccaagaagtttcattaa

SEQ ID NO: 718 - RNA, 1209 nt, synthetic construct
  misc_feature 1..1209: note = ACD02430
  source 1..1209: mol_type = other RNA
atggcgcagaaggagggtggccggactgtgccatgctgctccagacccaaggtggcagctctcactgcggggaccctgctacttctgacagccatcggggcggcatcctgggccattgtggctgttctcctcaggagtgaccaggagccgctgtacccagtgcaggtcagctctgcggacgctcggctcatggtctttgacaagacggaagggacgtggcggctgctgtgctcctcgcgctccaacgccagggtagccggactcagctgcgaggagatgggcttcctcagggcactgacccactccgagctggacgtgcgaacggcgggcgccaatggcacgtcgggcttcttctgtgtggacgaggggaggctgccccacacccagaggctgctggaggtcatctccgtgtgtgattgccccagaggccgtttcttggccgccatctgccaagactgtggccgcaggaagctgcccgtggaccgcatcgtgggaggccgggacaccagcttgggccggtggccgtggcaagtcagccttcgctatgatggagcacacctctgtgggggatccctgctctccggggactgggtgctgacagccgcccactgcttcccggagcggaaccgggtcctgtcccgatggcgagtgtttgccggtgccgtggcccaggcctctccccacggtctgcagctgggggtgcaggctgtggtctaccacgggggctatcttccctttcgggaccccaacagcgaggagaacagcaacgatattgccctggtccacctctccagtcccctgcccctcacagaatacatccagcctgtgtgcctcccagctgccggccaggccctggtggatggcaagatctgtaccgtgacgggctggggcaacacgcagtactatggccaacaggccggggtactccaggaggctcgagtccccataatcagcaatgatgtctgcaatggcgctgacttctatggaaaccagatcaagcccaagatgttctgtgctggctaccccgagggtggcattgatgcctgccagggcgacagcggtggtccctttgtgtgtgaggacagcatctctcggacgccacgttggcggctgtgtggcattgtgagttggggcactggctgtgccctggcccagaagccaggcgtctacaccaaagtcagtgacttccgggagtggatcttccagtga

SEQ ID NO: 719 - RNA, 1254 nt, synthetic construct
  misc_feature 1..1254: note = AAA36013
  source 1..1254: mol_type = other RNA
atggcgcagaaggagggtggccggactgtgccatgctgctccagacccaaggtggcagctctcactgcggggaccctgctacttctgacagccatcggggcggcatcctgggccattgtggctgttctcctcaggagtgaccaggagccgctgtacccagtgcaggtcagctctgcggacgctcggctcatggtctttgacaagacggaagggacgtggcggctgctgtgctcctcgcgctccaacgccagggtagccggactcagctgcgaggagatgggcttcctcagggcactgacccactccgagctggacgtgcgaacggcgggcgccaatggcacgtcgggcttcttctgtgtggacgaggggaggctgccccacacccagaggctgctggaggtcatctccgtgtgtgattgccccagaggccgtttcttggccgccatctgccaagactgtggccgcaggaagctgcccgtggaccgcatcgtgggaggccgggacaccagcttgggccggtggccgtggcaagtcagccttcgctatgatggagcacacctctgtgggggatccctgctctccggggactgggtgctgacagccgcccactgcttcccggagcggaaccgggtcctgtcccgatggcgagtgtttgccggtgccgtggcccaggcctctccccacggtctgcagctgggggtgcaggctgtggtctaccacgggggctatcttccctttcgggaccccaacagcgaggagaacagcaacgatattgccctggtccacctctccagtcccctgcccctcacagaatacatccagcctgtgtgcctcccagctgccggccaggccctggtggatggcaagatctgtaccgtgacgggctggggcaacacgcagtactatggccaacaggccggggtactccaggaggctcgagtccccataatcagcaatgatgtctgcaatggcgctgacttctatggaaaccagatcaagcccaagatgttctgtgctggctaccccgagggtggcattgatgcctgccagggcgacagcggtggtccctttgtgtgtgaggacagcatctctcggacgccacgttggcggctgtgtggcattgtgagttggggcactggctgtgccctggcccagaagccaggcgtctacaccaaagtcagtgacttccgggagtggatcttccaggccataaagactcactccgaagccagcggcatggtgacccagctctga

SEQ ID NO: 720 - RNA, 2940 nt, synthetic construct
  misc_feature 1..2940: note = BAG62073
  source 1..2940: mol_type = other RNA
atggagctggcggccttgtgccgctgggggctcctcctcgccctcttgccccccggagccgcgagcacccaagacaactacctttctacggacgtgggatcctgcaccctcgtctgccccctgcacaaccaagaggtgacagcagaggatggaacacagcggtgtgagaagtgcagcaagccctgtgcccgagtgtgctatggtctgggcatggagcacttgcgagaggtgagggcagttaccagtgccaatatccaggagtttgctggctgcaagaagatctttgggagcctggcatttctgccggagagctttgatggggacccagcctccaacactgccccgctccagccagagcagctccaagtgtttgagactctggaagagatcacaggttacctatacatctcagcatggccggacagcctgcctgacctcagcgtcttccagaacctgcaagtaatccggggacgaattctgcacaatggcgcctactcgctgaccctgcaagggctgggcatcagctggctggggctgcgctcactgagggaactgggcagtggactggccctcatccaccataacacccacctctgcttcgtgcacacggtgccctgggaccagctctttcggaacccgcaccaagctctgctccacactgccaaccggccagaggacgagtgtgtgggcgagggcctggcctgccaccagctgtgcgcccgagggcactgctggggtccagggcccacccagtgtgtcaactgcagccagttccttcggggccaggagtgcgtggaggaatgccgagtactgcaggggctccccagggagtatgtgaatgccaggcactgtttgccgtgccaccctgagtgtcagccccagaatggctcagtgacctgttttggaccggaggctgaccagtgtgtggcctgtgcccactataaggaccctcccttctgcgtggcccgctgccccagcggtgtgaaacctgacctctcctacatgcccatctggaagtttccagatgaggagggcgcatgccagccttgccccatcaactgcacccactcctgtgtggacctggatgacaagggctgccccgccgagcagagagccagccctctgacgtccatcatctctgcggtggttggcattctgctggtcgtggtcttgggggtggtctttgggatcctcatcaagcgacggcagcagaagatccggaagtacacgatgcggagactgctgcaggaaacggagctggtggagccgctgacacctagcggagcgatgcccaaccaggcgcagatgcggatcctgaaagagacggagctgaggaaggtgaaggtgcttggatctggcgcttttggcacagtctacaagggcatctggatccctgatggggagaatgtgaaaattccagtggccatcaaagtgttgagggaaaacacatcccccaaagccaacaaagaaatcttagacgaagcatacgtgatggctggtgtgggctccccatatgtctcccgccttctgggcatctgcctgacatccacggtgcagctggtgacacagcttatgccctatggctgcctcttagaccatgtccgggaaaaccgcggacgcctgggctcccaggacctgctgaactggtgtatgcagattgccaaggggatgagctacctggaggatgtgcggctcgtacacagggacttggccgctcggaacgtgctggtcaagagtcccaaccatgtcaaaattacagacttcgggctggctcggctgctggacattgacgagacagagtaccatgcagatgggggcaaggtgcccatcaagtggatggcgctggagtccattctccgccggcggttcacccaccagagtgatgtgtggagttatggtgtgactgtgtgggagctgatgacttttggggccaaaccttacgatgggatcccagcccgggagatccctgacctgctggaaaagggggagcggctgccccagccccccatctgcaccattgatgtctacatgatcatggtcaaatgttggatgattgactctgaatgtcggccaagattccgggagttggtgtctgaattctcccgcatggccagggacccccagcgctttgtggtcatccagaatgaggacttgggcccagccagtcccttggacagcaccttctaccgctcactgctggaggacgatgacatgggggacctggtggatgctgaggagtatctggtaccccagcagggcttcttctgtccagaccctgccccgggcgctgggggcatggtccaccacaggcaccgcagctcatctaccaggagtggcggtggggacctgacactagggctggagccctctgaagaggaggcccccaggtctccactggcaccctccgaaggggctggctccgatgtatttgatggtgacctgggaatgggggcagccaaggggctgcaaagcctccccacacatgaccccagccctctacagcggtacagtgaggaccccacagtacccctgccctctgagactgatggctacgttgcccccctgacctgcagcccccagcctgaatatgtgaaccagccagatgttcggccccagcccccttcgccccgagagggccctctgcctgctgcccgacctgctggtgccactctggaaaggcccaagactctctccccagggaagaatggggtcgtcaaagacgtttttgcctttgggggtgccgtggagaaccccgagtacttgacaccccagggaggagctgcccctcagccccaccctcctcctgccttcagcccagccttcgacaacctctattactgggaccaggacccaccagagcggggggctccacccagcaccttcaaagggacacctacggcagagaacccagagtacctgggtctggacgtgccagtgtga

SEQ ID NO: 721 - RNA, 264 nt, synthetic construct
  misc_feature 1..264: note = CCQ43016
  source 1..264: mol_type = other RNA
atgatgaggatgaaaacctttgtgatgatccacttccacttaatgaatggtggcaaagcaaagctatattcaagaccacatgcaaagctactccctgagcaaagagtcacagataaaacgggggcaccagtagaatggccaggacaaacgcagtgcagcacagagactcagaccctggcagccatgcctgcgcaggcagtgatgagagtgacatgtactgttgtggacatgcacaaaagtgagtgtgcaccggcacagacatga

SEQ ID NO: 722 - RNA, 3768 nt, synthetic construct
  misc_feature 1..3768: note = AAI67147
  source 1..3768: mol_type = other RNA
atggagctggcggccttgtgccgctgggggctcctcctcgccctcttgccccccggagccgcgagcacccaagtgtgcaccggcacagacatgaagctgcggctccctgccagtcccgagacccacctggacatgctccgccacctctaccagggctgccaggtggtgcagggaaacctggaactcacctacctgcccaccaatgccagcctgtccttcctgcaggatatccaggaggtgcagggctacgtgctcatcgctcacaaccaagtgaggcaggtcccactgcagaggctgcggattgtgcgaggcacccagctctttgaggacaactatgccctggccgtgctagacaatggagacccgctgaacaataccacccctgtcacaggggcctccccaggaggcctgcgggagctgcagcttcgaagcctcacagagatcttgaaaggaggggtcttgatccagcggaacccccagctctgctaccaggacacgattttgtggaaggacatcttccacaagaacaaccagctggctctcacactgatagacaccaaccgctctcgggcctgccacccctgttctccgatgtgtaagggctcccgctgctggggagagagttctgaggattgtcagagcctgacgcgcactgtctgtgccggtggctgtgcccgctgcaaggggccactgcccactgactgctgccatgagcagtgtgctgccggctgcacgggccccaagcactctgactgcctggcctgcctccacttcaaccacagtggcatctgtgagctgcactgcccagccctggtcacctacaacacagacacgtttgagtccatgcccaatcccgagggccggtatacattcggcgccagctgtgtgactgcctgtccctacaactacctttctacggacgtgggatcctgcaccctcgtctgccccctgcacaaccaagaggtgacagcagaggatggaacacagcggtgtgagaagtgcagcaagccctgtgcccgagtgtgctatggtctgggcatggagcacttgcgagaggtgagggcagttaccagtgccaatatccaggagtttgctggctgcaagaagatctttgggagcctggcatttctgccggagagctttgatggggacccagcctccaacactgccccgctccagccagagcagctccaagtgtttgagactctggaagagatcacaggttacctatacatctcagcatggccggacagcctgcctgacctcagcgtcttccagaacctgcaagtaatccggggacgaattctgcacaatggcgcctactcgctgaccctgcaagggctgggcatcagctggctggggctgcgctcactgagggaactgggcagtggactggccctcatccaccataacacccacctctgcttcgtgcacacggtgccctgggaccagctctttcggaacccgcaccaagctctgctccacactgccaaccggccagaggacgagtgtgtgggcgagggcctggcctgccaccagctgtgcgcccgagggcactgctggggtccagggcccacccagtgtgtcaactgcagccagttccttcggggccaggagtgcgtggaggaatgccgagtactgcaggggctccccagggagtatgtgaatgccaggcactgtttgccgtgccaccctgagtgtcagccccagaatggctcagtgacctgttttggaccggaggctgaccagtgtgtggcctgtgcccactataaggaccctcccttctgcgtggcccgctgccccagcggtgtgaaacctgacctctcctacatgcccatctggaagtttccagatgaggagggcgcatgccagccttgccccatcaactgcacccactcctgtgtggacctggatgacaagggctgccccgccgagcagagagccagccctctgacgtccatcatctctgcggtggttggcattctgctggtcgtggtcttgggggtggtctttgggatcctcatcaagcgacggcagcagaagatccggaagtacacgatgcggagactgctgcaggaaacggagctggtggagccgctgacacctagcggagcgatgcccaaccaggcgcagatgcggatcctgaaagagacggagctgaggaaggtgaaggtgcttggatctggcgcttttggcacagtctacaagggcatctggatccctgatggggagaatgtgaaaattccagtggccatcaaagtgttgagggaaaacacatcccccaaagccaacaaagaaatcttagacgaagcatacgtgatggctggtgtgggctccccatatgtctcccgccttctgggcatctgcctgacatccacggtgcagctggtgacacagcttatgccctatggctgcctcttagaccatgtccgggaaaaccgcggacgcctgggctcccaggacctgctgaactggtgtatgcagattgccaaggggatgagctacctggaggatgtgcggctcgtacacagggacttggccgctcggaacgtgctggtcaagagtcccaaccatgtcaaaattacagacttcgggctggctcggctgctggacattgacgagacagagtaccatgcagatgggggcaaggtgcccatcaagtggatggcgctggagtccattctccgccggcggttcacccaccagagtgatgtgtggagttatggtgtgactgtgtgggagctgatgacttttggggccaaaccttacgatgggatcccagcccgggagatccctgacctgctggaaaagggggagcggctgccccagccccccatctgcaccattgatgtctacatgatcatggtcaaatgttggatgattgactctgaatgtcggccaagattccgggagttggtgtctgaattctcccgcatggccagggacccccagcgctttgtggtcatccagaatgaggacttgggcccagccagtcccttggacagcaccttctaccgctcactgctggaggacgatgacatgggggacctggtggatgctgaggagtatctggtaccccagcagggcttcttctgtccagaccctgccccgggcgctgggggcatggtccaccacaggcaccgcagctcatctaccaggagtggcggtggggacctgacactagggctggagccctctgaagaggaggcccccaggtctccactggcaccctccgaaggggctggctccgatgtatttgatggtgacctgggaatgggggcagccaaggggctgcaaagcctccccacacatgaccccagccctctacagcggtacagtgaggaccccacagtacccctgccctctgagactgatggctacgttgcccccctgacctgcagcccccagcctgaatatgtgaaccagccagatgttcggccccagcccccttcgccccgagagggccctctgcctgctgcccgacctgctggtgccactctggaaaggcccaagactctctccccagggaagaatggggtcgtcaaagacgtttttgcctttgggggtgccgtggagaaccccgagtacttgacaccccagggaggagctgcccctcagccccaccctcctcctgccttcagcccagccttcgacaacctctattactgggaccaggacccaccagagcggggggctccacccagcaccttcaaagggacacctacggcagagaacccagagtacctgggtctggacgtgccagtgtga

SEQ ID NO: 723 - RNA, 1260 nt, synthetic construct
  misc_feature 1..1260: note = AAD56009
  source 1..1260: mol_type = other RNA
atggagctggcggccttgtgccgctgggggctcctcctcgccctcttgccccccggagccgcgagcacccaagtgtgcaccggcacagacatgaagctgcggctccctgccagtcccgagacccacctggacatgctccgccacctctaccagggatgccaggtggtgcagggaaacctggaactcacctacctgcccaccaatgccagcctgtccttcctgcaggatatccaggaggtgcagggctacgtgctcatcgctcacaaccaagtgaggcaggtcccactgcagaggctgcggattgtgcgaggcacccagctctttgaggacaactatgccctggccgtgctagacaatggagacccgctgaacaataccacccctgtcacaggggcctccccaggaggcctgcgggagctgcagcttcgaagcctcacagagatcttgaaaggaggggtcttgatccagcggaacccccagctctgctaccaggacacgattttgtggaaggacatcttccacaagaacaaccagctggctctcacactgatagacaccaaccgctctcgggcctgccacccctgctctccgatgtgtaagggctcccgctgctggggagagagttctgaggattgtcagagcctgacgcgcactgtctgtgccggtggctgtgcccgctgcaaggggccactgcccactgactgctgccatgagcagtgtgctgccggctgcacgggccccaagcactctgactgcctggcctgcctccacttcaaccacagtggcatctgtgagctgcactgcccagccctggtcacctacaacacagacacgtttgagtccatgcccaatcccgagggccggtatacattcggcgccagctgtgtcactgcctgtccctacaactacctttctacggacgtgggatcctgcaccctcgtctgccccctgcacaaccaagaggtgacagcagaggatggaacacagcggtgtgagaagtgcagcaagccctgtgcccgaggtacccactcactgcccccgaggccagctgcagttcctgtccctctgcgcatgcagcctggcccagcccaccctgtcctatccttcctcagaccctcttgggacctagtctctgccttctactctctacccctggcccccctcagccctacaagtgtccctatatcccctgtcagtgtggggaggggcccggaccctgatgctcatgtggctgttgacctgtcccggtatgaaggctga

SEQ ID NO: 724 - RNA, 546 nt, synthetic construct
  misc_feature 1..546: note = U70863.1
  source 1..546: mol_type = other RNA
ggctctcactccatgaggtatttcttcacatccgtgtcccggcccggccgcggggagccccgcttcatcgcagtgggctacgtggacgacacgcagttcgtgcggttcgacagcgacgccgcgagccagaggatggagccgcgggcgccgtggatagagcaggagggtccggagtattgggacggggagacacggaaagtgaaggcccactcacagactcaccgagtggacctggggaccctgcgcggctactacaaccagagcgaggccggttctcacaccgtccagaggatgtatggctgcgacgtggggtcggactggcgcttcctccgcgggtaccaccagtacgcctacgacggcaaggattacatcgccctgaaagaggacctgcgctcttggaccgcggcggacatggcagctcagaccaccaagcacaagtgggagacggcccatgtggcggagcagttgagagcctacctggagggcacgtgcgtggagtggctccgcagatacctggagaacgggaaggagacgctgcagcgcacg

SEQ ID NO: 725 - RNA, 543 nt, synthetic construct
  misc_feature 1..543: note = AH009136.2
  source 1..543: mol_type = other RNA
tctcactccatgaggtatttcttcacatccgtgtcccggcccggccgcggggagccccgcttcatcgcagtgggctacgtggacgacacgcagttcgtgcggttcgacagcgacgccgcgagccagaggatggagccgcgggcgccgtggatagagcaggagggtccggagtattgggacggggagacacggaaagtgaaggcccactcacagactcaccgagtggacctggggaccctgcgcggctactacaaccagagcgaggccggttctcacaccgtccagaggatgtatggctgcgacgtggggtcggactggcgcttcctccgcgggtaccaccagtacgcctacgacggcaaggattacatcgccctgaaagaagacctgcgctcttggaccgcggcggacatggcagctcagaccaccaagcacaagtgggaggcggcccatgtggcggagcagttgagagcctacctggagggcacgtgcgtggagtggctccgcagatacctggagaacgggaaggagacgctgcagcgcacg

SEQ ID NO: 726 - RNA, 705 nt, synthetic construct
  misc_feature 1..705: note = AAG09781
  source 1..705: mol_type = other RNA
atgctcagggttccggagccgcggcccggggaggcgaaagcggagggggccgcgccgccgaccccgtccaagccgctcacgtccttcctcatccaggacatcctgcgggacggcgcgcagcggcaaggcggccgcacgagcagccagagacagcgcgacccggagccggagccagagccagagccagagggaggacgcagccgcgccggggcgcagaacgaccagctgagcaccgggccccgcgccgcgccggaggaggccgagacgctggcagagaccgagccagaaaggcacttggggtcttatctgttggactctgaaaacacttcaggcgcccttccaaggcttccccaaacccctaagcagccgcagaagcgctcccgagctgccttctcccacactcaggtgatcgagttggagaggaagttcagccatcagaagtacctgtcagcccctgaacgggcccacctggccaagaacctcaagctcacggagacccaagtgaagatatggttccagaacagacgctataagactaagcgaaagcagctctcctcggagctgggagacttggagaagcactcctctttgccggccctgaaagaggaggccttctcccgggcctccctggtctccgtgtataacagctatccttactacccatacctgtactgcgtgggcagctggagcccagctttttggtaa

SEQ ID NO: 727 - RNA, 942 nt, synthetic construct
  misc_feature 1..942: note = BAG37303
  source 1..942: mol_type = other RNA
atggcttcgtttcggaagctaacgctttctgaaaaagtgccgccaaatcatcccagtcggaaaaaggttaacttcctagatatgtctctagacgacattataatctataaagagttagaagggacaaatgctgaagaagaaaagaataaaagacagaaccatagtaaaaaggaatcgccttcaagacagcaatcaaaagctcatagacatcgccatcggagagactactcaagatgcagaagcaactctgaggaaggaaatcatgataaaaaaccatcccaaaaaccttctggattcaagtctggacaacaccctttaaatgggcagcctttaattgagcaggagaagtgcagtgacaattatgaggcccaagcagagaagaatcaaggccagtcagaggggaaccagcatcaatcagaaggaaatccggacaaatcagaagaatcccagggccaaccagaagaaaatcatcattctgagcgatcccgaaaccacttagagagatctctttctcagtcagacagatctcaagggcagctaaagagacatcatccccaatatgagagatctcatggccaatacaagagatctcatggtcagtctgagagatctcatggccactcagagagatctcatggtcactcagagagatctcatggtcactcagagagatctcatggtcactcaaagagatctcgtagccagggagatcttgtggacactcagagtgatctcatagccactcagagagatctcatagccactcagaaagatctcatagccactcagagagatctcatagccactcagagagatctcatagtcactcagagagatctcgtggccactgagagagatctcataaatcagtcagggagatctcatggccaatcagaaagacatcagagatactcaacaggtaaaaatacaataactacttaa

SEQ ID NO: 728 - RNA, 942 nt, synthetic construct
  misc_feature 1..942: note = AAI28135
  source 1..942: mol_type = other RNA
atggcttcgtttcggaagctaacgctttctgaaaaagtgccgccaaatcatcccagtcggaaaaaggttaacttcctagatatgtctctagacgacattataatctataaagagttagaagggacaaatgctgaagaagaaaagaataaaagacagaaccatagtaaaaaggaatcgccttcaagacagcaatcaaaagctcatagacatcgccatcggagaggctactcaagatgcagaagcaactctgaggaaggaaatcatgataaaaaaccatcccaaaaaccttctggattcaagtctggacaacaccctttaaatgggcagcctttaattgagcaggagaagtgcagtgacaattatgaggcccaagcagagaagaatcaaggccagtcagaggggaaccagcatcaatcagaaggaaatccggacaaatcagaagaatcccagggccaaccagaagaaaatcatcattctgagcgatcccgaaaccacttagagagatctctttctcagtcagacagatctcaagggcagctaaagagacatcatccccaatatgagagatctcatggccaatacaagagatctcatggtcaatctgagagatctcatggccactcagagagatctcatggtcactcagagagatctcatggtcactcagagagatctcatggtcactcaaagagatctcgtagccagggagatcttgtggacactcagagtgatctcatagccactcagagagatctcatagccactcagaaagatctcatagccactcagagagatctcatagccactcagagagatctcatagtcactcagagagatctcgtggccactgagagagatctcataaatcagtcagggagatctcatggccaatcagaaagacatcagagatactcaacaggtaaaaatacaataactacttaa

SEQ ID NO: 729 - RNA, 384 nt, synthetic construct
  misc_feature 1..384: note = 12543784
  source 1..384: mol_type = other RNA
atgataaaaaaaaatcttaaaaaactgggtatagaagaaacataccttaacataataaaagccatatatgacagacccacagctagtatacaaaaaactgaaaacctttccactaaaactggaacaagccaagaataccacctgtcaccactgtggttctacatagtactggaaatcctagctagcacaatcagacaagagaaaaatttaaaggacatccacactgaaaaagaagaagtcaaattatccttgtttgctgatgctatgatcttatatttgaaaaaacctaatgactccacaagaaaattattagaactgataaaaaaaattcattcaagttgcaggataaaaatcaatatacattttgcattttgttcacaatga

SEQ ID NO: 730 - RNA, 1926 nt, synthetic construct
  misc_feature 1..1926: note = AAA63226
  source 1..1926: mol_type = other RNA
atggccaaagccgcggcgatcggcatcgacctgggcaccacctactcctgcgtgggggtgttccaacacggcaaggtggagatcatcgccaacgaccagggcaaccgcaccacccccagctacgtggccttcacggacaccgagcggctcatcggggatgcggccaagaaccaggtggcgctgaacccgcagaacaccgtgtttgacgcgaagcgcctgattggccgcaagttcggcgacccggtggtgcagtcggacatgaagcactggcctttccaggtgatcaacgacggagacaagcccaaggtgcaggtgagctacaagggggagaccaaggcattctaccccgaggagatctcgtccatggtgctgaccaagatgaaggagatcgccgaggcgtacctgggctacccggtgaccaacgcggtgatcaccgtgccggcctacttcaacgactcgcagcgccaggccaccaaggatgcgggtgtgatcgcggggctcaacgtgctgcggatcatcaacgagcccacggccgccgccatcgcctacggcctggacagaacgggcaagggggagcgcaacgtgctcatctttgacctgggcgggggcaccttcgacgtgtccatcctgacgatcgacgacggcatcttcgaggtgaaggccacggccggggacacccacctgggtggggaggactttgacaacaggctggtgaaccacttcgtggaggagttcaagagaaaacacaagaaggacatcagccagaacaagcgagccgtgaggcggctgcgcaccgcctgcgagagggccaagaggaccctgtcgtccagcacccaggccagcctggagatcgactccctgtttgagggcatcgacttctacacgtccatcaccagggcgaggttcgaggagctgtgctccgacctgttccgaagcaccctggagcccgtggagaaggctctgcgcgacgccaagctggacaaggcccagattcacgacctggtcctggtcgggggctccacccgcatccccaaggtgcagaagctgctgcaggacttcttcaacgggcgcgacctgaacaagagcatcaaccccgacgaggctgtggcctacggggcggcggtgcaggcggccatcctgatgggggacaagtccgagaacgtgcaggacctgctgctgctggacgtggctcccctgtcgctggggctggagacggccggaggcgtgatgactgccctgatcaagcgcaactccaccatccccaccaagcagacgcagatcttcaccacctactccgacaaccaacccggggtgctgatccaggtgtacgagggcgagagggccatgacgaaagacaacaatctgttggggcgcttcgagctgagcggcatccctccggcccccaggggcgtgccccagatcgaggtgaccttcgacatcgatgccaacggcatcctgaacgtcacggccacggacaagagcaccggcaaggccaacaagatcaccatcaccaacgacaagggccgcctgagcaaggaggagatcgagcgcatggtgcaggaggcggagaagtacaaagcggaggacgaggtgcagcgcgagagggtgtcagccaagaacgccctggagtcctacgccttcaacatgaagagcgccgtggaggatgaggggctcaagggcaagatcagcgaggccgacaagaagaaggtgctggacaagtgtcaagaggtcatctcgtggctggacgccaacaccttggccgagaaggacgagtttgagcacaagaggaaggagctggagcaggtgtgtaaccccatcatcagcggactgtaccagggtgccggtggtcccgggcctgggggcttcggggctcagggtcccaagggagggtctgggtcaggccccaccattgaggaggtagattag

SEQ ID NO: 731 - RNA, 1926 nt, synthetic construct
  misc_feature 1..1926: note = AAA63227
  source 1..1926: mol_type = other RNA
atggccaaagccgcggcgatcggcatcgacctgggcaccacctactcctgcgtgggggtgttccaacacggcaaggtggagatcatcgccaacgaccagggcaaccgcaccacccccagctacgtggccttcacggacaccgagcggctcatcggggatgcggccaagaaccaggtggcgctgaacccgcagaacaccgtgtttgacgcgaagcgcctgatcggccgcaagttcggcgacccggtggtgcagtcggacatgaagcactggcctttccaggtgatcaacgacggagacaagcccaaggtgcaggtgagctacaagggggagaccaaggcattctaccccgaggagatctcgtccatggtgctgaccaagatgaaggagatcgccgaggcgtacctgggctacccggtgaccaacgcggtgatcaccgtgccggcctacttcaacgactcgcagcgccaggccaccaaggatgcgggtgtgatcgcggggctcaacgtgctgcggatcatcaacgagcccacggccgccgccatcgcctacggcctggacagaacgggcaagggggagcgcaacgtcctgatctttgacctgggcgggggcaccttcgacgtgtccatcctgacgatcgacgacggcatcttcgaggtgaaggccacggccggggacacccacctgggtggggaggactttgacaacaggctggtgaaccacttcgtggaggagttcaagagaaaacacaagaaggacatcagccagaacaagcgagccgtgaggcggctgcgcaccgcctgcgagagggccaagaggaccctgtcgtccagcacccaggccagcctggagatcgactccctgtttgagggcatcgacttctacacgtccatcaccagggcgaggttcgaggagctgtgctccgacctgttccgaagcaccctggagcccgtggagaaggctctgcgcgacgccaagctggacaaggcccagattcacgacctggtcctggtcgggggctccacccgcatccccaaggtgcagaagctgctgcaagacttcttcaacgggcgcgacctgaacaagagcatcaaccccgacgaggctgtggcctacggggcggcggtgcaggcggccatcctgatgggggacaagtccgagaacgtgcaggacctgctgctgctggacgtggctcccctgtcgctggggctggagacggccggaggcgtgatgactgccctgatcaagcgcaactccaccatccccaccaagcagacgcagatcttcaccacctactccgacaaccaacccggggtgctgatccaggtgtacgagggcgagagggccatgacgaaagacaacaatctgttggggcgcttcgagctgagcggcatccctccggcccccaggggcgtgccccagatcgaggtgaccttcgacatcgatgccaacggcatcctgaacgtcacggccacggacaagagcaccggcaaggccaacaagatcaccatcaccaacgacaagggccgcctgagcaaggaggagatcgagcgcatggtgcaggaggcggagaagtacaaagcggaggacgaggtgcagcgcgagagggtgtcagccaagaacgccctggagtcctacgccttcaacatgaagagcgccgtggaggatgaggggctcaagggcaagatcagcgaggccgacaagaagaaggttctggacaagtgtcaagaggtcatctcgtggctggacgccaacaccttggccgagaaggacgagtttgagcacaagaggaaggagctggagcaggtgtgtaaccccatcatcagcggactgtaccagggtgccggtggtcccgggcctggcggcttcggggctcagggtcccaagggagggtctgggtcaggccctaccattgaggaggtggattag

SEQ ID NO: 732 - RNA, 627 nt, synthetic construct
  misc_feature 1..627: note = AAI21098
  source 1..627: mol_type = other RNA
atggccctgggacagaaactgttcatcactatgtcccggggagcaggacgtctgcagggcacgctgtgggctctcgtcttcctaggcatcctagtgggcatggtggtgccctcgcctgcaggcacccgtgccaacaacacgctgctggactcgaggggctggggcaccctgctgtccaggtctcgcgcggggctagctggagagattgccggggtgaactgggaaagtggctatttggtggggatcaagcggcagcggaggctctactgcaacgtgggcatcggctttcacctccaggtgctccccgacggccggatcagcggaacccacgaggagaacccctacagcctgctggaaatttccaccgtggagcgaggcgtggtgagtctctttggagtgagaagtgccctcttcgtcgccatgaacagtaaaggaagattgtacgcaacgcccagcttccaagaagaatgcaagttcagagaaaccctcctgcccaacaattacaatgcctacgagtcagacttgtaccaagggacctacattgccctgagcaaatacggacgggtaaagcggggcagcaaggtgtccccgatcatgactgtcactcatttccttcccaggatctaa

SEQ ID NO: 733 - RNA, 1569 nt, synthetic construct
  misc_feature 1..1569: note = BAA74724
  source 1..1569: mol_type = other RNA
atgccgcgcgctccccgctgccgagccgtgcgctccctgctgcgcagccactaccgcgaggtgctgccgctggccacgttcgtgcggcgcctggggccccagggctggcggctggtgcagcgcggggacccggcggctttccgcgcgctggtggcccagtgcctggtgtgcgtgccctgggacgcacggccgccccccgccgccccctccttccgccaggtgtcctgcctgaaggagctggtggcccgagtgctgcagaggctgtgcgagcgcggcgcgaagaacgtgctggccttcggcttcgcgctgctggacggggcccgcgggggcccccccgaggccttcaccaccagcgtgcgcagctacctgcccaacacggtgaccgacgcactgcgggggagcggggcgtgggggctgctgttgcgccgcgtgggcgacgacgtgctggttcacctgctggcacgctgcgcgctctttgtgctggtggctcccagctgcgcctaccaggtgtgcgggccgccgctgtaccagctcggcgctgccactcaggcccggcccccgccacacgctagtggaccccgaaggcgtctgggatgcgaacgggcctggaaccatagcgtcagggaggccggggtccccctgggcctgccagccccgggtgcgaggaggcgcgggggcagtgccagccgaagtctgccgttgcccaagaggcccaggcgtggcgctgcccctgagccggagcggacgcccgttgggcaggggtcctgggcccacccgggcaggacgcgtggaccgagtgaccgtggtttctgtgtggtgtcacctgccagacccgccgaagaagccacctctttggagggtgcgctctctggcacgcgccactcccacccatccgtgggccgccagcaccacgcgggccccccatccacatcgcggccaccacgtccctgggacacgccttgtcccccggtgtacgccgagaccaagcacttcctctactcctcaggcgacaaggagcagctgcggccctccttcctactcagctctctgaggcccatcctgactggcgctcggaggctcgtggagaccatctttctgggttccagccctggatgccagggactccccgcaggttgccccgcctgccccagcgctactggcaaatgcggcccctgtttctggagctgcttgggaaccacgcgcagtgcccctacggggtgctcctcaagacgcactgcccgctgcgagctgcggtcaccccagcagccggtgtctgtgcccgggagaagccccagggctctgtggcggcccccgaggaggaggacacagacccccgtcgcctggtgcagctgctccgccagcacagcacccctggcaggtgtacggcttcgtgcgggcctgcctgcgccggctggtgcccccaggcctctggggctccaggcacaacgacgccgcttcctcaggaacaccaagaagttcatctccctggggaagcatgccaagctctcgctgcaggagctgacgtggaagatgagcgtgcgggactgcgcttggctgcgcaggagccca

SEQ ID NO: 734 - RNA, 1680 nt, synthetic construct
  misc_feature 1..1680: note = BAA23606
  source 1..1680: mol_type = other RNA
atgcggctgcacagacttcgtgcgcggctgagcgcggtggcctgtgggcttctgctgcttcttgtccggggccagggccaggactcagccagtcccatccggaccacacacacggggcaggtgctggggagtcttgtccatgtgaagggcgccaatgccggggtccaaaccttcctgggaattccatttgccaagccacctctaggtccgctgcgatttgcaccccctgagccccctgaatcttggagtggtgtgagggatggaaccacccatccggccatgtgtctacaggacctcaccgcagtggagtcagagtttcttagccagttcaacatgaccttcccttccgactccatgtctgaggactgcctgtacctcagcatctacacgccggcccatagccatgaaggctctaacctgccggtgatggtgtggatccacggtggtgcgcttgtttttggcatggcttccttgtatgatggttccatgctggctgccttggagaacgtggtggtggtcatcatccagtaccgcctgggtgtcctgggcttcttcagcactggagacaagcacgcaaccggcaactggggctacctggaccaagtggctgcactacgctgggtccagcagaatatcgcccactttggaggcaaccctgaccgtgtcaccatttttggcgagtctgcgggtggcacgagtgtgtcttcgcttgttgtgtcccccatatcccaaggactcttccacggagccatcatggagagtggcgtggccctcctgcccggcctcattgccagctcagctgatgtcatctccacggtggtggccaacctgtctgcctgtgaccaagttgactctgaggccctggtgggctgcctgcggggcaagagtaaagaggagattcttgcaattaacaagcctttcaagatgatccccggagtggtggatggggtcttcctgcccaggcacccccaggagctgctggcctctgccgactttcagcctgtccctagcattgttggtgtcaacaacaatgaattcggctggctcatccccaaggtcatgaggatctatgatacccagaaggaaatggacagagaggcctcccaggctgctctgcagaaaatgttaacgctgctgatgttgcctcctacatttggtgacctgctgagggaggagtacattggggacaatggggatccccagaccctccaagcgcagttccaggagatgatggcggactccatgtttgtgatccctgcactccaagtagcacattttcagtgttcccgggcccctgtgtacttctacgagttccagcatcagcccagctggctcaagaacatcaggccaccgcacatgaaggcagaccatggtgatgagcttccttttgttttcagaagtttctttgggggcaactacattaaattcactgaggaagaggagcagctaagcaggaagatgatgaagtactgggccaactttgcgagaaatgggaacccgaatggcgagggtctgccacactggccgctgttcgaccaggaggagcaatacctgcagctgaacctacagcctgcggtgggccgggctctgaaggcccacaggctccagttctggaagaaggcgctgccccaaaagatccaggagctcgaggagcctgaagagagacacacagagctgtag

SEQ ID NO: 735 - RNA, 1740 nt, synthetic construct
  misc_feature 1..1740: note = AAH65269
  source 1..1740: mol_type = other RNA
atgaacaaactgtatatcggaaacctcagcgagaacgccgccccctcggacctagaaagtatcttcaaggacgccaagatcccggtgtcgggacccttcctggtgaagactggctacgcgttcgtggactgcccggacgagagctgggccctcaaggccatcgaggcgctttcaggtaaaatagaactgcacgggaaacccatagaagttgagcactcggtcccaaaaaggcaaaggattcggaaacttcagatacgaaatatcccgcctcatttacagtgggaggtgctggatagtttactagtccagtatggagtggtggagagctgtgagcaagtgaacactgactcggaaactgcagttgtaaatgtaacctattccagtaaggaccaagctagacaagcactagacaaactgaatggatttcagttagagaatttcaccttgaaagtagcctatatccctgatgaaatggccgcccagcaaaaccccttgcagcagccccgaggtcgccgggggcttgggcagaggggctcctcaaggcaggggtctccaggatccgtatccaagcagaaaccatgtgatttgcctctgcgcctgctggttcccacccaatttgttggagccatcataggaaaagaaggtgccaccattcggaacatcaccaaacagacccagtctaaaatcgatgtccaccgtaaagaaaatgcgggggctgctgagaagtcgattactatcctctctactcctgaaggcacctctgcggcttgtaagtctattctggagattatgcataaggaagctcaagatataaaattcacagaagagatccccttgaagattttagctcataataactttgttggacgtcttattggtaaagaaggaagaaatcttaaaaaaattgagcaagacacagacactaaaatcacgatatctccattgcaggaattgacgctgtataatccagaacgcactattacagttaaaggcaatgttgagacatgtgccaaagctgaggaggagatcatgaagaaaatcagggagtcttatgaaaatgatattgcttctatgaatcttcaagcacatttaattcctggattaaatctgaacgccttgggtctgttcccacccacttcagggatgccacctcccacctcagggcccccttcagccatgactcctccctacccgcagtttgagcaatcagaaacggagactgttcatctgtttatcccagctctatcagtcggtgccatcatcggcaagcagggccagcacatcaagcagctttctcgctttgctggagcttcaattaagattgctccagcagaagcaccagatgctaaagtgaggatggtgattatcactggaccaccagaggctcagttcaaggctcagggaagaatttatggaaaaattaaagaagaaaactttgttagtcctaaagaagaggtgaaacttgaagctcatatcagagtgccatcctttgctgctggcagagttattggaaaaggaggcaaaacggtgaatgaacttcagaatttgtcaagtgcagaagttgttgtccctcgtgaccagacacctgatgagaatgaccaagtggttgtcaaaataactggtcacttctatgcttgccaggttgcccagagaaaaattcaggaaattctgactcaggtaaagcagcaccaacaacagaaggctctgcaaagtggaccacctcagtcaagacggaagtaa

SEQ ID NO: 736 - RNA, 537 nt, synthetic construct
  misc_feature 1..537: note = AAA63207
  source 1..537: mol_type = other RNA
atgcacagctcagcactgctctgttgcctggtcctcctgactggggtgagggccagcccaggccagggcacccagtctgagaacagctgcacccacttcccaggcaacctgcctaacatgcttcgagatctccgagatgccttcagcagagtgaagactttctttcaaatgaaggatcagctggacaacttgttgttaaaggagtccttgctggaggactttaagggttacctgggttgccaagccttgtctgagatgatccagttttacctggaggaggtgatgccccaagctgagaaccaagacccagacatcaaggcgcatgtgaactccctgggggagaacctgaagaccctcaggctgaggctacggcgctgtcatcgatttcttccctgtgaaaacaagagcaaggccgtggagcaggtgaagaatgcctttaataagctccaagagaaaggcatctacaaagccatgagtgagtttgacatcttcatcaactacatagaagcctacatgacaatgaagatacgaaactga

SEQ ID NO: 737 - RNA, 1143 nt, synthetic construct
  misc_feature 1..1143: note = AAB17170
  source 1..1143: mol_type = other RNA
atggctttcgtttgcttggctatcggatgcttatatacctttctgataagcacaacatttggctgtacttcatcttcagacaccgagataaaagttaaccctcctcaggattttgagatagtggatcccggatacttaggttatctctatttgcaatggcaacccccactgtctctggatcattttaaggaatgcacagtggaatatgaactaaaataccgaaacattggtagtgaaacatggaagaccatcattactaagaatctacattacaaagatgggtttgatcttaacaagggcattgaagcgaagatacacacgcttttaccatggcaatgcacaaatggatcagaagttcaaagttcctgggcagaaactacttattggatatcaccacaaggaattccagaaactaaagttcaggatatggattgcgtatattacaattggcaatatttactctgttcttggaaacctggcataggtgtacttcttgataccaattacaacttgttttactggtatgagggcttggatcatgcattacagtgtgttgattacatcaaggctgatggacaaaatataggatgcagatttccctatttggaggcatcagactataaagatttctatatttgtgttaatggatcatcagagaacaagcctatcagatccagttatttcacttttcagcttcaaaatatagttaaacctttgccgccagtctatcttacttttactcgggagagttcatgtgaaattaagctgaaatggagcatacctttgggacctattccagcaaggtgttttgattatgaaattgagatcagagaagatgatactaccttggtgactgctacagttgaaaatgaaacatacaccttgaaaacaacaaatgaaacccgacaattatgctttgtagtaagaagcaaagtgaatatttattgctcagatgacggaatttggagtgagtggagtgataaacaatgctgggaaggtgaagacctatcgaagaaaactttgctacgtttctggctaccatttggtttcatcttaatattagttatatttgtaaccggtctgcttttgcgtaagccaaacacctacccaaaaatgattccagaatttttctgtgatacatga

SEQ ID NO: 738 - RNA, 819 nt, synthetic construct
  misc_feature 1..819: note = AAA67527
  source 1..819: mol_type = other RNA
atggattcatacctgctgatgtggggactgctcacgttcatcatggtgcctggctgccaggcagagctctgtgacgatgacccgccagagatcccacacgccacattcaaagccatggcctacaaggaaggaaccatgttgaactgtgaatgcaagagaggtttccgcagaataaaaagcgggtcactctatatgctctgtacaggaaactctagccactcgtcctgggacaaccaatgtcaatgcacaagctctgccactcggaacacaacgaaacaagtgacacctcaacctgaagaacagaaagaaaggaaaaccacagaaatgcaaagtccaatgcagccagtggaccaagcgagccttccaggtcactgcagggaacctccaccatgggaaaatgaagccacagagagaatttatcatttcgtggtggggcagatggtttattatcagtgcgtccagggatacagggctctacacagaggtcctgctgagagcgtctgcaaaatgacccacgggaagacaaggtggacccagccccagctcatatgcacaggtgaaatggagaccagtcagtttccaggtgaagagaagcctcaggcaagccccgaaggccgtcctgagagtgagacttcctgcctcgtcacaacaacagattttcaaatacagacagaaatggctgcaaccatggagacgtccatatttacaacagagtaccaggtagcagtggccggctgtgttttcctgctgatcagcgtcctcctcctgagtgggctcacctggcagcggagacagaggaagagtagaagaacaatctag

SEQ ID NO: 739 - RNA, 1656 nt, synthetic construct
  misc_feature 1..1656: note = AAA59143
  source 1..1656: mol_type = other RNA
atggcggcccctgctctgtcctggcgtctgcccctcctcatcctcctcctgcccctggctacctcttgggcatctgcagcggtgaatggcacttcccagttcacatgcttctacaactcgagagccaacatctcctgtgtctggagccaagatggggctctgcaggacacttcctgccaagtccatgcctggccggacagacggcggtggaaccaaacctgtgagctgctccccgtgagtcaagcatcctgggcctgcaacctgatcctcggagccccagattctcagaaactgaccacagttgacatcgtcaccctgagggtgctgtgccgtgagggggtgcgatggagggtgatggccatccaggacttcaagccctttgagaaccttcgcctgatggcccccatctccctccaagttgtccacgtggagacccacagatgcaacataagctgggaaatctcccaagcctcccactactttgaaagacacctggagttcgaggcccggacgctgtccccaggccacacctgggaggaggcccccctgctgactctcaagcagaagcaggaatggatctgcctggagacgctcaccccagacacccagtatgagtttcaggtgcgggtcaagcctctgcaaggcgagttcacgacctggagcccctggagccagcccctggccttcaggacaaagcctgcagcccttgggaaggacaccattccgtggctcggccacctcctcgtgggcctcagcggggcttttggcttcatcatcttagtgtacttgctgatcaactgcaggaacaccgggccatggctgaagaaggtcctgaagtgtaacaccccagacccctcgaagttcttttcccagctgagctcagagcatggaggagacgtccagaagtggctctcttcgcccttcccctcatcgtccttcagccctggcggcctggcacctgagatctcgccactagaagtgctggagagggacaaggtgacgcagctgctcctgcagcaggacaaggtgcctgagcccgcatccttaagcagcaaccactcgctgaccagctgcttcaccaaccagggttacttcttcttccacctcccggatgccttggagatagaggcctgccaggtgtactttacttacgacccctactcagaggaagaccctgatgagggtgtggccggggcacccacagggtcttccccccaacccctgcagcctctgtcaggggaggacgacgcctactgcaccttcccctccagggatgacctgctgctcttctcccccagtctcctcggtggccccagccccccaagcactgcccctgggggcagtggggccggtgaagagaggatgcccccttctttgcaagaaagagtccccagagactgggacccccagcccctggggcctcccaccccaggagtcccagacctggtggattttcagccaccccctgagctggtgctgcgagaggctggggaggaggtccctgacgctggccccagggagggagtcagtttcccctggtccaggcctcctgggcagggggagttcagggcccttaatgctcgcctgcccctgaacactgatgcctacttgtccctccaagaactccagggtcaggacccaactcacttggtgtag

SEQ ID NO: 740 - RNA, 1110 nt, synthetic construct
  misc_feature 1..1110: note = AAA59145
  source 1..1110: mol_type = other RNA
atgttgaagccatcattaccattcacatccctcttattcctgcagctgcccctgctgggagtggggctgaacacgacaattctgacgcccaatgggaatgaagacaccacagctgatttcttcctgaccactatgcccactgactccctcagtgtttccactctacccctcccagaggttcagtgttttgtgttcaatgtcgagtacatgaattgcacttggaacagcagctctgagccccagcctaccaacctcactctgcattattggtacaagaactcggataatgataaagtccagaagtgcagccactatctattctctgaagaaatcacttctggctgtcagttgcaaaaaaaggagatccacctctaccaaacatttgttgttcagctccaggacccacgggaacccaggagacaggccacacagatgctaaaactgcagaatctggtgatcccctgggctccagagaacctaacacttcacaaactgagtgaatcccagctagaactgaactggaacaacagattcttgaaccactgtttggagcacttggtgcagtaccggactgactgggaccacagctggactgaacaatcagtggattatagacataagttctccttgcctagtgtggatgggcagaaacgctacacgtttcgtgttcggagccgctttaacccactctgtggaagtgctcagcattggagtgaatggagccacccaatccactgggggagcaatacttcaaaagagaatcctttcctgtttgcattggaagccgtggttatctctgttggctccatgggattgattatcagccttctctgtgtgtatttctggctggaacggacgatgccccgaattcccaccctgaagaacctagaggatcttgttactgaataccacgggaacttttcggcctggagtggtgtgtctaagggactggctgagagtctgcagccagactacagtgaacgactctgcctcgtcagtgagattcccccaaaaggaggggcccttggggaggggcctggggcctccccatgcaaccagcatagcccctactgggcccccccatgttacaccctaaagcctgaaacctga

SEQ ID NO: 741 - RNA, 405 nt, synthetic construct
  misc_feature 1..405: note = AAA74469
  source 1..405: mol_type = other RNA
atgaggatgcttctgcatttgagtttgctagctcttggagctgcctacgtgtatgccatccccacagaaattcccacaagtgcattggtgaaagagaccttggcactgctttctactcatcgaactctgctgatagccaatgagactctgaggattcctgttcctgtacataaaaatcaccaactgtgcactgaagaaatctttcagggaataggcacactggagagtcaaactgtgcaagggggtactgtggaaagactattcaaaaacttgtccttaataaagaaatacattgacggccaaaaaaaaaagtgtggagaagaaagacggagagtaaaccaattcctagactacctgcaagagtttcttggtgtaatgaacaccgagtggataatagaaagttga

SEQ ID NO: 742 - RNA, 555 nt, synthetic construct
  misc_feature 1..555: note = AAH06487
  source 1..555: mol_type = other RNA
atggtgcggaagcttaagttccacgagcagaagctgctgaagcaggtggacttcctgaactgggaggtcaccgaccacaacctgcacgagctgcgcgtgctgcggcgttaccggctgcagcggcgggaggactacacgcgctacaaccagctgagccgtgccgtgcgtgagctggcgcggcgcctgcgcgacctgcccgaacgcgaccagttccgcgtgcgcgcttcggccgcgctgctggacaagctgtatgctctcggcttggtgcccacgcgcggttcgctggagctctgcgacttcgtcacggcctcgtccttctgccgccgccgcctccccaccgtgctcctcaagctgcgcatggcgcagcaccttcaggctgcagtggcctttgtggagcaagggcacgtacgcgtgggccctgacgtggttaccgaccccgccttccttgtcacgcgcagcatggaggactttgtcacttgggtggactcgtccaagatcaagcggcacgtgctagagtacaatgaggagcgcgatgacttcgatctggaagcctag

SEQ ID NO: 743 - RNA, 3150 nt, synthetic construct
  misc_feature 1..3150: note = AAH08786
  source 1..3150: mol_type = other RNA
atggggagccggacgccagagtcccctctccacgccgtgcagctgcgctggggcccccggcgccgacccccgctgctgccgctgctgttgctgctgctgccgccgccacccagggtcgggggcttcaacttagacgcggaggccccagcagtactctcggggcccccgggctccttcttcggattctcagtggagttttaccggccgggaacagacggggtcagtgtgctggtgggagcacccaaggctaataccagccagccaggagtgctgcagggtggtgctgtctacctctgtccttggggtgccagccccacacagtgcacccccattgaatttgacagcaaaggctctcggctcctggagtcctcactgtccagctcagagggagaggagcctgtggagtacaagtccttgcagtggttcggggcaacagttcgagcccatggctcctccatcttggcatgcgctccactgtacagctggcgcacagagaaggagccactgagcgaccccgtgggcacctgctacctctccacagataacttcacccgaattctggagtatgcaccctgccgctcagatttcagctgggcagcaggacagggttactgccaaggaggcttcagtgccgagttcaccaagactggccgtgtggttttaggtggaccaggaagctatttctggcaaggccagatcctgtctgccactcaggagcagattgcagaatcttattaccccgagtacctgatcaacctggttcaggggcagctgcagactcgccaggccagttccatctatgatgacagctacctaggatactctgtggctgttggtgaattcagtggtgatgacacagaagactttgttgctggtgtgcccaaagggaacctcacttacggctatgtcaccatccttaatggctcagacattcgatccctctacaacttctcaggggaacagatggcctcctactttggctatgcagtggccgccacagacgtcaatggggacgggctggatgacttgctggtgggggcacccctgctcatggatcggacccctgacgggcggcctcaggaggtgggcagggtctacgtctacctgcagcacccagccggcatagagcccacgcccacccttaccctcactggccatgatgagtttggccgatttggcagctccttgacccccctgggggacctggaccaggatggctacaatgatgtggccatcggggctccctttggtggggagacccagcagggagtagtgtttgtatttcctgggggcccaggagggctgggctctaagccttcccaggttctgcagcccctgtgggcagccagccacaccccagacttctttggctctgcccttcgaggaggccgagacctggatggcaatggatatcctgatctgattgtggggtcctttggtgtggacaaggctgtggtatacaggggccgccccatcgtgtccgctagtgcctccctcaccatcttccccgccatgttcaacccagaggagcggagctgcagcttagaggggaaccctgtggcctgcatcaaccttagcttctgcctcaatgcttctggaaaacacgttgctgactccattggtttcacagtggaacttcagctggactggcagaagcagaagggaggggtacggcgggcactgttcctggcctccaggcaggcaaccctgacccagaccctgctcatccagaatggggctcgagaggattgcagagagatgaagatctacctcaggaacgagtcagaatttcgagacaaactctcgccgattcacatcgctctcaacttctccttggacccccaagccccagtggacagccacggcctcaggccagccctacattatcagagcaagagccggatagaggacaaggctcagatcttgctggactgtggagaagacaacatctgtgtgcctgacctgcagctggaagtgtttggggagcagaaccatgtgtacctgggtgacaagaatgccctgaacctcactttccatgcccagaatgtgggtgagggtggcgcctatgaggctgagcttcgggtcaccgcccctccagaggctgagtactcaggactcgtcagacacccagggaacttctccagcctgagctgtgactactttgccgtgaaccagagccgcctgctggtgtgtgacctgggcaaccccatgaaggcaggagccagtctgtggggtggccttcggtttacagtccctcatctccgggacactaagaaaaccatccagtttgacttccagatcctcagcaagaatctcaacaactcgcaaagcgacgtggtttcctttcggctctccgtggaggctcaggcccaggtcaccctgaacggtgtctccaagcctgaggcagtgctattcccagtaagcgactggcatccccgagaccagcctcagaaggaggaggacctgggacctgctgtccaccatgtctatgagctcatcaaccaaggccccagctccattagccagggtgtgctggaactcagctgtccccaggctctggaaggtcagcagctcctatatgtgaccagagttacgggactcaactgcaccaccaatcaccccattaacccaaagggcctggagttggatcccgagggttccctgcaccaccagcaaaaacgggaagctccaagccgcagctctgcttcctcgggacctcagatcctgaaatgcccggaggctgagtgtttcaggctgcgctgtgagctcgggcccctgcaccaacaagagagccaaagtctgcagttgcatttccgagtctgggccaagactttcttgcagcgggagcaccagccatttagcctgcagtgtgaggctgtgtacaaagccctgaagatgccctaccgaatcctgcctcggcagctgccccaaaaagagcgtcaggtggccacagctgtgcaatggaccaaggcagaaggcagctatggcgtcccactgtggatcatcatcctagccatcctgtttggcctcctgctcctaggtctactcatctacatcctctacaagcttggattcttcaaacgctccctcccatatggcaccgccatggaaaaagctcagctcaagcctccagccacctctgatgcctga

SEQ ID NO: 744 - RNA, 2397 nt, synthetic construct
  misc_feature 1..2397: note = AAH20057
  source 1..2397: mol_type = other RNA
atgaatttacaaccaattttctggattggactgatcagttcagtttgctgtgtgtttgctcaaacagatgaaaatagatgtttaaaagcaaatgccaaatcatgtggagaatgtatacaagcagggccaaattgtgggtggtgcacaaattcaacatttttacaggaaggaatgcctacttctgcacgatgtgatgatttagaagccttaaaaaagaagggttgccctccagatgacatagaaaatcccagaggctccaaagatataaagaaaaataaaaatgtaaccaaccgtagcaaaggaacagcagagaagctcaagccagaggatattactcagatccaaccacagcagttggttttgcgattaagatcaggggagccacagacatttacattaaaattcaagagagctgaagactatcccattgacctctactaccttatggacctgtcttactcaatgaaagacgatttggagaatgtaaaaagtcttggaacagatctgatgaatgaaatgaggaggattacttcggacttcagaattggatttggctcatttgtggaaaagactgtgatgccttacattagcacaacaccagctaagctcaggaacccttgcacaagtgaacagaactgcaccagcccatttagctacaaaaatgtgctcagtcttactaataaaggagaagtatttaatgaacttgttggaaaacagcgcatatctggaaatttggattctccagaaggtggtttcgatgccatcatgcaagttgcagtttgtggatcactgattggctggaggaatgttacacggctgctggtgttttccacagatgccgggtttcactttgctggagatgggaaacttggtggcattgttttaccaaatgatggacaatgtcacctggaaaataatatgtacacaatgagccattattatgattatccttctattgctcaccttgtccagaaactgagtgaaaataatattcagacaatttttgcagttactgaagaatttcagcctgtttacaaggagctgaaaaacttgatccctaagtcagcagtaggaacattatctgcaaattctagcaatgtaattcagttgatcattgatgcatacaattccctttcctcagaagtcattttggaaaacggcaaattgtcagaaggagtaacaataagttacaaatcttactgcaagaacggggtgaatggaacaggggaaaatggaagaaaatgttccaatatttccattggagatgaggttcaatttgaaattagcataacttcaaataagtgtccaaaaaaggattctgacagctttaaaattaggcctctgggctttacggaggaagtagaggttattcttcagtacatctgtgaatgtgaatgccaaagcgaaggcatccctgaaagtcccaagtgtcatgaaggaaatgggacatttgagtgtggcgcgtgcaggtgcaatgaagggcgtgttggtagacattgtgaatgcagcacagatgaagttaacagtgaagacatggatgcttactgcaggaaagaaaacagttcagaaatctgcagtaacaatggagagtgcgtctgcggacagtgtgtttgtaggaagagggataatacaaatgaaatttattctggcaaattctgcgagtgtgataatttcaactgtgatagatccaatggcttaatttgtggaggaaatggtgtttgcaagtgtcgtgtgtgtgagtgcaaccccaactacactggcagtgcatgtgactgttctttggatactagtacttgtgaagccagcaacggacagatctgcaatggccggggcatctgtgagtgtggtgtctgtaagtgtacagatccgaagtttcaagggcaaacgtgtgagatgtgtcagacctgccttggtgtctgtgctgagcataaagaatgtgttcagtgcagagccttcaataaaggagaaaagaaagacacatgcacacaggaatgttcctattttaacattaccaaggtagaaagtcgggacaaattaccccagccggtccaacctgatcctgtgtcccattgtaaggagaaggatgttgacgactgttggttctattttacgtattcagtgaatgggaacaacgaggtcatggttcatgttgtggagaatccagagtgtcccactggtccagacatcattccaattgtagctggtgtggttgctggaattgttcttattggccttgcattactgctgatatggaagcttttaatgataattcatgacagaagggagtttgctaaatttgaaaaggagaaaatgaatgccaaatgggacacgggtgaaaatcctatttataagagtgccgtaacaactgtggtcaatccgaagtatgagggaaaatga

SEQ ID NO: 745 - RNA, 2367 nt, synthetic construct
  misc_feature 1..2367: note = AAA36122
  source 1..2367: mol_type = other RNA
atggggattgaactgctttgcctgttctttctatttctaggaaggaatgatcacgtacaaggtggctgtgccctgggaggtgcagaaacctgtgaagactgcctgcttattggacctcagtgtgcctggtgtgctcaggagaattttactcatccatctggagttggcgaaaggtgtgataccccagcaaaccttttagctaaaggatgtcaattaaacttcatcgaaaaccctgtctcccaagtagaaatacttaaaaataagcctctcagtgtaggcagacagaaaaatagttctgacattgttcagattgcgcctcaaagcttgatccttaagttgagaccaggtggtgcgcagactctgcaggtgcatgtccgccagactgaggactacccggtggatttgtattacctcatggacctctccgcctccatggatgacgacctcaacacaataaaggagctgggctcccggctttccaaagagatgtctaaattaaccagcaactttagactgggcttcggatcttttgtggaaaaacctgtatcccctttcgtgaaaacaacaccagaagaaattgccaacccttgcagtagtattccatacttctgtttacctacatttggattcaagcacattttgccattgacaaatgatgctgaaagattcaatgaaattgtgaagaatcagaaaatttctgctaatattgacacacccgaaggtggatttgatgcaattatgcaagctgctgtgtgtaaggaaaaaattggctggcggaatgactccctccacctcctggtctttgtgagtgatgctgattctcattttggaatggacagcaaactagcaggcatcgtcattcctaatgacgggctctgtcacttggacagcaagaatgaatactccatgtcaactgtcttggaatatccaacaattggacaactcattgataaactggtacaaaacaacgtgttattgatcttcgctgtaacccaagaacaagttcatttatatgagaattacgcaaaacttattcctggagctacagtaggtctacttcagaaggactccggaaacattctccagctgatcatctcagcttatgaagaactgcggtctgaggtggaactggaagtattaggagacactgaaggactcaacttgtcatttacagccatctgtaacaacggtaccctcttccaacaccaaaagaaatgctctcacatgaaagtgggagacacagcttccttcagcgtgactgtgaatatcccacactgcgagagaagaagcaggcacattatcataaagcctgtggggctgggggatgccctggaattacttgtcagcccagaatgcaactgcgactgtcagaaagaagtggaagtgaacagctccaaatgtcaccacgggaacggctctttccagtgtggggtgtgtgcctgccaccctggccacatggggcctcgctgtgagtgtggcgaggacatgctgagcacagattcctgcaaggaggccccagatcatccctcctgcagcggaaggggtgactgctactgtgggcagtgtatctgccacttgtctccctatggaaacatttatgggccttattgccagtgtgacaatttctcctgcgtgagacacaaagggctgctctgcggaggtaacggcgactgtgactgtggtgaatgtgtgtgcaggagcggctggactggcgagtactgcaactgcaccaccagcacggactcctgcgtctctgaagatggagtgctctgcagcgggcgcggggactgtgtttgtggcaagtgtgtttgcacaaaccctggagcctcaggaccaacctgtgaacgatgtcctacctgtggtgacccctgtaactctaaacggagctgcattgagtgccacctgtcagcagctggccaagcccgagaagaatgtgtggacaagtgcaaactagctggtgcgaccatcagtgaagaagaagatttctcaaaggatggttctgtttcctgctctctgcaaggagaaaatgaatgtcttattacattcctaataactacagataatgaggggaaaaccatcattcacagcatcaatgaaaaagattgtccgaagcctccaaacattcccatgatcatgttaggggtttccctggctattcttctcatcggggttgtcctactgtgcatctggaagctactggtgtcatttcatgatcgtaaagaagttgccaaatttgaagcagaacgatcaaaagccaagtggcaaacgggaaccaatccactctacagaggatccacaagtacttttaaaaatgtaacttataaacacagggaaaaacaaaaggtagacctttccacagattgctag

SEQ ID NO: 746 - RNA, 786 nt, synthetic construct
  misc_feature 1..786: note = EAW71937
  source 1..786: mol_type = other RNA
atgtgggacctggttctctccatcgccttgtctgtggggtgcactggtgccgtgcccctcatccagtctcggattgtgggaggctgggagtgtgagaagcattcccaaccctggcaggtggctgtgtacagtcatggatgggcacactgtgggggtgtcctggtgcacccccagtgggtgctcacagctgcccattgcctaaagaagaatagccaggtctggctgggtcggcacaacctgtttgagcctgaagacacaggccagagggtccctgtcagccacagcttcccacacccgctctacaatatgagccttctgaagcatcaaagccttagaccagatgaagactccagccatgacctcatgctgctccgcctgtcagagcctgccaagatcacagatgttgtgaaggtcctgggcctgcccacccaggagccagcactggggaccacctgctacgcctcaggctggggcagcatcgaaccagaggagttcttgcgccccaggagtcttcagtgtgtgagcctccatctcctgtccaatgacatgtgtgctagagcttactctgagaaggtgacagagttcatgttgtgtgctgggctctggacaggtggtaaagacacttgtgggggtgattctgggggtccacttgtctgtaatggtgtgcttcaaggtatcacatcatggggccctgagccatgtgccctgcctgaaaagcctgctgtgtacaccaaggtggtgcattaccggaagtggatcaaggacaccatcgcagccaacccctga

SEQ ID NO: 747 - RNA, 672 nt, synthetic construct
  misc_feature 1..672: note = EAW71938
  source 1..672: mol_type = other RNA
atgtgggacctggttctctccatcgccttgtctgtggggtgcactggtgccgtgcccctcatccagtctcggattgtgggaggctgggagtgtgagaagcattcccaaccctggcaggtggctgtgtacagtcatggatgggcacactgtgggggtgtcctggtgcacccccagtgggtgctcacagctgcccattgcctaaagaagaatagccaggtctggctgggtcggcacaacctgtttgagcctgaagacacaggccagagggtccctgtcagccacagcttcccacacccgctctacaatatgagccttctgaagcatcaaagccttagaccagatgaagactccagccatgacctcatgctgctccgcctgtcagagcctgccaagatcacagatgttgtgaaggtcctgggcctgcccacccaggagccagcactggggaccacctgctacgcctcaggctggggcagcatcgaaccagaggagttcttgcgccccaggagtcttcagtgtgtgagcctccatctcctgtccaatgacatgtgtgctagagcttactctgagaaggtgacagagttcatgttgtgtgctgggctctggacaggtggtaaagacacttgtggggtgagtcatccctactcccaacatctggaggggaaagggtga

SEQ ID NO: 748 - RNA, 189 nt, synthetic construct
  misc_feature 1..189: note = BAF98781
  source 1..189: mol_type = other RNA
atgagccttctgaagcatcaaagccttagaccagatgaagactccagccatgacctcatgctgcttcgcctgtcagagcctgccaagatcacagatgttgtgaaggtcctgggcctgcccacccaggagccagcactggggaccacctgctacgcctcaggctggggcagcatcgaaccagaggagtga

SEQ ID NO: 749 - RNA, 735 nt, synthetic construct
  misc_feature 1..735: note = BAG62239
  source 1..735: mol_type = other RNA
atgggcacactgtgggggtgtcctggtgcacccccagtgggtgctcacagctgcccattgcctaaagaagtaagtaggaccctgggatctggggagggaatggctgtgtcccacaggaataacagcgggatgcttcccccagggtcacttctcaggaatagccaggtctggctgggtcggcacaacctgtttgagcctgaagacacaggccggagggtccctgtcagccacagcttcccacacccgctctacaatatgagccttctgaagcatcaaagccttagaccagatgaagactccagccatgacctcatgctgctccgcctgtcagagcctgccaagatcacagatgttgtgaaggtcctgggcctgcccacccaggagccagcactggggaccacctgctacgcctcaggctggggcagcatcgaaccagaggagttcttgcgccccaggagtcttcagtgtgtgagcctccatctcctgtccaatgacatgtgtgctagagcttactctgagaaggtgacagagttcatgttgtgtgctgggctctggacaggtggtaaagacacttgtgggggtgattctgggggtccacttgtctgtaatggtgtgcttcaaggtatcacatcatggggccctgagccatgtgccctgcctgaaaagcctgctgtgtacaccaaggtggtgcattaccggaagtggatcaaggacaccatcgcagccaacccctga

SEQ ID NO: 750 - RNA, 786 nt, synthetic construct
  misc_feature 1..786: note = AAA74454
  source 1..786: mol_type = other RNA
atgtgggacctggttctctccatcgccttgtctgtggggtgcactggtgccgtgcccctcatccagtctcggattgtgggaggctgggagtgtgagaagcattcccaaccctggcaggtggctgtgtacagtcatggatgggcacactgtgggggtgtcctggtgcacccccagtgggtgctcacagctgcccattgcctaaagaagaatagccaggtctggctgggtcggcacaacctgtttgagcctgaagacacaggccagagggtccctgtcagccacagcttcccacacccgctctacaatatgagccttctgaagcatcaaagccttagaccagatgaagactccagccatgacctcatgctgctccgcctgtcagagcctgccaagatcacagatgttgtgaaggtcctgggcctgcccacccaggagccagcactggggaccacctgctacgcctcaggctggggcagcatcgaaccagaggagttcttgcgccccaggagtcttcagtgtgtgagcctccatctcctgtccaatgacatgtgtgctagagcttactctgagaaggtgacagagttcatgttgtgtgctgggctctggacaggtggtaaagacacttgtgggggtgattctgggggtccacttgtctgtaatggggtgcttcaaggtatcacatcatggggccctgagccatgtgccctgcctgaaaagcctgctgtgtacaccaaggtggtgcattaccggaagtggatcaaggacaccatcgcagccaacccctga

SEQ ID NO: 751 - RNA, 150 nt, synthetic construct
  misc_feature 1..150: note = AAR10469
  source 1..150: mol_type = other RNA
atgtgggacctggttctctccatcgccttgtctgtggggtgcactggaatagccaggtctggctgggtcggcacaacctgtttgagcctgaagacacaggccagagggtccctgtcagccacagcttcccacacccgctctacaatatga

SEQ ID NO: 752 - RNA, 543 nt, synthetic construct
  misc_feature 1..543: note = AAR10468
  source 1..543: mol_type = other RNA
atgtgggacctggttctctccatcgccttgtctgtggggtgcactggtgccgtgcccctcatccagtctcggattgtgggaggctgggagtgtgagaagcattcccaaccctggcaggtggctgtgtacagtcatggatgggcacactgtgggggtgtcctggtgcacccccagtgggtgctcacagctgcccattgcctaaagaagaatagccaggtctggctgggtcggcacaacctgtttgagcctgaagacacaggccagagggtccctgtcagccacagcttcccacacccgctctacaatatgagccttctgaagcatcaaagccttagaccagatgaagactccagccatgacctcatgctgctccgcctgtcagagcctgccaagatcacagatgttgtgaaggtcctgggcctgcccacccaggagccagcactggggaccacctgctacgcctcaggctggggcagcatcgaaccagaggagtgtacgcctgggccagatggtgtagctgggagcccagatgcctgggtctga

SEQ ID NO: 753 - RNA, 765 nt, synthetic construct
  misc_feature 1..765: note = EAW71943
  source 1..765: mol_type = other RNA
atggccacagcaggaaatccctggggctggttcctggggtacctcatccttggtgtcgcaggatcgctcgtctctggtagctgcagccaaatcataaacggcgaggactgcagcccgcactcgcagccctggcaggcggcactggtcatggaaaacgaattgttctgctcgggcgtcctggtgcatccgcagtgggtgctgtcagccgcacactgtttccagaactcctacaccatcgggctgggcctgcacagtcttgaggccgaccaagagccagggagccagatggtggaggccagcctctccgtacggcacccagagtacaacagacccttgctcgctaacgacctcatgctcatcaagttggacgaatccgtgtccgagtctgacaccatccggagcatcagcattgcttcgcagtgccctaccgcggggaactcttgcctcgtttctggctggggtctgctggcgaacggcagaatgcctaccgtgctgcagtgcgtgaacgtgtcggtggtgtctgaggaggtctgcagtaagctctatgacccgctgtaccaccccagcatgttctgcgccggcggagggcaagaccagaaggactcctgcaacggtgactctggggggcccctgatctgcaacgggtacttgcagggccttgtgtctttcggaaaagccccgtgtggccaagttggcgtgccaggtgtctacaccaacctctgcaaattcactgagtggatagagaaaaccgtccaggccagttaa

SEQ ID NO: 754 - RNA, 228 nt, synthetic construct
  misc_feature 1..228: note = AAX30051
  source 1..228: mol_type = other RNA
atggccacagcaggaaatccctggggctggttcctggggtacctcatccttggtgtcgcaggatcgctcgtctctggtagctgcagccaaatcataaacggcgaggactgcagcccgcactcgcagccctggcaggcggcactggtcatggaaaacgaattgttctgctcgggcgtcctggtgcatccgcagtgggtgctgtcagccgcacactgtttccagaagtga

SEQ ID NO: 755 - RNA, 588 nt, synthetic construct
  misc_feature 1..588: note = AAL14782
  source 1..588: mol_type = other RNA
atggccacagcaggaaatccctggggctggttcctggggtacctcatccttggtgtcgcaggatctctcgtctctggtagctgcagccaaatcataaacggcgaggactgcagcccgcactcgcagccctggcaggcggcactggtcatggaaaacgaattgttctgctcgggcgtcctggtgcatccgcagtgggtgctgtcagccgcacactgtttccagaactcctacaccatcgggctgggcctgcacagtcttgaggccgaccaagagccagggagccagatggtggaggccagcctctccgtacggcacccagagtacaacagacccttgctcgctaacgacctcatgctcatcaagttggacgaatccgtgtccgagtctgacaccatccggagcatcagcattgcttcgcagtgccctaccgcggggaactcttgcctcgtttctggctggggtctgctggcgaacggtgagctcacgggtgtgtgtctgccctcttcaaggaggtcctctgcccagtcgcgggggctgacccagagctctgcgtcccaggcagaatgcctaccgtgctgcagtgcgtga

SEQ ID NO: 756 - RNA, 480 nt, synthetic construct
  misc_feature 1..480: note = AAL14781
  source 1..480: mol_type = other RNA
atggccacagcaggaaatccctggggctggttcctggggtacctcatccttggtgtcgcaggatctctcgtctctggtagctgcagccaaatcataaacggcgaggactgcagcccgcactcgcagccctggcaggcggcactggtcatggaaaacgaattgttctgctcgggcgtcctggtgcatccgcagtgggtgctgtcagccgcacactgtttccagaactcctacaccatcgggctgggcctgcacagtcttgaggccgaccaagagccagggagccagatggtggaggccagcctctccgtacggcacccagagtacaacagacccttgctcgctaacgacctcatgctcatcaagttggacgaatccgtgtccgagtctgacaccatccggagcatcagcattgcttcgcagtgccctaccgcggggaactcttgcctcgtttctggctggggtctgctggcgaacgggtga

SEQ ID NO: 757 - RNA, 765 nt, synthetic construct
  misc_feature 1..765: note = AAD21580
  source 1..765: mol_type = other RNA
atggccacagcaggaaatccctggggctggttcctggggtacctcatccttggtgtcgcaggatcgctcgtctctggtagctgcagccaaatcataaacggcgaggactgcagcccgcactcgcagccctggcaggcggcactggtcatggaaaacgaattgttctgctcgggcgtcctggtgcatccgcagtgggtgctgtcagccgcacactgtttccagaactcctacaccatcgggctgggcctgcacagtcttgaggccgaccaagagccagggagccagatggtggaggccagcctctccgtacggcacccagagtacaacagacccttgctcgctaacgacctcatgctcatcaagttggacgaatccgtgtccgagtctgacaccatccggagcatcagcattgcttcgcagtgccctaccgcggggaactcttgcctcgtttctggctggggtctgctggcgaacggcagaatgcctaccgtgctgcagtgcgtgaacgtgtcggtggtgtctgaggaggtctgcagtaagctctatgacccgctgtaccaccccagcatgttctgcgccggcggagggcacgaccagaaggactcctgcaacggtgactctggggggcccctgatctgcaacgggtacttgcagggccttgtgtctttcggaaaagccccgtgtggccaagttggcgtgccaggtgtctacaccaacctctgcaaattcactgagtggatagagaaaaccgtccaggccagttaa

SEQ ID NO: 758 - RNA, 2673 nt, synthetic construct
  misc_feature 1..2673: note = AAC83230
  source 1..2673: mol_type = other RNA
atgtcgcaagggatcctttctccgccagcgggcttgctgtccgatgacgatgtcgtagtttctcccatgtttgagtccacagctgcagatttggggtctgtggtacgcaagaacctgctatcagactgctctgtcgtctctacctccctagaggacaagcagcaggttccatctgaggacagtatggagaaggtgaaagtatacttgagggttaggcccttgttaccttcagagttggaacgacaggaagatcagggttgtgtccgtattgagaatgtggagacccttgttctacaagcacccaaggactcgtttgccctgaagagcaatgaacggggaattggccaagccacacacaggttcaccttttcccagatctttgggccagaagtgggacaggcatccttcttcaacctaactgtgaaggagatggtaaaggatgtactcaaagggcagaactggctcatctatacatatggagtcactaactcagggaaaacccacacgattcaaggtaccatcaaggatggagggattctcccccggtccctggcgctgatcttcaatagcctccaaggccaacttcatccaacacctgatctgaagcccttgctctccaatgaggtaatctggctagacagcaagcagatccgacaggaggaaatgaagaagctgtccctgctaaatggaggcctccaagaggaggagctgtccacttccttgaagaggagtgtctacatcgaaagtcggataggtaccagcaccagcttcgacagtggcattgctgggctctcttctatcagtcagtgtaccagcagtagccagctggatgaaacaagtcatcgatgggcacagccagacactgccccactacctgtcccggcaaacattcgcttctccatctggatctcattctttgagatctacaacgaactgctttatgacctattagaaccgcctagccaacagcgcaagaggcagactttgcggctatgcgaggatcaaaatggcaatccctatgtgaaagatctcaactggattcatgtgcaagatgctgaggaggcctggaagctcctaaaagtgggtcgtaagaaccagagctttgccagcacccacctcaaccagaactccagccgcagtcacagcatcttctcaatcaggatcctacaccttcagggggaaggagatatagtccccaagatcagcgagctgtcactctgtgatctggctggctcagagcgctgcaaagatcagaagagtggtgaacggttgaaggaagcaggaaacattaacacctctctacacaccctgggccgctgtattgctgcccttcgtcaaaaccagcagaaccggtcaaagcagaacctggttcccttccgtgacagcaagttgactcgagtgttccaaggtttcttcacaggccgaggccgttcctgcatgattgtcaatgtgaatccctgtgcatctacctatgatgaaactcttcatgtggccaagttctcagccattgctagccagcttgtgcatgccccacctatgcaactgggattcccatccctgcactcgttcatcaaggaacatagtcttcaggtatcccccagcttagagaaaggggctaaggcagacacaggccttgatgatgatattgaaaatgaagctgacatctccatgtatggcaaagaggagctcctacaagttgtggaagccatgaagacactgcttttgaaggaacgacaggaaaagctacagctggagatgcatctccgagatgaaatttgcaatgagatggtagaacagatgcaacagcgggaacagtggtgcagtgaacatttggacacccaaaaggaactattggaggaaatgtatgaagaaaaactaaatatcctcaaggagtcactgacaagtttttaccaagaagagattcaggagcgggatgaaaagattgaagagctagaagctctcttgcaggaagccagacaacagtcagtggcccatcagcaatcagggtctgaattggccctacggcggtcacaaaggttggcagcttctgcctccacccagcagcttcaggaggttaaagctaaattacagcagtgcaaagcagagctaaactctaccactgaagagttgcataagtatcagaaaatgttagaaccaccaccctcagccaagcccttcaccattgatgtggacaagaagttagaagagggccagaagaatataaggctgttgcggacagagcttcagaaacttggtgagtctctccaatcagcagagagagcttgttgccacagcactggggcaggaaaacttcgtcaagccttgaccacttgtgatgacatcttaatcaaacaggaccagactctggctgaactgcagaacaacatggtgctagtgaaactggaccttcggaagaaggcagcatgtattgctgagcagtatcatactgtgttgaaactccaaggccaggtttctgccaaaaagcgccttggtaccaaccaggaaaatcagcaaccaaaccaacaaccaccagggaagaaaccattccttcgaaatttacttccccgaacaccaacctgccaaagctcaacagactgcagcccttatgcccggatcctacgctcacggcgttcccctttactcaaatctgggccttttggcaaaaagtactaa

SEQ ID NO: 759 - RNA, 1113 nt, synthetic construct
  misc_feature 1..1113: note = AAH34621
  source 1..1113: mol_type = other RNA
atggctataactttggaagaagctccgtggctgggctggctcttggtgaaagcactgatgaggtttgccttcatggtcgtcaacaacctggttgctattccatcctacatctgctatgtaattatacttcagccccttcgagtgctggacagtaagcggttctggtatatcgaaggaatcatgtataaatggcttttaggaatggtagcttcctggggatggtatgctggatatacagtgatggaatggggagaagatattaaagcagtttcaaaagatgaagcagtgatgttggtgaatcatcaggcaacaggagatgtgtgcacactgatgatgtgcctccaggacaaaggactggttgttgctcagatgatgtggttgatggatcatatttttaagtacacaaactttggaattgtttctctagttcatggagacttctttataagacagggaagatcttatcgtgaccaacagctgctgcttctcaagaagcacttagaaaataattacaggagcagagatcgaaaatggattgttttgtttccagaagggggcttcctcaggaagaggcgagaaacaagtcaggcatttgccaagaaaaataacttgccatttcttacaaatgttactctgccaaggtctggggcaacaaaaattattttgaatgcacttgtagcacaacagaaaaatggaagtccagcaggaggagatgctaaagaattagacagcaaatcaaaaggcctccagtggataatagatacaacgatagcttatcccaaagctgaacctatagatattcaaacctggatccttggatacaggaaaccaacagtcacacatgtacattacaggatctttccaattaaagatgtacccctggagactgatgaccttaccacttggctctatcagcggtttgttgaaaaagaagacctcttatcacatttttatgaaacaggagcttttccaccttccaagggccataaggaagctgtttccagggagatgaccctcagcaacttgtggatatttctcatacagtcttttgcatttttgtcaggctatatgtggtacaacatcattcagtatttttaccattgcctgttttag

SEQ ID NO: 760 - RNA, 2178 nt, synthetic construct
  misc_feature 1..2178: note = AAH14924
  source 1..2178: mol_type = other RNA
atggccatggactcgtcgcttcaggcccgcctgtttcccggtctcgctatcaagatccaacgcagtaatggtttaattcacagtgccaatgtaaggactgtgaacttggagaaatcctgtgtttcagtggaatgggcagaaggaggtgccacaaagggcaaagagattgattttgatgatgtggctgcaataaacccagaactcttacagcttcttcccttacatccgaaggacaatctgcccttgcaggaaaatgtaacaatccagaaacaaaaacggagatccgtcaactccaaaattcctgctccaaaagaaagtcttcgaagccgctccactcgcatgtccactgtctcagagcttcgcatcacggctcaggagaatgacatggaggtggagctgcctgcagctgcaaactcccgcaagcagttttcagttcctcctgcccccactaggccttcctgccctgcagtggctgaaataccattgaggatggtcagcgaggagatggaagagcaagtccattccatccgaggcagctcttctgcaaaccctgtgaactcagttcggaggaaatcatgtcttgtgaaggaagtggaaaaaatgaagaacaagcgagaagagaagaaggcccagaactctgaaatgagaatgaagagagctcaggagtatgacagtagttttccaaactgggaatttgcccgaatgattaaagaatttcgggctactttggaatgtcatccacttactatgactgatcctatcgaagagcacagaatatgtgtctgtgttaggaaacgcccactgaataagcaagaattggccaagaaagaaattgatgtgatttccattcctagcaagtgtctcctcttggtacatgaacccaagttgaaagtggacttaacaaagtatctggagaaccaagcattctgctttgactttgcatttgatgaaacagcttcgaatgaagttgtctacaggttcacagcaaggccactggtacagacaatctttgaaggtggaaaagcaacttgttttgcatatggccagacaggaagtggcaagacacatactatgggcggagacctctctgggaaagcccagaatgcatccaaagggatctatgccatggcctcccgggacgtcttcctcctgaagaatcaaccctgctaccggaagttgggcctggaagtctatgtgacattcttcgagatctacaatgggaagctgtttgacctgctcaacaagaaggccaagctgcgcgtgctggaggacggcaagcaacaggtgcaagtggtggggctgcaggagcatctggttaactctgctgatgatgtcatcaagatgatcgacatgggcagcgcctgcagaacctctgggcagacatttgccaactccaattcctcccgctcccacgcgtgcttccaaattattcttcgagctaaagggagaatgcatggcaagttctctttggtagatctggcagggaatgagcgaggcgcggacacttccagtgctgaccggcagacccgcatggagggcgcagaaatcaacaagagtctcttagccctgaaggagtgcatcagggccctgggacagaacaaggctcacaccccgttccgtgagagcaagctgacacaggtgctgagggactccttcattggggagaactctaggacttgcatgattgccacgatctcaccaggcataagctcctgtgaatatactttaaacaccctgagatatgcagacagggtcaaggagctgagcccccacagtgggcccagtggagagcagttgattcaaatggaaacagaagagatggaagcctgctctaacggggcgctgattccaggcaatttatccaaggaagaggaggaactgtcttcccagatgtccagctttaacgaagccatgactcagatcagggagctggaggagaaggctatggaagagctcaaggagatcatacagcaaggaccagactggcttgagctctctgagatgaccgagcagccagactatgacctggagacctttgtgaacaaagcggaatctgctctggcccagcaagccaagcatttctcagccctgcgagatgtcatcaaggccttgcgcctggccatgcagctggaagagcaggctagcagacaaataagcagcaagaaacggccccagtga

SEQ ID NO: 761 - RNA, 342 nt, synthetic construct
  misc_feature 1..342: note = AAH62223
  source 1..342: mol_type = other RNA
atgaacttctatttactcctagcgagcagcattctgtgtgccttgattgtcttctggaaatatcgccgctttcagagaaacactggcgaaatgtcatcaaattcaactgctcttgcactagtgagaccctcttcttctgggttaattaacagcaatacagacaacaatcttgcagtctacgacctctctcgggatattttaaataatttcccacactcaatagccaggcagaagcgaatattggtaaacctcagtatggtggaaaacaagctggttgaactggaacatactctacttagcaagggtttcagaggtgcatcacctcaccggaaatccacctaa

SEQ ID NO: 762 - RNA, 2583 nt, synthetic construct
  misc_feature 1..2583: note = AAA56833
  source 1..2583: mol_type = other RNA
atggggccctggggctggaaattgcgctggaccgtcgccttgctcctcgccgcggcggggactgcagtgggcgacagatgtgaaagaaacgagttccagtgccaagacgggaaatgcatctcctacaagtgggtctgcgatggcagcgctgagtgccaggatggctctgatgagtcccaggagacgtgcttgtctgtcacctgcaaatccggggacttcagctgtgggggccgtgtcaaccgctgcattcctcagttctggaggtgcgatggccaagtggactgcgacaacggctcagacgagcaaggctgtccccccaagacgtgctcccaggacgagtttcgctgccacgatgggaagtgcatctctcggcagttcgtctgtgactcagaccgggactgcttggacggctcagacgaggcctcctgcccggtgctcacctgtggtcccgccagcttccagtgcaacagctccacctgcatcccccagctgtgggcctgcgacaacgaccccgactgcgaagatggctcggatgagtggccgcagcgctgtaggggtctttacgtgttccaaggggacagtagcccctgctcggccttcgagttccactgcctaagtggcgagtgcatccactccagctggcgctgtgatggtggccccgactgcaaggacaaatctgacgaggaaaactgcgctgtggccacctgtcgccctgacgaattccagtgctctgatggaaactgcatccatggcagccggcagtgtgaccgggaatatgactgcaaggacatgagcgatgaagttggctgcgttaatgtgacactctgcgagggacccaacaagttcaagtgtcacagcggcgaatgcatcaccctggacaaagtctgcaacatggctagagactgccgggactggtcagatgaacccatcaaagagtgcgggaccaacgaatgcttggacaacaacggcggctgttcccacgtctgcaatgaccttaagatcggctacgagtgcctgtgccccgacggcttccagctggtggcccagcgaagatgcgaagatatcgatgagtgtcaggatcccgacacctgcagccagctctgcgtgaacctggagggtggctacaagtgccagtgtgaggaaggcttccagctggacccccacacgaaggcctgcaaggctgtgggctccatcgcctacctcttcttcaccaaccggcacgaggtcaggaagatgacgctggaccggagcgagtacaccagcctcatccccaacctgaggaacgtggtcgctctggacacggaggtggccagcaatagaatctactggtctgacctgtcccagagaatgatctgcagcacccagcttgacagagcccacggcgtctcttcctatgacaccgtcatcagcagggacatccaggcccccgacgggctggctgtggactggatccacagcaacatctactggaccgactctgtcctgggcactgtctctgttgcggataccaagggcgtgaagaggaaaacgttattcagggagaacggctccaagccaagggccatcgtggtggatcctgttcatggcttcatgtactggactgactggggaactcccgccaagatcaagaaagggggcctgaatggtgtggacatctactcgctggtgactgaaaacattcagtggcccaatggcatcaccctagatctcctcagtggccgcctctactgggttgactccaaacttcactccatctcaagcatcgatgtcaatgggggcaaccggaagaccatcttggaggatgaaaagaggctggcccaccccttctccttggccgtctttgaggacaaagtattttggacagatatcatcaacgaagccattttcagtgccaaccgcctcacaggttccgatgtcaacttgttggctgaaaacctactgtccccagaggatatggtcctcttccacaacctcacccagccaagaggagtgaactggtgtgagaggaccaccctgagcaatggcggctgccagtatctgtgcctccctgccccgcagatcaacccccactcgcccaagtttacctgcgcctgcccggacggcatgctgctggccagggacatgaggagctgcctcacagaggctgaggctgcagtggccacccaggagacatccaccgtcaggctaaaggtcagctccacagccgtaaggacacagcacacaaccacccggcctgttcccgacacctcccggctgcctggggccacccctgggctcaccacggtggagatagtgacaatgtctcaccaagctctgggcgacgttgctggcagaggaaatgagaagaagcccagtagcgtgagggctctgtccattgtcctccccatcgtgctcctcgtcttcctttgcctgggggtcttccttctatggaagaactggcggcttaagaacatcaacagcatcaactttgacaaccccgtctatcagaagaccacagaggatgaggtccacatttgccacaaccaggacggctacagctacccctcgagacagatggtcagtctggaggatgacgtggcgtga

SEQ ID NO: 763 - RNA, 1302 nt, synthetic construct
  misc_feature 1..1302: note = CAA70989
  source 1..1302: mol_type = other RNA
atggtttggaaagtagctgtattcctcagtgtggccctgggcattggtgccgttcctatagatgatcctgaagatggaggcaagcactgggtggtgatcgtggcaggttcaaatggctggtataattataggcaccaggcagacgcgtgccatgcctaccagatcattcaccgcaatgggattcctgacgaacagatcgttgtgatgatgtacgatgacattgcttactctgaagacaatcccactccaggaattgtgatcaacaggcccaatggcacagatgtctatcagggagtcccgaaggactacactggagaggatgttaccccacaaaatttccttgctgtgttgagaggcgatgcagaagcagtgaagggcataggatccggcaaagtcctgaagagtggcccccaggatcacgtgttcatttacttcactgaccatggatctactggaatactggtttttcccaatgaagatcttcatgtaaaggacctgaatgagaccatccattacatgtacaaacacaaaatgtaccgaaagatggtgttctacattgaagcctgtgagtctgggtccatgatgaaccacctgccggataacatcaatgtttatgcaactactgctgccaaccccagagagtcgtcctacgcctgttactatgatgagaagaggtccacgtacctgggggactggtacagcgtcaactggatggaagactcggacgtggaagatctgactaaagagaccctgcacaagcagtaccacctggtaaaatcgcacaccaacaccagccacgtcatgcagtatggaaacaaaacaatctccaccatgaaagtgatgcagtttcagggtatgaaacgcaaagccagttctcccgtccccctacctccagtcacacaccttgacctcacccccagccctgatgtgcctctcaccatcatgaaaaggaaactgatgaacaccaatgatctggaggagtccaggcagctcacggaggagatccagcggcatctggatgccaggcacctcattgagaagtcagtgcgtaagatcgtctccttgctggcagcgtccgaggctgaggtggagcagctcctgtccgagagagccccgctcacggggcacagctgctacccagaggccctgctgcacttccggacccactgcttcaactggcactcccccacgtacgagtatgcgttgagacatttgtacgtgctggtcaacctttgtgagaagccgtatccacttcacaggataaaattgtccatggaccacgtgtgccttggtcactactga

SEQ ID NO: 764 - RNA, 1797 nt, synthetic construct
  misc_feature 1..1797: note = AAL36991
  source 1..1797: mol_type = other RNA
atgacccccatcgtcacagtcctgatctgtctcgggctgagtctgggccccaggacccacgtgcagacagggaccattcccaagcccaccctgtgggctgagccagactctgtgatcacccaggggagtcccgtcaccctcagttgtcaggggagccttgaagcccaggagtaccgtctatatagggagaaaaaatcagcatcttggattacacggatacgaccagagcttgtgaagaacggccagttccacatcccatccatcacctgggaacacacagggcgatatggctgtcagtattacagccgcgctcggtggtctgagctcagtgaccccctggtgctggtgatgacaggagcctacccaaaacccaccctctcagcccagcccagccctgtggtgacctcaggaggaagggtgaccctccagtgtgagtcacaggtggcatttggcggcttcattctgtgtaaggaaggagaagaagaacacccacaatgcctgaactcccagccccatgcccgtgggtcgtcccgcgccatcttctccgtgggccccgtgagcccgaatcgcaggtggtcgcacaggtgctatggttatgacttgaactctccctatgtgtggtcttcacccagtgatctcctggagctcctggtcccaggtgtttctaagaagccatcactctcagtgcagccgggtcctgtcgtggcccctggggaaagcctgaccctccagtgtgtctctgatgtcggctatgacagatttgttctgtacaaggagggggaacgtgaccttcgccagctccctggccggcagccccaggctgggctctcccaggccaacttcaccctgggccctgtgagccgctcctacgggggccagtacagatgctacggtgcacacaacctctcctctgagtgctcggcccccagcgaccccctggacatcctgatcacaggacagatccgtggcacacccttcatctcagtgcagccaggccccacagtggcctcaggagagaacgtgaccctgctgtgtcagtcatggcggcagttccacactttccttctgaccaaggcgggagcagctgatgccccactccgtctaagatcaatacacgaatatcctaagtaccaggctgaattccccatgagtcctgtgacctcagcccacgcggggacctacaggtgctacggctcactcaactccgacccctacctgctgtctcaccccagtgagcccctggagctcgtggtctcaggaccctccatgggttccagccccccacccaccggtcccatctccacacctgcaggccctgaggaccagcccctcacccccactgggtcggatccccaaagtggtctgggaaggcacctgggggttgtgatcggcatcttggtggccgtcgtcctactgctcctcctcctcctcctcctcttcctcatcctccgacatcgacgtcagggcaaacactggacatcgacccagagaaaggctgatttccaacatcctgcaggggctgtggggccagagcccacagacagaggcctgcagtggaggtccagcccagctgccgacgcccaggaagaaaacctctatgctgccgtgaaggacacacagcctgaagatggggtggagatggacactcgggctgctgcatctgaagccccccaggatgtgacctacgcccagctgcacagcttgaccctcagacggaaggcaactgagcctcctccatcccaggaaagggaacctccagctgagcccagcatctacgccaccctggccatccactag

SEQ ID NO: 765 - RNA, 498 nt, synthetic construct
  misc_feature 1..498: note = CCDS6385.2
  source 1..498: mol_type = other RNA
atggcgctgctcgccttgctgctggtcgtggccctaccgcgggtgtggacagacgccaacctgactgcgagacaacgagatccagaggactcccagcgaacggacgagggtgacaatagagtgtggtgtcatgtttgtgagagagaaaacactttcgagtgccagaacccaaggaggtgcaaatggacagagccatactgcgttatagcggccgtgaaaatatttccacgttttttcatggttgcgaagcagtgctccgctggttgtgcagcgatggagagacccaagccagaggagaagcggtttctcctggaagagcccatgcccttcttttacctcaagtgttgtaaaattcgctactgcaatttagaggggccacctatcaactcatcagtgttcaaagaatatgctgggagcatgggtgagagctgtggtgggctgtggctggccatcctcctgctgctggcctccattgcagccggcctcagcctgtcttga

SEQ ID NO: 766 - RNA, 375 nt, synthetic construct
  misc_feature 1..375: note = AAA68873
  source 1..375: mol_type = other RNA
atgtctcttgagcagaagagtcagcactgcaagcctgaggaaggccttgacacccaagaagaggccctgggcctggtgggtgtgcaggctgccactactgaggagcaggaggctgtgtcctcctcctctcctctggtcccaggcaccctgggggaggtgcctgctgctgggtcaccaggtcctctcaagagtcctcagggagcctccgccatccccactgccatcgatttcactctatggaggcaatccattaagggctccagcaaccaagaagaggaggggccaagcacctcccctgacccagagtctgtgttccgagcagcactcagtaagaaggtggctgacttgattcattttctgctcctcaagtattaa

SEQ ID NO: 767 - RNA, 957 nt, synthetic construct
  misc_feature 1..957: note = AAH02455
  source 1..957: mol_type = other RNA
atgcttcttgggcagaagagtcagcgctacaaggctgaggaaggccttcaggcccaaggagaggcaccagggcttatggatgtgcagattcccacagctgaggagcagaaggctgcatcctcctcctctactctgatcatgggaacccttgaggaggtgactgattctgggtcaccaagtcctccccagagtcctgagggtgcctcctcttccctgactgtcaccgacagcactctgtggagccaatccgatgagggttccagcagcaatgaagaggaggggccaagcacctccccggacccagctcacctggagtccctgttccgggaagcacttgatgagaaagtggctgagttagttcgtttcctgctccgcaaatatcaaattaaggagccggtcacaaaggcagaaatgcttgagagtgtcatcaaaaattacaagaaccactttcctgatatcttcagcaaagcctctgagtgcatgcaggtgatctttggcattgatgtgaaggaagtggaccctgccggccactcctacatccttgtcacctgcctgggcctctcctatgatggcctgctgggtgatgatcagagtacgcccaagaccggcctcctgataatcgtcctgggcatgatcttaatggagggcagccgcgccccggaggaggcaatctgggaagcgttgagtgtgatggggctgtatgatgggagggagcacagtgtctattggaagctcaggaagctgctcacccaagagtgggtgcaggagaactacctggagtaccgccaggcgcccggcagtgatcctgtgcgctacgagttcctgtggggtccaagggcccttgctgaaaccagctatgtgaaagtcctggagcatgtggtcagggtcaatgcaagagttcgcatttcctacccatccctgcatgaagaggctttgggagaggagaaaggagtttga

SEQ ID NO: 768 - RNA, 1290 nt, synthetic construct
  misc_feature 1..1290: note = AAH04479
  source 1..1290: mol_type = other RNA
atggagactcagttccgcagagggggtctggggtgcagccctgccagcatcaagaggaagaagaagagggaggactcaggagactttggactccaggtgagcactatgttctcagaggacgacttccagtcaacagaaagagccccatatggtccacaactacagtggtcccaggatctgccaagagtccaggtttttagagaacaggccaacctggaggacaggagtcccaggagaacccagaggatcactggaggagaacaagtgctgtggggccccatcacccagatatttcccacagttcggcctgctgacctaaccagagtcatcatgcctcttgagcaaagaagtcagcactgcaagcctgaggaaggccttcaggcccaagaagaagacctgggcctggtgggtgcacaggctctccaagctgaggagcaggaggctgccttcttctcctctactctgaatgtgggcactctagaggagttgcctgctgctgagtcaccaagtcctccccagagtcctcaggaagagtccttctctcccactgccatggatgccatctttgggagcctatctgatgagggctctggcagccaagaaaaggaggggccaagtacctcgcctgacctgatagaccctgagtccttttcccaagatatactacatgacaagataattgatttggttcatttattgctccgcaagtatcgagtcaaggggctgatcacaaaggcagaaatgctggggagtgtcatcaaaaattatgaggactactttcctgagatatttagggaagcctctgtatgcatgcaactgctctttggcattgatgtgaaggaagtggaccccactagccactcctatgtccttgtcacctccctcaacctctcttatgatggcatacagtgtaatgagcagagcatgcccaagtctggcctcctgataatagtcctgggtgtaatcttcatggaggggaactgcatccctgaagaggttatgtgggaagtcctgagcattatgggggtgtatgctggaagggagcacttcctctttggggagcccaagaggctccttacccaaaattgggtgcaggaaaagtacctggtgtaccggcaggtgcccggcactgatcctgcatgctatgagttcctgtggggtccaagggcccacgctgagaccagcaagatgaaagttcttgagtacatagccaatgccaatgggagggatcccacttcttacccatccctgtatgaagatgctttgagagaggagggagagggagtctga

SEQ ID NO: 769 - RNA, 1110 nt, synthetic construct
  misc_feature 1..1110: note = EAW99421
  source 1..1110: mol_type = other RNA
atgcctcgagctccaaagcgtcagcgctgcatgcctgaagaagatcttcaatcccaaagtgagacacagggcctcgagggtgcacaggctcccctggctgtggaggaggatgcttcatcatccacttccaccagctcctcttttccatcctcttttccctcctcctcctcttcctcctcctcctcctgctatcctctaataccaagcaccccagaggaggtttctgctgatgatgagacaccaaatcctccccagagtgctcagatagcctgctcctccccctcggtcgttgcttcccttccattagatcaatctgatgagggctccagcagccaaaaggaggagagtccaagcaccctacaggtcctgccagacagtgagtctttacccagaagtgagatagatgaaaaggtgactgatttggtgcagtttctgctcttcaagtatcaaatgaaggagccgatcacaaaggcagaaatactggagagtgtcataaaaaattatgaagaccacttccctttgttgtttagtgaagcctccgagtgcatgctgctggtctttggcattgatgtaaaggaagtggatcccactggccactcctttgtccttgtcacctccctgggcctcacctatgatgggatgctgagtgatgtccagagcatgcccaagactggcattctcatacttatcctaagcataatcttcatagagggctactgcacccctgaggaggtcatctgggaagcactgaatatgatggggctgtatgatgggatggagcacctcatttatggggagcccaggaagctgctcacccaagattgggtgcaggaaaactacctggagtaccggcaggtgcctggcagtgatcctgcacggtatgagtttctgtggggtccaagggctcatgctgaaattaggaagatgagtctcctgaaatttttggccaaggtaaatgggagtgatccaagatccttcccactgtggtatgaggaggctttgaaagatgaggaagagagagcccaggacagaattgccaccacagatgatactactgccatggccagtgcaagttctagcgctacaggtagcttctcctaccctgaataa

SEQ ID NO: 770 - RNA, 945 nt, synthetic construct
  misc_feature 1..945: note = AAH03408
  source 1..945: mol_type = other RNA
atgccacttgagcagaggagtcagcactgcaagcctgaggaaggccttgaggcccaaggagaggccctgggcttggtgggtgcgcaggctcctgctactgaggagcaggagactgcctcctcctcctctactctagtggaagtcaccctgcgggaggtgcctgctgccgagtcaccaagtcctccccacagtcctcagggagcctccaccctccccactaccatcaactatactctctggagtcaatccgatgagggctccagcaacgaagaacaggaagggccaagcacctttcctgacctggagacgagcttccaagtagcactcagtaggaagatggctgagttggttcattttctgctcctcaagtatcgagccagggagccattcacaaaggcagaaatgctggggagtgtcatcagaaatttccaggacttctttcctgtgatcttcagcaaagcctccgagtacttgcagctggtctttggcatcgaggtggtggaagtggtccgcatcggccacttgtacatccttgtcacctgcctgggcctctcctacgatggcctgctgggcgacaatcagatcgtgcccaagacaggcctcctgataatcgtcctggccataatcgcaaaagagggcgactgtgcccctgaggagaaaatctgggaggagctgagtgtgttggaggcatctgatgggagggaggacagtgtctttgcgcatcccaggaagctgctcacccaagatttggtgcaggaaaactacctggagtaccggcaggtccccggcagtgatcctgcatgctacgagttcctgtggggtccaagggccctcgttgaaaccagctatgtgaaagtcctgcaccatttgctaaagatcagtggaggacctcacatttcctacccacccctgcatgaatgggcttttagagagggggaagagtga

SEQ ID NO: 771 - RNA, 930 nt, synthetic construct
  misc_feature 1..930: note = AAA03229
  source 1..930: mol_type = other RNA
atgtctcttgagcagaggagtctgcactgcaagcctgaggaagcccttgaggcccaacaagaggccctgggcctggtgtgtgtgcaggctgccacctcctcctcctctcctctggtcctgggcaccctggaggaggtgcccactgctgggtcaacagatcctccccagagtcctcagggagcctccgcctttcccactaccatcaacttcactcgacagaggcaacccagtgagggttccagcagccgtgaagaggaggggccaagcacctcttgtatcctggagtccttgttccgagcagtaatcactaagaaggtggctgatttggttggttttctgctcctcaaatatcgagccagggagccagtcacaaaggcagaaatgctggagagtgtcatcaaaaattacaagcactgttttcctgagatcttcggcaaagcctctgagtccttgcagctggtctttggcattgacgtgaaggaagcagaccccaccggccactcctatgtccttgtcacctgcctaggtctctcctatgatggcctgctgggtgataatcagatcatgcccaagacaggcttcctgataattgtcctggtcatgattgcaatggagggcggccatgctcctgaggaggaaatctgggaggagctgagtgtgatggaggtgtatgatgggagggagcacagtgcctatggggagcccaggaagctgctcacccaagatttggtgcaggaaaagtacctggagtaccggcaggtgccggacagtgatcccgcacgctatgagttcctgtggggtccaagggccctcgctgaaaccagctatgtgaaagtccttgagtatgtgatcaaggtcagtgcaagagttcgctttttcttcccatccctgcgtgaagcagctttgagagaggaggaagagggagtctga

SEQ ID NO: 772 - RNA, 945 nt, synthetic construct
  misc_feature 1..945: note = AAA17729
  source 1..945: mol_type = other RNA
atgcctcttgagcagaggagtcagcactgcaagcctgaagaaggccttgaggcccgaggagaggccctgggcctggtgggtgcgcaggctcctgctactgaggagcagcagaccgcttcttcctcttctactctagtggaagttaccctgggggaggtgcctgctgccgactcaccgagtcctccccacagtcctcagggagcctccagcttctcgactaccatcaactacactctttggagacaatccgatgagggctccagcaaccaagaagaggaggggccaagaatgtttcccgacctggagtccgagttccaagcagcaatcagtaggaagatggttgagttggttcattttctgctcctcaagtatcgagccagggagccggtcacaaaggcagaaatgctggagagtgtcctcagaaattgccaggacttctttcccgtgatcttcagcaaagcctccgagtacttgcagctggtctttggcatcgaggtggtggaagtggtccccatcagccacttgtacatccttgtcacctgcctgggcctctcctacgatggcctgctgggcgacaatcaggtcatgcccaagacaggcctcctgataatcgtcctggccataatcgcaatagagggcgactgtgcccctgaggagaaaatctgggaggagctgagtatgttggaggtgtttgaggggagggaggacagtgtcttcgcacatcccaggaagctgctcatgcaagatctggtgcaggaaaactacctggagtaccggcaggtgcccggcagtgatcctgcatgctacgagttcctgtggggtccaagggccctcattgaaaccagctatgtgaaagtcctgcaccatacactaaagatcggtggagaacctcacatttcctacccacccctgcatgaacgggctttgagagagggagaagagtga

SEQ ID NO: 773 - RNA, 945 nt, synthetic construct
  misc_feature 1..945: note = AAA17446
  source 1..945: mol_type = other RNA
atgcctcttgagcagaggagtcagcactgcaagcctgaagaaggccttgaggcccgaggagaggccctgggcctggtgggtgcgcaggctcctgctactgaggagcaggaggctgcctcctcctcttctactctagttgaagtcaccctgggggaggtgcctgctgccgagtcaccagatcctccccagagtcctcagggagcctccagcctccccactaccatgaactaccctctctggagccaatcctatgaggactccagcaaccaagaagaggaggggccaagcaccttccctgacctggagtccgagttccaagcagcactcagtaggaaggtggccgagttggttcattttctgctcctcaagtatcgagccagggagccggtcacaaaggcagaaatgctggggagtgtcgtcggaaattggcagtatttctttcctgtgatcttcagcaaagcttccagttccttgcagctggtctttggcatcgagctgatggaagtggaccccatcggccacttgtacatctttgccacctgcctgggcctctcctacgatggcctgctgggtgacaatcagatcatgcccaaggcaggcctcctgataatcgtcctggccataatcgcaagagagggcgactgtgcccctgaggagaaaatctgggaggagctgagtgtgttagaggtgtttgaggggagggaagacagtatcttgggggatcccaagaagctgctcacccaacatttcgtgcaggaaaactacctggagtaccggcaggtccccggcagtgatcctgcatgttatgaattcctgtggggtccaagggccctcgttgaaaccagctatgtgaaagtcctgcaccatatggtaaagatcagtggaggacctcacatttcctacccacccctgcatgagtgggttttgagagagggggaagagtga

SEQ ID NO: 774 - RNA, 954 nt, synthetic construct
  misc_feature 1..954: note = EAW99410
  source 1..954: mol_type = other RNA
atgtcttctgagcagaagagtcagcactgcaagcctgaggaaggcgttgaggcccaagaagaggccctgggcctggtgggtgcacaggctcctactactgaggagcaggaggctgctgtctcctcctcctctcctctggtccctggcaccctggaggaagtgcctgctgctgagtcagcaggtcctccccagagtcctcagggagcctctgccttacccactaccatcagcttcacttgctggaggcaacccaatgagggttccagcagccaagaagaggaggggccaagcacctcgcctgacgcagagtccttgttccgagaagcactcagtaacaaggtggatgagttggctcattttctgctccgcaagtatcgagccaaggagctggtcacaaaggcagaaatgctggagagagtcatcaaaaattacaagcgctgctttcctgtgatcttcggcaaagcctccgagtccctgaagatgatctttggcattgacgtgaaggaagtggaccccgccagcaacacctacacccttgtcacctgcctgggcctttcctatgatggcctgctgggtaataatcagatctttcccaagacaggccttctgataatcgtcctgggcacaattgcaatggagggcgacagcgcctctgaggaggaaatctgggaggagctgggtgtgatgggggtgtatgatgggagggagcacactgtctatggggagcccaggaaactgctcacccaagattgggtgcaggaaaactacctggagtaccggcaggtacccggcagtaatcctgcgcgctatgagttcctgtggggtccaagggctctggctgaaaccagctatgtgaaagtcctggagcatgtggtcagggtcaatgcaagagttcgcattgcctacccatccctgcgtgaagcagctttgttagaggaggaagagggagtctga

SEQ ID NO: 775 - RNA, 954 nt, synthetic construct; identical to SEQ ID NO: 774
  misc_feature 1..954: note = AAA68871
  source 1..954: mol_type = other RNA

SEQ ID NO: 776 - RNA, 954 nt, synthetic construct
  misc_feature 1..954: note = AAY27261
  source 1..954: mol_type = other RNA
atgtcttctgagcagaagagtcagcactgcaagcctgaggaaggcgttgaggcccaagaagaggccctgggcctggtgggtgcgcaggctcctactactgaggagcaggaggctgctgtctcctcctcctctcctctggtccctggcaccctggaggaagtgcctgctgctgagtcagcaggtcctccccagagtcctcagggagcctctgccttacccactaccatcagcttcacttgctggaggcaacccaatgagggttccagcagccaagaagaggaggggccaagcacctcgcctgacgcagagtccttgttccgagaagcactcagtaacaaggtggatgagttggctcattttctgctccgcaagtatcgagccaaggagctggtcacaaaggcagaaatgctggagagagtcatcaaaaattacaagcgctgctttcctgtgatcttcggcaaagcctccgagtccctgaagatgatctttggcattgacgtgaaggaagtggaccccaccagcaacacctacacccttgtcacctgcctgggcctttcctatgatggcctgctgggtaataatcagatctttcccaagacaggccttctgataatcgtcctgggcacaattgcaatggagggcgacagcgcctctgaggaggaaatctgggaggagctgggtgtgatgggggtgtatgatgggagggagcacactgtctatggggagcccaggaaactgctcacccaagattgggtgcaggaaaactacctggagtaccggcaggtacccggcagtaatcctgcgcgctatgagttcctgtggggtccaagggctctggctgaaaccagctatgtgaaagtcctggagcatgtggtcagggtcaatgcaagagttcgcattgcctacccatccctgcgtgaagcagctttgttagaggaggaagagggagtctga

SEQ ID NO: 777 - RNA, 945 nt, synthetic construct
  misc_feature 1..945: note = BAF82126
  source 1..945: mol_type = other RNA
atgcctcttgagcagaggagtcagcactgcaagcctgaagaaggccttgaggcccgaggagaggccctgggcctggtgggtgcgcaggctcctgctactgaggagcaggaggctgcctcctcctcttctactctagttgaagtcaccctgggggaggtgcctgctgccgagtcaccagatcctccccagagtcctcagggagcctccagcctccccactaccatgaactaccctctctggagccaatcctatgaggactccagcaaccaagaagaggaggggccaagcaccttccctgacctggagtctgagttccaagcagcactcagtaggaagctggccaagttggttcattttctgctcctcaagtatcgagccagggagccggtcacaaaggcagaaatgctggggagtgtcgtcggaaattggcagtacttctttcctgtgatcttcagcaaagcttccgattccttgcagctggtctttggcatcgagctgatggaagtggaccccatcggccacgtgtacatctttgccacctgcctgggcctctcctacgatggcctgctgggtgacaatcagatcatgcccaagacaggcttcctgataatcatcctggccataatcgcaaaagagggcgactgtgcccctgaggagaaaatctgggaggagctgagtgtgttagaggtgtttgaggggagggaagacattatcttcggggatcccaagaagctgctcacccaatatttcgtgcaggaaaactacctggagtaccggcaggtccccggcagtgatcctgcatgctatgagttcctgtggggtccaagggccctcattgaaaccagctatgtgaaagtcctgcaccatatggtaaagatcagtggaggacctcgcatttcctacccactcctgcatgagtgggctttgagagagggggaagagtga

SEQ ID NO: 778 - RNA, 945 nt, synthetic construct
  misc_feature 1..945: note = AAA19006
  source 1..945: mol_type = other RNA
atgcctcttgagcagaggagtcagcactgcaagcctgaagaaggccttgaggcccgaggagaggccctgggcctggtgggtgcgcaggctcctgctactgaggagcaggaggctgcctcctcctcttctactctagttgaagtcaccctgggggaggtgcctgctgccgagtcaccagatcctccccagagtcctcagggagcctccagcctccccactaccatgaactaccctctctggagccaatcctatgaggactccagcaaccaagaagaggaggggccaagcaccttccctgacctggagtctgagttccaagcagcactcagtaggaaggtggccaagttggttcattttctgctcctcaagtatcgagccagggagccggtcacaaaggcagaaatgctggggagtgtcgtcggaaattggcagtacttctttcctgtgatcttcagcaaagcttccgattccttgcagctggtctttggcatcgagctgatggaagtggaccccatcggccacgtgtacatctttgccacctgcctgggcctctcctacgatggcctgctgggtgacaatcagatcatgcccaagacaggcttcctgataatcatcctggccataatcgcaaaagagggcgactgtgcccctgaggagaaaatctgggaggagctgagtgtgttagaggtgtttgaggggagggaagacagtatcttcggggatcccaagaagctgctcacccaatatttcgtgcaggaaaactacctggagtaccggcaggtccccggcagtgatcctgcatgctatgagttcctgtggggtccaagggccctcattgaaaccagctatgtgaaagtcctgcaccatatggtaaagatcagtggaggacctcgcatttcctacccactcctgcatgagtgggctttgagagagggggaagagtga

SEQ ID NO: 779 - RNA, 945 nt, synthetic construct
  misc_feature 1..945: note = CAG46567
  source 1..945: mol_type = other RNA
atgccacttgagcagaggagtcagcactgcaagcctgaagaaggccttgaggcccgaggagaggccctgggcctggtgggtgcgcaggctcctgctactgaggagcaggaggctgcctcctcctcttctactctagttgaagtcaccctgggggaggtgcctgctgccgagtcaccagatcctccccagagtcctcagggagcctccagcctccccactaccatgaactaccctctctggagccaatcctatgaggactccagcaaccaagaagaggaggggccaagcaccttccctgacctggagtctgagttccaagcagcactcagtaggaaggtggccaagttggttcattttctgctcctcaagtatcgagccagggagccggtcacaaaggcagaaatgctggggagtgtcgtcggaaattggcagtacttctttcctgtgatcttcagcaaagcttccgattccttgcagctggtctttggcatcgagctgatggaagtggaccccatcggccacgtgtacatctttgccacctgcctgggcctctcctacgatggcctgctgggtgacaatcagatcatgcccaagacaggcttcctgataatcatcctggccataatcgcaaaagagggcgactgtgcccctgaggagaaaatctgggaggagctgagtgtgttagaggtgtttgaggggagggaagacagtatcttcggggatcccaagaagctgctcacccaatatttcgtgcaggaaaactacctggagtaccggcaggtccccggcagtgatcctgcatgctatgagttcctgtggggtccaagggccctcattgaaaccagctatgtgaaagtcctgcaccatatggtaaagatcagtggaggacctcgcatttcctacccactcctgcatgagtgggcttttagagagggggaagagtga

SEQ ID NO: 780 - RNA, 948 nt, synthetic construct
  misc_feature 1..948: note = AAA68877
  source 1..948: mol_type = other RNA
atgtctctcgagcagaggagtccgcactgcaagcctgatgaagaccttgaagcccaaggagaggacttgggcctgatgggtgcacaggaacccacaggcgaggaggaggagactacctcctcctctgacagcaaggaggaggaggtgtctgctgctgggtcatcaagtcctccccagagtcctcagggaggcgcttcctcctccatttccgtctactacactttatggagccaattcgatgagggctccagcagtcaagaagaggaagagccaagctcctcggtcgacccagctcagctggagttcatgttccaagaagcactgaaattgaaggtggctgagttggttcatttcctgctccacaaatatcgagtcaaggagccggtcacaaaggcagaaatgctggagagcgtcatcaaaaattacaagcgctactttcctgtgatcttcggcaaagcctccgagttcatgcaggtgatctttggcactgatgtgaaggaggtggaccccgccggccactcctacatccttgtcactgctcttggcctctcgtgcgatagcatgctgggtgatggtcatagcatgcccaaggccgccctcctgatcattgtcctgggtgtgatcctaaccaaagacaactgcgcccctgaagaggttatctgggaagcgttgagtgtgatgggggtgtatgttgggaaggagcacatgttctacggggagcccaggaagctgctcacccaagattgggtgcaggaaaactacctggagtaccggcaggtgcccggcagtgatcctgcgcactacgagttcctgtggggttccaaggcccacgctgaaaccagctatgagaaggtcataaattatttggtcatgctcaatgcaagagagcccatctgctacccatccctttatgaagaggttttgggagaggagcaagagggagtctga

SEQ ID NO: 781 - RNA, 1044 nt, synthetic construct
  misc_feature 1..1044: note = AAI01309
  source 1..1044: mol_type = other RNA
atgcctcgaggtcagaagagtaaactccgtgccagggaaaaacgccgtcaggcccgaggagggctggaagatttgatagatgctctggacattttagaagaggaggaagaatctcccccctctgcctctgcttgtttgaaggatgttttccagagttcacttgatggggcatccaacaatccccatggacttcgggaagcccaatccaccagcacatctgctacagctgcttcacacacaagacatcccgaaggagtcaacgaccaaatggaagaaaggccaatatgcacacaagatctagaagccactgatagctttcccagaggccctgtagatgagaaagtaattatattggtgcattacttgctgtacaagtaccaaatgaaagagcccattacaaaggcagatatgctgagaaatgtaacccaaatgtccaagagccagttccctgtaatcctgagcagagcttctgagcacctggagctgatctttggtcttgacctgaaggaagtggagcctaataagcacatctatgtccttgtcaacaaactagatctaggctgtgatgcaaagctgagtgatgaaacaggcgtgcccaagactggcctgctgatgactgtcctgggtattatcttcacaaatggcaattgtgtcgctgaggaggaagtctggaaagtgtttaacacgatggggttatatgacggaattgagcacttcatgtttggggagcccaggaagctccttaccaaagatttggtgaaagaaaattacctggagtaccagcaagtgcccaacagtgatcctccacgctatcaattcctatggggcccaagagcccatgctgaaaccagcaagatgaaagttcttgagtttttggccaaggtaaatgatacagctcccagtgaattctcaaactggtatacagaggctttacaagatgaggaagagagagccagagccagagttgcagccaaggctcgcgttagtgccacagccggtgcacgttccaaggttaagtccagcaagtcctcccaactgcagtaa

SEQ ID NO: 782 - RNA, 975 nt, synthetic construct
  misc_feature 1..975: note = CCDS43927.1
  source 1..975: mol_type = other RNA
atgtctcaggatcaggagagtccacgatgcacacatgatcagcaccttcagaccttcagtgagacccagagcctggaggttgcacaggtctccaaggctctggagaagaccctcctctcctcctcccatcctctagtgcctggcaaactgaaggaagctcctgctgctaaggcagagagtcctcttgaggttcctcagagtttctgctcctcttccattgccgtcacaaccacctcatcaagtgaatctgatgaggcttccagcaatcaagaagaggaagatagtccaagctcctcagaggatacatcagaccccaggaatgtgcccgcagatgctctcgaccagaaagtggcttttttggtgaatttcatgctgcacaagtgtcagatgaaaaagccaataacaaaggcagatatgttgaagattatcatcaaagatgatgagagccacttctctgagatcctcctgagagcttctgagcacctagagatgatatttggccttgatgtggtggaggtggaccccaccacccattgctatggcctcttcatcaaactgggcctcacctatgatgggatgctgagtggtgaaaagggtgtgcccaagactggcctcctgataattgtcctgggtgtgatcttcatgaagggcaaccgtgccactgaagaggaagtctgggaagtgctgaatttgacgggagtatattctgggaagaagcacttcatctttggagagcccagaatgctcatcaccaaagattttgtgaaggagaagtacctggagtaccagcaggtggccaacagtgatcctgcacgatatgaattcctgtggggcccaagagccaaagctgaaaccagcaagatgaaagtcctggagtttgtggccaaagttcatgggtcttacccacattctttcccatctcagtatgcggaagctctgaaagaggaagaagagagagctagagccagaatttga

SEQ ID NO: 783 - RNA, 1011 nt, synthetic construct
  misc_feature 1..1011: note = CCDS59524.1
  source 1..1011: mol_type = other RNA
atgcctcgcggtcaggcgagtaagcgccgtgcccgtgagaaacgccgccaggctcgaggtgaagaccaatgtctcgggggtgctcaagccaccgcagcagagaaggaaaagctgccatcctcctcctctcctgcatgccagagtcctccccagagcttccccaatgcaggcattcctcaggagtcccagagagccagctaccccagctctcctgcttcagctgtttcactcacaagttctgatgaaggtgccaagggccaaaagggggaaagtcccaactccttccatggcccgtcctcctctgagagcacaggaagagatcttctgaacacgaagacgggcgaattggtgcagttcctcctcaacaagtatataaggaaagagcccattacgagggaagccatgctgaaggttatcaacagaaagtacaagcagcacttccctgagatcctccggagaagcactgagaacgtagaggtggtctttggcctctacctgaaggaaatggaccccagccgtcagtcctatgtgcttgttggcaagctggactttcccaatcaaggaagcttgagcgatggcgggggctttcccctgagcgggctcctgatggttctcctgagcaccatcttcatgcatggcaaccgtgccactgaggaagagatgtgggaatgcctgaatgcattggggatgtataagggtaggaagcacttcatctatggggagccccaggagcttgtcaccaaagatttggtgcgagaggggtacctggagtaccagcaggtgcccagcagcgatcctccacgctacgagttcctgtggggtcccagggcccgtgctgaaaccagcaaaatgaaagtcctggagtttgtggccaagctcaatgataccgttgccagtacctacaagtcccggtatgaggaggctctgagagaggaggaagagcaagccagagccagagcggtagccagggatagcgccagggccagggctagcaggtcctttcagccctag

SEQ ID NO: 784 - RNA, 1044 nt, synthetic construct
  misc_feature 1..1044: note = AAC23616
  source 1..1044: mol_type = other RNA
atgcctcggggtcagaagagtaagctccgtgctcgtgagaaacgccgcaaggcgcgagaggagacccagggtctcaaggttcgtcacgccactgcagcagagaaagaggagtgcccctcctcctctcctgttttaggggatactcccacaagctcccctgctgctggcattccccagaagcctcagggagctccacccaccaccactgctgctgcagctgtgtcatgtaccgaatctgacgaaggtgccaaatgccaaggtgaggaaaatgcaagtttctcccaggccacaacatccactgagagctcagtcaaagatcctgtagcctgggaggcaggaatgctgatgcacttcattctacgtaagtataaaatgagagagcccattatgaaggcagatatgctgaaggttgttgatgaaaagtacaaggatcacttcactgagatcctcaatggagcctctcgccgcttggagctcgtctttggccttgatttgaaggaagacaaccctagtagccacacctacaccctcgtcagtaagctaaacctcaccaatgatggaaacctgagcaatgattgggactttcccaggaatgggcttctgatgcctctcctgggtgtgatcttcttaaagggcaactctgccaccgaggaagagatctggaaattcatgaatgtgttgggagcctatgatggagaggagcacttaatctatggggaaccccgtaagttcatcacccaagatctggtgcaggaaaaatatctgaagtacgagcaggtgcccaacagtgatcccccacgctatcaattcctatggggtccgagagcctatgctgaaaccaccaagatgaaagtcctcgagtttttggccaagatgaatggtgccactccccgtgacttcccatcccattatgaagaggctttgagagatgaggaagagagagcccaagtccgatccagtgttagagccaggcgtcgcactactgccacgacttttagagcgcgttctagagccccattcagcaggtcctcccaccccatgtga

SEQ ID NO: 785 - RNA, 960 nt, synthetic construct
  misc_feature 1..960: note = AAD10635
  source 1..960: mol_type = other RNA
atgcctcgtggtcagaagagtaagctccgtgcccgtgagaaacgccgcaaggcccgagatgagacccggggtctcaatgttcctcaggtcactgaagcagaggaagaagaggccccctgctgttcctcttctgtttctgggggtgctgcttcaagctctcctgctgctggcattccccaggagcctcagagagccccaaccactgccgctgctgcggctgcgggtgtttcatccacaaaatctaaaaaaggtgccaagagccaccaaggtgagaaaaatgcaagttcctcccaggcctcaacatccactaagagcccaagcgaagatcctctaaccaggaagtcagggtcgttggtgcagttcctgttgtacaagtataaaataaaaaagtccgttacaaagggagaaatgctgaaaattgttggcaaaaggttcagggagcacttccctgagatcctcaagaaagcctctgagggcctcagtgttgtctttggccttgagctgaataaagtcaaccccaacggccacacttacaccttcatcgacaaggtagacctcactgatgaggaatccctgctcagttcctgggactttcccaggagaaagcttctgatgcctctcctgggtgtgatcttcttaaatggcaactcagctactgaggaagagatctgggaattcctgaatatgttgggagtctatgatggagaggagcactcagtctttggggaaccctggaagctcatcaccaaagatctggtgcaggaaaaatatctggagtacaagcaggtgcccagcagtgatcccccacgctttcaattcctgtggggtccgagagcctatgctgaaaccagcaagatgaaagtcctggagtttttggccaaggtaaatggtaccaccccctgtgccttcccaacccattacgaagaagctttgaaagatgaagagaaagccggagtctga

SEQ ID NO: 786 - RNA, 1041 nt, synthetic construct
  misc_feature 1..1041: note = AAD10636
  source 1..1041: mol_type = other RNA
atgcctcggggtcagaagagtacgctccatgcacgtgagaaacgccagcagacccggggtcagacccaggatcaccagggtgctcagatcactgcaactaacaagaaaaaagtatccttttcatcccctcttattttgggggctactatccagaaaaagtctgctggtaggtcacgtagtgctctcaagaagcctcagagagcactatccaccactacatctgtagatgtttcttacaaaaagtcatacaagggagccaacagcaaaattgagaaaaagcaaagcttctctcagggtctatcctccactgtgcagtctcgcacagaccctctaatcatgaagacaaatatgttggtgcagttcctgatggaaatgtacaagatgaaaaagcccattatgaaagcagatatgctaaaaattgtccaaaaaagccataagaattgcttccctgagatccttaaaaaagcttctttcaacatggaggtggtatttggtgttgatttaaagaaagttgattctaccaaggactcctatgtccttgtcagcaaaatggatctccccaacaatgggacagtgactcgtgggaggggatttcccaagacaggtctcctgctgaatctcctgggcgtgatcttcatgaagggcaactgtgccactgaggagaagatctgggaattcctgaataagatgagaatatatgatgggaagaaacacttcatatttggggagcccagaaagctcatcacccaagatttggtgaagcttaaatacctggagtaccgacaagtgcccaacagtaatcctgcacgctatgaattcctgtggggtccaagagcccatgctgaaaccagcaagatgaaggtcctggagttttgggccaaggtcaataaaactgtccccagtgcgttccagttctggtatgaagaggctttgagagatgaggaagaaagagtccaagctgcagctatgctcaatgatggcagtagtgccatgggcagaaagtgttccaaggccaaggctagcagctcttcccacgcctag

SEQ ID NO: 787 - RNA, 1041 nt, synthetic construct
  misc_feature 1..1041: note = AAC23619
  source 1..1041: mol_type = other RNA
atgcctcggggtcagaagagtaagctccgtgcccgtgagaaacgccagcggacccgtggtcagacccaggatctcaaggttggtcagcctactgcagcagagaaagaagagtctccttcctcttcctcatctgttttgagggatactgcctccagctcccttgcttttggcattccccaggagcctcagagagagccacccaccacctctgctgctgcagctatgtcatgcactggatctgataaaggcgacgagagccaagatgaggaaaatgcaagttcctcccaggcctcaacatccactgagagatcactcaaagattctctaaccaggaagacgaagatgttagtgcagttcctgctgtacaagtataaaatgaaagagcccactacaaaggcagaaatgctgaagatcatcagcaaaaagtacaaggagcacttccctgagatcttcaggaaagtctctcagcgcacggagctggtctttggccttgccttgaaggaggtcaaccccaccactcactcctacatcctcgtcagcatgctaggccccaacgatggaaaccagagcagtgcctggacccttccaaggaatgggcttctgatgcctctactgagtgtgatcttcttaaatggcaactgtgcccgtgaagaggaaatctgggaattcctgaatatgctggggatctatgatggaaagaggcaccttatctttggggaaccccgaaagctcatcacccaagatctggtgcaggaaaaatatctggaataccagcaggtgcccaacagtgatcccccacgctatcaattcctgtggggtccaagagctcatgcagaaaccagcaagatgaaagtcctggagtttttggccaaggtgaatgacaccacccccaataacttcccactcctttatgaagaggctttgagagatgaagaagagagagctggagcccggcccagagttgcagccaggcgtggcactacagccatgactagtgcgtattccagggccacatccagtagctcttcccaacccatgtga

SEQ ID NO: 788 - RNA, 828 nt, synthetic construct
  misc_feature 1..828: note = CCDS65233.1
  source 1..828: mol_type = other RNA
atgacttctgcaggtgtttttaatgcaggatctgacgaaagggctaacagtagagatgaggagtacccatgttcctcagaggtctcaccctccactgagagttcatgcagcaatttcataaatattaaggtgggtttgttggagcagttcctgctctacaagttcaaaatgaaacagcgtattttgaaggaagatatgctgaagattgtcaacccaagataccaaaaccagtttgctgagattcacagaagagcttctgagcacattgaggttgtctttgcagttgacttgaaggaagtcaacccaacttgtcacttatatgaccttgtcagcaagctgaaactccccaacaatgggaggattcatgttggcaaagtgttacccaagactggtctcctcatgactttcctggttgtgatcttcctgaaaggcaactgtgccaacaaggaagatacctggaaatttctggatatgatgcaaatatatgatgggaagaagtactacatctatggagagcccaggaagctcatcactcaggatttcgtgaggctaacgtacctggagtaccaccaggtgccctgcagttatcctgcacactatcaattcctttggggtccaagagcctatactgaaaccagcaagatgaaagtcctggaatatttggccaaggtcaatgatattgctccaggtgccttctcatcacaatatgaagaggctttgcaagatgaggaagagagcccaagccagagatgcagccgaaactggcactactgcagtggccaagactgtctcagggcgaagttcagcagcttctctcaaccctattga

SEQ ID NO: 789 - RNA, 1224 nt, synthetic construct
  misc_feature 1..1224: note = AAH67286
  source 1..1224: mol_type = other RNA
atgcctcggggtcacaagagtaagctccgtacctgtgagaaacgccaagagaccaatggtcagccacagggtctcacgggtccccaggccactgcagagaagcaggaagagtcccactcttcctcatcctcttctcgcgcttgtctgggtgattgtcgtaggtcttctgatgcctccattcctcaggagtctcagggagtgtcacccactgggtctcctgatgcagttgtttcatattcaaaatccgatgtggctgccaacggccaagatgagaaaagtccaagcacctcccgtgatgcctccgttcctcaggagtctcagggagcttcacccactggctctcctgatgcaggtgtttcaggctcaaaatatgatgtggctgccaacggccaagatgagaaaagtccaagcacttcccatgatgtctccgttcctcaggagtctcagggagcttcacccactggctcgcctgatgcaggtgtttcaggctcaaaatatgatgtggctgccgagggtgaagatgaggaaagtgtaagcgcctcacagaaagccatcatttttaagcgcttaagcaaagatgctgtaaagaagaaggcgtgcacgttggcgcaattcctgcagaagaagtttgagaagaaagagtccattttgaaggcagacatgctgaagtgtgtccgcagagagtacaagccctacttccctcagatcctcaacagaacctcccaacatttggtggtggcctttggcgttgaattgaaagaaatggattccagcggcgagtcctacacccttgtcagcaagctaggcctccccagtgaaggaattctgagtggtgataatgcgctgccgaagtcgggtctcctgatgtcgctcctggttgtgatcttcatgaacggcaactgtgccactgaagaggaggtctgggagttcctgggtctgttggggatatatgatgggatcctgcattcaatctatggggatgctcggaagatcattactgaagatttggtgcaagataagtacgtggtttaccggcaggtgtgcaacagtgatcctccatgctatgagttcctgtggggtccacgagcctatgctgaaaccaccaagatgagagtcctgcgtgttttggccgacagcagtaacaccagtcccggtttatacccacatctgtatgaagacgctttgatagatgaggtagagagagcattgagactgagagcttaa

SEQ ID NO: 790 - RNA, 3429 nt, synthetic construct
  misc_feature 1..3429: note = CCDS35417.1
  source 1..3429: mol_type = other RNA
atgggggacaaggatatgcctactgctgggatgccgagtcttctccagagttcctctgagagtcctcagagttgtcctgagggggaggactcccagtctcctctccagattccccagagttctcctgagagcgacgacaccctgtatcctctccagagtcctcagagtcgttctgagggggaggactcctcggatcctctccagagacctcctgaggggaaggactcccagtctcctctccagattccccagagttctcctgagggcgacgacacccagtctcctctccagaattctcagagttctcctgaggggaaggactccctgtctcctctagagatttctcagagccctcctgagggtgaggatgtccagtctcctctgcagaatcctgcgagttccttcttctcctctgctttattgagtattttccagagttcccctgagagtactcaaagtccttttgagggttttccccagtctgttctccagattcctgtgagcgccgcctcctcctccactttagtgagtattttccagagttcccctgagagtactcaaagtccttttgagggttttccccagtctccactccagattcctgtgagccgctccttctcctccactttattgagtattttccagagttcccctgagagaactcagagtacttttgagggttttgcccagtctcctctccagattcctgtgagcccctcctcctcctccactttactgagtcttttccagagtttctctgagagaactcagagtacttttgagggttttgcccagtcttctctccagattcctgtgagcccctccttctcctccactttagtgagtcttttccagagttcccctgagagaactcagagtacttttgagggttttccccagtctcctctccagattcctgtgagctcctcctcctcctccactttattgagtcttttccagagttcccctgagagaactcacagtacttttgagggttttccccagtctcttctccagattcctatgacctcctccttctcctctactttattgagtattttccagagttctcctgagagtgctcaaagtacttttgagggttttccccagtctcctctccagattcctgggagcccctccttctcctccactttactgagtcttttccagagttcccctgagagaactcacagtacttttgagggttttccccagtctcctctccagattcctatgacctcctccttctcctctactttattgagtattttacagagttctcctgagagtgctcaaagtgcttttgagggttttccccagtctcctctccagattcctgtgagctcctctttctcctacactttattgagtcttttccagagttcccctgagagaactcacagtacttttgagggttttccccagtctcctctccagattcctgtgagctcctcctcctcctcctccactttattgagtcttttccagagttcccctgagtgtactcaaagtacttttgagggttttccccagtctcctctccagattcctcagagtcctcctgaaggggagaatacccattctcctctccagattgttccaagtcttcctgagtgggaggactccctgtctcctcactactttcctcagagccctcctcagggggaggactccctatctcctcactactttcctcagagccctcctcagggggaggactccctgtctcctcactactttcctcagagccctcagggggaggactccctgtctcctcactactttcctcagagccctcctcagggggaggactccatgtctcctctctactttcctcagagtcctcttcagggggaggaattccagtcttctctccagagccctgtgagcatctgctcctcctccactccatccagtcttccccagagtttccctgagagttctcagagtcctcctgaggggcctgtccagtctcctctccatagtcctcagagccctcctgaggggatgcactcccaatctcctctccagagtcctgagagtgctcctgagggggaggattccctgtctcctctccaaattcctcagagtcctcttgagggagaggactccctgtcttctctccattttcctcagagtcctcctgagtgggaggactccctctctcctctccactttcctcagtttcctcctcagggggaggacttccagtcttctctccagagtcctgtgagtatctgctcctcctccacttctttgagtcttccccagagtttccctgagagtcctcagagtcctcctgaggggcctgctcagtctcctctccagagacctgtcagctccttcttctcctacactttagcgagtcttctccaaagttcccatgagagtcctcagagtcctcctgaggggcctgcccagtctcctctccagagtcctgtgagctccttcccctcctccacttcatcgagtctttcccagagttctcctgtgagctccttcccctcctccacttcatcgagtctttccaagagttcccctgagagtcctctccagagtcctgtgatctccttctcctcctccacttcattgagcccattcagtgaagagtccagcagcccagtagatgaatatacaagttcctcagacaccttgctagagagtgattccttgacagacagcgagtccttgatagagagcgagcccttgttcacttatacactggatgaaaaggtggacgagttggcgcggtttcttctcctcaaatatcaagtgaagcagcctatcacaaaggcagagatgctgacgaatgtcatcagcaggtacacgggctactttcctgtgatcttcaggaaagcccgtgagttcatagagatactttttggcatttccctgagagaagtggaccctgatgactcctatgtctttgtaaacacattagacctcacctctgaggggtgtctgagtgatgagcagggcatgtcccagaaccgcctcctgattcttattctgagtatcatcttcataaagggcacctatgcctctgaggaggtcatctgggatgtgctgagtggaataggggtgcgtgctgggagggagcactttgcctttggggagcccagggagctcctcactaaagtttgggtgcaggaacattacctagagtaccgggaggtgcccaactcttctcctcctcgttacgaattcctgtggggtccaagagctcattcagaagtcattaagaggaaagtagtagagtttttggccatgctaaagaataccgtccctattacctttccatcctcttacaaggatgctttgaaagatgtggaagagagagcccaggccataattgacaccacagatgattcgactgccacagaaagtgcaagctccagtgtcatgtcccccagcttctcttctgagtga

SEQ ID NO: 791 - RNA, 1122 nt, synthetic construct
  misc_feature 1..1122: note = AAF07210
  source 1..1122: mol_type = other RNA
atgcctcccgttccaggcgttccattccgcaacgttgacaacgactccccgacctcagttgagttagaagactgggtagatgcacagcatcccacagatgaggaagaggaggaagcctcctccgcctcttccactttgtacttagtattttccccctcttctttctccacatcctcttctctgattcttggtggtcctgaggaggaggaggtgccctctggtgtgataccaaatcttaccgagagcattcccagtagtcctccacagggtcctccacagggtccttcccagagtcctctgagctcctgctgctcctctttttcatggagctcattcagtgaggagtccagcagccagaaaggggaggatacaggcacctgtcagggcctgccagacagtgagtcctctttcacatatacactagatgaaaaggtggccgagttagtggagttcctgctcctcaaatacgaagcagaggagcctgtaacagaggcagagatgctgatgattgtcatcaagtacaaagattactttcctgtgatactcaagagagcccgtgagttcatggagcttctttttggccttgccctgatagaagtgggccctgaccacttctgtgtgtttgcaaacacagtaggcctcaccgatgagggtagtgatgatgagggcatgcccgagaacagcctcctgattattattctgagtgtgatcttcataaagggcaactgtgcctctgaggaggtcatctgggaagtgctgaatgcagtaggggtatatgctgggagggagcacttcgtctatggggagcctagggagctcctcactaaagtttgggtgcagggacattacctggagtatcgggaggtgccccacagttctcctccatattatgaattcctgtggggtccaagagcccattcagaaagcatcaagaagaaagtactagagtttttagccaagctgaacaacactgttcctagttcctttccatcctggtacaaggatgctttgaaagatgtggaagagagagtccaggccacaattgataccgcagatgatgccactgtcatggccagtgaaagcctcagtgtcatgtccagcaacgtctccttttctgagtga

SEQ ID NO: 792 - RNA, 1932 nt, synthetic construct
  misc_feature 1..1932: note = AAM08355
  source 1..1932: mol_type = other RNA
atgctgctgccctgccactgggtgttggatgccaccttcagtgatggcagtctaggccagtgggtgaaaaacacatgtgccacatatgccttatccccagtggtgctcccacctcagccccagccccggaaaaaggccacagataaggactattctgcctttcatcttgggcatctgagggaggtgaggctttttctgaggggtggaacttcagatcagcgaatggatagtcttgtcctctgccccacatacttcaagctctggaggaccctatcagggtccccaggtttacaactttctgacttgcattttgggagtcagccggaggggaagttttctctgaggagggcagtttcagttaagcagagggaggaaccccaggactggccactcaacgagaagagaactctgtggaaggacagtgaccttccaacatggaggagaggcacaggctacaccctttcccttcctgccgtcagccctggaaaaaggttgtggggggagaaagcggggagcttgccagagagcgagcccttgttcacttatacactggatgaaaaggtggacaagttggtgcagtttcttctcctcaaatatcaagcaaaagagcctctcacaagagcagagatgcagatgaatgtcatcaacacatacacgggctactttcctatgatcttcaggaaagcccgtgagttcatagagattctttttggcatttccctgacagaagtggaccccgaccatttctatgtctttgtaaacacattagacctcacctgtgaggggagtctgagtgatgagcagggcatgccccagaaccgcctcctgattcttattctgagtgtgatcttcataaagggcaactgtgcatctgaggaggtcatctgggaagtgctgaatgcaatagggccctggtcagccttggcagggttcgcggatgtgctttcccgacttgcactgtgggagtctgaaggacctgaagcattttgcgaggagtctggactcaggtcagcagagggaagcgtcttagacctggccaatcctcaaggacttgcaggccacagacaggaagatggccgccgagggctgaccgaggcgtccccacaacagaagaagggaggagaagatgaggatatgcctgctgctgggatgccacctcttccccagagtcctcctgagattcctccccagggtcctcccaagatctctccccagggtcctccgcagagtcctccccagagtcctctagactcctgctcatcccctcttttgtggacccgattggatgaggagtccagcagtgaagaggaggatacagctacttggcatgccttgccagaaagtgaatccttgcccaggtatgccctggatgaaaaggtggctgagttggtgcagtttcttctcctcaaatatcaaacaaaagagcctgtcacaaaggcagagatgctgacgactgtcatcaagaagtataaggactattttcccatgatcttcgggaaagcccatgagttcatagagctaatttttggcattgccctgactgatatggaccccgacaaccactcctatttctttgaagacacattagacctcacctatgagggaagcctgattgatgaccagggcatgcccaagaactgtctcctgattcttattctcagtatgatcttcataaagggcagctgtgtccccgaggaggtcatctgggaagtgttgagtgcaatagggcccattcagaggccagcaagagaagtcttagagtttttatccaagctatccagtatcatccctagtgcctttccatcctggtacatggatgctttgaaagatatggaagacagagcccaggccataattgacaccacagatgatgctactgccatggccagtgcaagccccagtgtcatgtccaccaacttctgtcctgagtga

SEQ ID NO: 793 - RNA, 2337 nt, synthetic construct
  misc_feature 1..2337: note = AAG23757
  source 1..2337: mol_type = other RNA
atggctcagaaaatggactgtggtgcgggcctcctcggcttccaggctgaggcctccgtagaagacagcgccttgcttatgcagaccttgatggaggccatccagatctcagaggctccacctactaaccaggccaccgcagctgctagtccccagagttcacagcccccaactgccaatgagatggctgacattcaggtttcagcagctgccgctaggcctaagtcagcctttaaagtccagaatgccaccacaaaaggcccaaatggtgtctatgatttctctcaggctcataatgccaaggatgtgcccaacacgcagcccaaggcagcctttaagtcccaaaatgctaccccaaagggtccaaatgctgcctatgatttttcccaggcagcaaccactggtgagttagctgctaacaagtctgagatggccttcaaggcccagaatgccactactaaagtgggcccaaatgccacctacaatttctctcagtctctcaatgccaatgacctggccaacagcaggcctaagacccctttcaaggcttggaatgataccactaaggccccaacagctgatacccagacccagaatgtaaatcaggccaaaatggccacttcccaggctgacatagagaccgacccaggtatctctgaacctgacggtgcaactgcacagacatcagcagatggttcccaggctcagaatctggagtcccggacaataattcggggcaagaggacccgcaagattaataacttgaatgttgaagagaacagcagtggggatcagaggcgggccccactggctgcagggacctggaggtctgcaccagttccagtgaccactcagaacccacctggcgcaccccccaatgtgctctggcagacgccattggcttggcagaacccctcaggctggcaaaaccagacagccaggcagaccccaccagcacgtcagagccctccagctaggcagaccccaccagcctggcagaacccagtcgcttggcagaacccagtgatttggccaaacccagtaatctggcagaacccagtgatctggccaaaccccattgtctggcccggccctgttgtctggccgaatccactggcctggcagaatccacctggatggcagactccacctggatggcagaccccaccgggctggcagggtcctccagactggcaaggtcctcctgactggccgctaccacccgactggccactgccacctgattggccacttcccactgactggccactaccacctgactggatccccgctgattggccaattccacctgactggcagaacctgcgcccctcgcctaacctgcgcccttctcccaactcgcgtgcctcacagaacccaggtgctgcacagccccgagatgtggcccttcttcaggaaagagcaaataagttggtcaagtacttgatgcttaaggactacacaaaggtgcccatcaagcgctcagaaatgctgagagatatcatccgtgaatacactgatgtttatccagaaatcattgaacgtgcatgctttgtcctagagaagaaatttgggattcaactgaaagaaattgacaaagaagaacacctgtatattctcatcagtacccccgagtccctggctggcatactgggaacgaccaaagacacacccaagctcggtctcctcttggtgattctgggtgtcatcttcatgaatggcaaccgtgccagtgaggctgtcctctgggaggcactacgcaagatgggactgcgtcctggggtgagacatcccctccttggagatctaaggaaacttctcacctatgagtttgtaaagcagaaatacctggactacagacgagtgcccaacagcaaccccccggagtatgagttcctctggggcctccgttcctaccatgagactagcaagatgaaagtgctgagattcattgcagaggttcagaaaagagaccctcgtgactggactgcacagttcatggaggctgcagatgaggccttggatgctctggatgctgctgcagctgaggccgaagccagggctgaagcaagaacccgcatgggaattggagatgaggctgtgtctgggccctggagctgggatgacattgagtttgagctgctgacctgggatgaggaaggagattttggagatccctggtccagaattccatttaccttctgggccagataccaccagaatgcccgctccagattccctcagacctttgccggtcccattattggtcctggtggtacagccagtgccaacttcgctgccaactttggtgccattggtttcttctgggttgagtga

SEQ ID NO: 794 - RNA, 1821 nt, synthetic construct
  misc_feature 1..1821: note = AAD28598
  source 1..1821: mol_type = other RNA
atgtctgacacaagcgagagtggtgcaggtctaactcgcttccaggctgaagcttcagaaaaggacagtagctcgatgatgcagactctgttgacagtgacccagaatgtggaggtcccagagacaccgaaggcctcaaaggcactggaggtctcagaggatgtgaaggtctcaaaagcctctggggtctcaaaggccacagaggtctcaaagaccccagaggctcgggaggcacctgccacccaggcctcgtctactactcagctgactgatacccaggttctggcagctgaaaacaagagtctagcagctgacaccaagaaacagaatgctgacccgcaggctgtgacaatgcctgccactgagaccaaaaaggtcagccatgtggctgatacgaaggtcaatacaaaggctcaggagactgaggctgcaccctctcaggccccagcagatgaacctgagcctgagagtgcagctgcccagtctcaggagaatcaggatactcggcccaaggtcaaagccaagaaagcccgaaaggtgaagcatctggatggggaagaggatggcagcagtgatcagagtcaggcttctggaaccacaggtggccgaagggtctcaaaggctctaatggcctcaatggcccgcagggcttcaaggggtcccatagccttttgggcccgcagggcatcaaggactcggttggctgcttgggcccggagagccttgctctccctgagatcacctaaagcccgtaggggcaaggctcgccgtagagctgccaagctccagtcatcccaagagcctgaagcaccaccacctcgggatgtggcccttttgcaagggagggcaaatgatttggtgaagtaccttttggctaaagaccagacgaagattcccatcaagcgctcggacatgctgaaggacatcatcaaagaatacactgatgtgtaccccgaaatcattgaacgagcaggctattctttggagaaggtatttgggattcaattgaaggaaattgataagaatgaccacttgtacattcttctcagcaccttagagcccactgatgcaggcatactgggaacgactaaggactcacccaagctgggtctgctcatggtgcttcttagcatcatcttcatgaatggaaatcggtccagtgaggctgtcatctgggaggtgctgcgcaagttggggctgcgccctgggatacatcattcactctttggggacgtgaagaagctcatcactgatgagtttgtgaagcagaagtacctggactatgccagagtccccaatagcaatccccctgaatatgagttcttctggggcctgcgctcttactatgagaccagcaagatgaaagtcctcaagtttgcctgcaaggtacaaaagaaggatcccaaggaatgggcagctcagtaccgagaggcgatggaagcggatttgaaggctgcagctgaggctgcagctgaagccaaggctagggccgagattagagctcgaatgggcattgggctcggctcggagaatgctgccgggccctgcaactgggacgaagctgatatcggaccctgggccaaagcccggatccaggcgggagcagaagctaaagccaaagcccaagagagtggcagtgccagcactggtgccagtaccagtaccaataacagtgccagtgccagtgccagcaccagtggtggcttcagtgctggtgccagcctgaccgccactctcacatttgggctcttcgctggccttggtggagctggtgccagcaccagtggcagctctggtgcctgtggtttctcctacaagtga

SEQ ID NO: 795 - RNA, 2226 nt, synthetic construct
  misc_feature 1..2226: note = AAH63838
  source 1..2226: mol_type = other RNA
atggctgagggaagcttcagcgtgcaatcggaaagctacagtgttgaagacatggatgagggtagcgacgaagtcggggaggaagagatggttgaaggcaacgactatgaagaattcggtgcgtttggtggctatggcaccctcaccagctttgacatccatatcctcagagccttcggaagcttgggtccaggccttcgcatcttatcgaatgagccctgggaactggaaaaccctgtgctggcccagaccctggtggaggcattgcagctggatccggaaacacttgccaatgagacggccgcccgtgctgccaacgtagcccgcgccgccgcctccaaccgtgcggctcgggccgctgccgccgctgcccgtaccgccttcagtcaggtggtcgctagccaccgggtggccacgccgcaggtctcaggagaggatacccagcccacgacctacgccgccgaggctcaggggcccacccctgagccaccccttgcttctccgcagacctcccagatgttagtcaccagtaagatggctgcccccgaggctccggcaacctccgcacagtcccagacaggctccccggcccaggaggctgctactgagggccctagtagcgcctgtgctttctctcaggctccgtgtgccagggaggtggacgccaaccggcccagcacagccttcctgggccagaatgatgtcttcgatttcactcagccggcaggtgtcagtggcatggccttcccgcgccccaagagacctgccccagcccaagaggctgccacagagggccccagtgctgcctctggtgtgccccagacgggacctggcagggaggtggcagccacccggcccaagaccaccaagtcggggaaggcgctggccaagactcggtgggtggagcctcagaatgttgtggcagcagctgctgccaaggccaagatggccacgagcatccctgagccggagggtgcagctgctgccactgctcagcacagtgctgagccctgggccaggatgggaggcaagaggaccaagaagtccaagcacctggatgatgagtatgagagcagcgaggaggagagagagactcccgcggtcccacccacctggagagcatcacagccctcattgacggtgcgggctcagttggcccctcggcccccgatggccccgaggtcccagataccctcaaggcacgtactgtgcctgcccccccgcaacgtgacccttctgcaggagagggcaaataagttggtgaaatacctgatgattaaggactacaagaagatccccatcaagcgcgcagacatgctgaaggatgtcatcagagaatatgatgaacatttccctgagatcattgaacgagcaacgtacaccctggaaaagaagtttgggatccacctgaaggagatcgacaaggaagaacacctgtatattcttgtctgcacacgggactcctcagctcgcctccttggaaaaaccaaggacactcccaggctgagtctcctcttggtgattctgggcgtcatcttcatgaatggcaaccgtgccagcgaggctgtcctctgggaggcactacgcaagatgggactgcgccctggggtgaggcacccattcctcggcgatctgaggaagctcatcacagatgactttgtgaagcagaagtacctggaatacaagaagatccccaacagcaacccacctgagtatgaattcctctggggcctgcgagcccgccatgagaccagcaagatgagggtcctgagattcatcgcccagaatcagaaccgagacccccgggaatggaaggctcatttcttggaggctgtggatgatgctttcaagacaatggatgtggatatggccgaggaacatgccagggcccagatgagggcccagatgaatatcggggatgaagcgctgattggacggtggagctgggatgacatacaagtcgagctcctgacctgggatgaggacggagattttggcgatgcctgggccaggatcccctttgctttctgggccagataccatcagtacattctgaatagcaaccgtgccaacaggagggccacgtggagagctggcgtcagcagtggcaccaatggaggggccagcaccagcgtcctagatggccccagcaccagctccaccatccggaccagaaatgctgccagagctggcgccagcttcttctcctggatccagcaccgttga

SEQ ID NO: 796 - RNA, 1122 nt, synthetic construct
  misc_feature 1..1122: note = CAG33449
  source 1..1122: mol_type = other RNA
atgcctcccgttccaggcgttccattccgcaacgttgacaacgactccccgacctcagttgagttagaagactgggtagatgcacagcatcccacagatgaggaagaggaggaagcctcctccgcctcttccactttgtacttagtattttccccctcttctttctccacatcctcttctctgattcttggtggtcctgaggaggaggaggtgccctctggtgtgataccaaatcttaccgagagcattcccagtagtcctccacagggtcctccacagggtccttcccagagtcctctgagctcctgctgctcctctttttcatggagctcattcagtgaggagtccagcagccagaaaggggaggatacaggcacctgtcagggcctgccagacagtgagtcctctttcacatatacactagatgaaaaggtggccgagttagtggagttcctgctcctcaaatacgaagcagaggagcctgtaacagaggcagagatgctgatgattgtcatcaagtacaaagattactttcctgtgatactcaagagagcccgtgagttcatggagcttctttttggccttgccctgatagaagtgggccctgaccacttctgtgtgtttgcaaacacagtaggcctcaccgatgagggtagtgatgatgagggcatgcccgagaacagcctcctgattattattctgagtgtgatcttcataaagggcaactgtgcctctgaggaggtcatctgggaagtgctgaatgcagtaggggtatatgctgggagggagcacttcgtctatggggagcctagggagctcctcactaaagtttgggtgcagggacattacctggagtatcgggaggtgccccacagttctcctccatattatgaattcctgtggggtccaagagcccattcagaaagcatcaagaagaaagtactagagtttttagccaagctgaacaacactgttcctagttcctttccatcctggtacaaggatgctttgaaagatgtggaagagagagtccaggccacaattgataccgcagatgatgccactgtcatggccagtgaaagcctcagtgtcatgtccagcaacgtctccttttctgattaa

SEQ ID NO: 797 - RNA, 2874 nt, synthetic construct
  misc_feature 1..2874: note = AAM08354
  source 1..2874: mol_type = other RNA
atgtctctggtaagccagaattcgcgccgccgccgccgccgcgttgcaaaggctactgcgcacaacagcagctggggcgaaatgcaggcccctaatgcccccggtctccccgctgatgtgccaggctcagacgtcccccagggtcccagcgattcccagatcctccagggcctctgcgcctctgagggcccaagcacctccgttctgcccacctccgctgagggcccaagcacctttgtgccgcccaccatctctgaggcctcaagcgcctccgggcagcccaccatctctgagggacctggcacctccgtgctgcccacccccagtgagggcctaagcacctccgggcctcccaccatctctaaggggctgtgcacctctgtgacgcttgccgcctctgagggccggaacacctccaggccgcccacttcctctgaggaacctagcacctccgtgccgcccaccgcctctgaggtaccgagcacctccctgccgcccacccctggtgagggaacgagcacctccgtgccgcccacagcctatgagggaccaagcacctccgtggtgcccacccctgatgagggaccaagcacctccgtgctgcctacacctggtgagggaccaggcacctccgtgccgctcgccgccactgagggcctgagcacctccgtgcaggccactcctgatgagggaccgagcacctccgtgccgcccaccgccactgagggcctaagcacccccgtgccacccacccgtgatgagggaccgagcacctccgtgccggccactcctggtgagggaccgagcacctccgtgctgcccgccgcctctgacggacaaagcatctccttggtgcccacccgcggtaagggatcaagcacctccgtgccccccaccgccaccgagggcctgagcacctccgtgcagcccactgctggtgagggatcgagcacctccgtgccgcccacccctggtgggggactgagcacctccgtgccgcccaccgccactgaggagttgagcacctccgtgccgcccactcccggtgagggaccaagcacttccgtactgccaatccccggtgagggactgagcacctctgtgccgcccaccgcctctgatggatcggacacctccgtgccgcccactcctggtgagggcgcaagcaccttagtgcagcccaccgcccctgacggaccgggaagctccgtgctgcctaaccctggtgagggcccgagcacattgtttagctctagtgcttctgtggaccggaacccctccaagtgttcccttgttttgccaagccctagggtaaccaaggcctccgtggactcagattctgagggtcctaagggtgcagaaggccctatagaattcgaggtcctgagagactgtgagagccccaactccattagtattatgggcctcaatacttcccgggttgcaattaccctgaagccccaagaccctatggaacagaacgtagctgagctgttgcagttcctgctggtgaaggatcagagcaagtaccctatccgggagtctgaaatgcgggaatatattgttaaagaatatcgcaaccagtttcctgagatactcaggcgagcagcagcccacctggagtgcatttttaggtttgaattgagagaacttgaccctgaggcacacacctacattctgttaaacaaactgggacctgtgccctttgaagggttagaagagagcccaaatgggccaaagatgggcctcctgatgatgattctaggccaaatattcctgaatggcaaccaagccaaggaggctgagatttgggaaatgctctggaggatgggggtgcagcgggaaaggaggctttccatttttgggaacccaaagagacttctgtctgtggagtttgtatggcagcgttacttagactacaggccagtaactgactgtaaaccagtggagtatgagtttttctggggcccaagatcccacctagaaaccaccaagatgaaaattctgaagttcatggcgaaaatatataacaaagatcctatggattggccagagaaatacaacgaagctctggaagaagatgctgccagagcctttgctgagggttggcaggctctccctcactttaggaggcccttttttgaggaagctgctgcagaggtaccatcccctgattcagaggtttccagctattcctcaaaatatgccccacattcatggcctgagtcaagattggagagcaaggcaaggaagctggtgcagttatttctgcttatggattcaactaagctgcctataccaaagaaaggaattctgtactacattggccgagagtgcagcaaagtgttccctgacctcctgaatcgtgctgcccgcaccctgaaccatgtctatgggacagaactagtggtacttgatcccaggaatcactcctatactctgtacaaccgaagggagatggaagaaactgaggagatcgtagacagtccaaacaggcctggcaacaactttttgatgcaggtcctaagcttcatctttattatgggcaaccatgccagggagtctgcagtctgggcctttctgcggggcttaggggttcaagctgggagaaagcatgtgattacctgcagatacttgagtcagcgctatatagacagtttacgggttcctgacagtgatccagtgcaatatgagtttgtatggggtcctagagcccgtttggaaacctctaagatgaaagccttgcgatatgtggccagaatccacagaaaggaaccacaggactggccacagcagtacagggaggcaatggaagatgaggccaatagagctgatgttgggcacaggcaaatctttgttcacaacttcaggtag

SEQ ID NO: 798 - RNA, 1572 nt, synthetic construct
  misc_feature 1..1572: note = AAH93964
  source 1..1572: mol_type = other RNA
atgtctctggtaagccagaatgcacgccactgtagcgcagagatcactgcagattacggcgacggcagaggtgaaatacaagctactaacgcctccgggtcccccacctccatgctagtcgttgatgccccccagtgccctcaggcgccaatcaactctcagtgtgtcaacacttcccaggccgttcaggacccgaatgacctggaggtcctgatcgacgagcagtccagacgtttgggggcgctcagggtccatgaccctctagaagacaggtcgattgctttggtgaatttcatgagaatgaaaagccagacggaggggtctatccagcagtccgagatgctggagtttctcagagagtactcagatcagttccctgagatcctcagacgagcctcagctcacctggaccaggtctttgggttgaacctgagagttattgatcctcaggctgacacctacaatttagtcagcaaacggggtttccagatcaccgataggatagcggagtccctggacatgccaaaagcaagtctcctggccctagtcctaggccacatcctcttgaatgggaaccgagcaagagaggcctccatttgggacttgctgctaaaagttgatatgtgggataagcctcagaggatcaacaacctctttgggaacacaaggaacctcctcactactgactttgtgtgcatgcgattcttggagtactggccggtgtatggcactaatccccttgagtttgagttcttgtggggctctagagcccacagggaaatcacaaagatggaagccctgaagtttgtgtcagatgcccatgatgaagaaccctggagctggccagaagaatataataaggccctggaaggtgacaaaaccaaagaaagaagcctgactgctggcttagagttctggtcggaggacactatgaatgataaggcaaatgatttggtccagttggctattagtgtcactgaggagatgctgcctatacatcaggatgagctattggctcacactggcaaagaatttgaggatgtgttcccaaatatcctcaatagagctactctaattcttgatatgttctatgggttgtctctgattgaggttgataccagtgagcacatctacctccttgtccagcaaccagaatcagaggaagagcaagtgatgctagagagcctggggagacccactcaagaatatgtaatgccaatcctaggtttgatcttcctgatgggcaaccgtgtcaaagaggccaatgtctggaacttgcttcgaagatttagtgtggatgtagggagaaagcattccatcacccgtaagcttatgagacagcgctatctggaatgcaggccactgtcctactctaatccagttgaatatgagcttctatggggtcctcgagctcaccatgaaaccatcaaaatgaaagtcttggagtacatggccaggctctacagaaagcgaccacagaactggccagaacaatatagggaggctgtggaagatgaggaggccagagccaaatctgaggcaactatcatgtttttccttgaccccacgtga

SEQ ID NO: 799 - RNA, 924 nt, synthetic construct
  misc_feature 1..924: note = CCDS3269.1
  source 1..924: mol_type = other RNA
atgttgcagacaccagagagcagggggctcccggtcccgcaggccgagggggagaaggatggcggccatgatggtgagacccgggccccgaccgcctcgcaggagcgccccaaggaggagcttggcgccgggagggaggagggggctgcggagcccgccctcacccggaaaggcgcgagggccttggcggccaaagccttggcaaggcgcagggcctaccgccggctgaatcggacggtggcggagttggtgcagttcctcctggtgaaagacaagaagaagagtcccatcacacgctcggagatggtgaaatacgttattggagacttgaagattctgttcccggacatcatcgcaagggccgcagagcatctgcggtatgtctttggttttgagctgaaacagtttgaccgcaagcaccacacttacatcctgatcaacaaactaaaacctctggaggaggaggaggaggaggatctgggaggagatggccccagattgggtctgttaatgatgatcctgggccttatctatatgagaggtaatagcgccagggaggcccaggtctgggagatgctgcgtcggttgggggtgcaaccctcaaagtatcatttcctctttgggtatccgaagaggcttattatggaagattttgtgcagcagcgatatctcagttacaggcgggtgcctcacaccaatccaccagaatatgaattctcttggggtccccgaagcaacctggaaatcagcaagatggaagtcctggggttcgtggccaaactgcataagaaggaaccgcagcactggccagtgcagtaccgtgaggccctagcagacgaggccgacagggccagagccaaggccagagctgaagccagtatgagggccagggccagtgctagggccggcatccacctctggtga

SEQ ID NO: 800 - RNA, 660 nt, synthetic construct
  misc_feature 1..660: note = AAD31314
  source 1..660: mol_type = other RNA
atgcctcggggacgaaagagtcggcgccgccgtaatgcgagagccgcagaagagaaccgcaacaatcgcaaaatccaggcctcagaggcctccgagacccctatggccgcctctgtggtagcgagcacccccgaagacgacctgagcggccccgaggaagacccgagcactccagaggaggcctctaccacccctgaagaagcctcgagcactgcccaagcacaaaagccttcagtgccccggagcaattttcagggcaccaagaaaagtctcctgatgtctatattagcgctcatcttcatcatgggcaacagcgccaaggaagctctggtctggaaagtgctggggaagttaggaatgcagcctggacgtcagcacagcatctttggagatccgaagaagatcgtcacagaagagtttgtgcgcagagggtacctgatttataaaccggtgccccgtagcagtccggtggagtatgagttcttctgggggccccgagcacacgtggaatcgagcaaactgaaagtcatgcattttgtggcaagggttcgtaaccgatgctctaaagactggccttgtaattatgactgggattcggacgatgatgcagaggttgaggctatcctcaattcaggtgctaggggttattccgccccttaa

SEQ ID NO: 801 - RNA, 3750 nt, synthetic construct
  misc_feature 1..3750: note = CCDS73700.1
  source 1..3750: mol_type = other RNA
atgtcgcagctaagtaagaatctgggtgactcgagtcctccggcggaggccccgaagccgcctgtctatagccgccctacggttctgatgcgggccccgcccgcttcctcccgggctccgccagtcccttgggatccacctccaattgacttgcaggcttcattggccgcttggcaggcacctcagcctgcctgggaggccccacagggccagctgcccgccccggtggttccgatgacccagcctcctgccctagggggcccgatagtcccggctcccccgctggggggcccgatgggtaagcctccgactcccggggtcctgatggtgcatcctccacctccgggagccccgatggcccagcctccgaccccgggagtcctgatggtgcatccttcagctcccggagctcccatggcccatcctcctcctccggggaccccaatgtcccaccctccccctccggggaccccaatggcccatcctcctcctccggggaccccgatggcccatcctcctcctccggggaccccgatggtgcatcctcctcctccggggaccccgatggctcatcctccccctccggggacaccgatggctcatcctccccctccggggacaccgatggctcatcctccacctccggggacaccgatggctcatcctccccctccgggtacaccgatggcccagcctccagctccgggagtcctgatggcccagcctctgactccgggagtcctgatggtccagcctgctgctccgggagcaccgatggtccagccgcctccagcagccatgatgacccagcctcagccttcaggagcaccgatggccaagcctccaggtccaggagtcctgatgattcatcctccaggtgcgagagctccgatgacccagcctccagcttcaggagcaccgatggcacagccggcggccccacctgcacagccgatggccccacctgcacagccgatggcttcttgggccccgcaggctcagcctctgatcctgcaaatccagtctcaagttataagggctcctccgcaggttccccagggcccgcaggcacccccagcgcagctagccacacccccgggctggcaggcgacctcgccaggatggcaggccacgcagcaaggctggcaggccactcccctgacttggcagaccacgcaggtcacctggcaggcaccagccgttacctggcaggtgccgccgcccatgcgccaggggcccccgcccatccgccctggcccaccacccatccgccctggcccaccaccggtgcgacaggccccaccgctgatccgccaggccccaccggtgatccgccaggccccacccgtgatccgccaggccccacccgtgatccgccaggcccccgctgtgatccgccaggccccacctgtgatccgccaggccccacctgtgatccgccaggctccacctgtgatccgccaggccccgccgctgatccgccaggcgccgccgcccatccgacctgccccacaggtcctggccacccagccaccgctctggcaggccctgccacccccacctccactgcggcaggccccgcaggctaggctgccggccccgcaggtgcaggcggcgccgcaggtgcctacggccccacctgctacgcaggtacccgcggcgccgcccgctggcccgcaggtgccccagcctgtgctgccggccccgctgtctgccccactgtctgccccgcaggctgtgcactgcccttccatcatctggcaggcccccaaaggtcagcccccggtgccacacgagattccaacgtcaatggaattccaggaggtgcagcagacacaggcgctggcctggcaggcccagaaggcccccactcacatctggcagcccctgcctgcccaggaggcccagaggcaggctccccccttggtccagctggagcagccctttcagggagccccgccctcccaaaaagccgtgcaaatccagctacccccccagcaggcccaggcatcgggtccgcaagcggaggtgcccacactgccgctccagccttcctggcaggcaccgcctgcagtcttgcaggcccagcccggacccccggtagcagcggcaaattttcccctgggctccgctaaatcattgatgactccatcaggagaatgcagggcctcttctatagaccgcaggggctcctctaaagagcgcaggacctcctcgaaggagcgcagggccccttcaaaagaccgcatgatctttgctgccaccttctgtgctcccaaggcagtgtcagctgcgcgagcacacctgccagctgcctggaaaaacctgcctgccacaccggagacctttgctccctcctcaagtgtcttcccagctacctcccagtttcagcctgcctctctgaatgcctttaaaggcccctctgctgcctcagagaccccaaagtcactgccatatgctctgcaggatccctttgcctgtgtagaggccctgcctgcagttccatgggtcccacagcccaatatgaatgcctcaaaggcatcgcaggcagtgcccaccttcctgatggctacagcagctgccccccaggcaactgccaccactcaagaggcctccaagacctccgtcgagccgccacgccgctccggcaaggccacccggaagaagaagcatctggaagcccaagaggacagccgtggccacacgctagcctttcatgactggcagggcccaaggccctgggagaatctaaatctgagtgactgggaggtccaaagccctatccaggtctcgggtgactgggagcacccaaacaccccccgtggcctgagtggttgggagggccctagcacctccaggatcctgagtggctgggaagggcccagcgcatcctgggccctgagtgcctgggagggcccgagcacctccagggccctgggtctctctgaaagcccagggagctctctgcccgtagttgtgtctgaggtcgcaagtgtctctccgggatccagtgccacccaggataattccaaggtggaggcacagcccttgtctcccttggatgagagggcaaatgcgttggtgcagttcctcttagtcaaggaccaagccaaggtgcctgtccagcgctcggagatggtgaaagtcatcctccgagagtataaagatgagtgcttagatatcatcaaccgtgccaacaataagctggagtgtgcctttggttatcaattgaaagaaattgataccaaaaaccacgcctatattatcatcaacaagctgggctaccatacagggaatttggtggcatcctatttagacaggcccaagtttggccttctgatggtggtcttgagcctcatctttatgaaaggcaactgtgtcagggaggatctgatctttaattttctgttcaagttagggttggatgtccgggagacaaacggtctctttggaaatactaagaagctcatcaccgaagtgtttgtcaggcagaagtacctagagtacaggcgaatcccttacactgagcccgcagagtatgagttcctctggggccctcgagcattcctggaaaccagcaagatgcttgtcctgaggtttttggccaagctccataagaaagatccacagagctggccattccattaccttgaagcgctcgcagagtgtgagtgggaagacacagatgaggatgaacctgacaccggtgacagtgcccacggccccaccagcaggccccctccccgctaa

SEQ ID NO: 802 - RNA, 282 nt, synthetic construct
  misc_feature 1..282: note = AAC39608
  source 1..282: mol_type = other RNA
atgaagttgctgatggtcctcatgctggcggccctctcccagcactgctacgcaggctctggctgccccttattggagaatgtgatttccaagacaatcaatccacaagtgtctaagactgaatacaaagaacttcttcaagagttcatagacgacaatgccactacaaatgccatagatgaattgaaggaatgttttcttaaccaaacggatgaaactctgagcaatgttgaggtgtttatgcaattaatatatgacagcagtctttgtgatttattttaa

SEQ ID NO: 803 - RNA, 363 nt, synthetic construct
  misc_feature 1..363: note = AAH67220
  source 1..363: mol_type = other RNA
atgaagttgctgatggtcctcatgctggcggccctctcccagcactgctacgcaggctctggctgccccttattggagaatgtgatttccaagacaatcaatccacaagtgtctaagactgaatacaaagaacttcttcaagagttcatagacgacaatgccactacaaatgccatagatgaattgaaggaatgttttcttaaccaaacggatgaaactctgagcaatgttgaggtgtttatggtaatttcattttcttcctataagctttttaaatcccctgaccagggacaagtgggctcttcatttctcactgacaatgccaaagccactagtgaacaagccttttcttacattggttaa

SEQ ID NO: 804 - RNA, 357 nt, synthetic construct
  misc_feature 1..357: note = AAA19238
  source 1..357: mol_type = other RNA
atgccaagagaagatgctcacttcatctatggttaccccaagaaggggcacggccactcttacaccacggctgaagaggccgctgggatcggcatcctgacagtgatcctgggagtcttactgctcatcggctgttggtattgtagaagacgaaatggatacagagccttgatggataaaagtcttcatgttggcactcaatgtgccttaacaagaagatgcccacaagaagggtttgatcatcgggacagcaaagtgtctcttcaagagaaaaactgtgaacctgtggttcccaatgctccacctgcttatgagaaactctctgcagaacagtcaccaccaccttattcaccttaa

SEQ ID NO: 805 - RNA, 1482 nt, synthetic construct
  misc_feature 1..1482: note = EAW93427
  source 1..1482: mol_type = other RNA
atgctgccccgatgggaactggcactttacctacttgcctcactaggcttccacttctattccttctatgaagtttacaaagtctccagagaacacgaagaggagctggaccaggaatttgagctggagactgacactttatttggaggattaaagaaggatgcgaccgactttgagtggagcttctggatggaatgggggaagcagtggctggtgtggcttctccttggccacatggtagtgtctcaaatggccacactgctggcaagaaagcacagaccctggattctcatgctctatgggatgtgggcctgctggtgtgtgctggggacccctggtgtggctatggttttgctccataccaccatctctttctgcgtggcccagttccggtctcagctcctgacgtggctctgttctctcctcctcctctccacactgaggctgcagggtgtggaagaagttaagagaaggtggtacaagacagaaaacgagtactacctgctgcagttcacgctgaccgttcgctgcctctactacaccagcttcagcctggagctctgctggcagcagctgcctgctgcatcgacctcctactcctttccctggatgctggcctatgtcttttattatccagtcttacacaatgggcccatcctcagcttctcggagttcatcaaacagatgcagcagcaggagcatgactccctgaaggccagcctgtgtgtcctggccctggggctgggccgccttctttgctggtggtggctggccgagctgatggctcacctgatgtacatgcatgccatctacagcagcatccccctcctggagactgtctcttgttggaccttaggaggactggcgttagcccaggtgctctttttctacgtgaagtacttggtgctctttggcgtgcctgctctgctcatgcgcctggatggactcactccacccgccctcccccgctgcgtgagcaccatgttcagtttcaccgggatgtggaggtattttgatgttggactgcataatttcttaatcaggtatgtgtacattccagtgggcgggtcccagcatggcctgctggggacactgttttccacggcgatgacatttgcatttgtgagctactggcatggcggctacgactacctctggtgctgggcagcgctcaactggctgggagtcactgtggagaatggagtccggaggctggtggagactccctgcatccaggacagtctggcccgatacttctccccacaagctcgccgtcgattccacgctgcccttgcttcttgttccacctcgatgctgatcctgtccaacctggtatttcttgggggcaatgaggttgggaaaacctactggaataggatcttcatacaaggctggccttgggtgaccctctctgtcctgggattcctgtactgctactcccacgtgggcattgcctgggcccagacctacgccacggactaa

SEQ ID NO: 806 - RNA, 954 nt, synthetic construct
  misc_feature 1..954: note = AAD41349
  source 1..954: mol_type = other RNA
atggctgtgcagggatcccagagaagacttctgggctccctcaactccacccccacagccatcccccagctggggctggctgccaaccagacaggagcccggtgcctggaggtgtccatctctgacgggctcttcctcagcctggggctggtgagcttggtggagaacgcgctggtggtggccaccatcgccaagaaccggaacctgcactcacccatgtactgcttcatctgctgcctggccttgtcggacctgctggtgagcgggagcaacgtgctggagacggccgtcatcctcctgctggaggccggtgcactggtggcccgggctgcggtgctgcagcagctggacaatgtcattgacgtgatcacctgcagctccatgctgtccagcctctgcttcctgggcgccatcgccgtggaccgctacatctccatcttctacgcactgcgctaccacagcatcgtgaccctgccgcgggcgcggcgagccgttgcggccatctgggtggccagtgtcgtcttcagcacgctcttcatcgcctactacgaccacgtggccgtcctgctgtgcctcgtggtcttcttcctggctatgctggtgctcatggccgtgctgtacgtccacatgctggcccgggcctgccagcacgcccagggcatcgcccggctccacaagaggcagcgcccggtccaccagggctttggccttaaaggcgctgtcaccctcaccatcctgctgggcattttcttcctctgctggggccccttcttcctgcatctcacactcatcgtcctctgccccgagcaccccacgtgcggctgcatcttcaagaacttcaacctctttctcgccctcatcatctgcaatgccatcatcgaccccctcatctacgccttccacagccaggagctccgcaggacgctcaaggaggtgctgacatgctcctggtga

SEQ ID NO: 807 - RNA, 954 nt, synthetic construct; identical to SEQ ID NO: 806
  misc_feature 1..954: note = AHC09522
  source 1..954: mol_type = other RNA

SEQ ID NO: 808 - RNA, 954 nt, synthetic construct
  misc_feature 1..954: note = AHC09804
  source 1..954: mol_type = other RNA
atggctgtgcagggatcccagagaagacttctgggctccctcaactccacccccacagccatcccccagctggggctggctgccaaccagacaggagcccggtgcctggaggtgtccatctctgacgggctcttcctcagcctggggctggtgagcttggtggagaacgcgctggtggtggccaccatcgccaagaaccggaacctgcactcacccatgtactgcttcatctgctgcctggccttgtcggacctgctggtgagcgggagcaacgtgctggagacggccgtcatcctcctgctggaggccggtgcactggtggcccgggctgcggtgctgcagcagctggacaatgtcattgacgtgatcacctgcagctccatgctgtccagcctctgcttcctgggcgccatcgccgtggaccgctacatctccatcttctacgcactgcgctaccacagcatcgtgaccctgccgcgggcgcggcaagccgttgcggccatctgggtggccagtgtcgtcttcagcacgctcttcatcgcctactacgaccacgtggccgtcctgctgtgcctcgtggtcttcttcctggctatgctggtgctcatggccgtgctgtacgtccacatgctggcccgggcctgccagcacgcccagggcatcgcccggctccacaagaggcagcgcccggtccaccagggctttggccttaaaggcgctgtcaccctcaccatcctgctgggcattttcttcctctgctggggccccttcttcctgcatctcacactcatcgtcctctgccccgagcaccccacgtgcggctgcatcttcaagaacttcaacctctttctcgccctcatcatctgcaatgccatcatcgaccccctcatctacgccttccacagccaggagctccgcaggacgctcaaggaggtgctgacatgctcctggtga

SEQ ID NO: 809 - RNA, 954 nt, synthetic construct
  misc_feature 1..954: note = BAE94313
  source 1..954: mol_type = other RNA
atggctgtgcagggatcccagagaagacttctgggctccctcaactccacccccacagccatcccccagctggggctggctgccaaccagacaggagcccggtgcctggaggtgtccatctctgacgggctcttcctcagcctggggctggtgagcttggtggagaacgcgctggtggtggccaccatcgccaagaaccggaacctgcactcacccatgtactgcttcatctgctgcctggccttgtcggacctgctggtgagcgggagcaacgtgctggagacggccgtcatcctcctgctggaggccggtgcactggtggcccgggctgcggtgctgcagcagctggacaatgtcactgacgtgatcacctgcagctccatgctgtccagcctctgcttcctgggcgccatcgccgtggaccgctacatctccatcttctacgcactgcgctaccacagcatcgtgaccctgccgcgggcgcggcgagccgttgcggccatctgggtggccagtgtcgtcttcagcacgctcttcatcgcctactacgaccacgtggccgtcctgctgtgcctcgtggtcttcttcctggctatgctggtgctcatggccgtgctgtacgtccacatgctggcccgggcctgccagcacgcccagggcatcgcccggctccacaagaggcagcgcccggtccaccagggctttggccttaaaggcgctgtcaccctcaccatcctgctgggcattttcttcctctgctggggccccttcttcctgcatctcacactcatcgtcctctgccccgagcaccccacgtgcggctgcatcttcaagaacttcaacctctttctcgccctcatcatctgcaatgccatcatcgaccccctcatctacgccttccacagccaggagctccgcaggacgctcaaggaggtgctgacatgctcctggtga

SEQ ID NO: 810 - RNA, 954 nt, synthetic construct
  misc_feature 1..954: note = AHC09531
  source 1..954: mol_type = other RNA
atggctgtgcagggatcccagagaagacttctgggctccctcaactccacccccacagccatcccccagctggggctggctgccaaccagacaggagcccggtgcctggaggtgtccatctctgacgggctcttcctcagcctggggctggtgagcttggtggagaacgcgctggtggtggccaccatcgccaagaaccggaacctgcactcacccatgtactgcttcatctgctgcctggccttgtcggacctgctggtgagcgggagcaacatgctggagacggccgtcatcctcctgctggaggccggtgcactggtggcccgggctgcggtgctgcagcagctggacaatgtcattgacgtgatcacctgcagctccatgctgtccagcctctgcttcctgggcgccatcgccgtggaccgctacatctccatcttctacgcactgcgctaccacagcatcgtgaccctgccgcgggcgcggcgagccgttgcggccatctgggtggccagtgtcgtcttcagcacgctcttcatcgcctactacgaccacgtggccgtcctgctgtgcctcgtggtcttcttcctggctatgctggtgctcatggccgtgctgtacgtccacatgctggcccgggcctgccagcacgcccagggcatcgcccggctccacaagaggcagcgcccggtccaccagggctttggccttaaaggcgctgtcaccctcaccatcctgctgggcattttcttcctctgctggggccccttcttcctgcatctcacactcatcgtcctctgccccgagcaccccacgtgcggctgcatcttcaagaacttcaacctctttctcgccctcatcatctgcaatgccatcatcgaccccctcatctacgccttccacagccaggagctccgcaggacgctcaaggaggtgctgacgtgctcctggtga

SEQ ID NO: 811 - RNA, 954 nt, synthetic construct
  misc_feature 1..954: note = BAE94311
  source 1..954: mol_type = other RNA
atggctgtgcagggatcccagagaagacttctgggctccctcaactccacccccacagccatcccccagctggggctggctgccaaccagacaggagcccggtgcctggaggtgtccatctctgacgggctcttcctcagcctggggctggtgagcttggtggagaacgcgctggtggtggccaccatcgccaagaaccagaacctgcactcacccatgtactgcttcatctgctgcctggccttgtcggacctgctggtgagcgggagcaacgtgctggagacggccgtcatcctcctgctggaggccggtgcactggtggcccgggctgcggtgctgcagcagctggacaatgtcattgacgtgatcacctgcagctccatgctgtccagcctctgcttcctgggcgccatcgccgtggaccgctacatctccatcttctacgcactgcgctaccacagcatcgtgaccctgccgcgggcgcggcaagccgttgcggccatctgggtggccagtgtcgtcttcagcacgctcttcatcgcctactacgaccacgtggccgtcctgctgtgcctcgtggtcttcttcctggctatgctggtgctcatggccgtgctgtacgtccacatgctggcccgggcctgccagcacgcccagggcatcgcccggctccacaagaggcagcgcccggtccaccagggctttggccttaaaggcgctgtcaccctcaccatcctgctgggcattttcttcctctgctggggccccttcttcctgcatctcacactcatcgtcctctgccccgagcaccccacgtgcggctgcatcttcaagaacttcaacctctttctcgccctcatcatctgcaatgccatcatcgaccccctcatctacgccttccacagccaggagctccgcaggacgctcaaggaggtgctgacatgctcctggtga

SEQ ID NO: 812 - RNA, 954 nt, synthetic construct
  misc_feature 1..954: note = BAE94309
  source 1..954: mol_type = other RNA
atggctgtgcagggatcccagagaagacttctgggctccctcaactccacccccacagccatcccccagctggggctggctgccaaccagacaggagcccggtgcctggaggtgtccatctctgacgggctcttcctcagcctggggctggtgagcttggtggagaacgcgctggtggtggccaccatcgccaagaaccggaacctgcactcacccatgtactgcttcatctgctgcctggccttgtcggacctgctggtgagcgggagcaacgtgctggagacggccgtcatcctcctgctggaggccggtgcactggtggcccgggctgcggtgctgcagcagctggacaatgtcattgacgtgatcacctgcagctccatgctgtccagcctctgcttcctgggcgccatcgccgtggaccgctacatctccatcttctacgcactgcgctaccacagcatcgtgaccctgccgcgggcgcggcaagccgttggggccatctgggtggccagtgtcgtcttcagcacgctcttcatcgcctactacgaccacgtggccgtcctgctgtgcctcgtggtcttcttcctggctatgctggtgctcatggccgtgctgtacgtccacatgctggcccgggcctgccagcacgcccagggcatcgcccggctccacaagaggcagcgcccggtccaccagggctttggccttaaaggcgctgtcaccctcaccatcctgctgggcattttcttcctctgctggggccccttcttcctgcatctcacactcatcgtcctctgccccgagcaccccacgtgcggctgcatcttcaagaacttcaacctctttctcgccctcatcatctgcaatgccatcatcgaccccctcatctacgccttccacagccaggagctccgcaggacgctcaaggaggtgctgacatgctcctggtga

SEQ ID NO: 813 - RNA, 954 nt, synthetic construct
  misc_feature 1..954: note = BAE94308
  source 1..954: mol_type = other RNA
atggctgtgcagggatcccagagaagacttctgggctccctcaactccacccccacagccatcccccagctggggctggctgccaaccagacaggagcccggtgcctggaggtgtccatctctgacgggctcttcctcagcctggggctggtgagcttggtggagaacgcgctggtggtggccaccatcgccaagaaccggaacctgcactcacccatgtactgcttcatctgctgcctggccttgtcggacctgctggtgagcgggagcaacgtgctggagacggccgtcatcctcctgctggaggccggtgcactggtggcccgggctgcggtgctgcagcagctggacaatgtcactgacgtgatcacctgcagctccatgctgtccagcctctgcttcctgggcgccatcgccgtggaccgctacatctccatcttctacgcactgcgctaccacagcatcgtgaccctgacgcgggcgcggcgagccgttgcggccatctgggtggccagtgtcgtcttcagcacgctcttcatcgcctactacgaccacgtggccgtcctgctgtgcctcgtggtcttcttcctggctatgctggtgctcatggccgtgctgtacgtccacatgctggcccgggcctgccagcacgcccagggcatcgcccggctccacaagaggcagcgcccggtccaccagggctttggccttaaaggcgctgtcaccctcaccatcctgctgggcattttcttcctctgctggggccccttcttcctgcatctcacactcatcgtcctctgccccgagcaccccacgtgcggctgcatcttcaagaacttcaacctctttctcgccctcatcatctgcaatgccatcatcgaccccctcatctacgccttccacagccaggagctccgcaggacgctcaaggaggtgctgacatgctcctggtga

SEQ ID NO: 814 - RNA, 954 nt, synthetic construct
  misc_feature 1..954: note = BAE94307
  source 1..954: mol_type = other RNA
atggctgtgcagggatcccagagaagacttctgggctccctcaactccacccccacagccatcccccagctggggctggctgccaaccagacaggagcccggtgcctggaggtgtccatctctgacgggctcttcctcagcctggggctggtgagcttggtggagaacgcgctggtggtggccaccatcgccaagaaccggaacctgcactcacccatgtactgcttcatctgctgcctggccttgtcggacctgctggtgagcgggagcaacatgctggagacggccgtcatcctcctgctggaggccggtgcactggtggcccgggctgcggtgctgcagcagctggacaatgtcattgacgtgatcacctgcagctccatgctgtccagcctctgcttcctgggcgccatcgccgtggaccgctacatctccatcttctacgcactgcgctaccacagcatcgtgatcctgccgcgggcgcggcgagccgttgcggccatctgggtggccagtgtcgtcttcagcacgctcttcatcgcctactacgaccacgtggccgtcctgctgtgcctcgtggtcttcttcctggctatgctggtgctcatggccgtgctgtacgtccacatgctggcccgggcctgccagcacgcccagggcatcgcccggctccacaagaggcagcgcccggtccaccagggctttggccttaaaggcgctgtcaccctcaccatcctgctgggcattttcttcctctgctggggccccttcttcctgcatctcacactcatcgtcctctgccccgagcaccccacgtgcggctgcatcttcaagaacttcaacctctttctcgccctcatcatctgcaatgccatcatcgaccccctcatctacgccttccacagccaggagctccgcaggacgctcaaggaggtgctgacgtgctcctggtga

SEQ ID NO: 815 - RNA, 951 nt, synthetic construct
  misc_feature 1..951: note = BAE94306
  source 1..951: mol_type = other RNA
atggctgtgcagggatcccagagaagacttctgggctccctcaactccacccccacagccatcccccagctggggctggctgccaaccagacaggagcccggtgcctggaggtgtccatctctgacgggctcttcctcagcctggggctggtgagcttggtggagaacgcgctggtggtggccaccatcgccaagaaccggaacctgcactcacccatgtactgcttcatctgctgcctggccttgtcggacctgctggtgagcgggagcaacgtgctggagacggccgtcatcctcctgctggaggccggtgcactggtggcccgggctgcggtgctgcagcagctggacaatgtcattgacgtgatcacctgcagctccatgctgtccagcctctgcttcctgggcgccatcgccgtggaccgctacatctccatctacgcactgcgctaccacagcatcgtgaccctgccgcgggcgcggcaagccgttgcggccatctgggtggccagtgtcgtcttcagcacgctcttcatcgcctactacgaccacgtggccgtcctgctgtgcctcgtggtcttcttcctggctatgctggtgctcatggccgtgctgtacgtccacatgctggcccgggcctgccagcacgcccagggcatcgcccggctccacaagaggcagcgcccggtccaccagggctttggccttaaaggcgctgtcaccctcaccatcctgctgggcattttcttcctctgctggggccccttcttcctgcatctcacactcatcgtcctctgccccgagcaccccacgtgcggctgcatcttcaagaacttcaacctctttctcgccctcatcatctgcaatgccatcatcgaccccctcatctacgccttccacagccaggagctccgcaggacgctcaaggaggtgctgacatgctcctggtga

SEQ ID NO: 816 - RNA, 954 nt, synthetic construct
  misc_feature 1..954: note = AAQ62977
  source 1..954: mol_type = other RNA
atggctgtgcagggatcccagagaagacttctgggctccctcaactccacccccacagccatcccccagctggggctggctgccaaccagacaggagcccggtgcctggaggtgtccatctctgacgggctcttcctcagcctggggctggtgagcttggtggagaacgcgctggtggtggccaccatcgccaagaaccggaacctgcactcacccatgtactgcttcatctgctgcctggccttgtcggacctgctggtgagcgggagcaacgtgctggagacggccgtcatcctcctgctggaggccggtgcactggtggcccgggctgcggtgctgcagcagctggacaatgtcattgacgtgatcacctgcagctccatgctgtccagcctctgcttcctgggcgccatcgccgtggaccgctacatctccatcttctacgcactgcgctaccacagcatcgtgaccctgccgcgggcgcggcgagccgttgcggccatctgggtggccagtgtcgtcttcagcacgctcttcatcgcctactacgaccacgtggccgtcctgctgtgcctcgtggtcttcttcctggctatgctggtgctcatggccgtgctgtacgtccacatgctggcccgggcctgccagcacgcccagggcatcgcccggctccacaagaggcagcgcccggtccaccagggctttggccttaaaggcgctgtcaccctcaccatcctgctgggcattttcttcctctgctggggccccttcttcctgcatctcacactcatcatcctctgccccgagcaccccacgtgcggctgcatcttcaagaacttcaacctctttctcgccctcatcatctgcaatgccatcatcgaccccctcatctacgccttccacagccaggagctccgcaggacgctcaaggaggtgctgacatgctcctggtga

SEQ ID NO: 817 - RNA, 954 nt, synthetic construct
  misc_feature 1..954: note = AAQ62975
  source 1..954: mol_type = other RNA
atggctgtgcagggatcccagagaagacttctgggctccctcaactccacccccacagccatcccccagctggggctggctgccaaccagacaggagcccggtgcctggaggtgtccatctctgacgggctcttcctcagcctggggctggtgagcttggtggagaacgcgctggtggtggccaccatcgccaagaaccggaacctgcactcacccatgtactgcttcatctgctgcctggccttgtcggacctgctggtgagcgggagcaacgtgctggagacggccgtcatcctcctgctggaggccggtgcactggtggcccgggctgtggtgctgcagcagctggacaatgtcattgacgtgatcacctgcagctccatgctgtccagcctctgcttcctgggcgccatcgccgtggaccgctacatctccatcttctacgcactgcgctaccacagcatcgtgaccctgccgcgggcgcggcgagccgttgcggccatctgggtggccagtgtcgtcttcagcacgctcttcatcgcctactacgaccacgtggccgtcctgctgtgcctcgtggtcttcttcctggctatgctggtgctcatggccgtgctgtacgtccacatgctggcccgggcctgccagcacgcccagggcatcgcccggctccacaagaggcagcgcccggtccaccagggctttggccttaaaggcgctgtcaccctcaccatcctgctgggcattttcttcctctgctggggccccttcttcctgcatctcacactcatcgtcctctgccccgagcaccccacgtgcggctgcatcttcaagaacttcaacctctttctcgccctcatcatctgcaatgccatcatcgaccccctcatctacgccttccacagccaggagctccgcaggacgctcaaggaggtgctgacatgctcctggtga

SEQ ID NO: 818 - RNA, 954 nt, synthetic construct
  misc_feature 1..954: note = AAQ62974
  source 1..954: mol_type = other RNA
atggctgtgcagggatcccagagaagacttctgggctccctcaactccacccccacagccatcccccagctggggctggctgccaaccagacaggagcccggtgcctggaggtgtccatctctgacgggctcttcctcagcctggggctggtgagcttggtggagaacgcgctggtggtggccaccatcgccaagaaccggaacctgcactcacccatgtactgcttcatctgctgcctggccttgtcggacctgctggtgagcgggagcaacgtgctggagacggccgtcatcctcctgctggaggccggtgcactggtggcccgggctgcggtgctgcagcagctggacaatgtcattgacgtgatcacctgcagctccatgctgtccagcctctgcttcctgggcgccatcgccgtggaccgctacatctccatcttctacgcactgcgctaccacagcatcgtgaccctgccgcgggcgcggcgagccgttgcggccatctgggtggccagtgtcgtcttcagcacgctcttcatcgcctactacgaccacgtggccgtcctgctgtgcctcgtggtcttcttcctggctatgctggtgctcatggccgtgctgtacgtccacatgctggcccgggcctgccagcacgcccagggcatcgcccggctccacaagaggcagcgcccggtccaccagggctttggccttaaaggcgctgtcaccctcaccatcctgctgggcattttcttcctctgctggggccccttcttcctgcatctcacactcatcgtcctctgccccgagcaccccacgtgcggctgcatcttcaagaacttcaacctctttctcgccctcatcatctgcaatgccatcatcgaccccctcatctacgccttccacagccaggagctccgcaggacgctcaaggaggtgctgacacgctcctggtga

SEQ ID NO: 819 - RNA, 954 nt, synthetic construct
  misc_feature 1..954: note = AAQ62973
  source 1..954: mol_type = other RNA
atggctgtgcagggatcccagagaagacttctgggctccctcaactccacccccacagccatcccccagctggggctggctgccaaccagacaggagcccggtgcctggaggtgtccatctctgacgggctcttcctcagcctggggctggtgagcttggtggagaacgcgctggtggtggccaccatcgccaagaaccggaacctgcactcacccatgtactgcttcatctgctgcctggccttgtcggacctgctggtgagcgggagcaacgtgctggagacggccgtcatcctcctgctggaggccggtgcactggtggcccgggctgcggtgctgcagcagctggacaatgtcattgacgtgatcacctgcagctccatgctgtccagcctctgcttcctgggcgccatcgccgtggaccgctacatctccatcttctacgcactgcgctaccacagcatcgtgaccctgccgcgggcgcggcgagccgttgcggccatctgggtggccagtgtcgtcttcagcacgctcttcatcgcctactacgaccacgtggccgtcctgctgtgcctcgtggtcttcttcctggctatgctggtgctcatggccgtgctgtacgtccacatgctggcccgggcctgccagcacgcccagggcatcgcccggctccacaagaggcagcgcccggtccaccagggctttggccttaaaggcgctgtcaccctcaccatcctgctgggcattttcttcctctgctggggccccttcttcctgcatctcacactcatcgtcctctgccccgagcaccccacgtgcggctgcatcttcaagaacttcaacctctttctcgccctcatcatctgcaatgccatcatcgaccccctcatctacgccttccacagccaggagctccgcaggatgctcaaggaggtgctgacatgctcctggtga

SEQ ID NO: 820 - RNA, 954 nt, synthetic construct
  misc_feature 1..954: note = AAQ62972
  source 1..954: mol_type = other RNA
atggctgtgcagggatcccagagaagacttctgggctccctcaactccacccccacagccatcccccagctggggctggctgccaaccagacaggagcccggtgcctggaggtgtccatctctgacgggctcttcctcagcctggggctggtgagcttggtggagaacgcgctggtggtggccaccatcgccaagaaccggaacctgcactcacccatgtactgcttcatctgctgcctggccttgtcggacctgctggtgagcgggagcaacgtgctggagacggccgtcatcctcctgctggaggccggtgcactggtggcccgggctgcggtgctgcagcagctggacaatgtcattgacgtgatcacctgcagctccatgctgtccagcctctgcttcctgggcgccatcgccgtggaccgctacatctccatcttctacgcactgcgctaccacagcatcgtgaccctgccgcgggcgcggcgagccgttgcggccatctgggtggccagtgtcgtcttcagcacgctcttcatcgcctactacgaccacgtggccgtcctgctgtgcctcgtggtcttcttcctggctatgctggtgctcatggccgtgctgtacgtccacatgctggcctgggcctgccagcacgcccagggcatcgcccggctccacaagaggcagcgcccggtccaccagggctttggccttaaaggcgctgtcaccctcaccatcctgctgggcattttcttcctctgctggggccccttcttcctgcatctcacactcatcgtcctctgccccgagcaccccacgtgcggctgcatcttcaagaacttcaacctctttctcgccctcatcatctgcaatgccatcatcgaccccctcatctacgccttccacagccaggagctccgcaggacgctcaaggaggtgctgacatgctcctggtga

SEQ ID NO: 821 - RNA, 954 nt, synthetic construct
  misc_feature 1..954: note = AAQ62971
  source 1..954: mol_type = other RNA
atggctgtgcagggatcccagagaagacttctgggctccctcaactccacccccacagccatcccccagctggggctggctgccaaccagacaggagcccggtgcctggaggtgtccatctctgacgggctcttcctcagcctggggctggtgagcttggtggagaacgcgctggtggtggccaccatcgccaagaaccggaacctgcactcacccatgtactgcttcatctgctgcctggccttgtcggacctgctggtgagcgggagcaacgtgctggagacggccgtcatcctcctgctggaggccggtgcactggtggcccgggctgcggtgctgcagcagctggacaatgtcattgacgtgatcacctgcagctccatgctgtccagcctctgcttcctgggcgccatcgccgtggaccgctacatctccatcttctacgcactgcgctaccacagcatcgtgaccctgccgcaggcgcggcgagccgttgcggccatctgggtggccagtgtcgtcttcagcacgctcttcatcgcctactacgaccacgtggccgtcctgctgtgcctcgtggtcttcttcctggctatgctggtgctcatggccgtgctgtacgtccacatgctggcccgggcctgccagcacgcccagggcatcgcccggctccacaagaggcagcgcccggtccaccagggctttggccttaaaggcgctgtcaccctcaccatcctgctgggcattttcttcctctgctggggccccttcttcctgcatctcacactcatcgtcctctgccccgagcaccccacgtgcggctgcatcttcaagaacttcaacctctttctcgccctcatcatctgcaatgccatcatcgaccccctcatctacgccttccacagccaggagctccgcaggacgctcaaggaggtgctgacatgctcctggtga

SEQ ID NO: 822 - RNA, 954 nt, synthetic construct
  misc_feature 1..954: note = AAQ62970
  source 1..954: mol_type = other RNA
atggctgtgcagggatcccagagaagacttctgggctccctcaactccacccccacagccatcccccagctggggctggctgccaaccagacaggagcccggtgcctggaggtgtccatctctgacgggctcttcctcagcctggggctggtgagcttggtggagaacgcgctggtggtggccaccatcgccaagaaccggaacctgcactcacccatgtactgcttcatctgctgcctggccttgttggacctgctggtgagcgggagcaacgtgctggagacggccgtcatcctcctgctggaggccggtgcactggtggcccgggctgcggtgctgcagcagctggacaatgtcattgacgtgatcacctgcagctccatgctgtccagcctctgcttcctgggcgccatcgccgtggaccgctacatctccatcttctacgcactgcgctaccacagcatcgtgaccctgccgcgggcgcggcgagccgttgcggccatctgggtggccagtgtcgtcttcagcacgctcttcatcgcctactacgaccacgtggccgtcctgctgtgcctcgtggtcttcttcctggctatgctggtgctcatggccgtgctgtacgtccacatgctggcccgggcctgccagcacgcccagggcatcgcccggctccacaagaggcagcgcccggtccaccagggctttggccttaaaggcgctgtcaccctcaccatcctgctgggcattttcttcctctgctggggccccttcttcctgcatctcacactcatcgtcctctgccccgagcaccccacgtgcggctgcatcttcaagaacttcaacctctttctcgccctcatcatctgcaatgccatcatcgaccccctcatctacgccttccacagccaggagctccgcaggacgctcaaggaggtgctgacatgctcctggtga

SEQ ID NO: 823 - RNA, 954 nt, synthetic construct
  misc_feature 1..954: note = AAQ62969
  source 1..954: mol_type = other RNA
atggctgtgcagggatcccagagaagacttctgggctccctcaactccacccccacagccatcccccagctggggctggctgccaaccagacaggagcccggtgcctggaggtgtccatctctgacgggctcctcctcagcctggggctggtgagcttggtggagaacgcgctggtggtggccaccatcgccaagaaccggaacctgcactcacccatgtactgcttcatctgctgcctggccttgtcggacctgctggtgagcgggagcaacgtgctggagacggccgtcatcctcctgctggaggccggtgcactggtggcccgggctgcggtgctgcagcagctggacaatgtcattgacgtgatcacctgcagctccatgctgtccagcctctgcttcctgggcgccatcgccgtggaccgctacatctccatcttctacgcactgcgctaccacagcatcgtgaccctgccgcgggcgcggcgagccgttgcggccatctgggtggccagtgtcgtcttcagcacgctcttcatcgcctactacgaccacgtggccgtcctgctgtgcctcgtggtcttcttcctggctatgctggtgctcatggccgtgctgtacgtccacatgctggcccgggcctgccagcacgcccagggcatcgcccggctccacaagaggcagcgcccggtccaccagggctttggccttaaaggcgctgtcaccctcaccatcctgctgggcattttcttcctctgctggggccccttcttcctgcatctcacactcatcgtcctctgccccgagcaccccacgtgcggctgcatcttcaagaacttcaacctctttctcgccctcatcatctgcaatgccatcatcgaccccctcatctacgccttccacagccaggagctccgcaggacgctcaaggaggtgctgacatgctcctggtga

SEQ ID NO: 824 - RNA, 954 nt, synthetic construct
  misc_feature 1..954: note = AAO21073
  source 1..954: mol_type = other RNA
atggctgtgcagggatcccagagaagacttctgggctccctcaactccacccccacagccatcccccagctggggctggctgccaaccagacaggagcccggtgcctggaggtgtccatctctgacgggctcttcctcagcctggggctggtgagcttggtggagaacgcgctggtggtggccaccatcgccaagaaccggaacctgcactcacccatgtactgcttcatctgctgcctggccttgtcggacctgctggtgagcgggagcaacgtgcgggagacggccgtcatcctcctgctggaggccggtgcactggtggcccgggctgcggtgctgcagcagctggacaatgtcattgacgtgatcacctgcagctccatgctgtccagcctctgcttcctgggcgccatcgccgtggaccgctacatctccatcttctacgcactgcgctaccacagcatcgtgaccctgccgcgggcgcggcgagccgttgcggccatctgggtggccagtgtcgtcttcagcacgctcttcatcgcctactacgaccacgtggccgtcctgctgtgcctcgtggtcttcttcctggctatgctggtgctcatggccgtgctgtacgtccacatgctggcccgggcctgccagcacgcccagggcatcgcccggctccacaagaggcagcgcccggtccaccagggctttggccttaaaggcgctgtcaccctcaccatcctgctgggcattttcttcctctgctggggccccttcttcctgcatctcacactcatcgtcctctgccccgagcaccccacgtgcggctgcatcttcaagaacttcaacctctttctcgccctcatcatctgcaatgccatcatcgaccccctcatctacgccttccacagccaggagctccgcaggacgctcaaggaggtgctgacatgctcctggtga

SEQ ID NO: 825 - RNA, 954 nt, synthetic construct
  misc_feature 1..954: note = AHC09567
  source 1..954: mol_type = other RNA
atggctgtgcagggatcccagagaagacttctgggctccctcaactccacccccacagccatcccccagctggggctggctgccaaccagacaggagcccggtgcctggaggtgtccatctctgacgggctcttcctcagcctggggctggtgagcttggtggagaacgcgctggtggtggccaccatcgccaagaaccggaacctgcactcacccatgtactgcttcatctgctgcctggccttgccggacctgctggtgagcgggagcaacgtgctggagacggccgtcatcctcctgctggaggccggtgcactggtggcccgggctgcggtgctgcagcagctggacaatgtcattgacgtgatcacctgcagctccatgctgtccagcctctgcttcctgggcgccatcgccgtggaccgctacatctccatcttctacgcactgcgctaccacagcatcgtgaccctgccgcgggcgcggcgagccgttgcggccatctgggtggccagtgtcgtcttcagcacgctcttcatcgcctactacgaccacgtggccgtcctgctgtgcctcgtggtcttcttcctggctatgctggtgctcatggccgtgctgtacgtccacatgctggcccgggcctgccagcacgcccagggcatcgcccggctccacaagaggcagcgcccggtccaccagggctttggccttaaaggcgctgtcaccctcaccatcctgctgggcattttcttcctctgctggggccccttcttcctgcatctcacactcatcgtcctctgccccgagcaccccacgtgcggctgcatcttcaagaacttcaacctctttctcgccctcatcatctgcaatgccatcatcgaccccctcatctacgccttccacagccaggagctccgcaggacgctcaaggaggtgctgacatgctcctggtga

SEQ ID NO: 826 - RNA, 954 nt, synthetic construct
  misc_feature 1..954: note = AHC09812
  source 1..954: mol_type = other RNA
atggctgtgcagggatcccagagaagacttctgggctccctcaactccacccccacagccatcccccagctggggctggctgccaaccagacaggagcccggtgcctggaggtgtccatctctgacgggctcttcctcagcctggggctggtgagcttggtggagaacgcgctggtggtggccaccatcgccaagaaccggaacctgcactcacccatgtactgcttcatctgctgcctggccttgtcggacctgctggtgagcgggagcaacgtgctggagacggccgtcatcctcctgctggaggccggtgcactggtggcccgggctgcggtgctgcagcagctggacaatgtcattgacgtgatcacctgcagctccatgctgtccagcctctgcttcctgggcgccatcgccgtggaccgctacatctccatcttctacgcactgcgctaccacagcatcgtgaccctgccgcgggcgcggcgagccgttgcggccatctgggtggccagtgtcgtcttcagcacgctcttcatcgcctactacgaccacgtggccgtcctgctgtgcctcatggtcttcttcctggctatgctggtgctcatggccgtgctgtacgtccacatgctggcccgggcctgccagcacgcccagggcatcgcccggctccacaagaggcagcgcccggtccaccagggctttggccttaaaggcgctgtcaccctcaccatcctgctgggcattttcttcctctgctggggccccttcttcctgcatctcacactcatcgtcctctgccccgagcaccccacgtgcggctgcatcttcaagaacttcaacctctttctcgccctcatcatctgcaatgccatcatcgaccccctcatctacgccttccacagccaggagctccgcaggacgctcaaggaggtgctgacatgctcctggtga

SEQ ID NO: 827 - RNA, 954 nt, synthetic construct
  misc_feature 1..954: note = AHC10192
  source 1..954: mol_type = other RNA
atggctgtgcagggatcccagagaagacttctgggctccctcaactccacccccacagccatcccccagctggggctggctgccaaccagacaggagcccggtgcctggaggtgtccatctctgacgggctcttcctcagcctggggctggtgagcttggtggagaacgcgctggtggtggccaccatcgccaagaaccggaacctgcactcacccatgtactgcttcatctgctgcctggccttgtcggacctgctggtgagcgggagcaacgtgctggagacggccgtcatcctcctgctggaggccggtgcactggtggcccgggctgcggtgctgcagcagctggacaatgtcattgacgtgatcacctgcagctccatgctgtccagcctctgcttcctgggcgccatcgccgtggaccgctacatctccatcttctacgcactgcgctaccacagcatcgtgaccctgccgcgggcgcggcgagccgttgcggccatctgggtggccagtgtcgtcttcagcacgctcttcatcgcctactacgaccacgtggccgtcctgctgtgcctcgtggtcttcttcctggctatgctggtgctcatggccgtgctgtacgtccacatgctggcccgggcctgccagcacgcccagggcaccgcccggctccacaagaggcagcgcccggtccaccagggctttggccttaaaggcgctgtcaccctcaccatcctgctgggcattttcttcctctgctggggccccttcttcctgcatctcacactcatcgtcctctgccccgagcaccccacgtgcggctgcatcttcaagaacttcaacctctttctcgccctcatcatctgcaatgccatcatcgaccccctcatctacgccttccacagccaggagctccgcaggacgctcaaggaggtgctgacatgctcctggtga

SEQ ID NO: 828 - RNA, 954 nt, synthetic construct
  misc_feature 1..954: note = AHC09641
  source 1..954: mol_type = other RNA
atggctgtgcagggatcccagagaagacttctgggctccctcaactccacccccacagccatcccccagctggggctggctgccaaccagacaggagcccggtgcctggaggtgtccatctctgacgggctcttcctcagcctggggctggtgagcttggtggagaacgcgctggtggtggccaccatcgccaagaaccggaacctgcactcacccatgtactgcttcatctgctgcctggccttgtcggacctgctggtgagcgggagcaacgtgctggagacggccgtcatcctcctgctggaggccggtgcactggtggcccgggctgcggtgctgcagcagctggacaatgtcattgacgtgatcacctgcagctccatgctgtccagcctctgcttcctgggcgccatcgccgtggaccgctacatctccatcttctacgcactgcgctaccacagcaccgtgaccctgccgcgggcgcggcgagccgttgcggccatctgggtggccagtgtcgtcttcagcacgctcttcatcgcctactacgaccacgtggccgtcctgctgtgcctcgtggtcttcttcctggctatgctggtgctcatggccgtgctgtacgtccacatgctggcccgggcctgccagcacgcccagggcatcgcccggctccacaagaggcagcgcccggtccaccagggctttggccttaaaggcgctgtcaccctcaccatcctgctgggcattttcttcctctgctggggccccttcttcctgcatctcacactcatcgtcctctgccccgagcaccccacgtgcggctgcatcttcaagaacttcaacctctttctcgccctcatcatctgcaatgccatcatcgaccccctcatctacgccttccacagccaggagctccgcaggacgctcaaggaggtgctgacgtgctcctggtga

SEQ ID NO: 829 - RNA, 954 nt, synthetic construct
  misc_feature 1..954: note = AHC10044
  source 1..954: mol_type = other RNA
atggctgtgcagggatcccagagaagacttctgggctccctcaactccacccccacagccatcccccagctggggctggctgccaaccagacaggagcccggtacctggaggtgtccatctctgacgggctcttcctcagcctggggctggtgagcttggtggagaacgcgctggtggtggccaccatcgccaagaaccggaacctgcactcacccatgtactgcttcatctgctgcctggccttgtcggacctgctggtgagcgggagcaacgtgctggagacggccgtcatcctcctgctggaggccggtgcactggtggcccgggctgcggtgctgcagcagctggacaatgtcattgacgtgatcacctgcagctccatgctgtccagcctctgcttcctgggcgccatcgccgtggaccgctacatctccatcttctacgcactgcgctaccacagcatcgtgaccctgccgcgggcgcggcgagccgttgcggccatctgggtggccagtgtcgtcttcagcacgctcttcatcgcctactacgaccacgtggccgtcctgctgtgcctcgtggtcttcttcctggctatgctggtgctcatggccgtgctgtacgtccacatgctggcccgggcctgccagcacgcccagggcatcgcccggctccacaagaggcagcgcccggtccaccagggctttggccttaaaggcgctgtcaccctcaccatcctgctgggcattttcttcctctgctggggccccttcttcctgcatctcacactcatcgtcctctgccccgagcaccccacgtgcggctgcatcttcaagaacttcaacctctttctcgccctcatcatctgcaatgccatcatcgaccccctcatctacgccttccacagccaggagctccgcaggacgctcaaggaggtgctgacatgctcctggtga

SEQ ID NO: 830 - RNA, 954 nt, synthetic construct
  misc_feature 1..954: note = AHC09532
  source 1..954: mol_type = other RNA
atggctgtgcagggatcccagagaagacttctgggctccctcaactccacccccacagccatcccccagctggggctggctgccaaccagacaggagcccggtgcctggaggtgtccatctctgacgggctcttcctcagcctggggctggtgagcttggtggagaacgcgctggtgttggccaccatcgccaagaaccggaacctgcactcacccatgtactgcttcatctgctgcctggccttgtcggacctgctggtgagcgggagcaacgtgctggagacggccgtcatcctcctgctggaggccggtgcactggtggcccgggctgcggtgctgcagcagctggacaatgtcattgacgtgatcacctgcagctccatgctgtccagcctctgcttcctgggcgccatcgccgtggaccgctacatctccatcttctacgcactgcgctaccacagcatcgtgaccctgccgcgggcgcggcgagccgttgcggccatctgggtggccagtgtcgtcttcagcacgctcttcatcgcctactacgaccacgtggccgtcctgctgtgcctcgtggtcttcttcctggctatgctggtgctcatggccgtgctgtacgtccacatgctggcccgggcctgccagcacgcccagggcatcgcccggctccacaagaggcagcgcccggtccaccagggctttggccttaaaggcgctgtcaccctcaccatcctgctgggcattttcttcctctgctggggccccttcttcctgcatctcacactcatcgtcctctgccccgagcaccccacgtgcggctgcatcttcaagaacttcaacctctttctcgccctcatcatctgcaatgccatcatcgaccccctcatctacgccttccacagccaggagctccgcaggacgctcaaggaggtgctgacatgctcctggtga

SEQ ID NO: 831 - RNA, 954 nt, synthetic construct
  misc_feature 1..954: note = AHC11042
  source 1..954: mol_type = other RNA
atggctgtgcagggatcccagagaagacttctgggctccctcaactccacccccacagccatcccccagctggggctggctgccaaccagacaggagcccggtgcctggaggtgtccatctctgacgggctcttcctcagcctggggctggtgagcttggtggagaacgcgctggtggtggccaccatcgccaagaaccggaacctgcactcacccatgtactgcttcatctgctgcctgcccttgtcggacctgctggtgagcgggagcaacgtgctggagacggccgtcatcctcctgctggaggccggtgcactggtggcccgggctgcggtgctgcagcagctggacaatgtcattgacgtgatcacctgcagctccatgctgtccagcctctgcttcctgggcgccatcgccgtggaccgctacatctccatcttctacgcactgcgctaccacagcatcgtgaccctgccgcgggcgcggcgagccgttgcggccatctgggtggccagtgtcgtcttcagcacgctcttcatcgcctactacgaccacgtggccgtcctgctgtgcctcgtggtcttcttcctggctatgctggtgctcatggccgtgctgtacgtccacatgctggcccgggcctgccagcacgcccagggcatcgcccggctccacaagaggcagcgcccggtccaccagggctttggccttaaaggcgctgtcaccctcaccatcctgctgggcattttcttcctctgctggggccccttcttcctgcatctcacactcatcgtcctctgccccgagcaccccacgtgcggctgcatcttcaagaacttcaacctctttctcgccctcatcatctgcaatgccatcatcgaccccctcatctacgccttccacagccaggagctccgcaggacgctcaaggaggtgctgacatgctcctggtga

SEQ ID NO: 832 - RNA, 954 nt, synthetic construct
  misc_feature 1..954: note = AHC10733
  source 1..954: mol_type = other RNA
atggctgtgcagggatcccagagaagacttctgggctccctcaactccacccccacagccatcccccagctggggctggctgccaaccagacaggagcccggtgcctggaggtgtccatctctgacgggctcttcctcagcctggggctggtgagcttggtggagaacgcgctggtggtggccaccatcgccaagaaccggaacctgcactcacccatgtactgcttcatctgctgcctggccttgtcggacctgctggtgagcgggagcaacgtgctggagacggccgtcatcctcctgctggaggccggtgcactggtggcccgggctgcggtgctgcagcagctggacaatgtcattgacgtgatcacctgcagctccatgctgtccagcctctgcttcctgggcgccatcgccgtggaccgctacatctccatcttctacgcactgcgctaccacagcatcgtgaccctgccgcgggcgcggcgagccgttgcggccatctgggtggccagtgtcgtcttcagcacgctcttcatcgcctactacgaccacgtggccgtcctgctgtgcctcgtggtcttcttcctggctatgctggtgctcatggccgtgctgtacgtccacatgctggcccgggcctgccagcacgcccagggcatcgcccggctccacaagaggcagcgcccggtccaccagggctttggccttaaaggcgctgtcaccctcaccatcctgctgggcattttcttcctctgctggggccccttcttcctgcatctcacactcatcgtcctctgccccgagcaccccacgtgcggctgcatcttcaagaacttcagcctctttctcgccctcatcatctgcaatgccatcatcgaccccctcatctacgccttccacagccaggagctccgcaggacgctcaaggaggtgctgacatgctcctggtga

SEQ ID NO: 833 - RNA, 954 nt, synthetic construct
  misc_feature 1..954: note = AHC10696
  source 1..954: mol_type = other RNA
atggctgtgcagggatcccagagaagacttctgggctccctcaactccacccccacagccatcccccagctggggctggctgccaaccagacaggagcccggtgcctggaggtgtccatctctgacgggctcttcctcagcctggggctggtgagcttggtggagaacgcgctggtggtggccaccatcgccaagaaccggaacctgcactcacccatgtactgcttcatctgctgcctggccttgtcggacctgctggtgagcgggagcaacgtgctggagacggccgtcatcctcctgctggaggccggtgcactggtggcccgggctgcggtgctgcagcagctggacaatgtcattgacgtgatcacctgcagctccatgctgtccagcctctgcttcctgggcgccatcgccgtggaccgctacatctccatcttctacgcactgcgctaccacagcatcgtgaccctgccgcgggcgcggcgagccgttgcggccatctgggtggccagtgtcgtcttcagcacgctcttcatcgcctactacgaccacgtggccgtcctgctgtgcctcgtggtcttcttcctggctatgctggtgctcatggccgtgctgtacgtccacatgctggcccgggcctgccagcacgcccagggcatcgcccggctccacaagaggcagcgcccggtccaccagggctttggccttaaaggcgctgtcaccctcaccatcctgctgggcattttcttcctctgctggggccccttcttcctgcatctcacactcatcgtcctctgccccgagcaccccacgtgcggctgcatcttcaagaacttcaacctctttctcgccctcatcatctgcaatgccatcatcgaccccctcatccacgccttccacagccaggagctccgcaggacgctcaaggaggtgctgacatgctcctggtga

SEQ ID NO: 834 - RNA, 954 nt, synthetic construct
  misc_feature 1..954: note = AHC09527
  source 1..954: mol_type = other RNA
atggctgtgcagggatcccagagaagacttctgggctccctcaactccacccccacagccatcccccagctggggctggctgccaaccagacaggagcccggtgcctggaggtgtccatctctgacgggctcttcctcagcctggggctggtgagcttggtggagaacgcgctggtggtggccaccatcgccaagaaccggaacctgcactcacccatgtactgcttcatctgctgcctggccttgtcggacctgctggtgagcgggagcaacgtgctggagacggccgtcatcctcctgctggaggccggtgcactggtggcccgggctgcggtgctgcagcagctggacaatgtcattgacgtgatcacctgcagctccatgctgtccagcctctgcttcctgggcgccatcgccgtggaccgctacatctccatcttctacgcactgcgctaccacagcatcgtgaccctgccgcgggcgcggcgagccgttgcggccatctgggtggccagtgtcgtcttcagcacgctcttcatcgcctactacgaccacgtggccgtcctgctgtgcctcgtggtcttcttcctggctatgctggtgctcatggccgtgctgtacgtccacatgctggcccgggcctgccagcacgcccagggcatcgcccggctccacaagaggcagcgcccggtccaccagggctttggccttaaaggcgctgtcaccctcaccatcctgctgggcattttcttcctctgctggggccccttcttcctgcatctcacactcatcgtcctctgccccgagcaccccacgtgcggctgcatcttcaagaacttcaacctctttctcgccctcatcatctgcaatgccatcatccaccccctcatctacgccttccacagccaggagctccgcaggacgctcaaggaggtgctgacatgctcctggtga

SEQ ID NO: 835 - RNA, 954 nt, synthetic construct
  misc_feature 1..954: note = AHC10869
  source 1..954: mol_type = other RNA
atggctgtgcagggatcccagagaagacttctgggctccctcaactccacccccacagccatcccccagctggggctggctgccaaccagacaggagcccggtgcctggaggtgtccatctctgacgggctcttcctcagcctggggctggtgagcttggtggagaacgcgctggtggtggccaccatcgccaagaaccggaacctgcactcacccatgtactgcttcatctgctgcctggccttgtcggacctgctggtgagcgggagcaacgtgctggagacggccgtcatcctcctgctggaggccggtgcactggtggcccgggctgcggtgctgcagcagctggacaatgtcattgacgtgatcacctgcagctccatgctgtccagcctctgcttcctgggcgccatcgccgtggaccgctacatctccatcttctacgcactgcgctaccacagcatcgtgaccctgccgcgggcgcggcgagccgttgcggccatctgggtggccagtgtcgtcttcagcacgctcttcatcgcctactacgaccacgtggccgtcctgctgtgcctcgtggtcttcttcctggctatgctggtgctcatggccgtgctgtacgtccacatgctggcccgggcctgccagcacgcccagggcatcgcccggctccacaagaggcagcacccggtccaccagggctttggccttaaaggcgctgtcaccctcaccatcctgctgggcattttcttcctctgctggggccccttcttcctgcatctcacactcatcgtcctctgccccgagcaccccacgtgcggctgcatcttcaagaacttcaacctctttctcgccctcatcatctgcaatgccatcatcgaccccctcatctacgccttccacagccaggagctccgcaggacgctcaaggaggtgctgacatgctcctggtga

SEQ ID NO: 836 - RNA, 954 nt, synthetic construct
  misc_feature 1..954: note = AHC11615
  source 1..954: mol_type = other RNA
atggctgtgcagggatcccagagaagacttctgggctccctcaactccacccccacagccatcccccagctggggctggctgccaaccagacaggagcccggtgcctggaggtgtccatctctgacgggctcttcctcagcctggggctggtgagcttggtggagaacgcgctggtggtggccaccatcgccaagaaccggaacctgcactcacccatgtactgcttcatctgctgcctggccttgtcggacctgctggtgagcgggagcaacgtgctggagacggccgtcatcctcctgctggaggccggtgcactggtggcccgggctgcggtgctgcagcagctggacaatgtcattgacgtgatcacctgcagctccatgctgtccagcctctgcttcctgggcgccatcgccgtggaccgctacatctccatcttctacgcactgcgctaccacagcatcgtgaccctgccgcgggcgcggcgagccgttgcggccatctgggtggccagtgtcgtcttcagcacgctcttcatcgcctactacgaccacgtggccgtcctgctgtgcctcgtggtcttcttcctggctatgctggtgctcatggccgtgctgtacgtccacatgctggcccgggcctgccagcacgcccagggcatcgcccggctccacaagaggcagcgcccggtccaccagggctttggccttaaaggcgctgtcaccctcaccatcctgctgggcattttcttcctctgctggggccccttcttcctgcatctcacactcatcgtcctctgccccgagcaccccacgtgcggctgcatcttcaagaacttcaacctctttctcaccctcatcatctgcaatgccatcatcgaccccctcatctacgccttccacagccaggagctccgcaggacgctcaaggaggtgctgacatgctcctggtga

SEQ ID NO: 837 - RNA, 954 nt, synthetic construct
  misc_feature 1..954: note = AHC09535
  source 1..954: mol_type = other RNA
atggctgtgcagggatcccagagaagacttctgggctccctcaactccacccccacagccatcccccagctggggctggctgccaaccagacaggagcccggtgcctggaggtgtccatctctgacgggctcttcctcagcctggggctggtgagcttggtggagaacgcgctggtggtggccaccatcgccaagaaccggaacctgcactcacccatgtactgcttcatctgctgcctggccttgtcggacctgctggtgagcgggagcaacgtgctggagacggccgtcatcctcctgctggaggccggtgcactggtggcccgggctgcggtgctgcagcagctggacaatgtcattgacgtgatcacctgcagctccatgctgtccagcctctgcttcctgggcgccatcgccgtggaccactacatctccatcttctacgcactgcgctaccacagcatcgtgaccctgccgcgggcgcggcgagccgttgcggccatctgggtggccagtgtcgtcttcagcacgctcttcatcgcctactacgaccacgtggccgtcctgctgtgcctcgtggtcttcttcctggctatgctggtgctcatggccgtgctgtacgtccacatgctggcccgggcctgccagcacgcccagggcatcgcccggctccacaagaggcagcgcccggtccaccagggctttggccttaaaggcgctgtcaccctcaccatcctgctgggcattttcttcctctgctggggccccttcttcctgcatctcacactcatcgtcctctgccccgagcaccccacgtgcggctgcatcttcaagaacttcaacctctttctcgccctcatcatctgcaatgccatcatcgaccccctcatctacgccttccacagccaggagctccgcaggacgctcaaggaggtgctgacatgctcctggtga

SEQ ID NO: 838 - RNA, 954 nt, synthetic construct
  misc_feature 1..954: note = AHC11840
  source 1..954: mol_type = other RNA
atggctgtgcagggatcccagagaagacttctgggctccctcaactccacccccacagccatcccccagctggggctggctgccaaccagacaggagcccggtgcctggaggtgtccatctctgacgggctcttcctcagcctggggctggtgagcttggtggagaacgcgctggtggtggccaccatcgccaagaaccggaacctgcactcacccatgtactgcttcatctgctgcctggccttgtcggacctgctggtgagcgggagcaacgtgctggagacggccgtcatcctcctgctggaggccggtgcactggtggcccgggctgcggtgctgcagcagctggacaatgtcattgacgtgatcacctgcagctccatgctgtccagcctctgcttcctgggcgccatcgccgtggaccgctacatctccatcttctacgcactgcgctaccacagcatcgtgaccctgccgcgggcgcggcgagccgttgcggccatctgggtggccagtgtcgtcttcagcacgctcttcatcgcctactacgaccacgtggccgtcctgctgtgcctcgtggtcttcttcctggctatgctggtgctcatggccgtgctgtacgtccacatgctggcccgggcctgccagcacgcccagggcatcgcccggctccacaagaggcagcgcccggtccaccagggctttggccttaaaggcgctgtcaccctcaccatcctgctgggcattttcttcctctgctggggccccttcttcctgcatctcacactcatcgtcctctgccccgagcaccccacgtgcggctgcatcttcaagaacttcaacctctttctcgccctcatcatctgcaatgccatcatcgaccccctcatctacgccttccacaaccaggagctccgcaggacgctcaaggaggtgctgacatgctcctggtga

SEQ ID NO: 839 - RNA, 954 nt, synthetic construct
  misc_feature 1..954: note = AHC09665
  source 1..954: mol_type = other RNA
atggctgtgcagggatcccagagaagacttctgggctccctcaactccacccccacagccatcccccagctggggctggctgccaaccagacaggagcccggtgcctggaggtgtccatctctgacgggctcttcctcagcctggggctggtgagcttggtggagaacgcgctggtggtggccaccatcgccaagaaccggaacctgcactcacccatgtactgcttcatctgctgcctggccttgtcggacctgctggtgagcgggagcaacgtgctggagacggccgtcatcctcctgctggaggccggtgcactggtggcccgggctgcggtgctgcagcagctggacaatgtcattgacatgatcacctgcagctccatgctgtccagcctctgcttcctgggcgccatcgccgtggaccgctacatctccatcttctacgcactgcgctaccacagcatcgtgaccctgccgcgggcgcggcgagccgttgcggccatctgggtggccagtgtcgtcttcagcacgctcttcatcgcctactacgaccacgtggccgtcctgctgtgcctcgtggtcttcttcctggctatgctggtgctcatggccgtgctgtacgtccacatgctggcccgggcctgccagcacgcccagggcatcgcccggctccacaagaggcagcgcccggtccaccagggctttggccttaaaggcgctgtcaccctcaccatcctgctgggcattttcttcctctgctggggccccttcttcctgcatctcacactcatcgtcctctgccccgagcaccccacgtgcggctgcatcttcaagaacttcaacctctttctcgccctcatcatctgcaatgccatcatcgaccccctcatctacgccttccacagccaggagctccgcaggacgctcaaggaggtgctgacatgctcctggtga

SEQ ID NO: 840 - RNA, 954 nt, synthetic construct
  misc_feature 1..954: note = AHC11324
  source 1..954: mol_type = other RNA
atggctgtgcagggatcccagagaagacttctgggctccctcaactccacccccacagccatcccccagctggggctggctgccaaccagacaggagcccggtgcctggaggtgtccatctctgacgggctcttcctcagcctggggctggtgagcttggtggagaacgcgctggtggtggccaccatcgccaagaaccggaacctgcactcacccatgtactgcttcatctgctgcctggccttgtcggacctgctggtgagcgggagcaacgtgctggagacggccgtcatcctcctgctggaggccggtgcactggtggcccgggctgcggtgctgcagcagctggacaatgtcattgacgtgatcacctgcagctccatgctgtccagcctctgcttcctgggcgccatcgccgtggaccgctacatctccatcttctacgcactgcgctaccacagcatcgtgaccctgccgcgggcgcggcgagccgttgcggccatctgggtggccagtgtcgtcttcagcacgctcttcatcgcctactacgaccacgtggccgtcctgctgtgcctcgtggtcttcttcctggctatgctggtgctcatggccgtgctgtacgtccacatgctggcccgggcctgccagcacgcccagggcatcgcccggctccacaagaggcagcgcccggtccaccagggctttggccttaaaggcgctgtcaccctcaccatcctgctgggcattttcttcctctgctggggccccttcttcctgcatctcacactcatcgtcctctgccccgagcaccccacgtgcggctgcatcttcaagaacttcaacctctttctcgccctcatcatccgcaatgccatcatcgaccccctcatctacgccttccacagccaggagctccgcaggacgctcaaggaggtgctgacatgctcctggtga

SEQ ID NO: 841 - RNA, 954 nt, synthetic construct
  misc_feature 1..954: note = AHC09521
  source 1..954: mol_type = other RNA
atggctgtgcagggatcccagagaagacttctgggctccctcaactccacccccacagccatcccccagctggggctggctgccaaccagacaggagcccggtgcctggaggtgtccatctctgacgggctcttcctcagcctggggctggtgagcttggtggagaacgcgctggtggtggccaccatcgccaagaaccggaacctgcactcacccatgtactgcttcatctgctgcctggccttgtcggacctgctggtgagcgggagcaacgtgctggagacggccgtcatcctcctgctggaggccggtgcactggtggcccgggctgcggtgctgcagcagctggacaatgtcattgacgtgatcacctgcagctccatgctgtccagcctctgcttcctgggcgccatcgccgtggaccgctacatctccatcttctacgcactgcgctaccacagcatcgtgaccctgccgtgggcgcggcgagccgttgcggccatctgggtggccagtgtcgtcttcagcacgctcttcatcgcctactacgaccacgtggccgtcctgctgtgcctcgtggtcttcttcctggctatgctggtgctcatggccgtgctgtacgtccacatgctggcccgggcctgccagcacgcccagggcatcgcccggctccacaagaggcagcgcccggtccaccagggctttggccttaaaggcgctgtcaccctcaccatcctgctgggcattttcttcctctgctggggccccttcttcctgcatctcacactcatcgtcctctgccccgagcaccccacgtgcggctgcatcttcaagaacttcaacctctttctcgccctcatcatctgcaatgccatcatcgaccccctcatctacgccttccacagccaggagctccgcaggacgctcaaggaggtgctgacatgctcctggtga

SEQ ID NO: 842 - RNA, 954 nt, synthetic construct
  misc_feature 1..954: note = AHC11794
  source 1..954: mol_type = other RNA
atggctgtgcagggatcccagagaagacttctgggctccctcaactccacccccacagccatcccccagctggggctggctgccaaccagacaggagcccggtgcctggaggtgtccatctctgacgggctcttcctcagcctggggctggtgagcttggtggagaacgcgctggtggtggccaccatcgccaagaaccggaacctgcactcacccatgtactgcttcatctgctgcctggccttgtcggacctgctggtgagcgggagcaacgtgctggagacggccgtcatcctcctgctggaggccggtgcactggtggcccgggctgcggtgctgcagcagctggacaatgtcattgacgtgatcacctgcagctccatgctgtccagcctctgcttcctgggcgccatcgccgtggaccgctacatctccatcttctacgcactgcgctaccacagcatcgtgaccctgccgcgggcgcggcgagccgttgcggccatctgggtggccagtgtcgtcttcagcacgctcttcatcgcctactacgaccacgtggccgtcctgctgtgcctcgtggtcttcttcctggctatgctggtgctcatggccgtgctgtacgtccacatgctggcccgggcctgccagcacgcccagggcatcgcccggctccacaagaggcagcgcccggtccaccagggctttggccttaaaggcgctgtcaccctcaccatcctgctgggcattttcttcctctgctggggccccttcttcctgcatctcacactcatcgtcctctgccccgagcaccccgagtgcggctgcatcttcaagaacttcaacctctttctcgccctcatcatctgcaatgccatcatcgaccccctcatctacgccttccacagccaggagctccgcaggacgctcaaggaggtgctgacatgctcctggtga

SEQ ID NO: 843 - RNA, 954 nt, synthetic construct
  misc_feature 1..954: note = AHC10874
  source 1..954: mol_type = other RNA
atggctgtgcagggatcccagagaagacttctgggctccctcaactccacccccacagccatcccccagctggggctggctgccaaccagacaggagcccggtgcctggaggtgtccatctctgacgggctcttcctcagcctggggctggtgagcttggtggagaacgcgctggtggtggccaccatcgccaagaaccggaacctgcactcacccatgtactgcttcatctgctgcctggccttgtcggaactgctggtgagcgggagcaacgtgctggagacggccgtcatcctcctgctggaggccggtgcactggtggcccgggctgcggtgctgcagcagctggacaatgtcattgacgtgatcacctgcagctccatgctgtccagcctctgcttcctgggcgccatcgccgtggaccgctacatctccatcttctacgcactgcgctaccacagcatcgtgaccctgccgcgggcgcggcgagccgttgcggccatctgggtggccagtgtcgtcttcagcacgctcttcatcgcctactacgaccacgtggccgtcctgctgtgcctcgtggtcttcttcctggctatgctggtgctcatggccgtgctgtacgtccacatgctggcccgggcctgccagcacgcccagggcatcgcccggctccacaagaggcagcgcccggtccaccagggctttggccttaaaggcgctgtcaccctcaccatcctgctgggcattttcttcctctgctggggccccttcttcctgcatctcacactcatcgtcctctgccccgagcaccccacgtgcggctgcatcttcaagaacttcaacctctttctcgccctcatcatctgcaatgccatcatcgaccccctcatctacgccttccacagccaggagctccgcaggacgctcaaggaggtgctgacatgctcctggtga

SEQ ID NO: 844 - RNA, 954 nt, synthetic construct
  misc_feature 1..954: note = AHC09597
  source 1..954: mol_type = other RNA
atggctgtgcagggatcccagagaagacttctgggctccctcaactccacccccacagccatcccccagctggggctggctgccaaccagacaggagcccggtgcctggaggtgtccatctctgacgggctcttcctcagcctggggctggtgagcttggtggagaacgcgctggtggtggccaccatcgccaagaaccggaacctgcactcacccatgtactgcttcatctgctgcctggccttgtcggacctgctggtgagcgggagcaacgtgctggagacggccgtcatcctcctgctggaggccggtgcactggtggcccgggctgcggtgctgcagcagctggacaatgtcattgacgtgatcacctgcagctccatgctgtccagcctctgcttcctgggcgccatcgccgtggaccgctacatctccatcttctacgcactgtgctaccacagcatcgtgaccctgccgcgggcgcggcgagccgttgcggccatctgggtggccagtgtcgtcttcagcacgctcttcatcgcctactacgaccacgtggccgtcctgctgtgcctcgtggtcttcttcctggctatgctggtgctcatggccgtgctgtacgtccacatgctggcccgggcctgccagcacgcccagggcatcgcccggctccacaagaggcagcgcccggtccaccagggctttggccttaaaggcgctgtcaccctcaccatcctgctgggcattttcttcctctgctggggccccttcttcctgcatctcacactcatcgtcctctgccccgagcaccccacgtgcggctgcatcttcaagaacttcaacctctttctcgccctcatcatctgcaatgccatcatcgaccccctcatctacgccttccacagccaggagctccgcaggacgctcaaggaggtgctgacatgctcctggtga

SEQ ID NO: 845 - RNA, 1665 nt, synthetic construct
  misc_feature 1..1665: note = CCDS816.1
  source 1..1665: mol_type = other RNA
atgaccgcgccgggcgccgccgggcgctgccctcccacgacatggctgggctccctgctgttgttggtctgtctcctggcgagcaggagtatcaccgaggaggtgtcggagtactgtagccacatgattgggagtggacacctgcagtctctgcagcggctgattgacagtcagatggagacctcgtgccaaattacatttgagtttgtagaccaggaacagttgaaagatccagtgtgctaccttaagaaggcatttctcctggtacaagacataatggaggacaccatgcgcttcagagataacacccccaatgccatcgccattgtgcagctgcaggaactctctttgaggctgaagagctgcttcaccaaggattatgaagagcatgacaaggcctgcgtccgaactttctatgagacacctctccagttgctggagaaggtcaagaatgtctttaatgaaacaaagaatctccttgacaaggactggaatattttcagcaagaactgcaacaacagctttgctgaatgctccagccaagatgtggtgaccaagcctgattgcaactgcctgtaccccaaagccatccctagcagtgacccggcctctgtctcccctcatcagcccctcgccccctccatggcccctgtggctggcttgacctgggaggactctgagggaactgagggcagctccctcttgcctggtgagcagcccctgcacacagtggatccaggcagtgccaagcagcggccacccaggagcacctgccagagctttgagccgccagagaccccagttgtcaaggacagcaccatcggtggctcaccacagcctcgcccctctgtcggggccttcaaccccgggatggaggatattcttgactctgcaatgggcactaattgggtcccagaagaagcctctggagaggccagtgagattcccgtaccccaagggacagagctttccccctccaggccaggagggggcagcatgcagacagagcccgccagacccagcaacttcctctcagcatcttctccactccctgcatcagcaaagggccaacagccggcagatgtaactggtaccgccttgcccagggtgggccccgtgaggcccactggccaggactggaatcacaccccccagaagacagaccatccatctgccctgctcagagaccccccggagccaggctctcccaggatctcatcactgcgcccccagggcctcagcaacccctccaccctctctgctcagccacagctttccagaagccactcctcgggcagcgtgctgccccttggggagctggagggcaggaggagcaccagggatcggaggagccccgcagagccagaaggaggaccagcaagtgaaggggcagccaggcccctgccccgttttaactccgttcctttgactgacacaggccatgagaggcagtccgagggatccttcagcccgcagctccaggagtctgtcttccacctgctggtgcccagtgtcatcctggtcttgctggccgtcggaggcctcttgttctacaggtggaggcggcggagccatcaagagcctcagagagcggattctcccttggagcaaccagagggcagccccctgactcaggatgacagacaggtggaactgccagtgtag

SEQ ID NO: 846 - RNA, 1893 nt, synthetic construct
  misc_feature 1..1893: note = EAW85719
  source 1..1893: mol_type = other RNA
atggccttgccaacggctcgacccctgttggggtcctgtgggacccccgccctcggcagcctcctgttcctgctcttcagcctcggatgggtgcagccctcgaggaccctggctggagagacagggcaggaggctgcgcccctggacggagtcctggccaacccacctaacatttccagcctctcccctcgccaactccttggcttcccgtgtgcggaggtgtccggcctgagcacggagcgtgtccgggagctggctgtggccttggcacagaagaatgtcaagctctcaacagagcagctgcgctgtctggctcaccggctctctgagccccccgaggacctggacgccctcccattggacctgctgctattcctcaacccagatgcgttctcggggccccaggcctgcacccgtttcttctcccgcatcacgaaggccaatgtggacctgctcccgaggggggctcccgagcgacagcggctgctgcctgcggctctggcctgctggggtgtgcgggggtctctgctgagcgaggctgatgtgcgggctctgggaggcctggcttgcgacctgcctgggcgctttgtggccgagtcggccgaagtgctgctaccccggctggtgagctgcccgggacccctggaccaggaccagcaggaggcagccagggcggctctgcagggcgggggacccccctacggccccccgtcgacatggtctgtctccacgatggacgctctgcggggcctgctgcccgtgctgggccagcccatcatccgcagcatcccgcagggcatcgtggccgcgtggcggcaacgctcctctcgggacccatcctggcggcagcctgaacggaccatcctccggccgcggttccggcgggaagtggagaagacagcctgtccttcaggcaagaaggcccgcgagatagacgagagcctcatcttctacaagaagtgggagctggaagcctgcgtggatgcggccctgctggccacccagatggaccgcgtgaacgccatccccttcacctacgagcagctggacgtcctaaagcataaactggatgagctctacccacaaggttaccccgagtctgtgatccagcacctgggctacctcttcctcaagatgagccctgaggacattcgcaagtggaatgtgacgtccctggagaccctgaaggctttgcttgaagtcaacaaagggcacgaaatgagtcctcaggctcctcggcggcccctcccacaggtggccaccctgatcgaccgctttgtgaagggaaggggccagctagacaaagacaccctagacaccctgaccgccttctaccctgggtacctgtgctccctcagccccgaggagctgagctccgtgccccccagcagcatctgggcggtcaggccccaggacctggacacgtgtgacccaaggcagctggacgtcctctatcccaaggcccgccttgctttccagaacatgaacgggtccgaatacttcgtgaagatccagtccttcctgggtggggcccccacggaggatttgaaggcgctcagtcagcagaatgtgagcatggacttggccacgttcatgaagctgcggacggatgcggtgctgccgttgactgtggctgaggtgcagaaacttctgggaccccacgtggagggcctgaaggcggaggagcggcaccgcccggtgcgggactggatcctacggcagcggcaggacgacctggacacgctggggctggggctacagggcggcatccccaacggctacctggtcctagacctcagcatgcaagaggccctctcggggacgccctgcctcctaggacctggacctgttctcaccgtcctggcactgctcctagcctccaccctggcctga

SEQ ID NO: 847 - RNA, 1515 nt, synthetic construct
  misc_feature 1..1515: note = CCDS46865.1
  source 1..1515: mol_type = other RNA
atggaggcgcttagagttcagatgttcatgccatgctcctttgaaagcttgtatctcagttccgccgagcatcctggggcctccaagcctccgataagctcctccagtatgacatcacgcatcttgctacgccagcaactcatgcgtgagcagatgcaggagcaggagcgcagggagcagcagcagaagctgcaggcggcccagttcatgcaacagagagtgcccgtgagtcagacaccagccataaacgtcagtgtgcccaccacccttccctctgccacgcaggtgccgatggaagtccttaaggtgcagacccacctcgaaaaccccaccaagtaccacatacagcaagcccaacggcagcaggtaaagcagtacctttctaccactttagcaaataaacatgccaaccaagtcctgagcttgccatgtccaaaccagcctggcgatcatgtcatgccaccggtgccggggagcagcgcacccaacagccccatggctatgcttacgcttaactccaactgtgaaaaagagggattttataagtttgaagagcaaaacagggcagagagcgagtgcccaggcatgaacacacattcacgagcgtcctgtatgcagatggatgatgtaatcgatgacatcattagcctagaatcaagttataatgaggaaatcttgggcttgatggatcctgctttgcaaatggcaaatacgttgcctgtctcgggaaacttgattgatctttatggaaaccaaggtctgcccccaccaggcctcaccatcagcaactcctgtccagccaaccttcccaacataaaaagggagctcacagagtctgaagcaagagcactggccaaagagaggcagaaaaaggacaatcacaacctgattgaacgaagaagaagatttaacataaatgaccgcattaaagaactaggtactttgattcccaagtcaaatgatccagacatgcgctggaacaagggaaccatcttaaaagcatccgtggactatatccgaaagttgcaacgagaacagcaacgcgcaaaagaacttgaaaaccgacagaagaaactggagcacgccaaccggcatttgttgctcagaatacaggaacttgaaatgcaggctcgagctcatggactttcccttattccatccacgggtctctgctctccagatttggtgaatcggatcatcaagcaagaacccgttcttgagaactgcagccaagacctccttcagcatcatgcagacctaacctgtacaacaactctcgatctcacggatggcaccatcaccttcaacaacaacctcggaactgggactgaggccaaccaagcctatagtgtccccacaaaaatgggatccaaactggaagacatcctgatggacgacaccctttctcccgtcggtgtcactgatccactcctttcctcagtgtcccccggagcttccaaaacaagcagccggaggagcagtatgagcatggaagagacggagcacacttgttag

SEQ ID NO: 848 - RNA, 1260 nt, synthetic construct
  misc_feature 1..1260: note = CCDS2913.1
  source 1..1260: mol_type = other RNA
atgctggaaatgctagaatataatcactatcaggtgcagacccacctcgaaaaccccaccaagtaccacatacagcaagcccaacggcagcaggtaaagcagtacctttctaccactttagcaaataaacatgccaaccaagtcctgagcttgccatgtccaaaccagcctggcgatcatgtcatgccaccggtgccggggagcagcgcacccaacagccccatggctatgcttacgcttaactccaactgtgaaaaagagggattttataagtttgaagagcaaaacagggcagagagcgagtgcccaggcatgaacacacattcacgagcgtcctgtatgcagatggatgatgtaatcgatgacatcattagcctagaatcaagttataatgaggaaatcttgggcttgatggatcctgctttgcaaatggcaaatacgttgcctgtctcgggaaacttgattgatctttatggaaaccaaggtctgcccccaccaggcctcaccatcagcaactcctgtccagccaaccttcccaacataaaaagggagctcacagcgtgtatttttcccacagagtctgaagcaagagcactggccaaagagaggcagaaaaaggacaatcacaacctgattgaacgaagaagaagatttaacataaatgaccgcattaaagaactaggtactttgattcccaagtcaaatgatccagacatgcgctggaacaagggaaccatcttaaaagcatccgtggactatatccgaaagttgcaacgagaacagcaacgcgcaaaagaacttgaaaaccgacagaagaaactggagcacgccaaccggcatttgttgctcagaatacaggaacttgaaatgcaggctcgagctcatggactttcccttattccatccacgggtctctgctctccagatttggtgaatcggatcatcaagcaagaacccgttcttgagaactgcagccaagacctccttcagcatcatgcagacctaacctgtacaacaactctcgatctcacggatggcaccatcaccttcaacaacaacctcggaactgggactgaggccaaccaagcctatagtgtccccacaaaaatgggatccaaactggaagacatcctgatggacgacaccctttctcccgtcggtgtcactgatccactcctttcctcagtgtcccccggagcttccaaaacaagcagccggaggagcagtatgagcatggaagagacggagcacacttgttag

SEQ ID NO: 849 - RNA, 1581 nt, synthetic construct
  misc_feature 1..1581: note = XM_005264754
  source 1..1581: mol_type = other RNA
atgcagtccgaatcggggatcgtgccggatttcgaagtcggggaggagtttcatgaagagcccaaaacctattacgaactcaaaagtcaaccgctgaagagcagcagttccgccgagcatcctggggcctccaagcctccgataagctcctccagtatgacatcacgcatcttgctacgccagcaactcatgcgtgagcagatgcaggagcaggagcgcagggagcagcagcagaagctgcaggcggcccagttcatgcaacagagagtgcccgtgagtcagacaccagccataaacgtcagtgtgcccaccacccttccctctgccacgcaggtgccgatggaagtccttaaggtgcagacccacctcgaaaaccccaccaagtaccacatacagcaagcccaacggcagcaggtaaagcagtacctttctaccactttagcaaataaacatgccaaccaagtcctgagcttgccatgtccaaaccagcctggcgatcatgtcatgccaccggtgccggggagcagcgcacccaacagccccatggctatgcttacgcttaactccaactgtgaaaaagagggattttataagtttgaagagcaaaacagggcagagagcgagtgcccaggcatgaacacacattcacgagcgtcctgtatgcagatggatgatgtaatcgatgacatcattagcctagaatcaagttataatgaggaaatcttgggcttgatggatcctgctttgcaaatggcaaatacgttgcctgtctcgggaaacttgattgatctttatggaaaccaaggtctgcccccaccaggcctcaccatcagcaactcctgtccagccaaccttcccaacataaaaagggagctcacagcgtgtatttttcccacagagtctgaagcaagagcactggccaaagagaggcagaaaaaggacaatcacaacctgattgaacgaagaagaagatttaacataaatgaccgcattaaagaactaggtactttgattcccaagtcaaatgatccagacatgcgctggaacaagggaaccatcttaaaagcatccgtggactatatccgaaagttgcaacgagaacagcaacgcgcaaaagaacttgaaaaccgacagaagaaactggagcacgccaaccggcatttgttgctcagaatacaggaacttgaaatgcaggctcgagctcatggactttcccttattccatccacgggtctctgctctccagatttggtgaatcggatcatcaagcaagaacccgttcttgagaactgcagccaagacctccttcagcatcatgcagacctaacctgtacaacaactctcgatctcacggatggcaccatcaccttcaacaacaacctcggaactgggactgaggccaaccaagcctatagtgtccccacaaaaatgggatccaaactggaagacatcctgatggacgacaccctttctcccgtcggtgtcactgatccactcctttcctcagtgtcccccggagcttccaaaacaagcagccggaggagcagtatgagcatggaagagacggagcacacttgttag

SEQ ID NO: 850 - RNA, 1065 nt, synthetic construct
  misc_feature 1..1065: note = BAG52140
  source 1..1065: mol_type = other RNA
atggctccggccgcctggctccgcagcgcggccgcgcgcgccctcctgcccccgatgctgctgctgctgctccagccgccgccgctgctggcccgggctctgccgccggacgtccaccacctccatgccgagaggagggggccacagccctggcatgcagccctgcccagtagcccggcacctgcccctgccacgcaggaagccccccggcctgccagcagcctcaggcctccccgctgtggcgtgcccgacccatctgatgggctgagtgcccgcaaccgacagaagaggatccttcggttcccatggcagttggtgcaggagcaggtgcggcagacgatggcagaggccctaaaggtatggagcgatgtgacgccactcacctttactgaggtgcacgagggccgtgctgacatcatgatcgacttcgccaggtactggcatggggacgacctgccgtttgatgggcctgggggcatcctggcccatgccttcttccccaagactcaccgagaaggggatgtccacttcgactatgatgagacctggactatcggggatgaccagggcacagacctgctgcaggtggcagcccatgaatttggccacgtgctggggctgcagcacacaacagcagccaaggccctgatgtccgccttctacacctttcgctacccactgagtctcagcccagatgactgcaggggcgttcaacacctatatggccagccctggcccactgtcacctccaggaccccagccctgggcccccaggctgggatagacaccaatgagattgcaccgctggagccagacgccccgccagatgcctgtgaggcctcctttgacgcggtctccaccatccgaggcgagctctttttcttcaaagcgggctttgtgtggcgcctccgtgggggccagctgcagcccggctacccagcattggcctctcgccactggcagggactgcccagccctgtggacgctgccttcgaggatgcccagggccacatttggttcttccaagggactactggcgtttccaccccagcacccggcgtgtag

SEQ ID NO: 851 - RNA, 804 nt, synthetic construct
  misc_feature 1..804: note = AAV40839
  source 1..804: mol_type = other RNA
atgcgactcaccgtgctgtgtgctgtgtgcctgctgcctggcagcctggccctgccgctgcctcaggaggcgggaggcatgagtgagctacagtgggaacaggctcaggactatctcaagagattttatctctatgactcagaaacaaaaaatgccaacagtttagaagccaaactcaaggagatgcaaaaattctttggcctacctataactggaatgttaaactcccgcgtcatagaaataatgcagaagcccagatgtggagtgccagatgttgcagaatactcactatttccaaatagcccaaaatggacttccaaagtggtcacctacaggatcgtatcatatactcgagacttaccgcatattacagtggatcgattagtgtcaaaggctttaaacatgtggggcaaagagatccccctgcatttcaggaaagttgtatggggaactgctgacatcatgattggctttgcgcgaggagctcatggggactcctacccatttgatgggccaggaaacacgctggctcatgcctttgcgcctgggacaggtctcggaggagatgctcacttcgatgaggatgaacgctggacggatggtagcagtctagggattaacttcctgtatgctgcaactcatgaacttggccattctttgggtatgggacattcctctgatcctaatgcagtgatgtatccaacctatggaaatggagatccccaaaattttaaactttcccaggatgatattaaaggcattcagaaactatatggaaagagaagtaattcaagaaagaaatag

SEQ ID NO: 852 - RNA, 3768 nt, synthetic construct
  misc_feature 1..3768: note = J05582.1
  source 1..3768: mol_type = other RNA
atgacaccgggcacccagtctcctttcttcctgctgctgctcctcacagtgcttacagttgttacaggttctggtcatgcaagctctaccccaggtggagaaaaggagacttcggctacccagagaagttcagtgcccagctctactgagaagaatgctgtgagtatgaccagcagcgtactctccagccacagccccggttcaggctcctccaccactcagggacaggatgtcactctggccccggccacggaaccagcttcaggttcagctgccacctggggacaggatgtcacctcggtcccagtcaccaggccagccctgggctccaccaccccgccagcccacgatgtcacctcagccccggacaacaagccagccccgggctccaccgcccccccagcccacggtgtcacctcggccccggacaccaggccggccccgggctccaccgcccccccagcccacggtgtcacctcggccccggacaccaggccggccccgggctccaccgcccccccagcccacggtgtcacctcggccccggacaccaggccggccccgggctccaccgcccccccagcccacggtgtcacctcggccccggacaccaggccggccccgggctccaccgcccccccagcccacggtgtcacctcggccccggacaccaggccggccccgggctccaccgcccccccagcccacggtgtcacctcggccccggacaccaggccggccccgggctccaccgcccccccagcccacggtgtcacctcggccccggacaccaggccggccccgggctccaccgcccccccagcccacggtgtcacctcggccccggacaccaggccggccccgggctccaccgcccccccagcccacggtgtcacctcggccccggacaccaggccggccccgggctccaccgcccccccagcccacggtgtcacctcggccccggacaccaggccggccccgggctccaccgcccccccagcccacggtgtcacctcggccccggacaccaggccggccccgggctccaccgcccccccagcccacggtgtcacctcggccccggacaccaggccggccccgggctccaccgcccccccagcccacggtgtcacctcggccccggacaccaggccggccccgggctccaccgcccccccagcccacggtgtcacctcggccccggacaccaggccggccccgggctccaccgcccccccagcccacggtgtcacctcggccccggacaccaggccggccccgggctccaccgcccccccagcccacggtgtcacctcggccccggacaccaggccggccccgggctccaccgcccccccagcccacggtgtcacctcggccccggacaccaggccggccccgggctccaccgcccccccagcccacggtgtcacctcggccccggacaccaggccggccccgggctccaccgcccccccagcccacggtgtcacctcggccccggacaccaggccggccccgggctccaccgcccccccagcccacggtgtcacctcggccccggacaccaggccggccccgggctccaccgcccccccagcccacggtgtcacctcggccccggacaccaggccggccccgggctccaccgcccccccagcccacggtgtcacctcggccccggacaccaggccggccccgggctccaccgcccccccagcccacggtgtcacctcggccccggacaccaggccggccccgggctccaccgcccccccagcccacggtgtcacctcggccccggacaccaggccggccccgggctccaccgcccccccagcccacggtgtcacctcggccccggacaccaggccggccccgggctccaccgcccccccagcccacggtgtcacctcggccccggacaccaggccggccccgggctccaccgcccccccagcccacggtgtcacctcggccccggacaccaggccggccccgggctccaccgcccccccagcccacggtgtcacctcggccccggacaccaggccggccccgggctccaccgcccccccagcccacggtgtcacctcggccccggacaccaggccggccccgggctccaccgcccccccagcccacggtgtcacctcggccccggacaccaggccggccccgggctccaccgcccccccagcccacggtgtcacctcggccccggacaccaggccggccccgggctccaccgcccccccagcccacggtgtcacctcggccccggacaccaggccggccccgggctccaccgcccccccagcccacggtgtcacctcggccccggacaccaggccggccccgggctccaccgcccccccagcccacggtgtcacctcggccccggacaccaggccggccccgggctccaccgcccccccagcccacggtgtcacctcggccccggacaccaggccggccccgggctccaccgcccccccagcccacggtgtcacctcggccccggacaccaggccggccccgggctccaccgcccccccagcccacggtgtcacctcggccccggacaccaggccggccccgggctccaccgcccccccagcccacggtgtcacctcggccccggacaccaggccggccccgggctccaccgcccccccagcccacggtgtcacctcggccccggacaccaggccggccccgggctccaccgcccccccagcccacggtgtcacctcggccccggacaccaggccggccccgggctccaccgcccccccagcccatggtgtcacctcggccccggacaacaggcccgccttgggctccaccgcccctccagtccacaatgtcacctcggcctcaggctctgcatcaggctcagcttctactctggtgcacaacggcacctctgccagggctaccacaaccccagccagcaagagcactccattctcaattcccagccaccactctgatactcctaccacccttgccagccatagcaccaagactgatgccagtagcactcaccatagctcggtacctcctctcacctcctccaatcacagcacttctccccagttgtctactggggtctctttctttttcctgtcttttcacatttcaaacctccagtttaattcctctctggaagatcccagcaccgactactaccaagagctgcagagagacatttctgaaatgtttttgcagatttataaacaagggggttttctgggcctctccaatattaagttcaggccaggatctgtggtggtacaattgactctggccttccgagaaggtaccatcaatgtccacgacgtggagacacagttcaatcagtataaaacggaagcagcctctcgatataacctgacgatctcagacgtcagcgtgagtgatgtgccatttcctttctctgcccagtctggggctggggtgccaggctggggcatcgcgctgctggtgctggtctgtgttctggttgcgctggccattgtctatctcattgccttggctgtctgtcagtgccgccgaaagaactacgggcagctggacatctttccagcccgggatacctaccatcctatgagcgagtaccccacctaccacacccatgggcgctatgtgccccctagcagtaccgatcgtagcccctatgagaaggtttctgcaggtaacggtggcagcagcctctcttacacaaacccagcagtggcagccgcttctgccaacttgtag

SEQ ID NO: 853 - RNA, 2136 nt, synthetic construct
  misc_feature 1..2136: note = NM_032853
  source 1..2136: mol_type = other RNA
atgatggcggatgccaagtatgtcctctgccgatgggaaaagcgattatggcctgcgaaggttttggcccgaaccgcgacttcaacaaaaaataagagaagaaaggaatattttctagctgtgcaaatcctctctctagaggaaaaaattaaggtgaaaagcactgaagttgagatcctagagaagtctcaaattgaagccattgcttcctcgttagcctcacagaatgaggttcctgcggcacccctggaagaactggcctacagacggtcgcttcgcgtggctctggacgttctgagcgagggctcgatttggagtcaagaaagctctgcagggacaggtagagctgaccggtctctgcgagggaagcccatggagcatgtctcctcgccctgtgattcgaactcctcatctcttccccgcggagacgtgttgggcagttccagacctcacaggaggaggccatgtgtgcaacaaagcctgtcaagttcgttcacttgtgaaaaggaccccgagtgcaaagtggaccacaagaaggggctcaggaaaagtgaaaacccaagaggcccgttggtcctcccagctggaggtggtgcccaagatgagagtgggtccagaatccaccacaaaaattggactcttgcaagtaagaggggaggaaactcagcgcagaaggctagcttgtgcctgaatggatcttccctttcagaggacgacacggagagagacatggggagcaaaggaggcagctgggcagccccgtccttgccctccggggtcagggaggacgatccctgtgccaacgctgagggacacgaccccggtctgccgttgggcagcctcactgcgcccccagcccctgagccctcggcctgctcagagcctggagaatgccctgcgaaaaagaggccgcgcctggatggcagccaaaggccgcctgccgtgcagctggagcccatggcagcaggggccgcaccatcccccgggccggggccagggcccagagagtctgtgaccccgcgcagcaccgccaggctgggcccgcctccctcccacgcctctgcggatgcaaccagatgtcttccttgcccggattcccagaagctggagaaagagtgccagtcttccgaagagtccatggggtctaattccatgcgttctatcctggaggaagacgaggaagacgaggagccaccaagagtccttttataccacgaaccacgttcgtttgaagtaggaatgctagtctggcataaacataaaaaataccccttctggccagcagtggtcaaaagcgtcaggcagagagataagaaagcaagtgtgctatacatcgaaggacacatgaacccgaaaatgaaaggtttcacagtgtctcttaaaagtttaaagcactttgattgtaaagagaaacagacgcttctgaatcaagccagggaggacttcaaccaggacatcggctggtgtgtctccctcatcaccgactacagggtccggttaggctgcgggtcttttgctggctctttcctggaatattacgcggctgatataagctatcctgtccgaaaatccatccagcaggacgtcttggggaccaagcttcctcaactgagcaaggggagccccgaggagcccgtggtggggtgccccctggggcagaggcagccctgccggaaaatgctccccgaccgctcgcgggccgcccgggaccgggccaaccagaagctggtggagtacattgtgaaggccaagggcgcggagagccacctgcgggccatcctaaagagcaggaagccatctcgctggctgcagaccttcctgagctccagccagtacgtgacctgtgtggagacctacctggaggatgaggggcagctggacctggtggtgaagtacctgcagggcgtctaccaggaggtgggggccaaggtgctccagcgcaccaacggcgaccggatccggttcattctggacgtgcttctgcccgaggccatcatctgtgcgatctctgcggtggacgaggtggactacaagacggctgaggagaagtacatcaaggggccttcgctgagctaccgggaaaaagaaatatttgacaaccagctccttgaagagcggaaccggcgccgtcggtga

SEQ ID NO: 854 - RNA, 438 nt, synthetic construct
  misc_feature 1..438: note = AAD44697
  source 1..438: mol_type = other RNA
atgactgtccacaacctgtacctgtttgaccggaatggagtgtgtctgcactacagcgaatggcaccgcaagaagcaagcagggattcccaaggaggaggagtataagctgatgtacgggatgctcttctctatccgctcgtttgtcagcaagatgtccccgctagacatgaaggatggcttcctggccttccaaactagccgttacaaactccattactacgagacgcccactgggatcaaagttgtcatgaatactgacttgggcgtgggacccatccgagatgtgctgcaccacatctacagtgcgctgtatgtggagctggtggtgaagaatcccctgtgcccgctgggccaaactgtgcaaagtgagctctttcgctcccgactggactcctatgttcgctctctgcccttcttctccgcccgggctggctga

SEQ ID NO: 855 - RNA, 1395 nt, synthetic construct
  misc_feature 1..1395: note = AAH02712
  source 1..1395: mol_type = other RNA
atgccgagctgctccacgtccaccatgccgggcatgatctgcaagaacccagacctcgagtttgactcgctacagccctgcttctacccggacgaagatgacttctacttcggcggccccgactcgacccccccgggggaggacatctggaagaagtttgagctgctgcccacgcccccgctgtcgcccagccgtggcttcgcggagcacagctccgagcccccgagctgggtcacggagatgctgcttgagaacgagctgtggggcagcccggccgaggaggacgcgttcggcctggggggactgggtggcctcacccccaacccggtcatcctccaggactgcatgtggagcggcttctccgcccgcgagaagctggagcgcgccgtgagcgagaagctgcagcacggccgcgggccgccaaccgccggttccaccgcccagtccccgggagccggcgccgccagccctgcgggtcgcgggcacggcggggctgcgggagccggccgcgccggggccgccctgcccgccgagctcgcccacccggccgccgagtgcgtggatcccgccgtggtcttcccctttcccgtgaacaagcgcgagccagcgcccgtgcccgcagccccggccagtgccccggcggcgggccctgcggtcgcctcgggggcgggtattgccgccccagccggggccccgggggtcgcccctccgcgcccaggcggccgccagaccagcggcggcgaccacaaggccctcagtacctccggagaggacaccctgagcgattcagatgatgaagatgatgaagaggaagatgaagaggaagaaatcgacgtggtcactgtggagaagcggcgttcctcctccaacaccaaggctgtcaccacattcaccatcactgtgcgtcccaagaacgcagccctgggtcccgggagggctcagtccagcgagctgatcctcaaacgatgccttcccatccaccagcagcacaactatgccgccccctctccctacgtggagagtgaggatgcacccccacagaagaagataaagagcgaggcgtccccacgtccgctcaagagtgtcatccccccaaaggctaagagcttgagcccccgaaactctgactcggaggacagtgagcgtcgcagaaaccacaacatcctggagcgccagcgccgcaacgaccttcggtccagctttctcacgctcagggaccacgtgccggagttggtaaagaatgagaaggccgccaaggtggtcattttgaaaaaggccactgagtatgtccactccctccaggccgaggagcaccagcttttgctggaaaaggaaaaattgcaggcaagacagcagcagttgctaaagaaaattgaacacgctcggacttgctag

SEQ ID NO: 856 - RNA, 3132 nt, synthetic construct
  misc_feature 1..3132: note = AAC78645
  source 1..3132: mol_type = other RNA
atgcctctcctggaaggttctgtgggggtggaggatcttgtcctcctggaacccttggtggaggagtcactgctcaagaatcttcagcttcgctatgaaaacaaggagatttatacctacattgggaatgtggtgatctcagtgaatccctatcaacagcttcccatctatgggccagagttcattgccaaatatcaagactatactttctatgagctgaagccccatatctacgcattggcaaatgtggcgtaccagtcactgagggacagggaccgagaccagtgtatcctcatcacaggcgagagtggatcagggaagactgaggccagcaagctggtgatgtcttatgtggctgccgtctgtgggaaaggagagcaggtgaactctgtgaaggagcagctgctacagtctaacccagtgctggaggcttttggcaatgccaagaccattcgcaacaacaattcctcccgatttggaaaatacatggatattgaatttgacttcaagggatcccccctcggtggtgtcatcacaaactatctgcttgagaaatcccgattagtgaagcagctcaaaggagaaaggaacttccacatcttctatcagctgctggctggagcagatgaacagctgctgaaggccctgaagcttgagcgggatacaactggctatgcctatctgaatcatgaagtatccagagtggatggcatggacgacgcctccagcttcagggctgtacagagtgcaatggcagtgattgggttctcggaggaggagattcgacaagtgctagaggtgacatccatggtgctaaagctggggaacgtgttggtggctgatgagttccaggccagtgggataccagcaagtggcatccgtgatgggagaggtgttcgggagattggggagatggtgggcttgaattcagaagaagtagagagagctttgtgctcgaggaccatggaaacagccaaggaaaaggtggtcactgcactgaatgttatgcaggctcagtatgctcgggacgccctggctaagaacatctacagccgcctctttgactggatagtgaatcgaatcaatgagagcatcaaggtgggcatcggggaaaagaagaaggtaatgggagtccttgatatctacggttttgagatattagaggataatagctttgagcaatttgtgatcaactactgcaatgagaagctgcagcaggtgttcatagagatgaccctgaaagaagagcaagaggaatataagagagaaggcataccgtggacaaaggtggactactttgataatggcatcatttgtaagctcattgagcataatcagcgaggtatcctggccatgttggatgaggagtgcctgcggcctggggtggtcagtgactccactttcctagcaaagctgaaccagctcttctccaagcatggccactacgagagcaaagtcacccagaatgcccagcgtcagtatgaccacaccatgggcctcagctgcttccgcatctgccactatgcgggcaaggtgacatacaacgtgaccagctttattgacaagaataatgacctactcttccgagacctgttgcaggccatgtggaaggcccagcaccccctccttcggtccttgtttcctgagggcaatcctaagcaggcatctctcaaacgccccccgactgctggggcccagttcaagagttctgtggccatcctcatgaagaatctgtattccaagagccccaactacatcaggtgcataaagcccaatgagcatcagcagcgaggtcagttctcttcagacctggtggcaacccaggctcggtacctgggactgctggagaacgtacgggtgcgacgggcaggctatgcccaccgccagggttatgggcccttcctggaaaggtaccgattgctgagccggagcacctggcctcactggaatgggggagaccgggaaggtgttgagaaggtcctgggggagctgagcatgtcctcgggggagctggcctttggcaagacaaagatcttcattagaagccccaagactcttttctacctcgaagaacagaggcgcctgagactccagcagctggccacactcatacagaagatttaccgaggctggcgctgccgcacccactaccaactgatgcgaaagagtcagatcctcatctcctcttggtttcggggaaacatgcaaaagaaatgctatgggaagataaaggcatccgtgttattgatccaggcttttgtgagagggtggaaggcccgaaagaattatcgcaaatatttccggtcagaggctgccctcaccttggcagatttcatctacaagagcatggtacagaaattcctactggggctgaagaacaatttgccatccacaaacgtcttagacaagacatggccagccgccccctacaagtgcctcagcacagcaaatcaggagctgcagcagctcttctaccagtggaagtgcaagaggttccgggatcagctgtccccgaagcaggtagagatcctgagggaaaagctctgtgccagtgaactgttcaagggcaagaaggcttcatatccccagagtgtccccattccattctgtggtgactacattgggctgcaagggaaccccaagctgcagaagctgaaaggcggggaggaggggcctgttctgatggcagaggccgtgaagaaggtcaatcgtggcaatggcaagacttcttctcggattctcctcctgaccaagggccatgtgattctcacagacaccaagaagtcccaggccaaaattgtcattgggctagacaatgtggctggggtgtcagtcaccagcctcaaggatgggctctttagcttgcatctgagtgagatgtcatcggtgggctccaagggggacttcctgctggtcagcgagcatgtgattgaactgctgaccaaaatgtaccgggctgtgctggatgccacgcagaggcagcttacagtcaccgtgactgagaagttctcagtgaggttcaaggagaacagtgtggctgtcaaggtcgtccagggccctgcaggtggtgacaacagcaagctacgctacaaaaaaaaggggagtcattgcttggaggtgactgtgcagtga

SEQ ID NO: 857 - RNA, 3411 nt, synthetic construct
  misc_feature 1..3411: note = AAH53558
  source 1..3411: mol_type = other RNA
atggccaaaatggaggtgaaaacctcacttctggacaatatgattggagttggggatatggttcttttagaacctctcaatgaggagaccttcatcaacaacctcaagaagcgctttgaccacagtgaaatatacacttacattggaagtgtggttatatctgttaacccatatcggtctttacccatttattcaccagagaaagtggaagaatacaggaacagaaatttttatgaactgagccctcacatctttgccctttcggatgaagcatacagatccctacgagatcaagataaggaccaatgtattctcattactggggaaagtggagcaggaaaaacagaggccagtaagcttgtcatgtcctatgtggcagctgtttgtggaaaaggagcagaagttaatcaagttaaagaacagcttttacagtccaacccggtcctggaagcttttggaaatgccaaaactgtaaggaatgacaactcctctagatttggcaaatatatggatattgaatttgactttaaaggcgatccactaggaggagtaataagtaactatcttttagagaaatctcgggttgttaaacagccaagaggtgaaagaaacttccatgtgttctatcagctgctctctggtgcctctgaagagctcctcaataaacttaagcttgagagggatttcagcaggtataactacctgagtctggattcggccaaagtgaatggagtggatgatgcagcaaattttagaaccgtgcggaatgccatgcagattgtgggctttatggatcatgaagctgagtctgtcttggcggtggtggcagcagtgttgaaactggggaacattgagttcaagcccgaatctcgagtgaatggtctagatgaaagcaaaatcaaagataaaaatgagttaaaagaaatttgtgaattgaccggcattgatcaatcagttctagaacgagcattcagtttccgaacagttgaggccaaacaggagaaagtttcaactacactgaatgtggctcaggcttattatgcccgtgatgctctggctaaaaacctctacagcaggttgttttcatggttggtaaatcgaatcaatgaaagcattaaggcacaaacaaaagtgagaaagaaggtcatgggtgttctggacatttatggctttgagattttcgaggacaacagctttgagcagttcattattaattattgtaacgaaaagctgcaacaaatcttcattgaacttactcttaaagaagagcaggaggagtatatacgggaggatatagaatggactcacattgactacttcaataatgctatcatttgtgacctaatagaaaataacacaaatggaatcctggccatgctggatgaagagtgcctcagacctggcacagtcactgatgagaccttcttagaaaagctgaaccaagtatgtgccacccaccagcattttgaaagcaggatgagcaagtgctctcggttcctcaatgacacgtctctgcctcacagctgcttcaggatccagcattatgctggaaaggtgctgtaccaggtggaaggattcgttgacaaaaacaatgaccttctctatcgagacctgtcccaagccatgtggaaggccagccatgccctcatcaagtctttgttccccgaagggaatcccgccaagatcaacctgaaaaggcctcctacagcaggctcacagttcaaggcatccgtggccactctgatgaaaaacctacagaccaagaacccaaactatattaggtgtatcaaaccgaatgataaaaaagcagcacacatcttcaacgaggctctagtgtgtcatcagatcaggtacctggggcttttggagaacgtccgagtgcggagggcaggctacgccttcaggcaggcctatgaaccttgcctagaaagatacaaaatgctttgtaaacaaacatggcctcattggaaaggaccagccaggtctggtgtggaggtcctatttaatgaattagaaattcccgtggaagaatactcctttggtagatcaaagatattcatccgaaacccaagaacattattcaaattagaagacctgaggaagcaacgcctggaggacttggccactctcattcagaagatatatcgggggtggaaatgccgcacacacttcctgctaatgaaaaaaagccaaattgtgattgccgcctggtacaggagatatgcgcaacaaaagaggtaccagcagacaaagagttccgccttagtaattcagtcttatatccggggttggaaggctcgaaaaattctgcgggaactgaagcatcaaaagcgctgtaaggaagcagtcacgaccattgctgcatattggcatgggacccaggcacgaagggaactgagacggctgaaggaggaggctaggaataaacatgctattgcagttatttgggcttactggcttggatctaaggctcgaagggaattgaaacgcttgaaggaggaggctaggcgtaagcatgcagttgctgtcatttgggcttactggcttggactgaaggtacgtagagaatacaggaaattcttcagagccaatgctggaaagaaaatctatgagtttacgcttcagagaattgtgcaaaaatacttcttggaaatgaaaaataagatgccttccttatctccaatagacaagaattggccctcaagaccttacttattcttggattctactcacaaggagctaaaaaggattttccacttgtggaggtgtaaaaaatacagggaccaattcacagaccagcagaaacttatttatgaagagaaactagaagccagtgaactcttcaaagacaagaaggctttatacccatctagtgttgggcaaccattccaaggggcttacctggaaatcaacaagaaccccaagtataagaaactcaaagatgccattgaagaaaagatcatcattgctgaagtcgtgaacaaaattaaccgtgctaatgggaagagtacatctcggattttcctcttaacaaacaataatctccttcttgctgaccaaaagtctggacaaatcaagtcagaggttccactggtggatgtgaccaaggtatcaatgagctcacaaaatgatggcttcttcgccgtccacctcaaagagggctcagaagcagctagtaaaggagactttctcttcagcagtgatcacctgattgaaatggccaccaagctctatcgcacaactctcagccaaaccaaacagaagctcaatattgagatttccgatgagttcctggtacagttcagacaggacaaagtatgtgtgaagtttattcagggaaaccagaaaaatgggagtgtcccaacatgtaaacgaaaaaacaaccgtctccttgaagttgctgtcccttaa

SEQ ID NO: 858 - RNA, 3192 nt, synthetic construct
  misc_feature 1..3192: note = CCDS42226.1
  source 1..3192: mol_type = other RNA
atggcgctgcaagtggagctggtacccaccggggagatcatccgcgtggttcatccccacaggccctgcaagcttgccctgggcagtgacggggttcgggtgaccatggagagtgcgctcaccgcccgtgaccgggtgggggtgcaggatttcgtgctgctggagaacttcaccagcgaggccgccttcatcgagaacctgcggcggcgatttcgggagaatctcatctacacctacattggccccgtcctggtctctgtcaatccctaccgggacctgcagatctacagccggcagcatatggagcgttaccgtggcgtcagcttctatgaagtgccccctcacctgtttgccgtggcggacactgtgtaccgagcactgcgcacggagcgtcgggaccaggctgtgatgatctctggggagagcggggcaggcaagaccgaggccaccaagaggctgctgcagttctatgcagagacctgcccagcccccgagcgcggaggtgccgtgcgggaccggctgctacagagcaacccggtgctggaggcctttggaaatgccaagaccctccggaacgataactccagcaggttcgggaagtacatggatgtgcagtttgacttcaagggtgcccccgtgggtggccacatcctcagttacctcctggaaaagtcacgagtggtgcaccagaatcatggggagcggaacttccacatcttctaccagctgctggaggggggcgaggaggagactcttcgcaggctgggcttggaacggaacccccagagctacctgtacctggtgaagggccagtgtgccaaagtctcctccatcaacgacaagagtgactggaaggtcgtcaggaaggctctgacagtcattgatttcaccgaggatgaagtggaggacctgctgagcatcgtggccagcgtccttcatttgggcaacatccactttgctgccaacgaggagagcaatgcccaggtcaccaccgagaaccagctcaagtatctgaccaggctcctcagcgtggaaggctcgacgctgcgagaagccctgacacacaggaagatcatcgccaagggggaggagctcctgagcccgctgaacctggagcaggccgcgtacgcacgagacgccctcgccaaggctgtgtacagccgcacttttacctggctcgtcgggaagatcaacaggtcgctggcctccaaggacgtggagagccccagctggcggagcaccacggttctcgggctcctggatatttatggctttgaagtgtttcagcataacagctttgagcagttctgcatcaattactgcaacgagaagctgcagcagctcttcatcgagctcacgctcaagtcggagcaggaggagtacgaggcagagggcatcgcgtgggagcccgtccagtatttcaacaacaaaatcatctgtgatctggtggaggagaagtttaagggcatcatctcgattttggatgaggagtgtctgcgccccggggaggccacagacctgaccttcctggagaagctggaggatactgtcaagcaccatccacacttcctgacgcacaagctggctgaccagcggaccaggaaatctctgggccgaggggaattccgccttctgcactatgcgggggaggtgacctacagcgtgaccgggtttctggacaaaaacaatgaccttctcttccggaaccttaaggagaccatgtgtagctcaaagaatcccattatgagccagtgctttgaccggagcgagctcagtgacaagaagcggccagagacggtcgccacccagttcaagatgagcctcctgcagctggtggagatcctgcagtctaaggagcccgcctacgtccgctgcatcaaacccaatgatgccaaacagcccggccgctttgacgaggtgctgatccgccaccaggtgaagtacctggggctgttggaaaacctgcgcgtgcgcagagccggctttgcctatcgccgcaaatacgaagctttcctgcaaaggtacaagtcactgtgcccagagacgtggcccacgtgggcaggacggccgcaggatggggtggctgtgctggtccgacacctgggctacaagccagaagagtacaagatgggcaggaccaagatcttcatccgcttccccaagaccctgtttgccacagaggatgccctggaggtccggcggcagagcctggccacaaagatccaagctgcctggaggggctttcactggcggcagaaattcctccgggtgaagagatcagccatctgcatccagtcgtggtggcgtggaacactgggccggaggaaggcagccaagaggaagtgggcggcacagaccatccggcggctcatccgaggcttcgtcctgcgccacgccccccgctgccccgagaacgccttcttcctggaccatgtgcgcacctcttttttgctaaacctgaggcggcagctgccccagaatgtcctggacacctcgtggcccacgcccccacctgccctgcgtgaggcctcagagcttctgcgggagttgtgcataaagaacatggtgtggaaatactgccggagtatcagccctgagtggaagcagcagctgcagcagaaggccgtggctagtgagatcttcaagggcaagaaggataattaccctcagagtgtacccaggctcttcatcagcactcggcttggtacagatgagatcagcccccgagtgctgcaggccttgggctctgagcccattcagtatgcggtgcctgttgtgaaatacgaccgcaagggctacaagcctcgctcccggcagctgctgctcacgcccaacgccgtcgtcatcgtggaggacgccaaagtcaagcagaggattgattacgccaacctgaccggaatctctgtcagcagcctgagcgacagtctttttgtgcttcatgtacagcgtgcggacaataagcaaaagggagatgtggtgctgcagagtgaccacgtgattgagacgctgaccaagacagccctcagtgccaaccgcgtgaacagcatcaacatcaaccagggcagcatcacgtttgcagggggccccggcagggatggcaccattgacttcacacccggctcggagctgctcatcaccaaggccaagaacgggcacctggctgtggtcgccccacggctgaattctcggtga

SEQ ID NO: 859 - RNA, 3021 nt, synthetic construct
  misc_feature 1..3021: note = AAI46764
  source 1..3021: mol_type = other RNA
atggcggagcaggagagcctggaattcggcaaggcagacttcgtgctgatggacaccgtctccatgcccgagttcatggccaacctcaggctcagatttgaaaaagggcgcatctatacgttcattggagaagtcgtcgtttctgtgaacccttacaagttgttgaacatctatggaagagacacaattgagcagtataaaggccgtgagctgtatgagagaccgcctcacctttttgctattgcggatgctgcttacaaggctatgaagaggcgatcaaaagacacttgtattgtgatatcaggggaaagtggagctggtaaaacggaagccagtaagtacattatgcagtatattgcggccatcaccaaccccagtcagagagcagaggttgaaagagtgaagaatatgttgcttaagtccaactgtgttttggaagcttttggaaatgccaaaaccaaccgtaatgacaactcaagcaggtttggaaaatacatggatatcaactttgacttcaagggtgaccctattggtgggcatatcaataactacttactagaaaagtctcgagtgattgtgcaacagccaggagaaagaagctttcattctttctatcagctactccaaggaggttcagaacaaatgctacgctctctacatctccagaaatccctttcatcctacaactatattcatgtgggagctcaattaaagtcttctatcaatgatgctgccgaattcagagttgttgctgatgccatgaaagtcattggcttcaaacctgaggagatccaaacagtgtataagattttggctgctattctgcacttgggaaatttaaaatttgtagtagatggtgacacgcctcttattgagaatggcaaagtagtatctatcatagcagaattgctctctactaagacagatatggttgagaaagcccttctttaccggactgtggccacaggccgtgacatcattgacaagcagcacacagaacaagaggccagctacggcagagacgcctttgccaaggcaatatatgagcgccttttttgttggatcgttactcgcatcaatgatattattgaggtcaagaactatgacaccacaatccatgggaaaaacactgttattggtgtcttggatatctatggctttgaaatcttcgacaacaacagttttgaacaattctgtatcaattactgcaatgagaaactgcagcagctatttattcagctggttctgaagcaagaacaagaggaataccagcgggaagggatcccctggaaacatattgactacttcaacaatcagatcattgttgacctcgtggagcaacagcacaaagggatcattgcaatccttgatgatgcttgcatgaatgtcggcaaagtcaccgatgaaatgtttcttgaagcacttaacagtaaattgggcaaacacgcccatttttccagccgaaagctctgtgcctcagacaaaattctggagtttgatcgagattttcgaattcgacattatgcaggcgatgtagtctattctgtcattggttttattgacaaaaataaagatactttatttcaagatttcaagcgccttatgtataacagttcaaatcctgtgctcaagaatatgtggcctgaaggcaaactgagcattacagaggtgaccaagcgacctctgactgctgctaccttgtttaagaattctatgattgctctagtagacaaccttgcatcaaaggaaccatattacgttcgttgcatcaaacccaatgacaagaaatctccacagatatttgatgatgaacgctgccggcaccaagtagaatatcttggactactggaaaatgtgagagtgcgtcgggcaggatttgccttccgccagacatacgagaagtttcttcacaggtataagatgatctctgaattcacctggcccaaccatgaccttccttcagacaaagaggctgtcaagaaactaattgaacggtgtggttttcaggatgatgtagcttatgggaagaccaaaattttcattcgaacaccccgaacattgtttaccttggaagaactccgtgcccagatgctcataaggattgtcctctttctacaaaaggtgtggcggggcaccctggcccgcatgcggtacaaaagaaccaaggcagctctgacaataatcaggtactaccggcgctacaaagtgaagtcgtacatccacgaggtggccagacgcttccatggcgtcaagaccatgcgagactacgggaagcacgtgaagtggccaagccctcctaaagttcttcgccgttttgaggaggccctgcagacgattttcaatagatggagagcatcccagctcatcaagagcattccggcctcagacctgccccaggtcagggcaaaggttgcagccgtggaaatgttgaagggtcaaagggctgacctcgggctccagagggcctgggagggcaactatcttgcttcaaagccagatacacctcagacctcaggcacttttgtccctgttgctaatgaattgaaacggaaggacaaatacatgaatgtcctcttttcctgtcacgtccgtaaggtaaatcgatttagtaaggtggaagacagagcaatttttgtcactgaccgtcacctgtataaaatggatcccactaaacagtacaaggtgatgaagactatccctctatacaatttgactggtctgagtgtctccaatggaaaggaccaacttgtagtgttccatacgaaagacaacaaagacctcattgtctgcctcttcagcaaacagccaacccatgagagtcgaattggagaacttgttggagtgctggtgaatcatttcaagagtgagaagcgccaccttcaagtgaacgtcaccaacccagtacagtgcagcctgcacgggaagaagtgcaccgtctccgtggagacgcggctcaaccagccccagcccgacttcaccaagaatcgctcgggcttcatcctcagcgtgcccgggaactga

SEQ ID NO: 860 - RNA, 3327 nt, synthetic construct
  misc_feature 1..3327: note = CCDS32254.1
  source 1..3327: mol_type = other RNA
atgggaagcaaaggtgtctaccagtaccactggcaaagccacaatgtcaagcacagtggtgtggacgacatggtgctactgtccaagatcacagagaactccatcgtggagaatctgaagaagagatacatggatgactacatttttacatatataggatctgtattaatctcagtcaaccctttcaagcagatgccatattttggggaaaaggaaattgaaatgtaccaaggagcggcacagtatgaaaacccaccacatatctatgcccttgcagataatatgtacagaaacatgatcattgacagagagaaccagtgcgtcattatcagtggtgaaagtggtgctggaaaaacagtggctgccaaatatatcatgagctacatctccagagtgtctggaggagggaccaaagtccagcacgtgaaggacattatcctgcagtccaacccgctgctggaggccttcgggaacgccaagaccgtccggaacaacaactccagccgatttggaaaatactttgaaatccagttcagtccaggtggggaaccagatggtggaaagatctccaacttccttctggaaaaatctagggtggtgatgaggaacccaggagagcggagttttcacatattttaccagctcatcgagggcgcctctgcagagcagaaacacagccttggcatcaccagcatggactattattactacctgagcctctcgggctcatacaaggttgatgacattgacgacaggcgggagtttcaggaaactctgcacgccatgaatgtgattgggatctttgcagaagagcaaacgctggtgttgcagatagtggcgggtattctccacctgggaaacatcagcttcaaagaagttggcaactacgcggctgtggagagtgaagagtttttagcttttcctgcatatctgctagggataaaccaggaccggttgaaagaaaagctaacaagccggcagatggatagcaagtggggaggcaaatccgaatccatccacgtgaccctcaacgtagagcaggcctgttacacccgggatgcgctcgccaaggccctgcacgcccgggtctttgatttcttggtagattccatcaataaagccatggagaaagaccatgaagaatacaacattggcgtcctagacatctatggctttgaaatattccagaaaaatggctttgaacagttttgtatcaattttgttaatgaaaaactgcagcagatttttattgaactgacattaaaggcagaacaggaagaatatgttcaagagggaataagatggacacccattgagtactttaataataaaatcgtatgtgacctcatagagaacaaagtgaaccctcctggcatcatgagcatcctggatgacgtgtgcgccacgatgcatgcggtgggtgagggggcagatcagacgctgctccagaaacttcagatgcagattgggagtcatgagcacttcaacagttggaaccaaggcttcatcattcatcattatgctgggaaggtatcctatgacatggatggcttttgtgaaaggaaccgggatgtgctttttatggatctcatcgagcttatgcagagcagcgagctgcctttcataaagtctttatttccggaaaatctgcaggctgacaagaaagggcgcccaactactgccggaagcaaaataaagaaacaagccaatgaccttgtgagcaccctgatgaaatgtacgccccactacattcgctgcatcaagccaaacgaaaccaagaagcccagagactgggaggaaagcagggtaaagcatcaagtcgaatatttgggtctgaaagagaacattcgagtgagaagagctggctatgcctatcggcgcatcttccaaaaattcctacagaggtatgccattctgaccaaagccacctggccttcttggcagggagaggagaagcaaggcgtcctgcacctgctgcagtcggtcaacatggacagcgaccagttccagctggggaggagtaaagtgttcatcaaagcccccgagtctctatttcttttagaagagatgagagagagaaagtatgatgggtatgctcgagtgatacagaaatcatggaggaaattcgtggcccggaagaaatacgttcaaatgagagaagaagcctcagacctcttattgaacaagaaggagagaaggagaaacagtattaacaggaactttataggggattatattgggatggaagagcacccagaactccagcagttcgtgggcaagagggagaagattgatttcgcagacacagtcaccaagtatgacaggaggttcaagggtgtaaagcgagacctgctccttaccccaaagtgcttgtacttaatcggacgagaaaaagtcaaacagggcccagacaagggcctggtgaaagaagtcctgaagcggaaaatcgagatagaacggatcttgtctgtgtccctcagtactatgcaggatgacatttttattctccatgagcaagagtatgacagtttgcttgaatctgtcttcaaaactgaattcctaagcctcttagcaaagcgttacgaggagaagacccagaagcaactacctctgaaattcagcaatacgcttgaactgaagttgaaaaaggaaaactggggcccctggagtgcagggggctcccggcaagtgcagttccaccaagggtttggggacctggctgtcctcaagcccagtaacaaagtgctgcaggtcagcatcggacctggactgcccaagaactcccgtcctaccagaaggaacactacccaaaatacaggttattccagtgggactcaaaatgccaactacccagtgagagctgcccctcctcccccaggataccatcagaacggagtcatcagaaaccagtatgtgccatatccccatgctcctggaagccagaggtccaatcagaaaagcctgtacacctccatggcccgcccgcccttgcctcggcagcagtctaccagttcagaccgagtgtcacagacgccagagagcctggatttcctcaaggtcccggaccagggagctgcaggggtcaggagacaaacaaccagtcggcctcccccagcagggggcagacccaagccccagcccaagcccaagcctcaggtgccacagtgcaaggctttgtatgcctatgacgctcaggacacagacgaactcagctttaatgccaatgacattattgatattatcaaagaagatccttctggctggtggacgggtcgactacgaggcaagcagggcctgttccccaacaactatgtgaccaagatctga

SEQ ID NO: 861 - RNA, 3297 nt, synthetic construct
  misc_feature 1..3297: note = AAH28071
  source 1..3297: mol_type = other RNA
atgggcagcaaggagcgcttccactggcagagccacaacgtgaagcagagcggcgtggatgacatggtgcttcttccccagatcaccgaagacgccattgccgccaacctccggaagcgcttcatggacgactacatcttcacctacatcggctctgtgctcatctctgtaaaccccttcaagcagatgccctacttcaccgaccgtgagatcgacctctatcagggcgcggcccagtatgagaatcccccgcacatctacgccctcacggacaacatgtaccggaacatgcttatcgactgtgagaaccagtgtgtcatcattagtggagagagtggagctgggaagacagtggcagccaaatatatcatgggctacatctccaaggtgtctggcggaggcgagaaggtccagcacgtcaaagatatcatcctgcagtccaacccgctgctcgaggccttcggcaacgccaagactgtgcgcaacaacaattccagccgctttggcaagtactttgagatccagttcagccgaggtggggagccagatgggggcaagatctccaacttcttgctggagaagtcccgcgtggtcatgcaaaatgaaaatgagaggaacttccacatctactaccagctgctggaaggggcctcccaggagcaaaggcagaacctgggcctcatgacaccggactactattactacctcaaccaatcggacacctaccaggtggacggcacggacgacagaagcgactttggtgagactctgagtgctatgcaggttattgggatcccgcccagcatccagcagctggtcctgcagctcgtggcggggatcttgcacctggggaacatcagtttctgtgaagacgggaattacgcccgagtggagagtgtggacctcctggcctttcccgcctacctgctgggcattgacagcgggcgactgcaggagaagctgaccagccgcaagatggacagccgctggggcgggcgcagcgagtccatcaatgtgaccctcaacgtggagcaggcagcctacacccgtgatgccctggccaaggggctctatgcccgcctcttcgacttcctcgtggaggccatcaaccgtgctatgcagaaaccccaggaagagtacagcatcggtgtgctggacatttacggcttcgagatcttccagaaaaatggcttcgagcagttttgcatcaacttcgtcaatgagaagctgcagcaaatctttatcgaacttaccctgaaggccgagcaggaggagtatgtgcaggaaggcatccgctggactccaatccagtacttcaacaacaaggtcgtctgtgacctcatcgaaaacaagctgagccccccaggcatcatgagcgtcttggacgacgtgtgcgccaccatgcacgccacgggcgggggagcagaccagacactgctgcagaagctgcaggcggctgtggggacccacgagcatttcaacagctggagcgccggcttcgtcatccaccactacgctggcaaggtctcctacgacgtcagcggcttctgcgagaggaaccgagacgttctcttctccgacctcatagagctgatgcagaccagtgagcaggccttcctccggatgctcttccccgagaagctggatggagacaagaaggggcgccccagcaccgccggctccaagatcaagaaacaagccaacgacctggtggccacactgatgaggtgcacaccccactacatccgctgcatcaaacccaacgagaccaagaggccccgagactgggaggagaacagagtcaagcaccaggtggaatacctgggcctgaaggagaacatcagggtgcgcagagccggcttcgcctaccgccgccagttcgccaaattcctgcagaggtatgccattctgacccccgagacgtggccgcggtggcgtggggacgaacgccagggcgtccagcacctgcttcgggcggtcaacatggagcccgaccagtaccagatggggagcaccaaggtctttgtcaagaacccagagtcgcttttcctcctggaggaggtgcgagagcgaaagttcgatggctttgcccgaaccatccagaaggcctggcggcgccacgtggctgtccggaagtacgaggagatgcgggaggaagcttccaacatcctgctgaacaagaaggagcggaggcgcaacagcatcaatcggaacttcgtcggggactacctggggctggaggagcggcccgagctgcgtcagttcctgggcaagagggagcgggtggacttcgccgattcggtcaccaagtacgaccgccgcttcaagcccatcaagcgggacttgatcctgacgcccaagtgtgtgtatgtgattgggcgagagaaagtgaagaagggacctgagaagggccaggtgtgtgaagtcttgaagaagaaagtggacatccaggctctgcggggagtctccctcagcacgcgacaggacgacttcttcatcctccaagaggatgccgccgacagcttcctggagagcgtcttcaagaccgagtttgtcagccttctgtgcaagcgcttcgaggaggcgacgcggaggcccctgcccctcaccttcagcgacacactacagtttcgggtgaagaaggagggctggggcggtggcggcacccgcagcgtcaccttctcccgcggcttcggcgacttggcagtgctcaaggttggcggtcggaccctcacggtcagcgtgggcgatgggctgcccaagagctccaagcctacgcggaagggaatggccaagggaaaacctcggaggtcgtcccaagcccctacccgggcggcccctgcgccccccagaggcatggatcgcaatggggtgcccccctctgccagagggggccccctgcccctggagatcatgtctggagggggcacccacaggcctccccggggccctccgtccacatccctgggagccagcagacgaccccgggcacgtccgccctcagagcacaacacagaattcctcaacgtgcctgaccagggcatggccggcatgcagaggaagcgcagcgtggggcaacggccagtgcctggtgtgggccgacccaagccccagcctcggacacatggtcccaggtgccgggccctataccagtacgtgggccaagatgtggacgagctgagcttcaacgtgaacgaggtcattgagatcctcatggaagatccctcgggctggtggaagggccggcttcacggccaggagggccttttcccaggaaactacgtggagaagatctga

SEQ ID NO: 862 - RNA, 3057 nt, synthetic construct
  misc_feature 1..3057: note = CCDS34629.1
  source 1..3057: mol_type = other RNA
atggaggacgaggaaggccctgagtatggcaaacctgactttgtgcttttggaccaagtgaccatggaggacttcatgaggaacctgcagctcaggttcgagaagggccgcatctacacctacatcggtgaggtgctggtgtccgtgaacccctaccaggagctgcccctgtatgggcctgaggccatcgccaggtaccagggccgtgagctctatgagcggccaccccatctctatgctgtggccaacgccgcctacaaggcaatgaagcaccggtccagggacacctgcatcgtcatctcaggggagagtggggcagggaagacagaagccagtaagcacatcatgcagtacatcgctgctgtcaccaatccaagccagagggctgaggtggagagggtcaaggacgtgctgctcaagtccacctgtgtgctggaggcctttggcaatgcccgcaccaaccgcaatcacaactccagccgctttggcaagtacatggacatcaactttgacttcaagggggacccgatcggaggacacatccacagctacctactggagaagtctcgggtcctcaagcagcacgtgggtgaaagaaacttccacgccttctaccaattgctgagaggcagtgaggacaagcagctgcatgaactgcacttggagagaaaccctgctgtatacaatttcacacaccagggagcaggactcaacatgactgtgcacagtgccttggacagtgatgagcagagccaccaggcagtgaccgaggccatgagggtcatcggcttcagtcctgaagaggtggagtctgtgcatcgcatcctggctgccatattgcacctgggaaacatcgagtttgtggagacggaggagggtgggctgcagaaggagggcctggcagtggccgaggaggcactggtggaccatgtggctgagctgacggccacaccccgggacctcgtgctccgctccctgctggctcgcacagttgcctcgggaggcagggaactcatagagaagggccacactgcagctgaggccagctatgcccgggatgcctgtgccaaggcagtgtaccagcggctgtttgagtgggtggtgaacaggatcaacagtgtcatggaaccccggggccgggatcctcggcgtgatggcaaggacacagtcattggcgtgctggacatctatggcttcgaggtgtttcccgtcaacagtttcgagcagttctgcatcaactactgcaacgagaagctgcagcagctattcatccagctcatcctgaagcaggaacaggaagagtacgagcgcgagggcatcacctggcagagcgttgagtatttcaacaacgccaccattgtggatctggtggagcggccccaccgtggcatcctggccgtgctggacgaggcctgcagctctgctggcaccatcactgaccgaatcttcctgcagaccctggacatgcaccaccgccatcacctacactacaccagccgccagctctgccccacagacaagaccatggagtttggccgagacttccggatcaagcactatgcaggggacgtcacgtactccgtggaaggcttcatcgacaagaacagagatttcctcttccaggacttcaagcggctgctgtacaacagcacggaccccactctacgggccatgtggccggacgggcagcaggacatcacagaggtgaccaagcgccccctgacggctggcacactcttcaagaactccatggtggccctggtggagaaccttgcctccaaggagcccttctacgtccgctgcatcaagcccaatgaggacaaggtagctgggaagctggatgagaaccactgtcgccaccaggtcgcatacctggggctgctggagaatgtgagggtccgcagggctggcttcgcttcccgccagccctactctcgattcctgctcaggtacaagatgacctgtgaatacacatggcccaaccacctgctgggctccgacaaggcagccgtgagcgctctcctggagcagcacgggctgcagggggacgtggcctttggccacagcaagctgttcatccgctcaccccggacactggtcacactggagcagagccgagcccgcctcatccccatcattgtgctgctattgcagaaggcatggcggggcaccttggcgaggtggcgctgccggaggctgagggctatctacaccatcatgcgctggttccggagacacaaggtgcgggctcacctggctgagctgcagcggcgattccaggctgcaaggcagccgccactctacgggcgtgaccttgtgtggccgctgccccctgctgtgctgcagcccttccaggacacctgccacgcactcttctgcaggtggcgggcccggcagctggtgaagaacatccccccttcagacatgccccagatcaaggccaaggtggccgccatgggggccctgcaagggcttcgtcaggactggggctgccgacgggcctgggcccgagactacctgtcctctgccactgacaatcccacagcatcaagcctgtttgctcagcgactaaagacacttcaggacaaagatggcttcggggctgtgctcttttcaagccatgtccgcaaggtgaaccgcttccacaagatccggaaccgggccctcctgctcacagaccagcacctctacaagctggaccctgaccggcagtaccgggtgatgcgggccgtgccccttgaggcggtgacggggctgagcgtgaccagcggaggagaccagctggtggtgctgcacgcccgcggccaggacgacctcgtggtgtgcctgcaccgctcccggccgccattggacaaccgcgttggggagctggtgggcgtgctggccgcacactgccagggggagggccgcaccctggaggttcgcgtctccgactgcatcccactaagccatcgcggggtccggcgcctcatctccgtggagcccaggccggagcagccagagcccgatttccgctgcgctcgcggctccttcaccctgctctggcccagccgctga

SEQ ID NO: 863 - RNA, 3069 nt, synthetic construct
  misc_feature 1..3069: note = CCDS53826.1
  source 1..3069: mol_type = other RNA
atggaaggggcgctgactgcccgggacaaggtcggggttcaggattttgtgctattggacgcgtacaccagcgaatctgcctttgtcgacaacctccgcaagcgtttcagcgagaacctcatatacacatatattggcaccctccttgtgtctgtgaatccataccaggagctcggaatctacactgtgagccagatggaactttatcaaggggtcaatttctttgaactgccaccacatgtctacgctatagccgacaacgcttaccgaatgatgtgtgctgaactaaataaccatttcatcctcatttctggagagagtggggcagggaaaacagaggcctccaagaaaattctcgagtattttgcagtgacctgcccaatgacccagtcactacaaatagcccgtgacagactgctgttctccaacccagtgctggaggcttttggaaatgccagaacgctccggaatgacaactccagcagatttgggaaatacatggatatacaatttgattttcagggcattcccgtaggtgggcatatcatcagttacttgatagagaagtcccgagttgtctaccaaaacgaaggcgagcggaatttccacatcttctaccagctgctggcaggtggcgaagaggagcgcctgtcttacctgggactcgagcgagacccccagctgtataaatacctctcacagggtcattgtgccaaagagtcatccattagtgacaagaatgactggaaaactgtttccaacgccttttctgtcattgattttactgaagctgacctcgagaatctctttggaattattgccagtgtcttacacctggggaacattggttttgaagaagacgaccaaggctgtgccactatcccagacacccatgagatcaagtggatagccaagctcctgggggtccacccatcagtccttctggaagctctcacccacagaaaaattgaagccaaaactgaggaggtgatctgcccgttgacactagaactctctgtctacgctagagatgcaatggcaaaggctgtttatggacgaacgtttacttggctggtcaacaaaatcaattcctccttagttaacaaggatttcaccaggaaaactgtaattggattactggacatctatgggtttgaagtctttgacaagaatggttttgaacagttctgtataaattactgcaatgagaaactccagcaactgttaattgagaggactctaaaagcagaacaggcagaatatgaaatggaaggcatagagtgggagccaattaaatatttcaacaacaagatcatctgtgatttggtagaagagagacataaaggaatcatatctattctggatgaagaatgcattcggcctggtcctgctacagacttgagtttcctggagaaattggaagagaaagtgggcaaacatgcacacttcgaaacccgtaagctggctggtccaaagggccgaaagaggattggctggatggagttccgactcctccactatgcaggagaggtcacatactgcaccaagggattcttggaaaaaaacaatgatcttctttacagacatctgaaagaagtgctgtgcaagtccaagaacattatcctgagggaatgcttcctgctggccgagttagaaaaccggaggaggcccccaacagtggggactcagtttaaaaacagtctgagcagccttctagaaaccctcatctctaaggagccctcctacatccgttgcatcaagcccaacgacaggaaagaacccagcaaatttgatgacttcctcataaggcatcagatcaaatacctggggctgatggagcacctgcgggtgagacgggctggttttgcataccgaaggaaatacgagcatttcttgcaaaggtacaagtccttatgcccagacacctggccgcactggcacgggcctccagcagagggcgtggaacggctgatcaagtacatcggctacaaacccgaggaatacaagttaggcaaaaccaaaatattcattcgtttccccagaactctgtttgctaccgaagatgcctttgaatttagtaaacatcaactagttgcaagaatccaagccacttacaaacgctgcctaggaaggagagaatacgtgaaaaaaagacaagcagccatcaaactggaagcccactggcgtggggccctggctcggaaggcaatccaaaggagaaagtgggccgtgcggattatcagaaagttcattaaaggattcatcagtcgcaacaaacccctctgtcctgacaacgaggaatttatcgtgtttgtgcggaagaattacatcttgaatctccggtatcaccttccaaagactgtcctggacaagagctggctgaggcctcctggcatcttggaaaatgcatcagatctgctcaggaaaatgtgcgtgaggaacctggtgcagaagtactgccgcgggatcacagctgagcggaaagcaatgatgcagcaaaaggtagttacaagtgaaatcttcaggggaaggaaagacggctacacagaaagtttaaatcaaccctttgtcaacagtcggatagatgaaggagacattaatccgaaagtgcttcagctaattagccatgagaaaatccagtatggtgtcccggtcattaaatatgacagaaaaggcttcaaagcacggcagcggcaactcattcttactcagaaagcagcttacgtggtggaacttgccaaaatcaagcagaaaatagagtactcagctctcaaaggtgtctccactagcaatctgagtgatggaatcttagtcattcatgtttcaccagaggacagcaagcaaaagggggatgccgttttgcagtgtggacacgtgtttgaagcagttactaaactcgtcatgctggttaagaaggagaacattgtcaatgttgttcaaggaagtttacagttttttattagtccgggaaaagaaggcacaatagttttcgacactggactggaagaacaagtctataaaaataaaaatggacaattaacagtggtgtcagtccggaggaagtcctga

SEQ ID NO: 864 - RNA, 2379 nt, synthetic construct
  misc_feature 1..2379: note = BAC84969
  source 1..2379: mol_type = other RNA
atgatcaccgtcaaccccgatgggaagataatggtcagaagatgcctggtcaccctgagaccctttcggctttttgtcctgggcatcggcttcttcactctctgcttcctgatgacgtctctgggaggccagttctcggcccggcgcctgggggactcgccattcaccatccgcacagaagtgatggggggccccgagtcccgcggcgtcctgcgcaagatgagcgacctgctggagctgatggtgaagcgcatggacgcactggccaggctggagaacagcagtgagctgcaccgggccggcggcgacctgcactttcccgcagacaggatgccccctggggccggcctcatggagcggatccaggctattgcccagaacgtctccgacatcgctgtgaaggtggaccagatcctgcgccacagtctgctcctgcacagcaaggtgtcagaaggccggcgggaccagtgtgaggcacccagtgaccccaagttccctgactgctcagggaaggtggagtggatgcgtgcccgctggacctctgacccctgctacgccttctttggggtggacggcaccgagtgctccttcctcatctacctcagtgaggtcgagtggttctgccccccgctgccctggaggaaccagacggctgcccagagggcacccaagcccctccccaaagtccaggcagttttccgaagcaacctgtcccaccttctggacctgatgggcagcgggaaggagtccctgatcttcatgaagaagcggaccaagaggctcacagcccagtgggcgctggctgcccagcgcctggcacagaagctgggggccacccagagggaccagaagcagatcctggtccacatcggcttcctgacggaggagtccggggacgtgttcagccctcgggtcctgaagggcgggcccctaggggagatggtgcagtgggcggacattctgactgcactctatgtcctgggccatggcctgcgggtcacagtctccctgaaggagctgcagagtaacttaggggtaccgccaggccggggaagctgcccgctcaccatgcccctgcccttcgacctcatctacaccgactaccacggcctgcagcagatgaagcggcacatgggactctccttcaagaagtaccggtgccgaatcagggtcatcgacaccttcgggacggaacctgcgtacaaccacgaggagtacgccacgctgcacggctaccggaccaactggggctactggaacctcaaccccaagcagttcatgaccatgtttcctcatacccccgacaactccttcatgggcttcgtgtccgaggagctcaacgagacggagaagcggctcatcaaaggcggcaaggccagcaacatggccgtggtgtacggcaaggaggcgagcatctggaagctccaggggaaggagaagttcctgggcatcctgaacaaatacatggagatccatggcaccgtgtactacgagagccagcggccccccgaggtgccagcctttgtgaagaaccacggcctcttaccgcagcctgagtttcagcagctgctgcgcaaggccaaactcttcatcgggtttggcttcccctacgagggccccgcccccctggaggccatcgccaatggttgcatcttcctgcagtcccgcttcagcccgccccacagctccctcaaccacgagttcttccgaggcaagcccacctccagagaggtgttctcccagcatccctacgcggagaacttcatcggcaagccccacgtgtggacagtcgactacaacaactcagaggagtttgaagcagccatcaaggccattatgagaactcaggtagacccctacctaccctatgagtacacctgcgaggggatgctggagcggatccacgcctacatccagcaccaggacttctgcagagctccagaccctgccctaccagaggcccacgccccgcagagcccctttgtcctggcccccaatgccacccacctcgagtgggctcggaacaccagcttggctcctggggcctggccccccgcgcacgccctgcgggcctggctggccgtgcctgggagggcctgcaccgacacctgcctggaccacgggctaatctgtgagccctccttcttccccttcctgaacagccaggacgccttcctcaagctgcaggtgccctgtgacagcaccgagtcggagatgaaccacctgtacccggcgttcgcccagcctggccaggagtgctacctgcagaaggagcctctgctcttcagctgcgccggctccaacaccaagtaccgccggctctgcccctgccgcgacttccgcaagggccaggtggccttgtgccagggctgtctgtga

SEQ ID NO: 865 - RNA, 36 nt, synthetic construct
  misc_feature 1..36: note = AF164963.1
  source 1..36: mol_type = other RNA
atgactcaaggacagcacttcctgcagaaagtctag

SEQ ID NO: 866 - RNA, 2211 nt, synthetic construct
  misc_feature 1..2211: note = AAI11702
  source 1..2211: mol_type = other RNA
atgaaagagatgtctgcaaacaccgtgctggacagccagcgtcaacaaaagcattatggaattacctccccaattagtttggcatctcctaaagaaattgatcatatttacacacagaaattaattgacgccatgaaaccatttggagtgtttgaagatgaggaagaattgaaccacaggctggtggttcttggtaaattgaacaatttagtaaaagaatggatttctgatgtcagcgagagtaagaacctcccaccttctgttgtggctactgttggtggtaaaattttcacatttggatcctataggcttggagtacacaccaaaggagctgacattgatgcactttgtgtagctccaagacatgtggaaagatctgatttttttcagtctttttttgaaaaattgaaacatcaagatggcattagaaacttaagagctgtagaagatgcctttgtacctgttataaaatttgaatttgatggtattgaaattgatctagtctttgcaagactggcaatacaaaccatatcagataatttagatctaagagacgactctcgcctgagaagccttgatataaggtgtattcgcagcttaaatggttgtagagttactgatgaaattttgcatttagtgccaaataaagaaacttttagactcaccctaagagctgtcaaattatgggcaaaacgacgtggtatttattccaacatgctaggattccttggtggtgtctcctgggcaatgctagttgcaagaacttgccaattgtatccaaatgcagcagcatctactttagttcataagttctttttagttttttccaagtgggaatggccaaatcctgtgctgctgaagcaaccagaagaaagcaatttgaatttgcctgtctgggatcctcgggtaaatccatcagataggtatcatctcatgcccataatcacccctgcctacccacaacagaattctacgtataatgtgtccacatcaactcgaacagtaatggtagaagaatttaaacaaggtcttgcagtcacagatgaaattcttcaaggaaagtcagattggtccaaactacttgagccaccgaatttctttcaaaagtatagacattatatagtattgactgccagcgcatcaacagaagaaaaccatctagagtgggttggattagtagaatctaaaatccgtgtacttgttggaaacttggaacggaatgaatttattactcttgcccatgtgaatccccagtcattcccagggaataaggaacatcataaagacaacaattacgtatcaatgtggttccttgggataatttttcggagagtagaaaatgcagaaagtgtcaacatagacttgacatatgatatacagtcatttactgatacagtgtacagacaggcaaacaatataaatatgctaaaggagggaatgaaaattgaagcaactcatgtaaagaaaaaacaacttcaccactaccttcctgcagaaattcttcaaaagaagaaaaagcaaagtctctctgatgtcaatcgaagctcgggcggacttcaatccaaaagattgtctctggatagcagttgtctggatagctccagagacactgataatggaacaccttttaattctccagcgtccaagtctgatagcccttctgtaggagaaacagaaaggaatagtgctgagcctgctgctgtaattgtggagaagccactgagtgtaccaccagcccaaggactttccattccagtgattggcgcaaaagttgactctacagtaaaaactgtatcaccccccactgtgtgtaccattcctaccgtagtaggacgaaatgtcattcctagaatcacaacacctcacaaccctgcccagggacaaccgcatctgaatggaatgtcaaatataactaagactgttacacctaagagatcccattccccatccatagatgggactcctaagaggttgaaagacgtagaaaagtttattcgacttgaatcaacatttaaggacccccgcactgctgaagaaagaaaaagaaaatcagtggatgccattggaggagaatctatgcctattccaactattgatacatcacgcaaaaagagactacccagtaaagaactaccagattcatcatctccagttccagcaaacaacatccgtgtcatcaaaaattccattcgactgacccttaatcggtaa

SEQ ID NO: 867 - RNA, 1377 nt, synthetic construct
  misc_feature 1..1377: note = AAG28389
  source 1..1377: mol_type = other RNA
atgtccacagaaggaggatttggtggtactagcagcagtgatgcccagcaaagtctacagtcgttctggcctcgggtcatggaagaaatccggaatttaacagtgaaagacttccgagtgcaggaactcccactggctcgtattaagaagattatgaaactggatgaagatgtgaagatgatcagtgcagaagcgcctgtactctttgccaaggcagcccagatttttatcacagagttgactcttcgagcctggattcacacagaagataacaagcgccggactctacagagaaatgatatcgccatggcaattacaaaatttgatcagtttgattttctcatcgatattgttccaagagatgaactgaaacctccaaagcgtcaggaggaggtgcgccagtctgtaactcctgccgagccagtccagtactatttcacgctggctcagcaacccaccgctgtccaagtccagggccagcagcaaggccagcagaccaccagctccacgaccaccatccagcctgggcagatcatcatcgcacagcctcagcagggccagaccacacctgtgacaatgcaggttggagaaggtcagcaggtgcagattgtccaggctcagccacagggtcaagcccaacaggcccagagtggcactggacagaccatgcaggtgatgcagcagatcatcactaacacaggagagatccagcagatcccggtgcagctgaatgccggccagctgcagtatatccgcttagcccagcctgtatcaggcactcaagttgtgcagggacagatccagacacttgccaccaatgctcaacaggggcaaagaaatgcaagtcaggggaagcctcgaaggtgcctgaaagaaaccttacagattacacagacagaggtccagcaaggacagcagcagttcagccagttcacagatggacagaggaacagcgtgcagcaagctcgagtctctgagctaacgggagaggcagagcccagagaagtgaaagccacaggaaattcaactccctgcacctcttccctgcccaccacacaccccccctcacaccgggctggtgcctcctgtgtctgctgctcccaaccccagcagagctccacttcccctcctccttctgacgccttgcagtgggtggtggttgaggtatctgggacccccaaccagctcgagacccatagggagctgcatgcccctctcccagggatgacctcactctctcctctccacccctcgcagcagctctaccagatccagcaagtcaccatgcctgcgggccaggacctcgcccagcccatgttcatccagtcagccaaccagccctccgacgggcaggccccccaggtgaccggcgactga

SEQ ID NO: 868 - RNA, 2802 nt, synthetic construct
  misc_feature 1..2802: note = CCDS33423.1
  source 1..2802: mol_type = other RNA
atgcgaatggctgccactgcctgggcggggctccaagggccacccctccccaccctctgtcccgcagtgaggacgggactctactgccgagaccaggctcacgctgagaggtgggccatgacctccgagacctcttccggaagccactgtgccaggagcaggatgctgcggcgacgggcccaggaagaggacagcaccgtcctgatcgatgtgagcccccctgaggcagagaagaggggctcttacgggagcacagcccacgcctcggagccaggtggacagcaagcggccgcctgcagagctgggagtcctgccaagccccggatcgcagacttcgtcctcgtttgggaggaggacctgaagctagacaggcagcaggacagtgccgcccgggacagaacagacatgcacaggacctggcgggagacttttctggataatcttcgtgcggctgggctgtgtgtagaccagcaggacgtccaggacgggaacaccacagtgcactacgccctcctcagcgcctcctgggctgtgctctgctactacgccgaagacctgcgcctgaagctgcccttgcaggagttacccaaccaggcctccaactggtcggccggcctgctggcatggctgggcatccccaacgtcctgctggaggttgtgccagacgtaccccccgagtactactcctgccggttcagagtgaacaagctgccacgcttcctcgggagtgacaaccaggacaccttcttcacaagcaccaagaggcaccaaattctgtttgagatcctggccaagaccccgtatggccacgagaagaaaaacctgcttgggatccaccagctgctggcagagggtgtcctcagtgccgccttccccctgcatgacggccccttcaagacgcccccagagggcccgcaggctccacgcctcaaccagcgccaagtccttttccagcactgggcgcgctggggcaagtggaacaagtaccagcccctggaccacgtgcgcaggtacttcggggagaaggtggccctctacttcgcctggctcgggttttacacaggctggctcctgccagcggcagtggtgggcacactggtgttcctggtgggctgcttcctggtgttctcagacatacccacgcaggaactgtgtggcagcaaggacagcttcgagatgtgcccactttgcctcgactgccctttctggctgctctccagcgcctgtgccctggcccaggccggccggctgttcgaccacggcggcaccgtgttcttcagcttgttcatggcactgtgggccgtgctgctgctggagtactggaagcggaagagcgccacgctggcctaccgctgggactgctctgactacgaggacactgaggagaggcctcggccccagtttgccgcctcagcccccatgacagccccgaaccccatcacgggtgaggacgagccctacttccctgagaggagccgcgcgcgccgcatgctggccggctctgtggtgatcgtggtgatggtggccgtggtggtcatgtgcctcgtgtctatcatcctgtaccgtgccatcatggccatcgtggtgtccaggtcgggcaacacccttctcgcagcctgggcctctcgcatcgccagcctcacggggtctgtagtgaacctcgtcttcatcctcatcctctccaagatctatgtatccctggcccacgtcctgacacgatgggaaatgcaccgcacccagaccaagttcgaggacgccttcaccctcaaggtgttcatcttccagttcgtcaacttctactcctcacccgtctacattgccttcttcaagggcaggtttgtgggatacccaggcaactaccacaccttgtttggagtccgcaatgaggagtgcgcggctggaggctgcctgatcgagctggcacaggagctcctggtcatcatggtgggcaagcaggtcatcaacaacatgcaggaggtcctcatcccgaagctaaagggctggtggcagaagttccggcttcgctccaagaagaggaaggcgggagcttctgcaggggctagccaggggccctgggaggacgactatgagcttgtgccctgtgagggtctgtttgacgagtacctggaaatggtgctgcagttcggcttcgtcaccatcttcgtggccgcctgtccgctcgcgccgctcttcgccctgctcaacaactgggtggagatccgcttggacgcgcgcaagttcgtctgcgagtaccggcgcccggtggccgagcgcgcccaggacatcggcatctggttccacatcctggcgggcctcacgcacctggcggtcatcagcaacgccttcctcctggccttctcgtccgacttcctgccgcgcgcctactaccggtggacccgcgcccacgacctgcgcggcttcctcaacttcacgctggcgcgagccccgtcctccttcgccgccgcgcacaaccgcacgtgcaggtatcgggctttccgggatgacgatggacattattcccagacctactggaatcttcttgccatccgcctggccttcgtcattgtgtttgagcatgtggttttctccgttggccgcctcctggacctcctggtgcctgacatcccagagtctgtggagatcaaagtgaagcgggagtactacctggctaagcaggcactggctgagaatgaggttctttttggaacgaacggaacaaaggatgagcagcccgagggctcagagctcagctcccactggacacccttcacggttcccaaggccagccagctgcagcagtga

SEQ ID NO: 869 - RNA, 885 nt, synthetic construct
  misc_feature 1..885: note = AAA36380
  source 1..885: mol_type = other RNA
atggaagattcgatggacatggacatgagccccctgaggccccagaactatcttttcggttgtgaactaaaggccgacaaagattatcactttaaggtggataatgatgaaaatgagcaccagttatctttaagaacggtcagtttaggggctggtgcaaaggatgagttgcacattgttgaagcagaggcaatgaattacgaaggcagtccaattaaagtaacactggcaactttgaaaatgtctgtacagccaacggtttcccttgggggctttgaaataacaccaccagtggtcttaaggttgaagtgtggttcagggccagtgcatattagtggacagcacttagtagctgtggaggaagatgcagagtcagaagatgaagaggaggaggatgtgaaactcttaagtatatctggaaagcggtctgcccctggaggtggtagcaaggttccacagaaaaaagtaaaacttgctgctgatgaagatgatgacgatgatgatgaagaggatgatgatgaagatgatgatgatgatgattttgatgatgaggaagctgaagaaaaagcgccagtgaagaaatctatacgagatactccagccaaaaatgcacaaaagtcaaatcagaatggaaaagactcaaaaccatcatcaacaccaagatcaaaaggacaagaatccttcaagaaacaggaaaaaactcctaaaacaccaaaaggacctagttctgtagaagacattaaagcaaaaatgcaagcaagtatagaaaaaggtggttctcttcccaaagtggaagccaaattcatcaattatgtgaagaattgcttccggatgactgaccaagaggctattcaagatctctggcagtggaggaagtctctttaa

SEQ ID NO: 870 - RNA, 3915 nt, synthetic construct
  misc_feature 1..3915: note = CCDS47686.1
  source 1..3915: mol_type = other RNA
atgcagcttaaaataatgccgaaaaagaagcgcttatctgcgggcagagtgcccctgattctcttcctgtgccagatgattagtgcactggaagtacctcttgatccaaaacttcttgaagacttggtacagcctccaaccatcacccaacagtctccaaaagattacattattgaccctcgggagaatattgtaatccagtgtgaagccaaagggaaaccgcccccaagcttttcctggacccgtaatgggactcattttgacatcgataaagaccctctggtcaccatgaagcctggcacaggaacgctcataattaacatcatgagcgaagggaaagctgagacctatgaaggagtctatcagtgtacagcaaggaacgaacgcggagctgcagtttctaataacattgttgtccgcccatccagatcaccattgtggaccaaagaaaaacttgaaccaatcacacttcaaagtggtcagtctttagtacttccctgcagacccccaattggattaccaccacctataatattttggatggataattcctttcaaagacttccacaaagtgagagagtttctcaaggtttgaatggggacctttatttttccaatgtcctcccagaggacacccgcgaagactatatctgttatgctagatttaatcatactcaaaccatacagcagaagcaacctatttctgtgaaggtgatttcagtggatgaattgaatgacactatagctgctaatttgagtgacactgagttttatggtgctaaatcaagtagagagaggccaccaacatttttaactccagaaggcaatgcaagtaacaaagaggaattaagaggaaatgtgctttcactggagtgcattgcagaaggactgcctaccccaattatttactgggcaaaggaagatggaatgctacccaaaaacaggacagtttataagaactttgagaaaaccttgcagatcattcatgtttcagaagcagactctggaaattaccaatgtatagcaaaaaacgcattaggagccatccaccataccatttctgttagagttaaagcggctccatactggatcacagcccctcaaaatcttgtgctgtccccaggagaggatgggaccttgatctgcagagctaatggcaaccccaaacccagaattagctggttaacaaatggagtcccaatagaaattgcccctgatgaccccagcagaaaaatagatggcgataccattattttttcaaatgttcaagaaagatcaagtgcagtctatcagtgcaatgcctctaatgaatatggatatttactggcaaacgcatttgtaaatgtgctggctgagccaccacgaatcctcacacctgcaaacacactctaccaggtcattgcaaacaggcctgctttactagactgtgccttctttgggtctcctctcccaaccatcgagtggtttaaaggagctaaaggaagtgctcttcatgaagatatttatgttttacatgaaaatggaactttggaaattcctgtggcccaaaaggacagtacaggaacttatacgtgtgttgcaaggaataaattagggatggcgaagaatgaagttcacttagaaatcaaagatcctacatggatcgttaaacagcccgaatatgcagttgtgcaaagagggagcatggtgtcctttgaatgcaaagtgaaacatgatcacaccttatccctcactgtcctgtggctgaaggacaacagggaactgcccagtgatgaaaggttcactgttgacaaggatcatctagtggtagctgatgtcagtgacgatgacagcgggacctacacgtgtgtggccaacaccactctggacagcgtctccgccagcgctgtgcttagcgttgttgctcctactccaactccagctcccgtttacgatgtcccaaatcctccctttgacttagaactgacagatcaacttgacaaaagtgttcagctgtcatggaccccaggcgatgacaacaatagccccattacaaaattcatcatcgaatatgaagatgcaatgcacaagccagggctgtggcaccaccaaactgaagtttctggaacacagaccacagcccagctgaagctgtctccttacgtgaactactccttccgcgtgatggcagtgaacagcattgggaagagcttgcccagcgaggcgtctgagcagtatttgacgaaagcctcagaaccagataaaaaccccacagctgtggaaggactgggatcagagcctgataatttggtgattacgtggaagcccttgaatggtttcgaatctaatgggccaggccttcagtacaaagttagctggcgccagaaagatggtgatgatgaatggacatctgtggttgtggcaaatgtatccaaatatattgtctcaggcacgccaacctttgttccatacctgatcaaagttcaggccctgaatgacatggggtttgcccccgagccagctgtagtcatgggacattctggagaagacctcccaatggtggctcctgggaacgtgcgtgtgaatgtggtgaacagtaccttagccgaggtgcactgggacccagtacctctgaaaagcatccgaggacacctacaaggctatcggatttactattggaagacccagagttcatctaaaagaaacagacgtcacattgagaaaaagatcctcaccttccaaggcagcaagactcatggcatgttgccggggctagagccctttagccactacacactgaatgtccgagtggtcaatgggaaaggggagggcccagccagccctgacagagtctttaatactccagaaggagtccccagtgctccctcgtctttgaagattgtgaatccaacactggactctctcactttggaatgggatccaccgagccacccgaatggcattttgacagagtacaccttaaagtatcagccaattaacagcacacatgaattaggccctctggtagatttgaaaattcctgccaacaagacacggtggactttaaaaaatttaaatttcagcactcgatataagttttatttctatgcacaaacatcagcaggatcaggaagtcaaattacagaggaagcagtaacaactgtggatgaagctggtattcttccacctgatgtaggtgcaggcaaagttcaagcagtaaatcccaggatcagcaatcttactgctgcagctgctgagacctatgccaatatcagttgggaatatgagggaccagagcatgtgaacttttatgttgaatatggtgtagcaggcagcaaagaagaatggagaaaagaaattgtaaatggttctcggagcttctttgggttaaagggtctaatgccaggaacagcatacaaagttcgagttggtgctgtgggggactctggttttgtgagttcagaggatgtgtttgagacaggcccagcgatggcaagccggcaggtggatattgcaactcagggctggttcattggtctgatgtgtgctgttgctctccttatcttaattttgctgattgtttgcttcatcagaagaaacaagggtggtaaatatccagttaaagaaaaggaagatgcccatgctgaccctgaaatccagcctatgaaggaagatgatgggacatttggagaatacagtgatgcagaagaccacaagcctttgaaaaaaggaagtcgaactccttcagacaggactgtgaaaaaagaagatagtgacgacagcctagttgactatggagaaggggttaatggccagttcaatgaggatggctcctttattggacaatacagtggtaagaaagagaaagagccggctgaaggaaacgaaagctcagaggcaccttctcctgtcaacgccatgaattcctttgtttaa

SEQ ID NO: 871 - RNA, 1305 nt, synthetic construct
  misc_feature 1..1305: note = AAB51320
  source 1..1305: mol_type = other RNA
atgtccatagagaagatctgggcccgggagatcctggactcccgcgggaaccccacagtggaggtggatctctatactgccaaaggtcttttccgggctgcagtgcccagtggagcctctacgggcatctatgaggccctggagctgagggatggagacaaacagcgttacttaggcaaaggtgtcctgaaggcagtggaccacatcaactccaccatcgcgccagccctcatcagctcaggtctctctgtggtggagcaagagaaactggacaacctgatgctggagttggatgggactgagaacaaatccaagtttggggccaatgccatcctgggtgtgtctctggccgtgtgtaaggcaggggcagctgagcgggaactgcccctgtatcgccacattgctcagctggccgggaactcagacctcatcctgcctgtgccggccttcaacgtgatcaatggtggctctcatgctggcaacaagctggccatgcaggagttcatgatcctcccagtgggagctgagagctttcgggatgccatgcgactaggtgcagaggtctaccatacactcaagggagtcatcaaggacaaatacggcaaggatgccaccaatgtgggggatgaaggtggctttgcccccaatatcctggagaacagtgaagccttggagctggtgaaggaagccatcgacaaggctggctacacggaaaagatcgttattggcatggatgttgctgcctcagagttttatcgtgatggcaaatatgacttggacttcaagtctcccactgatccttcccgatacatcactggggaccagctgggggcactctaccaggactttgtcagggactatcctgtggtctccattgaggacccatttgaccaggatgattgggctgcctggtccaagttcacagccaatgtagggatccagattgtgggtgatgacctgacagtgaccaacccaaaacgtattgagcgggcagtggaagaaaaggcctgcaactgtctgctgctcaaggtcaaccagatcggctcggtcactgaagccatccaagcgtgcaagctggcccaggagaatggctggggggtcatggtgagtcatcgctcaggagagactgaggacacattcattgctgacctggtggtggggctgtgcacaggccagatcaagactggtgccccgtgccgttctgaacgtctggctaaatacaaccagctcatgagaattgaggaagagctgggggatgaagctcgctttgccggacataacttccgtaatcccagtgtgctgtga

SEQ ID NO: 872 - RNA, 1395 nt, synthetic construct
  misc_feature 1..1395: note = AAH08489
  source 1..1395: mol_type = other RNA
atggaaactttgtctttccccagatataatgtagctgagattgtgattcatattcgcaataagatcttaacaggagctgatggtaaaaacctcaccaagaatgatctttatccaaatccaaagcctgaagtcttgcacatgatctacatgagagccttacaaatagtatatggaattcgactggaacatttttacatgatgccagtgaactctgaagtcatgtatccacatttaatggaaggcttcttaccattcagcaatttagttactcatctggactcatttttgcctatctgccgggtgaatgactttgagactgctgatattctatgtccaaaagcaaaacggacaagtcggtttttaagtggcattatcaactttattcacttcagagaagcatgccgtgaaacgtatatggaatttctttggcaatataaatcctctgcggacaaaatgcaacagttaaacgccgcacaccaggaggcattaatgaaactggagagacttgattctgttccagttgaagagcaagaagagttcaagcagctttcagatggaattcaggagctacaacaatcactaaatcaggattttcatcaaaaaacgatagtgctgcaagagggaaattcccaaaagaagtcaaatatttcagagaaaaccaagcgtttgaatgaactaaaattgtcggtggtttctttgaaagaaatacaagagagtttgaaaacaaaaattgtggattctccagagaagttaaagaattataaagaaaaaatgaaagatacggtccagaagcttaaaaatgccagacaagaagtggtggagaaatatgaaatctatggagactcagttgactgcctgccttcatgtcagttggaagtgcagttatatcaaaagaaaatacaggacctttcagataatagggaaaaattagccagtatcttaaaggagagcctgaacttggaggaccaaattgagagtgatgagtcagaactgaagaaattgaagactgaagaaaattcgttcaaaagactgatgattgtgaagaaggaaaaacttgccacagcacaattcaaaataaataagaagcatgaagatgttaagcaatacaaacgcacagtaattgaggattgcaataaagttcaagaaaaaagaggtgctgtctatgaacgagtaaccacaattaatcaagaaatccaaaaaattaaacttggaattcaacaactaaaagatgctgctgaaagggagaaactgaagtcccaggaaatatttctaaacttgaaaactgctttggagaaataccacgacggtattgaaaaggcagcagaggactcctatgctaagatagatgagaagacagctgaactgaagaggaagatgttcaaaatgtcaacctga

SEQ ID NO: 873 - RNA, 543 nt, synthetic construct
  misc_feature 1..543: note = AAB49693
  source 1..543: mol_type = other RNA
atgcaggccgaaggccggggcacagggggttcgacgggcgatgctgatggcccaggaggccctggcattcctgatggcccagggggcaatgctggcggcccaggagaggcgggtgccacgggcggcagaggtccccggggcgcaggggcagcaagggcctcggggccgggaggaggcgccccgcggggtccgcatggcggcgcggcttcagggctgaatggatgctgcagatgcggggccagggggccggagagccgcctgcttgagttctacctcgccatgcctttcgcgacacccatggaagcagagctggcccgcaggagcctggcccaggatgccccaccgcttcccgtgccaggggtgcttctgaaggagttcactgtgtccggcaacatactgactatccgactgactgctgcagaccaccgccaactgcagctctccatcagctcctgtctccagcagctttccctgttgatgtggatcacgcagtgctttctgcccgtgtttttggctcagcctccctcagggcagaggcgctaa

SEQ ID NO: 874 - RNA, 1215 nt, synthetic construct
  misc_feature 1..1215: note = CCDS14134.2
  source 1..1215: mol_type = other RNA
atggcctccccgcgcctagggaccttctgctgccccacgcgggacgcagccacgcagctcgtgctgagcttccagccgcgggccttccacgcgctctgcctgggcagcggcgggctccgcttggcgctgggccttctgcagctgctgcccggccgccggcccgcgggccccgggtcccccgcgacgtccccgccggcctcggtccgcatcctgcgcgctgccgctgcctgcgaccttctcggctgcctgggtatggtgatccggtccaccgtgtggttaggattcccaaattttgttgacagcgtctcggatatgaaccacacggaaatttggcctgctgctttctgcgtggggagtgcgatgtggatccagctgttgtacagtgcctgcttctggtggctgttttgctatgcagtggatgcttatctggtgatccggagatcggcaggactgagcaccatcctgctgtatcacatcatggcgtggggcctggccaccctgctctgtgtggagggagccgccatgctctactacccttccgtgtccaggtgtgagcggggcctggaccacgccatcccccactatgtcaccatgtacctgcccctgctgctggttctcgtggcgaaccccatcctgttccaaaagacagtgactgcagtggcctctttacttaaaggaagacaaggcatttacacggagaacgagaggaggatgggagccgtgatcaagatccgatttttcaaaatcatgctggttttaattatttgttggttgtcgaatatcatcaatgaaagccttttattctatcttgagatgcaaacagatatcaatggaggttctttgaaacctgtcagaactgcagccaagaccacatggtttattatgggaatcctgaatccagcccagggatttctcttgtctttggccttctacggctggacaggatgcagcctgggttttcagtctcccaggaaggagatccagtgggaatcactgaccacctcggctgctgagggggctcacccatccccactgatgccccatgaaaaccctgcttccgggaaggtgtctcaagtgggtgggcagacttctgacgaagccctgagcatgctgtctgaaggttctgatgccagcacaattgaaattcacactgcaagtgaatcctgcaacaaaaatgagggtgaccctgctctcccaacccatggagacctatga

SEQ ID NO: 875 - RNA, 3141 nt, synthetic construct
  misc_feature 1..3141: note = AAH38180
  source 1..3141: mol_type = other RNA
atggcgtcttccgtgggcaacgtggccgacagcacagaaccaacgaaacgtatgctttccttccaagggttagctgagttggcacatcgagaatatcaggcaggagattttgaggcagctgagagacactgcatgcagctctggagacaagagccagacaatactggtgtgcttttattactttcatctatacacttccagtgtcgaaggctggacagatctgctcactttagcactctggcaattaaacagaacccccttctggcagaagcttattcgaatttggggaatgtgtacaaggaaagagggcagttgcaggaggcaattgagcattatcgacatgcattgcgtctcaaacctgatttcatcgatggttatattaacctggcagccgccttggtagcagcgggtgacatggaaggggcagtacaagcttacgtctctgctcttcagtacaatcctgatttgtactgtgttcgcagtgacctggggaacctgctcaaagccctgggtcgcttggaagaagccaaggcatgttatttgaaagcaattgagacgcaaccgaactttgcagtagcttggagtaatcttggctgtgttttcaatgcacaaggggaaatttggcttgcaattcatcactttgaaaaggctgtcacccttgacccaaactttctggatgcttatatcaatttaggaaatgtcttgaaagaggcacgcatttttgacagagctgtggcagcttatcttcgtgccctaagtttgagtccaaatcacgcagtggtgcacggcaacctggcttgtgtatactatgagcaaggcctgatagatctggcaatagacacctacaggcgggctatcgaactacaaccacatttccctgatgcttactgcaacctagccaatgctctcaaagagaagggcagtgttgctgaagcagaagattgttataatacagctctccgtctgtgtcccacccatgcagactctctgaataacctagccaatatcaaacgagaacagggaaacattgaagaggcagttcgcttgtatcgtaaagcattagaagtcttcccagagtttgctgctgcccattcaaatttagcaagtgtactgcagcagcagggaaaactgcaggaagctctgatgcattataaggaggctattcgaatcagtcctacctttgctgatgcctactctaatatgggaaacactctaaaggagatgcaggatgttcagggagccttgcagtgttatacgcgtgccatccaaattaatcctgcatttgcagatgcacatagcaatctggcttccattcataaggattcagggaatattccagaagccatagcttcttaccgcacggctctgaaacttaagcctgattttcctgatgcttattgtaacttggctcattgcctgcagattgtctgtgattggacagactatgatgagcgaatgaagaagttggtcagtattgtggctgaccagttagagaagaataggttgccttctgtgcatcctcatcatagtatgctatatcctctttctcatggcttcaggaaggctattgctgagaggcacggcaacctgtgcttagataagattaatgttcttcataaaccaccatatgaacatccaaaagacttgaagctcagtgatggtcggctgcgtgtaggatatgtgagttccgactttgggaatcatcctacttctcaccttatgcagtctattccaggcatgcacaatcctgataaatttgaggtgttctgttatgccctgagcccagacgatggcacaaacttccgagtgaaggtgatggcagaagccaatcatttcattgatctttctcagattccatgcaatggaaaagcagctgatcgcatccatcaggatggaattcatatccttgtaaatatgaatggctatactaagggcgctcgaaatgagctttttgctctcaggccagctcctattcaggcaatgtggctgggataccctgggacgagtggtgcgcttttcatggattatattatcactgatcaggaaacttcgccagctgaagttgctgagcagtattccgagaaattggcttatatgccccacactttttttattggtgatcatgctaatatgttccctcacctgaagaaaaaagcagtcatcgattttaagtccaatgggcacatttatgacaatcggatagttctgaatggcatcgacctcaaagcatttcttgatagtctaccagatgtgaaaattgtcaagatgaagtgtcctgatggaggagacaatgcagatagcagtaacacagctcttaatatgcctgttattcctatgaatactattgcagaagcagttattgaaatgattaaccgaggacagattcaaataacaattaatggattcagtattagcaatggactggcaactactcagatcaacaataaggctgcaactggagaggaggttccccgtaccattattgtaaccacccgttctcagtacgggttaccagaagatgccatcgtatactgtaactttaatcagttgtataaaattgacccttctactttgcagatgtgggcaaacattctgaagcgtgttcccaatagtgtactctggctgttgcgttttccagcagtaggagaacctaatattcaacagtatgcacaaaacatgggcctgccccagaaccgtatcattttttcacctgttgctcctaaagaggaacacgtcaggagaggccagctggctgatgtctgcttggacactccactctgtaatgggcacaccacagggatggatgtcctctgggcagggacccccatggtgactatgccaggagagactcttgcttctcgagttgcagcatcccagctcacttgcttaggttgtcttgagcttattgctaaaaacagacaagaatatgaagacatagctgtgaagctgggaactgatctagaatacctgaagaaagttcgtggcaaagtctggaagcaaagaatatctagccctctgttcaacaccaaacaatacacaatggaactagagcggctctatctacagatgtgggagcattatgcagctggcaacaaacctgaccacatgattaagcctgttgaagtcactgagtcagcataa

SEQ ID NO: 876 - RNA, 441 nt, synthetic construct
  misc_feature 1..441: note = BAG57972
  source 1..441: mol_type = other RNA
atggcggcggaaacgctgctgtccagtttgttaggactgctgcttctgggactcctgttacccgcaagtctgaccggcggtgtcgggagtctgaacctggaggagctgagtgagatgcgttatgggatcgagatcctgccgttgcctgtcatgggagggcagagccaatcttcggacgtggtgattgtctcctctaagtacaaacagcgctatgagtgtcgcctgccagttggagctattcacttccagcgtgaaagggaggaggaaacacctgcttaccaagggcctgggatccctgagttgttgagcccaatgagagatgctccctgcttgctgaagacaaaggactggtggacatatgaattctgttatggacgccacatccagcaataccacatggaagattcagagatcaaaggcctccaagcagcatcgtcttaa

SEQ ID NO: 877 - RNA, 1221 nt, synthetic construct
  misc_feature 1..1221: note = BAG65333
  source 1..1221: mol_type = other RNA
atggcggcggaaacgctgctgtccagtttgttaggactgctgcttctgggactcctgttacccgcaagtctgaccggcggtgtcgggagcctgaacctggaggagctgagtgagatgcgttatgggatcgagatcctgccgttgcctgtcatgggagggcagagccaatcttcggacgtggtgattgtctcctctaagtacaaacagcgctatgagtgtcgcctgccagctggagctattcacttccagcgtgaaagggaggaggaaacacctgcttaccaagggcctgggatccctgagttgttgagcccaatgagagatgctccctgcttgctgaagacaaaggactggtggacatatgaattctgttatggacgccacatccagcaataccacatggaagattcagcttctggtgctcccaatgattttcagaacaacgtgcaggtcaaagtcattcgaagccctgcggatttgattcgattcatagaggagctgaaaggtggaacaaaaaaggggaagccaaatataggccaagagcagcctgtggatgatgctgcagaagtccctcagagggaaccagagaaggaaaggggtgatccagaacggcagagagagatggaagaagaggaggatgaggatgaggatgaggatgaagatgaggatgaacggcagttactgggagaatttgagaaggaactggaagggatcctgcttccgtcagaccgagaccggctccgttcggaggtgaaggctggcatggagcgggaactggaaaacatcatccaggagacagagaaagagctggacccagatgggctgaagaaggagtcagagcgggatcgggcaatgctggctctcacatccactctcaacaaactcatcaaaagactggaggaaaaacagagtccagagctggtgaagaagcacaagaaaaagagggttgtccccaaaaagcctcccccatcaccccaacctacagggaaaattgagatcaaaattgtccgcccatgggctgaagggactgaagagggtgcacgttggctgactgatgaggacacgagaaacctcaaggagatcttcttcaatatcttggtgccgggagctgaagaggcccagaaggaacgccagcggcagaaagagctggagagcaattaccgccgggtgtggggctctccaggtggggagggcacaggggacctggacgaatttgacttctga

SEQ ID NO: 878 - RNA, 2223 nt, synthetic construct
  misc_feature 1..2223: note = BAH13933
  source 1..2223: mol_type = other RNA
atggcggtggaaacgctgctgtccagtttgttaggactgctgcttctgggactcctgttacccgcaagtctgaccggcggtgtcgggagcctgaacctggaggagctgagtgagatgcgttatgggatcgagatcctgccgttgcctgtcatgggagggcagagccaatcttcggacgtggtgattgtctcctctaagtacaaacagcgctatgagtgtcgcctgccagctggagctattcacttccagcgtgaaagggaggaggaaacacctgcttaccaagggcctgggatccctgagttgttgagcccaatgagagatgctccctgcttgctgaagacaaaggactggtggacatatgaattctgttatggacgccacatccagcaataccacatggaagattcagagatcaaaggtgaagtcctctatctcggctactaccaatcagccttcgactgggatgatgaaacagccaaggcctccaagcagcatcgtcttaaacgctaccacagccagacctatggcaatgggtccaagtgcgaccttaatgggaggccccgggaggccgaggttcggttcctctgtgacgagggtgcaggtatctctggggactacatcgatcgcgtggacgagcccttgtcctgctcttatgtgctgaccattcgcactcctcggctctgcccccaccctctcctccggcccccacccagtgctgcaccgcaggccatcctctgtcacccttccctacagcctgaggagtacatggcctacgttcagaggcaagccgactcaaagcagtatggagataaaatcatagaggagctgcaagatctaggcccccaagtgtggagtgagaccaagtctggggtggcaccccaaaagatggcaggtaggaccttgtttcacctgttccgtgaaattcacttccatttcttcccttcccctgatcttactgtcctgactgactggtggggtggggggggggtggaaaagtaccatgggccctcctcccttggtgatagaggaggggaagggaccccatcctatttgctcccttctgtctcacccctcctgtcagatcagtctctccctgttctctgtaccctaggtgcgagcccgaccaaggatgacagtaaggactcagatttctggaagatgcttaatgagccagaggaccaggccccaggaggggaggaggtgccggctgaggagcaggacccaagccctgaggcagcagattcagcttctggtgctcccaatgattttcagaacaacgtgcaggtcaaagtcattcgaagccctgcggatttgattcgattcatagaggagctgaaaggtggaacaaaaaaggggaagccaaatataggccaagagcagcctgtggatgatgctgcagaagtccctcagagggaaccagagaaggaaaggggtgatccagaacggcagagagagatggaagaagaggaggatgaggatgaggatgaggatgaagatgaggatgaacggcagttactgggagaatttgagaaggaactggaagggatcctgcttccgtcagaccgagaccggctccgttcggaggtgaaggctggcatggagcgggaactggagaacatcatccaggagacagagaaagagctggacccagatgggctgaagaaggagtcagagcgggatcgggcaatgctggctctcacatccactctcaacaaactcatcaaaagactggaggaaaaacagagtccagagctggtgaagaagcacaagaaaaagagggttgtccccaaaaagcctcccccatcaccccaacctacagaggaggatcctgagcacagagtccgggtccgggtcaccaagctccgtctcggaggccctaatcaggatctgactgtcctcgagatgaaacgggaaaacccacagctgaaacaaatcgaggggctggtgaaggagctgctggagagggagggactcacagctgcagggaaaattgagatcaaaattgtccgcccatgggctgaagggactgaagagggtgcacgttggctgactgatgaggacacgagaaacctcaaggagatcttcttcaatatcttggtgccgggagctgaagaggcccagaaggaacgccagcggcagaaagagctggagagcaattaccgccgggtgtggggctctccaggtggggagggcacaggggacctggacgaatttgacttctga

SEQ ID NO: 879 - RNA, 2004 nt, synthetic construct
  misc_feature 1..2004: note = AAB06495
  source 1..2004: mol_type = other RNA
atggcggcggaaacgctgctgtccagtttgttaggactgctgcttctgggactcctgttacccgcaagtctgaccggcggtgtcgggagcctgaacctggaggagctgagtgagatgcgttatgggatcgagatcctgccgttgcctgtcatgggagggcagagccaatcttcggacgtggtgattgtctcctctaagtacaaacagcgctatgagtgtcgcctgccagctggagctattcacttccagcgtgaaagggaggaggaaacacctgcttaccaagggcctgggatccctgagttgttgagcccaatgagagatgctccctgcttgctgaagacaaaggactggtggacatatgaattctgttatggacgccacatccagcaataccacatggaagattcagagatcaaaggtgaagtcctctatctcggctactaccaatcagccttcgactgggatgatgaaacagccaaggcctccaagcagcatcgtcttaaacgctaccacagccagacctatggcaatgggtccaagtgcgaccttaatgggaggccccgggaggccgaggttcggttcctctgtgacgagggtgcaggtatctctggggactacatcgatcgcgtggacgagcccttgtcctgctcttatgtgctgaccattcgcactcctcggctctgcccccaccctctcctccggcccccacccagtgctgcaccacaggccatcctctgtcacccttccctacagcctgaggagtacatggcctacgttcagaggcaagccgactcaaagcagtatggagataaaatcatagaggagctgcaagatctaggcccccaagtgtggagtgagaccaagtctggggtggcaccccaaaagatggcaggtgcgagcccgaccaaggatgacagtaaggactcagatttctggaagatgcttaatgagccagaggaccaggccccaggaggggaggaggtgccggctgaggagcaggacccaagccctgaggcagcagattcagcttctggtgctcccaatgattttcagaacaacgtgcaggtcaaagtcattcgaagccctgcggatttgattcgattcatagaggagctgaaaggtggaacaaaaaaggggaagccaaatataggccaagagcagcctgtggatgatgctgcagaagtccctcagagggaaccagagaaggaaaggggtgatccagaacggcagagagagatggaagaagaggaggatgaggatgaggatgaggatgaagatgaggatgaacggcagttactgggagaatttgagaaggaactggaagggatcctgcttccgtcagaccgagaccggctccgttcggaggtgaaggctggcatggagcgggaactggagaacatcatccaggagacagagaaagagctggacccagatgggctgaagaaggagtcagagcgggatcgggcaatgctggctctcacatccactctcaacaaactcatcaaaagactggaggaaaaacagagtccagagctggtgaagaagcacaagaaaaagagggttgtccccaaaaagcctcccccatcaccccaacctacagaggaggatcctgagcacagagtccgggtccgggtcaccaagctccgtctcggaggccctaatcaggatctgactgtcctcgagatgaaacgggaaaacccacagctgaaacaaatcgaggggctggtgaaggagctgctggagagggagggactcacagctgcagggaaaattgagatcaaaattgtccgcccatgggctgaagggactgaagagggtgcacgttggctgactgatgaggacacgagaaacctcaaggagatcttcttcaatatcttggtgccgggagctgaagaggcccagaaggaacgccagcggcagaaagagctggagagcaattaccgccgggtgtggggctctccaggtggggagggcacaggggacctggacgaatttgacttctga

SEQ ID NO: 880 - RNA, 303 nt, synthetic construct
  misc_feature 1..303: note = AAI13433
  source 1..303: mol_type = other RNA
atgagagccctcacactcctcgccctattggccctggccgcactttgcatcgctggccaggcaggtgcgaagcccagcggtgcagagtccagcaaaggtgcagcctttgtgtccaagcaggagggcagcgaggtagtgaagagacccaggcgctacctgtatcaatggctgggagccccagtcccctacccggatcccctggagcccaggagggaggtgtgtgagctcaatccggactgtgacgagttggctgaccacatcggctttcaggaggcctatcggcgcttctacggcccggtctag

SEQ ID NO: 881 - RNA, 945 nt, synthetic construct
  misc_feature 1..945: note = EAX06008
  source 1..945: mol_type = other RNA
atgagaattgcagtgatttgcttttgcctcctaggcatcacctgtgccataccagttaaacaggctgattctggaagttctgaggaaaagcagctttacaacaaatacccagatgctgtggccacatggctaaaccctgacccatctcagaagcagaatctcctagccccacagaatgctgtgtcctctgaagaaaccaatgactttaaacaagagacccttccaagtaagtccaacgaaagccatgaccacatggatgatatggatgatgaagatgatgatgaccatgtggacagccaggactccattgactcgaacgactctgatgatgtagatgacactgatgattctcaccagtctgatgagtctcaccattctgatgaatctgatgaactggtcactgattttcccacggacctgccagcaaccgaagttttcactccagttgtccccacagtagacacatatgatggccgaggtgatagtgtggtttatggactgaggtcaaaatctaagaagtttcgcagacctgacatccagtaccctgatgctacagacgaggacatcacctcacacatggaaagcgaggagttgaatggtgcatacaaggccatccccgttgcccaggacctgaacgcgccttctgattgggacagccgtgggaaggacagttatgaaacgagtcagctggatgaccagagtgctgaaacccacagccacaagcagtccagattatataagcggaaagccaatgatgagagcaatgagcattccgatgtgattgatagtcaggaactttccaaagtcagccgtgaattccacagccatgaatttcacagccatgaagatatgctggttgtagaccccaaaagtaaggaagaagataaacacctgaaatttcgtatttctcatgaattagatagtgcatcttctgaggtcaattaa

SEQ ID NO: 882 - RNA, 903 nt, synthetic construct
  misc_feature 1..903: note = EAX06009
  source 1..903: mol_type = other RNA
atgagaattgcagtgatttgcttttgcctcctaggcatcacctgtgccataccagttaaacaggctgattctggaagttctgaggaaaagcagctttacaacaaatacccagatgctgtggccacatggctaaaccctgacccatctcagaagcagaatctcctagccccacagacccttccaagtaagtccaacgaaagccatgaccacatggatgatatggatgatgaagatgatgatgaccatgtggacagccaggactccattgactcgaacgactctgatgatgtagatgacactgatgattctcaccagtctgatgagtctcaccattctgatgaatctgatgaactggtcactgattttcccacggacctgccagcaaccgaagttttcactccagttgtccccacagtagacacatatgatggccgaggtgatagtgtggtttatggactgaggtcaaaatctaagaagtttcgcagacctgacatccagtaccctgatgctacagacgaggacatcacctcacacatggaaagcgaggagttgaatggtgcatacaaggccatccccgttgcccaggacctgaacgcgccttctgattgggacagccgtgggaaggacagttatgaaacgagtcagctggatgaccagagtgctgaaacccacagccacaagcagtccagattatataagcggaaagccaatgatgagagcaatgagcattccgatgtgattgatagtcaggaactttccaaagtcagccgtgaattccacagccatgaatttcacagccatgaagatatgctggttgtagaccccaaaagtaaggaagaagataaacacctgaaatttcgtatttctcatgaattagatagtgcatcttctgaggtcaattaa

SEQ ID NO: 883 - RNA, 864 nt, synthetic construct
  misc_feature 1..864: note = EAX06010
  source 1..864: mol_type = other RNA
atgagaattgcagtgatttgcttttgcctcctaggcatcacctgtgccataccagttaaacaggctgattctggaagttctgaggaaaagcagaatgctgtgtcctctgaagaaaccaatgactttaaacaagagacccttccaagtaagtccaacgaaagccatgaccacatggatgatatggatgatgaagatgatgatgaccatgtggacagccaggactccattgactcgaacgactctgatgatgtagatgacactgatgattctcaccagtctgatgagtctcaccattctgatgaatctgatgaactggtcactgattttcccacggacctgccagcaaccgaagttttcactccagttgtccccacagtagacacatatgatggccgaggtgatagtgtggtttatggactgaggtcaaaatctaagaagtttcgcagacctgacatccagtaccctgatgctacagacgaggacatcacctcacacatggaaagcgaggagttgaatggtgcatacaaggccatccccgttgcccaggacctgaacgcgccttctgattgggacagccgtgggaaggacagttatgaaacgagtcagctggatgaccagagtgctgaaacccacagccacaagcagtccagattatataagcggaaagccaatgatgagagcaatgagcattccgatgtgattgatagtcaggaactttccaaagtcagccgtgaattccacagccatgaatttcacagccatgaagatatgctggttgtagaccccaaaagtaaggaagaagataaacacctgaaatttcgtatttctcatgaattagatagtgcatcttctgaggtcaattaa

SEQ ID NO: 884 - RNA, 984 nt, synthetic construct
  misc_feature 1..984: note = BAH12087
  source 1..984: mol_type = other RNA
atgggcattgtccccagaagcttggacaaaaaggcacacagagttcaattccagttgaacagaataaaggccaaaatagagctgccttgggggtcactgcaattagactgcttgatgaagacattaaaagaactttacaacaaatacccagatgctgtggccacatggctaaaccctgacccatctcagaagcagaatctcctagccccacagaatgctgtgtcctctgaagaaaccaatgactttaaacaagagacccttccaagtaagtccaacgaaagccatgaccacatggatgatatggatgatgaagatgatgatgaccatgtggacagccaggactccattgactcgaacgactctgatgatgtagatgacactgatgattctcaccagtctgatgagtctcaccattctgatgaatctgatgaactggtcactgattttcccacggacctgccagcaaccgaagttttcactccagttgtccccacagtagacacatatgatggccgaggtgatagtgtggtttatggactgaggtcaaaatctaagaagtttcgcagacctgacatccagtaccctgatgctacagacgaggacatcacctcacacatggaaagcgaggagttgaatggtgcatacaaggccatccccgttgcccaggacctgaacgcgccttctgattgggacagccgtgggaaggacagttatgaaacgagtcagctggatgaccagagtgctgaaacccacagccacaagcagtccagattatataagcggaaagccaatgatgagagcaatgagcattccgatgtgattgatagtcaggaactttccaaagtcagccgtgaattccacagccatgaatttcacagccatgaagatatgctggttgtagaccccaaaagtaaggaagaagataaacacctgaaatttcgtatttctcatgaattagatagtgcatcttctgaggtcaattaa

SEQ ID NO: 885 - RNA, 879 nt, synthetic construct
  misc_feature 1..879: note = AEA49030
  source 1..879: mol_type = other RNA
atgagaattgcagtgatttgcttttgcctcctaggcatcacctgtgccataccagttaaacaggctgattctggaagttctgaggaaaagcagctttacaacaaatacccagatgctgtggccacatggctaaaccctgacccatctcagaagcagaatctcctagccccacagaatgctgtgtcctctgaagaaaccaatgactttaaacaagagacccttccaagtaagtccaacgaaagccatgaccacatggatgatatggatgatgaagatgatgattctcaccagtctgatgagtctcaccattctgatgaatctgatgaactggtcactgattttcccacggacctgccagcaaccgaagttttcactccagttgtccccacagtagacacatatgatggccgaggtgatagtgtggtttatggactgaggtcaaaatctaagaagtttcgcagacctgacatccagtaccctgatgctacagacgaggacatcacctcacacatggaaagcgaggagttgaatggtgcatacaaggccatccccgttgcccaggacctgaacgcgccttctgattgggacagccgtgggaaggacagttatgaaacgagtcagctggatgaccagagtgctgaaacccacagccacaagcagtccagattatataagcggaaagctaatgatgagagcaatgagcattccgatgtgattgatagtcaggaactttccaaagtcagccgtgaattccacagccatgaatttcacagccatgaagatatgctggttgtagaccccaaaagtaaggaagaagataaacacctgaaatttcgtatttctcatgaattagatagtgcatcttctgaggtcaattaa

SEQ ID NO: 886 - RNA, 945 nt, synthetic construct; identical to SEQ ID NO: 881
  misc_feature 1..945: note = AAA86886
  source 1..945: mol_type = other RNA

SEQ ID NO: 887 - RNA, 1182 nt, synthetic construct
  misc_feature 1..1182: note = AAA59988
  source 1..1182: mol_type = other RNA
atggaggagccgcagtcagatcctagcgtcgagccccctctgagtcaggaaacattttcagacctatggaaactacttcctgaaaacaacgttctgtcccccttgccgtcccaagcaatggatgatttgatgctgtccccggacgatattgaacaatggttcactgaagacccaggtccagatgaagctcccagaatgccagaggctgctccccccgtggcccctgcaccagcagctcctacaccggcggcccctgcaccagccccctcctggcccctgtcatcttctgtcccttcccagaaaacctaccagggcagctacggtttccgtctgggcttcttgcattctgggacagccaagtctgtgacttgcacgtactcccctgccctcaacaagatgttttgccaactggccaagacctgccctgtgcagctgtgggttgattccacacccccgcccggcacccgcgtccgcgccatggccatctacaagcagtcacagcacatgacggaggttgtgaggcgctgcccccaccatgagcgctgctcagatagcgatggtctggcccctcctcagcatcttatccgagtggaaggaaatttgcgtgtggagtatttggatgacagaaacacttttcgacatagtgtggtggtgccctatgagccgcctgaggttggctctgactgtaccaccatccactacaactacatgtgtaacagttcctgcatgggcggcatgaaccggaggcccatcctcaccatcatcacactggaagactccagtggtaatctactgggacggaacagctttgaggtgcgtgtttgtgcctgtcctgggagagaccggcgcacagaggaagagaatctccgcaagaaaggggagcctcaccacgagctgcccccagggagcactaagcgagcactgcccaacaacaccagctcctctccccagccaaagaagaaaccactggatggagaatatttcacccttcagatccgtgggcgtgagcgcttcgagatgttccgagagctgaatgaggccttggaactcaaggatgcccaggctgggaaggagccaggggggagcagggctcactccagccacctgaagtccaaaaagggtcagtctacctcccgccataaaaaactcatgttcaagacagaagggcctgactcagactga

SEQ ID NO: 888 - RNA, 309 nt, synthetic construct
  misc_feature 1..309: note = AAF88037
  source 1..309: mol_type = other RNA
atgagtgcacgagtgagatcaagatccagaggaagaggagatggtcaggaggctcccgatgtggttgcattcgtggctcccggtgaatctcagcaagaggaaccaccaactgacaatcaggatattgaacctggacaagagagagaaggaacacctccgatcgaagaacgtaaagtagaaggtgattgccaggaaatggatctggaaaagactcggagtgagcgtggagatggctctgatgtaaaagagaagactccacctaatcctaagcatgctaagactaaagaagcaggagatgggcagccataa

SEQ ID NO: 889 - RNA, 1209 nt, synthetic construct
  misc_feature 1..1209: note = AAA60003
  source 1..1209: mol_type = other RNA
atgcagatgtctccagccctcacctgcctagtcctgggcctggcccttgtctttggtgaagggtctgctgtgcaccatcccccatcctacgtggcccacctggcctcagacttcggggtgagggtgtttcagcaggtggcgcaggcctccaaggaccgcaacgtggttttctcaccctatggggtggcctcggtgttggccatgctccagctgacaacaggaggagaaacccagcagcagattcaagcagctatgggattcaagattgatgacaagggcatggcccccgccctccggcatctgtacaaggagctcatggggccatggaacaaggatgagatcagcaccacagacgcgatcttcgtccagcgggatctgaagctggtccagggcttcatgccccacttcttcaggctgttccggagcacggtcaagcaagtggacttttcagaggtggagagagccagattcatcatcaatgactgggtgaagacacacacaaaaggtatgatcagcaacttgcttgggaaaggagccgtggaccagctgacacggctggtgctggtgaatgccctctacttcaacggccagtggaagactcccttccccgactccagcacccaccgccgcctcttccacaaatcagacggcagcactgtctctgtgcccatgatggctcagaccaacaagttcaactatactgagttcaccacgcccgatggccattactacgacatcctggaactgccctaccacggggacaccctcagcatgttcattgctgccccttatgaaaaagaggtgcctctctctgccctcaccaacattctgagtgcccagctcatcagccactggaaaggcaacatgaccaggctgccccgcctcctggttctgcccaagttctccctggagactgaagtcgacctcaggaagcccctagagaacctgggaatgaccgacatgttcagacagtttcaggctgacttcacgagtctttcagaccaagagcctctccacgtcgcgcaggcgctgcagaaagtgaagatcgaggtgaacgagagtggcacggtggcctcctcatccacagctgtcatagtctcagcccgcatggcccccgaggagatcatcatggacagacccttcctctttgtggtccggcacaaccccacaggaacagtccttttcatgggccaagtgatggaaccctga

SEQ ID NO: 890 - RNA, 1248 nt, synthetic construct
  misc_feature 1..1248: note = AAA36797
  source 1..1248: mol_type = other RNA
atggaggatctttgtgtggcaaacacactctttgccctcaatttattcaagcatctggcaaaagcaagccccacccagaacctcttcctctccccatggagcatctcgtccaccatggccatggtctacatgggctccaggggcagcaccgaagaccagatggccaaggtgcttcagtttaatgaagtgggagccaatgcagttacccccatgactccagagaactttaccagctgtgggttcatgcagcagatccagaagggtagttatcctgatgcgattttgcaggcacaagctgcagataaaatccattcatccttccgctctctcagctctgcaatcaatgcatccacagggaattatttactggaaagtgtcaataagctgtttggtgagaagtctgcgagcttccgggaagaatatattcgactctgtcagaaatattactcctcagaaccccaggcagtagacttcctagaatgtgcagaagaagctagaaaaaagattaattcctgggtcaagactcaaaccaaaggcaaaatcccaaacttgttacctgaaggttctgtagatggggataccaggatggtcctggtgaatgctgtctacttcaaaggaaagtggaaaactccatttgagaagaaactaaatgggctttatcctttccgtgtaaactcggctcagcgcacacctgtacagatgatgtacttgcgtgaaaagctaaacattggatacatagaagacctaaaggctcagattctagaactcccatatgctggagatgttagcatgttcttgttgcttccagatgaaattgccgatgtgtccactggcttggagctgctggaaagtgaaataacctatgacaaactcaacaagtggaccagcaaagacaaaatggctgaagatgaagttgaggtatacataccccagttcaaattagaagagcattatgaactcagatccattctgagaagcatgggcatggaggacgccttcaacaagggacgggccaatttctcagggatgtcggagaggaatgacctgtttctttctgaagtgttccaccaagccatggtggatgtgaatgaggagggcactgaagcagccgctggcacaggaggtgttatgacagggagaactggacatggaggcccacagtttgtggcagatcatccttttctttttcttattatgcataagataaccaactgcattttatttttcggcagattttcctcaccctaa

SEQ ID NO: 891 - RNA, 528 nt, synthetic construct
  misc_feature 1..528: note = AAA60020
  source 1..528: mol_type = other RNA
atgctgcctcccatggccctgcccagtgtatcttggatgctgctttcctgcctcatgctgctgtctcaggttcaaggtgaagaaccccagagggaactgccctctgcacggatccgctgtcccaaaggctccaaggcctatggctcccactgctatgccttgtttttgtcaccaaaatcctggacagatgcagatctggcctgccagaagcggccctctggaaacctggtgtctgtgctcagtggggctgagggatccttcgtgtcctccctggtgaagagcattggtaacagctactcatacgtctggattgggctccatgaccccacacagggcaccgagcccaatggagaaggttgggagtggagtagcagtgatgtgatgaattactttgcatgggagagaaatccctccaccatctcaagccccggccactgtgcgagcctgtcgagaagcacagcatttctgaggtggaaagattataactgtaatgtgaggttaccctatgtctgcaagttcactgactag

SEQ ID NO: 892 - RNA, 528 nt, synthetic construct; identical to SEQ ID NO: 891
  misc_feature 1..528: note = AAT11159
  source 1..528: mol_type = other RNA

SEQ ID NO: 893 - RNA, 381 nt, synthetic construct
  misc_feature 1..381: note = AAH39863
  source 1..381: mol_type = other RNA
atggacaagtccctcttgctggaactccccatcctgctctgctgctttagggcattatctggatcactttcaatgagaaatgatgcagtcaatgaaatagttgctgtgaaaaacaattttcctgtgatagaaattgttcagtgtaggatgtgccacctccagttcccaggagaaaagtgctccagaggaagaggaatatgcacagcaacaacagaagaggcctgcatggttggaaggatgttcaaaagggatggtaatccctggttaaccttcatgggctgcctaaagaactgtgctgatgtgaaaggcataaggtggagtgtctatttggtgaacttcaggtgctgcaggagccatgacctgtgcaatgaagacctttag

SEQ ID NO: 894 - RNA, 1440 nt, synthetic construct
  misc_feature 1..1440: note = CCDS42826.1
  source 1..1440: mol_type = other RNA
atgaccacgctggccggcgctgtgcccaggatgatgcggccgggcccggggcagaactacccgcgtagcgggttcccgctggaagtgtccactcccctcggccagggccgcgtcaaccagctcggcggtgtttttatcaacggcaggccgctgcccaaccacatccgccacaagatcgtggagatggcccaccacggcatccggccctgcgtcatctcgcgccagctgcgcgtgtcccacggctgcgtctccaagatcctgtgcaggtaccaggagactggctccatacgtcctggtgccatcggcggcagcaagcccaagcaggtgacaacgcctgacgtggagaagaaaattgaggaatacaaaagagagaacccgggcatgttcagctgggaaatccgagacaaattactcaaggacgcggtctgtgatcgaaacaccgtgccgtcagtgagttccatcagccgcatcctgagaagtaaattcgggaaaggtgaagaggaggaggccgacttggagaggaaggaggcagaggaaagcgagaagaaggccaaacacagcatcgacggcatcctgagcgagcgagcctcagcaccccaatcagatgaaggctctgatattgactctgaaccagatttaccactaaagaggaaacagcgcagaagccgaaccaccttcacagcagaacagctggaggaactggagcgtgcttttgagagaactcattaccctgacatttatactagggaggaactggcccagagggcgaagctcaccgaggcccgagtacaggtctggtttagcaaccgccgtgcaagatggaggaagcaagctggggccaatcaactgatggctttcaaccatctcattcccggggggttccctcccactgccatgccgaccttgccaacgtaccagctgtcggagacctcttaccagcccacatctattccacaagctgtgtcagatcccagcagcaccgttcacagacctcaaccgcttcctccaagcactgtacaccaaagcacgattccttccaacccagacagcagctctgcctactgcctccccagcaccaggcatggattttccagctatacagacagctttgtgcctccgtcggggccctccaaccccatgaaccccaccattggcaatggcctctcacctcaggtaatgggactcctgaccaaccacggtggggtacctcatcagccccagactgattacgcgctctcccctctcaccgggggtctggaacctaccaccacggtgtcggccagctgcagtcagagactagaccatatgaagagcttggacagtctgccaacatctcagtcctactgtccacccacctatagcaccacaggctacagtatggaccctgtcacaggctaccaatatgggcagtatggacaaagtaagccttggactttttag

SEQ ID NO: 895 - RNA, 1176 nt, synthetic construct
  misc_feature 1..1176: note = AAA58397
  source 1..1176: mol_type = other RNA
atggatttagagaaaaattatccgactcctcggaccagcaggacaggacatggaggagtgaatcagcttgggggggtttttgtgaatggacggccactcccggatgtagtccgccagaggatagtggaacttgctcatcaaggtgtcaggccctgcgacatctccaggcagcttcgggtcagccatggttgtgtcagcaaaattcttggcaggtattatgagacaggaagcatcaagcctggggtaattggaggatccaaaccaaaggtcgccacacccaaagtggtggaaaaaatcgctgaatataaacgccaaaatcccaccatgtttgcctgggagatcagggaccggctgctggcagagcgggtgtgtgacaatgacaccgtgcctagcgtcagttccatcaacaggatcatccggacaaaagtacagcagccacccaaccaaccagtcccagcttccagtcacagcatagtgtccactggctccgtgacgcaggtgtcctcggtgagcacggattcggccggctcgtcgtactccatcagcggcatcctgggcatcacgtcccccagcgccgacaccaacaagcgcaagagagacgaaggtattcaggagtctccggtgccgaacggccactcgcttccgggcagagacttcctccggaagcagatgcggggagacttgttcacacagcagcagctggaggtgctggaccgcgtgtttgagaggcagcactactcagacatcttcaccaccacagagcccatcaagcccgagcagaccacagagtattcagccatggcctcgctggctggtgggctggacgacatgaaggccaatctggccagccccacccctgctgacatcgggagcagtgtgccaggcccgcagtcctaccccattgtgacaggccgtgacttggcgagcacgaccctccccgggtaccctccacacgtcccccccgctggacagggcagctactcagcaccgacgctgacagggatggtgcctgggagtgagttttccgggagtccctacagccaccctcagtattcctcgtacaacgactcctggaggttccccaacccggggctgcttggctccccctactattatagcgctgccgcccgaggagccgccccacctgcagccgccactgcctatgaccgtcactga

SEQ ID NO: 896 - RNA, 873 nt, synthetic construct
  misc_feature 1..873: note = AAF25807
  source 1..873: mol_type = other RNA
atgaggatatttgctgtctttatattcatgacctactggcatttgctgaacgcatttactgtcacggttcccaaggacctatatgtggtagagtatggtagcaatatgacaattgaatgcaaattcccagtagaaaaacaattagacctggctgcactaattgtctattgggaaatggaggataagaacattattcaatttgtgcatggagaggaagacctgaaggttcagcatagtagctacagacagagggcccggctgttgaaggaccagctctccctgggaaatgctgcacttcagatcacagatgtgaaattgcaggatgcaggggtgtaccgctgcatgatcagctatggtggtgccgactacaagcgaattactgtgaaagtcaatgccccatacaacaaaatcaaccaaagaattttggttgtggatccagtcacctctgaacatgaactgacatgtcaggctgagggctaccccaaggccgaagtcatctggacaagcagtgaccatcaagtcctgagtggtaagaccaccaccaccaattccaagagagaggagaagcttttcaatgtgaccagcacactgagaatcaacacaacaactaatgagattttctactgcacttttaggagattagatcctgaggaaaaccatacagctgaattggtcatcccagaactacctctggcacatcctccaaatgaaaggactcacttggtaattctgggagccatcttattatgccttggtgtagcactgacattcatcttccgtttaagaaaagggagaatgatggatgtgaaaaaatgtggcatccaagatacaaactcaaagaagcaaagtgatacacatttggaggagacgtaa

SEQ ID NO: 897 - RNA, 867 nt, synthetic construct
  misc_feature 1..867: note = AAH74740
  source 1..867: mol_type = other RNA
atgcagatcccacaggcgccctggccagtcgtctgggcggtgctacaactgggctggcggccaggatggttcttagactccccagacaggccctggaacccccccaccttctccccagccctgctcgtggtgaccgaaggggacaacgccaccttcacctgcagcttctccaacacatcggagagcttcgtgctaaactggtaccgcatgagccccagcaaccagacggacaagctggccgctttccccgaggaccgcagccagcccggccaggactgccgcttccgtgtcacacaactgcccaacgggcgtgacttccacatgagcgtggtcagggcccggcgcaatgacagcggcacctacctctgtggggccatctccctggcccccaaggcgcagatcaaagagagcctgcgggcagagctcagggtgacagagagaagggcagaagtgcccacagcccaccccagcccctcacccaggccagccggccagttccaaaccctggtggttggtgtcgtgggcggcctgctgggcagcctggtgctgctagtctgggtcctggccgtcatctgctcccgggccgcacgagggacaataggagccaggcgcaccggccagcccctgaaggaggacccctcagccgtgcctgtgttctctgtggactatggggagctggatttccagtggcgagagaagaccccggagccccccgtgccctgtgtccctgagcagacggagtatgccaccattgtctttcctagcggaatgggcacctcatcccccgcccgcaggggctcagccgacggccctcggagtgcccagccactgaggcctgaggatggacactgctcttggcccctctga

SEQ ID NO: 898 - RNA, 1008 nt, synthetic construct
  misc_feature 1..1008: note = AAC95296
  source 1..1008: mol_type = other RNA
atgggcagcgccagcccgggtctgagcagcgtatcccccagccacctcctgctgccccccgacacggtgtcgcggacaggcttggagaaggcggcagcgggggcagtgggtctcgagagacgggactggagtcccagtccacccgccacgcccgagcagggcctgtccgccttctacctctcctactttgacatgctgtaccctgaggacagcagctgggcagccaaggcccctggggccagcagtcgggaggagccacctgaggagcctgagcagtgcccggtcattgacagccaagccccagcgggcagcctggacttggtgcccggcgggctgaccttggaggagcactcgctggagcaggtgcagtccatggtggtgggcgaagtgctcaaggacatcgagacggcctgcaagctgctcaacatcaccgcagatcccatggactggagccccagcaatgtgcagaagtggctcctgtggacagagcaccaataccggctgccccccatgggcaaggccttccaggagctggcgggcaaggagctgtgcgccatgtcggaggagcagttccgccagcgctcgcccctgggtggggatgtgctgcacgcccacctggacatctggaagtcagcggcctggatgaaagagcggacttcacctggggcgattcactactgtgcctcgaccagtgaggagagctggaccgacagcgaggtggactcatcatgctccgggcagcccatccacctgtggcagttcctcaaggagttgctactcaagccccacagctatggccgcttcattaggtggctcaacaaggagaagggcatcttcaaaattgaggactcagcccaggtggcccggctgtggggcatccgcaagaaccgtcccgccatgaactacgacaagctgagccgctccatccgccagtattacaagaagggcatcatccggaagccagacatctcccagcgcctcgtctaccagttcgtgcaccccatctga

SEQ ID NO: 899 - RNA, 2217 nt, synthetic construct
  misc_feature 1..2217: note = AAA36429
  source 1..2217: mol_type = other RNA
atgcagccgaggtgggcccaaggggccacgatgtggcttggagtcctgctgacccttctgctctgttcaagccttgagggtcaagaaaactctttcacaatcaacagtgttgacatgaagagcctgccggactggacggtgcaaaatgggaagaacctgaccctgcagtgcttcgcggatgtcagcaccacctctcacgtcaagcctcagcaccagatgctgttctataaggatgacgtgctgttttacaacatctcctccatgaagagcacagagagttattttattcctgaagtccggatctatgactcagggacatataaatgtactgtgattgtgaacaacaaagagaaaaccactgcagagtaccagctgttggtggaaggagtgcccagtcccagggtgacactggacaagaaagaggccatccaaggtgggatcgtgagggtcaactgttctgtcccagaggaaaaggccccaatacacttcacaattgaaaaacttgaactaaatgaaaaaatggtcaagctgaaaagagagaagaattctcgagaccagaattttgtgatactggaattccccgttgaggaacaggaccgcgttttatccttccgatgtcaagctaggatcatttctgggatccatatgcagacctcagaatctaccaagagtgaactggtcaccgtgacggaatccttctctacacccaagttccacatcagccccaccggaatgatcatggaaggagctcagctccacattaagtgcaccattcaagtgactcacctggcccaggagtttccagaaatcataattcagaaggacaaggcgattgtggcccacaacagacatggcaacaaggctgtgtactcagtcatggccatggtggagcacagtggcaactacacgtgcaaagtggagtccagccgcatatccaaggtcagcagcatcgtggtcaacataacagaactattttccaagcccgaactggaatcttccttcacacatctggaccaaggtgaaagactgaacctgtcctgctccatcccaggagcacctccagccaacttcaccatccagaaggaagatacgattgtgtcacagactcaagatttcaccaagatagcctcaaagtcggacagtgggacgtatatctgcactgcaggtattgacaaagtggtcaagaaaagcaacacagtccagatagtcgtatgtgaaatgctctcccagcccaggatttcttatgatgcccagtttgaggtcataaaaggacagaccatcgaagtccgttgcgaatcgatcagtggaactttgcctatttcttaccaacttttaaaaacaagtaaagttttggagaatagtaccaagaactcaaatgatcctgcggtattcaaagacaaccccactgaagacgtcgaataccagtgtgttgcagataattgccattcccatgccaaaatgttaagtgaggttctgagggtgaaggtgatagccccggtggatgaggtccagatttctatcctgtcaagtaaggtggtggagtctggagaggacattgtgctgcaatgtgctgtgaatgaaggatctggtcccatcacctataagttttacagagaaaaagagggcaaacccttctatcaaatgacctcaaatgccacccaggcattttggaccaagcagaaggctagcaaggaacaggagggagagtattactgcacagccttcaacagagccaaccacgcctccagtgtccccagaagcaaaatactgacagtcagagtcattcttgccccatggaagaaaggacttattgcagtggttatcatcggagtgatcattgctctcttgatcattgcggccaaatgttattttctgaggaaagccaaggccaagcagatgccagtggaaatgtccaggccagcagtaccacttctgaactccaacaacgagaaaatgtcagatcccaatatggaagctaacagtcattacggtcacaatgacgatgtcagaaaccatgcaatgaaaccaataaatgataataaagagcctctgaactcagacgtgcagtacacggaagttcaagtgtcctcagctgagtctcacaaagatctaggaaagaaggacacagagacagtgtacagtgaagtccggaaagctgtccctgatgccgtggaaagcagatactctagaacggaaggctcccttgatggaacttag

SEQ ID NO: 900 - RNA, 2736 nt, synthetic construct
  misc_feature 1..2736: note = AAG23134
  source 1..2736: mol_type = other RNA
atggcccagctgttcctgcccctgctggcagccctggtcctggcccaggctcctgcagctttagcagatgttctggaaggagacagctcagaggaccgcgcttttcgcgtgcgcatcgcgggcgacgcgccactgcagggcgtgctcggcggcgccctcaccatcccttgccacgtccactacctgcggccaccgccgagccgccgggctgtgctgggctctccgcgggtcaagtggactttcctgtcccggggccgggaggcagaggtgctggtggcgcggggagtgcgcgtcaaggtgaacgaggcctaccggttccgcgtggcactgcctgcgtacccagcgtcgctcaccgacgtctccctggcgctgagcgagctgcgccccaacgactcaggtatctatcgctgtgaggtccagcacggcatcgatgacagcagcgacgctgtggaggtcaaggtcaaaggggtcgtctttctctaccgagagggctctgcccgctatgctttctccttttctggggcccaggaggcctgtgcccgcattggagcccacatcgccaccccggagcagctctatgccgcctaccttgggggctatgagcaatgtgatgctggctggctgtcggatcagaccgtgaggtatcccatccagaccccacgagaggcctgttacggagacatggatggcttccccggggtccggaactatggtgtggtggacccggatgacctctatgatgtgtactgttatgctgaagacctaaatggagaattgttcctgggtgaccctccagagaagctgacattggaggaagcacgggcgtactgccaggagcggggtgcagagattgccaccacgggccaactgtatgcagcctgggatggtggcctggaccactgcagcccagggtggctagctgatggcagtgtgcgctaccccatcgtcacacccagccagcgctgtggtgggggcttgcctggtgtcaagactctcttcctcttccccaaccagactggcttccccaataagcacagccgcttcaacgtctactgcttccgagactcggcccagccttctgccatccctgaggcctccaacccagcctccaacccagcctctgatggactagaggctatcgtcacagtgacagagaccctggaggaactgcagctgcctcaggaagccacagagagtgaatcccgtggggccatctactccatccccatcatggaggacggaggaggtggaagctccactccagaagacccagcagaggcccctaggacgctcctagaatttgaaacacaatccatggtaccgcccacggggttctcagaagaggaaggtaaggcattggaggaagaagagaaatatgaagatgaagaagagaaagaggaggaagaagaagaggaggaggtggaggatgaggctctgtgggcatggcccagcgagctcagcagcccgggccctgaggcctctctccccactgagccagcagcccaggaggagtcactctcccaggcgccagcaagggcagtcctgcagcctggtgcatcaccacttcctgatggagagtcagaagcttccaggcctccaagggtccatggaccacctactgagactctgcccactcccagggagaggaacctagcatccccatcaccttccactctggttgaggcaagagaggtgggggaggcaactggtggtcctgagctatctggggtccctcgaggagagagcgaggagacaggaagctccgagggtgccccttccctgcttccagccacacgggcccctgagggtaccagggagctggaggccccctctgaagataattctggaagaactgccccagcagggacctcagtgcaggcccagccagtgctgcccactgacagcgccagccgaggtggagtggccgtggtccccgcatcaggtgactgtgtccccagcccctgccacaatggtgggacatgcttggaggaggaggaaggggtccgctgcctatgtctgcctggctatgggggggacctgtgcgatgttggcctccgcttctgcaaccccggctgggacgccttccagggcgcctgctacaagcacttttccacacgaaggagctgggaggaggcagagacccagtgccggatgtacggcgcgcatctggccagcatcagcacacccgaggaacaggacttcatcaacaaccggtaccgggagtaccagtggatcggactcaacgacaggaccatcgaaggcgacttcttgtggtcggatggcgtccccctgctctatgagaactggaaccctgggcagcctgacagctacttcctgtctggagagaactgcgtggtcatggtgtggcatgatcagggacaatggagtgacgtgccctgcaactaccacctgtcctacacctgcaagatggggctggtgtcctgtgggccgccaccggagctgcccctggctcaagtgttcggccgcccacggctgcgctatgaggtggacactgtgcttcgctaccggtgccgggaaggactggcccagcgcaatctgccgctgatccgatgccaagagaacggtcgttgggaggccccccagatctcctgtgtgcccagaagacctgcccgagctctgcacccagaggaggacccagaaggacgtcaggggaggctactgggacgctggaaggcgctgttgatccccccttccagccccatgccaggtccctag

SEQ ID NO: 901 - RNA, 3321 nt, synthetic construct
  misc_feature 1..3321: note = AAA60049
  source 1..3321: mol_type = other RNA
atgcggcttccgggtgcgatgccagctctggccctcaaaggcgagctgctgttgctgtctctcctgttacttctggaaccacagatctctcagggcctggtcgtcacacccccggggccagagcttgtcctcaatgtctccagcaccttcgttctgacctgctcgggttcagctccggtggtgtgggaacggatgtcccaggagcccccacaggaaatggccaaggcccaggatggcaccttctccagcgtgctcacactgaccaacctcactgggctagacacgggagaatacttttgcacccacaatgactcccgtggactggagaccgatgagcggaaacggctctacatctttgtgccagatcccaccgtgggcttcctccctaatgatgccgaggaactattcatctttctcacggaaataactgagatcaccattccatgccgagtaacagacccacagctggtggtgacactgcacgagaagaaaggggacgttgcactgcctgtcccctatgatcaccaacgtggcttttctggtatctttgaggacagaagctacatctgcaaaaccaccattggggacagggaggtggattctgatgcctactatgtctacagactccaggtgtcatccatcaacgtctctgtgaacgcagtgcagactgtggtccgccagggtgagaacatcaccctcatgtgcattgtgatcgggaatgaggtggtcaacttcgagtggacatacccccgcaaagaaagtgggcggctggtggagccggtgactgacttcctcttggatatgccttaccacatccgctccatcctgcacatccccagtgccgagttagaagactcggggacctacacctgcaatgtgacggagagtgtgaatgaccatcaggatgaaaaggccatcaacatcaccgtggttgagagcggctacgtgcggctcctgggagaggtgggcacactacaatttgctgagctgcatcggagccggacactgcaggtagtgttcgaggcctacccaccgcccactgtcctgtggttcaaagacaaccgcaccctgggcgactccagcgctggcgaaatcgccctgtccacgcgcaacgtgtcggagacccggtatgtgtcagagctgacactggttcgcgtgaaggtggcagaggctggccactacaccatgcgggccttccatgaggatgctgaggtccagctctccttccagctacagatcaatgtccctgtccgagtgctggagctaagtgagagccaccctgacagtggggaacagacagtccgctgtcgtggccggggcatgccccagccgaacatcatctggtctgcctgcagagacctcaaaaggtgtccacgtgagctgccgcccacgctgctggggaacagttccgaagaggagagccagctggagactaacgtgacgtactgggaggaggagcaggagtttgaggtggtgagcacactgcgtctgcagcacgtggatcggccactgtcggtgcgctgcacgctgcgcaacgctgtgggccaggacacgcaggaggtcatcgtggtgccacactccttgccctttaaggtggtggtgatctcagccatcctggccctggtggtgctcaccatcatctcccttatcatcctcatcatgctttggcagaagaagccacgttacgagatccgatggaaggtgattgagtctgtgagctctgacggccatgagtacatctacgtggaccccatgcagctgccctatgactccacgtgggagctgccgcgggaccagcttgtgctgggacgcaccctcggctctggggcctttgggcaggtggtggaggccacggctcatggcctgagccattctcaggccacgatgaaagtggccgtcaagatgcttaaatccacagcccgcagcagtgagaagcaagcccttatgtcggagctgaagatcatgagtcaccttgggccccacctgaacgtggtcaacctgttgggggcctgcaccaaaggaggacccatctatatcatcactgagtactgccgctacggagacctggtggactacctgcaccgcaacaaacacaccttcctgcagcaccactccgacaagcgccgcccgcccagcgcggagctctacagcaatgctctgcccgttgggctccccctgcccagccatgtgtccttgaccggggagagcgacggtggctacatggacatgagcaaggacgagtcggtggactatgtgcccatgctggacatgaaaggagacgtcaaatatgcagacatcgagtcctccaactacatggccccttacgataactacgttccctctgcccctgagaggacctgccgagcaactttgatcaacgagtctccagtgctaagctacatggacctcgtgggcttcagctaccaggtggccaatggcatggagtttctggcctccaagaactgcgtccacagagacctggcggctaggaacgtgctcatctgtgaaggcaagctggtcaagatctgtgactttggcctggctcgagacatcatgcgggactcgaattacatctccaaaggcagcacctttttgcctttaaagtggatggctccggagagcatcttcaacagcctctacaccaccctgagcgacgtgtggtccttcgggatcctgctctgggagatcttcaccttgggtggcaccccttacccagagctgcccatgaacgagcagttctacaatgccatcaaacggggttaccgcatggcccagcctgcccatgcctccgacgagatctatgagatcatgcagaagtgctgggaagagaagtttgagattcggccccccttctcccagctggtgctgcttctcgagagactgttgggcgaaggttacaaaaagaagtaccagcaggtggatgaggagtttctgaggagtgaccacccagccatccttcggtcccaggcccgcttgcctgggttccatggcctccgatctcccctggacaccagctccgtcctctatactgccgtgcagcccaatgagggtgacaacgactatatcatccccctgcctgaccccaaacccgaggttgctgacgagggcccactggagggttcccccagcctagccagctccaccctgaatgaagtcaacacctcctcaaccatctcctgtgacagccccctggagccccaggacgaaccagagccagagccccagcttgagctccaggtggagccggagccagagctggaacagttgccggattcggggtgccctgcgcctcgggcggaagcagaggatagcttcctgtag

SEQ ID NO: 902 - RNA, 942 nt, synthetic construct
  misc_feature 1..942: note = EAX03935
  source 1..942: mol_type = other RNA
atgctcttgtccaaaatcaactcgcttgcccacctgcgcgccgcgccctgcaacgacctgcacgccaccaagctggcgcccggcaaggagaaggagcccctggagtcgcagtaccaggtgggcccgctactgggcagcggcggcttcggctcggtctactcaggcatccgcgtctccgacaacttgccggtggccatcaaacacgtggagaaggaccggatttccgactggggagagctgcctaatggcactcgagtgcccatggaagtggtcctgctgaagaaggtgagctcgggtttctccggcgtcattaggctcctggactggttcgagaggcccgacagtttcgtcctgatcctggagaggcccgagccggtgcaagatctcttcgacttcatcacggaaaggggagccctgcaagaggagctggcccgcagcttcttctggcaggtgctggaggccgtgcggcactgccacaactgcggggtgctccaccgcgacatcaaggacgaaaacatccttatcgacctcaatcgcggcgagctcaagctcatcgacttcgggtcgggggcgctgctcaaggacaccgtctacacggacttcgatgggacccgagtgtatagccctccagagtggatccgctaccatcgctaccatggcaggtcggcggcagtctggtccctggggatcctgctgtatgatatggtgtgtggagatattcctttcgagcatgacgaagagatcatcaggggccaggttttcttcaggcagagggtctcttcagaatgtcagcatctcattagatggtgcttggccctgagaccatcagataggccaaccttcgaagaaatccagaaccatccatggatgcaagatgttctcctgccccaggaaactgctgagatccacctccacagcctgtcgccggggcccagcaaatag

SEQ ID NO: 903 - RNA, 303 nt, synthetic construct
  misc_feature 1..303: note = AAB81333
  source 1..303: mol_type = other RNA
atggcggacgaggagaaactgccgcctggctgggaaaagcgcatgagccgcccctcaggccgagggtactacttcaaccacatcactaaccccagccagtgggagcggcccagcgggaacagcagcagtggcggcaaaatctggcagggggagcccgccagggtccgccgctcgcacctgctagtgaagccagtcaaggcggccctcgacctggcggcaggaaatcacccggaccaaggaggaggccctggagctgatcagcggctacatccagaagatcaaggcaggagagaaggactttga

SEQ ID NO: 904 - RNA, 492 nt, synthetic construct
  misc_feature 1..492: note = AAC50492
  source 1..492: mol_type = other RNA
atggcggacgaggagaagctgccgcccggctgggagaagcgcatgagccgcagctcaggccgagtgtactacttcaaccacatcactaacgccagccagtgggagcggcccagcggcaacagcagcagtggtggcaaaaacgggcagggggagcctgccagggtccgctgctcgcacctgctggtgaagcacagccagtcacggcggccctcgtcctggcggcaggagaagatcacccggaccaaggaggaggccctggagctgatcaacggctacatccagaagatcaagtcgggagaggaggactttgagtctctggcctcacagttcagcgactgcagctcagccaaggccaggggagacctgggtgccttcagcagaggtcagatgcagaagccatttgaagacgcctcgtttgcgctgcggacgggggagatgagcgggcccgtgttcacggattccggcatccacatcatcctccgcactgagtga

SEQ ID NO: 905 - RNA, 138 nt, synthetic construct
  misc_feature 1..138: note = AAH31971
  source 1..138: mol_type = other RNA
atgcagaagccatttgaagacgcctcgtttgcgctgcggacgggggagatgagcgggcccgtgttcacggattccggcatccacatcatcctccgcactgagtgctggaggcagactcgagggccgaattgtttctag

SEQ ID NO: 906 - RNA, 639 nt, synthetic construct
  misc_feature 1..639: note = AAG22596
  source 1..639: mol_type = other RNA
atgaaagtttttaagttcataggactgatgatcctcctcacctctgcgttttcagccggttcaggacaaagtccaatgactgtgctgtgctccatagactggttcatggtcacagtgcaccccttcatgctaaacaacgatgtgtgtgtacactttcatgaactacacttgggcctgggttgccccccaaaccatgttcagccacacgcctaccagttcacctaccgtgttactgaatgtggcatcagggccaaagctgtctctcaggacatggttatctacagcactgagatacactactcttctaagggcacgccatctaagtttgtgatcccagtgtcatgtgctgccccccaaaagtccccatggctcaccaagccctgctccatgagagtagccagcaagagcagggccacagcccagaaggatgagaaatgctacgaggtgttcagcttgtcacagtccagtcaaaggcccaactgcgattgtccaccttgtgtcttcagtgaagaagagcatacccaggtcccttgtcaccaagcaggggctcaggaggctcaacctctgcagccatctcactttcttgatatttctgaggattggtctcttcacacagatgatatgattgggtccatgtga

SEQ ID NO: 907 - RNA, 1986 nt, synthetic construct
  misc_feature 1..1986: note = AAB00386
  source 1..1986: mol_type = other RNA
atggatctggtgctaaaaagatgccttcttcatttggctgtgataggtgctttgctggctgtgggggctacaaaagtacccagaaaccaggactggcttggtgtctcaaggcaactcagaaccaaagcctggaacaggcagctgtatccagagtggacagaagcccagagacttgactgctggagaggtggtcaagtgtccctcaaggtcagtaatgatgggcctacactgattggtgcaaatgcctccttctctattgccttgaacttccctggaagccaaaaggtattgccagatgggcaggttatctgggtcaacaataccatcatcaatgggagccaggtgtggggaggacagccagtgtatccccaggaaactgacgatgcctgcatcttccctgatggtggaccttgcccatctggctcttggtctcagaagagaagctttgtttatgtctggaagacctggggccaatactggcaagttctagggggcccagtgtctgggctgagcattgggacaggcagggcaatgctgggcacacacaccatggaagtgactgtctaccatcgccggggatcccggagctatgtgcctcttgctcattccagctcagccttcaccattactgaccaggtgcctttctccgtgagcgtgtcccagttgcgggccttggatggagggaacaagcacttcctgagaaatcagcctctgacctttgccctccagctccatgaccccagtggctatctggctgaagctgacctctcctacacctgggactttggagacagtagtggaaccctgatctctcgggcacttgtggtcactcatacttacctggagcctggcccagtcactgcccaggtggtcctgcaggctgccattcctctcacctcctgtggctcctccccagttccaggcaccacagatgggcacaggccaactgcagaggcccctaacaccacagctggccaagtgcctactacagaagttgtgggtactacacctggtcaggcgccaactgcagagccctctggaaccacatctgtgcaggtgccaaccactgaagtcataagcactgcacctgtgcagatgccaactgcagagagcacaggtatgacacctgagaaggtgccagtttcagaggtcatgggtaccacactggcagagatgtcaactccagaggctacaggtatgacacctgcagaggtatcaattgtggtgctttctggaaccacagctgcacaggtaacaactacagagtgggtggagaccacagctagagagctacctatccctgagcctgaaggtccagatgccagctcaatcatgtctacggaaagtattacaggttccctgggccccctgctggatggtacagccaccttaaggctggtgaagagacaagtccccctggattgtgttctgtatcgatatggttccttttccgtcaccctggacattgtccagggtattgaaagtgccgagatcctgcaggctgtgccgtccggtgagggggatgcatttgagctgactgtgtcctgccaaggcgggctgcccaaggaagcctgcatggagatctcatcgccagggtgccagccccctgcccagcggctgtgccagcctgtgctacccagcccagcctgccagctggttctgcaccagatactgaagggtggctcggggacatactgcctcaatgtgtctctggctgataccaacagcctggcagtggtcagcacccagcttatcatgcctggtcaagaagcaggccttgggcaggttccgctgatcgtgggcatcttgctggtgttgatggctgtggtccttgcatctctgatatataggcgcagacttatgaagcaagacttctccgtaccccagttgccacatagcagcagtcactggctgcgtctaccccgcatcttctgctcttgtcccattggtgagaatagccccctcctcagtgggcagcaggtctga

SEQ ID NO: 908 - RNA, 2649 nt, synthetic construct
  misc_feature 1..2649: note = CCDS10255.1
  source 1..2649: mol_type = other RNA
atggagcctgcacccgcccgatctccgaggccccagcaggaccccgcccggccccaggagcccaccatgcctccccccgagaccccctctgaaggccgccagcccagccccagccccagccctacagagcgagcccccgcttcggaggaggagttccagtttctgcgctgccagcaatgccaggcggaagccaagtgcccgaagctgctgccttgtctgcacacgctgtgctcaggatgcctggaggcgtcgggcatgcagtgccccatctgccaggcgccctggcccctaggtgcagacacacccgccctggataacgtctttttcgagagtctgcagcggcgcctgtcggtgtaccggcagattgtggatgcgcaggctgtgtgcacccgctgcaaagagtcggccgacttctggtgctttgagtgcgagcagctcctctgcgccaagtgcttcgaggcacaccagtggttcctcaagcacgaggcccggcccctagcagagctgcgcaaccagtcggtgcgtgagttcctggacggcacccgcaagaccaacaacatcttctgctccaaccccaaccaccgcacccctacgctgaccagcatctactgccgaggatgttccaagccgctgtgctgctcgtgcgcgctccttgacagcagccacagtgagctcaagtgcgacatcagcgcagagatccagcagcgacaggaggagctggacgccatgacgcaggcgctgcaggagcaggatagtgcctttggcgcggttcacgcgcagatgcacgcggccgtcggccagctgggccgcgcgcgtgccgagaccgaggagctgatccgcgagcgcgtgcgccaggtggtagctcacgtgcgggctcaggagcgcgagctgctggaggctgtggacgcgcggtaccagcgcgactacgaggagatggccagtcggctgggccgcctggatgctgtgctgcagcgcatccgcacgggcagcgcgctggtgcagaggatgaagtgctacgcctcggaccaggaggtgctggacatgcacggtttcctgcgccaggcgctctgccgcctgcgccaggaggagccccagagcctgcaagctgccgtgcgcaccgatggcttcgacgagttcaaggtgcgcctgcaggacctcagctcttgcatcacccaggggaaagatgcagctgtatccaagaaagccagcccagaggctgccagcactcccagggaccctattgacgttgacctgcccgaggaggcagagagagtgaaggcccaggttcaggccctggggctggctgaagcccagcctatggctgtggtacagtcagtgcccggggcacaccccgtgccagtgtacgccttctccatcaaaggcccttcctatggagaggatgtctccaatacaacgacagcccagaagaggaagtgcagccagacccagtgccccaggaaggtcatcaagatggagtctgaggaggggaaggaggcaaggttggctcggagctccccggagcagcccaggcccagcacctccaaggcagtctcaccaccccacctggatggaccgcctagccccaggagccccgtcataggaagtgaggtcttcctgcccaacagcaaccacgtggccagtggcgccggggaggcagaggaacgcgttgtggtgatcagcagctcggaagactcagatgccgaaaactcgtcctcccgagagctggatgacagcagcagtgagtccagtgacctccagctggaaggccccagcaccctcagggtcctggacgagaaccttgctgacccccaagcagaagacagacctctggttttctttgacctcaagattgacaatgaaacccagaagattagccagctggctgcggtgaaccgggaaagcaagttccgcgtggtcatccagcctgaagccttcttcagcatctactccaaggccgtgtccctggaggtggggctgcagcacttcctcagctttctgagctccatgcgccgccctatcttggcctgctacaagctgtgggggcctggcctcccaaacttcttccgggccctggaggacattaacaggctgtgggaattccaggaggccatctcgggcttcctggctgccctgcctctcatccgggagcgtgtgcccggggccagcagcttcaaactcaagaacctggcccagacctacctggcgagaaacatgagcgagcgcagcgccatggctgccgtgctggccatgcgtgacctgtgccgcctcctcgaggtctccccgggcccccagctggcccagcatgtctaccccttcagtagcctgcagtgctttgcctccctgcagcccctggtgcaggcagctgtgctgccccgggctgaggcccgcctcctggccctacacaacgtgagcttcatggagctgctgagtgcacaccgccgtgaccggcaggggggcctgaagaagtacagccgctatctaagcctgcagaccaccacgttgccccctgcccagcctgctttcaacctgcaggctctgggcacctactttgaaggcctgttggagggtccggcgctggcacgggcagaaggagtctccaccccacttgctggccgtggcttggcagagagggcctcccagcagagctga

SEQ ID NO: 909 - RNA, 3228 nt, synthetic construct
  misc_feature 1..3228: note = CCDS46409.1
  source 1..3228: mol_type = other RNA
atggtggttgaggttgattccatgccggctgcctcttctgtgaagaagccatttggtctcaggagcaagatgggcaagtggtgctgccgttgcttcccctgctgcagggagagcggcaagagcaacgtgggcacttctggagaccacgacgactctgctatgaagacactcaggagcaagatgggcaagtggtgccgccactgcttcccctgctgcagggggagtggcaagagcaacgtgggcgcttctggagaccacgacgactctgctatgaagacactcaggaacaagatgggcaagtggtgctgccactgcttcccctgctgcagggggagcagcaagagcaaggtgggcgcttggggagactacgatgacagtgccttcatggagcccaggtaccacgtccgtggagaagatctggacaagctccacagagctgcctggtggggtaaagtccccagaaaggatctcatcgtcatgctcagggacactgacgtgaacaagcaggacaagcaaaagaggactgctctacatctggcctctgccaatgggaattcagaagtagtaaaactcctgctggacagacgatgtcaacttaatgtccttgacaacaaaaagaggacagctctgataaaggccgtacaatgccaggaagatgaatgtgcgttaatgttgctggaacatggcactgatccaaatattccagatgagtatggaaataccactctgcactacgctatctataatgaagataaattaatggccaaagcactgctcttatatggtgctgatatcgaatcaaaaaacaagcatggcctcacaccactgttacttggtgtacatgagcaaaaacagcaagtcgtgaaatttttaattaagaaaaaagcgaatttaaatgcactggatagatatggaagaactgctctcatacttgctgtatgttgtggatcagcaagtatagtcagccttctacttgagcaaaatattgatgtatcttctcaagatctatctggacagacggccagagagtatgctgtttctagtcatcatcatgtaatttgccagttactttctgactacaaagaaaaacagatgctaaaaatctcttctgaaaacagcaatccagaacaagacttaaagctgacatcagaggaagagtcacaaaggttcaaaggcagtgaaaatagccagccagagaaaatgtctcaagaaccagaaataaataaggatggtgatagagaggttgaagaagaaatgaagaagcatgaaagtaataatgtgggattactagaaaacctgactaatggtgtcactgctggcaatggtgataatggattaattcctcaaaggaagagcagaacacctgaaaatcagcaatttcctgacaacgaaagtgaagagtatcacagaatttgtgaattactttctgactacaaagaaaagcagatgccaaaatactcttctgaaaacagcaacccagaacaagacttaaagctgacatcagaggaagagtcacaaaggcttaaaggcagtgaaaatggccagccagagaaaagatctcaagaaccagaaataaataaggatggtgatagagagctagaaaattttatggctatcgaagaaatgaagaagcacagaagtactcatgtcggattcccagaaaacctgactaatggtgccactgctggcaatggtgatgatggattaattcctccaaggaagagcagaacacctgaaagccagcaatttcctgacactgagaatgaagagtatcacagtgacgaacaaaatgatactcagaagcaattttgtgaagaacagaacactggaatattacacgatgagattctgattcatgaagaaaagcagatagaagtggttgaaaaaatgaattctgagctttctcttagttgtaagaaagaaaaagacatcttgcatgaaaatagtacgttgcgggaagaaattgccatgctaagactggagctagacacaatgaaacatcagagccagctaagagaaaagaaatatttggaggatattgaaagtgtgaaaaaaaggaatgataatcttttaaaggctctacaattgaatgagctcaccatggatgatgataccgctgtgctcgtcattgacaacggctctggcatgtgcaaggccggctttgcgggcgacgatgccccccgggctgtcttcccttccatcgtggggcgccccaggcagcagggcatgatggggggcatgcatcagaaagagtcctatgtgggcaaggaggcccagagcaaaagaggcatcctgaccctgaagtaccccatggaacacggcatcatcaccaactgggatgacatggagaagatctggcaccacaccttctacaacgagctgcgtgtggctcccgaggagcaccccgtcctgctgaccgaggccaccctgaaccctaaggccaaccgcgagaagatgacccagatcatgtttgagaccttcaacaccccagccatgtacgtggccatccaggctgtgctgtccctgtacacctctggccgtactactggcatcgtgatggactctggtgacggggtcacccacactgtgcccatctatgaggggaatgccctcccccatgccaccctgcgcctagacctggctgggcgggaactgcctgactacctcatgaagatcctcaccgagcatggctataggttcaccaccatggccgagcgggaaatcgtgcgtgacatcaaagagaagctgtgctatgttgccctggacttcgagcaggagatggccacggtggcctccagctcctccctagagaagagctacgagctgcccgatggccaggtcatcaccatcggcaacgagcggttccgctgccccgaggcgctcttccagccttgcttcctgggcatggaatcctgtggcatccatgaaactaccttcaactccatcatgaagtctgatgtggacatccgcaaagacctgtacaccaacacagtgctgtctggcggcaccaccatgtaccctggcatggcccacagaatgcagaaggagatcgctgccctggcgcctagcatgatgaagatcaggatcattgctcctcccaagcgcaagtactccgtgtgggtcggtggctccatcctggcctcgctgtccaccttccagcagatgtggatcagcaagcaggagtatgatgagtcaggcccctccattgtccaccgcaaatgcttgtag

SEQ ID NO: 910 - RNA, 1755 nt, synthetic construct
  misc_feature 1..1755: note = CCDS13562.1
  source 1..1755: mol_type = other RNA
atggtggctgaggtttgttcaatgcccactgcctctactgtgaagaagccatttgatctcaggagcaagatgggcaagtggtgccaccaccgcttcccctgctgcagggggagcggcaagagcaacatgggcacttctggagaccacgacgactcctttatgaagatgctcaggagcaagatgggcaagtgttgccgccactgcttcccctgctgcagggggagcggcacgagcaacgtgggcacttctggagaccatgaaaactcctttatgaagatgctcaggagcaagatgggcaagtggtgctgtcactgcttcccctgctgcagggggagcggcaagagcaacgtgggcgcttggggagactacgaccacagcgccttcatggagccgaggtaccacatccgtcgagaagatctggacaagctccacagagctgcctggtggggtaaagtccccagaaaggatctcatcgtcatgctcagggacactgacatgaacaagagggacaaggaaaagaggactgctctacatttggcctctgccaatggaaattcagaagtagtacaactcctgctggacagacgatgtcaacttaatgtccttgacaacaaaaaaaggacagctctgataaaggccatacaatgccaggaagatgaatgtgtgttaatgttgctggaacatggcgctgatcgaaatattccagatgagtatggaaataccgctctacactatgctatctacaatgaagataaattaatggccaaagcactgctcttatatggtgctgatattgaatcaaaaaacaagtgtggcctcacaccacttttgcttggcgtacatgaacaaaaacagcaagtggtgaaatttttaatcaagaaaaaagctaatttaaatgtacttgatagatatggaagaactgccctcatacttgctgtatgttgtggatcagcaagtatagtcaatcttctacttgagcaaaatgttgatgtatcttctcaagatctatctggacagacggccagagagtatgctgtttctagtcatcatcatgtaatttgtgaattactttctgactataaagaaaaacagatgctaaaaatctcttctgaaaacagcaatccagaacaagacttaaagctgacatcagaggaagagtcacaaaggcttaaagtcagtgaaaatagccagccagagaaaatgtctcaagaaccagaaataaataaggactgtgatagagaggttgaagaagaaataaagaagcatggaagtaatcctgtgggattaccagaaaacctgactaatggtgccagtgctggcaatggtgatgatggattaattccacaaaggaggagcagaaaacctgaaaatcagcaatttcctgacactgagaatgaagagtatcacagtgatgaacaaaatgatacccggaaacaactttctgaagaacagaacactggaatatcacaagatgagattctgactaataaacaaaagcagatagaagtggctgaacagaaaatgaattctgagctttctcttagtcataagaaagaagaagatctcttgcgtgaaaacagcgtgttgcaggaagaaattgccatgctaagactggaactagatgaaacaaaacatcagaaccagctaagggaaaataaaattttggaggaaattgaaagtgtgaaagaaaagactgataaacttctaagggctatgcaattgaatgaagaagcattaacgaaaaccaatatttaa

SEQ ID NO: 911 - RNA, 1530 nt, synthetic construct
  misc_feature 1..1530: note = EAW59519
  source 1..1530: mol_type = other RNA
atggaacgaaggcgtttgtggggttccattcagagccgatacatcagcatgagtgtgtggacaagcccacggagacttgtggagctggcagggcagagcctgctgaaggatgaggccctggccattgccgccctggagttgctgcccagggagctcttcccgccactcttcatggcagcctttgacgggagacacagccagaccctgaaggcaatggtgcaggcctggcccttcacctgcctccctctgggagtgctgatgaagggacaacatcttcacctggagaccttcaaagctgtgcttgatggacttgatgtgctccttgcccaggaggttcgccccaggaggtggaaacttcaagtgctggatttacggaagaactctcatcaggacttctggactgtatggtctggaaacagggccagtctgtactcatttccagagccagaagcagctcagcccatgacaaagaagcgaaaagtagatggtttgagcacagaggcagagcagcccttcattccagtagaggtgctcgtagacctgttcctcaaggaaggtgcctgtgatgaattgttctcctacctcattgagaaagtgaagcgaaagaaaaatgtactacgcctgtgctgtaagaagctgaagatttttgcaatgcccatgcaggatatcaagatgatcctgaaaatggtgcagctggactctattgaagatttggaagtgacttgtacctggaagctacccaccttggcgaaattttctccttacctgggccagatgattaatctgcgtagactcctcctctcccacatccatgcatcttcctacatttccccggagaaggaagagcagtatatcgcccagttcacctctcagttcctcagtctgcagtgcctgcaggctctctatgtggactctttatttttccttagaggccgcctggatcagttgctcaggcacgtgatgaaccccttggaaaccctctcaataactaactgccggctttcggaaggggatgtgatgcatctgtcccagagtcccagcgtcagtcagctaagtgtcctgagtctaagtggggtcatgctgaccgatgtaagtcccgagcccctccaagctctgctggagagagcctctgccaccctccaggacctggtctttgatgagtgtgggatcacggatgatcagctccttgccctcctgccttccctgagccactgctcccagcttacaaccttaagcttctacgggaattccatctccatatctgccttgcagagtctcctgcagcacctcatcgggctgagcaatctgacccacgtgctgtatcctgtccccctggagagttatgaggacatccatggtaccctccacctggagaggcttgcctatctgcatgccaggctcagggagttgctgtgtgagttggggcggcccagcatggtctggcttagtgccaacccctgtcctcactgtggggacagaaccttctatgacccggagcccatcctgtgcccctgtttcatgcctaactag

SEQ ID NO: 912 - RNA, 1530 nt, synthetic construct; identical to SEQ ID NO: 911
  misc_feature 1..1530: note = AAC51160
  source 1..1530: mol_type = other RNA

SEQ ID NO: 913 - RNA, 645 nt, synthetic construct
  misc_feature 1..645: note = CCDS8069.1
  source 1..645: mol_type = other RNA
atgggactagctggcgtgtgcgccctgagacgctcagcgggctatatactcgtcggtggggccggcggtcagtctgcggcagcggcagcaagacggtacagtgaaggagagtgggcgtctggcggggtccgcagtttcagcagagccgctgcagccatggccccaatcaaggtgggagatgccatcccagcagtggaggtgtttgaaggggagccagggaacaaggtgaacctggcagagctgttcaagggcaagaagggtgtgctgtttggagttcctggggccttcacccctggatgttccaagacacacctgccagggtttgtggagcaggctgaggctctgaaggccaagggagtccaggtggtggcctgtctgagtgttaatgatgcctttgtgactggcgagtggggccgagcccacaaggcggaaggcaaggttcggctcctggctgatcccactggggcctttgggaaggagacagacttattactagatgattcgctggtgtccatctttgggaatcgacgtctcaagaggttctccatggtggtacaggatggcatagtgaaggccctgaatgtggaaccagatggcacaggcctcacctgcagcctggcacccaatatcatctcacagctctga

SEQ ID NO: 914 - RNA, 309 nt, synthetic construct
  misc_feature 1..309: note = AAA63250
  source 1..309: mol_type = other RNA
atggtccgataccgcgtgaggagcctgagcgaacgctcgcacgaggtgtacaggcagcagttgcatgggcaagagcaaggacaccacggccaagaggagcaagggctgagcccggagcacgtcgaggtctacgagaggacccatggccagtctcactataggcgcagacactgctctcgaaggaggctgcaccggatccacaggcggcagcatcgctcctgcagaaggcgcaaaagacgctcctgcaggcaccggaggaggcatcgcagaggctgcagaaccaggaagagaacatgcagaaggcactaa

SEQ ID NO: 915 - RNA, 1662 nt, synthetic construct
  misc_feature 1..1662: note = AAH50416
  source 1..1662: mol_type = other RNA
atggtccagaggctgtgggtgagccgcctgctgcggcaccggaaagcccagctcttgctggtcaacctgctaacctttggcctggaggtgtgtttggccgcaggcatcacctatgtgccgcctctgctgctggaagtgggggtagaggagaagttcatgaccatggtgctgggcattggtccagtgctgggcctggtctgtgtcccgctcctaggctcagccagtgaccactggcgtggacgctatggccgccgccggcccttcatctgggcactgtccttgggcatcctgctgagcctctttctcatcccaagggccggctggctagcagggctgctgtgcccggatcccaggcccctggagctggcactgctcatcctgggcgtggggctgctggacttctgtggccaggtgtgcttcactccactggaggccctgctctctgacctcttccgggacccggaccactgtcgccaggcctactctgtctatgccttcatgatcagtcttgggggctgcctgggctacctcctgcctgccattgactgggacaccagtgccctggccccctacctgggcacccaggaggagtgcctctttggcctgctcaccctcatcttcctcacctgcgtagcagccacactgctggtggctgaggaggcagcgctgggccccaccgagccagcagaagggctgtcggccccctccttgtcgccccactgctgtccatgccgggcccgcttggctttccggaacctgggcgccctgcttccccggctgcaccagctgtgctgccgcatgccccgcaccctgcgccggctcttcgtggctgagctgtgcagctggatggcactcatgaccttcacgctgttttacacggatttcgtgggcgaggggctgtaccagggcgtgcccagagctgagccgggcaccgaggcccggagacactatgatgaaggcgttcggatgggcagcctggggctgttcctgcagtgcgccatctccctggtcttctctctggtcatggaccggctggtgcagcgattcggcactcgagcagtctatttggccagtgtggcagctttccctgtggctgccggtgccacatgcctgtcccacagtgtggccgtggtgacagcttcagccgccctcaccgggttcaccttctcagccctgcagatcctgccctacacactggcctccctctaccaccgggagaagcaggtgttcctgcccaaataccgaggggacactggaggtgctagcagtgaggacagcctgatgaccagcttcctgccaggccctaagcctggagctcccttccctaatggacacgtgggtgctggaggcagtggcctgctcccacctccacccgcgctctgcggggcctctgcctgtgatgtctccgtacgtgtggtggtgggtgagcccaccgaggccagggtggttccgggccggggcatctgcctggacctcgccatcctggatagtgccttcctgctgtcccaggtggccccatccctgtttatgggctccattgtccagctcagccagtctgtcactgcctatatggtgtctgccgcaggcctgggtctggtcgccatttactttgctacacaggtagtatttgacaagagcgacttggccaaatactcagcgtag

SEQ ID NO: 916 - RNA, 648 nt, synthetic construct
  misc_feature 1..648: note = CBI83574
  source 1..648: mol_type = other RNA
atggcctccctgcagatgcgggggaacccgggcagccacttctgcggaggcaccttgatccaccccagcttcgtgctgacggccgcgcactgcctgcgggacataccccagcgcctggtgaacgtggtgctcggagcccacaacgtgcggacgcaggagcccacccagcagcacttctcggtggctcaggtgtttctgaacaactacgacgcggagaacaaactgaacgacattctcctcatccagctgagcagcccagccaacctcagtgcctccgtcgccacagtccagctgccacagcaggaccagccagtgccccacggcacccagtgcctggccatgggctggggccgcgtgggtgcccacgaccccccagcccaggtcctgcaggagctcaatgtcaccgtggtgaccttcttctgccggccacataacatttgcactttcgtccctcgccgcaaggccggcatctgcttcggagactcaggtggccccctgatctgtgatggcatcatccaaggaatagactccttcgtgatctggggatgtgccacccgccttttccctgacttcttcacgcgggtagccctctacgtggactggatccgttccacgctgcgccgtgtggaggccaagggccgcccctga

SEQ ID NO: 917 - RNA, 771 nt, synthetic construct
  misc_feature 1..771: note = AAH96183
  source 1..771: mol_type = other RNA
atggctcaccggccccccagccctgccctggcgtccgtgctgctggccttgctgctgagcggtgctgcccgagctgcggagatcgtgggcgggcacgaggcgcagccacactcccggccctacatggcctccctgcagatgcgggggaacccgggcagccacttctgcggaggcaccttgatccaccccagcttcgtgctgacggccgcgcactgcctgcgggacataccccagcgcctggtgaacgtggtgctcggagcccacaacgtgcggacgcaggagcccacccagcagcacttctcggtggctcaggtgtttctgaacaactacgacgcggagaacaaactgaacgacgttctcctcatccagctgagcagcccagccaacctcagtgcctccgtcgccacagtccagctgccacagcaggaccagccagtgccccacggcacccagtgcctggccatgggctggggccgcgtgggtgcccacgaccccccagcccaggtcctgcaggagctcaatgtcaccgtggtcaccttcttctgccggccacataacatttgcactttcgtccctcgccgcaaggccggcatctgcttcggagactcaggtggccccctgatctgtgatggcatcatccaaggaatagactccttcgtgatctggggatgtgccacccgccttttccctgacttcttcacgcgggtagccctctacgtggactggatccgttccacgctgcgccgtgtggaggccaagggccgcccctga

SEQ ID NO: 918 - RNA, 2760 nt, synthetic construct
  misc_feature 1..2760: note = CCDS45721.1
  source 1..2760: mol_type = other RNA
atgtggctggcagctgccgccccctccctcgctcgccgcctgctcttcctcggccctccgcctcctcccctcctccttctcgtcttcagccgctcctctcgccgccgcctccacagcctgggcctcgccgcgatgccggagaagaggcccttcgagcggctgcctgccgatgtctcccccatcaactacagcctttgcctcaagcccgacttgctggacttcaccttcgagggcaagctggaggccgccgcccaggtgaggcaggcgactaatcagattgtgatgaattgtgctgatattgatattattacagcttcatatgcaccagaaggagatgaagaaatacatgctacaggatttaactatcagaatgaagatgaaaaagtcaccttgtctttccctagtactctgcaaacaggtacgggaaccttaaagatagattttgttggagagctgaatgacaaaatgaaaggtttctatagaagtaaatatactaccccttctggagaggtgcgctatgctgctgtaacacagtttgaggctactgatgcccgaagggcttttccttgctgggatgagcctgctatcaaagcaacttttgatatctcattggttgttcctaaagacagagtagctttatcaaacatgaatgtaattgaccggaaaccataccctgatgatgaaaatttagtggaagtgaagtttgcccgcacacctgttatgtctacatatctggtggcatttgttgtgggtgaatatgactttgtagaaacaaggtcaaaagatggtgtgtgtgtccgtgtttacactcctgttggcaaagcagagcaaggaaaatttgcgttagaggttgctgctaaaaccttgcctttttataaggactacttcaatgttccttatcctctacctaaaattgatctcattgctattgcagactttgcagctggtgccatggagaactggggccttgttacttatagggagactgcattgcttattgatccaaaaaattcctgttcttcatcccgccagtgggttgctctggttgtgggacatgaactcgcccatcaatggtttggaaatcttgttactatggaatggtggactcatctttggttaaatgaaggttttgcatcctggattgaatatctgtgtgtagaccactgcttcccagagtatgatatttggactcagtttgtttctgctgattacacccgtgcccaggagcttgacgccttagataacagccatcctattgaagtcagtgtgggccatccatctgaggttgatgagatatttgatgctatatcatatagcaaaggtgcatctgtcatccgaatgctgcatgactacattggggataaggactttaagaaaggaatgaacatgtatttaaccaagttccaacaaaagaatgctgccacagaggatctctgggaaagtttagaaaatgctagtggtaaacctatagcagctgtgatgaatacctggaccaaacaaatgggatttcccctcatttatgtggaagctgaacaggtagaagatgacagattattgaggttgtcccaaaagaagttctgtgctggtgggtcatatgttggtgaagattgtccccagtggatggtccctatcacaatctctactagtgaagaccccaaccaggccaaactaaaaattctaatggacaagccagagatgaatgtggttttgaaaaatgtcaaaccagaccaatgggtgaagttaaacttaggaacagttgggttttatcggacccagtacagctctgccatgctggaaagtttattaccaggcattcgtgacctttctctgccccctgtggatcgacttggattacagaatgacctcttctccttggctcgagctggaatcattagcactgtagaggttctaaaagtcatggaggcttttgtgaatgagcccaattatactgtatggagcgacctgagctgtaacctggggattctctcaactctcttgtcccacacagacttctatgaggaaatccaggagtttgtgaaagatgtcttttcacctataggggagagactgggctgggaccccaaacctggagaaggtcatctcgatgcactcctgaggggcttggttctgggaaaactaggaaaagcaggacataaggcaacgttagaagaagcccgtcgtcggtttaaggaccacgtggaaggaaaacagattctctccgctgatctgaggagtcctgtctatctgactgttttgaagcatggtgatggcactactttagatattatgttaaaacttcataaacaagcagatatgcaagaagagaaaaaccgaatcgaaagagtccttggcgctactcttttgcctgacctgattcaaaaagtcctcacgtttgcactttcagaagaggtacgtccacaggacactgtatcggtaattggtggagtagctggaggcagcaagcatggtaggaaagctgcttggaaattcataaaggacaactgggaagaactttataaccgataccagggaggattcttaatatccagactaataaagctatcagttgagggatttgcagttgataaaatggctggagaggttaaggctttcttcgagagtcacccagctccttcagctgagcgtaccatccagcagtgttgtgaaaatattctgctgaatgctgcctggctaaagcgagatgctgagagcatccaccagtacctccttcagcggaaggcctcaccacccacagtgtga

SEQ ID NO: 919 - RNA, 660 nt, synthetic construct
  misc_feature 1..660: note = AAH65513
  source 1..660: mol_type = other RNA
atgctgcgggcgggagcaccaaccggggacttaccccgggcgggagaagtccacaccgggaccaccatcatggcagtggagtttgacgggggcgttgtgatgggttctgattcccgagtgtctgcaggcgaggcggtggtgaaccgagtgtttgacaagctgtccccgctgcacgagcgcatctactgtgcactctctggttcagctgctgatgcccaagccgtggccgacatggccgcctaccagctggagctccatgggatagaactggaggaacctccacttgttttggctgctgcaaatgtggtgagaaatatcagctataaatatcgagaggacttgtctgcacatctcatggtagctggctgggaccaacgtgaaggaggtcaggtatatggaaccctgggaggaatgctgactcgacagccttttgccattggtggctccggcagcacctttatctatggttatgtggatgcagcatataagccaggcatgtctcccgaggagtgcaggcgcttcaccacagacgctattgctctggccatgagccgggatggctcaagcgggggtgtcatctacctggtcactattacagctgccggtgtggaccatcgagtcatcttgggcaatgaactgccaaaattctatgatgagtga

SEQ ID NO: 920 - RNA, 345 nt, synthetic construct
  misc_feature 1..345: note = EAW82312
  source 1..345: mol_type = other RNA
atggcaggcttggccctgcagccaggcactgccctgctgtgctactcctgcaaagcccaggtgagcaacgaggactgcctgcaggtggagaactgcacccagctgggggagcagtgctggaccgcgcgcatccgcgcagttggcctcctgaccgtcatcagcaaaggctgcagcttgaactgcgtggatgactcacaggactactacgtgggcaagaagaacatcacgtgctgtgacaccgacttgtgcaacgccagcggggcccatgccctgcagccggctgctgccatccttgcgctgctccctgcactcggcctgctgctctggggacccggccagctctag

SEQ ID NO: 921 - RNA, 372 nt, synthetic construct
  misc_feature 1..372: note = AAC39607
  source 1..372: mol_type = other RNA
atgaaggctgtgctgcttgccctgttgatggcaggcttggccctgcagccaggcactgccctgctgtgctactcctgcaaagcccaggtgagcaacgaggactgcctgcaggtggagaactgcacccagctgggggagcagtgctggaccgcgcgcatccgcgcagttggcctcctgaccgtcatcagcaaaggctgcagcttgaactgcgtggatgactcacaggactactacgtgggcaagaagaacatcacgtgctgtgacaccgacttgtgcaacgccagcggggcccatgccctgcagccggctgccgccatccttgcgctgctccctgcactcggcctgctgctctggggacccggccagctatag

SEQ ID NO: 922 - RNA, 963 nt, synthetic construct
  misc_feature 1..963: note = AAG40776
  source 1..963: mol_type = other RNA
atgagttcctgcaacttcacacatgccacctttgtgcttattggtatcccaggattagagaaagcccatttctgggttggcttccccctcctttccatgtatgtagtggcaatgtttggaaactgcatcgtggtcttcatcgtaaggacggaacgcagcctgcacgctccgatgtacctctttctctgcatgcttgcagccattgacctggccttatccacatccaccatgcctaagatccttgcccttttctggtttgattcccgagagattagctttgaggcctgtcttacccagatgttctttattcatgccctctcagccattgaatccaccatcctgctggccatggcctttgaccgttatgtggccatctgccacccactgcgccatgctgcagtgctcaacaatacagtaacagcccagattggcatcgtggctgtggtccgcggatccctcttttttttcccactgcctctgctgatcaagcggctggccttctgccactccaatgtcctctcgcactcctattgtgtccaccaggatgtaatgaagttggcctatgcagacactttgcccaatgtggtatatggtcttactgccattctgctggtcatgggcgtggacgtaatgttcatctccttgtcctattttctgataatacgaacggttctgcaactgccttccaagtcagagcgggccaaggcctttggaacctgtgtgtcacacattggtgtggtactcgccttctatgtgccacttattggcctctcagttgtacaccgctttggaaacagccttcatcccattgtgcgtgttgtcatgggtgacatctacctgctgctgcctcctgtcatcaatcccatcatctatggtgccaaaaccaaacagatcagaacacgggtgctggctatgttcaagatcagctgtgacaaggacttgcaggctgtgggaggcaagtga

SEQ ID NO: 923 - RNA, 2253 nt, synthetic construct
  misc_feature 1..2253: note = AAA60209
  source 1..2253: mol_type = other RNA
atgtggaatctccttcacgaaaccgactcggctgtggccaccgcgcgccgcccgcgctggctgtgcgctggggcgctggtgctggcgggtggcttctttctcctcggcttcctcttcgggtggtttataaaatcctccaatgaagctactaacattactccaaagcataatatgaaagcatttttggatgaattgaaagctgagaacatcaagaagttcttatataattttacacagataccacatttagcaggaacagaacaaaactttcagcttgcaaagcaaattcaatcccagtggaaagaatttggcctggattctgttgagctagcacattatgatgtcctgttgtcctacccaaataagactcatcccaactacatctcaataattaatgaagatggaaatgagattttcaacacatcattatttgaaccacctcctccaggatatgaaaatgtttcggatattgtaccacctttcagtgctttctctcctcaaggaatgccagagggcgatctagtgtatgttaactatgcacgaactgaagacttctttaaattggaacgggacatgaaaatcaattgctctgggaaaattgtaattgccagatatgggaaagttttcagaggaaataaggttaaaaatgcccagctggcaggggccaaaggagtcattctctactccgaccctgctgactactttgctcctggggtgaagtcctatccagatggttggaatcttcctggaggtggtgtccagcgtggaaatatcctaaatctgaatggtgcaggagaccctctcacaccaggttacccagcaaatgaatatgcttataggcgtggaattgcagaggctgttggtcttccaagtattcctgttcatccaattggatactatgatgcacagaagctcctagaaaaaatgggtggctcagcaccaccagatagcagctggagaggaagtctcaaagtgccctacaatgttggacctggctttactggaaacttttctacacaaaaagtcaagatgcacatccactctaccaatgaagtgacaagaatttacaatgtgataggtactctcagaggagcagtggaaccagacagatatgtcattctgggaggtcaccgggactcatgggtgtttggtggtattgaccctcagagtggagcagctgttgttcatgaaattgtgaggagctttggaacactgaaaaaggaagggtggagacctagaagaacaattttgtttgcaagctgggatgcagaagaatttggtcttcttggttctactgagtgggcagaggagaattcaagactccttcaagagcgtggcgtggcttatattaatgctgactcatctatagaaggaaactacactctgagagttgattgtacaccgctgatgtacagcttggtacacaacctaacaaaagagctgaaaagccctgatgaaggctttgaaggcaaatctctttatgaaagttggactaaaaaaagtccttccccagagttcagtggcatgcccaggataagcaaattgggatctggaaatgattttgaggtgttcttccaacgacttggaattgcttcaggcagagcacggtatactaaaaattgggaaacaaacaaattcagcggctatccactgtatcacagtgtctatgaaacatatgagttggtggaaaagttttatgatccaatgtttaaatatcacctcactgtggcccaggttcgaggagggatggtgtttgagctagccaattccatagtgctcccttttgattgtcgagattatgctgtagttttaagaaagtatgctgacaaaatctacagtatttctatgaaacatccacaggaaatgaagacatacagtgtatcatttgattcacttttttctgcagtaaagaattttacagaaattgcttccaagttcagtgagagactccaggactttgacaaaagcaacccaatagtattaagaatgatgaatgatcaactcatgtttctggaaagagcatttattgatccattagggttaccagacaggcctttttataggcatgtcatctatgctccaagcagccacaacaagtatgcaggggagtcattcccaggaatttatgatgctctgtttgatattgaaagcaaagtggacccttccaaggcctggggagaagtgaagagacagatttatgttgcagccttcacagtgcaggcagctgcagagactttgagtgaagtagcctaa

SEQ ID NO: 924 - RNA, 3921 nt, synthetic construct
  misc_feature 1..3921: note = CCDS1397.2
  source 1..3921: mol_type = other RNA
atgaccatgtatttgtggcttaaactcttggcatttggctttgcctttctggacacagaagtatttgtgacagggcaaagcccaacaccttcccccactggattgactacagcaaagatgcccagtgttccactttcaagtgaccccttacctactcacaccactgcattctcacccgcaagcacctttgaaagagaaaatgacttctcagagaccacaacttctcttagtccagacaatacttccacccaagtatccccggactctttggataatgctagtgcttttaataccacaggtgtttcatcagtacagacgcctcaccttcccacgcacgcagactcgcagacgccctctgctggaactgacacgcagacattcagcggctccgccgccaatgcaaaactcaaccctaccccaggcagcaatgctatctcagatgtcccaggagagaggagtacagccagcacctttcctacagacccagtttccccattgacaaccaccctcagccttgcacaccacagctctgctgccttacctgcacgcacctccaacaccaccatcacagcgaacacctcagatgcctaccttaatgcctctgaaacaaccactctgagcccttctggaagcgctgtcatttcaaccacaacaatagctactactccatctaagccaacatgtgatgaaaaatatgcaaacatcactgtggattacttatataacaaggaaactaaattatttacagcaaagctaaatgttaatgagaatgtggaatgtggaaacaatacttgcacaaacaatgaggtgcataaccttacagaatgtaaaaatgcgtctgtttccatatctcataattcatgtactgctcctgataagacattaatattagatgtgccaccaggggttgaaaagtttcagttacatgattgtacacaagttgaaaaagcagatactactatttgtttaaaatggaaaaatattgaaacctttacttgtgatacacagaatattacctacagatttcagtgtggtaatatgatatttgataataaagaaattaaattagaaaaccttgaacccgaacatgagtataagtgtgactcagaaatactctataataaccacaagtttactaacgcaagtaaaattattaaaacagattttgggagtccaggagagcctcagattattttttgtagaagtgaagctgcacatcaaggagtaattacctggaatccccctcaaagatcatttcataattttaccctctgttatataaaagagacagaaaaagattgcctcaatctggataaaaacctgatcaaatatgatttgcaaaatttaaaaccttatacgaaatatgttttatcattacatgcctacatcattgcaaaagtgcaacgtaatggaagtgctgcaatgtgtcatttcacaactaaaagtgctcctccaagccaggtctggaacatgactgtctccatgacatcagataatagtatgcatgtcaagtgtaggcctcccagggaccgtaatggcccccatgaacgttaccatttggaagttgaagctggaaatactctggttagaaatgagtcgcataagaattgcgatttccgtgtaaaagatcttcaatattcaacagactacacttttaaggcctattttcacaatggagactatcctggagaaccctttattttacatcattcaacatcttataattctaaggcactgatagcatttctggcatttctgattattgtgacatcaatagccctgcttgttgttctctacaaaatctatgatctacataagaaaagatcctgcaatttagatgaacagcaggagcttgttgaaagggatgatgaaaaacaactgatgaatgtggagccaatccatgcagatattttgttggaaacttataagaggaagattgctgatgaaggaagactttttctggctgaatttcagagcatcccgcgggtgttcagcaagtttcctataaaggaagctcgaaagccctttaaccagaataaaaaccgttatgttgacattcttccttatgattataaccgtgttgaactctctgagataaacggagatgcagggtcaaactacataaatgccagctatattgatggtttcaaagaacccaggaaatacattgctgcacaaggtcccagggatgaaactgttgatgatttctggaggatgatttgggaacagaaagccacagttattgtcatggtcactcgatgtgaagaaggaaacaggaacaagtgtgcagaatactggccgtcaatggaagagggcactcgggcttttggagatgttgttgtaaagatcaaccagcacaaaagatgtccagattacatcattcagaaattgaacattgtaaataaaaaagaaaaagcaactggaagagaggtgactcacattcagttcaccagctggccagaccacggggtgcctgaggatcctcacttgctcctcaaactgagaaggagagtgaatgccttcagcaatttcttcagtggtcccattgtggtgcactgcagtgctggtgttgggcgcacaggaacctatatcggaattgatgccatgctagaaggcctggaagccgagaacaaagtggatgtttatggttatgttgtcaagctaaggcgacagagatgcctgatggttcaagtagaggcccagtacatcttgatccatcaggctttggtggaatacaatcagtttggagaaacagaagtgaatttgtctgaattacatccatatctacataacatgaagaaaagggatccacccagtgagccgtctccactagaggctgaattccagagacttccttcatataggagctggaggacacagcacattggaaatcaagaagaaaataaaagtaaaaacaggaattctaatgtcatcccatatgactataacagagtgccacttaaacatgagctggaaatgagtaaagagagtgagcatgattcagatgaatcctctgatgatgacagtgattcagaggaaccaagcaaatacatcaatgcatcttttataatgagctactggaaacctgaagtgatgattgctgctcagggaccactgaaggagaccattggtgacttttggcagatgatcttccaaagaaaagtcaaagttattgttatgctgacagaactgaaacatggagaccaggaaatctgtgctcagtactggggagaaggaaagcaaacatatggagatattgaagttgacctgaaagacacagacaaatcttcaacttatacccttcgtgtctttgaactgagacattccaagaggaaagactctcgaactgtgtaccagtaccaatatacaaactggagtgtggagcagcttcctgcagaacccaaggaattaatctctatgattcaggtcgtcaaacaaaaacttccccagaagaattcctctgaagggaacaagcatcacaagagtacacctctactcattcactgcagggatggatctcagcaaacgggaatattttgtgctttgttaaatctcttagaaagtgcggaaacagaagaggtagtggatatttttcaagtggtaaaagctctacgcaaagctaggccaggcatggtttccacattcgagcaatatcaattcctatatgacgtcattgccagcacctaccctgctcagaatggacaagtaaagaaaaacaaccatcaagaagataaaattgaatttgataatgaagtggacaaagtaaagcaggatgctaattgtgttaatccacttggtgccccagaaaagctccctgaagcaaaggaacaggctgaaggttctgaacccacgagtggcactgaggggccagaacattctgtcaatggtcctgcaagtccagctttaaatcaaggttcatag

SEQ ID NO: 925 - RNA, 624 nt, synthetic construct
  misc_feature 1..624: note = AAH02977
  source 1..624: mol_type = other RNA
atggcgaagacctacgattacctgttcaagctgctgctgatcggggactcgggggtggggaagacctgtgtcctgttccgcttctccgaggacgccttcaactccacttttatctccaccataggaattgactttaaaattaggaccatagagctcgatggcaagagaattaaactgcagatatgggacacagccggtcaggaacggtttcggacgatcacaacggcctactacaggggtgcaatgggcatcatgctggtctacgacatcaccaacgagaagtccttcgacaacatccggaactggattcgcaacattgaggagcacgcctctgcagacgtcgaaaagatgatactcgggaacaagtgtgatgtgaatgacaagagacaagtttccaaggaacggggagaaaagctggccctcgactatggaatcaagttcatggagaccagcgcgaaggccaacatcaatgtggaaaatgcatttttcactctcgccagagatatcaaagcaaaaatggacaaaaaattggaaggcaacagcccccaggggagcaaccagggagtcaaaatcacaccggaccagcagaagaggagcagctttttccgatgtgttcttctgtga

SEQ ID NO: 926 - RNA, 1260 nt, synthetic construct
  misc_feature 1..1260: note = BAA81688
  source 1..1260: mol_type = other RNA
atgaagaactataaagcaattggcaaaataggagagggaacgttttctgaagttatgaagatgcaaagcctgagagatggaaactactatgcatgtaaacaaatgaagcagcgctttgaaagtattgagcaagtcaacaacctacgagagatccaagcactgaggcgcctgaatccgcacccaaacattcttatgttgcatgaagtggtttttgacagaaaatctggttctcttgcactaatatgtgaacttatggacatgaatatttatgagctaatacgagggagaagatacccattatcagaaaaaaaaattatgcactatatgtaccagttatgtaagtccctggatcatattcacagaaatggaatatttcacagagatgtaaaaccagaaaatatactaataaagcaggatgtcctgaaattaggggactttggctcctgccggagtgtctattccaagcagccgtacacggaatacatctccacccgctggtaccgggccccggagtgtctcctcactgatgggttctacacgtacaagatggacctgtggagcgccggctgtgtgttctacgagatcgccagtctgcagcccctctttcctggagtaaatgaactggaccaaatctcaaaaatccacgatgtcatcggcacacccgctcagaagatcctcaccaagttcaaacagtcgagagctatgaattttgattttccttttaaaaagggatcaggaatacctctactaacaaccaatttgtccccacaatgcctctccctcctgcacgcaatggtggcctatgatcccgatgagagaatcgccgcccaccaggccctgcagcacccctacttccaagaacagaggaaaacagagaagcgggctctgggcagccacagaaaagctggctttccggagcaccctgtggcaccggaaccactcagtaacagctgccagatttccaaggagggcagaaagcagaaacagtccctaaagcaagaggaggaccgtcccaagagacgaggaccggcctatgtcatggaactgcccaaactaaagctttcgggagtggtcagactgtcgtcttactccagccccacgctgcagtccgtgcttggatctggaacaaatggaagagtgccggtgctgagacccttgaagtgcatccctgcgagcaagaagacagatccgcagaaggaccttaagcctgccccgcagcagtgtcgcctgcccaccatagtgcggaaaggcggaagataa

SEQ ID NO: 927 - RNA, 1389 nt, synthetic construct
  misc_feature 1..1389: note = AAH08727
  source 1..1389: mol_type = other RNA
atggccagcaacagcagctcctgcccgacacctgggggcgggcacctcaatgggtacccggtgcctccctacgccttcttcttcccccctatgctgggtggactctccccgccaggcgctctgaccactctccagcaccagcttccagttagtggatatagcacaccatccccagccaccattgagacccagagcagcagttctgaagagatagtgcccagccctccctcgccaccccctctaccccgcatctacaagccttgctttgtctgtcaggacaagtcctcaggctaccactatggggtcagcgcctgtgagggctgcaagggcttcttccgccgcagcatccagaagaacatggtgtacacgtgtcaccgggacaagaactgcatcatcaacaaggtgacccggaaccgctgccagtactgccgactgcagaagtgctttgaagtgggcatgtccaaggagtctgtgagaaacgaccgaaacaagaagaagaaggaggtgcccaagcccgagtgctctgagagctacacgctgacgccggaggtgggggagctcattgagaaggtgcgcaaagcgcaccaggaaaccttccctgccctctgccagctgggcaaatacactacgaacaacagctcagaacaacgtgtctctctggacattgacctctgggacaagttcagtgaactctccaccaagtgcatcattaagactgtggagttcgccaagcagctgcccggcttcaccaccctcaccatcgccgaccagatcaccctcctcaaggctgcctgcctggacatcctgatcctgcggatctgcacgcggtacacgcccgagcaggacaccatgaccttctcggacgggctgaccctgaaccggacccagatgcacaacgctggcttcggccccctcaccgacctggtctttgccttcgccaaccagctgctgcccctggagatggatgatgcggagacggggctgctcagcgccatctgcctcatctgcggagaccgccaggacctggagcagccggaccgggtggacatgctgcaggagccgctgctggaggcgctaaaggtctacgtgcggaagcggaggcccagccgcccccacatgttccccaagatgctaatgaagattactgacctgcgaagcatcagcgccaagggggctgagcgggtgatcacgctgaagatggagatcccgggctccatgccgcctctcatccaggaaatgttggagaactcagagggcctggacactctgagcggacagccggggggtggggggcgggacgggggtggcctggcccccccgccaggcagctgtagccccagcctcagccccagctccaacagaagcagcccggccacccactccccgtga

SEQ ID NO: 928 - RNA, 570 nt, synthetic construct
  misc_feature 1..570: note = AAB02605
  source 1..570: mol_type = other RNA
atgacggaatataagctggtggtggtgggcgccggcggtgtgggcaagagtgcgctgaccatccagctgatccagaaccattttgtggacgaatacgaccccactatagaggattcctaccggaagcaggtggtcattgatggggagacgtgcctgttggacatcctggataccgccggccaggaggagtacagcgccatgcgggaccagtacatgcgcaccggggagggcttcctgtgtgtgtttgccatcaacaacaccaagtcttttgaggacatccaccagtacagggagcagatcaaacgggtgaaggactcggatgacgtgcccatggtgctggtggggaacaagtgtgacctggctgcacgcactgtggaatctcggcaggctcaggacctcgcccgaagctacggcatcccctacatcgagacctcggccaagacccggcagggagtggaggatgccttctacacgttggtgcgtgagatccggcagcacaagctgcggaagctgaaccctcctgatgagagtggccccggctgcatgagctgcaagtgtgtgctctcctga

SEQ ID NO: 929 - RNA, 570 nt, synthetic construct
  misc_feature 1..570: note = AAB59445
  source 1..570: mol_type = other RNA
atgactgaatataaacttgtggtagttggagctggtggcgtaggcaagagtgccttgacgatacagctaattcagaatcattttgtggacgaatatgatccaacaatagaggattcctacaggaagcaagtagtaattgatggagaaacctgtctcttggatattctcgacacagcaggtcaagaggagtacagtgcaatgagggaccagtacatgaggactggggagggctttctttgtgtatttgccataaataatactaaatcatttgaagatattcaccattatagagaacaaattaaaagagttaaggactctgaagatgtacctatggtcctagtaggaaataaatgtgatttgccttctagaacagtagacacaaaacaggctcaggacttagcaagaagttatggaattccttttattgaaacatcagcaaagacaagacagagagtggaggatgctttttatacattggtgagagagatccgacaatacagattgaaaaaaatcagcaaagaagaaaagactcctggctgtgtgaaaattaaaaaatgcattataatgtaa

SEQ ID NO: 930 - RNA, 570 nt, synthetic construct
  misc_feature 1..570: note = AAA60255
  source 1..570: mol_type = other RNA
atgactgagtacaaactggtggtggttggagcaggtggtgttgggaaaagcgcactgacaatccagctaatccagaaccactttgtagatgaatatgatcccaccatagaggattcttacagaaaacaagtggttatagatggtgaaacctgtttgttggacatactggatacagctggacaagaagagtacagtgccatgagagaccaatacatgaggacaggcgaaggcttcctctgtgtatttgccatcaataatagcaagtcatttgcggatattaacctctacagggagcagattaagcgagtaaaagactcggatgatgtacctatggtgctagtgggaaacaagtgtgatttgccaacaaggacagttgatacaaaacaagcccacgaactggccaagagttacgggattccattcattgaaacctcagccaagaccagacagggtgttgaagatgctttttacacactggtaagagaaatacgccagtaccgaatgaaaaaactcaacagcagtgatgatgggactcagggttgtatgggattgccatgtgtggtgatgtaa

SEQ ID NO: 931 - RNA, 546 nt, synthetic construct
  misc_feature 1..546: note = AAB84001
  source 1..546: mol_type = other RNA
atgtgcaaaggacttgcagctttgccccactcatgcctggaaagggccaaggagattaagatcaagttgggaattctcctccagaagccagactcagttggtgaccttgtcattccgtacaatgagaagccagagaaaccagccaagacccagaaaacctcgctggacgaggccctgcagtggcgtgattccctggacaaactcctgcagaacaactatggacttgccagtttcaaaagtttcctgaagtctgaattcagtgaggaaaaccttgagttctggattgcctgtgaggattacaagaagatcaagtcccctgccaagatggctgagaaggcaaagcaaatttatgaagaattcattcaaacggaggctcctaaagaggtgaatattgaccacttcactaaggacatcacaatgaagaacctggtggaaccttccctgagcagctttgacatggcccagaaaagaatccatgccctgatggaaaaggattctctgcctcgctttgtgcgctctgagttttatcaggagttaatcaagtag

SEQ ID NO: 932 - RNA, 2175 nt, synthetic construct
  misc_feature 1..2175: note = CCDS4362.1
  source 1..2175: mol_type = other RNA
atgtcctttcctaaggcgcccttgaaacgattcaatgacccttctggttgtgcaccatctccaggtgcttatgatgttaaaactttagaagtattgaaaggaccagtatcctttcagaaatcacaaagatttaaacaacaaaaagaatctaaacaaaatcttaatgttgacaaagatactaccttgcctgcttcagctagaaaagttaagtcttcggaatcaaaggaatctcaaaagaatgataaagatttgaagatattagagaaagagattcgtgttcttctacaggaacgtggtgcccaggacaggcggatccaggatctggaaactgagttggaaaagatggaagcaaggctaaatgctgcactaagggaaaaaacatctctctctgcaaataatgctacactggaaaaacaacttattgaattgaccaggactaatgaactactaaaatctaagttttctgaaaatggtaaccagaagaatttgagaattctaagcttggagttgatgaaacttagaaacaaaagagaaacaaagatgaggggtatgatggctaagcaagaaggcatggagatgaagctgcaggtcacccaaaggagtctcgaagagtctcaagggaaaatagcccaactggagggaaaacttgtttcaatagagaaagaaaagattgatgaaaaatctgaaacagaaaaactcttggaatacatcgaagaaattagttgtgcttcagatcaagtggaaaaatacaagctagatattgcccagttagaagaaaatttgaaagagaagaatgatgaaattttaagccttaagcagtctcttgaggagaatattgttatattatctaaacaagtagaagatctaaatgtgaaatgtcagctgcttgaaaaagaaaaagaagaccatgtcaacaggaatagagaacacaacgaaaatctaaatgcagagatgcaaaacttaaaacagaagtttattcttgaacaacaggaacgtgaaaagcttcaacaaaaagaattacaaattgattcacttctgcaacaagagaaagaattatcttcgagtcttcatcagaagctctgttcttttcaagaggaaatggttaaagagaagaatctgtttgaggaagaattaaagcaaacactggatgagcttgataaattacagcaaaaggaggaacaagctgaaaggctggtcaagcaattggaagaggaagcaaaatctagagctgaagaattaaaactcctagaagaaaagctgaaagggaaggaggctgaactggagaaaagtagtgctgctcatacccaggccaccctgcttttgcaggaaaagtatgacagtatggtgcaaagccttgaagatgttactgctcaatttgaaagctataaagcgttaacagccagtgagatagaagatcttaagctggagaactcatcattacaggaaaaagcggccaaggctgggaaaaatgcagaggatgttcagcatcagattttggcaactgagagctcaaatcaagaatatgtaaggatgcttctagatctgcagaccaagtcagcactaaaggaaacagaaattaaagaaatcacagtttcttttcttcaaaaaataactgatttgcagaaccaactcaagcaacaggaggaagactttagaaaacagctggaagatgaagaaggaagaaaagctgaaaaagaaaatacaacagcagaattaactgaagaaattaacaagtggcgtctcctctatgaagaactatataataaaacaaaaccttttcagctacaactagatgcttttgaagtagaaaaacaggcattgttgaatgaacatggtgcagctcaggaacagctaaataaaataagagattcatatgctaaattattgggtcatcagaatttgaaacaaaaaatcaagcatgttgtgaagttgaaagatgaaaatagccaactcaaatcggaagtatcaaaactccgctgtcagcttgctaaaaaaaaacaaagtgagacaaaacttcaagaggaattgaataaagttctaggtatcaaacactttgatccttcaaaggcttttcatcatgaaagtaaagaaaattttgccctgaagaccccattaaaagaaggcaatacaaactgttaccgagctcctatggagtgtcaagaatcatggaagtaa

SEQ ID NO: 933 - RNA, 582 nt, synthetic construct
  misc_feature 1..582: note = AAC33179
  source 1..582: mol_type = other RNA
atggctgcaatccgaaagaagctggtgatcgttggggatggtgcctgtgggaagacctgcctcctcatcgtcttcagcaaggatcagtttccggaggtctacgtccctactgtctttgagaactatattgcggacattgaggtggacggcaagcaggtggagctggctctgtgggacacagcagggcaggaagactatgatcgactgcggcctctctcctacccggacactgatgtcatcctcatgtgcttctccatcgacagccctgacagcctggaaaacattcctgagaagtggaccccagaggtgaagcacttctgccccaacgtgcccatcatcctggtggggaataagaaggacctgaggcaagacgagcacaccaggagagagctggccaagatgaagcaggagcccgttcggtctgaggaaggccgggacatggcgaaccggatcagtgcctttggctaccttgagtgctcagccaagaccaaggagggagtgcgggaggtgtttgagatggccactcgggctggcctccaggtccgcaagaacaagcgtcggaggggctgtcccattctctga

SEQ ID NO: 934 - RNA, 888 nt, synthetic construct
  misc_feature 1..888: note = AAA36161
  source 1..888: mol_type = other RNA
atgtccggagcccttgatgtcctgcaaatgaaggaggaggatgtccttaagttccttgcagcaggaacccacttaggtggcaccaatcttgacttccagatggaacagtacatctataaaaggaaaagtgatggcatctatatcataaatctcaagaggacctgggagaagcttctgctggcagctcgtgcaattgttgccattgaaaaccctgctgatgtcagtgttatatcctccaggaatactggccagagggctgtgctgaagtttgctgctgccactggagccactccaattgctggccgcttcactcctggaaccttcactaaccagatccaggcagccttccgggagccacggcttcttgtggttactgaccccagggctgaccaccagcctctcacggaggcatcttatgttaacctacctaccattgcgctgtgtaacacagattctcctctgcgctatgtggacattgccatcccatgcaacaacaagggagctcactcagtgggtttgatgtggtggatgctggctcgggaagttctgcgcatgcgtggcaccatttcccgtgaacacccatgggaggtcatgcctgatctgtacttctacagagatcctgaagagattgaaaaagaagagcaggctgctgctgagaaggcagtgaccaaggaggaatttcagggtgaatggactgctcccgctcctgagttcactgctactcagcctgaggttgcagactggtctgaaggtgtacaggtgccctctgtgcctattcagcaattccctactgaagactggagcgctcagcctgccacggaagactggtctgcagctcccactgctcaggccactgaatgggtaggagcaaccactgactggtcttaa

SEQ ID NO: 935 - RNA, 2601 nt, synthetic construct
  misc_feature 1..2601: note = AAH14614
  source 1..2601: mol_type = other RNA
atgaacggggagcagcagcttgatgcagatgccggctctggtatggaagaggtagaattaagctgggaagattatctagaagaaacagggtccacagcagttccctatgggtcttttaaacatgtggacacacgtctgcaaaatggatttgctcctgggatgaagctggaggtggctgtgagaacagatcctgagacctactgggttgccaccgttatcactacctgtgagcagttgctccttctccgctatgatggctatggggaggatcggagagcagatttctggtgtgacatcaggaaggctgatctctaccccattgggtggtgtgagcagaataagaagacccttgaagccccagaaggcatcagagataaagtatctgactgggatgagtttctgcggcagaccctgataggagcatgtagtcctcctgttccgctgctagagggcctccgtaatgggaggaatcctttagatctcattgctccaggatccagactagaatgtcaagctttccaggactctttaagcacttggattgttactgtagtagaaaacattggaggaaggctgaagctacgttatgaaggacttgaaagttctgacaattatgaacattggttgtattacttggatccatttcttcatcacgttggttgggctgctcaacagggatatgagcttcagcccccttcagccattagacatctaaaaaatgaagctgagtggcaagagattttggccaaagtgaaagaggaagaggaagagccattaccatcttacttatttaaggacaaacaagttattggcattcatacattctctgtaaacatgaaattggaagctgtagacccctggtctccttttgggatctctcctgctacagttgttaaggtttttgatgagaagtactttctggtggaaatggatgacttgcgtcctgagaaccacgcacggcgatcctttgtgtgccacgccgacagtcctggcatcttccctgtgcagtggagtctgaagaatggcctacacatcagcccccctccaggctacccaagccaggactttgactgggctgactacctcaaacagtgtggtgctgaagctgctccccagaggtgcttccctccgttaatttctgaacatgaatttaaggagaacatgaagctcgaggcggtgaaccccattctccctgaagaagtgtgtgttgctaccatcactgcagtgagaggctcctacctgtggctccagctggagggttctaagaagcctatacctgaatgtattgtgagtgtggaatccatggatatatttcctttgggctggtgtgaaaccaacggccaccccctcagcactcctcgccgagcacgagtatataaacagaggaaaattgcagtggttcagccagaaaaacaagtaccatcctcgaggactgtccacgagggcctgaggaatcaggagctgaactccacagagtcagttatgattaatggaaaatattgctgtccaaagatatacttcaaccaccgttgcttctcagggccatatcttaacaaaggaagaattgctgagctgcctcaatgtgtaggacctgggaactgtgttctggtccttagagaggtcctcactttacttatcaatgcagcctacaaacccagccgtgtccttcgggagctccagctggacaaagactctgtgtggcacggatgtggggaagtcctaaaagccaaatataaaggaaagagttatcgggctactgttgagatagtgaaaacagcagatcgggtgactgaattctgccggcaaacctgtatcaaactggaatgctgtcctaacctcttcggtccacggatggttctggataagtgttctgagaactgttctgtacttacaaagaccaaatacacacactattacggaaagaagaaaaataaaagaattgggaggccacctggtgggcatagtaacttagcttgtgccctgaaaaaagccagtaagaggagaaagaggcggaaaaatgtttttgttcataagaagaaacgctcctctgcatctgttgataataccccagcgggctctccccagggaagtgggggtgaagatgaggatgacccagatgaaggggatgatgattccctaagtgaaggcagtacatccgagcagcaggatgagctacaggaagaatcagaaatgtcagaaaaaaagtcatgctcctcttctcccacccaaagtgagatatccacatcgctgcctccagatagacaaaggagaaaaagggagcttcgcaccttttcattttctgacgatgaaaataaacctccttcaccaaaggaaataaggatcgaagttgctgaaaggcttcacctggacagtaaccccttgaagtggagtgtggcagacgttgtgcggttcatcagatccactgactgtgctccattagcaagaatattcctagaccaggaaattgatgggcaggccctgttgctccttacccttcccactgttcaagaatgcatggacttaaaattgggccctgccatcaaactttgccatcacatagagaggatcaagtttgctttttatgagcagtttgccaactga

SEQ ID NO: 936 - RNA, 1431 nt, synthetic construct
  misc_feature 1..1431: note = CCDS4550.1
  source 1..1431: mol_type = other RNA
atgagcggcagcagcgccaggtccagccacctgtctcagcccgtcgtgaagagcgtgcttgtgtaccgcaacggggaccccttctacgcggggcgccgcgtcgtcatccatgagaagaaggtgtccagcttcgaagtcttcctgaaggaggtgaccggcggcgttcaggcaccctttggggccgtcaggaacatctacaccccgcggactggccaccgaatccggaagctagaccagatccagagcgggggcaattacgtggctggaggccaggaagccttcaagaaactcaattacttggacataggagaaatcaagaaaagaccaatggaagttgttaatacagaggtaaaaccagtaatccatagcaggatcaacgtgtcagctcgctttagaaaaccgcttcaggagccgtgcactatcttcttgattgcaaatggagacctcataaacccagcttctcgcctccttatccccagaaaaaccttgaatcagtgggatcatgtactacaaatggtcacagaaaaaatcactctgaggagcggggctgttcacaggctttatactttagaaggaaaacttgttgagagtggagcagagttggagaatgggcagttttatgtggctgttggcagagataagtttaagaaactgccttacagtgagttactttttgacaagtcaacgatgagaaggccttttggtcagaaagcttcttcactacctcctattgtaggatccagaaagtctaaagggagtggaaatgatcgccactctaagtcaacagttggatccagtgacaactcatctcctcagcccctgaagaggaaagggaaaaaagaagacgtgaattcagaaaaactgacgaaattgaaacaaaatgtaaaattaaagaattcacaagaaaccattccaaatagtgatgaaggcattttcaaagctggagcagagaggtctgaaacacggggggcagcagaagtccaagaagatgaagatactcaggttgaggttccagtcgatcagaggccagcagaaatagtagacgaggaagaagatggagagaaggcaaacaaggatgcagaacagaaagaagacttttcaggaatgaatggtgaccttgaagaggaaggaggtagggaggctacagatgcccctgagcaagtcgaggagattctggatcacagtgagcagcaggcacgccctgctcgtgtaaatggaggcaccgatgaggagaatggtgaggagctgcagcaggttaataatgagcttcaactggtcctagacaaggaaagaaagtctcaaggagctggcagtggacaagatgaggctgatgtagaccctcaaagaccaccaaggccagaagtaaaaattaccagtccagaagaaaatgaaaacaaccaacaaaacaaggactatgctgccgtggcttag

SEQ ID NO: 937 - RNA, 1362 nt, synthetic construct
  misc_feature 1..1362: note = BAA07903
  source 1..1362: mol_type = other RNA
atgcgtatccccgtagatgccagcacgagccgccgcttcacgccgccttccaccgcgctgagcccaggcaagatgagcgaggcgttgccgctgggcgccccggacgccggcgctgccctggccggcaagctgaggagcggcgaccgcagcatggtggaggtgctggccgaccacccgggcgagctggtgcgcaccgacagccccaacttcctctgctccgtgctgcctacgcactggcgctgcaacaagaccctgcccatcgctttcaaggtggtggccctaggggatgttccagatggcactctggtcactgtgatggctggcaatgatgaaaactactcggctgagctgagaaatgctaccgcagccatgaagaaccaggttgcaagatttaatgacctcaggtttgtcggtcgaagtggaagagggaaaagcttcactctgaccatcactgtcttcacaaacccaccgcaagtcgccacctaccacagagccatcaaaatcacagtggatgggccccgagaacctcgaagacatcggcagaaactagatgatcagaccaagcccgggagcttgtccttttccgagcggctcagtgaactggagcagctgcggcgcacagccatgagggtcagcccacaccacccagcccccacgcccaaccctcgtgcctccctgaaccactccactgcctttaaccctcagcctcagagtcagatgcaggatacaaggcagatccaaccatccccaccgtggtcctacgatcagtcctaccaatacctgggatccattgcctctccttctgtgcacccagcaacgcccatttcacctggacgtgccagcggcatgacaaccctctctgcagaactttccagtcgactctcaacggcacccgacctgacagcgttcagcgacccgcgccagttccccgcgctgccctccatctccgacccccgcatgcactatccaggcgccttcacctactccccgacgccggtcacctcgggcatcggcatcggcatgtcggccatgggctcggccacgcgctaccacacctacctgccgccgccctaccccggctcgtcgcaagcgcagggaggcccgttccaagccagctcgccctcctaccacctgtactacggcgcctcggccggctcctaccagttctccatggtgggcggcgagcgctcgccgccgcgcatcctgccgccctgcaccaacgcctccaccggctccgcgctgctcaaccccagcctcccgaaccagagcgacgtggtggaggccgagggcagccacagcaactcccccaccaacatggcgccctccgcgcgcctggaggaggccgtgtggaggccctactga

SEQ ID NO: 938 - RNA, 1080 nt, synthetic construct
  misc_feature 1..1080: note = ACI46041
  source 1..1080: mol_type = other RNA
atgccgctggagctggagctgtgtcccgggcgctgggtgggcgggcaacacccgtgcttcatcattgccgagatcggccagaaccaccagggcgacctggacgtagccaagcgcatgatccgcatggccaaggagtgtggggctgattgtgccaagttccagaagagtgagctagaattcaagtttaatcggaaagccttggagaggccatacacctcgaagcattcctgggggaagacgtacggggagcacaaacgacatctggagttcagccatgaccagtacagggagctgcagaggtacgccgaggaggttgggatcttcttcactgcctctggcatggatgagatggcagttgaattcctgcatgaactgaatgttccatttttcaaagttggatctggagacactaataattttccttatctggaaaagacagccaaaaaaggtcgcccaatggtgatctccagtgggatgcagtcaatggacaccatgaagcaagtttatcagatcgtgaagcccctcaaccccaacttctgcttcttgcagtgtaccagcgcatacccgctccagcctgaggacgtcaacctgcgggtcatctcggaatatcagaagctctttcctgacattcccatagggtattctgggcatgaaacaggcatagcgatatctgtggccgcagtggctctgggggccaaggtgttggaacgtcacataactttggacaagacctggaaggggagtgaccactcggcctcgctggagcctggagaactggccgagctggtgcggtcagtgcgtcttgtggagcgtgccctgggctccccaaccaagcagctgctgccctgtgagatggcctgcaatgagaagctgggcaagtctgtggtggccaaagtgaaaattccggaaggcaccattctaacaatggacatgctcaccgtgaaggtgggtgagcccaaagcctatcctcctgaagacatctttaatctagtgggcaagaaggtcctggtcactgttgaagaggatgacaccatcatggaagaattggtagataatcatggcaaaaaaatcaagtcttaa

SEQ ID NO: 939 - RNA, 2715 nt, synthetic construct
  misc_feature 1..2715: note = CCDS14652.1
  source 1..2715: mol_type = other RNA
atgcaggcttctccacttcaaacgagtcaaccaactccacctgaagaacttcatgctgctgcctatgtgtttacaaatgatgggcagcaaatgaggagtgatgaagtaaatctggttgcaacagggcatcaaagcaaaaagaaacattccagaaaatccaagagacactcttcatctaagagaaggaagagtatgtcctcgtggttagacaaacaggaagatgctgcagtcactcacagcatttgtgaagagaggataaataacggccaaccagtagctgataatgtcttgtcaactgctccaccatggcctgatgctaccatcgctcacaatatccgtgaagagaggatggaaaatggccaatctcgaactgacaaagtcttgtcaactgctccaccacagcttgttcatatggctgcagctggtattccatccatgagtaccagggatctgcattctaccgtcactcacaatatccgtgaagagagaatggaaaatggccaaccccaacctgataacgtcttgtcaactggtcccacagggcttattaatatggcagcaactcctattccagccatgagtgccagagatctctatgctacagtcactcacaatgtctgtgaacagaagatggaaaatgtccaaccagcacctgataacgtgttgttgactcttcgaccacggcgtattaatatgacagacactggtatttcacccatgagtaccagggatccatatgctaccatcacttacaatgtccctgaggagaagatggaaaagggccaaccccaacctgataacatcttgtcaactgcttcaacagggcttattaatgtggcaggagctggtactccagccatcagcaccaatggcctgtattccaccgtccctcacaatgtctgtgaagagaagatggaaaatgaccaaccgcaacctaataacgtattgtcaactgttcaaccagtgattatttatttgacagcaactggtattccgggcatgaataccagggatcagtatgctaccatcactcacaatgtctgtgaagagagagtggtaaataaccaaccactacctagtaacgccttgtcaactgttctaccagggcttgcttatttggcaacagctgatatgccagccatgagtaccagggatcagcatgctaccatcattcacaatctgcgtgaagagaagaaagataacagccaaccaacccctgataacgtcttgtcagctgttacaccagagcttattaacttggcaggagctggtattccacccatgagtaccagggatcagtatgctaccgtcaatcaccatgtccatgaagcaaggatggaaaatggccaacgaaaacaggataacgtcttgtcaaatgttctatccgggcttattaatatggcaggagctagtattccagcaatgagttccagggatctgtatgctaccattactcacagtgttcgtgaagagaagatggaaagtggcaaaccccaaactgataaggtcatatcaaatgatgcaccacagcttggtcatatggctgcaggtggtattccatccatgagtaccaaggatctgtatgctaccgtcactcaaaatgtccatgaagagaggatggaaaataaccaaccacaacctagttatgacttgtcaactgttctaccaggacttacttatttgacagtagctggtattccggccatgagtaccagggatcagtatgctaccgtcactcacaatgtccatgaagagaagattaaaaatggccaagcagcatccgataatgtcttctcgactgttccaccagcatttattaatatggcagcaactggtgtttcatccatgagtaccagggatcagtatgctgcagtcactcacaacatccgtgaagagaagataaataacagccaaccagcacctggtaacatcttgtcaactgctcctccatggcttcgtcatatggcagcagctggaatttcatccacgattaccagggatctgtatgtcaccgccactcacagtgtccatgaggagaagatgacaaatggccaacaggcacctgataactccttgtcaacggttccacctggttgtattaatctgtcaggagctggtatttcatgcagaagtaccagggatctgtatgctactgtcattcacgatatccaggaggaggagatggaaaatgatcaaacccctcctgatggcttcctgtcaaattctgattcaccagagctgataaatatgacaggacattgtatgccacccaatgcattggattctttctctcacgacttcacaagtctcagcaaagatgagctgctttacaaacctgatagtaatgaatttgcggtaggcaccaaaaactacagtgtctctgcaggtgacccaccagttacagtaatgtctttggtggaaactgtgccaaatacaccacaaatatctcctgccatggcaaagaaaattaatgatgatataaaatatcaattaatgaaagaagttcgaaggtttgggcaaaattatgaaagaattttcattttgcttgaagaggtacaaggatctatgaaagtcaagagacaatttgttgaatttaccatcaaggaagcagcaaggtttaaaaaagttgtcttaattcagcaactcgagaaggcgcttaaagaaatagattcccactgccatctcagaaaagttaagcacatgagaaaaagataa

SEQ ID NO: 940 - RNA, 2403 nt, synthetic construct
  misc_feature 1..2403: note = AAH01058
  source 1..2403: mol_type = other RNA
atggggtcgtccaagaagcatcgcggagagaaggaggcggccgggacgacggcggcggccggcaccgggggtgccaccgagcagccgccgcggcaccgggaacacaaaaaacacaagcaccggagtggcggcagtggcggtagcggtggcgaacgacggaagcggagccgggaacgtgggggcgagcgcgggagcgggcggcgcggggccgaagctgaggcccggagcagcacgcacgggcgggagcgcagccaggcagagccctccgagcggcgcgtgaagcgggagaagcgcgatgacggctacgaggccgctgccagctccaaaactagctcaggcgatgcctcctcactcagcatcgaggagactaacaaactccgggcaaagttggggctgaaacccttggaggttaatgccatcaagaaggaggcgggcaccaaggaggagcccgtgacagctgatgtcatcaaccctatggccttgcgacagcgagaggagctgcgggagaagctggcagctgccaaggagaagcgcctgctgaaccaaaagctggggaagataaagaccctaggagaggatgacccctggctggacgacactgcagcctggatcgagaggagccggcagctgcagaaggagaaggacctggcagagaagagggccaagttactggaggagatggaccaagagtttggtgtcagcactctggtggaggaggagttcgggcagaggcggcaggacctgtacagtgcccgggacctgcagggcctcaccgtggagcatgccattgattccttccgagaaggggagacaatgattcttaccctcaaggacaaaggcgtgctgcaggaggaggaggacgtgctggtgaacgtgaacctggtggataaggagcgggcagagaaaaatgtggagctgcggaagaagaagcctgactacctgccctatgccgaggacgagagcgtggacgacctggcgcagcaaaaacctcgctctatcctgtccaagtatgacgaagagcttgaaggggagcggccacattccttccgcttggagcagggcggcacggctgatggcctgcgggagcgggagctggaggagatccgggccaagctgcggctgcaggctcagtccctgagcacagtggggccccggctggcctccgaatacctcacgcctgaggagatggtgacctttaaaaagaccaagcggagggtgaagaaaatccgcaagaaggagaaggaggtagtagtgcgggcagatgacttgctgcctctcggggaccagactcaggatggggactttggttccagactgcggggacggggtcgccgccgagtgtccgaagtggaggaggagaaggagcctgtgcctcagcccctgccgtcggacgacacccgagtggagaacatggacatcagtgatgaggaggaaggtggagctccaccgccggggtccccgcaggtgctggaggaggacgaggcggagctggagctgcagaagcagctggagaagggacgccggctgcgacagttacagcagctacagcagctgcgagacagtggcgagaaggtggtggagattgtgaagaagctggagtctcgccagcggggctgggaggaggatgaggatcccgagcggaagggggccatcgtgttcaacgccacgtccgagttctgccgcaccttgggggagatccccacctacgggctggctggcaatcgcgaggagcaggaggagctcatggactttgaacgggatgaggagcgctcagccaacggtggctccgaatctgacggggaggagaacatcggctggagcacggtgaacctggacgaggagaagcagcagcaggatttctctgcttcctccaccaccatcctggacgaggaaccgatcgtgaatagggggctggcagctgccctgctcctgtgtcagaacaaagggctgctggagaccacagtgcagaaggtggcccgggtgaaggcccccaacaagtcgctgccctcagccgtgtactgcatcgaggataagatggccatcgatgacaagtacagccggagggaggaataccgaggcttcacacaggacttcaaggagaaggacggctacaaacccgacgttaagatcgaatacgtggatgagacgggccggaaactcacacccaaggaggctttccggcagctgtcgcaccgcttccatggcaagggctcaggcaagatgaagacagagcggcggatgaagaagctggacgaggaggcgctcctgaagaagatgagctccagcgacacgcccctgggcaccgtggccctgctccaggagaagcagaaggctcagaagaccccctacatcgtgctcagcggcagcggcaagagcatgaacgcgaacaccatcaccaagtga

SEQ ID NO: 941 - RNA, 2877 nt, synthetic construct
  misc_feature 1..2877: note = AAF00087
  source 1..2877: mol_type = other RNA
atgaggactcacacacggggggctcccagtgtgtttttcatatatttgctttgctttgtgtcagcctacatcaccgacgagaacccagaagttatgattcccttcaccaatgccaactacgacagccatcccatgctgtacttctccagggcagaagtggcggagctgcagctcagggctgccagctcgcacgagcacattgcagcccgcctcacggaggctgtgcacacgatgctgtccagccccttggaatacctccctccctgggatcccaaggactacagtgcccgctggaatgaaatttttggaaacaacttgggtgccttggcaatgttctgtgtgctgtatcctgagaacattgaagcccgagacatggccaaagactacatggagaggatggcagcgcagcctagttggttggtgaaagatgctccttgggatgaggtcccgcttgctcactccctggttggttttgccactgcttatgacttcttgtacaactacctgagcaagacacaacaggagaagtttcttgaagtgattgccaatgcctcagggtatatgtatgaaacttcatacaggagaggatggggatttcaatacctgcacaatcatcagcccaccaactgtatggctttgctcacgggaagcctagtcctgatgaatcaaggatatcttcaagaagcctacttatggaccaaacaagttctgaccatcatggagaaatctctggtcttgctcagggaggtgacggatggctccctctatgaaggagttgcgtatggcagctacaccactagatcactcttccaatacatgtttctcgtccagaggcacttcaacatcaaccactttggccatccgtggcttaaacaacactttgcatttatgtatagaaccatcctgccagggtttcaaaggactgtggctattgcggactcaaattacaactggttttatggtccagaaagccaattagtgttccttgataaatttgtcatgcgtaatggcagtggtaactggctagctgaccaaatcagaaggaaccgtgtggtggaaggtccaggaacaccatccaaagggcagcgctggtgcactctgcacacagaatttctctggtatgatggcagcttgaaatcggttcctcctccagactttggcacccctacactgcattattttgaagactggggtgtcgtgacttatggaagtgcactacctgcagaaatcaatagatctttcctttccttcaagtctggaaaactggggggacgtgcaatatatgacattgtccacagaaacaaatacaaagattggatcaaaggatggagaaattttaatgcagggcatgaacatcctgatcaaaactcatttacttttgctcccaatggtgtgcctttcattactgaggctctgtacgggccaaagtacaccttcttcaacaatgttttgatgttttccccagctgtgtcaaagagctgcttttctccctgggtgggtcaggtcacagaagactgctcatcaaaatggtctaaatacaagcatgacctggcagctagttgtcaggggagggtggttgcagcagaggagaaaaatggggtggttttcatccgaggagaaggtgtgggagcttataacccccagctcaacctgaagaatgttcagaggaatctcatcctcctacatccacagctgcttctccttgtagaccaaatacacctgggagaggagagtcccttggagacagcagcgagcttcttccataatgtggatgttccttttgaggagactgtggtagatggtgtccatggggctttcatcaggcagagagatggtctctataaaatgtactggatggacgatactggctacagcgagaaagcaacctttgcctcagtgacatatcctcggggctatccctacaacgggacaaactatgtgaatgtcaccatgcacctccgaagtcccatcaccagggcagcttacctcttcatagggccatctatagatgttcagagcttcactgtccacggagactctcagcaactggatgtgttcatagccaccagcaaacatgcctacgccacatacctgtggacaggtgaggccacaggacagtctgcctttgcacaggtcattgctgatcgtcacaaaattctgtttgaccggaattcagccatcaagagcagcattgtccctgaggtgaaggactatgctgctattgtggaacagaacttgcagcattttaaaccagtgtttcagctgctggagaagcagatactgtcccgagtccggaacacagctagctttaggaagactgctgaacgcctgctgagattttcagataagagacagactgaggaggccattgacaggatttttgccatatcacagcaacagcagcagcaaagcaagtcaaagaaaaaccgaagggcaggcaaacgctataaatttgtggatgctgtccctgatatttttgcacagattgaagtcaatgagaaaaagattagacagaaagctcagattttggcacagaaagaactacccatagatgaagatgaagaaatgaaagaccttttagattttgcagatgtaacatacgagaaacataaaaatgggggcttgattaaaggccggtttggacaggcacggatggtgacaactacacacagcagggccccatcactgtctgcttcctataccaggttgttcctgattctgaacattgctattttctttgtcatgttggcaatgcaactgacttatttccagagggcccagagcctacatggccaaagatgtctttatgcagttcttctcatagatagctgtattttattatggttgtactcttcttgttcccaatcacagtgttag

SEQ ID NO: 942 - RNA, 2892 nt, synthetic construct
  misc_feature 1..2892: note = AAH93784
  source 1..2892: mol_type = other RNA
atggcgactgcggccgaaacctcggcttcagaacccgaggctgagtccaaggctgggcccaaggctgacggagaggaggatgaggttaaggcggctaggacaaggagaaaggtgttatcgcgggctgtggccgctgcgacatacaagaccatggggccagcgtgggatcagcaggaggaaggcgtgagcgagagcgatggggatgagtacgccatggcttcctccgcggagagctcccccggggagtacgagtgggaatatgacgaagaggaggagaaaaaccagctggagattgagagactggaggagcagttgtctatcaacgtctatgactacaactgccatgtggacttgatcagactgctcaggctggaaggggagcttaccaaggtgaggatggcccgccagaagatgagtgaaatctttcccttgactgaagagctctggctggagtggctgcatgacgagatcagcatggcccaggatggcctggacagagagcacgtgtatgacctctttgagaaagccgtgaaggattacatttgtcctaacatttggctagagtatggccagtactcagttggtgggattggtcagaaaggtggccttgagaaagttcgctccgtgtttgaaagggctctctcgtctgttggtttacatatgaccaaaggactcgccctctgggaggcttaccgagagtttgaaagtgcgattgtggaagctgctcggcttgagaaagtccacagtcttttccggcgacagttggcgatcccactctatgatatggaggccacatttgcagagtatgaagaatggtcagaagacccaataccagagtcagtaattcagaactataacaaagcactacagcagctggagaaatataaaccctatgaagaagcactgttgcaggcagaggcaccaaggctggcagaatatcaagcatatatcgattttgagatgaaaattggcgatcctgctcgcattcagttgatctttgagcgcgccctggtcgagaactgccttgtcccagacttatggatccgttacagtcagtacctagatcgacaactgaaagtaaaggatttggttttatctgtacataaccgcgctattagaaactgcccctggacagttgccttatggagtcggtacctcttggccatggagagacatggagttgatcatcaagtaatttctgtaaccttcgagaaagctttgaatgccggcttcatccaggccactgattatgtggagatttggcaggcataccttgattacctgaggagaagggttgatttcaaacaagactccagtaaagagctggaggagttgagggccgcctttactcgtgccttggagtatctgaagcaggaggtggaagagcgtttcaatgagagtggtgatccaagctgcgtgattatgcagaactgggctaggattgaggctcgactgtgcaataacatgcagaaagctcgggaactctgggatagcatcatgaccagaggaaatgccaagtacgccaacatgtggctagagtattacaacctggaaagagctcatggtgacacccagcactgccggaaggctctgcaccgggccgtccagtgcaccagtgactacccagagcacgtctgcgaagtgttactcaccatggagaggacagaaggttctttagaagattgggatatagctgttcagaaaactgaaacccgattagctcgtgtcaatgagcagagaatgaaggctgcagagaaggaagcagcccttgtgcagcaagaagaagaaaaggctgaacaacggaaaagagctcgggctgagaagaaagcgttaaaaaagaagaaaaagatcagaggcccagagaagcgcggagcagatgaggacgatgagaaagagtggggcgatgatgaagaagagcagccttccaaacgcagaagggtcgagaacagcatccctgcagctggagaaacacaaaatgtagaagtagcagcagggcccgctgggaaatgtgctgccgtagatgtggagcccccttcgaagcagaaggagaaggcagcctccctgaagagggacatgcccaaggtgctgcacgacagcagcaaggacagcatcaccgtctttgtcagcaacctgccctacagcatgcaggagccggacacgaagctcaggccactcttcgaggcctgtggggaggtggtccagatccgacccatcttcagcaaccgtggggatttccgaggttactgctacgtggagtttaaagaagagaaatcagcccttcaggcactggagatggaccggaaaagtgtagaagggaggccaatgtttgtttccccctgtgtggataagagcaaaaaccccgattttaaggtgttcaggtacagcacttccctagagaaacacaagctgttcatctcaggcctgcctttctcctgtactaaagaggaactagaagaaatctgtaaggctcatggcaccgtgaaggacctcaggctggtcaccaaccgggctggcaaaccaaagggcctggcctacgtggagtatgaaaatgaatcccaggcgtcgcaggctgtgatgaagatggacggcatgactatcaaagagaacatcatcaaagtggcaatcagcaaccctcctcagaggaaagttccagagaagccagagaccaggaaggcaccaggtggccccatgcttttgccgcagacatacggagcgagggggaagggaaggacgcagctgtctctactgcctcgtgccctgcagcgcccaagtgctgcagctcctcaggctgagaacggccctgccgcggctcctgcagttgccgccccagcagccaccgaggcacccaagatgtccaatgccgattttgccaagctgtttctgagaaagtga

SEQ ID NO: 943 - RNA, 2283 nt, synthetic construct
  misc_feature 1..2283: note = AAC51668
  source 1..2283: mol_type = other RNA
atgaagacttgggtaaaaatcgtatttggagttgccacctctgctgtgcttgccttattggtgatgtgcattgtcttacgcccttcaagagttcataactctgaagaaaatacaatgagagcactcacactgaaggatattttaaatggaacattttcttataaaacattttttccaaactggatttcaggacaagaatatcttcatcaatctgcagataacaatatagtactttataatattgaaacagggcaatcatataccattttgagtaatagaaccatgaaaagtgtgaatgcttcaaattacggcttatcacctgatcggcaatttgtatatctagaaagtgattattcaaagctttggagatactcttacacagcaacatattacatctatgaccttagcaatggagaatttgtaagaggaaatgagcttcctcgtccaattcagtatttatgctggtcgcctgttgggagtaaattagcatatgtctatcaaaacaatatctatttgaaacaaagaccaggagatccaccttttcaaataacatttaatggaagagaaaataaaatatttaatggaatcccagactgggtttatgaagaggaaatgcttgctacaaaatatgctctctggtggtctcctaatggaaaatttttggcatatgcggaatttaatgatacggatataccagttattgcctattcctattatggcgatgaacaatatcctagaacaataaatattccatacccaaaggctggagctaagaatcccgttgttcggatatttattatcgataccacttaccctgcgtatgtaggtccccaggaagtgcctgttccagcaatgatagcctcaagtgattattatttcagttggctcacgtgggttactgatgaacgagtatgtttgcagtggctaaaaagagtccagaatgtttcggtcctgtctatatgtgacttcagggaagactggcagacatgggattgtccaaagacccaggagcatatagaagaaagcagaactggatgggctggtggattctttgtttcaacaccagttttcagctatgatgccatttcgtactacaaaatatttagtgacaaggatggctacaaacatattcactatatcaaagacactgtggaaaatgctattcaaattacaagtggcaagtgggaggccataaatatattcagagtaacacaggattcactgttttattctagcaatgaatttgaagaataccctggaagaagaaacatctacagaattagcattggaagctatcctccaagcaagaagtgtgttacttgccatctaaggaaagaaaggtgccaatattacacagcaagtttcagcgactacgccaagtactatgcacttgtctgctacggcccaggcatccccatttccacccttcatgatggacgcactgatcaagaaattaaaatcctggaagaaaacaaggaattggaaaatgctttgaaaaatatccagctgcctaaagaggaaattaagaaacttgaagtagatgaaattactttatggtacaagatgattcttcctcctcaatttgacagatcaaagaagtatcccttgctaattcaagtgtatggtggtccctgcagtcagagtgtaaggtctgtatttgctgttaattggatatcttatcttgcaagtaaggaagggatggtcattgccttggtggatggtcgaggaacagctttccaaggtgacaaactcctctatgcagtgtatcgaaagctgggtgtttatgaagttgaagaccagattacagctgtcagaaaattcatagaaatgggtttcattgatgaaaaaagaatagccatatggggctggtcctatggaggatacgtttcatcactggcccttgcatctggaactggtcttttcaaatgtggtatagcagtggctccagtctccagctgggaatattacgcgtctgtctacacagagagattcatgggtctcccaacaaaggatgataatcttgagcactataagaattcaactgtgatggcaagagcagaatatttcagaaatgtagactatcttctcatccacggaacagcagatgataatgtgcactttcagaactcagcacagattgctaaagctctggttaatgcacaagtggatttccaggcaatgtggtactctgaccagaaccacggcttatccggcctgtccacgaaccacttatacacccacatgacccacttcctaaagcagtgtttctctttgtcagactaa

SEQ ID NO: 944 - RNA, 1128 nt, synthetic construct
  misc_feature 1..1128: note = CCDS32839.1
  source 1..1128: mol_type = other RNA
atggatgccctgcaactagcaaattcggcttttgccgttgatctgttcaaacaactatgtgaaaaggagccactgggcaatgtcctcttctctccaatctgtctctccacctctctgtcacttgctcaagtgggtgctaaaggtgacactgcaaatgaaattggacaggttcttcattttgaaaatgtcaaagatgtaccctttggatttcaaacagtaacatcggatgtaaacaaacttagttccttttactcactgaaactaatcaagcggctctacgtagacaaatctctgaatctttctacagagttcatcagctctacgaagagaccgtatgcaaaggaattggaaactgttgacttcaaagataaattggaagaaacgaaaggtcagatcaacaactcaattaaggatctcacagatggccactttgagaacattttagctgacaacagtgtgaacgaccagaccaaaatccttgtggttaatgctgcctactttgttggcaagtggatgaagaaattttctgaatcagaaacaaaagaatgtcctttcagagtcaacaagacagacaccaaaccagtgcagatgatgaacatggaggccacgttctgtatgggaaacattgacagtatcaattgtaagatcatagagcttccttttcaaaataagcatctcagcatgttcatcctactacccaaggatgtggaggatgagtccacaggcttggagaagattgaaaaacaactcaactcagagtcactgtcacagtggactaatcccagcaccatggccaatgccaaggtcaaactctccattccaaaatttaaggtggaaaagatgattgatcccaaggcttgtctggaaaatctagggctgaaacatatcttcagtgaagacacatctgatttctctggaatgtcagagaccaagggagtggccctatcaaatgttatccacaaagtgtgcttagaaataactgaagatggtggggattccatagaggtgccaggagcacggatcctgcagcacaaggatgaattgaatgctgaccatccctttatttacatcatcaggcacaacaaaactcgaaacattattttctttggcaaattctgttctccttaa

SEQ ID NO: 945 - RNA, 1002 nt, synthetic construct
  misc_feature 1..1002: note = AAH06564
  source 1..1002: mol_type = other RNA
atggcttgctcgaggccccccagccagtgtgaacccacatccctgcccccagggccacctgcaggacgccgacacctacccctcagcagacgccggagagaaatgagtagcaacaaagagcagcggtcagcagtgttcgtgatcctctttgccctcatcaccatcctcatcctctacagctccaacagtgccaatgaggtcttccattacggctccctgcggggccgtagccgccgacctgtcaacctcaagaagtggagcatcactgacggctatgtccccattctcggcaacaagacactgccctctcggtgccaccagtgtgtgattgtcagcagctccagccacctgctgggcaccaagctgggccctgagatcgagcgggctgagtgtacaatccgcatgaatgatgcacccaccactggctactcagctgatgtgggcaacaagaccacctaccgcgtcgtggcccattccagtgtgttccgcgtgctgaggaggccccaggagtttgtcaaccggacccctgaaaccgtgttcatcttctgggggcccccgagcaagatgcagaagccccagggcagcctcgtgcgtgtgatccagcgagcgggcctggtgttccccaacatggaagcatatgccgtctctcccggccgcatgcggcaatttgacgacctcttccggggtgagacgggcaaggacagggagaagtctcattcgtggttgagcacaggctggtttaccatggtgatcgcggtggagttgtgtgaccacgtgcatgtctatggcatggtcccccccaactactgcagccagcggccccgcctccagcgcatgccctaccactactacgagcccaaggggccggacgaatgtgtcacctacatccagaatgagcacagtcgcaagggcaaccaccaccgcttcatcaccgagaaaagggtcttctcatcgtgggcccagctgtatggcatcaccttctcccacccctcctggacctag

SEQ ID NO: 946 - RNA, 1071 nt, synthetic construct
  misc_feature 1..1071: note = AAC37586
  source 1..1071: mol_type = other RNA
atgagcccctgcgggcgggcccggcgacaaacgtccagaggggccatggctgtactggcgtggaagttcccgcggacccggctgcccatgggagccagtgccctctgtgtcgtggtcctctgttggctctacatcttccccgtctaccggctgcccaacgagaaagagatcgtgcagggggtgctgcaacagggcacggcgtggaggaggaaccagaccgcggccagagcgttcaggaaacaaatggaagactgctgcgaccctgcccatctctttgctatgactaaaatgaattcccctatggggaagagcatgtggtatgacggggagtttttatactcattcaccattgacaattcaacttactctctcttcccacaggcaaccccattccagctgccattgaagaaatgcgcggtggtgggaaatggtgggattctgaagaagagtggctgtggccgtcaaatagatgaagcaaattttgtcatgcgatgcaatctccctcctttgtcaagtgaatacactaaggatgttggatccaaaagtcagttagtgacagctaatcccagcataattcggcaaaggtttcagaaccttctgtggtccagaaagacatttgtggacaacatgaaaatctataaccacagttacatctacatgcctgccttttctatgaagacaggaacagagccatctttgagggtttattatacactgtcagatgttggtgccaatcaaacagtgctgtttgccaaccccaactttctgcgtagcattggaaagttctggaaaagtagaggaatccatgccaagcgcctgtccacaggactttttctggtgagcgcagctctgggtctctgtgaagaggtggccatctatggcttctggcccttctctgtgaatatgcatgagcagcccatcagccaccactactatgacaacgtcttacccttttctggcttccatgccatgcccgaggaatttctccaactctggtatcttcataaaatcggtgcactgagaatgcagctggacccatgtgaagatacctcactccagcccacttcctag

SEQ ID NO: 947 - RNA, 1257 nt, synthetic construct
  misc_feature 1..1257: note = BAG50894
  source 1..1257: mol_type = other RNA
atgcggacgaaggcggcgggctgcgcggagcggcgtcccctgcagccgcggaccgaggcagcggcggcacctgccggccgagcaatgccaagtgagtacacctatgtgaaactgagaagtgattgctcgaggccttccctgcaatggtacacccgagctcaaagcaagatgagaaggcccagcttgttattaaaagacatcctcaaatgtacattgcttgtgtttggagtgtggatcctttatatcctcaagttaaattatactactgaagaatgtgacatgaaaaaaatgcattatgtggaccctgaccatgtaaagagagctcagaaatatgctcagcaagtcttgcagaaggaatgtcgtcccaagtttgccaagacatcaatggcgctgttatttgagcacaggtatagcgtggacttactcccttttgtgcagaaggcccccaaagacagtgaagctgagtccaagtacgatcctccttttgggttccggaagttctccagtaaagtccagaccctcttggaactcttgccagagcacgacctccctgaacacttgaaagccaagacctgtcggcgctgtgtggttattggaagcggaggaatactgcacggattagaactgggccacaccctgaaccagttcgatgttgtgataaggttaaacagtgcaccagttgagggatattcagaacatgttggaaataaaactactataaggatgacttatccagagggcgcaccactgtctgaccttgaatattattccaatgacttatttgttgctgttttatttaagagtgttgatttcaactggcttcaagcaatggtaaaaaaggaaaccctgccattctgggtacgactcttcttttggaagcaggtggcagaaaaaatcccactgcagccaaaacatttcaggattttgaatccagttatcatcaaagagactgcctttgacatccttcagtactcagagcctcagtcaaggttctggggccgagataagaacgtccccacaatcggtgtcattgccgttgtcttagccacacatctgtgcgatgaagtcagtttggcgggttttggatatgacctcaatcaacccagaacacctttgcactacttcgacagtcaatgcatggctgctatgaactttcagaccatgcataatgtgacaacggaaaccaagttcctcttaaagctggtcaaagagggagtggtgaaagatctcagtggaggcattgatcgtgaattttga

SEQ ID NO: 948 - RNA, 1059 nt, synthetic construct
  misc_feature 1..1059: note = EAW56837
  source 1..1059: mol_type = other RNA
atggacttcctgcggaacttattctcccagacgctcagcctgggcagccagaaggagcgtctgctggacgagctgaccttggaaggggtggcccggtacatgcagagcgaacgctgtcgcagagtcatctgtttggtgggagctggaatctccacatccgcaggcatccccgactttcgctctccatccaccggcctctatgacaacctagagaagtaccatcttccctacccagaggccatctttgagatcagctatttcaagaaacatccggaacccttcttcgccctcgccaaggaactctatcctgggcagttcaagccaaccatctgtcactacttcatgcgcctgctgaaggacaaggggctactcctgcgctgctacacgcagaacatagataccctggagcgaatagccgggctggaacaggaggacttggtggaggcgcacggcaccttctacacatcacactgcgtcagcgccagctgccggcacgaatacccgctaagctggatgaaagagaagatcttctctgaggtgacgcccaagtgtgaagactgtcagagcctggtgaagcctgatatcgtcttttttggtgagagcctcccagcgcgtttcttctcctgtatgcagtcagacttcctgaaggtggacctcctcctggtcatgggtacctccttgcaggtgcagccctttgcctccctcatcagcaaggcacccctctccacccctcgcctgctcatcaacaaggagaaagctggccagtcggaccctttcctggggatgattatgggcctcggaggaggcatggactttgactccaagaaggcctacagggacgtggcctggctgggtgaatgcgaccagggctgcctggcccttgctgagctccttggatggaagaaggagctggaggaccttgtccggagggagcacgccagcatagatgcccagtcgggggcgggggtccccaaccccagcacttcagcttcccccaagaagtccccgccacctgccaaggacgaggccaggacaacagagagggagaaaccccagtga

SEQ ID NO: 949 - RNA, 1170 nt, synthetic construct
  misc_feature 1..1170: note = AAD40850
  source 1..1170: mol_type = other RNA
atggcagagccagacccctctcaccctctggagacccaggcagggaaggtgcaggaggctcaggactcagattcagactctgagggaggagccgctggtggagaagcagacatggacttcctgcggaacttattctcccagacgctcagcctgggcagccagaaggagcgtctgctggacgagctgaccttggaaggggtggcccggtacatgcagagcgaacgctgtcgcagagtcatctgtttggtgggagctggaatctccacatccgcaggcatccccgactttcgctctccatccaccggcctctatgacaacctagagaagtaccatcttccctacccagaggccatctttgagatcagctatttcaagaaacatccggaacccttcttcgccctcgccaaggaactctatcctgggcagttcaagccaaccatctgtcactacttcatgcgcctgctgaaggacaaggggctactcctgcgctgctacacgcagaacatagataccctggagcgaatagccgggctggaacaggaggacttggtggaggcgcacggcaccttctacacatcacactgcgtcagcgccagctgccggcacgaatacccgctaagctggatgaaagagaagatcttctctgaggtgacgcccaagtgtgaagactgtcagagcctggtgaagcctgatatcgtcttttttggtgagagcctcccagcgcgtttcttctcctgtatgcagtcagacttcctgaaggtggacctcctcctggtcatgggtacctccttgcaggtgcagccctttgcctccctcatcagcaaggcacccctctccacccctcgcctgctcatcaacaaggagaaagctggccagtcggaccctttcctggggatgattatgggcctcggaggaggcatggactttgactccaagaaggcctacagggacgtggcctggctgggtgaatgcgaccagggctgcctggcccttgctgagctccttggatggaagaaggagctggaggaccttgtccggagggagcacgccagcatagatgcccagtcgggggcgggggtccccaaccccagcacttcagcttcccccaagaagtccccgccacctgccaaggacgaggccaggacaacagagagggagaaaccccagtga

SEQ ID NO: 950 - RNA, 1401 nt, synthetic construct
  misc_feature 1..1401: note = AAH02824
  source 1..1401: mol_type = other RNA
atggcggaggagcaggacctatcggaggtggagctgagccccgtgggctcggaggagccccgctgcctgtccccggggagcgcgccctcgctagggcccgacggcggcggcggcggatcgggcctgcgagccagcccggggccaggcgagctgggcaaggtcaagaaggagcagcaggacggcgaggcggacgatgacaagttccccgtgtgcatccgcgaggccgtcagccaggtgctcagcggctacgactggacgctggtgcccatgcccgtgcgcgtcaacggcgccagcaaaagcaagccgcacgtcaagcggcccatgaacgccttcatggtgtgggctcaggcagcgcgcaggaagctcgcggaccagtacccgcacctgcacaacgctgagctcagcaagacgctgggcaagctctggaggctgctgaacgaaagtgacaagcgccccttcatcgaggaggctgagcggctccgtatgcagcacaagaaagaccacccggactacaagtaccagcccaggcggcggaagaacgggaaggccgcccagggcgaggcggagtgccccggtggggaggccgagcaaggtgggaccgccgccatccaggcccactacaagagcgcccacttggaccaccggcacccaggagagggctcccccatgtcagatgggaaccccgagcacccctcaggccagagccatggcccacccacccctccaaccaccccgaagacagagctgcagtcgggcaaggcagacccgaagcgggacgggcgctccatgggggagggcgggaagcctcacatcgacttcggcaacgtggacattggtgagatcagccacgaggtaatgtccaacatggagacctttgatgtggctgagttggaccagtacctgccgcccaatgggcacccaggccatgtgagcagctactcagcagccggctatgggctgggcagtgccctggccgtggccagtggacactccgcctggatctccaagccaccaggcgtggctctgcccacggtctcaccacctggtgtggatgccaaagcccaggtgaagacagagaccgcggggccccaggggcccccacactacaccgaccagccatccacctcacagatcgcctacacctccctcagcctgccccactatggctcagccttcccctccatctcccgcccccagtttgactactctgaccatcagccctcaggaccctattatggccactcgggccaggcctctggcctctactcggccttctcctatatggggccctcgcagcggcccctctacacggccatctctgaccccagcccctcagggccccagtcccacagccccacacactgggagcagccagtatatacgacactgtcccggccctaa

SEQ ID NO: 951 - RNA, 456 nt, synthetic construct
  misc_feature 1..456: note = AAH32457
  source 1..456: mol_type = other RNA
atgtcgattccattctccaacacccactaccgaattccacaaggatttgggaatcttcttgaagggctgacacgcgagattctgagagagcaaccggacaatataccagcttttgcagcagcctattttgagagccttctagagaaaagagagaaaaccaactttgatccagcagaatgggggagtaaggtagaagaccgcttctataacaatcatgcattcgaggagcaagaaccacctgagaaaagtgatcctaaacaagaagagtctcagatatctgggaaggaggaagagacatcagtcaccatcttagactcttctgaggaagataaggaaaaagaagaggttgctgctgtcaaaatccaagctgccttccggggacacatagccagagaggaggcaaagaaaatgaaaacaaatagtcttcaaaatgaggaaaaagaggaaaacaagtga

SEQ ID NO: 952 - RNA, 294 nt, synthetic construct
  misc_feature 1..294: note = AAF28420
  source 1..294: mol_type = other RNA
atggacaaacaatccagtgccggcggggtgaagaggagcgtcccctgtgattccaacgaggccaacgagatgatgccggagaccccaactggggactcagacccgcaacctgctcctaaaaaaatgaaaacatctgagtcctcgaccatactagtggttcgctacaggaggaactttaaaagaacatctccagaggaactgctgaatgaccacgcccgagagaacagaatcaaccccctccaaatggaggaggaggaattcatggaaataatggttgaaatacctgcaaagtag

SEQ ID NO: 953 - RNA, 426 nt, synthetic construct
  misc_feature 1..426: note = AAH62750
  source 1..426: mol_type = other RNA
atggaacagccaacttccagtaccaatggggagaagacgaagagcccctgtgaatccaataacaaaaaaaatgatgagatgcaagaggtaccaaacagagtcttagcccccgaacagagtttgaagaagacaaaaacatcagaatatccaataatatttgtgtattacctcaggaagggtaagaaaataaattcaaatcaactggagaatgaacagtcccaagagaactccatcaatccaatccaaaaggaggaggacgaaggcgtagacttatctgaaggatcttcaaatgaggatgaagacctaggcccatgtgaaggaccttcaaaggaggacaaagatctagactcatctgaaggatcctcacaggaggatgaagacctaggcttatctgaaggatcttcacaggacagtggggaggattag

SEQ ID NO: 954 - RNA, 567 nt, synthetic construct
  misc_feature 1..567: note = AAH01003
  source 1..567: mol_type = other RNA
atgaacggagacgacacctttgcaaagagacccagggatgatgctaaagcatcagagaagagaagcaaggcctttgatgatattgccacatacttctctaagaaagagtggaaaaagatgaaatactcggagaaaatcagctatgtgtatatgaagagaaactataaggccatgactaaactaggtttcaaagtcaccctcccacctttcatgtgtaataaacaggccacagacttccaggggaatgattttgataatgaccataaccgcaggattcaggttgaacatcctcagatgactttcggcaggctccacagaatcatcccgaagatcatgcccaagaagccagcagaggacgaaaatgattcgaagggagtgtcagaagcatctggcccacaaaacgatgggaaacaactgcaccccccaggaaaagcaaatatttctgagaagattaataagagatctggacccaaaagggggaaacatgcctggacccacagactgcgtgagagaaagcagctggtgatttatgaagagatcagcgaccctgaggaagatgacgagtaa

SEQ ID NO: 955 - RNA, 567 nt, synthetic construct
  misc_feature 1..567: note = AAH16957
  source 1..567: mol_type = other RNA
atgaacggagacgacgcctttgcaaggagacccacggttggtgctcaaataccagagaagatccaaaaggccttcgatgatattgccaaatacttctctaaggaagagtgggaaaagatgaaagcctcagagaaaatcttctatgtgtatatgaagagaaagtatgaggctatgactaaactaggtttcaaggccaccctcccacctttcatgtgtaataaacgggccgaagacttccaggggaatgatttggataatgaccctaaccgtgggaatcaggttgaacgtcctcagatgactttcggcaggctccagggaatctccccgaagatcatgcccaagaagccagcagaggaaggaaatgattcggaggaagtgccagaagcatctggcccacaaaatgatgggaaagagctgtgccccccgggaaaaccaactacctctgagaagattcacgagagatctggacccaaaaggggggaacatgcctggacccacagactgcgtgagagaaaacagctggtgatttatgaagagatcagcgaccctgaggaagatgacgagtaa

SEQ ID NO: 956 - RNA, 567 nt, synthetic construct
  misc_feature 1..567: note = AAC05819
  source 1..567: mol_type = other RNA
atgaacggagatgacacctttgcaaggagacccacggttggtgctcaaataccagagaagatacaaaaggccttcgatgatattgccaaatacttctctaaggaagagtgggaaaagatgaaagtctcggagaaaatcgtctatgtgtatatgaagagaaagtatgaggccatgactaaactaggtttcaaggccatcctcccatctttcatgcgtaataaacgggtcacagacttccaggggaatgattttgataatgaccctaaccgtgggaatcaggttcaacgtcctcagatgactttcggcaggctccagggaatcttcccgaagatcatgcccaagaagccagcagaggaaggaaatgtttcgaaggaagtgccagaagcatctggcccacaaaacgatgggaaacagctgtgccccccgggaaaaccaactacctctgagaagattaacatgatatctggacccaaaaggggggaacatgcctggacccacagactgcgtgagagaaagcagctggtgatttatgaagagatcagcgatcctgaggaagatgatgagtaa

SEQ ID NO: 957 - RNA, 567 nt, synthetic construct
  misc_feature 1..567: note = AAC05820
  source 1..567: mol_type = other RNA
atgaacggagacgacgcctttgcaaggagacccagggatgatgctcaaatatcagagaagttacgaaaggccttcgatgatattgccaaatacttctctaagaaagagtgggaaaagatgaaatcctcggagaaaatcgtctatgtgtatatgaagctaaactatgaggtcatgactaaactaggtttcaaggtcaccctcccacctttcatgcgtagtaaacgggctgcagacttccacgggaatgattttggtaacgatcgaaaccacaggaatcaggttgaacgtcctcagatgactttcggcagcctccagagaatcttcccgaagatcatgcccaagaagccagcagaggaagaaaatggtttgaaggaagtgccagaggcatctggcccacaaaatgatgggaaacagctgtgccccccgggaaatccaagtaccttggagaagattaacaagacatctggacccaaaagggggaaacatgcctggacccacagactgcgtgagagaaagcagctggtggtttatgaagagatcagcgaccctgaggaagatgacgagtaa

SEQ ID NO: 958 - RNA, 888 nt, synthetic construct
  misc_feature 1..888: note = CCDS32420.1
  source 1..888: mol_type = other RNA
atggagctgatccaggacacctcccgcccgccactggagtacgtgaagggggtcccgctcatcaagtactttgcagaggcactggggcccctgcagagcttccaggcccggcctgatgacctgctcatcagcacctaccccaagtccggcactacctgggtaagccagattctggacatgatctaccagggtggtgacctggagaagtgtcaccgagctcccatcttcatgcgggtgcccttccttgagttcaaagccccagggattccctcagggatggagactctgaaagacacaccggccccacgactcctgaagacacacctgcccctggctctgctcccccagactctgttggatcagaaggtcaaggtggtctatgttgcccgcaacgcaaaggatgtggcagtttcctactaccacttctaccacatggccaaggtgcaccctgagcctgggacctgggacagcttcctggagaagttcatggtcggagaagtgtcctacggatcctggtaccagcacgtgcaggagtggtgggagctgagccgcacccaccctgttctctacctcttctatgaagacatgaaggagaacccgaaaagggagattcaaaagatcctggagtttgtggggcgctccctgccagaggagaccgtggacttcgtggttcagcacacgtcgttcaaggagatgaagaagaaccctatgaccaactacaccaccgtcccccaggagttcatggaccacagcatctcccccttcatgaggaaaggcatggctggggactggaagaccaccttcaccgtggcgcagaatgagcgcttcgatgcggactatgcggagaagatggcaggctgcagcctcagcttccgctctgagctgtga

SEQ ID NO: 959 - RNA, 3807 nt, synthetic construct
  misc_feature 1..3807: note = CCDS43990.1
  source 1..3807: mol_type = other RNA
atgatagcagctccagaaataccaactgattttaatctactacaggagtcagaaacacatttttcttctgacacagattttgaagatatcgaaggaaaaaaccaaaagcaaggcaaaggcaaaacttgtaaaaaaggcaaaaagggcccagcagaaaagggcaaaggtggaaatggaggaggaaaacctccttctggtccaaaccgaatgaatggtcatcaccaacagaatggagtggaaaacatgatgttgtttgaagttgttaaaatgggcaagagtgctatgcagtcggtggtagatgattggatagaatcatacaagcatgaccgagatatagcacttcttgaccttatcaacttttttattcagtgttcaggctgtaaaggagttgtcacagcagaaatgtttagacatatgcagaactctgagataattcgaaaaatgactgaagaattcgatgaggatagtggagattatccacttaccatggctggtcctcagtggaagaagttcaaatccagtttttgtgaattcattggcgtgttagtacggcaatgtcaatatagtatcatatatgatgagtatatgatggatacagtcatttcacttcttacaggattgtctgactcacaagtcagagcatttcgacatacaagcaccctggcagctatgaagttgatgacagctttggtgaatgtggcactaaatcttagcattaatatggataatacacaaagacaatatgaagcagaacggaataaaatgattggaaaacgagccaatgagaggctagaactcctgctacaaaagcggaaagagcttcaggaaaatcaagatgaaatagaaaatatgatgaatgcaatatttaaaggagtgtttgtacatagataccgtgatgcgatagctgaaattcgagctatttgcattgaagagattggcatttggatgaagatgtatagtgatgcctttcttaatgacagttatttaaaatatgttggttggactatgcatgataagcaaggtgaagtaagactcaaatgtcttactgctctacaagggctttattataacaaagagcttaattccaaactggaactttttaccagtcggttcaaggatagaattgtgtctatgacccttgacaaagaatatgatgttgcagtacaagcaataaaattactcactcttgttttacagagtagtgaagaagttctcactgcagaagattgtgaaaatgtctatcatctggtttattcagctcaccggccagtagcagtagcagctggagaatttctctacaaaaagctcttcagtcgtagagatccagaggaggatggaatgatgaaaagaagaggaagacaaggtccaaatgccaaccttgttaagacattggtttttttctttctagaaagtgagttacatgagcatgcagcataccttgtggatagcatgtgggactgtgctactgagctgctgaaagactgggaatgtatgaatagcttgttactggaagagccacttagtggagaggaagcactaacagataggcaagagagtgctctgattgaaataatgctttgtaccattagacaagcggctgaatgtcatcctcccgtgggaagagggacaggaaaaagggtgcttacagcaaaggagaagaagacacagttggatgataggacaaaaatcactgagctttttgccgtggcccttcctcagttattagcaaaatactctgtagatgcagaaaaggtgactaacttgttgcagttgcctcagtactttgatttggaaatatataccactggacgattagaaaagcatttggatgccttattgcgacagatccggaatattgtagagaagcacacagatacagatgttttggaagcatgttctaaaacttaccatgcactctgtaatgaagagttcacaatcttcaacagagtagatatttcaagaagtcaactgatagatgaattggcagataaatttaaccggcttcttgaagattttctgcaagagggtgaagaacctgatgaagatgatgcatatcaggtattgtcaacattgaagaggatcactgcttttcataatgcccatgacctttcaaagtgggatttatttgcttgtaattacaaactcttgaaaactggaatcgaaaatggagacatgcctgagcagattgttattcacgcactgcagtgtactcactatgtaatcctttggcaacttgctaagataactgaaagcagctctacaaaggaggacttgctgcgtttaaagaaacaaatgagagtattttgtcagatatgtcaacattacctgaccaacgtgaatactactgttaaggaacaggccttcactattctgtgtgatattttgatgatcttcagccatcagattatgtcaggagggcgtgacatgttagagccattagtgtatacccctgattcttcattgcagtctgagttgctcagctttattttggatcatgtcttcattgaacaggatgatgataataatagtgcagatggtcagcaagaggatgaagccagtaaaattgaagctctgcacaagagaagaaatttacttgcagcattttgtaagctaattgtatatactgtggtggagatgaatacagctgcagatatcttcaaacagtatatgaagtattataatgactatggagatatcatcaaagaaacaatgagtaaaacaaggcagatagacaaaattcagtgtgctaagacccttattctcagtctgcaacagctttttaatgaaatgatacaagaaaatggctataattttgatagatcatcctctacatttagtggcataaaagaacttgctcgacgttttgctttaacttttggacttgatcagttgaaaacaagagaagccattgccatgctacacaaagatggcatagaatttgcttttaaagagcctaatccgcaaggggagagccatccacctttaaatttggcatttcttgatattctgagtgaattttcttctaaactacttcgacaagacaaaagaacagtgtatgtttacttggaaaagttcatgacctttcagatgtcactccgaagagaggatgtgtggcttccactgatgtcttaccgaaattctttgctagctggtggtgatgatgacaccatgtcagtcattagtggaatcagcagccgggggtcaacagtacggagtaaaaaatcaaaaccatctacaggaaaacggaaagtggttgagggcatgcagctttcactcactgaagaaagtagtagtagtgacagtatgtggttaagcagagaacaaacactgcacacccctgttatgatgcagacaccacaactcacctccactattatgagagagcccaaaagattacggcctgaggatagcttcatgagtgtttatccaatgcagactgaacatcatcaaacacctcttgattataacacgcaggtaacatggatgttagctcaaagacaacaagaggaagcaaggcaacagcaggagagagcagcaatgagctatgttaaactgcgaactaatcttcagcatgccattcggcgtggcacaagcctaatggaagatgatgaagagccaattgtggaagatgttatgatgtcctcagaagggaggattgaggatcttaatgagggaatggattttgacaccatggatatagatttgccaccatcaaagaacagacgagagagaacagaactgaagcctgatttctttgatccagcttcaattatggatgaatcagttcttggagtgtcaatgttttaa

SEQ ID NO: 960 - RNA, 1473 nt, synthetic construct
  misc_feature 1..1473: note = CCDS5615.1
  source 1..1473: mol_type = other RNA
atggaatcaatctctatgatgggaagccctaagagccttagtgaaacttttttacctaatggcataaatggtatcaaagatgcaaggaaggtcactgtaggtgtgattggaagtggagattttgccaaatccttgaccattcgacttattagatgcggctatcatgtggtcataggaagtagaaatcctaagtttgcttctgaattttttcctcatgtggtagatgtcactcatcatgaagatgctctcacaaaaacaaatataatatttgttgctatacacagagaacattatacctccctgtgggacctgagacatctgcttgtgggtaaaatcctgattgatgtgagcaataacatgaggataaaccagtacccagaatccaatgctgaatatttggcttcattattcccagattctttgattgtcaaaggatttaatgttgtctcagcttgggcacttcagttaggacctaaggatgccagccggcaggtttatatatgcagcaacaatattcaagcgcgacaacaggttattgaacttgcccgccagttgaatttcattcccattgacttgggatccttatcatcagccagagagattgaaaatttacccctacgactctttactctctggagagggccagtggtggtagctataagcttggccacattttttttcctttattcctttgtcagagatgtgattcatccatatgctagaaaccaacagagtgacttttacaaaattcctatagagattgtgaataaaaccttacctatagttgccattactttgctctccctagtatacctcgcaggtcttctggcagctgcttatcaactttattacggcaccaagtataggagatttccaccttggttggaaacctggttacagtgtagaaaacagcttggattactaagttttttcttcgctatggtccatgttgcctacagcctctgcttaccgatgagaaggtcagagagatatttgtttctcaacatggcttatcagcaggttcatgcaaatattgaaaactcttggaatgaggaagaagtttggagaattgaaatgtatatctcctttggcataatgagccttggcttactttccctcctggcagtcacttctatcccttcagtgagcaatgctttaaactggagagaattcagttttattcagtctacacttggatatgtcgctctgctcataagtactttccatgttttaatttatggatggaaacgagcttttgaggaagagtactacagattttatacaccaccaaactttgttcttgctcttgttttgccctcaattgtaattctgggtaagattattttattccttccatgtataagccgaaagctaaaacgaattaaaaaaggctgggaaaagagccaatttctggaagaaggtatgggaggaacaattcctcatgtctccccggagagggtcacagtaatgtga

SEQ ID NO: 961 - RNA, 777 nt, synthetic construct
  misc_feature 1..777: note = EAW93749
  source 1..777: mol_type = other RNA
atggaaagcagaaaagacatcacaaaccaagaagaaatttggaaaatgaagcctaggagaaatttagaagacaacgattatttgcataaggacacgggagagaccagcatgctaaaaagacctgtgcttttgcatttgcagcaaacagcccatgctgatgaatttgactgcccttcagaacttcagcacgcacaggaactctttccacagtggcacttgccaattaaaatagctgctgttatggcatctctgacttttctttacactcttctgagggaagtaattcaccctttagcaacttcccatcaacaatatttttataaaattccaatcctggtcatcaacaaagtcttgccaatggtttccatcactctcttggcattggtttacctaccaggtgtgatagcagcaattgtccaagttcataatggaaccaagtataagaagtttccacattggttggataagtggatgttaacaagaaagcagtttgggcttctcagtttgttttttgctgtactgcatgcaatttatactctgtcttacgcaatgaggcgatcctacagatacaagttgctaaactgggcatatcaacaggtccaacaaaataaagaagatgcctggattgagcatgatgtttggagaatggagatttatgtgtctctgggaattgtgggactggcaatactggctctgttggctgtgacatctattccatctgtgagtgactctttgacatggagagaatttcactatattcaggtaaataatatataa

SEQ ID NO: 962 - RNA, 1020 nt, synthetic construct
  misc_feature 1..1020: note = AAD15620
  source 1..1020: mol_type = other RNA
atggaaagcagaaaagacatcacaaaccaagaagaactttggaaaatgaagcctaggagaaatttagaagaagacgattatttgcataaggacacgggagagaccagcatgctaaaaagacctgtgcttttgcatttgcaccaaacagcccatgctgatgaatttgactgcccttcagaacttcagcacacacaggaactctttccacagtggcacttgccaattaaaatagctgctattatagcatctctgacttttctttacactcttctgagggaagtaattcaccctttagcaacttcccatcaacaatatttttataaaattccaatcctggtcatcaacaaagtcttgccaatggtttccatcactctcttggcattggtttacctgccaggtgtgatagcagcaattgtccaacttcataatggaaccaagtataagaagtttccacattggttggataagtggatgttaacaagaaagcagtttgggcttctcagtttcttttttgctgtactgcatgcaatttatagtctgtcttacccaatgaggcgatcctacagatacaagttgctaaactgggcatatcaacaggtccaacaaaataaagaagatgcctggattgagcatgatgtttggagaatggagatttatgtgtctctgggaattgtgggattggcaatactggctctgttggctgtgacatctattccatctgtgagtgactctttgacatggagagaatttcactatattcagagcaagctaggaattgtttcccttctactgggcacaatacacgcattgatttttgcctggaataagtggatagatataaaacaatttgtatggtatacacctccaacttttatgatagctgttttccttccaattgttgtcctgatatttaaaagcatactattcctgccatgcttgaggaagaagatactgaagattagacatggttgggaagacgtcaccaaaattaacaaaactgagatatgttcccagttgtag

SEQ ID NO: 963 - RNA, 498 nt, synthetic construct
  misc_feature 1..498: note = CCDS32752.1
  source 1..498: mol_type = other RNA
atgggtgccccgacgttgccccctgcctggcagccctttctcaaggaccaccgcatctctacattcaagaactggcccttcttggagggctgcgcctgcaccccggagcggatggccgaggctggcttcatccactgccccactgagaacgagccagacttggcccagtgtttcttctgcttcaaggagctggaaggctgggagccagatgacgaccccattgggccgggcacggtggcttacgcctgtaataccagcactttgggaggccgaggcgggcggatcacgagagaggaacataaaaagcattcgtccggttgcgctttcctttctgtcaagaagcagtttgaagaattaacccttggtgaatttttgaaactggacagagaaagagccaagaacaaaattgcaaaggaaaccaacaataagaagaaagaatttgaggaaactgcggagaaagtgcgccgtgccatcgagcagctggctgccatggattga

SEQ ID NO: 964 - RNA, 429 nt, synthetic construct
  misc_feature 1..429: note = AAC51660
  source 1..429: mol_type = other RNA
atgggtgccccgacgttgccccctgcctggcagccctttctcaaggaccaccgcatctctacattcaagaactggcccttcttggagggctgcgcctgcaccccggagcggatggccgaggctggcttcatccactgccccactgagaacgagccagacttggcccagtgtttcttctgcttcaaggagctggaaggctgggagccagatgacgaccccatagaggaacataaaaagcattcgtccggttgcgctttcctttctgtcaagaagcagtttgaagaattaacccttggtgaatttttgaaactggacagagaaagagccaagaacaaaattgcaaaggaaaccaacaataagaagaaagaatttgaggaaactgcgaagaaagtgcgccgtgccatcgagcagctggctgccatggattga

SEQ ID NO: 965 - RNA, 2931 nt, synthetic construct
  misc_feature 1..2931: note = EAW56623
  source 1..2931: mol_type = other RNA
atggaaaagcaaaagccctttgcattgttcgtaccaccgagatcaagcagcagtcaggtgtctgcggtgaaacctcagaccctgggaggcgattccactttcttcaagagtttcaacaaatgtactgaagatgattttgagtttccatttgcaaagactaatctctccaaaaatggggaaaacattgattcagatcctgctttacaaaaagttaatttcttgcccgtgcttgagcaggttggtaattctgactgtcactatcaggaaggactaaaagactctgatttggagaattcagagggattgagcagagtgtattcaaaactgtataaggaggctgaaaagataaaaaaatggaaagtaagtacagaagctgaactgagacagaaagaaagtaagttgcaagaaaacagaaagataattgaagcacagcgaaaagccattcaggaactgcaatttggaaatgaaaaagtaagtttgaaattagaagaaggaatacaagaaaataaagatttaataaaagagaataatgccacaaggcatttatgtaatctactcaaagaaacctgtgctagatctgcagaaaagacaaagaaatatgaatatgaacgggaagaaaccaggcaagtttatatggatctaaataataacattgagaaaatgataacagcttttgaggaacttcgtgtgcaagctgagaattccagactggaaatgcattttaagttaaaggaagattatgaaaaaatccaacaccttgaacaagaatacaagaaggaaataaatgacaaggaaaagcaggtatcactactattgatccaaatcactgagaaagaaaataaaatgaaagatttaacatttctgctagaggaatccagagataaagttaatcaattagaggaaaagacaaaattacagagtgaaaacttaaaacaatcaattgagaaacagcatcatttgactaaagaactagaagatattaaagtgtcattacaaagaagtgtgagtactcaaaaggctttagaggaagatttacagatagcaacaaaaacaatttgtcagctaactgaagaaaaagaaactcaaatggaagaatctaataaagctagagctgctcattcgtttgtggttactgaatttgaaactactgtctgcagcttggaagaattattgagaacagaacagcaaagattggaaaaaaatgaagatcaattgaaaatacttaccatggagcttcaaaagaaatcaagtgagctggaagagatgactaagcttacaaataacaaagaagtagaacttgaagaattgaaaaaagtcttgggagaaaaggaaacacttttatatgaaaataaacaatttgagaagattgctgaagaattaaaaggaacagaacaagaactaattggtcttctccaagccagagagaaagaagtacatgatttggaaatacagttaactgccattaccacaagtgaacagtattattcaaaagaggttaaagatctaaaaactgagcttgaaaacgagaagcttaagaatactgaattaacttcacactgcaacaagctttcactagaaaacaaagagctcacacaggaaacaagtgatatgaccctagaactcaagaatcagcaagaagatattaataataacaaaaagcaagaagaaaggatgttgaaacaaatagaaaatcttcaagaaacagaaacccaattaagaaatgaactagaatatgtgagagaagagctaaaacagaaaagagatgaagttaaatgtaaattggacaagagtgaagaaaattgtaacaatttaaggaaacaagttgaaaataaaaacaagtatattgaagaacttcagcaggagaataaggccttgaaaaaaaaaggtacagcagaaagcaagcaactgaatgtttatgagataaaggtcaataaattagagttagaactagaaagtgccaaacagaaatttggagaaatcacagacacctatcagaaagaaattgaggacaaaaagatatcagaagaaaatcttttggaagaggttgagaaagcaaaagtaatagctgatgaagcagtaaaattacagaaagaaattgataagcgatgtcaacataaaatagctgaaatggtagcacttatggaaaaacataagcaccaatatgataagatcattgaagaaagagactcagaattaggactttataagagcaaagaacaagaacagtcatcactgagagcatctttggagattgaactatccaatctcaaagctgaacttttgtctgttaagaagcaacttgaaatagaaagagaagagaaggaaaaactcaaaagagaggcaaaagaaaacacagctactcttaaagaaaaaaaagacaagaaaacacaaacatttttattggaaacacctgaaatttattggaaattggattctaaagcagttccttcacaaactgtatctcgaaatttcacatcagttgatcatggcatatccaaagataaaagagactatctgtggacatctgccaaaaatactttatctacaccattgccaaaggcatatacagtgaagacaccaacaaaaccaaaactacagcaaagagaaaacttgaatatacccattgaagaaagtaaaaaaaagagaaaaatggcctttgaatttgatattaattcagatagttcagaaactactgatcttttgagcatggtttcagaagaagagacattgaaaacactgtataggaacaataatccaccagcttctcatctttgtgtcaaaacaccaaaaaaggccccttcatctctaacaacccctggatctacactgaagtttggagctataagaaaaatgcgggaggaccgttgggctgtaattgctaaaatggatagaaaaaaaaaactaaaagaagctgaaaagttatttgtttaa

SEQ ID NO: 966 - RNA, 2931 nt, synthetic construct
  misc_feature 1..2931: note = AAI44020
  source 1..2931: mol_type = other RNA
atggaaaagcaaaagccctttgcattgttcgtaccaccgagatcaagcagcagtcaggtgtctgcggtgaaacctcagaccctgggaggcgattccactttcttcaagagtttcaacaaatgtactgaagatgattttgagtttccatttgcaaagactaatctctccaaaaatggggaaaacattgattcagatcctgctttacaaaaagttaatttcttgcccgtgtttgagcaggttggtaattctgactgtcactatcaggaaggactaaaagactctgatttggagaattcagagggattgagcagagtgtattcaaaactgtataaggaggctgaaaagataaaaaaatggaaagtaagtacagaagctgaactgagacagaaagaaagtaagttgcaagaaaacagaaagataattgaagcacagcgaaaagccattcaggaactgcaatttggaaatgaaaaagtaagtttgaaattagaagaaggaatacaagaaaataaagatttaataaaagagaataatgccacaaggcatttatgtaatctactcaaagaaacctgtgctagatctgcagaaaagacaaagaaatatgaatatgaacgggaagaaaccaggcaagtttatatggatctaaatagtaacattgagaaaatgataacagcttttgaggaacttcgtgtgcaagctgagaattccagactggaaatgcattttaagttaaaggaagattatgaaaaaatccaacaccttgaacaagaatacaagaaggaaataaatgacaaggaaaagcaggtatcactactattgatccaaatcactgagaaagaaaataaaatgaaagatttaacatttctgctagaggaatccagagataaagttaatcaattagaggaaaagacaaaattacagagtgaaaacttaaaacaatcaattgagaaacagcatcatttgactaaagaactagaagatattaaagtgtcattacaaagaagtgtgagtactcaaaaggctttagaggaagatttacagatagcaacaaaaacaatttgtcagctaactgaagaaaaagaaactcaaatggaagaatctaataaagctagagctgctcattcgtttgtggttactgaatttgaaactactgtctgcagcttggaagaattattgagaacagaacagcaaagattggaaaaaaatgaagatcaattgaaaatacttaccatggagcttcaaaagaaatcaagtgagctggaagagatgactaagcttacaaataacaaagaagtagaacttgaagaattgaaaaaagtcttgggagaaaaggaaacacttttatatgaaaataaacaatttgagaagattgctgaagaattaaaaggaacagaacaagaactaattggtcttctccaagccagagagaaagaagtacatgatttggaaatacagttaactgccattaccacaagtgaacagtattattcaaaagaggttaaagatctaaaaactgagcttgaaaacgagaagcttaagaatactgaattaacttcacactgcaacaagctttcactagaaaacaaagagctcacacaggaaacaagtgatatgaccctagaactcaagaatcagcaagaagatattaataataacaaaaagcaagaagaaaggatgttgaaacaaatagaaaatcttcaagaaacagaaacccaattaagaaatgaactagaatatgtgagagaagagctaaaacagaaaagagatgaagttaaatgtaaattggacaagagtgaagaaaattgtaacaatttaaggaaacaagttgaaaataaaaacaagtatattgaagaacttcagcaggagaataaggccttgaaaaaaaaaggtacagcagaaagcaagcaactgaatgtttatgagataaaggtcaataaattagagttagaactagaaagtgccaaacagaaatttggagaaatcacagacacctatcagaaagaaattgaggacaaaaagatatcagaagaaaatcttttggaagaggttgagaaagcaaaagtaatagctgatgaagcagtaaaattacagaaagaaattgataagcgatgtcaacataaaatagctgaaatggtagcacttatggaaaaacataagcaccaatatgataagatcattgaagaaagagactcagaattaggactttataagagcaaagaacaagaacagtcatcactgagagcatctttggagattgaactatccaatctcaaagctgaacttttgtctgttaagaagcaacttgaaatagaaagagaagagaaggaaaaactcaaaagagaggcaaaagaaaacacagctactcttaaagaaaaaaaagacaagaaaacacaaacatttttattggaaacacctgaaatttattggaaattggattctaaagcagttccttcacaaactgtatctcgaaatttcacatcagttgatcatggcatatccaaagataaaagagactatctgtggacatctgccaaaaatactttatctacaccattgccaaaggcatatacagtgaagacaccaacaaaaccaaaactacagcaaagagaaaacttgaatatacccattgaagaaagtaaaaaaaagagaaaaatggcctttgaatttgatattaattcagatagttcagaaactactgatcttttgagcatggtttcagaagaagagacattgaaaacactgtataggaacaataatccaccagcttctcatctttgtgtcaaaacaccaaaaaaggccccttcatctctaacaacccctggatctacactgaagtttggagctataagaaaaatgcgggaggaccgttgggctgtaattgctaaaatggatagaaaaaaaaaactaaaagaagctgaaaagttatttgtttaa

SEQ ID NO: 967 - RNA, 2931 nt, synthetic construct; identical to SEQ ID NO: 965
  misc_feature 1..2931: note = AAI26267
  source 1..2931: mol_type = other RNA

SEQ ID NO: 968 - RNA, 330 nt, synthetic construct
  misc_feature 1..330: note = AAI05300
  source 1..330: mol_type = other RNA
atggaaaagcaaaagccctttgcattgttcgtaccaccgagatcaagcagcagtcaggtgtctgcggtgaaacctcagaccctgggaggcgattccactttcttcaagagtttcaacaaatgtactgaagatgattttgagtttccatttgcaaagactaatctctccaaaaatggggaaaacattgattcagatcctgctttacaaaacgttaatttcttgcccgtgcttgagcaggttggtaattctgactgtcactatcaggaaggactaaaagactctgatttggagaattcagagggattgagcagagtgtattcaaaactgtaa

SEQ ID NO: 969 - RNA, 1467 nt, synthetic construct
  misc_feature 1..1467: note = BAF56181
  source 1..1467: mol_type = other RNA
atgtctgtggctttcgcggccccgaggcagcgaggcaagggggagatcactcccgctgcgattcagaagatgttggatgacaataaccatcttattcagtgtataatggactctcagaataaaggaaagacctcagagtgttctcagtatcagcagatgttgcacacaaacttggtataccttgctacaatagcagattctaatcaaaatatgcagtctcttttaccagcaccacccacacagaatatgcctatgggtcctggagggatgaatcagagcggccctcccccacctccacgctctcacaacatgccttcagatggaatggtaggtgggggtcctcctgcaccgcacatgcagaaccagatgaacggccagatgcctgggcctaaccatatgcctatgcagggacctggacccaatcaactcaatatgacaaacagttccatgaatatgccttcaagtagccatggatccatgggaggttacaaccattctgtgccatcatcgcagagcatgccagtacagaatcagatgacaatgagtcagggacaaccaatgggaaactatggtcccagaccaaatatgagtatgcagccaaaccaaggtccaatgatgcatcagcagcctccttctcagcaatacaatatgccacagggaggcggacagcattaccaaggacagcagccacctatggggatgatgggtcaagttaaccaaggcaatcatatgatgggtcagagacagattcctccctatagacctcctcaacagggcccaccacagcagtactcaggccaggaagactattacggggaccaatacagtcatggtggacaaggtcctccagaaggcatgaaccagcaatattaccctgatggtcataatgattacggttatcagcaaccgtcgtatcctgaacaaggctacgataggccttatgaggattcctcacaacattactacgaaggaggaaattcacagtatggccaacagcaagatgcataccagggaccacctccacaacagggatatccaccccagcagcagcagtacccagggcagcaaggttacccaggacagcagcagggctacggtccttcacagggtggtccaggtcctcagtatcctaactacccacagggacaaggtcagcagtatggaggatatagaccaacacagcctggaccaccacagccaccccagcagaggccttatggatatgaccagatcatgcccaagaagccagcagaggacgaaaatgattcgaagggagtgtcagaagcatctggcccacaaaacgatgggaaacaactgcaccccccaggaaaagcaaatatttctgagaagattaataagagatctggacccaaaagggggaaacatgcctggacccacagactgcgtgagagaaagcagctggtgatttatgaagagatcagcgaccctgaggaagatgacgagtaa

SEQ ID NO: 970 - RNA, 1374 nt, synthetic construct
  misc_feature 1..1374: note = BAF56182
  source 1..1374: mol_type = other RNA
atgtctgtggctttcgcggccccgaggcagcgaggcaagggggagatcactcccgctgcgattcagaagatgttggatgacaataaccatcttattcagtgtataatggactctcagaataaaggaaagacctcagagtgttctcagtatcagcagatgttgcacacaaacttggtataccttgctacaatagcagattctaatcaaaatatgcagtctcttttaccagcaccacccacacagaatatgcctatgggtcctggagggatgaatcagagcggccctcccccacctccacgctctcacaacatgccttcagatggaatggtaggtgggggtcctcctgcaccgcacatgcagaaccagatgaacggccagatgcctgggcctaaccatatgcctatgcagggacctggacccaatcaactcaatatgacaaacagttccatgaatatgccttcaagtagccatggatccatgggaggttacaaccattctgtgccatcatcgcagagcatgccagtacagaatcagatgacaatgagtcagggacaaccaatgggaaactatggtcccagaccaaatatgagtatgcagccaaaccaaggtccaatgatgcatcagcagcctccttctcagcaatacaatatgccacagggaggcggacagcattaccaaggacagcagccacctatggggatgatgggtcaagttaaccaaggcaatcatatgatgggtcagagacagattcctccctatagacctcctcaacagggcccaccacagcagtactcaggccaggaagactattacggggaccaatacagtcatggtggacaaggtcctccagaaggcatgaaccagcaatattaccctgatggaaattcacagtatggccaacagcaagatgcataccagggaccacctccacaacagggatatccaccccagcagcagcagtacccagggcagcaaggttacccaggacagcagcagggctacggtccttcacagggtggtccaggtcctcagtatcctaactacccacagggacaaggtcagcagtatggaggatatagaccaacacagcctggaccaccacagccaccccagcagaggccttatggatatgaccagatcatgcccaagaagccagcagaggacgaaaatgattcgaagggagtgtcagaagcatctggcccacaaaacgatgggaaacaactgcaccccccaggaaaagcaaatatttctgagaagattaataagagatctggacccaaaagggggaaacatgcctggacccacagactgcgtgagagaaagcagctggtgatttatgaagagatcagcgaccctgaggaagatgacgagtaa

SEQ ID NO: 971 - RNA, 1467 nt, synthetic construct
  misc_feature 1..1467: note = BAF56183
  source 1..1467: mol_type = other RNA
atgtctgtggctttcgcggccccgaggcagcgaggcaagggggagatcactcccgctgcgattcagaagatgttggatgacaataaccatcttattcagtgtataatggactctcagaataaaggaaagacctcagagtgttctcagtatcagcagatgttgcacacaaacttggtataccttgctacaatagcagattctaatcaaaatatgcagtctcttttaccagcaccacccacacagaatatgcctatgggtcctggagggatgaatcagagcggccctcccccacctccacgctctcacaacatgccttcagatggaatggtaggtgggggtcctcctgcaccgcacatgcagaaccagatgaacggccagatgcctgggcctaaccatatgcctatgcagggacctggacccaatcaactcaatatgacaaacagttccatgaatatgccttcaagtagccatggatccatgggaggttacaaccattctgtgccatcatcgcagagcatgccagtacagaatcagatgacaatgagtcagggacaaccaatgggaaactatggtcccagaccaaatatgagtatgcagccaaaccaaggtccaatgatgcatcagcagcctccttctcagcaatacaatatgccacagggaggcggacagcattaccaaggacagcagccacctatggggatgatgggtcaagttaaccaaggcaatcatatgatgggtcagagacagattcctccctatagacctcctcaacagggcccaccacagcagtactcaggccaggaagactattacggggaccaatacagtcatggtggacaaggtcctccagaaggcatgaaccagcaatattaccctgatggtcataatgattacggttatcagcaaccgtcgtatcctgaacaaggctacgataggccttatgaggattcctcacaacattactacgaaggaggaaattcacagtatggccaacagcaagatgcataccagggaccacctccacaacagggatatccaccccagcagcagcagtacccagggcagcaaggttacccaggacagcagcagggctacggtccttcacagggtggtccaggtcctcagtatcctaactacccacagggacaaggtcagcagtatggaggatatagaccaacacagcctggaccaccacagccaccccagcagaggccttatggatatgaccagatcatgcccaagaagccagcagaggaaggaaatgattcggaggaagtgccagaagcatctggcccacaaaatgatgggaaagagctgtgccccccgggaaaaccaactacctctgagaagattcacgagagatctggacccaaaaggggggaacatgcctggacccacagactgcgtgagagaaaacagctggtgatttatgaagagatcagcgaccctgaggaagatgacgagtaa

SEQ ID NO: 972 - RNA, 1374 nt, synthetic construct
  misc_feature 1..1374: note = BAF56184
  source 1..1374: mol_type = other RNA
atgtctgtggctttcgcggccccgaggcagcgaggcaagggggagatcactcccgctgcgattcagaagatgttggatgacaataaccatcttattcagtgtataatggactctcagaataaaggaaagacctcagagtgttctcagtatcagcagatgttgcacacaaacttggtataccttgctacaatagcagattctaatcaaaatatgcagtctcttttaccagcaccacccacacagaatatgcctatgggtcctggagggatgaatcagagcggccctcccccacctccacgctctcacaacatgccttcagatggaatggtaggtgggggtcctcctgcaccgcacatgcagaaccagatgaacggccagatgcctgggcctaaccatatgcctatgcagggacctggacccaatcaactcaatatgacaaacagttccatgaatatgccttcaagtagccatggatccatgggaggttacaaccattctgtgccatcatcgcagagcatgccagtacagaatcagatgacaatgagtcagggacaaccaatgggaaactatggtcccagaccaaatatgagtatgcagccaaaccaaggtccaatgatgcatcagcagcctccttctcagcaatacaatatgccacagggaggcggacagcattaccaaggacagcagccacctatggggatgatgggtcaagttaaccaaggcaatcatatgatgggtcagagacagattcctccctatagacctcctcaacagggcccaccacagcagtactcaggccaggaagactattacggggaccaatacagtcatggtggacaaggtcctccagaaggcatgaaccagcaatattaccctgatggaaattcacagtatggccaacagcaagatgcataccagggaccacctccacaacagggatatccaccccagcagcagcagtacccagggcagcaaggttacccaggacagcagcagggctacggtccttcacagggtggtccaggtcctcagtatcctaactacccacagggacaaggtcagcagtatggaggatatagaccaacacagcctggaccaccacagccaccccagcagaggccttatggatatgaccagatcatgcccaagaagccagcagaggaaggaaatgattcggaggaagtgccagaagcatctggcccacaaaatgatgggaaagagctgtgccccccgggaaaaccaactacctctgagaagattcacgagagatctggacccaaaaggggggaacatgcctggacccacagactgcgtgagagaaaacagctggtgatttatgaagagatcagcgaccctgaggaagatgacgagtaa

SEQ ID NO: 973 - RNA, 336 nt, synthetic construct
  misc_feature 1..336: note = AAI05590
  source 1..336: mol_type = other RNA
atgaagactaacgacacatacatgaaatttagctggttaacggtgccagaaaagtcactggacaaagaacacagatgtatcgtcagacatgagaataataaaaacggagttgatcaagaaattatctttcctccaataaagacagatgtcatcacaatggatcccaaagacaattgttcaaaagatgcaaatgatacactactgctgcagctcacaaacacctctgcatattacatgtacctcctcctgctcctcaagagtgtggtctattttgccatcatcacctgctgtctgcttagaagaacggctttctgctgcaatggagagaaatcataa

SEQ ID NO: 974 - RNA, 177 nt, synthetic construct
  misc_feature 1..177: note = AAG29337
  source 1..177: mol_type = other RNA
atgcagatgtttcccccaagcccactatttttcttccttcaattgctgaaacaaagctccagaaggctggaacatacctttgtcttcttgagaaatttttccctgatgttattaagatacattggcaagaaaagaagagcaacacgattctgggatcccaggaggggaacaccatga

SEQ ID NO: 975 - RNA, 1131 nt, synthetic construct
  misc_feature 1..1131: note = AAF26776
  source 1..1131: mol_type = other RNA
atggcgaactcggcaaatacaaacaccgtgcctaaattatacagatctgtgattgaagatgtcattaatgatgtgagagacatctttctggatgatggagtggatgaacaagtactgatggaactaaaaactttatgggaaaacaaactaatgcagtccagggcagtagatggatttcattcagaagagcagcagcttctactgcaagttcaacagcagcatcaaccccagcagcagcagcatcaccaccatcaccatcatcagcaagctcagcctcagcagacagtacctcagcaagcgcagacccagcaggttcttattcctgcatcacagcaagccacagcaccacaagttattgttccagattctaagttgatacagcatatgaatgcatcaaacatgagtgctgctgctacagctgctaccttagcactccctgcaggtgtgactcctgttcagcagatattaacaaattcaggccagcttcttcaggtggtcagagcagccaatggtgcccaatatatctttcagcctcagcagtcagtggttctacaacaacaggttataccacaaatgcagcctggtggagtacaagctcctgttatacagcaggtgctggctcctcttcctggagggatttcaccacagacaggtgtcatcatccagcctcagcaaatcttatttacaggaaataagactcaagttatacctacgacagtggcagcacctacaccagcccaagcacagataactgcaactggccagcagcaaccgcaggcccagcctgctcaaacacaagctccattggtcttacaagttgatggaactggggatacatcatctgaagaagatgaagatgaagaagaagactatgatgatgatgaggaggaagacaaagagaaagatggagctgaagatgggcaggtggaagaagagcccctcaatagtgaagatgatgtgagtgatgaggaaggacaggaactctttgacacagaaaatgttgttgtatgccaatatgataagatacacagaagtaaaaacaaatggaaatttcatctcaaggatggcattatgaatcttaatggaagagattatatattttccaaagccattggagatgcagaatggtga

SEQ ID NO: 976 - RNA, 1173 nt, synthetic construct
  misc_feature 1..1173: note = AAH00125
  source 1..1173: mol_type = other RNA
atgccgccctccgggctgcggctgctgctgctgctgctaccgctgctgtggctactggtgctgacgcctggccggccggccgcgggactatccacctgcaagactatcgacatggagctggtgaagcggaagcgcatcgaggccatccgcggccagatcctgtccaagctgcggctcgccagccccccgagccagggggaggtgccgcccggcccgctgcccgaggccgtgctcgccctgtacaacagcacccgcgaccgggtggccggggagagtgcagaaccggagcccgagcctgaggccgactactacgccaaggaggtcacccgcgtgctaatggtggaaacccacaacgaaatctatgacaagttcaagcagagtacacacagcatatatatgttcttcaacacatcagagctccgagaagcggtacctgaacccgtgttgctctcccgggcagagctgcgtctgctgaggctcaagttaaaagtggagcagcacgtggagctgtaccagaaatacagcaacaattcctggcgatacctcagcaaccggctgctggcacccagcgactcgccagagtggttatcttttgatgtcaccggagttgtgcggcagtggttgagccgtggaggggaaattgagggctttcgccttagcgcccactgctcctgtgacagcagggataacacactgcaagtggacatcaacgggttcactaccggccgccgaggtgacctggccaccattcatggcatgaaccggcctttcctgcttctcatggccaccccgctggagagggcccagcatctgcaaagctcccggcaccgccgagccctggacaccaactattgcttcagctccacggagaagaactgctgcgtgcggcagctgtacattgacttccgcaaggacctcggctggaagtggatccacgagcccaagggctaccatgccaacttctgcctcgggccctgcccctacatttggagcctggacacgcagtacagcaaggtcctggccctgtacaaccagcataacccgggcgcctcggcggcgccgtgctgcgtgccgcaggcgctggagccgctgcccatcgtgtactacgtgggccgcaagcccaaggtggagcagctgtccaacatgatcgtgcgctcctgcaagtgcagctga

SEQ ID NO: 977 - RNA, 1704 nt, synthetic construct
  misc_feature 1..1704: note = AAT70724
  source 1..1704: mol_type = other RNA
atgggtcgggggctgctcaggggcctgtggccgctgcacatcgtcctgtggacgcgtatcgccagcacgatcccaccgcacgttcagaagtcggttaataacgacatgatagtcactgacaacaacggtgcagtcaagtttccacaactgtgtaaattttgtgatgtgagattttccacctgtgacaaccagaaatcctgcatgagcaactgcagcatcacctccatctgtgagaagccacaggaagtctgtgtggctgtatggagaaagaatgacgagaacataacactagagacagtttgccatgaccccaagctcccctaccatgactttattctggaagatgctgcttctccaaagtgcattatgaaggaaaaaaaaaagcctggtgagactttcttcatgtgttcctgtagctctgatgagtgcaatgacaacatcatcttctcagaagaatataacaccagcaatcctgacttgttgctagtcatatttcaagtgacaggcatcagcctcctgccaccactgggagttgccatatctgtcatcatcatcttctactgctaccgcgttaaccggcagcagaagctgagttcaacctgggaaaccggcaagacgcggaagctcatggagttcagcgagcactgtgccatcatcctggaagatgaccgctctgacatcagctccacgtgtgccaacaacatcaaccacaacacagagctgctgcccattgagctggacaccctggtggggaaaggtcgctttgctgaggtctataaggccaagctgaagcagaacacttcagagcagtttgagacagtggcagtcaagatctttccctatgaggagtatgcctcttggaagacagagaaggacatcttctcagacatcaatctgaagcatgagaacatactccagttcctgacggctgaggagcggaagacggagttggggaaacaatactggctgatcaccgccttccacgccaagggcaacctacaggagtacctgacgcggcatgtcatcagctgggaggacctgcgcaagctgggcagctccctcgcccgggggattgctcacctccacagtgatcacactccatgtgggaggcccaagatgcccatcgtgcacagggacctcaagagctccaatatcctcgtgaagaacgacctaacctgctgcctgtgtgactttgggctttccctgcgtctggaccctactctgtctgtggatgacctggctaacagtgggcaggtgggaactgcaagatacatggctccagaagtcctagaatccaggatgaatttggagaatgttgagtccttcaagcagaccgatgtctactccatggctctggtgctctgggaaatgacatctcgctgtaatgcagtgggagaagtaaaagattatgagcctccatttggttccaaggtgcgggagcacccctgtgtcgaaagcatgaaggacaacgtgttgagagatcgagggcgaccagaaattcccagcttctggctcaaccaccagggcatccagatggtgtgtgagacgttgactgagtgctgggaccacgacccagaggcccgtctcacagcccagtgtgtggcagaacgcttcagtgagctggagcatctggacaggctctcggggaggagctgctcggaggagaagattcctgaagacggctccctaaacactaccaaatag

SEQ ID NO: 978 - RNA, 2055 nt, synthetic construct
  misc_feature 1..2055: note = BAG35778
  source 1..2055: mol_type = other RNA
atgatggatgcatcaaaagagctgcaagttctccacattgacttcttgaatcaggacaacgccgtttctcaccacacatgggagttccaaacgagcagtcctgtgttccggcgaggacaggtgtttcacctgcggctggtgctgaaccagcccccacaatcctaccaccaactgaaactggaattcagcacagggccgaatcctagcatcgccaaacacaccctggtggtgctcgacccgaggacgccctcagaccactacaactggcaggcaacccttcaaaatgagtctggcaaagaggtcacagtggctgtcaccagttcccccaatgccatcctgggcaagtaccaactaaacgtgaaaactggaaaccacatccttaagtctgaagaaaacatcctataccttctcttcaacccatggtgtaaagaggacatggttttcatgcctgatgaggacgagcgcaaagagtacatcctcaatgacacgggctgccattacgtgggggctgccagaagtatcaaatgcaaaccctggaactttggtcagtttgagaaaaatgtcctggactgctgcatttccctgctgactgagagctccctcaagcccacagataggagggaccccgtgctggtgtgcagggccatgtgtgctatgatgagctttgagaaaggccagggcgtgctcattgggaattggactggggactacgaaggtggcacagccccatacaagtggacaggcagtgccccgatcctgcagcagtactacaacacgaagcaggctgtgtgctttggccagtgctgggtgtttgctgggatcctgactacagtgctgagagcgttgggcatcccagcacgcagtgtgacaggcttcgattcagctcacgacacagaaaggaacctcacggtggacacctatgtgaatgagaatggcgagaaaatcaccagtatgacccacgactctgtctggaatttccatgtgtggacggatgcctggatgaagcgaccggatctgcccaagggctacgacggctggcaggctgtggacgcaacgccgcaggagcgaagccagggtgtcttctgctgtgggccatcaccactgaccgccatccgcaaaggtgacatctttattgtctatgacaccagattcgtcttctcagaagtgaatggtgacaggctcatctggttggtgaagatggtgaatgggcaggaggagttacacgtaatttcaatggagaccacaagcatcgggaaaaacatcagcaccaaggcagtgggccaagacaggcggagagatatcacctatgagtacaagtatccagaaggctcctctgaggagaggcaggtcatggatcatgccttcctccttctcagttctgagagggagcacagacgacctgtaaaagagaactttcttcacatgtcggtacaatcagatgatgtgctgctgggaaactctgttaatttcaccgtgattcttaaaaggaagaccgctgccctacagaatgtcaacatcttgggctcctttgaactacagttgtacactggcaagaagatggcaaaactgtgtgacctcaataagacctcgcagatccaaggtcaagtatcagaagtgactctgaccttggactccaagacctacatcaacagcctggctatattagatgatgagccagttatcagaggtttcatcattgcggaaattgtggagtctaaggaaatcatggcctctgaagtattcacgtctttccagtaccctgagttctctatagagttgcctaacacaggcagaattggccagctacttgtctgcaattgtatcttcaagaataccctggccatccctttgactgacgtcaagttctctttggaaagcctgggcatctcctcactacagacctctgaccatgggacggtgcagcctggtgagaccatccaatcccaaataaaatgcaccccaataaaaactggacccaagaaatttatcgtcaagttaagttccaaacaagtgaaagagattaatgctcagaagattgttctcatcaccaagtag

SEQ ID NO: 979 - RNA, 3375 nt, synthetic construct
  misc_feature 1..3375: note = CCDS6519.1
  source 1..3375: mol_type = other RNA
atggactctttagccagcttagttctctgtggagtcagcttgctcctttctggaactgtggaaggtgccatggacttgatcttgatcaattccctacctcttgtatctgatgctgaaacatctctcacctgcattgcctctgggtggcgcccccatgagcccatcaccataggaagggactttgaagccttaatgaaccagcaccaggatccgctggaagttactcaagatgtgaccagagaatgggctaaaaaagttgtttggaagagagaaaaggctagtaagatcaatggtgcttatttctgtgaagggcgagttcgaggagaggcaatcaggatacgaaccatgaagatgcgtcaacaagcttccttcctaccagctactttaactatgactgtggacaagggagataacgtgaacatatctttcaaaaaggtattgattaaagaagaagatgcagtgatttacaaaaatggttccttcatccattcagtgccccggcatgaagtacctgatattctagaagtacacctgcctcatgctcagccccaggatgctggagtgtactcggccaggtatataggaggaaacctcttcacctcggccttcaccaggctgatagtccggagatgtgaagcccagaagtggggacctgaatgcaaccatctctgtactgcttgtatgaacaatggtgtctgccatgaagatactggagaatgcatttgccctcctgggtttatgggaaggacgtgtgagaaggcttgtgaactgcacacgtttggcagaacttgtaaagaaaggtgcagtggacaagagggatgcaagtcttatgtgttctgtctccctgacccctatgggtgttcctgtgccacaggctggaagggtctgcagtgcaatgaagcatgccaccctggtttttacgggccagattgtaagcttaggtgcagctgcaacaatggggagatgtgtgatcgcttccaaggatgtctctgctctccaggatggcaggggctccagtgtgagagagaaggcatacagaggatgaccccaaagatagtggatttgccagatcatatagaagtaaacagtggtaaatttaatcccatttgcaaagcttctggctggccgctacctactaatgaagaaatgaccctggtgaagccggatgggacagtgctccatccaaaagactttaaccatacggatcatttctcagtagccatattcaccatccaccggatcctcccccctgactcaggagtttgggtctgcagtgtgaacacagtggctgggatggtggaaaagcccttcaacatttctgttaaagttcttccaaagcccctgaatgccccaaacgtgattgacactggacataactttgctgtcatcaacatcagctctgagccttactttggggatggaccaatcaaatccaagaagcttctatacaaacccgttaatcactatgaggcttggcaacatattcaagtgacaaatgagattgttacactcaactatttggaacctcggacagaatatgaactctgtgtgcaactggtccgtcgtggagagggtggggaagggcatcctggacctgtgagacgcttcacaacagcttctatcggactccctcctccaagaggtctaaatctcctgcctaaaagtcagaccactctaaatttgacctggcaaccaatatttccaagctcggaagatgacttttatgttgaagtggagagaaggtctgtgcaaaaaagtgatcagcagaatattaaagttccaggcaacttgacttcggtgctacttaacaacttacatcccagggagcagtacgtggtccgagctagagtcaacaccaaggcccagggggaatggagtgaagatctcactgcttggacccttagtgacattcttcctcctcaaccagaaaacatcaagatttccaacattacacactcctcagctgtgatttcttggacaatattggatggctattctatttcttctattactatccgttacaaggttcaaggcaagaatgaagaccagcacgttgatgtgaagataaagaatgccaccatcactcagtatcagctcaagggcctagagcctgaaacagcataccaggtggacatttttgcagagaacaacatagggtcaagcaacccagccttttctcatgaactggtgaccctcccagaatctcaagcaccagcggacctcggaggggggaagatgctgcttatagccatccttggctctgctggaatgacctgcctgactgtgctgttggcctttctgatcatattgcaattgaagagggcaaatgtgcaaaggagaatggcccaagccttccaaaacgtgagggaagaaccagctgtgcagttcaactcagggactctggccctaaacaggaaggtcaaaaacaacccagatcctacaatttatccagtgcttgactggaatgacatcaaatttcaagatgtgattggggagggcaattttggccaagttcttaaggcgcgcatcaagaaggatgggttacggatggatgctgccatcaaaagaatgaaagaatatgcctccaaagatgatcacagggactttgcaggagaactggaagttctttgtaaacttggacaccatccaaacatcatcaatctcttaggagcatgtgaacatcgaggctacttgtacctggccattgagtacgcgccccatggaaaccttctggacttccttcgcaagagccgtgtgctggagacggacccagcatttgccattgccaatagcaccgcgtccacactgtcctcccagcagctccttcacttcgctgccgacgtggcccggggcatggactacttgagccaaaaacagtttatccacagggatctggctgccagaaacattttagttggtgaaaactatgtggcaaaaatagcagattttggattgtcccgaggtcaagaggtgtatgtgaaaaagacaatgggaaggctcccagtgcgctggatggccatcgagtcactgaattacagtgtgtacacaaccaacagtgatgtatggtcctatggtgtgttactatgggagattgttagcttaggaggcacaccctactgcgggatgacttgtgcagaactctacgagaagctgccccagggctacagactggagaagcccctgaactgtgatgatgaggtgtatgatctaatgagacaatgctggcgggagaagccttatgagaggccatcatttgcccagatattggtgtccttaaacagaatgttagaggagcgaaagacctacgtgaataccacgctttatgagaagtttacttatgcaggaattgactgttctgctgaagaagcggcctag

SEQ ID NO: 980 - RNA, 1791 nt, synthetic construct
  misc_feature 1..1791: note = BAF84950
  source 1..1791: mol_type = other RNA
atggcggatgctgaggcgagggctgagttcccggaggaggccagacctgacaggggcaccttgcaggtgttgcaagatatggccagccgcttgcgaatccattccatcagggccacatgctccacgagctccggccaccctacatcatgtagcagttcttctgagatcatgtctgtgctgttcttctacatcatgaggtacaagcagtcagatccagagaatccggacaacgaccgatttgtcctcgcaaagagactgtcgtttgtggatgtggcaacaggatggctcggacaaggactgggagttgcatgtggaatggcatatactggcaagtacttcgacagggccagctaccgggtgttctgcctcatgagtgatggcgagtcctcagaaggctctgtctgggaggcaatggcctttgcttcctactacagtctggacaatcttgtggcaatctttgatgtgaaccgcctgggacacagtggtgcattgcccgccgagcactgcataaacatctatcagaggcgctgcgaagcctttgggtggaacacttatgtggtggacggccgggacgtggaggcactgtgccaggtattctggcaggcttctcaggtgaagcacaagcccactgctgtggtggccaagaccttcaagggccggggcaccccaagtattgaggatgcagaaagttggcatgcaaagccaatgccgagagaaagagcagatgccattatcaaattaattgagagccagatacagaccagcaggaatcttgacccacagccccccattgaggactcacctgaagtcaacatcacagatgtaaggatgacctctccacctgattacagagttggtgacaagatagctactcggaaagcatgcggtctggctctggctaagctgggctacgcgaacaacagagtcgttgtgctggatggtgacaccaggtactctactttctctgagatattcaacaaggagtaccctgagcgcttcatcgagtgctttatggctgaacaaaacatggtgagcgtggctctgggctgtgcctcccgtggacggaccattgcttttgctagcacctttgctgcctttctgactcgagcatttgatcacatccggataggaggcctcgctgagagcaacatcaacattattggttcccactgtggggtatctgttggtgacgatggtgcttcccagatggccctggaggatatagccatgttccgaaccattcccaagtgcacgatcttctacccaactgatgccgtctccacggagcatgctgttgctctggcagccaatgccaaggggatgtgcttcattcggaccacccgaccagaaactatggttatttacaccccacaagaacgctttgagatcggacaggccaaggtcctccgccactgtgtcagtgacaaggtcacagttattggagctggaattactgtgtatgaagccttagcagctgctgatgagctttcgaaacaagatatttttatccgtgtcatcgacctgtttaccattaaacctctggatgtcgccaccatcgtctccagtgcaaaagccacagagggccggatcattacagtggaggatcactacccgcaaggtggcatcggggaagctgtctgcgcagccgtctccatggatcctgacattcaggttcattcgctggcagtgtcgggagtgccccagagtgggaagtccgaggaattgctggatatgtatggaattagtgccagacatatcatagtggccgtgaaatgcatgttgctgaactaa

SEQ ID NO: 981 - RNA, 861 nt, synthetic construct
  misc_feature 1..861: note = EAW88722
  source 1..861: mol_type = other RNA
atggcggaggacggcgaggaggcggagttccacttcgcggcgctctatataagtgggcagtggccgcgactgcgcgcagacactgaccttcagcgcctcggctccagcgccatggcgccctccaggaagttcttcgttgggggaaactggaagatgaacgggcggaagcagagtctgggggagctcatcggcactctgaacgcggccaaggtgccggccgacaccgaggtggtttgtgctccccctactgcctatatcgacttcgcccggcagaagctagatcccaagattgctgtggctgcgcagaactgctacaaagtgactaatggggcttttactggggagatcagccctggcatgatcaaagactgcggagccacgtgggtggtcctggggcactcagagagaaggcatgtctttggggagtcagatgagctgattgggcagaaagtggcccatgctctggcagagggactcggagtaatcgcctgcattggggagaagctagatgaaagggaagctggcatcactgagaaggttgttttcgagcagacaaaggtcatcgcagataacgtgaaggactggagcaaggtcgtcctggcctatgagcctgtgtgggccattggtactggcaagactgcaacaccccaacaggcccaggaagtacacgagaagctccgaggatggctgaagtccaacgtctctgatgcggtggctcagagcacccgtatcatttatggaggctctgtgactggggcaacctgcaaggagctggccagccagcctgatgtggatggcttccttgtgggtggtgcttccctcaagcccgaattcgtggacatcatcaatgccaaacaatga

SEQ ID NO: 982 - RNA, 357 nt, synthetic construct
  misc_feature 1..357: note = CAA72108
  source 1..357: mol_type = other RNA
atgccactggtagtagctgttatcttcttctccctctgggtttttgcacttgggcagttggaacaacctgaaatatctatttccagaccagcaaataagagtgcccacatatcttggaaggcatccatccaaggctttagcagtaaaatcatacactggtactggcagaaaccaaacaaaggcttagaatatttattacatgtcttcttgacaatctctgctcaagattgctcaggtgggaagactaagaaacttgaggtaagtaaaaatgctcacacttccacttccactttgaaaataaagttcttagagaaagaagatgaggtggtgtaccactgtgcctgctggattaggcac

SEQ ID NO: 983 - RNA, 414 nt, synthetic construct
  misc_feature 1..414: note = EAL23985
  source 1..414: mol_type = other RNA
atgctgtcactgctccacacatcaacgctggcagtccttggggctctgtgtgtatatggtgcaggtcacctagagcaacctcaaatttccagtactaaaacgctgtcaaaaacagcccgcctggaatgtgtggtgtctggaataacaatttctgcaacatctgtatattggtatcgagagagacctggtgaagtcatacagttcctggtgtccatttcatatgacggcactgtcagaaaggaatccggcattccgtcaggcaaatttgaggtggataggatacctgaaacgtctacatccactctcaccattcacaatgtagagaaacaggacatagctacctactactgtgccttgtgggaggtgcacagcagcagacagtttgagccatcccattcaataaatgtttattga

SEQ ID NO: 984 - RNA, 366 nt, synthetic construct
  misc_feature 1..366: note = CAA30181
  source 1..366: mol_type = other RNA
atgctgtcactgctccacacatcaacgctggcagtccttggggctctgtgtgtatatggtgcaggtcacctagagcaacctcaaatttccagtactaaaacgctgtcaaaaacagcccgcctggaatgtgtggtgtctggaataacaatttctgcaacatctgtatattggtatcgagagagacctggtgaagtcatacagttcctggtgtccatttcatatgacggcactgtcagaaaggaatccggcattccgtcaggcaaatttgaggtggataggatacctgaaacgtctacatccactctcaccattcacaatgtagagaaacaggacatagctacctactactgtgccttgtgggaggtg

SEQ ID NO: 985 - RNA, 366 nt, synthetic construct
  misc_feature 1..366: note = CAA33345
  source 1..366: mol_type = other RNA
atgctgtcactgctccacacatcaacgctggcagtccttggggctctgtgtgtatatggtgcaggtcacctagagcaacctcaaatttccagtactaaaacgctgtcaaaaacagcccgcctggaatgtgtggtgtctggaataaaaatttctgcaacatctgtatattggtatcgagagagacctggtgaagtcatacagttcctggtgtccatttcatatgacggcactgtcagaaaggaatctggcattccgtcaggcaaatttgaggtggataggatacctgaaacgtctacatccactctcaccattcacaatgtagagaaacaggacatagctacctactactgtgccttgtgggaggtg

SEQ ID NO: 986 - RNA, 2382 nt, synthetic construct
  misc_feature 1..2382: note = AAA93251
  source 1..2382: mol_type = other RNA
atgatggcggccctgtacccgagcacggacctctcgggcgcctcctcctcctccctgccttcctctccatcctcttcctcgccgaacgaggtgatggcgctgaaggatgtgcgggaggtgaaggaggagaatacgctgaatgagaagcttttcttgctggcgtgcgacaagggtgactattatatggttaaaaagattttggaggaaaacagttcaggtgacttgaacataaattgcgtagatgtgcttgggagaaatgctgttaccataactattgaaaacgaaaacttggatatactgcagcttcttttggactacggttgtcagtctgcagatgcacttttggtggcaatcgactctgaagtagtgggagctgttgatatactacttaatcatcgaccaaaacgatcatcaagaccaactatagtaaaactaatggaacgaattcagaatcctgagtattcaacaactatggatgttgcacctgtcattttagctgctcatcgtaacaactatgaaattcttacaatgctcttaaaacaggatgtatctctacccaagccccatgcagttggctgtgaatgcacattgtgttctgcaaaaaacaaaaaggatagcctccggcattccaggtttcgtcttgatatatatcgatgtttggccagtccagctctaataatgttaacagaggaggatccaattctgagagcatttgaacttagtgctgatttaaaagaactaagtcttgtggaggtggaattcaggaatgattatgaggaactagcccggcaatgtaaaatgtttgctaaggatttacttgcacaagcccggaattctcgtgaattggaagttattctaaaccatacgtctagtgacgagcctcttgacaaacggggattattagaagaaagaatgaatttaagtcgtctaaaacttgctatcaaatataaccagaaagagtttgtctcccagtctaactgccagcagttcctgaacactgtttggtttggacagatgtcgggttaccgacgcaagcccacctgtaagaagataatgactgttttgacagtaggcatcttttggccagttttgtcactttgttatttgatagctcccaaatctcagtttggcagaatcattcacacaccttttatgaaatttatcattcatggagcatcatatttcacatttctgctgttgcttaatctatactctcttgtctacaatgaggataagaaaaacacaatggggccagcccttgaaagaatagactatcttcttattctgtggattattgggatgatttggtcagacattaaaagactctggtatgaagggttggaagactttttagaagaatctcgtaatcaactcagttttgtcatgaattctctttatttggcaacctttgccctcaaagtggttgctcacaacaagtttcatgattttgctgatcggaaggattgggatgcattccatcctacactggtggcagaagggctttttgcatttgcaaatgttctaagttatcttcgtctcttttttatgtatacaaccagctctatcttgggtccattacagatttcaatgggacagatgttacaagattttggaaaatttcttgggatgtttcttcttgttttgttttctttcacaattggactgacacaactgtatgataaaggatatacttcaaaggagcagaaggactgtgtaggcatcttctgtgaacagcaaagcaatgataccttccattcgttcattggcacctgctttgctttgttctggtatattttctccttagcgcatgtggcaatctttgtcacaagatttagctatggagaagaactgcagtcctttgtgggagctgtcattgttggtacatacaatgtcgtggttgtgattgtgcttaccaaactgctggtggcaatgcttcataaaagctttcagttgatagcaaatcatgaagacaaagaatggaagtttgctcgagcaaaattatggcttagctactttgatgacaaatgtacgttacctccacctttcaacatcattccctcaccaaagactatctgctatatgattagtagcctcagtaagtggatttgctctcatacatcaaaaggcaaggtcaaacggcaaaacagtttaaaggaatggaggaatttgaaacagaagagagatgaaaactatcaaaaagtgatgtgctgcctagtgcatcgttacttgacttccatgagacagaagatgcaaagtacagatcaggcaactgtggaaaatctaaacgaactgcgccaagatctgtcaaaattccgaaatgaaataagggatttacttggctttcggacttctaaatatgctatgttttatccaagaaattaa

SEQ ID NO: 987 - RNA, 3315 nt, synthetic construct
  misc_feature 1..3315: note = AAZ73614
  source 1..3315: mol_type = other RNA
atgtcctttcgggcagccaggctcagcatgaggaacagaaggaatgacactctggacagcacccggaccctgtactccagcgcgtctcggagcacagacttgtcttacagtgaaagcgacttggtgaattttattcaagcaaattttaagaaacgagaatgtgtcttctttaccaaagattccaaggccacggagaatgtgtgcaagtgtggctatgcccagagccagcacatggaaggcacccagatcaaccaaagtgagaaatggaactacaagaaacacaccaaggaatttcctaccgacgcctttggggatattcagtttgagacactggggaagaaagggaagtatatacgtctgtcctgcgacacggacgcggaaatcctttacgagctgctgacccagcactggcacctgaaaacacccaacctggtcatttctgtgaccgggggcgccaagaacttcgccctgaagccgcgcatgcgcaagatcttcagccggctcatctacatcgcgcagtccaaaggtgcttggattctcacgggaggcacccattatggcctgatgaagtacatcggggaggtggtgagagataacaccatcagcaggagttcagaggagaatattgtggccattggcatagcagcttggggcatggtctccaaccgggacaccctcatcaggaattgcgatgctgagggctattttttagcccagtaccttatggatgacttcacaagagatccactgtatatcctggacaacaaccacacacatttgctgctcgtggacaatggctgtcatggacatcccactgtcgaagcaaagctccggaatcagctagagaagtatatctctgagcgcactattcaagattccaactatggtggcaagatccccattgtgtgttttgcccaaggaggtggaaaagagactttgaaagccatcaatacctccatcaaaaataaaattccttgtgtggtggtggaaggctcgggccagatcgctgatgtgatcgctagcctggtggaggtggaggatgccctgacatcttctgccgtcaaggagaagctggtacgctttttaccccgcacggtgtcccggctgcctgaggaggagactgagagttggatcaaatggctcaaagaaattctcgaatgttctcacctattaacagttattaaaatggaagaagctggggatgaaattgtgagcaatgccatctcctacgctctatacaaagccttcagcaccagtgagcaagacaaggataactggaatgggcagctgaagcttctgctggagtggaaccagctggacttagccaatgatgagattttcaccaatgaccgccgatgggagtctgctgaccttcaagaagtcatgtttacggctctcataaaggacagacccaagtttgtccgcctctttctggagaatggcttgaacctacggaagtttctcacccatgatgtcctcactgaactcttctccaaccacttcagcacgcttgtgtaccggaatctgcagatcgccaagaattcctataatgatgccctcctcacgtttgtctggaaactggttgcgaacttccgaagaggcttccggaaggaagacagaaatggccgggacgagatggacatagaactccacgacgtgtctcctattactcggcaccccctgcaagctctcttcatctgggccattcttcagaataagaaggaactctccaaagtcatttgggagcagaccaggggctgcactctggcagccctgggagccagcaagcttctgaagactctggccaaagtgaagaacgacatcaatgctgctggggagtccgaggagctggctaatgagtacgagacccgggctgttgagctgttcactgagtgttacagcagcgatgaagacttggcagaacagctgctggtctattcctgtgaagcttggggtggaagcaactgtctggagctggcggtggaggccacagaccagcatttcatcgcccagcctggggtccagaattttctttctaagcaatggtatggagagatttcccgagacaccaagaactggaagattatcctgtgtctgtttattatacccttggtgggctgtggctttgtatcatttaggaagaaacctgtcgacaagcacaagaagctgctttggtactatgtggcgttcttcacctcccccttcgtggtcttctcctggaatgtggtcttctacatcgccttcctcctgctgtttgcctacgtgctgctcatggatttccattcggtgccacacccccccgagctggtcctgtactcgctggtctttgtcctcttctgtgatgaagtgagacagtggtacgtaaatggggtgaattattttactgacctgtggaatgtgatggacacgctggggcttttttacttcatagcaggaattgtatttcggctccactcttctaataaaagctctttgtattctggacgagtcattttctgtctggactacattattttcactctaagattgatccacatttttactgtaagcagaaacttaggacccaagattataatgctgcagaggatgctgatcgatgtgttcttcttcctgttcctctttgcggtgtggatggtggcctttggcgtggccaggcaagggatccttaggcagaatgagcagcgctggaggtggatattccgttcggtcatctacgagccctacctggccatgttcggccaggtgcccagtgacgtggatggtaccacgtatgactttgcccactgcaccttcactgggaatgagtccaagccactgtgtgtggagctggatgagcacaacctgccccggttccccgagtggatcaccatccccctggtgtgcatctacatgttatccaccaacatcctgctggtcaacctgctggtcgccatgtttggctacacggtgggcaccgtccaggagaacaatgaccaggtctggaagttccagaggtacttcctggtgcaggagtactgcagccgcctcaatatccccttccccttcatcgtcttcgcttacttctacatggtggtgaagaagtgcttcaagtgttgctgcaaggagaaaaacatggagtcttctgtctgctgtttcaaaaatgaagacaatgagactctggcatgggagggtgtcatgaaggaaaactaccttgtcaagatcaacacaaaagccaacgacacctcagaggaaatgaggcatcgatttagacaactggatacaaagcttaatgatctcaagggtcttctgaaagagattgctaataaaatcaaataa

SEQ ID NO: 988 - RNA, 2097 nt, synthetic construct
  misc_feature 1..2097: note = AAK13079
  source 1..2097: mol_type = other RNA
atgatgcgaagtaggtctaaaagtccaagacgcccatcaccaactgcccggggtgcaaactgtgatgtagaacttttgaagacaacaacaagagatcgtgaagaacttaaatgcatgctggaaaaatatgagcgccatttggcagaaattcagggtaatgtcaaggttcttaaatctgagagagacaagatcttccttctttatgaacaggcacaggaagaaattacccgacttcgacgagaaatgatgaaaagctgtaagagtcctaaatcaacaacggcacatgctattctccggcgagtggagactgaaagagatgtagcctttactgatttacgaagaatgaccacagaacgagatagtctaagggagaggctaaagattgctcaagagacagcatttaatgagaaggctcacctggaacaaaggatagaggagctggagtgtacagttcataatcttgatgatgaacgtatggagcaaatgtcaaatatgactttgatgaaggaaaccataagcactgtggaaaaagaaatgaaatcactagcaagaaaggcaatggataccgaaagtgaacttggcagacaaaaagcagagaataattctttgagacttttgtatgaaaacacagaaaaagatctttctgatactcagcgacaccttgctaagaaaaaatatgagctacagcttactcaggagaaaattatgtgcttggatgaaaaaattgataactttacaaggcaaaatattgcacagcgagaagaaatcagcattcttggtggaaccctcaatgatctggctaaagaaaaggaatgcctgcaagcatgtttggataaaaaatctgagaatattgcatcccttggagagagtttggcaatgaaagaaaagaccatttcaggcatgaagaatatcattgctgagatggaacaggcatcaagacagtgtactgaggccctaattgtgtgtgaacaagacgtttccagaatgcgtcggcaattggatgagacaaatgatgagctggcccagatcgccagggaaagagatatcttggctcatgacaatgacaatctccaggaacagtttgctaaagctaaacaagaaaaccaggcactgtccaaaaaattgaatgacactcataatgaacttaatgacataaaacagaaggttcaagatactaatttggaggttaacaagctgaagaatatattaaagtctgaagaatctgagaaccggcaaatgatggaacaacttcgaaaagccaatgaagatgctgaaaactgggaaaataaagcccgtcaatcagaggcagataacaataccctcaaactggaacttatcactgctgaggcagagggtaacagattaaaagaaaaagtagattccctcaacagagaggttgagcaacacttaaatgcagaaaggtcttacaagtcccagatttctaccttacataaatctgttgtaaaaatggaagaggagcttcagaaggttcagtttgaaaaagtgtccgctcttgcagatttgtcttctactagggaactctgtattaaacttgactcaagcaaagaacttcttaatcgacagctggttgctaaagatcaagaaatagaaatgagggagaatgagttagattctgctcattctgaaattgaactcctgaggagtcagatggcaaatgagagaatctccatgcagaatctagaagctttgctggtggccaatcgagacaaagaatatcagtctcagatagcacttcaagaaaaagaatctgaaattcagcttcttaaagaacacctttgtttggcagaaaataaaatggccatccagagtagagatgtggcccagttcagaaatgttgtcacacaattggaagctgatttagacattaccaaaagacaactaggaacagagcgctttgaaagggagagggccgtacaagaacttcgccgccaaaattattcaagtaatgcttatcatatgagttctacaatgaagccaaatacaaaatgtcattcaccagaacgtgctcaccatcgatctcctgaccgaggcctagatcgatcattagaagagaatctttgctacagagatttctga

SEQ ID NO: 989 - RNA, 927 nt, synthetic construct
  misc_feature 1..927: note = CCDS48205.1
  source 1..927: mol_type = other RNA
atgcgccctgagggctcgctgacctaccgggtgccagagaggctgcggcagggtttctgtggcgtgggtcgggcagcacaggccttggtgtgtgcgagtgccaaggagggcaccgccttcaggatggaggctgtgcaggagggggcggccggggtggagagtgagcaggcggctttgggggaggaggcggtgctgctgttggatgacataatggcggaggtggaggtggtggcggaggaggagggcctcgtggagcggcgggaggaggcccagcgggcacagcaggctgtgcctggccctgggcccatgaccccagagtctgcaccggaggagctgctggccgttcaggtggagctggagccggttaatgcccaagccaggaaggccttttctcggcagcgggaaaagatggagcggaggcgcaagccccacctagaccgcagaggcgccgtcatccagagcgtccctggcttctgggccaatgttattgcaaaccacccccagatgtcagccctgatcactgacgaagatgaagacatgctgagctacatggtcagcctggaggtgggagaagagaagcatcctgttcatctctgcaagatcatgttgttctttcggagtaacccctacttccagaataaagtgattaccaaggaatatctggtgaacatcacagaatacagggcttctcattccactccaattgagtggtatccggattatgaagtggaggcctatcgccgcagacaccacaacagcagccttaacttcttcaactggttctctgaccacaacttcgcaggatctaacaagattgctgagatcctatgtaaggacctgtggcgcaatcccctgcaatactacaagaggatgaagccacctgaagagggaacagagacgtcaggggactcccagttgttgagttga

SEQ ID NO: 990 - RNA, 369 nt, synthetic construct
  misc_feature 1..369: note = M13231.1
  source 1..369: mol_type = other RNA
atgcggtgggccctactggtgcttctagctttcctgtctcctgccagtcagaaatcttccaacttggaagggagaacgaagtcagtcaccaggcagactgggtcatctgctgaaatcacttgcgatcttactgtaacaaataccttctacatccactggtacctacaccaggaggggaaggccccacagcgtcttctgtactatgacgtctccactgcaagggatgtgttggaatcaggactcagtccaggaaagtattatactcatacacccaggaggtggagctggatattgagactgcaaaatctaattgaaaatgattctggggtctattactgtgccacctgggacaggcaaaaattattataa

SEQ ID NO: 991 - RNA, 804 nt, synthetic construct
  misc_feature 1..804: note = CCDS12619.1
  source 1..804: mol_type = other RNA
atgggggcgaggcagatccagaccagctcctcccagacctctccagaagaagccatgggaacccctcgtatccagcatttgctgatcctcctggtcctaggagcctccctcctgacctcgggcctagagctgtattgtcaaaagggtctgtccatgactgtggaagcagatccagccaatatgtttaactggaccacagaggaagtggagacttgtgacaaaggggcactttgccaggaaaccatactaataattaaagcagggactgagacagccattttggccacgaagggctgcatcccggaaggggaggaggccataacaattgtccagcactcttcacctcccggcctgatcgtgacctcctacagtaactactgtgaggattccttctgtaatgacaaagacagcctgtctcagttttgggagttcagtgagaccacagcttccactgtgtcaacaaccctccattgtccaacctgtgtggctttggggacctgtttcagtgctccttctcttccctgtcccaatggtacaactcgatgctatcaaggaaaacttgagatcactggaggtggcattgagtcgtctgtggaggtcaaaggctgtacagccatgattggctgcaggctgatgtctggaatcttagcagtaggacccatgtttgtgagggaagcgtgcccacatcagctgctcactcaacctcgaaagactgaaaatggggccacctgtcttcccattcctgtttgggggttacagctactgctgccattgctgctgccatcatttattcacttttcctaa

SEQ ID NO: 992 - RNA, 1590 nt, synthetic construct
  misc_feature 1..1590: note = AHZ44440
  source 1..1590: mol_type = other RNA
atgctcctggctgttttgtactgcctgctgtggagtttccagacctccgctggccatttccctagagcctgtgtctcctctaagaacctgatggagaaggaatgctgtccaccgtggagcggggacaggagtccctgtggccagctttcaggcagaggttcctgtcagaatatccttctgtccaatgcaccacttgggcctcaatttcccttcacaggggtggatgaccgggagtcgtggccttccgtcttttataataggacctgccagtgctctggcaacttcatgggattcaactgtggaaactgcaagtttggcttttggggaccaaactgcacagagagacgactcttggtgagaagaaacatcttcgatttgagtgccccagagaaggacaaattttttgcctacctcactttagcaaagcataccatcagctcagactatgtcatccccatagggacctatggccaaatgaaaaatggatcaacacccatgtttaacgacatcaatatttatgacctctttgtctggatgcattattatgtgtcaatggatgcactgcttgggggatctgaaatctggagagacattgattttgcccatgaagcaccagcttttctgccttggcatagactcttcttgttgcggtgggaacaagaaatccagaagctgacaggagatgaaaacttcactattccatattgggactggcgggatgcagaaaagtgtgacatttgcacagatgagtacatgggaggtcagcaccccacaaatcctaacttactcagcccagcatcattcttctcctcttggcagattgtctgtagccgattggaggagtacaacagccatcagtctttatgcaatggaacgcccgagggacctttacggcgtaatcctggaaaccatgacaaatccagaaccccaaggctcccctcttcagctgatgtagaattttgcctgagtttgacccaatatgaatctggttccatggataaagctgccaatttcagctttagaaatacactggaaggatttgctagtccacttactgggatagcggatgcctctcaaagcagcatgcacaatgccttgcacatctatatgaatggaacaatgtcccaggtacagggatctgccaacgatcctatcttccttcttcaccatgcatttgttgacagtatttttgagcagtggctccgaaggcaccgtcctcttcaagaagtttatccagaagccaatgcacccattagacataaccgggaatcctacatggttccttttataccactgtacagaaatggtgatttctttatttcatccaaagatctgggctatgactatagctatctacaagattcagacccagactcttttcaagactacattaagtcctatttggaacaagcgagtcggatctggtcatggctccttggggcggcgatggtaggggccgtcctcactgccctgctggcagggcttgtgagcttgctgtgtcgtcacaagagaaagcagcttcctgaagaaaagcagccactcctcatggagaaagaggattaccacagcttgtatcagagccatttataa

SEQ ID NO: 993 - RNA, 1590 nt, synthetic construct
  misc_feature 1..1590: note = AGV39051
  source 1..1590: mol_type = other RNA
atgctcctggctgttttgtactgcctgctgtggagtttccagacctccgctggccatttccctagagcctgtgtctcctctaagaacctgatggagaaggaatgctgtccaccgtggagcggggacaggagtccctgtggccagctttcaggcagaggttcctgtcagaatatccttctgtccaatgcaccacttgggcctcaatttcccttcacaggggtggatgaccgggagtcgtggccttccgtcttttataataggacctgccagtgctctggcaacttcatgggattcaactgtggaaactgcaagtttggcttttggggaccaaactgcacagagagacgactcttggtgagaagaaacatcttcgatttgagtgccccagagaaggacaaattttttgcctacctcactttagcaaagcataccatcagctcagactatgtcatccccatagggacctatggccaaatgaaaaatggatcaacacccatgtttaacgacatcaatatttatgacctctttgtctggatgcattattatgtgtcaatggatgcactgcttgggggatctgaaatctggagagacattgattttgcccatgaagcaccagcttttctgccttggcatagactcttcttgttgcggtgggaacaagaaatccagaagctgacaggagatgaaaacttcactattccatattgggactggcgggatgcagaaaagtgtgacatttgcacagatgagtacatgggaggtcagcaccccacaaatcctaacttactcagcccagcatcattcttctcctcttggcagattgtctgtagccgattggaggagtacaacagccatcagtctttatgcaatggaacgcccgagggacctttacggcgtaatcctggaaaccatgacaaatccagaaccccaaggctcccctcttcagctgatgtagaattttgcctgagtttgacccaatatgaatctggttccatggataaagctgccaatttcagctttagaaatacactggaaggatttgctagtccacttactgggatagcggatgcctctcaaagcagcatgcacaatgccttgcacatctatatgaatggaacaatgtcccaggtacagggatctgccaacgatcctatcttccttcttcaccatgcatttgttgacagtatttttgagcagtggctccgaaggcaccgtcctcttcaagaagtttatccagaagccaatgcacccattggacataaccgggaatcctacatggttccttttataccactgtacagaaatggtgatttctttatttcatccaaagatctgggctatgactatagctatctacaagattcagacccagactcttttcaagactacattaagtcctatttggaacaagcgagtcggatctggtcatggctccttggggcggcgatggtaggggccgtcctcactgccctgctggcagggcttgtgagcttgctgtgtcgtcacaagagaaagcagcttcctgaagaaaagcagccactcctcatggagaaagaggattaccacagcttgtatcagagccatttataa

SEQ ID NO: 994 - RNA, 1590 nt, synthetic construct
  misc_feature 1..1590: note = AGV39049
  source 1..1590: mol_type = other RNA
atgctcctggctgttttgtactgcctgctgtggagtttccagacctccgctggccatttccctagagcctgtgtctcctctaagaacctgatggagaaggaatgctgtccaccgtggagcggggacaggagtccctgtggccagctttcaggcagaggttcctgtcagaatatccttctgtccaatgcaccacttgggcctcaatttcccttcacaggggtggatgaccgggagtcgtggccttccgtcttttataataggacctgccagtgctctggcaacttcatgggattcaactgtggaaactgcaagtttggcttttggggaccaaactgcacagagagacgactcttggtgagaagaaacatcttcgatttgagtgccccagagaaggacaaattttttgcctacctcactttagcaaagcataccatcagctcagactatgtcatccccatagggacctatggccaaatgaaaaatggatcaacacccatgtttaacgacatcaatatttatgacctctttgtctggatgcattattatgtgtcaatggatgcactgcttgggggatctgaaatctggagagacattgattttgcccatgaagcaccagcttttctgccttggcatagactcttcttgttgcggtgggaacaagaaatccagaagctgacaggagatgaaaacttcactattccatattgggactggcgggatgcagaaaagtgtgacatttgcacagatgagtacatgggaggtcagcaccccacaaatcctaacttactcagcccagcatcattcttctcctcttggcagattgtctgtagccgattggaggagtacaacagccatcagtctttatgcaatggaacgcccgagggacctttacggcgtaatcctggaaaccatgacaaatccagaaccccaaggctcccctcttcagctgatgtagaattttgcctgagtttgacccaatatgaatctggttccatggataaagctgccaatttcagctttagaaatacactggaaggatttgctagtccacttactgggatagcggatgcctctcaaagcagcatgcacaatgccttgcacatctatatgaatggaacaatgtcccaggtacagggatctgccaacgatcctatcttccttcttcaccatgcatttgttgacagtatttttgagcagtggctccaaaggcaccgtcctcttcaagaagtttatccagaagccaatgcacccattggacataaccgggaatcctacatggttccttttataccactgtacagaaatggtgatttctttatttcatccaaagatctgggctatgactatagctatctacaagattcagacccagactcttttcaagactacattaagtcctatttggaacaagcgagtcggatctggtcatggctccttggggcggcgatggtaggggccgtcctcactgccctgctggcagggcttgtgagcttgctgtgtcgtcacaagagaaagcagcttcctgaagaaaagcagccactcctcatggagaaagaggattaccacagcttgtatcagagccatttataa

SEQ ID NO: 995 - RNA, 1590 nt, synthetic construct
  misc_feature 1..1590: note = AGV39050
  source 1..1590: mol_type = other RNA
atgctcctggctgttttgtactgcctgctgtggagtttccagacctccgctggccatttccctagagcctgtgtctcctctaagaacctgatggagaaggaatgctgtccaccgtggagcggggacaggagtccctgtggccagctttcaggcagaggttcctgtcagaatatccttctgtccaatgcaccacttgggcctcaatttcccttcacaggggtggatgaccgggagtcgtggccttccgtcttttataataggacctgccagtgctctggcaacttcatgggattcaactgtggaaactgcaagtttggcttttggggaccaaactgcacagagagacgactcttggtgagaagaaacatcttcgatttgagtgccccagagaaggacaaattttttgcctacctcactttagcaaagcataccatcagctcagactatgtcatccccatagggacctatggccaaatgaaaaatggatcaacacccatgtttaacgacatcaatatttatgacctctttgtctggatgcattattatgtgtcaatggatgcactgcttgggggatatgaaatctggagagacattgattttgcccatgaagcaccagcttttctgccttggcatagactcttcttgttgcggtgggaacaagaaatccagaagctgacaggagatgaaaacttcactattccatattgggactggcgggatgcagaaaagtgtgacatttgcacagatgagtacatgggaggtcagcaccccacaaatcctaacttactcagcccagcatcattcttctcctcttggcagattgtctgtagccgattggaggagtacaacagccatcagtctttatgcaatggaacgcccgagggacctttacggcgtaatcctggaaaccatgacaaatccagaaccccaaggctcccctcttcagctgatgtagaattttgcctgagtttgacccaatatgaatctggttccatggataaagctgccaatttcagctttagaaatacactggaaggatttgctagtccacttactgggatagcggatgcctctcaaagcagcatgcacaatgccttgcacatctatatgaatggaacaatgtcccaggtacagggatctgccaacgatcctatcttccttcttcaccatgcatttgttgacagtatttttgagcagtggctccgaaggcaccgtcctcttcaagaagtttatccagaagccaatgcacccattggacataaccgggaatcctacatggttccttttataccactgtacagaaatggtgatttctttatttcatccaaagatctgggctatgactatagctatctacaagattcagacccagactcttttcaagactacattaagtcctatttggaacaagcgagtcggatctggtcatggctccttggggcggcgatggtaggggccgtcctcactgccctgctggcagggcttgtgagcttgctgtgtcgtcacaagagaaagcagcttcctgaagaaaagcagccactcctcatggagaaagaggattaccacagcttgtatcagagccatttataa

SEQ ID NO: 996 - RNA, 714 nt, synthetic construct
  misc_feature 1..714: note = CAA04137
  source 1..714: mol_type = other RNA
atgagccccctttggtgggggtttctgctcagttgcttgggctgcaaaatcctgccaggagcccagggtcagttcccccgagtctgcatgacggtggacagcctagtgaacaaggagtgctgcccacgcctgggtgcagagtcggccaatgtctgtggctctcagcaaggccgggggcagtgcacagaggtgcgagccgacacaaggccctggagtggtccctacatcctacgaaaccaggatgaccgtgagctgtggccaagaaaattcttccaccggacctgcaagtgcacaggaaactttgccggctataattgtggagactgcaagtttggctggaccggtcccaactgcgagcggaagaaaccaccagtgattcggcagaacatccattccttgagtcctcaggaaagagagcagttcttgggcgccttagatctcgcgaagaagagagtacaccccgactacgtgatcaccacacaacactgggtgggcctgcttgggcccaatggaacccagccgcagtttgccaactgcagtgtttatgatttttttgtgtggctccattattattctgttagagatacattattaggtgggttttttccttggctgaaggtatattattacaggtttgtgattgggttgagggtatggcagtgggaagtaatttcatgcaagttaattaagagagcaaccacaaggcagccttag

SEQ ID NO: 997 - RNA, 1590 nt, synthetic construct; identical to SEQ ID NO: 993
  misc_feature 1..1590: note = AAA61242
  source 1..1590: mol_type = other RNA

SEQ ID NO: 998 - RNA, 1590 nt, synthetic construct
  misc_feature 1..1590: note = AGV39054
  source 1..1590: mol_type = other RNA
atgctcctggctgttttgtactgcctgctgtggagtttccagacctccgctggccatttccctagagcctgtgtctcctctaagaacctgatggagaaggaatgctgtccaccgtggagcggggacaggagtccctgtggccagctttcaggcagaggttcctgtcagaatatccttctgtccaatgcaccacttgggcctcaatttcccttcacaggggtggatgaccgggagtcgtggccttccgtcttttataataggacctgccagtgctctggcaacttcatgggattcaactgtggaaactgcaagtttggcttttggggaccaaactgcacagagagacgactcttggtgagaagaaacatcttcgatttgagtgccccagagaaggacaaattttttgcctacctcactttagcaaagcataccatcagctcagactatgtcatccccatagggacctatggccaaatgaaaaatggatcaacacccatgtttaacgacatcaatatttatgacctctttgtctggatgcattattatgtgtcaatggatgcactgcttgggggatctgaaatctggagagacattgattttgcccatgaagcaccagcttttctgccttggcatagactcttcttgttgcggtgggaacaagaaatccagaagctgacaggagatgaaaacttcactattccatattgggactggcgggatgcagaaaagtgtgacatttgcacagatgagtacgtgggaggtcagcaccccacaaatcctaacttactcagcccagcatcattcttctcctcttggcagattgtctgtagccgattggaggagtacaacagccatcagtctttatgcaatggaacgcccgagggacctttacggcgtaatcctggaaaccatgacaaatccagaaccccaaggctcccctcttcagctgatgtagaattttgcctgagtttgacccaatatgaatctggttccatggataaagctgccaatttcagctttagaaatacactggaaggatttgctagtccacttactgggatagcggatgcctctcaaagcagcatgcacaatgccttgcacatctatatgaatggaacaatgtcccaggtacagggatctgccaacgatcctatcttccttcttcaccatgcatttgttgacagtatttttgagcagtggctccgaaggcaccgtcctcttcaagaagtttatccagaagccaatgcacccattggacataaccgggaatcctacatggttccttttataccactgtacagaaatggtgatttctttatttcatccaaagatctgggctatgactatagctatctacaagattcagacccagactcttttcaagactacattaagtcctatttggaacaagcgagtcggatctggtcatggctccttggggcggcgatggtaggggccgtcctcactgccctgctggcagggcttgtgagcttgctgtgtcgtcacaagagaaagcagcttcctgaagaaaagcagccactcctcatggagaaagaggattaccacagcttgtatcagagccatttataa

SEQ ID NO: 999 - RNA, 1590 nt, synthetic construct
  misc_feature 1..1590: note = AGV39162
  source 1..1590: mol_type = other RNA
atgctcctggctgttttgtactgcctgctgtggagtttccagacctccgctggccatttccctagagcctgtgtctcctctaagaacctgatggagaaggaatgctgtccaccgtggagcggggacaggagtccctgtggccagctttcaggcagaggttcctgtcagaatatccttctgtccaatgcaccacttgggcctcaatttcccttcacaggggtggatgaccgggagtcgtggccttccgtcttttataataggacctgccagtgctctggcaacttcatgggattcaactgtggaaactgcaagtttggcttttggggaccaaactgcacagagagacgactcttggtgagaagaaacatcttcgatttgagtgccccagagaaggacaaattttttgcctacctcactttagcaaagcataccatcagctcagactatgtcatccccatagggacctatggccaaatgaaaaatggatcaacacccatgtttaacgacatcaatatttatgacctctttgtctggatgcattattatgtgtcaatggatgcactgcttgggggatctgaaatctggagagacattgattttgcccatgaagcaccagcttttctgccttggcatagactcttcttgttgcggtgggaacaagaaatccagaagctgacaggagatgaaaacttcactattccatattgggactggcgggatgcagaaaagtgtgacatttgcacagatgagtacatgggaggtcagcaccccacaaatcctaacttactcagcccagcatcattcttctcctcttggcagattgtctgtagccgattggaggagtacaacagccatcagtctttatgcaatggaacgcccgagggacctttacggcgtaatcctggaaaccatgacaaatccagaaccccaaggctcccctcttcagctgatgtagaattttgcctgagtttgacccaatatgaatctggttccatggataaagctgccaatttcagctttagaaatacactggaaggatttgctagtccacttactgggatagcggatgcctctcaaagcagcatgcacaatgccttgcacatctatatgaatggaacaatgtcccaggtacagggatctgccaacgatcctatcttccttcttcaccatgcatttgttgacagtatttttgagcagtggctccgaaggcaccgtcttcttcaagaagtttatccagaagccaatgcacccattggacataaccgggaatcctacatggttccttttataccactgtacagaaatggtgatttctttatttcatccaaagatctgggctatgactatagctatctacaagattcagacccagactcttttcaagactacattaagtcctatttggaacaagcgagtcggatctggtcatggctccttggggcggcgatggtaggggccgtcctcactgccctgctggcagggcttgtgagcttgctgtgtcgtcacaagagaaagcagcttcctgaagaaaagcagccactcctcatggagaaagaggattaccacagcttgtatcagagccatttataa

SEQ ID NO: 1000 - RNA, 1590 nt, synthetic construct
  misc_feature 1..1590: note = AGV39086
  source 1..1590: mol_type = other RNA
atgctcctggctgttttgtactgcctgctgtggagtttccagacctccgctggccatttccctagagcctgtgtctcctctaagaacctgatggagaaggaatgctgtccaccgtggagcggggacaggagtccctgtggccagctttcaggcagaggttcctgtcagaatatccttctgtccaatgcaccacttgggcctcaatttcccttcacaggggtggatgaccgggagtcgtggccttccgtcttttataataggacctgccagtgctctggcaacttcatgggattcaactgtggaaactgcaagtttggcttttggggaccaaactgcacagagagacgactcttggtgagaagaaacatcttcgatttgagtgccccagagaaggacaaattttttgcctacctcactttagcaaagcataccatcagctcagactatgtcatccccatagggacctatggccaaatgaaaaatggatcaacacccatgtttaacgacatcaatatttatgacctctttgtctggatgcattattatgtgtcaatggatgcactgcttgggggatctgaaatctggagagacattgattttgcccatgaagcaccagcttttctgccttggcatagactcttcttgttgcggtgggaacaagaaatccagaagctgacaggagatgaaaacttcactattccatattgggactggcgggatgcagaaaagtgtgacatttgcacagatgagtacatgggaggtcagcaccccacaaatcctaacttactcagcccagcatcattcttctcctcttggcagattgtctgtagccgattggaggagtacaacagccatcagtctttatgcaatggaacgcccgagggacctttacggcgtaatcctggaaaccatgacaaatccagaaccccaaggctcccctcttcagctgatgtagaattttgcctgagtttgacccaatatgaatctggttccatggataaagctgccaatttcagctttagaaatacactggaaggatttgctagtccacttactgggatagcggatgcctctcaaagcagcatgcacaatgccttgcacatctatatgaatggaacaatgtcccaggtacagggatctgccaacgatcctatcttccttcttcaccatgcatttgttgacagtatgtttgagcagtggctccgaaggcaccgtcctcttcaagaagtttatccagaagccaatgcacccattggacataaccgggaatcctacatggttccttttataccactgtacagaaatggtgatttctttatttcatccaaagatctgggctatgactatagctatctacaagattcagacccagactcttttcaagactacattaagtcctatttggaacaagcgagtcggatctggtcatggctccttggggcggcgatggtaggggccgtcctcactgccctgctggcagggcttgtgagcttgctgtgtcgtcacaagagaaagcagcttcctgaagaaaagcagccactcctcatggagaaagaggattaccacagcttgtatcagagccatttataa

SEQ ID NO: 1001 - RNA, 1614 nt, synthetic construct
  misc_feature 1..1614: note = AAC15468
  source 1..1614: mol_type = other RNA
atgagtgctcctaaactcctctctctgggctgtatcttcttccccttgctactttttcagcaggcccgggctcaattcccaagacagtgtgccactgttgaggctttgagaagtggtatgtgttgcccagacctgtcccctgtgtctgggcctgggacagaccgctgtggctcatcatcagggaggggcagatgtgaggcagtgactgcagactcccggccccacagccctcagtatccccatgatggcagagatgatcgggaggtctggcccttgcgcttcttcaataggacatgtcactgcaacggcaatttctcaggacacaactgtgggacgtgccgtcctggctggagaggagctgcctgtgaccagagggttctcatagtcaggagaaatcttctggacttaagtaaagaagaaaagaaccactttgtccgggccctggatatggcaaagcgcacaactcaccctttatttgtcattgccaccaggagatcagaagaaatactggggccagatggcaacacgccacaatttgagaacatttccatttataactactttgtttggacacactattactcagtcaaaaagactttccttggggtaggacaggaaagctttggtgaagtggatttctctcatgagggaccagcttttctcacatggcacaggtaccacctcctgcgtctggagaaagacatgcaggaaatgttgcaagagccttctttctcccttccttactggaattttgcaacggggaaaaatgtctgtgatatctgcacggatgacttgatgggatccagaagcaactttgattccactctaataagcccaaactctgtcttttctcaatggcgagtggtctgtgactccttggaagattatgataccctgggaacactttgtaacagcaccgaggatgggccaattaggagaaatccagctggaaatgtggccagaccaatggtgcaacgtcttcctgaaccacaggatgtcgctcagtgcttggaagttggtttatttgacacgcctcctttttattccaactctacaaacagtttccgaaacacagtggaaggttacagtgaccccacgggaaagtatgaccctgctgttcgaagtcttcacaatttggctcatctattcctgaatggaacagggggacaaacccatttgtctccaaatgatcctatttttgtcctcctgcacaccttcacagatgcagtctttgatgaatggctgaggagatacaatgctgatatatccacatttccattggaaaatgcccctattggacataatagacaatacaacatggtgccattctggcccccagtcaccaacacagaaatgtttgttactgctccagacaacctgggatacacttatgaaattcaatggccaagtcgggagtttagtgtacctgagataattgccatagcagtagttggcgctttgttactggttgcactcatttttgggactgcttcttatctgattcgtgccagacgcagtatggatgaagctaaccagcctctcctcactgatcagtatcaatgctatgctgaagaatatgaaaaactccagaatcctaatcagtctgtggtctaa

SEQ ID NO: 1002 - RNA, 1560 nt, synthetic construct
  misc_feature 1..1560: note = AAA20870
  source 1..1560: mol_type = other RNA
atgagccccctttggtgggggtttctgctcagttgcttgggctgcaaaatcctgccaggagcccagggtcagttcccccgagtctgcatgacggtggacagcctagtgaacaaggagtgctgcccacgcctgggtgcagagtcggccaatgtctgtggctctcagcaaggccgggggcagtgcacagaggtgcgagccgacacaaggccctggagtggtccctacatcctacgaaaccaggatgaccgtgagctgtggccaagaaaattcttccaccggacctgcaagtgcacaggaaactttgccggctataattgtggagactgcaagtttggctggaccggtcccaactgcgagcggaagaaaccaccagtgattcggcagaacatccattccttgagtcctcaggaaagagagcagttcttgggcgccttagatctcgcgaagaagagagtacaccccgactacgtgatcaccacacaacactggctgggcctgcttgggcccaatggaacccagccgcagtttgccaactgcagtgtttatgatttttttgtgtggctccattattattctgttagagatacattattaggaccaggacgcccctacagggccatagatttctcacatcaaggacctgcatttgttacctggcaccggtaccatttgttgtgtctggaaagagatctccagcgactcattggcaatgagtcttttgctttgccctactggaactttgccactgggaggaacgagtgtgatgtgtgtacagaccagctgtttggggcagcgagaccagacgatccgactctgattagtcggaactcaagattctccagctgggaaactgtctgtgatagcttggatgactacaaccacctggtcaccttgtgcaatggaacctatgaaggtttgctgagaagaaatcaaatgggaagaaacagcatgaaattgccaaccttaaaagacatacgagattgcctgtctctccagaagtttgacaatcctcccttcttccagaactctaccttcagtttcaggaatgctttggaagggtttgataaagcagatgggactctggattctcaagtgatgagccttcataatttggttcattccttcctgaacgggacaaacgctttgccacattcagccgccaatgatcccatttttgtggttcttcattcctttactgatgccatctttgatgagtggatgaaaagatttaatcctcctgcagatgcctggcctcaggagctggcccctattggtcacaatcggatgtacaacatggttcctttcttccctccagtgactaatgaagaactctttttaacctcagaccaacttggctacagctatgccatcgatctgccagtttcagttgaagaaactccaggttggcccacaactctcttagtagtcatgggaacactggtggctttggttggtctttttgtgctgttggcttttcttcaatatagaagacttcgaaaaggatatacacccctaatggagacacatttaagcagcaagagatacacagaagaagcctag

SEQ ID NO: 1003 - RNA, 456 nt, synthetic construct
  misc_feature 1..456: note = CCDS7679.1
  source 1..456: mol_type = other RNA
atgaggaggctcctcctggtcaccagcctggtggttgtgctgctgtgggaggcaggtgcagtcccagcacccaaggtccctatcaagatgcaagtcaaacactggccctcagagcaggacccagagaaggcctggggcgcccgtgtggtggagcctccggagaaggacgaccagctggtggtgctgttccctgtccagaagccgaaactcttgaccaccgaggagaagccacgaggtcagggcaggggccccatccttccaggcaccaaggcctggatggagaccgaggacaccctgggccatgtcctgagtcccgagcccgaccatgacagcctgtaccaccctccgcctgaggaggaccagggcgaggagaggccccggttgtgggtgatgccaaatcaccaggtgctcctgggaccggaggaagaccaagaccacatctaccacccccagtag

SEQ ID NO: 1004 - RNA, 525 nt, synthetic construct
  misc_feature 1..525: note = ACF47598
  source 1..525: mol_type = other RNA
atggtcagctactgggacaccggggtcctgctgtgcgcgctgctcagctgtctgcttctcacaggatctagttcaggttcaaaattaaaagatcctgaactgagtttaaaaggcacccagcacatcatgcaagcaggccagacactgcatctccaatgcaggggggaagcagcccataaatggtctttgcctgaaatggtgagtaaggaaagcgaaaggctgagcataactaaatctgcctgtggaagaaatggcaaacaattctgcagtactttaaccttgaacacagctcaagcaaaccacactggcttctacagctgcaaatatctagctgtacctacttcaaagaagaaggaaacagaatctgcaatctatatatttattagtgatacaggtagacctttcgtagagatgtacagtgaaatccccgaaattatacacatgactgaaggaagggagctcgtcattccctgccgggttacgtcacctaacatcactgttactttaaaaaagaaaaaggcataa

SEQ ID NO: 1005 - RNA, 750 nt, synthetic construct
  misc_feature 1..750: note = BAR92607
  source 1..750: mol_type = other RNA
atgggctccgacgtgcgggacctgaacgcgctgctgcccgccgtcccctccctgggtggcggcggcggctgtgccctgcctgtgagcggcgcggcgcagtgggcgccggtgctggactttgcgcccccgggcgcttcggcttacgggtcgttgggcggccccgcgccgccaccggctccgccgccacccccgccgccgccgcctcactccttcatcaaacaggagccgagctggggcggcgcggagccgcacgaggagcagtgcctgagcgccttcactgtccacttttccggccagttcactggcacagccggagcctgtcgctacgggcccttcggtcctcctccgcccagccaggcgtcatccggccaggccaggatgtttcctaacgcgccctacctgcccagctgcctcgagagccagcccgctattcgcaatcagggttacagcacggtcaccttcgacgggacgcccagctacggtcacacgccctcgcaccatgcggcgcagttccccaaccactcattcaagcatgaggatcccatgggccagcagggctcgctgggtgagcagcagtactcggtgccgcccccggtctatggctgccacacccccaccgacagctgcaccggcagccaggctttgctgctgaggacgccctacagcagtgacaatttataccaaatgacatcccagcttgaatgcatgacctggaatcagatgaacttaggagccaccttaaaggggtaa

SEQ ID NO: 1006 - RNA, 1350 nt, synthetic construct
  misc_feature 1..1350: note = AAA61299
  source 1..1350: mol_type = other RNA
atgggctccgacgtgcgggacctgaacgcgctgctgcccgccgtcccctccctgggtggcggcggcggctgtgccctgcctgtgagcggcgcggcgcagtgggcgccggtgctggactttgcgcccccgggcgcttcggcttacgggtcgttgggcggccccgcgccgccaccggctccgccgccacccccgccgccgccgcctcactccttcatcaaacaggagccgagctggggcggcgcggagccgcacgaggagcagtgcctgagcgccttcactgtccacttttccggccagttcactggcacagccggagcctgtcgctacgggcccttcggtcctcctccgcccagccaggcgtcatccggccaggccaggatgtttcctaacgcgccctacctgcccagctgcctcgagagccagcccgctattcgcaatcagggttacagcacggtcaccttcgacgggacgcccagctacggtcacacgccctcgcaccatgcggcgcagttccccaaccactcattcaagcatgaggatcccatgggccagcagggctcgctgggtgagcagcagtactcggtgccgcccccggtctatggctgccacacccccaccgacagctgcaccggcagccaggctttgctgctgaggacgccctacagcagtgacaatttataccaaatgacatcccagcttgaatgcatgacctggaatcagatgaacttaggagccaccttaaagggagttgctgctgggagctccagctcagtgaaatggacagaagggcagagcaaccacagcacagggtacgagagcgataaccacacaacgcccatcctctgcggagcccaatacagaatacacacgcacggtgtcttcagaggcattcaggatgtgcgacgtgtgcctggagtagccccgactcttgtacggtcggcatctgagaccagtgagaaacgccccttcatgtgtgcttacccaggctgcaataagagatattttaagctgtcccacttacagatgcacagcaggaagcacactggtgagaaaccataccagtgtgacttcaaggactgtgaacgaaggttttctcgttcagaccagctcaaaagacaccaaaggagacatacaggtgtgaaaccattccagtgtaaaacttgtcagcgaaagttctcccggtccgaccacctgaagacccacaccaggactcatacaggtaaaacaagtgaaaagcccttcagctgtcggtggccaagttgtcagaaaaagtttgcccggtcagatgaattagtccgccatcacaacatgcatcagagaaacatgaccaaactccagctggcgctttga

SEQ ID NO: 1007 - RNA, 279 nt, synthetic construct
  misc_feature 1..279: note = AAA63269
  source 1..279: mol_type = other RNA
atgcagaggcgaggacagcccctggaaaaccatgtggcgttgatacactggcaaagcgcaggcatcccggcctcgaaggtgcataattattgcaatatgaaaaaatcgaggctgggtaggagcagggcagtgaggatttctcaacccttactttcaccccggcgctgtccactgcatctgacagagcgcggagctgggctgctacagccgcaaccccagggaccagtgcgcacgcctgggccgccctccgggagtcacccagcggccgcggacaactga

SEQ ID NO: 1008 - RNA, 246 nt, synthetic construct
  misc_feature 1..246: note = AAP35763
  source 1..246: mol_type = other RNA
atggagagccccaaaaagaagaaccagcagctgaaagtcgggatcctacacctgggcagcagacagaagaagatcaggatacagctgagatcccagtgcgcgacatggaaggtgatctgcaagagctgcatcagtcaaacaccggggataaatctggatttgggttccggcgtcaaggtgaagataatacctaaagaggaacactgtaaaatgccagaagcaggtgaagagcaaccacaagtttag

SEQ ID NO: 1009 - RNA, 1098 nt, synthetic construct
  misc_feature 1..1098: note = AAA59652_variant
  source 1..1098: mol_type = other RNA
atggccgtgatggcgccccgcaccctgctcctgctgctcagcggcgccctggccctgacccagacgtgggccgggtcccacagcatgcggtacttcttcacctccgtcagccgcccgggccgcggggagccccggttcatcgccgtgggctacgtggacgacacccagttcgtccggttcgactccgacgccgcgagccagaagatggagccccgcgccccctggatcgagcaggaggggccggagtactgggaccaggagacccggaacatgaaggcccactcccagacggaccgcgccaacctcggcaccctgcggggctactacaaccagagcgaggacgggtcccacaccatccagatcatgtacggctgcgacgtggggcccgacggccgcttcctgcgggggtaccgccaggacgcgtacgacggcaaggactacatcgccctcaacgaggacctgcggagctggaccgccgccgacatggccgcgcagatcacgaagcgcaagtgggaggccgtgcacgccgccgagcagcggcgcgtctacctggagggccggtgcgtggacgggctccgccggtacctggagaacggcaaggagaccctgcagcgcaccgacccgcccaagacccacatgacgcaccaccccatctccgaccacgaggccaccctccggtgctgggcgctggggttctaccccgccgagatcaccctgacctggcagcgcgacggcgaggaccagacgcaggacaccgagctcgtggagacccgccccgccggcgacgggaccttccagaagtgggccgccgtcgtggtgcccagcggcgaggagcagcggtacacgtgccacgtccagcacgaggggctgccgaagcccctgaccctccgctgggagctgtccagccagcccaccatccccatcgtgggcatcatcgcggggctggtgctcctgggcgccgtcatcaccggcgccgtggtggccgccgtcatgtggcggcgcaagtccagcgaccggaagggcgggtcctacacgcaggcggccagctccgacagcgcccaggggagcgacgtgtccctgaccgcctgcaaggtgtga

SEQ ID NO: 1010 - RNA, 1098 nt, synthetic construct
  misc_feature 1..1098: note = AAA59606_variant
  source 1..1098: mol_type = other RNA
atggccgtgatggcgccccgcaccctggtcctcctgctgagcggcgccctcgccctgacccagacgtgggccgggtcccacagcatgcggtacttcttcacctccgtgagccgcccgggccggggcgagccccgcttcatcgccgtgggctacgtcgacgacacccagttcgtgcggttcgactccgacgccgcgagccagcgcatggagccccgggccccctggatcgagcaggaggggccggagtactgggacggcgagacccgcaaggtgaaggcccactcccagacgcaccgggtcgacctgggcaccctccgcgggtactacaaccagagcgaggccggctcccacaccgtgcagcggatgtacgggtgcgacgtgggcagcgactggcgcttcctgcgggggtaccaccagtacgcgtacgacggcaaggactacatcgccctgaaggaggacctccgctcctggaccgccgccgacatggccgcgcagacgaccaagcacaagtgggaggccgcccacgtcgccgagcagctgcgggcctacctggaggggacctgcgtggagtggctccgccggtacctggagaacgggaaggagaccctgcagcgcacggacgcgcccaagacccacatgacccaccacgccgtgagcgaccacgaggccaccctccggtgctgggccctgtccttctaccccgccgagatcacgctgacctggcagcgcgacggcgaggaccagacccaggacaccgagctcgtcgagacgcggcccgcgggggacggcaccttccagaagtgggccgccgtggtggtcccgagcggccaggagcagcgctacacgtgccacgtgcagcacgaggggctgcccaagcccctgaccctccgctgggagccctccagccagccgaccatccccatcgtgggcatcatcgccgggctggtcctgttcggcgccgtgatcaccggggcggtggtcgccgccgtgatgtggcggcgcaagtccagcgaccggaagggcggctcctacagccaggccgcgagctccgacagcgcccaggggtccgacgtgagcctcaccgcctgcaaggtctga

SEQ ID NO: 1011 - RNA, 1263 nt, synthetic construct
  misc_feature 1..1263: note = AAH37161_variant
  source 1..1263: mol_type = other RNA
atgcccggcgggtgcagccgcggccccgccgccggggacggccggctgcgcctcgcgcggctggccctggtgctcctggggtgggtctccagctccagccccacctccagcgcctccagcttctccagctccgcccccttcctggccagcgcggtgtccgcccagcccccgctccccgaccagtgccccgccctgtgcgagtgcagcgaggccgcgcgcaccgtgaagtgcgtcaaccggaacctgacggaggtgcccaccgacctcccggcctacgtgcgcaacctgttcctgaccggcaaccagctcgccgtcctgcccgccggcgccttcgcgcggcgcccgcccctggccgagctcgccgccctgaacctgtccgggagccggctcgacgaggtgcgcgccggcgcgttcgagcacctcccctccctgcggcagctggacctgagccacaaccccctggccgacctctcccccttcgccttcagcgggagcaacgcctccgtgagcgccccctccccgctggtcgagctgatcctcaaccacatcgtgccgcccgaggacgagcgccagaaccggagcttcgagggcatggtggtcgcggccctgctggccgggcgcgccctccagggcctgcggcgcctggagctcgcctccaaccacttcctgtacctgccccgggacgtgctcgcgcagctgcccagcctgcgccacctcgacctgtccaacaacagcctggtgtccctcacctacgtcagcttccggaacctgacgcacctggagtccctccacctggaggacaacgccctgaaggtgctccacaacggcaccctggccgagctgcaggggctgccccacatccgcgtgttcctcgacaacaacccctgggtctgcgactgccacatggccgacatggtgacctggctgaaggagaccgaggtggtccagggcaaggaccggctgacgtgcgcgtaccccgagaagatgcgcaaccgcgtgctcctggagctgaacagcgccgacctcgactgcgacccgatcctgccgccctccctgcagaccagctacgtgttcctcgggatcgtcctggccctgatcggcgccatcttcctcctggtgctgtacctcaaccggaagggcatcaagaagtggatgcacaacatccgcgacgcctgccgggaccacatggaggggtaccactaccgctacgagatcaacgcggacccccggctgaccaacctgtccagcaactccgacgtctga

SEQ ID NO: 1012 - RNA, 1632 nt, synthetic construct
  misc_feature 1..1632: note = AAH33010_variant
  source 1..1632: mol_type = other RNA
atgcgcaagcccgccgccggcttcctgccgagcctcctgaaggtgctgctcctgcccctggcgcccgccgccgcccaggactccacccaggccagcacccccgggtccccgctcagccccacggagtacgagcggttcttcgcgctgctgacccccacctggaaggccgagaccacgtgccgcctccgggccacccacggctgccgcaaccccaccctggtccagctggaccagtacgagaaccacgggctcgtgccggacggcgccgtgtgctccaacctgccctacgcgagctggttcgagtccttctgccagttcacccactaccggtgcagcaaccacgtctactacgccaagcgcgtgctgtgctcccagcccgtgagcatcctctcccccaacacgctgaaggagatcgaggccagcgccgaggtctccccgaccaccatgaccagccccatcagcccccacttcacggtgaccgagcggcagaccttccagccctggccggagcgcctgagcaacaacgtggaggagctcctgcagtccagcctgtccctcgggggccaggagcaggcccccgagcacaagcaggagcagggcgtcgagcaccggcaggagcccacccaggagcacaagcaggaggaggggcagaagcaggaggagcaggaggaggagcaggaggaggagggcaagcaggaggaggggcagggcacgaaggaggggcgcgaggcggtgagccagctgcagaccgacagcgagcccaagttccactccgagagcctgtccagcaacccgtccagcttcgcgccccgggtgcgcgaggtcgagtccacccccatgatcatggagaacatccaggagctcatccggagcgcccaggagatcgacgagatgaacgagatctacgacgagaactcctactggcgcaaccagaaccccggcagcctgctgcagctcccgcacaccgaggccctgctggtgctctgctactccatcgtggagaacacgtgcatcatcacccccaccgccaaggcctggaagtacatggaggaggagatcctgggcttcgggaagtccgtctgcgactccctgggccggcgccacatgagcacgtgcgccctctgcgacttctgctccctgaagctggagcagtgccacagcgaggcctccctccagcggcagcagtgcgacaccagccacaagacccccttcgtgagccccctgctggcctcccagagcctctccatcgggaaccaggtgggcagcccggagtccggccgcttctacgggctggacctgtacggcgggctccacatggacttctggtgcgcccggctggcgaccaagggctgcgaggacgtccgcgtgagcgggtggctgcagaccgagttcctctccttccaggacggcgacttccccacgaagatctgcgacaccgactacatccagtaccccaactactgcagcttcaagtcccagcagtgcctgatgcggaaccgcaaccgcaaggtgagccggatgcgctgcctgcagaacgagacctactccgccctcagcccgggcaagtccgaggacgtcgtgctgcggtggagccaggagttctccaccctgacgctggggcagttcggctga

SEQ ID NO: 1013 - RNA, 1830 nt, synthetic construct
  misc_feature 1..1830: note = AAB58754_variant
  source 1..1830: mol_type = other RNA
atgaagtgggtggagagcatcttcctgatcttcctcctgaacttcaccgagtcccgcaccctgcaccggaacgagtacggcatcgccagcatcctcgactcctaccagtgcacggccgagatcagcctggcggacctggccaccatcttcttcgcccagttcgtccaggaggccacctacaaggaggtgtccaagatggtgaaggacgccctcaccgcgatcgagaagcccacgggggacgagcagagctccggctgcctggagaaccagctgcccgccttcctcgaggagctgtgccacgagaaggagatcctggagaagtacgggcacagcgactgctgctcccagagcgaggagggccgccacaactgcttcctcgcccacaagaagcccacccccgcctccatccccctgttccaggtcccggagcccgtgaccagctgcgaggcgtacgaggaggaccgggagaccttcatgaacaagttcatctacgagatcgcccgccggcaccccttcctgtacgcccccacgatcctcctgtgggccgcccgctacgacaagatcatcccgtcctgctgcaaggcggagaacgccgtggagtgcttccagaccaaggccgccaccgtcaccaaggagctgcgggagagctccctcctgaaccagcacgcctgcgcggtgatgaagaacttcgggacgcgcaccttccaggccatcaccgtgaccaagctgagccagaagttcacgaaggtcaacttcaccgagatccagaagctcgtgctggacgtggcccacgtccacgagcactgctgccggggcgacgtgctggactgcctccaggacggcgagaagatcatgtcctacatctgcagccagcaggacaccctgtccaacaagatcaccgagtgctgcaagctgacgaccctcgagcgcgggcagtgcatcatccacgccgagaacgacgagaagcccgagggcctgagccccaacctgaaccggttcctcggggaccgcgacttcaaccagttcagctccggcgagaagaacatcttcctggccagcttcgtgcacgagtactcccggcgccacccccagctggcggtcagcgtgatcctccgggtggccaaggggtaccaggagctgctggagaagtgcttccagaccgagaacccgctcgagtgccaggacaagggcgaggaggagctgcagaagtacatccaggagtcccaggccctggccaagcgcagctgcggcctcttccagaagctgggggagtactacctgcagaacgccttcctcgtcgcgtacaccaagaaggcgccccagctgacgtccagcgagctgatggccatcacccggaagatggccgccaccgccgcgacctgctgccagctctccgaggacaagctgctggcctgcggcgagggggccgccgacatcatcatcggccacctctgcatccgccacgagatgacgcccgtgaaccccggcgtggggcagtgctgcaccagctcctacgccaaccggcgcccgtgcttcagctccctggtcgtggacgagacctacgtgccgcccgccttcagcgacgacaagttcatcttccacaaggacctgtgccaggcccagggcgtcgccctgcagaccatgaagcaggagttcctcatcaacctggtgaagcagaagccccagatcacggaggagcagctggaggcggtcatcgccgacttctccgggctcctggagaagtgctgccagggccaggagcaggaggtgtgcttcgccgaggaggggcagaagctgatcagcaagacccgggccgccctcggcgtgtga

SEQ ID NO: 1014 - RNA, 2565 nt, synthetic construct
  misc_feature 1..2565: note = AAI26251_variant
  source 1..2565: mol_type = other RNA
atgatggcctacagcgacaccaccatgatgtccgacgacatcgactggctgcgcagccaccggggcgtgtgcaaggtcgacctctacaaccccgaggggcagcaggaccaggaccgcaaggtgatctgcttcgtggacgtctccaccctgaacgtggaggacaaggactacaaggacgccgcgagctccagctccgagggcaacctgaacctcgggagcctggaggagaaggagatcatcgtgatcaaggacaccgagaagaaggaccagtccaagaccgagggcagcgtctgcctgttcaagcaggccccgtccgaccccgtgagcgtgctcaactggctgctgtccgacctccagaagtacgccctggggttccagcacgccctgagcccctccaccagcacgtgcaagcacaaggtcggcgacaccgagggcgagtaccaccgggcctccagcgagaactgctactccgtgtacgcggaccaggtgaacatcgactacctcatgaaccgcccccagaacctgcggctggagatgaccgccgccaagaacaccaacaacaaccagagcccgagcgccccgcccgcgaagccgccctccacgcagcgcgccgtcatcagccccgacggggagtgctccatcgacgacctcagcttctacgtgaaccggctgtccagcctggtgatccagatggcccacaaggagatcaaggagaagctcgagggcaagtccaagtgcctgcaccacagcatctgcccctcccccgggaacaaggagcgcatcagcccccggacccccgcctccaagatcgccagcgagatggcgtacgaggccgtcgagctgaccgccgccgagatgcgcggcaccggggaggagtcccgggagggcggccagaagtccttcctctacagcgagctgagcaacaagtccaagagcggggacaagcagatgtcccagcgcgagagcaaggagttcgccgacagcatctccaagggcctgatggtgtacgcgaaccaggtggccagcgacatgatggtctccctcatgaagacgctgaaggtgcacagctccgggaagcccatccccgccagcgtggtcctgaagcgggtgctcctgcgccacaccaaggagatcgtgtccgacctgatcgacagctgcatgaagaacctccacaacatcaccggcgtcctgatgaccgactccgacttcgtgagcgccgtcaagcggaacctgttcaaccagtggaagcagaacgccacggacatcatggaggcgatgctcaagcgcctggtgtccgccctgatcggcgaggagaaggagaccaagagccagtccctcagctacgcctccctgaaggccgggagccacgacccgaagtgccggaaccagtccctggagttcagcaccatgaaggccgagatgaaggagcgcgacaagggcaagatgaagtccgacccctgcaagagcctcaccagcgcggagaaggtgggggagcacatcctgaaggagggcctgacgatctggaaccagaagcaggggaactcctgcaaggtcgccaccaaggcctgcagcaacaaggacgagaagggcgagaagatcaacgcctccaccgacagcctcgcgaaggacctgatcgtgtccgccctgaagctcatccagtaccacctgacccagcagacgaagggcaaggacacgtgcgaggaggactgccccgggagcaccatgggctacatggcccagtccacccagtacgagaagtgcgggggcgggcagagcgccaaggccctgtccgtgaagcagctcgagagccaccgggcgcccggcccgtccacgtgccagaaggagaaccagcacctggacagccagaagatggacatgtccaacatcgtcctgatgctgatccagaagctcctgaacgagaaccccttcaagtgcgaggacccctgcgagggcgagaacaagtgcagcgagccccgcgcctccaaggccgccagcatgtccaaccggagcgacaaggccgaggagcagtgccaggagcaccaggagctggactgcaccagcgggatgaagcaggcgaacggccagttcatcgacaagctcgtggagtccgtgatgaagctgtgcctgatcatggccaagtacagcaacgacggggccgccctcgccgagctggaggagcaggcggcctccgccaacaagccgaacttccgcggcacccgctgcatccacagcggggccatgccccagaactaccaggactccctgggccacgaggtcatcgtgaacaaccagtgcagcaccaactccctccagaagcagctgcaggcggtgctgcagtggatcgccgccagccagttcaacgtccccatgctctacttcatgggcgacaaggacgggcagctggagaagctgccccaggtgtccgccaaggccgcggagaagggctacagcgtcgggggcctcctgcaggaggtgatgaagttcgccaaggagcggcagccggacgaggccgtgggcaaggtggcccgcaagcagctgctcgactggctgctggccaacctctga

SEQ ID NO: 1015 - RNA, 1251 nt, synthetic construct
  misc_feature 1..1251: note = BAG61782_variant
  source 1..1251: mol_type = other RNA
atggtggactaccacgccgccaaccagtcctaccagtacggcccctccagcgcggggaacggcgccgggggcgggggctccatgggcgactacatggcccaggaggacgactgggaccgcgacctgctcctggacccggcctgggagaagcagcagcggaagaccttcaccgcctggtgcaacagccacctccgcaaggcggggacccagatcgagaacatcgacgaggacttccgggacggcctgaagctgatgctgctcctggaggtcatctccggggagcgcctgcccaagcccgagcggggcaagatgcgcgtgcacaagatcaacaacgtgaacaaggccctcgacttcatcgccagcaagggggtcaagctggtgtccatcggcgccgaggagatcgtggacggcaacgcgaagatgaccctggggatgatctggaccatcatcctccggttcgccatccaggacatcagcgtcgaggagacctccgccaaggagggcctgctgctctggtgccagcgcaagacggccccctacaagaacgtgaacgtgcagaacttccacatcagctggaaggacgggctggccttcaacgcgctgatccaccggcaccgcccggagctcatcgagtacgacaagctgcggaaggacgaccccgtcaccaacctgaacaacgccttcgaggtggccgagaagtacctcgacatccccaagatgctggacgccgaggacatcgtgaacaccgcccgccccgacgagaaggcgatcatgacctacgtctccagcttctaccacgccttctccggcgcccagaaggccgagacggccgcgaaccggatctgcaaggtgctggccgtgaaccaggagaacgagcacctcatggaggactacgagaagctggccagcgacctgctcgagtggatccgccggaccatcccgtggctggaggaccgcgtcccccagaagaccatccaggagatgcagcagaagctggaggacttccgggactaccgccgggtgcacaagccgcccaaggtgcaggagaagtgccagctcgagatcaacttcaacaccctgcagacgaagctgcgcctctccaaccggcccgccttcatgcccagctggcgctcccgcgccagctccagccccaccagcacgtgcgcggcctccagccccgcccggccgatgctgtggggccccgggtcccgcccccggtggcgccggagcggcgccagccccctgcgctga

SEQ ID NO: 1016 - RNA, 1689 nt, synthetic construct
  misc_feature 1..1689: note = BAG65349_variant
  source 1..1689: mol_type = other RNA
atggtggactaccacgccgccaaccagagctaccagtacggcccctccagcgcggggaacggcgccgggggcgggggctccatgggcgactacatggcccaggaggacgactgggaccgcgacctgctcctggacccggcctgggagaagcagcagcggaagaccttcaccgcctggtgcaacagccacctccgcaaggcggggacgcagatcgagaacatcgacgaggacttccgggacggcctgaagctgatgctgctcctggaggtcatctccggggagcgcctgcccaagcccgagcggggcaagatgcgcgtgcacaagatcaacaacgtgaacaaggccctcgacttcatcgccagcaagggggtcaagctggtgtccatcggcgccgaggagatcgtggacggcaacgcgaagatgaccctggggatgatctggaccatcatcctccggttcgccatccaggacatcagcgtcgaggagacctccgccaaggagggcctgctgctctggtgccagcgcaagacggccccctacaagaacgtgaacgtgcagaacttccacatcagctggaaggacgggctggccttcaacgcgctgatccaccggcaccgcccggagctcatcgagtacgacaagctgcggaaggacgaccccgtcaccaacctgaacaacgccttcgaggtggccgagaagtacctcgacatccccaagatgctggacgccgaggacatcgtgaacaccgcccgccccgacgagaaggcgatcatgacctacgtctccagcttctaccacgccttctccggcgcccagaaggccgagacggccgcgaaccggatctgcaaggtgctggccgtgaaccaggagaacgagcacctcatggaggactacgagaagctggccagcgacctgctcgagtggatccagcgcaccatcccgtggctggaggaccgggtcccccagaaggccatccaggagatgcagcagaagctggaggacttccgcgactaccggcgcgtgcacaagccgcccaaggtgcaggagaagtgccagctcgagatcaacttcaacaccctgcagaccaagctgcggctctccaaccgccccgccttcatgcccagcgagggcaagatggtctccgacatcaacaacgggtggcagcacctggagcaggcggagaagggctacgaggagtggctgctcaacgagatccggcgcctggagcgcctggaccacctcgccgagaagttccggcagaaggccagcatccacgaggcctggacggacgggaaggaggcgatgctgaagcaccgcgactacgagaccgccaccctgtccgacatcaaggccctcatccggaagcacgaggccttcgagagcgacctggccgcgcaccaggaccgcgtggagcagatcgccgccatcgcccaggagctgaacgagctcgactactacgacagccacaacgtgaacacccccgacggcctgcaggaggggcccggccagccgcactcccccatcccgcccctgtgcatctacgccaagcacagcctccagtccagcggcgtcgggggctgggcggggcggggctgggggcgcctgagccccctgtccctgtgcggcctcgcccggcgcttcccccggcccggctggggcgacctggggcccgccctgctcgtgtggtga

SEQ ID NO: 1017 - RNA, 2736 nt, synthetic construct
  misc_feature 1..2736: note = AAH05033_variant
  source 1..2736: mol_type = other RNA
atggtggactaccacgccgccaaccagagctaccagtacggcccctccagcgcggggaacggcgccgggggcgggggctccatgggcgactacatggcccaggaggacgactgggaccgcgacctgctcctggacccggcctgggagaagcagcagcggaagaccttcaccgcctggtgcaacagccacctccgcaaggcggggacgcagatcgagaacatcgacgaggacttccgggacggcctcaagctgatgctgctcctggaggtcatctccggggagcgcctgcccaagcccgagcggggcaagatgcgcgtgcacaagatcaacaacgtgaacaaggccctcgacttcatcgccagcaagggggtcaagctggtgtccatcggcgccgaggagatcgtggacggcaacgcgaagatgaccctggggatgatctggaccatcatcctccggttcgccatccaggacatcagcgtcgaggagacctccgccaaggagggcctgctgctctggtgccagcgcaagacggccccctacaagaacgtgaacgtgcagaacttccacatcagctggaaggacgggctggccttcaacgcgctgatccaccggcaccgcccggagctcatcgagtacgacaagctgcggaaggacgaccccgtcaccaacctgaacaacgccttcgaggtggccgagaagtacctcgacatccccaagatgctggacgccgaggacatcgtgaacaccgcccgccccgacgagaaggcgatcatgacctacgtctccagcttctaccacgccttctccggcgcccagaaggccgagacggccgcgaaccggatctgcaaggtgctggccgtgaaccaggagaacgagcacctcatggaggactacgagaagctggccagcgacctgctcgagtggatccgccggaccatcccgtggctggaggaccgcgtcccccagaagaccatccaggagatgcagcagaagctggaggacttccgggactaccgccgggtgcacaagccgcccaaggtgcaggagaagtgccagctcgagatcaacttcaacaccctgcagacgaagctgcgcctctccaaccggcccgccttcatgcccagcgagggcaagatggtctccgacatcaacaacgggtggcagcacctggagcaggccgagaagggctacgaggagtggctgctcaacgagatccgccgcctggagcggctggaccacctcgcggagaagttccgccagaaggccagcatccacgaggcctggaccgacgggaaggaggccatgctgaagcaccgggactacgagaccgcgaccctgtccgacatcaaggccctcatccgcaagcacgaggccttcgagagcgacctggccgcccaccaggaccgggtggagcagatcgcggccatcgcccaggagctgaacgagctcgactactacgacagccacaacgtgaacacgcgctgccagaagatctgcgaccagtgggacgccctgggctccctgacccacagccggcgcgaggccctcgagaagaccgagaagcagctggaggcgatcgaccagctgcacctggagtacgccaagcgggccgcccccttcaacaactggatggagtccgccatggaggacctccaggacatgttcatcgtccacaccatcgaggagatcgaggggctgatcagcgcgcacgaccagttcaagtccacgctgcccgacgccgaccgcgagcgggaggccatcctcgccatccacaaggaggcgcagcgcatcgccgagagcaaccacatcaagctgtccggcagcaacccgtacaccaccgtgacgccccagatcatcaactccaagtgggagaaggtgcagcagctggtccccaagcgggaccacgccctcctggaggagcagagcaagcagcagtccaacgagcacctccgccggcagttcgccagccaggccaacgtggtcggcccctggatccagaccaagatggaggagatcgggcgcatctccatcgagatgaacggcaccctggaggaccagctgagccacctgaagcagtacgagcggtccatcgtggactacaagccgaacctcgacctgctggagcagcagcaccagctcatccaggaggcgctgatcttcgacaacaagcacaccaactacaccatggagcacatccgcgtggggtgggagcagctgctcacgaccatcgcccggaccatcaacgaggtcgagaaccagatcctgacccgcgacgccaagggcatcagccaggagcagatgcaggagttccgcgcctccttcaaccacttcgacaaggaccacgggggcgccctgggccccgaggagttcaaggcgtgcctcatcagcctggggtacgacgtggagaacgaccggcagggcgaggccgagttcaaccgcatcatgtccctggtggaccccaaccacagcgggctcgtcacgttccaggccttcatcgacttcatgagccgggagaccaccgacaccgacacggccgaccaggtgatcgcctccttcaaggtgctggcgggcgacaagaacttcatcaccgccgaggagctgcgccgggagctgcccccggaccaggccgagtactgcatcgcccgcatggcgccctaccaggggcccgacgccgtccccggcgccctggactacaagagcttctccaccgccctgtacggcgagagcgacctctga

SEQ ID NO: 1018 - RNA, 597 nt, synthetic construct
  misc_feature 1..597: note = EAX10817_variant
  source 1..597: mol_type = other RNA
atggccctgcagggcatcagcgtgatggagctctccgggctggcccccggcccgttctgcgcgatggtcctggccgacttcggggcccgcgtggtgcgggtcgaccgccccggcagccggtacgacgtgtcccgcctcgggcggggcaagcgcagcctggtgctggacctcaagcagccccggggcgccgccgtcctgcgccggctgtgcaagcgctccgacgtgctcctggagcccttccggcgcggggtgatggagaagctgcagctcggcccggagatcctgcagcgggagaacccccgcctgatctacgcgcggctcagcgggttcggccagtccgggagcttctgccgcctggccggccacgacatcaactacctggccctctccggcgggcggaacagcatcttcaagttcttctccgtcgagaacagcgagatcgagtccgtgggcagcacctcccgcaccgagcacgtggggtggtggagcacgttcctgtacgacctgcaggactcccggtggggcatccacggctgctggagcaaccgcacccccgtcctccgggccgcggaccagcgcacctggaccaaggtgtga

SEQ ID NO: 1019 - RNA, 597 nt, synthetic construct
  misc_feature 1..597: note = BAF85677_variant
  source 1..597: mol_type = other RNA
atggccctgcagggcatcagcgtggtcgagctctccgggctggcccccggcccgttctgcgcgatggtgctggccgacttcggggcccgcgtggtccgggtggaccgccccggcagccggtacgacgtgtcccgcctcgggcggggcaagcgcagcctggtcctggacctcaagcagccccggggcgccgccgtgctgcgccggctgtgcaagcgctccgacgtgctcctggagcccttccggcgcggggtcatggagaagctgcagctcggcccggagatcctgcagcgggagaacccccgcctgatctacgcgcggctcagcgggttcggccagtccgggagcttctgccgcctggccggccacgacatcaactacctggccctctccggcgggcggaacagcatcttcaagttcttctccgtggagaacagcgagatcgagtccgtgggcagcacctcccgcaccgagcacgtcgggtggtggagcacgttcctgtacgacctgcaggactcccggtggggcatccacggctgctggagcaaccgcacccccttcctccgggccgcggaccagcgcacctggaccaaggtgtga

SEQ ID NO: 1020 - RNA, 2763 nt, synthetic construct
  misc_feature 1..2763: note = EAX05380_variant
  source 1..2763: mol_type = other RNA
atggaggtgcagctgggcctcgggcgcgtctacccccggccgcccagcaagacctaccgcggcgccttccagaacctgttccagtccgtgcgggaggtgatccagaaccccgggccccgccacccggaggccgcgagcgccgccccccccggcgcctccctgctcctgctgcagcagcagcagcagcagcagcagcagcagcagcagcagcagcagcagcagcagcagcagcagcagcaggagaccagcccccggcagcagcagcagcagcagggggaggacggctccccgcaggcccaccgccggggccccacggggtacctcgtcctggacgaggagcagcagcccagccagccccagtccgcgctggagtgccacccggagcgcggctgcgtgcccgagcccggggccgccgtggccgcgagcaagggcctcccccagcagctgccggccccccccgacgaggacgactccgccgcccccagcaccctgtccctcctggggccgaccttccccggcctgagctcctgcagcgccgacctcaaggacatcctgtccgaggcgagcaccatgcagctgctccagcagcagcagcaggaggccgtctccgagggcagctccagcgggcgggcccgcgaggccagcggcgcccccacgtccagcaaggacaactacctggggggcacctccaccatcagcgacaacgcgaaggagctgtgcaaggccgtgtccgtgagcatgggcctcggggtcgaggccctggagcacctgtcccccggcgagcagctccggggggactgcatgtacgccccgctgctgggcgtgccccccgccgtgcgccccaccccgtgcgcgcccctcgccgagtgcaaggggagcctgctggacgactccgccggcaagagcacggaggacaccgccgagtactcccccttcaagggcgggtacaccaagggcctcgagggggagagcctgggctgctccgggagcgccgcggccggctccagcggcaccctggagctcccgtccacgctgagcctgtacaagtccggggccctcgacgaggccgcggcctaccagagccgggactactacaacttccccctggccctggccggcccccccccgcccccccccccgccccacccccacgcccgcatcaagctcgagaaccccctggactacgggagcgcgtgggccgccgccgccgcgcagtgccggtacggcgacctggcctccctccacggggccggcgccgccggcccggggagcggctcccccagcgcggccgcctccagctcctggcacaccctgttcaccgccgaggaggggcagctgtacggcccctgcggcgggggcgggggcgggggcggcgggggcgggggcgggggcggcgggggcgggggcgggggcggcggggaggcgggcgccgtcgccccctacgggtacacccgcccgccccagggcctcgccgggcaggagagcgacttcacggcccccgacgtgtggtaccccggcggcatggtgtcccgggtcccgtaccccagccccacctgcgtgaagtccgagatggggccctggatggacagctactccggcccgtacggggacatgcgcctggagaccgcgcgggaccacgtgctgcccatcgactactacttccccccgcagaagacctgcctcatctgcggcgacgaggccagcggctgccactacggggccctgacgtgcggctcctgcaaggtcttcttcaagcgcgccgccgaggggaagcagaagtacctgtgcgcgagccggaacgactgcaccatcgacaagttccgccgcaagaactgcccctcctgccggctgcgcaagtgctacgaggccggcatgaccctcggggcccggaagctgaagaagctgggcaacctcaagctgcaggaggagggcgaggccagcagcaccacgtcccccaccgaggagaccacccagaagctgacggtgagccacatcgaggggtacgagtgccagcccatcttcctcaacgtgctggaggccatcgagccgggcgtcgtgtgcgcggggcacgacaacaaccagcccgactccttcgccgccctgctcagctccctgaacgagctgggcgagcgccagctcgtgcacgtcgtgaagtgggccaaggcgctgcccgggttccggaacctgcacgtcgacgaccagatggccgtgatccagtacagctggatgggcctcatggtgttcgccatgggctggcgctccttcaccaacgtcaacagccggatgctgtacttcgcccccgacctggtgttcaacgagtaccgcatgcacaagtcccggatgtacagccagtgcgtgcgcatgcggcacctctcccaggagttcgggtggctgcagatcaccccgcaggagttcctgtgcatgaaggccctcctgctgttcagcatcatccccgtcgacggcctcaagaaccagaagttcttcgacgagctgcgcatgaactacatcaaggagctggaccggatcatcgcgtgcaagcgcaagaaccccacctcctgcagccggcgcttctaccagctcacgaagctgctggactccgtgcagcccatcgcccgggagctccaccagttcaccttcgacctgctgatcaagagccacatggtgtccgtcgacttcccggagatgatggccgagatcatcagcgtgcaggtgcccaagatcctctccgggaaggtcaagcccatctacttccacacccagtga

SEQ ID NO: 1021 - RNA, 1239 nt, synthetic construct
  misc_feature 1..1239: note = AAH64630_variant
  source 1..1239: mol_type = other RNA
atggcccccgtggagcacgtcgtggccgacgcgggcgccttcctgcgccacgccgccctccaggacatcgggaagaacatctacaccatccgggaggtggtcaccgagatccgcgacaaggccacgcggcgccggctggcggtgctgccgtacgagctccgcttcaaggagcccctgcccgagtacgtgcggctggtcaccgagttcagcaagaagaccggcgactacccctccctcagcgccaccgacatccaggtgctggccctgacgtaccagctcgaggccgagttcgtgggggtctcccacctgaagcaggagccgcagaaggtgaaggtgagctccagcatccagcaccccgagacgcccctgcacatctccggcttccacctcccctacaagccgaagccgccccaggagaccgagaaggggcacagcgcgtgcgagcccgagaacctggagttctccagcttcatgttctggcgcaaccccctgcccaacatcgaccacgagctccaggagctgctgatcgaccggggcgaggacgtcccctccgaggaggaggaggaggaggagaacggcttcgaggaccgcaaggacgacagcgacgacgacgggggcgggtggatcaccccctccaacatcaagcagatccagcaggagctcgagcagtgcgacgtgccggaggacgtgcgggtcggctgcctgaccaccgacttcgccatgcagaacgtgctgctccagatggggctgcacgtgctggccgtcaacggcatgctcatccgcgaggcccggagctacatcctgcgctgccacggctgcttcaagaccacctccgacatgagccgggtgttctgctcccactgcgggaacaagacgctgaagaaggtgagcgtcaccgtgtccgacgacggcaccctccacatgcacttcagccgcaaccccaaggtgctgaacccccgggggctgcgctacagcctccccaccccgaagggcggcaagtacgccatcaacccccacctgacggaggaccagcggttcccccagctgcgcctctcccagaaggcgcggcagaagaccaacgtcttcgcccccgactacatcgccggggtgagcccgttcgtcgagaacgacatctccagccgctccgccaccctccaggtgcgcgacagcaccctgggcgccgggcggcgccggctgaaccccaacgcgtcccgcaagaagttcgtgaagaagcggtga

SEQ ID NO: 1022 - RNA, 984 nt, synthetic construct
  misc_feature 1..984: note = AAH69102_variant
  source 1..984: mol_type = other RNA
atgcagatgcccgccatgatgagcctgctcctggtgtccgtcggcctgatggaggccctccaggcgcagagccaccccatcacccgccgggacctgttctcccaggagatccagctggacatggccctcgccagcttcgacgaccagtacgccgggtgcgccgcggccatgaccgccgccctgcccgacctgaaccacacggagttccaggcgaaccaggtgtacgccgactcctggaccctcgccagctcccagtggcaggagcgccaggcccggtggcccgagtggagcctgtcccccacccgcccgtccccgccgcccctgggcttccgggacgagcacggggtggccctcctggcgtacaccgccaacagccccctgcacaaggagttcaacgccgccgtccgcgaggccggccggagccgcgcgcactacctccaccacttctccttcaagacgctgcacttcctgctcaccgaggccctgcagctgctcgggagcggccagcggccgccccgctgccaccaggtgttccggggcgtgcacgggctgcgcttccggcccgccggcccccgcgccaccgtccggctcgggggcttcgcctccgcgagcctgaagcacgtggccgcccagcagttcggggaggacaccttcttcggcatctggacgtgcctgggcgcccccatcaaggggtactccttcttccccggcgaggaggaggtgctgatcccgcccttcgagaccttccaggtcatcaacgccagccgcctcgcgcaggggcccgcccggatctacctgcgcgccctgggcaagcactccacctacaactgcgagtacatcaaggacaagaagtgcaagagcggcccctgccacctcgacaacagcgccatggggcagtccccgctgagcgcggtgtggtccctgctcctgctgctctggttcctggtggtccgggccttccccgacggccccgggctgctctga

SEQ ID NO: 1023 - RNA, 1035 nt, synthetic construct
  misc_feature 1..1035: note = AAH09751_variant
  source 1..1035: mol_type = other RNA
atggcccagaaggagaacagctacccctggccctacggccgccagaccgccccctccgggctgagcaccctcccccagcgggtgctgcgcaaggagcccgtcacgccgtccgcgctggtgctcatgagccggtccaacgtgcagcccaccgccgcccccggccagaaggtcatggagaacagctccgggacccccgacatcctgacccgccacttcacgatcgacgacttcgagatcggccggccgctggggaagggcaagttcggcaacgtgtacctcgcccgcgagaagaagtcccacttcatcgtggccctgaaggtcctgttcaagagccagatcgagaaggagggggtggagcaccagctccggcgcgagatcgagatccaggcgcacctccaccaccccaacatcctgcggctgtacaactacttctacgaccgccggcgcatctacctgatcctggagtacgcgccccggggcgagctctacaaggagctgcagaagtcctgcaccttcgacgagcagcgcaccgccaccatcatggaggagctggccgacgccctcatgtactgccacgggaagaaggtgatccaccgggacatcaagcccgagaacctgctgctcggcctgaagggggagctgaagatcgccgacttcggctggagcgtccacgccccgagcctccgccggaagacgatgtgcggcaccctggactacctgccgcccgagatgatcgaggggcgcatgcacaacgagaaggtggacctctggtgcatcggcgtgctgtgctacgagctgctcgtcgggaacccgcccttcgagtccgccagccacaacgagacctaccggcgcatcgtgaaggtggacctgaagttccccgcctccgtccccatgggcgcgcaggacctgatcagcaagctcctgcggcacaacccctccgagcgcctgcccctcgcccaggtgagcgcccacccctgggtgcgcgccaactcccggcgcgtcctgccgcccagcgccctgcagagcgtggcgtga

SEQ ID NO: 1024 - RNA, 360 nt, synthetic construct
  misc_feature 1..360: note = AAD48083_variant
  source 1..360: mol_type = other RNA
atgagccgctccgtggccctggccgtcctcgcgctgctgagcctctccggcctggaggccatccagcggacccccaagatccaggtgtacagccgccacccggccgagaacgggaagtccaacttcctgaactgctacgtgagcggcttccacccctccgacatcgaggtcgacctcctgaagaacggggagcggatcgagaaggtggagcacagcgacctgtccttcagcaaggactggtccttctacctcctgtactacaccgagttcacgcccaccgagaaggacgagtacgcctgccgcgtgaaccacgtcaccctgagccagcccaagatcgtgaagtgggaccgggacatgtga

SEQ ID NO: 1025 - RNA, 1137 nt, synthetic construct
  misc_feature 1..1137: note = AAH28058_variant
  source 1..1137: mol_type = other RNA
atgcgcatgctggtgagcggccggcgcgtcaagaagtggcagctcatcatccagctgttcgcgacctgcttcctggcctccctcatgttcttctgggagcccatcgacaaccacatcgtgagccacatgaagtcctacagctaccggtacctgatcaactcctacgacttcgtgaacgacaccctgagcctcaagcacacgtccgccgggccgcgctaccagtacctgatcaaccacaaggagaagtgccaggcccaggacgtcctgctcctgctgttcgtgaagaccgcccccgagaactacgaccggcgcagcggcatccggcgcacctgggggaacgagaactacgtgcggtcccagctcaacgccaacatcaagaccctgttcgccctgggcacgcccaaccccctcgagggggaggagctgcagcgcaagctggcgtgggaggaccagcggtacaacgacatcatccagcaggacttcgtcgacagcttctacaacctcaccctgaagctgctcatgcagttctcctgggccaacacctactgcccgcacgccaagttcctgatgaccgccgacgacgacatcttcatccacatgcccaacctgatcgagtacctccagagcctggagcagatcggcgtgcaggacttctggatcggccgcgtgcaccgcggggcgccgcccatccgggacaagtccagcaagtactacgtctcctacgagatgtaccagtggcccgcctaccccgactacacggccggcgccgcctacgtgatcagcggggacgtggcggccaaggtctacgaggcctcccagaccctgaacagctccctctacatcgacgacgtgttcatgggcctgtgcgccaacaagatcgggatcgtgccccaggaccacgtcttcttcagcggcgagggcaagaccccctaccacccgtgcatctacgagaagatgatgaccagccacgggcacctggaggacctccaggacctgtggaagaacgccacggaccccaaggtgaagaccatctccaagggcttcttcgggcagatctactgccggctgatgaagatcatcctcctgtgcaagatcagctacgtggacacctacccctgccgcgcggccttcatctga

SEQ ID NO: 1026 - RNA, 1602 nt, synthetic construct
  misc_feature 1..1602: note = AAA35516_variant
  source 1..1602: mol_type = other RNA
atgtggctgggccgccgggccctctgcgccctggtgctgctcctggcgtgcgccagcctggggctcctgtacgcctccacccgcgacgcccccggcctgcggctcccgctggccccctgggcgccgccccagagcccccgccggcccgagctgcccgacctcgcccccgagccgcgctacgcccacatccccgtccggatcaaggagcaggtcgtggggctgctggcctggaacaactgctcctgcgagagctccggcgggggcctccccctgcccttccagaagcaggtccgcgcgatcgacctgaccaaggccttcgacccggccgagctccgggccgccagcgcgacgcgcgagcaggagttccaggccttcctgtcccggagccagtcccccgccgaccagctgctcatcgcccccgccaacagccccctgcagtacccgctgcagggcgtggaggtgcagcccctccgctccatcctggtgcccgggctgagcctccaggcggcctccggccaggaggtgtaccaggtgaacctgaccgccagcctggggacctgggacgtcgccggcgaggtgaccggggtgacgctcaccggcgagggccaggccgacctgaccctggtctcccccgggctcgaccagctgaaccggcagctgcagctcgtgacctacagctcccgcagctaccagacgaacaccgcggacaccgtgcggttctccaccgagggccacgaggccgccttcacgatccgcatccggcacccgcccaacccccgcctgtacccgcccgggagcctgccccagggcgcccagtacaacatcagcgccctcgtcaccatcgcgaccaagaccttcctgcggtacgaccgcctgcgggccctcatcacgtccatccgccgcttctaccccaccgtgaccgtggtcatcgccgacgacagcgacaagcccgagcgggtgtccggcccgtacgtggagcactacctgatgcccttcgggaagggctggttcgccgggcgcaacctggcggtcagccaggtgaccacgaagtacgtgctctgggtcgacgacgacttcgtgttcaccgcccggacccgcctggagcggctggtcgacgtgctcgagcgcacgcccctggacctggtgggcggggccgtccgggagatctccggcttcgccaccacctaccgccagctgctcagcgtggagccgggcgcccccgggctgggcaactgcctgcggcagcgccgggggttccaccacgagctcgtgggcttccccgggtgcgtcgtgaccgacggcgtggtcaacttcttcctggcgcgcaccgacaaggtgcgggaggtgggcttcgacccccgcctgtcccgggtcgcccacctcgagttcttcctggacgggctgggcagcctccgcgtggggtcctgcagcgacgtggtcgtggaccacgcctccaagctgaagctgccgtggacgagccgggacgccggcgccgagacctacgcgcgctaccggtaccccgggtccctcgacgagagccagatggccaagcaccgcctgctgttcttcaagcaccgcctccagtgcatgacctcccagtga

SEQ ID NO: 1027 - RNA, 849 nt, synthetic construct
  misc_feature 1..849: note = AAH74729_variant
  source 1..849: mol_type = other RNA
atggccagcctgggccagatcctcttctggtccatcatcagcatcatcatcatcctggccggggcgatcgccctgatcatcggcttcgggatctccggccgccacagcatcaccgtgaccacggtcgcctccgccgggaacatcggcgaggacggcatcctcagctgcaccttcgagcccgacatcaagctgtccgacatcgtgatccagtggctgaaggagggggtgctcggcctggtccacgagttcaaggaggggaaggacgagctgagcgagcaggacgagatgttccggggccgcaccgccgtgttcgcggaccaggtgatcgtcgggaacgcctccctccggctgaagaacgtgcagctgaccgacgccggcacgtacaagtgctacatcatcaccagcaagggcaaggggaacgccaacctcgagtacaagaccggcgcgttctccatgccggaggtgaacgtcgactacaacgccagctccgagaccctgcgctgcgaggcgccccggtggttcccccagcccacggtggtgtgggccagccaggtcgaccagggggccaacttctccgaggtgagcaacacctccttcgagctgaacagcgagaacgtgaccatgaaggtcgtgtccgtgctctacaacgtcaccatcaacaacacgtacagctgcatgatcgagaacgacatcgccaaggccaccggcgacatcaaggtgaccgagagcgagatcaagcgccggtcccacctccagctgctgaacagcaaggcctccctgtgcgtgagctccttcttcgccatcagctgggccctgctcccgctgtccccctacctgatgctcaagtga

SEQ ID NO: 1028 - RNA, 132 nt, synthetic construct
  misc_feature 1..132: note = AAC50123_variant
  source 1..132: mol_type = other RNA
atggccgcccgcgcggtgttcctggccctcagcgcccagctgctgcaggcccggctcatgaaggaggagtcccccgtcgtgagctggcgcctggagccggaggacggcaccgccctgtgcttcatcttctga

SEQ ID NO: 1029 - RNA, 1158 nt, synthetic construct
  misc_feature 1..1158: note = AAN40694_variant
  source 1..1158: mol_type = other RNA
atggccgccgccctgttcgtgctgctgggcttcgccctgctcgggacccacggcgccagcggggccgccggcttcgtccaggcgcccctgtcccagcagcgctgggtcgggggcagcgtggagctgcactgcgaggccgtgggctccccggtgcccgagatccagtggtggttcgaggggcagggccccaacgacacgtgcagccagctctgggacggggcccggctggaccgcgtgcacatccacgccacctaccaccagcacgcggcctccaccatcagcatcgacaccctggtcgaggaggacaccggcacgtacgagtgccgggcctccaacgaccccgaccgcaaccacctcacccgggccccgcgcgtgaagtgggtgcgggcccaggcggtcgtgctggtgctggagcccgggaccgtcttcaccacggtggaggacctcggcagcaagatcctgctgacctgctccctcaacgacagcgccaccgaggtgaccggccaccgctggctgaagggcggggtcgtgctgaaggaggacgccctccccgggcagaagacggagttcaaggtggactccgacgaccagtggggcgagtacagctgcgtcttcctgcccgagccgatgggcaccgccaacatccagctgcacgggccgccccgggtgaaggccgtgaagtccagcgagcacatcaacgagggcgagaccgcgatgctcgtctgcaagtccgagagcgtgccgcccgtgaccgactgggcctggtacaagatcacggactccgaggacaaggccctgatgaacgggagcgagtcccgcttcttcgtcagcagctcccagggccggagcgagctgcacatcgagaacctcaacatggaggccgaccccgggcagtaccgctgcaacggcacctccagcaagggctccgaccaggccatcatcaccctgcgggtgcgcagccacctggcggccctctggcccttcctggggatcgtcgccgaggtgctggtgctcgtcaccatcatcttcatctacgagaagcggcgcaagcccgaggacgtgctggacgacgacgacgccggctccgcgcccctcaagagctccgggcagcaccagaacgacaagggcaagaacgtgcggcagcgcaacagctcctga

SEQ ID NO: 1030 - RNA, 720 nt, synthetic construct
  misc_feature 1..720: note = ABX60202_variant
  source 1..720: mol_type = other RNA
atggcccacgccggccgcaccgggtacgacaaccgggagatcgtgatgaagtacatccactacaagctgagccagcgcggctacgagtgggacgcgggggacgtcggcgccgcgcccccgggggccgcccccgcccccggcatcttctccagccagcccggccacaccccgcaccccgccgcctcccgggaccccgtggcccgcacgagccccctccagaccccggcggcccccggggccgccgccggccccgcgctgtcccccgtgccgcccgtcgtgcacctgaccctccggcaggccggggacgacttcagccgccggtaccgccgggacttcgccgagatgtccagccagctgcacctgacccccttcacggcccgcggccggttcgccaccgtggtcgaggagctgttccgcgacggggtgaactggggccggatcgtggcgttcttcgagttcggcggggtcatgtgcgtggagtccgtgaaccgcgagatgagccccctggtcgacaacatcgccctgtggatgaccgagtacctcaaccggcacctccacacctggatccaggacaacggcgggtgggacgccttcgtggagctgtacggcccgtccatgcgccccctcttcgacttcagctggctgtccctgaagacgctcctgagcctggccctcgtgggcgcctgcatcaccctgggggcgtacctgtcccacaagtga

SEQ ID NO: 1031 - RNA, 1290 nt, synthetic construct
  misc_feature 1..1290: note = ABX82700_variant
  source 1..1290: mol_type = other RNA
atggtggaccccgtcggcttcgccgaggcctggaaggcgcagttcccggacagcgagccgccccgcatggagctgcggtccgtgggggacatcgagcaggagctcgagcgctgcaaggccagcatccggcgcctggagcaggaggtgaaccaggagcggttccgcatgatctacctgcagaccctcctggccaaggagaagaagtcctacgaccggcagcgctggggcttccggcgcgccgcccaggcgcccgacggggccagcgagccccgggcctccgccagccgcccccagcccgcgcccgccgacggcgccgacccgccgcccgccgaggagcccgaggcccggcccgacggggagggctcccccggcaaggcgcgccccgggaccgcccggcgccccggcgccgccgccagcggggagcgggacgaccgcggcccgcccgcgtccgtcgccgccctgcggagcaacttcgagcgcatccggaaggggcacggccagcccggcgccgacgccgagaagcccttctacgtgaacgtggagttccaccacgagcgcgggctcgtcaaggtgaacgacaaggaggtgtccgaccgcatcagctccctgggcagccaggcgatgcagatggagcggaagaagtcccagcacggggccggcagctccgtcggcgacgccagccgcccgccctaccgggggcgctccagcgagagctcctgcggcgtggacggggactacgaggacgccgagctgaacccccggttcctcaaggacaacctgatcgacgccaacggcgggagccggcccccgtggccgcccctggagtaccagccctaccagtccatctacgtgggcggcatgatggagggggagggcaaggggcccctcctgcgcagccagtccacgagcgagcaggagaagcgcctgacctggccccggcgctcctacagcccccggtccttcgaggactgcggcgggggctacaccccggactgcagctccaacgagaacctcaccagctccgaggaggacttcagctccggccagagctcccgcgtcagcccctcccccacgacctaccggatgttccgcgacaagagccggagcccctcccagaacagccagcagtccttcgacagctccagcccgcccacgccccagtgccacaagcgccaccggcactgccccgtggtggtctccgaggcgaccatcgtgggggtgcgcaagaccggccagatctggccgaacgacggggagggcgccttccacggggacgccgacggcggctga

SEQ ID NO: 1032 - RNA, 1665 nt, synthetic construct
  misc_feature 1..1665: note = ABX82703_variant
  source 1..1665: mol_type = other RNA
atggtggaccccgtcggcttcgccgaggcctggaaggcgcagttcccggacagcgagccgccccgcatggagctgcggtccgtgggggacatcgagcaggagctcgagcgctgcaaggccagcatccggcgcctggagcaggaggtgaaccaggagcggttccgcatgatctacctgcagaccctcctggccaaggagaagaagtcctacgaccggcagcgctggggcttccggcgcgccgcccaggcgcccgacggggccagcgagccccgggcctccgccagccgcccccagcccgcgcccgccgacggcgccgacccgccgcccgccgaggagcccgaggcccggcccgacggggagggctcccccggcaaggcgcgccccgggaccgcccggcgccccggcgccgccgccagcggggagcgggacgaccgcggcccgcccgcgtccgtcgccgccctgcggagcaacttcgagcgcatccggaaggggcacggccagcccggcgccgacgccgagaagcccttctacgtgaacgtggagttccaccacgagcgcgggctcgtcaaggtgaacgacaaggaggtgtccgaccgcatcagctccctgggcagccaggcgatgcagatggagcggaagaagtcccagcacggggccggcagctccgtcggcgacgccagccgcccgccctaccgggggcgctccagcgagagctcctgcggcgtggacggggactacgaggacgccgagctgaacccccggttcctcaaggacaacctgatcgacgccaacggcgggagccggcccccgtggccgcccctggagtaccagccctaccagtccatctacgtgggcggcatgatggagggggagggcaaggggcccctcctgcgcagccagtccacgagcgagcaggagaagcgcctgacctggccccggcgctcctacagcccccggtccttcgaggactgcggcgggggctacaccccggactgcagctccaacgagaacctcaccagctccgaggaggacttcagctccggccagagctcccgcgtcagcccctcccccacgacctaccggatgttccgcgacaagagccggagcccctcccagaacagccagcagtccttcgacagctccagcccgcccacgccccagtgccacaagcgccaccggcactgccccgtggtggtctccgaggcgaccatcgtgggggtgcgcaagaccggccagatctggccgaacgacggggagggcgccttccacggggacgccgacggcagcttcggcaccccgcccgggtacggctgcgccgcggaccgggccgaggagcagcgccgccaccaggacgggctgccctacatcgacgactcccccagctccagcccccacctgtccagcaagggccggggctcccgcgacgccctcgtcagcggggccctggagtccaccaaggccagcgagctggacctcgagaagggcctggagatgcggaagtgggtgctgagcgggatcctcgcgtccgaggagacctacctgagccacctggaggccctcctgctgcccatgaagcccctcaaggccgccgccacgacctcccagccggtgctgaccagccagcagatcgagaccatcttcttcaaggtccccgacctgctctga

SEQ ID NO: 1033 - RNA, 1545 nt, synthetic construct
  misc_feature 1..1545: note = ABX82704_variant
  source 1..1545: mol_type = other RNA
atggtggaccccgtcggcttcgccgaggcctggaaggcgcagttcccggacagcgagccgccccgcatggagctgcggtccgtgggggacatcgagcaggagctcgagcgctgcaaggccagcatccggcgcctggagcaggaggtgaaccaggagcggttccgcatgatctacctgcagaccctcctggccaaggagaagaagtcctacgaccggcagcgctggggcttccggcgcgccgcccaggcgcccgacggggccagcgagccccgggcctccgccagccgcccccagcccgcgcccgccgacggcgccgacccgccgcccgccgaggagcccgaggcccggcccgacggggagggctcccccggcaaggcgcgccccgggaccgcccggcgccccggcgccgccgccagcggggagcgggacgaccgcggcccgcccgcgtccgtcgccgccctgcggagcaacttcgagcgcatccggaaggggcacggccagcccggcgccgacgccgagaagcccttctacgtgaacgtggagttccaccacgagcgcgggctcgtcaaggtgaacgacaaggaggtgtccgaccgcatcagctccctgggcagccaggcgatgcagatggagcggaagaagtcccagcacggggccggcagctccgtcggcgacgccagccgcccgccctaccgggggcgctccagcgagagctcctgcggcgtggacggggactacgaggacgccgagctgaacccccggttcctcaaggacaacctgatcgacgccaacggcgggagccggcccccgtggccgcccctggagtaccagccctaccagtccatctacgtgggcggcatgatggagggggagggcaaggggcccctcctgcgcagccagtccacgagcgagcaggagaagcgcctgacctggccccggcgctcctacagcccccggtccttcgaggactgcggcgggggctacaccccggactgcagctccaacgagaacctcaccagctccgaggaggacttcagctccggccagagctcccgcgtcagcccctcccccacgacctaccggatgttccgcgacaagagccggagcccctcccagaacagccagcagtccttcgacagctccagcccgcccacgccccagtgccacaagcgccaccggcactgccccgtggtggtctccgaggcgaccatcgtgggggtgcgcaagaccggccagatctggccgaacgacggggagggcgccttccacggggacgccgacggcagcttcggcaccccgcccgggtacggctgcgccgcggaccgggccgaggagcagcgccgccaccaggacgggctgccctacatcgacgactcccccagctccagcccccacctgtccagcaagggccggggctcccgcgacgccctcgtcagcggggccctggagtccaccaaggccagcgagctggacctcgagaagggcctggagatgcggaagtgggtgctgagcgggatcctcgcgtccgaggagatcaccctgtga

SEQ ID NO: 1034 - RNA, 1326 nt, synthetic construct
  misc_feature 1..1326: note = ABX82705_variant
  source 1..1326: mol_type = other RNA
atggtggaccccgtcggcttcgccgaggcctggaaggcgcagttcccggacagcgagccgccccgcatggagctgcggtccgtgggggacatcgagcaggagctcgagcgctgcaaggccagcatccggcgcctggagcaggaggtgaaccaggagcggttccgcatgatctacctgcagaccctcctggccaaggagaagaagtcctacgaccggcagcgctggggcttccggcgcgccgcccaggcgcccgacggggccagcgagccccgggcctccgccagccgcccccagcccgcgcccgccgacggcgccgacccgccgcccgccgaggagcccgaggcccggcccgacggggagggctcccccggcaaggcgcgccccgggaccgcccggcgccccggcgccgccgccagcggggagcgggacgaccgcggcccgcccgcgtccgtcgccgccctgcggagcaacttcgagcgcatccggaaggggcacggccagcccggcgccgacgccgagaagcccttctacgtgaacgtggagttccaccacgagcgcgggctcgtcaaggtgaacgacaaggaggtgtccgaccgcatcagctccctgggcagccaggcgatgcagatggagcggaagaagtcccagcacggggccggcagctccgtcggcgacgccagccgcccgccctaccgggggcgctccagcgagagctcctgcggcgtggacggggactacgaggacgccgagctgaacccccggttcctcaaggacaacctgatcgacgccaacggcgggagccggcccccgtggccgcccctggagtaccagccctaccagtccatctacgtgggcggcatgatggagggggagggcaaggggcccctcctgcgcagccagtccacgagcgagcaggagaagcgcctgacctggccccggcgctcctacagcccccggtccttcgaggactgcggcgggggctacaccccggactgcagctccaacgagaacctcaccagctccgaggaggacttcagctccggccagagctcccgcgtcagcccctcccccacgacctaccggatgttccgcgacaagagccggagcccctcccagaacagccagcagtccttcgacagctccagcccgcccacgccccagtgccacaagcgccaccggcactgccccgtggtggtctccgaggcgaccatcgtgggggtgcgcaagaccggccagatctggccgaacgacggggagggcgccttccacggggacgccgacggcagcctggagctgcagggcaagccctcccggtggacccagtga

SEQ ID NO: 1035 - RNA, 1575 nt, synthetic construct
  misc_feature 1..1575: note = ABX82706_variant
  source 1..1575: mol_type = other RNA
atggtggaccccgtcggcttcgccgaggcctggaaggcgcagttcccggacagcgagccgccccgcatggagctgcggtccgtgggggacatcgagcaggagctcgagcgctgcaaggccagcatccggcgcctggagcaggaggtgaaccaggagcggttccgcatgatctacctgcagaccctcctggccaaggagaagaagtcctacgaccggcagcgctggggcttccggcgcgccgcccaggcgcccgacggggccagcgagccccgggcctccgccagccgcccccagcccgcgcccgccgacggcgccgacccgccgcccgccgaggagcccgaggcccggcccgacggggagggctcccccggcaaggcgcgccccgggaccgcccggcgccccggcgccgccgccagcggggagcgggacgaccgcggcccgcccgcgtccgtcgccgccctgcggagcaacttcgagcgcatccggaaggggcacggccagcccggcgccgacgccgagaagcccttctacgtgaacgtggagttccaccacgagcgcgggctcgtcaaggtgaacgacaaggaggtgtccgaccgcatcagctccctgggcagccaggcgatgcagatggagcggaagaagtcccagcacggggccggcagctccgtcggcgacgccagccgcccgccctaccgggggcgctccagcgagagctcctgcggcgtggacggggactacgaggacgccgagctgaacccccggttcctcaaggacaacctgatcgacgccaacggcgggagccggcccccgtggccgcccctggagtaccagccctaccagtccatctacgtgggcggcatgatggagggggagggcaaggggcccctcctgcgcagccagtccacgagcgagcaggagaagcgcctgacctggccccggcgctcctacagcccccggtccttcgaggactgcggcgggggctacaccccggactgcagctccaacgagaacctcaccagctccgaggaggacttcagctccggccagagctcccgcgtcagcccctcccccacgacctaccggatgttccgcgacaagagccggagcccctcccagaacagccagcagtccttcgacagctccagcccgcccacgccccagtgccacaagcgccaccggcactgccccgtggtggtctccgaggcgaccatcgtgggggtgcgcaagaccggccagatctggccgaacgacggggagggcgccttccacggggacgccgacggcagcttcggcaccccgcccgggtacggctgcgccgcggaccgggccgaggagcagcgccgccaccaggacgggctgccctacatcgacgactcccccagctccagcccccacctgtccagcaagggccggggctcccgcgacgccctcgtcagcggggccctggagtccaccaaggccagcgagctggacctcgagaagggcctggagatgcggaagtgggaccccgtgaagatgacccccacgttcagcctgcactgcatgatcctctggccggtggagatcaccctgtga

SEQ ID NO: 1036 - RNA, 1398 nt, synthetic construct
  misc_feature 1..1398: note = ABX82707_variant
  source 1..1398: mol_type = other RNA
atggtggaccccgtcggcttcgccgaggcctggaaggcgcagttcccggacagcgagccgccccgcatggagctgcggtccgtgggggacatcgagcaggagctcgagcgctgcaaggccagcatccggcgcctggagcaggaggtgaaccaggagcggttccgcatgatctacctgcagaccctcctggccaaggagaagaagtcctacgaccggcagcgctggggcttccggcgcgccgcccaggcgcccgacggggccagcgagccccgggcctccgccagccgcccccagcccgcgcccgccgacggcgccgacccgccgcccgccgaggagcccgaggcccggcccgacggggagggctcccccggcaaggcgcgccccgggaccgcccggcgccccggcgccgccgccagcggggagcgggacgaccgcggcccgcccgcgtccgtcgccgccctgcggagcaacttcgagcgcatccggaaggggcacggccagcccggcgccgacgccgagaagcccttctacgtgaacgtggagttccaccacgagcgcgggctcgtcaaggtgaacgacaaggaggtgtccgaccgcatcagctccctgggcagccaggcgatgcagatggagcggaagaagtcccagcacggggccggcagctccgtcggcgacgccagccgcccgccctaccgggggcgctccagcgagagctcctgcggcgtggacggggactacgaggacgccgagctgaacccccggttcctcaaggacaacctgatcgacgccaacggcgggagccggcccccgtggccgcccctggagtaccagccctaccagtccatctacgtgggcggcatgatggagggggagggcaaggggcccctcctgcgcagccagtccacgagcgagcaggagaagcgcctgacctggccccggcgctcctacagcccccggtccttcgaggactgcggcgggggctacaccccggactgcagctccaacgagaacctcaccagctccgaggaggacttcagctccggccagagctcccgcgtcagcccctcccccacgacctaccggatgttccgcgacaagagccggagcccctcccagaacagccagcagtccttcgacagctccagcccgcccacgccccagtgccacaagcgccaccggcactgccccgtggtggtctccgaggcgaccatcgtgggggtgcgcaagaccggccagatctggccgaacgacggggagggcgccttccacggggagcaccccggcgccgccgaggaggtcttccagaagctgctgcccgacatccggggcgcggccgacgccgaccagctcgtgtgcgagacccccgactgcccgcagcacagcgccgaccaccagtga

SEQ ID NO: 1037 - RNA, 1377 nt, synthetic construct
  misc_feature 1..1377: note = ABX82709_variant
  source 1..1377: mol_type = other RNA
atggtggaccccgtcggcttcgccgaggcctggaaggcgcagttcccggacagcgagccgccccgcatggagctgcggtccgtgggggacatcgagcaggagctcgagcgctgcaaggccagcatccggcgcctggagcaggaggtgaaccaggagcggttccgcatgatctacctgcagaccctcctggccaaggagaagaagtcctacgaccggcagcgctggggcttccggcgcgccgcccaggcgcccgacggggccagcgagccccgggcctccgccagccgcccccagcccgcgcccgccgacggcgccgacccgccgcccgccgaggagcccgaggcccggcccgacggggagggctcccccggcaaggcgcgccccgggaccgcccggcgccccggcgccgccgccagcggggagcgggacgaccgcggcccgcccgcgtccgtcgccgccctgcggagcaacttcgagcgcatccggaaggggcacggccagcccggcgccgacgccgagaagcccttctacgtgaacgtggagttccaccacgagcgcgggctcgtcaaggtgaacgacaaggaggtgtccgaccgcatcagctccctgggcagccaggcgatgcagatggagcggaagaagtcccagcacggggccggcagctccgtcggcgacgccagccgcccgccctaccgggggcgctccagcgagagctcctgcggcgtggacggggactacgaggacgccgagctgaacccccggttcctcaaggacaacctgatcgacgccaacggcgggagccggcccccgtggccgcccctggagtaccagccctaccagtccatctacgtgggcggcatgatggagggggagggcaaggggcccctcctgcgcagccagtccacgagcgagcaggagaagcgcctgacctggccccggcgctcctacagcccccggtccttcgaggactgcggcgggggctacaccccggactgcagctccaacgagaacctcaccagctccgaggaggacttcagctccggccagagctcccgcgtcagcccctcccccacgacctaccggatgttccgcgacaagagccggagcccctcccagaacagccagcagtccttcgacagctccagcccgcccacgccccagtgccacaagcgccaccggcactgccccgtggtggtctccgaggcgaccatcgtgggggtgcgcaagaccggccagatctggccgaacgacggggagggcgccttccacggggacgccgacggcagcttcggcaccccgcccgggtactgctgcctgtgcctgcccgcctggccctccggctgcaccgcggccaccgcccgggtcacgcgcagctga

SEQ ID NO: 1038 - RNA, 1365 nt, synthetic construct
  misc_feature 1..1365: note = ABX82710_variant
  source 1..1365: mol_type = other RNA
atggtggaccccgtcggcttcgccgaggcctggaaggcgcagttccccgacagcgagccgccccgcatggagctgcggtccgtgggggacatcgagcaggagctcgagcgctgcaaggccagcatccggcgcctggagcaggaggtgaaccaggagcggttccgcatgatctacctgcagaccctcctggccaaggagaagaagtcctacgaccggcagcgctggggcttccggcgcgccgcccaggcgcccgacggggccagcgagccccgggcctccgccagccgcccccagcccgcgcccgccgacggcgccgacccgccgcccgccgaggagcccgaggcccggcccgacggggagggctcccccggcaaggcgcgccccgggaccgcccggcgccccggcgccgccgccagcggggagcgggacgaccgcggcccgcccgcgtccgtcgccgccctgcggagcaacttcgagcgcatccggaaggggcacggccagcccggcgccgacgccgagaagcccttctacgtgaacgtggagttccaccacgagcgcgggctcgtcaaggtgaacgacaaggaggtgtccgaccgcatcagctccctgggcagccaggcgatgcagatggagcggaagaagtcccagcacggggccggcagctccgtcggcgacgccagccgcccgccctaccgggggcgctccagcgagagctcctgcggcgtggacggggactacgaggacgccgagctgaacccccggttcctcaaggacaacctgatcgacgccaacggcgggagccggcccccgtggccgcccctggagtaccagccctaccagtccatctacgtgggcggcatgatggagggggagggcaaggggcccctcctgcgcagccagtccacgagcgagcaggagaagcgcctgacctggccccggcgctcctacagcccccggtccttcgaggactgcggcgggggctacaccccggactgcagctccaacgagaacctcaccagctccgaggaggacttcagctccggccagagctcccgcgtcagcccctcccccacgacctaccggatgttccgcgacaagagccggagcccctcccagaacagccagcagtccttcgacagctccagcccgcccacgccccagtgccacaagcgccaccggcactgccccgtggtggtctccgaggcgaccatcgtgggggtgcgcaagaccggccagatctggccgaacgacggggagggcgccttccacggggacgccgacggcagcttcggcaccccgcccgggtacggctgcgccgcggggcggccgccccacctgaccgagctgcccgtccagcaccagtga

SEQ ID NO: 1039 - RNA, 1404 nt, synthetic construct
  misc_feature 1..1404: note = ABX82711_variant
  source 1..1404: mol_type = other RNA
atggtggaccccgtcggcttcgccgaggcctggaaggcgcagttcccggacagcgagccgccccgcatggagctgcggtccgtgggggacatcgagcaggagctcgagcgctgcaaggccagcatccggcgcctggagcaggaggtgaaccaggagcggttccgcatgatctacctgcagaccctcctggccaaggagaagaagtcctacgaccggcagcgctggggcttccggcgcgccgcccaggcgcccgacggggccagcgagccccgggcctccgccagccgcccccagcccgcgcccgccgacggcgccgacccgccgcccgccgaggagcccgaggcccggcccgacggggagggctcccccggcaaggcgcgccccgggaccgcccggcgccccggcgccgccgccagcggggagcgggacgaccgcggcccgcccgcgtccgtcgccgccctgcggagcaacttcgagcgcatccggaaggggcacggccagcccggcgccgacgccgagaagcccttctacgtgaacgtggagttccaccacgagcgcgggctcgtcaaggtgaacgacaaggaggtgtccgaccgcatcagctccctgggcagccaggcgatgcagatggagcggaagaagtcccagcacggggccggcagctccgtcggcgacgccagccgcccgccctaccgggggcgctccagcgagagctcctgcggcgtggacggggactacgaggacgccgagctgaacccccggttcctcaaggacaacctgatcgacgccaacggcgggagccggcccccgtggccgcccctggagtaccagccctaccagtccatctacgtgggcggcatgatggagggggagggcaaggggcccctcctgcgcagccagtccacgagcgagcaggagaagcgcctgacctggccccggcgctcctacagcccccggtccttcgaggactgcggcgggggctacaccccggactgcagctccaacgagaacctcaccagctccgaggaggacttcagctccggccagagctcccgcgtcagcccctcccccacgacctaccggatgttccgcgacaagagccggagcccctcccagaacagccagcagtccttcgacagctccagcccgcccacgccccagtgccacaagcgccaccggcactgccccgtggtggtctccgaggcgaccatcgtgggggtgcgcaagaccggccagatctggccgaacgacggggagggcgccttccacggggacgccgtcctgaagaccgaggtgccccaccagggcgtgcggcgcgcccgcctgagcctcgaggcgctgggcgaggacccctccttcctgttccccgccagcgacgggccgcggcactccagcacctggtga

SEQ ID NO: 1040 - RNA, 1542 nt, synthetic construct
  misc_feature 1..1542: note = ABX82712_variant
  source 1..1542: mol_type = other RNA
atggtggaccccgtcggcttcgccgaggcctggaaggcgcagttcccggacagcgagccgccccgcatggagctgcggtccgtgggggacatcgagcaggagctcgagcgctgcaaggccagcatccggcgcctggagcaggaggtgaaccaggagcggttccgcatgatctacctgcagaccctcctggccaaggagaagaagtcctacgaccggcagcgctggggcttccggcgcgccgcccaggcgcccgacggggccagcgagccccgggcctccgccagccgcccccagcccgcgcccgccgacggcgccgacccgccgcccgccgaggagcccgaggcccggcccgacggggagggctcccccggcaaggcgcgccccgggaccgcccggcgccccggcgccgccgccagcggggagcgggacgaccgcggcccgcccgcgtccgtcgccgccctgcggagcaacttcgagcgcatccggaaggggcacggccagcccggcgccgacgccgagaagcccttctacgtgaacgtggagttccaccacgagcgcgggctcgtcaaggtgaacgacaaggaggtgtccgaccgcatcagctccctgggcagccaggcgatgcagatggagcggaagaagtcccagcacggggccggcagctccgtcggcgacgccagccgcccgccctaccgggggcgctccagcgagagctcctgcggcgtggacggggactacgaggacgccgagctgaacccccggttcctcaaggacaacctgatcgacgccaacggcgggagccggcccccgtggccgcccctggagtaccagccctaccagtccatctacgtgggcggcatgatggagggggagggcaaggggcccctcctgcgcagccagtccacgagcgagcaggagaagcgcctgacctggccccggcgctcctacagcccccggtccttcgaggactgcggcgggggctacaccccggactgcagctccaacgagaacctcaccagctccgaggaggacttcagctccggccagagctcccgcgtcagcccctcccccacgacctaccggatgttccgcgacaagagccggagcccctcccagaacagccagcagtccttcgacagctccagcccgcccacgccccagtgccacaagcgccaccggcactgccccgtggtggtctccgaggcgaccatcgtgggggtgcgcaagaccggccagatctggccgaacgacggggagggcgccttccacggggacgccgacggcagcttcggcaccccgcccgggtacggctgcgccgcggaccgggccgaggagcagcgccgccaccaggacgggctgccctacatcgacgactcccccagctccagcccccacctgtccagcaagggccggggctcccgcgacgccctcgtcagcggggccctggagtccaccaaggccagcgagctggaccccgtgaagatgacccccacgttcagcctccactgcatgatcctgtggccggtggagatcaccctgtga

SEQ ID NO: 1041 - RNA, 1221 nt, synthetic construct
  misc_feature 1..1221: note = ABX82714_variant
  source 1..1221: mol_type = other RNA
atggtggaccccgtcggcttcgccgaggcctggaaggcgcagttcccggacagcgagccgccccgcatggagctgcggtccgtgggggacatcgagcaggagctcgagcgctgcaaggccagcatccggcgcctggagcaggaggtgaaccaggagcggttccgcatgatctacctgcagaccctcctggccaaggagaagaagtcctacgaccggcagcgctggggcttccggcgcgccgcccaggcgcccgacggggccagcgagccccgggcctccgccagccgcccccagcccgcgcccgccgacggcgccgacccgccgcccgccgaggagcccgaggcccggcccgacggggagggctcccccggcaaggcgcgccccgggaccgcccggcgccccggcgccgccgccagcggggagcgggacgaccgcggcccgcccgcgtccgtcgccgccctgcggagcaacttcgagcgcatccggaaggggcacggccagcccggcgccgacgccgagaagcccttctacgtgaacgtggagttccaccacgagcgcgggctcgtcaaggtgaacgacaaggaggtgtccgaccgcatcagctccctgggcagccaggcgatgcagatggagcggaagaagtcccagcacggggccggcagctccgtcggcgacgccagccgcccgccctaccgggggcgctccagcgagagctcctgcggcgtggacggggactacgaggacgccgagctgaacccccggttcctcaaggacaacctgatcgacgccaacggcgggagccggcccccgtggccgcccctggagtaccagccctaccagtccatctacgtgggcggcatgatggagggggagggcaaggggcccctcctgcgcagccagtccaccagcgagcaggagaagcgcctgacctggccccggcgctcctacagcccccggtccttcgaggactgcggcgggggctacaccccggactgcagctccaacgagaacctcaccagctccgaggaggacttcagctccggccagagctcccgcgtcagcccctcccccacgacctaccggatgttccgcgacaagagccggagcccctcccagaacagccagcagtccttcgacagctccagcccgcccacgccccagtgccacaagcgccaccggcactgccccgtggtggtctccgaggcgaccagcgggcagtga

SEQ ID NO: 1042 - RNA, 2346 nt, synthetic construct
  misc_feature 1..2346: note = AAH58926_variant
  source 1..2346: mol_type = other RNA
atggccacccaggccgacctgatggagctcgacatggcgatggagcccgaccgcaaggccgccgtgagccactggcagcagcagtcctacctggacagcggcatccactccggggccaccacgaccgcccccagcctgtccggcaaggggaaccccgaggaggaggacgtcgacaccagccaggtgctctacgagtgggagcagggcttctcccagagcttcacccaggagcaggtcgcggacatcgacgggcagtacgccatgacgcgggcccagcgcgtgcgggccgcgatgttccccgagaccctggacgagggcatgcagatcccctccacccagttcgacgccgcccacccgaccaacgtgcagcgcctggccgagcccagccagatgctcaagcacgccgtggtcaacctgatcaactaccaggacgacgcggagctggccacgcgggccatccccgagctcaccaagctgctgaacgacgaggaccaggtggtggtcaacaaggccgccgtgatggtgcaccagctctccaagaaggaggcgagccgccacgccatcatgcggagcccccagatggtctccgccatcgtgcgcaccatgcagaacaccaacgacgtggagacggcccggtgcaccgccggcaccctgcacaacctgtcccaccaccgcgaggggctcctggcgatcttcaagagcggcgggatcccggccctggtcaagatgctcggctcccccgtggacagcgtgctgttctacgccatcaccacgctgcacaacctcctgctgcaccaggagggggccaagatggccgtccggctcgcgggcggcctgcagaagatggtggccctgctcaacaagaccaacgtgaagttcctggccatcaccaccgactgcctgcagatcctcgcctacgggaaccaggagtccaagctgatcatcctggcgagcggcgggccccaggccctcgtcaacatcatgcgcacgtacacctacgagaagctgctgtggaccaccagccgggtgctcaaggtgctgtccgtctgcagctccaacaagcccgccatcgtggaggccggcggcatgcaggccctggggctccacctgacggacccgagccagcgcctggtccagaactgcctctggaccctgcggaacctgtccgacgcggccaccaagcaggagggcatggaggggctcctgggcaccctggtgcagctcctggggagcgacgacatcaacgtggtcacgtgcgccgccggcatcctgtccaacctgacctgcaacaactacaagaacaagatgatggtgtgccaggtgggcgggatcgaggccctcgtccgcaccgtgctgcgggcgggcgaccgcgaggacatcaccgagcccgccatctgcgccctgcggcacctcacgagccgccaccaggaggccgagatggcccagaacgcggtgcggctgcactacgggctgcccgtcgtggtgaagctcctgcacccgccctcccactggcccctgatcaaggccaccgtcggcctcatccgcaacctggccctgtgccccgccaaccacgcgcccctccgcgagcagggggccatcccgcggctggtgcagctgctcgtgcgcgcccaccaggacacccagcggcgcaccagcatgggcggcacgcagcagcagttcgtcgagggggtgcggatggaggagatcgtggagggctgcaccggggccctgcacatcctggcccgcgacgtccacaaccggatcgtgatccgcggcctcaacaccatccccctgttcgtgcagctgctctactcccccatcgagaacatccagcgggtcgcggccggggtgctgtgcgagctggcccaggacaaggaggccgccgaggcgatcgaggccgagggcgccaccgcgcccctcaccgagctgctgcacagccgcaacgagggcgtggccacgtacgccgccgccgtcctcttccggatgtccgaggacaagccgcaggactacaagaagcgcctgagcgtggagctgacctccagcctcttccggaccgagcccatggcctggaacgagaccgcggacctggggctggacatcggcgcccagggggagcccctcggctaccgccaggacgacccctcctaccggagcttccactccggcgggtacggccaggacgccctggggatggacccgatgatggagcacgagatgggcgggcaccaccccggcgccgactaccccgtggacggcctgccggacctcgggcacgcccaggacctgatggacggcctgccgcccggggacagcaaccagctcgcgtggttcgacacggacctgtga

SEQ ID NO: 1043 - RNA, 1692 nt, synthetic construct
  misc_feature 1..1692: note = AAI21007_variant
  source 1..1692: mol_type = other RNA
atggacgtgggcgagctgctcagctaccagcccaaccgcgggaccaagcggccgcgcgacgacgaggaggaggagcagaagatgcggcgcaagcagaccggcacgcgggagcgcgggcggtaccgcgaggaggagatgaccgtcgtggaggaggccgacgacgacaagaagcggctgctgcagatcatcgaccgcgacggcgaggaggaggaggaggaggaggagcccctcgacgagtccagcgtgaagaagatgatcctgaccttcgagaagcggtcctacaagaaccaggagctgcgcatcaagttccccgacaaccccgagaagttcatggagagcgagctcgacctgaacgacatcatccaggagatgcacgtcgtggccaccatgccggacctgtaccacctcctggtggagctgaacgcggtccagtccctcctggggctgctcggccacgacaacacggacgtgagcatcgccgtggtcgacctgctgcaggagctcaccgacatcgacaccctgcacgagtccgaggagggcgccgaggtgctgatcgacgccctcgtggacgggcaggtcgtggccctgctggtgcagaacctcgagcggctggacgagagcgtcaaggaggaggcggacggcgtgcacaacaccctggccatcgtggagaacatggccgagttccgccccgagatgtgcacggagggggcccagcagggcctcctgcagtggctgctcaagcggctgaaggcgaagatgcccttcgacgccaacaagctgtactgctccgaggtcctcgccatcctgctgcaggacaacgacgagaaccgcgagctcctgggggagctggacggcatcgacgtgctcctgcagcagctgagcgtgttcaagcggcacaacccctccaccgccgaggagcaggagatgatggagaacctcttcgacagcctgtgctcctgcctgatgctcagctccaaccgcgagcggttcctgaagggcgaggggctgcagctcatgaacctgatgctgcgcgagaagaagatcagccggtccagcgccctgaaggtcctcgaccacgcgatgatcggcccggaggggaccgacaactgccacaagttcgtggacatcctgggcctgcgcaccatcttccccctcttcatgaagtccccgcgcaagatcaagaaggtgggcacgaccgagaaggagcacgaggagcacgtctgcagcatcctggccagcctgctccggaacctgcgcgggcagcagcggacccgcctgctcaacaagttcaccgagaacgactccgagaaggtggaccggctgatggagctgcacttcaagtacctcggcgccatgcaggtcgccgacaagaagatcgagggggagaagcacgacatggtgcgccggggcgagatcatcgacaacgacacggaggaggagttctacctgcgccggctggacgccggcctcttcgtgctgcagcacatctgctacatcatggcggagatctgcaacgccaacgtcccccagatccgccagcgggtgcaccagatcctgaacatgcgcgggagctccatcaagatcgtgcggcacatcatcaaggagtacgccgagaacatcggcgacgggcgcagccccgagttccgggagaacgagcagaagcgcatcctcggcctgctggagaacttctga

SEQ ID NO: 1044 - RNA, 1833 nt, synthetic construct
  misc_feature 1..1833: note = CCDS4772.1_variant
  source 1..1833: mol_type = other RNA
atggagaccgcccccaagccgggcaaggacgtgccgcccaagaaggacaagctgcagaccaagcgcaagaagccccggcgctactgggaggaggagacggtccccaccaccgccggggcgagccccggcccgccccggaacaagaagaaccgcgagctccggccccagcgccccaagaacgcctacatcctgaagaagtcccggatcagcaagaagccccaggtgcccaagaagccgcgcgagtggaagaaccccgagtcccagcgggggctgagcggcacccaggaccccttccccgggccggcccccgtgcccgtcgaggtggtgcagaagttctgccgcatcgacaagtcccggaagctcccccacagcaaggccaagacgcgctcccggctggaggtcgccgaggcggaggaggaggagaccagcatcaaggccgcccgctccgagctgctcctggccgaggagccgggcttcctggagggcgaggacggggaggacaccgcgaagatctgccaggccgacatcgtggaggccgtggacatcgccagcgccgcgaagcacttcgacctcaacctgcggcagttcggcccctaccgcctgaactactcccggaccgggcgccacctcgccttcggcgggcggcgcggccacgtcgccgccctggactgggtgacgaagaagctgatgtgcgagatcaacgtgatggaggccgtccgggacatccgcttcctccacagcgaggcgctgctggccgtggcccagaaccgctggctccacatctacgacaaccagggcatcgagctgcactgcatccggcgctgcgaccgggtgacccgcctggagttcctccccttccacttcctgctggccaccgcctccgagaccgggttcctcacgtacctggacgtcagcgtgggcaagatcgtggcggccctgaacgcccgggccgggcgcctcgacgtcatgtcccagaacccctacaacgccgtgatccacctgggccacagcaacggcaccgtgtccctgtggagcccggcgatgaaggagcccctcgccaagatcctgtgccaccgcgggggcgtccgggccgtggccgtggactccaccgggacctacatggcgacgagcggcctggaccaccagctcaagatcttcgacctgcgggggacctaccagcccctgagcacccgcaccctcccccacggcgccggccacctggccttctcccagcgggggctgctcgtcgccggcatgggggacgtggtcaacatctgggccggccaggggaaggcgagcccgccctccctggagcagccctacctgacgcaccgcctcagcggcccggtgcacggcctgcagttctgccccttcgaggacgtgctgggggtcggccacaccgggggcatcacctccatgctcgtgcccggggccggcgagcccaacttcgacggcctggagagcaacccgtaccggtcccgcaagcagcggcaggagtgggaggtgaaggccctgctcgagaaggtccccgccgagctgatctgcctggacccccgcgccctggcggaggtggacgtgatcagcctcgagcaggggaagaaggagcagatcgagcggctgggctacgacccccaggccaaggccccgttccagcccaagcccaagcagaaggggcgctccagcaccgcctccctggtcaagcggaagcgcaaggtgatggacgaggagcaccgcgacaaggtgcggcagagcctccagcagcagcaccacaaggaggccaaggcgaagcccacgggcgcccgcccgtccgccctggaccggttcgtccgctga

SEQ ID NO: 1045 - RNA, 897 nt, synthetic construct
  misc_feature 1..897: note = AAG37878_variant
  source 1..897: mol_type = other RNA
atgggccccaaggacagcgccaagtgcctgcaccgcgggccgcagccctcccactgggccgcgggcgacgggcccacccaggagcggtgcggcccccgcagcctcgggtccccggtgctgggcctggacacgtgccgggcctgggaccacgtcgacggccagatcctcgggcagctgcgccccctgaccgaggaggaggaggaggagggcgccggggccaccctcagccggggccccgccttccccgggatgggctccgaggagctgcgcctggcgagcttctacgactggccgctcaccgccgaggtgccgcccgagctgctggccgccgcgggcttcttccacaccgggcaccaggacaaggtgcggtgcttcttctgctacggcgggctccagtcctggaagcgcggcgacgacccctggacggagcacgccaagtggttccccagctgccagttcctgctgcggtccaagggccgcgacttcgtccacagcgtgcaggagacccactcccagctcctggggagctgggacccctgggaggagcccgaggacgccgcccccgtggccccgtccgtccccgcgagcggctaccccgagctgcccaccccgcggcgcgaggtgcagtccgagagcgcccaggagcccgggggcgtgtcccccgccgaggcccagcgggcctggtgggtcctcgagcccccgggggcgcgcgacgtggaggcccagctgcggcgcctgcaggaggagcggacctgcaaggtgtgcctcgaccgcgccgtcagcatcgtgttcgtgccctgcggccacctggtctgcgccgagtgcgcccccggcctgcagctctgccccatctgccgggcgccggtgcgctcccgggtgcgcacgttcctgagctga

SEQ ID NO: 1046 - RNA, 2280 nt, synthetic construct
  misc_feature 1..2280: note = EAW60925_variant
  source 1..2280: mol_type = other RNA
atggacctgagcgccctccgcgtggaggaggtccagaacgtgatcaacgccatgcagaagatcctggagtgccccatctgcctggagctcatcaaggagccggtgtccaccaagtgcgaccacatcttctgcaagttctgcatgctgaagctgctcaaccagaagaagggccccagccagtgccccctgtgcaagaacgacatcaccaagcggtccctgcaggagagcacgcgcttctcccagctcgtcgaggagctgctgaagatcatctgcgcgttccagctcgacaccgggctggagtacgccaacagctacaacttcgccaagaaggagaacaactcccccgagcacctgaaggacgaggtgagcatcatccagtccatgggctaccggaaccgcgccaagcggctcctgcagagcgagccggagaacccctccctgcaggagaccagcctctccgtgcagctgagcaacctggggaccgtccgcacgctccggaccaagcagcgcatccagccccagaagacctccgtgtacatcgagctgggcagcgactccagcgaggacaccgtgaacaaggccacgtactgctccgtcggggaccaggagctgctccagatcacgccccagggcacccgggacgagatcagcctggacagcgcgaagaaggccgcctgcgagttctccgagaccgacgtgaccaacaccgagcaccaccagccgagcaacaacgacctgaacaccaccgagaagcgcgccgcggagcggcaccccgagaagtaccagggcgaggccgcctccgggtgcgagagcgagacgtccgtgagcgaggactgctccggcctcagctcccagagcgacatcctgaccacccagcagcgcgacaccatgcagcacaacctgatcaagctccagcaggagatggccgagctggaggccgtcctggagcagcacgggtcccagcccagcaactcctaccccagcatcatctccgacagctccgcgctcgaggacctgcggaacccggagcagagcacgtccgagaaggtgctgaccagccagaagtccagcgagtaccccatcagccagaaccccgagggcctctccgccgacaagttcgaggtgagcgccgactccagcacctccaagaacaaggagcccggggtcgagcgcagctccccgagcaagtgcccctccctggacgaccggtggtacatgcacagctgctccggcagcctgcagaaccgcaactacccctcccaggaggagctcatcaaggtggtggacgtcgaggagcagcagctggaggagagcggcccccacgacctgaccgagacgtcctacctcccgcggcaggacctggaggggaccccctacctggagagcggcatcagcctcttctccgacgaccccgagagcgacccctccgaggaccgcgccccggagagcgcccgggtggggaacatcccctccagcacctccgcgctgaaggtgccccagctgaaggtcgccgagagcgcccagtcccccgccgccgcgcacaccacggacaccgccggctacaacgccatggaggagagcgtgtcccgcgagaagccggagctcaccgccagcaccgagcgggtgaacaagcgcatgtccatggtcgtgagcggcctgacgcccgaggagttcatgctggtctacaagttcgcccgcaagcaccacatcaccctgaccaacctcatcaccgaggagacgacccacgtggtgatgaagaccgacgcggagttcgtctgcgagcggaccctgaagtacttcctggggatcgccggcgggaagtgggtggtgtcctacttctgggtcacccagagcatcaaggagcgcaagatgctcaacgagcacgacttcgaggtgcggggcgacgtggtcaacgggcgcaaccaccagggccccaagcgggcccgcgagtcccaggaccggaagatcttccgcggcctggagatctgctgctacgggccgttcacgaacatgcccaccgaccagctggagtggatggtgcagctctgcggcgccagcgtggtcaaggagctgtccagcttcaccctggggaccggcgtgcaccccatcgtggtcgtgcagcccgacgcgtggacggaggacaacgggttccacgccatcggccagatgtgcgaggccccggtggtcacccgggagtgggtgctcgacagcgtggccctgtaccagtgccaggagctggacacctacctcatcccccagatcccccactcccactactga

SEQ ID NO: 1047 - RNA, 2160 nt, synthetic construct
  misc_feature 1..2160: note = EAW60922_variant
  source 1..2160: mol_type = other RNA
atggacctgagcgccctccgcgtggaggaggtccagaacgtgatcaacgccatgcagaagatcctggagtgccccatctgcctggagctcatcaaggagccggtgtccaccaagtgcgaccacatcttctgcaagttctgcatgctgaagctgctcaaccagaagaagggccccagccagtgccccctgtgcaagaacgacatcaccaagcggtccctgcaggagagcacgcgcttctcccagctcgtcgaggagctgctgaagatcatctgcgcgttccagctcgacaccgggctggagtacgccaacagctacaacttcgccaagaaggagaacaactcccccgagcacctgaaggacgaggtgagcatcatccagtccatgggctaccggaaccgcgccaagcggctcctgcagagcgagccggagaacccctccctgcaggagaccagcctctccgtgcagctgagcaacctggggaccgtccgcacgctccggaccaagcagcgcatccagccccagaagacctccgtgtacatcgagctggccgcgtgcgagttcagcgagaccgacgtgacgaacaccgagcaccaccagccctccaacaacgacctgaacaccaccgagaagcgggccgccgagcgccacccggagaagtaccagggcgaggccgcgagcgggtgcgagtccgagacgagcgtcagcgaggactgctccggcctcagctcccagagcgacatcctgaccacccagcagcgggacaccatgcagcacaacctgatcaagctccagcaggagatggccgagctggaggccgtgctggagcagcacggctcccagcccagcaactcctaccccagcatcatctccgacagctccgccctcgaggacctgcgcaaccccgagcagagcacgtccgagaaggccgtgctgaccagccagaagtccagcgagtacccgatctcccagaaccccgaggggctcagcgcggacaagttcgaggtctccgccgacagcagcacctccaagaacaaggagcccggcgtggagcggagctcccccagcaagtgcccgtccctggacgaccgctggtacatgcacagctgctccgggagcctgcagaaccggaactacccctcccaggaggagctcatcaaggtggtcgacgtggaggagcagcagctggaggagagcggcccccacgacctgaccgagacgtcctacctcccccgccaggacctggaggggaccccgtacctggagagcggcatctccctcttcagcgacgaccccgagtccgaccccagcgaggaccgggcccccgagtccgcccgcgtgggcaacatcccgagcagcacctccgccctgaaggtcccccagctgaaggtggcggagagcgcccagtcccccgccgccgcccacaccacggacaccgcggggtacaacgccatggaggagagcgtgtcccgggagaagcccgagctcaccgccagcaccgagcgcgtcaacaagcggatgtccatggtggtgagcggcctgacgccggaggagttcatgctggtctacaagttcgcccgcaagcaccacatcaccctcaccaacctgatcaccgaggagacgacccacgtggtcatgaagaccgacgccgagttcgtgtgcgagcgcaccctgaagtacttcctggggatcgcgggcggcaagtgggtggtctcctacttctgggtgacgcagagcatcaaggagcggaagatgctcaacgagcacgacttcgaggtgcgcggggacgtcgtgaacggccggaaccaccaggggcccaagcgcgcccgggagtcccaggaccgcaagatcttccggggcctggagatctgctgctacgggcccttcaccaacatgccgaccgaccagctggagtggatggtgcagctctgcggcgccagcgtcgtgaaggagctgtccagcttcaccctgggcaccggggtgcaccccatcgtcgtggtgcagcccgacgcctggacggaggacaacggcttccacgcgatcgggcagatgtgcgaggcccccgtcgtgacccgcgagtgggtgctcgactccgtcgccctgtaccagtgccaggagctggacacctacctcatcccgcagatcccccacagccactactga

SEQ ID NO: 1048 - RNA, 2166 nt, synthetic construct
  misc_feature 1..2166: note = EAW60923_variant
  source 1..2166: mol_type = other RNA
atggacctgagcgccctccgcgtggaggaggtccagaacgtgatcaacgccatgcagaagatcctggagtgccccatctgcctggagctcatcaaggagccggtgtccaccaagtgcgaccacatcttctgcaagttctgcatgctgaagctgctcaaccagaagaagggccccagccagtgccccctgtgcaagaacgacatcaccaagcggtccctgcaggagagcacgcgcttctcccagctcgtcgaggagctgctgaagatcatctgcgcgttccagctcgacaccgggctggagtacgccaacagctacaacttcgccaagaaggagaacaactcccccgagcacctgaaggacgaggtgagcatcatccagtccatgggctaccggaaccgcgccaagcggctcctgcagagcgagccggagaacccctccctgcaggagaccagcctctccgtgcagctgagcaacctggggaccgtccgcacgctccggaccaagcagcgcatccagccccagaagacctccgtgtacatcgagctgggcagcgactccagcgaggacaccgtgaacaaggccacgtactgctccgtcggggaccaggagctgctccagatcacgccccagggcacccgggacgagatcagcctggacagcgcgaagaagggcgaggccgcctccgggtgcgagagcgagacctccgtgagcgaggactgctccggcctgagctcccagagcgacatcctcaccacccagcagcgcgacaccatgcagcacaacctgatcaagctgcagcaggagatggccgagctcgaggcggtgctggagcagcacgggtcccagccgagcaactcctaccccagcatcatctccgacagctccgccctggaggacctccggaaccccgagcagagcacctccgagaaggccgtcctgacgagccagaagtccagcgagtaccccatcagccagaacccggagggcctgtccgccgacaagttcgaggtgagcgccgactccagcacctccaagaacaaggagcccggggtggagcgcagctcccccagcaagtgcccctccctcgacgaccggtggtacatgcacagctgctccggcagcctgcagaaccgcaactacccgtcccaggaggagctgatcaaggtcgtggacgtggaggagcagcagctcgaggagagcggcccccacgacctgaccgagacctcctacctgccccggcaggacctcgaggggacgccctacctggagagcggcatctccctgttcagcgacgacccggagagcgacccctccgaggaccgcgcgcccgagagcgcccgggtcgggaacatcccctccagcacctccgccctcaaggtgccgcagctgaaggtggccgagagcgcccagtcccccgcggccgcccacaccaccgacacggccggctacaacgccatggaggagagcgtctcccgcgagaagcccgagctgaccgcgagcaccgagcgggtgaacaagcgcatgtccatggtggtcagcggcctcacccccgaggagttcatgctggtgtacaagttcgcccggaagcaccacatcacgctgaccaacctgatcaccgaggagaccacgcacgtcgtgatgaagaccgacgccgagttcgtgtgcgagcgcaccctcaagtacttcctggggatcgccggcgggaagtgggtcgtgtcctacttctgggtgacccagagcatcaaggagcgcaagatgctgaacgagcacgacttcgaggtccggggcgacgtggtgaacgggcgcaaccaccagggcccgaagcgggcccgcgagtcccaggaccggaagatcttccgcggcctcgagatctgctgctacgggcccttcacgaacatgcccaccgaccagctggagtggatggtccagctgtgcggcgcgagcgtggtgaaggagctctccagcttcaccctggggaccggcgtccacccgatcgtggtggtccagcccgacgcctggaccgaggacaacgggttccacgccatcggccagatgtgcgaggcccccgtggtgacgcgggagtgggtcctggactccgtggcgctctaccagtgccaggagctggacacctacctgatcccccagatcccgcacagccactactga

SEQ ID NO: 1049 - RNA, 36 nt, synthetic construct
  misc_feature 1..36: note = AIC83575_variant
  source 1..36: mol_type = other RNA
atggacctgagcgccctccgcgtggaggaggtctga

SEQ ID NO: 1050 - RNA, 522 nt, synthetic construct
  misc_feature 1..522: note = ABC59810_variant
  source 1..522: mol_type = other RNA
atggacgccgagttcgtgtgcgagcgcaccctgaagtacttcctcggcatcgccgggggcaagtgggtcgtgagctacttctgggtgacccagtccatcaaggagcggaagatgctgaacgagcacgacttcgaggtccgcggggacgtggtgaacggccggaaccaccaggggcccaagcgcgcgcgggagagccaggaccgcaagatcttccggggcctggagatctgctgctacggcccgttcacgaacatgcccaccgaccagctcgagtggatggtccagctgtgcggggcctccgtggtgaaggagctgagctccttcaccctcggcaccggggtccaccccatcgtggtggtccagcccgacgcctggacggaggacaacggcttccacgccatcgggcagatgtgcgaggccccggtggtgacccgcgagtgggtcctggacagcgtggcgctgtaccagtgccaggagctcgacacctacctgatcccccagatcccccactcccactactga

SEQ ID NO: 1051 - RNA, 1065 nt, synthetic construct
  misc_feature 1..1065: note = ABC88652_variant
  source 1..1065: mol_type = other RNA
atgcacagctgctccggcagcctgcagaaccgcaactacccctcccaggaggagctcatcaaggtggtcgacgtggaggagcagcagctggaggagagcgggccgcacgacctgaccgagacctcctacctcccccggcaggacctggagggcacgccctacctggagagcgggatctccctcttcagcgacgaccccgagtccgacccgagcgaggaccgcgcccccgagtccgcccgggtgggcaacatccccagctccaccagcgcgctgaaggtcccccagctgaaggtggccgagtccgcccaggggccggccgccgcgcacaccaccgacacggccggctacaacgccatggaggagagcgtgtcccgcgagaagcccgagctcaccgccagcaccgagcgggtcaacaagcgcatgtccatggtggtgagcggcctgacccccgaggagttcatgctggtctacaagttcgcgcggaagcaccacatcacgctcaccaacctgatcaccgaggagaccacgcacgtggtgatgaagaccgacgccgagttcgtctgcgagcgcaccctgaagtacttcctcgggatcgccggcgggaagtgggtggtgagctacttctgggtcacccagtccatcaaggagcggaagatgctgaacgagcacgacttcgaggtgcgcggcgacgtggtcaacgggcggaaccaccagggccccaagcgcgcccgggagagccaggaccgcaagatcttccggggcctggagatctgctgctacgggccgttcacgaacatgcccaccgaccagctcgagtggatggtgcagctgtgcggcgcctccgtggtcaaggagctgagctccttcaccctcgggaccggcgtgcaccccatcgtggtcgtgcagcccgacgcgtggacggaggacaacggcttccacgccatcgggcagatgtgcgagaccccggtcgtgacccgcgagtgggtgctggacagcgtcgccctgtaccagtgccaggagctcgacacctacctgatcccccagatcccccactcccactactga

SEQ ID NO: 1052 - RNA, 2043 nt, synthetic construct
  misc_feature 1..2043: note = EAW60939_variant
  source 1..2043: mol_type = other RNA
atggacctgagcgccctccgcgtggaggaggtccagaacgtgatcaacgccatgcagaagatcctggagtgccccatctgcctggagctcatcaaggagccggtgtccaccaagtgcgaccacatcttctgcaagttctgcatgctgaagctgctcaaccagaagaagggccccagccagtgccccctgtgcaagaacgacatcaccaagcggtccctgcaggagagcacgcgcttctcccagctcgtcgaggagctgctgaagatcatctgcgcgttccagctcgacaccgggctggagtacgccaacagctacaacttcgccaagaaggagaacaactcccccgagcacctgaaggacgaggtgagcatcatccagtccatgggctaccggaaccgcgccaagcggctcctgcagagcgagccggagaacccctccctgcaggagaccagcctctccgtgcagctgagcaacctggggaccgtccgcacgctccggaccaagcagcgcatccagccccagaagacctccgtgtacatcgagctgggcgaggccgcgagcgggtgcgagtccgagaccagcgtgtccgaggactgcagcggcctgagctcccagagcgacatcctcacgacccagcagcgggacaccatgcagcacaacctgatcaagctgcagcaggagatggccgagctcgaggccgtcctggagcagcacggctcccagcccagcaactcctacccgagcatcatctccgacagctccgccctggaggacctccgcaaccccgagcagagcacctccgagaaggcggtgctgacgagccagaagtccagcgagtaccccatctcccagaaccccgaggggctgagcgccgacaagttcgaggtgtccgccgacagctccaccagcaagaacaaggagccgggcgtcgagcggagctcccccagcaagtgcccctccctcgacgaccgctggtacatgcacagctgctccgggagcctgcagaaccggaactacccctcccaggaggagctgatcaaggtggtggacgtcgaggagcagcagctcgaggagagcggcccgcacgacctgaccgagacctcctacctgccccgccaggacctcgaggggacgccctacctggagagcggcatctccctgttcagcgacgaccccgagtccgacccgagcgaggaccgggcccccgagtccgcccgcgtgggcaacatccccagctccaccagcgcgctcaaggtgccccagctgaaggtcgccgagagcgcccagtccccggccgccgcgcacaccaccgacacggccgggtacaacgccatggaggagagcgtgtcccgggagaagcccgagctgaccgccagcaccgagcgcgtgaacaagcggatgtccatggtcgtgagcggcctcacccccgaggagttcatgctggtgtacaagttcgcccgcaagcaccacatcacgctgaccaacctcatcaccgaggagaccacgcacgtcgtgatgaagaccgacgcggagttcgtctgcgagcggaccctgaagtacttcctggggatcgccggcggcaagtgggtggtgtcctacttctgggtcacccagagcatcaaggagcgcaagatgctgaacgagcacgacttcgaggtgcgcggggacgtggtcaacggccggaaccaccaggggcccaagcgcgcccgggagtcccaggaccgcaagatcttccggggcctcgagatctgctgctacgggccgttcacgaacatgcccaccgaccagctggagtggatggtgcagctgtgcggcgccagcgtggtcaaggagctctccagcttcaccctgggcaccggggtgcaccccatcgtggtcgtgcagccggacgcctggacggaggacaacggcttccacgcgatcgggcagatgtgcgaggcccccgtggtcacccgcgagtgggtgctggactccgtggccctctaccagtgccaggagctggacacctacctgatcccccagatcccccacagccactactga

SEQ ID NO: 1053 - RNA, 546 nt, synthetic construct
  misc_feature 1..546: note = AAC72302_variant
  source 1..546: mol_type = other RNA
atgctgctcgagcccggccgcgggtgctgcgccctggccatcctgctcgcgatcgtggacatccagagcggcgggtgcatcaacatcacctccagcgcctcccaggagggcacccggctgaacctgatctgcacggtctggcacaagaaggaggaggccgaggggttcgtggtgttcctctgcaaggaccgcagcggcgactgctccccggagaccagcctgaagcagctgcggctcaagcgcgaccccggcatcgacggggtcggcgagatctccagccagctgatgttcaccatctcccaggtgacgcccctgcacagcgggacctaccagtgctgcgcccggtcccagaagtccggcatccgcctccaggggcacttcttcagcatcctgttcaccgagaccggcaactacaccgtgacgggcctgaagcagcggcagcacctcgagttcagccacaacgaggggaccctgtccagcggcttcctgcaggagaaggtctgggtgatgctcgtgacctccctggtcgccctgcaggcgctctga

SEQ ID NO: 1054 - RNA, 639 nt, synthetic construct
  misc_feature 1..639: note = BAG58223_variant
  source 1..639: mol_type = other RNA
atgctgctcagcgtgtacttcaaggagcagttcctggacggcgacgggtggacctcccgctggatcgagagcaagcacaagtccgacttcggcaagttcgtcctgagctccgggaagttctacggcgacgaggagaaggacaaggggctccagaccagccaggacgcccggttctacgccctgtccgcgagcttcgagcccttctccaacaagggccagacgctggtggtgcagttcaccgtcaagcacgagcagaacatcgactgcggcgggggctacgtgaagctgttcccgaacagcctcgaccagaccgacatgcacggggactccgagtacaacatcatgttcggccccgacatctgcgggcccggcaccaagaaggtgcacgtcatcttcaactacaagggcaagaacgtgctgatcaacaaggacatccgctgcaaggacgacgagttcacgcacctctacaccctgatcgtgcggcccgacaacacctacgaggtcaagatcgacaacagccaggtggagtccgggagcctggaggacgactgggacttcctcccgcccaagaagatcaaggaccccgacgcctccaagcccgaggactgggacgagcgcgccaagatcgacgacccgtga

SEQ ID NO: 1055 - RNA, 891 nt, synthetic construct
  misc_feature 1..891: note = BAG65301_variant
  source 1..891: mol_type = other RNA
atgcacggcgacagcgagtacaacatcatgttcgggcccgacatctgcggcccggggaccaagaaggtgcacgtcatcttcaactacaagggcaagaacgtgctgatcaacaaggacatccgctgcaaggacgacgagttcacccacctctacacgctgatcgtgcggcccgacaacacctacgaggtcaagatcgacaactcccaggtggagagcgggtccctggaggacgactgggacttcctcccgcccaagaagatcaaggaccccgacgccagcaagcccgaggactgggacgagcgcgccaagatcgacgaccccaccgactccaagcccgaggactgggacaagccggagcacatccccgaccccgacgcgaagaagcccgaggactgggacgaggagatggacggcgagtgggagccgcccgtgatccagaaccccgagtacaagggcgagtggaagccccggcagatcgacaacccggactacaaggggacctggatccaccccgagatcgacaaccccgagtacagccccgacccgtccatctacgcctacgacaacttcggcgtcctggggctggacctctggcaggtcaagagcggcacgatcttcgacaacttcctgatcaccaacgacgaggcctacgccgaggagttcgggaacgagacctggggcgtgaccaaggccgcggagaagcagatgaaggacaagcaggacgaggagcagcgcctgaaggaggaggaggaggacaagaagcggaaggaggaggaggaggccgaggacaaggaggacgacgaggacaaggacgaggacgaggaggacgaggaggacaaggaggaggacgaggaggaggacgtgcccggccaggccaaggacgagctctga

SEQ ID NO: 1056 - RNA, 1254 nt, synthetic construct
  misc_feature 1..1254: note = AAA36582_variant
  source 1..1254: mol_type = other RNA
atgctgctcagcgtgcccctgctgctcggcctgctggggctcgccgtcgccgagccggcggtgtacttcaaggagcagttcctggacggcgacgggtggacctcccgctggatcgagagcaagcacaagtccgacttcggcaagttcgtgctgagctccgggaagttctacggcgacgaggagaaggacaagggcctccagaccagccaggacgcccggttctacgccctgtccgccagcttcgagcccttctccaacaaggggcagacgctggtcgtgcagttcaccgtgaagcacgagcagaacatcgactgcggcgggggctacgtcaagctgttccccaacagcctcgaccagaccgacatgcacggggactccgagtacaacatcatgttcggccccgacatctgcggcccggggaccaagaaggtgcacgtgatcttcaactacaagggcaagaacgtcctgatcaacaaggacatccgctgcaaggacgacgagttcacgcacctctacaccctgatcgtgcggcccgacaacacctacgaggtgaagatcgacaacagccaggtcgagtccgggagcctggaggacgactgggacttcctcccgcccaagaagatcaaggaccccgacgcctccaagcccgaggactgggacgagcgcgcgaagatcgacgaccccaccgacagcaagcccgaggactgggacaagccggagcacatccccgaccccgacgccaagaagcccgaggactgggacgaggagatggacggcgagtgggagccgcccgtgatccagaaccccgagtacaagggcgagtggaagccccggcagatcgacaacccggactacaaggggacgtggatccaccccgagatcgacaaccccgagtactcccccgacccgagcatctacgcctacgacaacttcggcgtgctggggctggacctctggcaggtcaagtccggcaccatcttcgacaacttcctgatcaccaacgacgaggcctacgcggaggagttcgggaacgagacctggggcgtgacgaaggccgccgagaagcagatgaaggacaagcaggacgaggagcagcgcctgaaggaggaggaggaggacaagaagcggaaggaggaggaggaggccgaggacaaggaggacgacgaggacaaggacgaggacgaggaggacgaggaggacaaggaggaggacgaggaggaggacgtgcccggccaggccaaggacgagctctga

SEQ ID NO: 1057 - RNA, 1155 nt, synthetic construct
  misc_feature 1..1155: note = BAB71655_variant
  source 1..1155: mol_type = other RNA
atggcccgcgccctggtgcagctctgggcgatctgcatgctgcgggtggccctggccaccgtgtacttccaggaggagttcctcgacggcgagcactggcgcaaccggtggctgcagagcaccaacgactcccgcttcgggcacttccggctgagctccggcaagttctacgggcacaaggagaaggacaagggcctccagacgacccagaacgggcgcttctacgccatcagcgcccggttcaagcccttctccaacaagggcaagaccctggtgatccagtacaccgtcaagcacgagcagaagatggactgcggcgggggctacatcaaggtgttcccggcggacatcgaccagaagaacctgaacggcaagagccagtactacatcatgttcgggcccgacatctgcgggttcgacatcaagaaggtgcacgtcatcctccacttcaagaacaagtaccacgagaacaagaagctgatccgctgcaaggtggacggcttcacgcacctgtacaccctcatcctgcggcccgacctgtcctacgacgtgaagatcgacggccagagcatcgagtccgggagcatcgagtacgactggaacctcacctccctgaagaaggagaccagccccgccgagtccaaggactgggagcagacgaaggacaacaaggcccaggactgggagaagcacttcctggacgccagcacctccaagcagagcgactggaacggcgacctcgacggggactggccggcgcccatgctgcagaagccgccctaccaggacggcctgaagcccgagggcatccacaaggacgtctggctccaccgcaagatgaagaacaccgactacctgacccagtacgacctgtccgagttcgagaacatcggggccatcggcctcgagctgtggcaggtccggagcgggacgatcttcgacaacttcctgatcaccgacgacgaggagtacgccgacaacttcggcaaggccacctggggcgagaccaaggggcccgagcgcgagatggacgccatccaggcgaaggaggagatgaagaaggcccgggaggaggaggaggaggagctcctgtccggcaagatcaaccgccacgagcactacttcaaccagttccaccggcgcaacgagctgtga

SEQ ID NO: 1058 - RNA, 330 nt, synthetic construct
  misc_feature 1..330: note = CAA10193_variant
  source 1..330: mol_type = other RNA
atgctgatggcccaggaggccctcgcgttcctgatggcccagggcgccatgctggccgcccaggagcgccgggtgccccgcgcggccgaggtcccgggggcccagggccagcaggggccccggggccgcgaggaggcgccccgcggggtgcggatggccgtgcccctcctgcggcgcatggagggcgccccggccggccccgggggccggaccgccgcctgcttcagctgcacctcccgctgcctgagccggcgcccctggaagcggtcctggagcgcggggtcctgccccggcatgccgcacctcagccccgaccaggggcgcttctga

SEQ ID NO: 1059 - RNA, 1440 nt, synthetic construct
  misc_feature 1..1440: note = CAA66853_variant
  source 1..1440: mol_type = other RNA
atggacttcagccgcaacctgtacgacatcggcgagcagctcgactccgaggacctggccagcctgaagttcctctccctggactacatcccccagcggaagcaggagccgatcaaggacgccctgatgctgttccagcgcctgcaggagaagcggatgctggaggagagcaacctctccttcctgaaggagctcctcttccgcatcaaccggctggacctgctcatcacctacctgaacacccgcaaggaggagatggagcgggagctgcagacgcccgggcgcgcgcagatcagcgcctaccgggtgatgctctaccagatctccgaggaggtcagccgctccgagctgcggagcttcaagttcctgctccaggaggagatctccaagtgcaagctggacgacgacatgaacctgctcgacatcttcatcgagatggagaagcgcgtgatcctgggcgaggggaagctggacatcctcaagcgggtgtgcgcccagatcaacaagagcctgctgaagatcatcaacgactacgaggagttctccaaggagcgcagctccagcctcgagggctcccccgacgagttcagcaacggggaggagctgtgcggcgtcatgaccatctccgacagcccccgggagcaggacagcgagtcccagaccctggacaaggtgtaccagatgaagtccaagccgcgcggctactgcctcatcatcaacaaccacaacttcgccaaggcccgggagaaggtgcccaagctgcacagcatccgcgaccggaacgggacccacctggacgcgggcgccctcacgaccaccttcgaggagctgcacttcgagatcaagccccacgacgactgcaccgtcgagcagatctacgagatcctgaagatctaccagctcatggaccacagcaacatggactgcttcatctgctgcatcctgtcccacggggacaagggcatcatctacgggacggacggccaggaggcccccatctacgagctgaccagccagttcaccggcctcaagtgcccgtccctggccgggaagcccaaggtgttcttcatccaggcgtgccagggcgacaactaccagaaggggatccccgtggagaccgacagcgaggagcagccctacctggagatggacctctccagcccgcagacgcgctacatccccgacgaggccgacttcctgctgggcatggccaccgtcaacaactgcgtgtcctaccggaaccccgccgagggcacctggtacatccagagcctctgccagtccctgcgcgagcgctgcccccgcggggacgacatcctgaccatcctgacggaggtgaactacgaggtcagcaacaaggacgacaagaagaacatgggcaagcagatgccgcagcccaccttcaccctccggaagaagctggtgttcccctccgactga

SEQ ID NO: 1060 - RNA, 1569 nt, synthetic construct
  misc_feature 1..1569: note = CCDS2340.1_variant
  source 1..1569: mol_type = other RNA
atgaagtcccagggccagcactggtacagcagctccgacaagaactgcaaggtgagcttccgcgagaagctgctcatcatcgactccaacctgggggtccaggacgtggagaacctgaagttcctctgcatcggcctggtgcccaacaagaagctggagaagtccagcagcgcctccgacgtcttcgagcacctcctggccgaggacctgctcagcgaggaggacccgttcttcctggcggagctgctctacatcatccggcagaagaagctgctgcagcacctcaactgcaccaaggaggaggtggagcgcctgctgcccacccggcagcgcgtgtccctcttccggaacctgctgtacgagctcagcgaggggatcgactccgagaacctgaaggacatgatcttcctgctcaaggacagcctgcccaagacggagatgacctccctgagcttcctcgccttcctggagaagcagggcaagatcgacgaggacaacctgacctgcctcgaggacctgtgcaagaccgtcgtgcccaagctgctccgcaacatcgagaagtacaagcgggagaaggccatccagatcgtgacgccgcccgtcgacaaggaggccgagtcctaccagggggaggaggagctggtgagccagaccgacgtgaagaccttcctggaggccctcccccaggagtcctggcagaacaagcacgcgggcagcaacggcaaccgcgccaccaacggggcccccagcctggtctcccggggcatgcagggggccagcgcgaacacgctgaactccgagaccagcaccaagcgcgccgccgtgtaccggatgaaccgcaaccaccggggcctctgcgtgatcgtcaacaaccactccttcaccagcctgaaggaccgccaggggacgcacaaggacgccgagatcctgtcccacgtgttccagtggctcggcttcaccgtgcacatccacaacaacgtcaccaaggtggagatggagatggtgctgcagaagcagaagtgcaacccggcccacgcggacggcgactgcttcgtcttctgcatcctgacccacgggcggttcggcgccgtgtacagctccgacgaggccctcatccccatccgcgagatcatgagccacttcacggccctgcagtgcccccggctggccgagaagcccaagctgttcttcatccaggcgtgccagggggaggagatccagccgtccgtgagcatcgaggccgacgccctcaaccccgagcaggcccccacctccctgcaggacagcatccccgccgaggcggacttcctgctcggcctggccaccgtcccgggctacgtgtccttccgccacgtcgaggaggggagctggtacatccagtccctgtgcaaccacctcaagaagctggtgccccggcacgaggacatcctgagcatcctcaccgccgtgaacgacgacgtctcccgccgggtggacaagcagggcacgaagaagcagatgccccagcccgccttcaccctgcgcaagaagctggtgttcccggtccccctcgacgccctgagcctgtga

SEQ ID NO: 1061 - RNA, 1020 nt, synthetic construct
  misc_feature 1..1020: note = EAW65632_variant
  source 1..1020: mol_type = other RNA
atgtggcagctgtgggccagcctctgctgcctgctggtgctcgccaacgcgcgctcccggcccagcttccacccgctgtccgacgagctggtcaactacgtgaacaagcgcaacaccacctggcaggccggccacaacttctacaacgtggacatgagctacctcaagcggctgtgcgggacgttcctgggcgggcccaagccgccccagcgcgtcatgttcaccgaggacctcaagctgcccgcctccttcgacgcccgggagcagtggccccagtgccccaccatcaaggagatccgcgaccagggcagctgcgggtcctgctgggccttcggcgcggtggaggccatcagcgaccggatctgcatccacaccaacgcccacgtgtccgtcgaggtgagcgccgaggacctgctcacgtgctgcggctccatgtgcggggacggctgcaacgggggctaccccgcggaggcctggaacttctggacccgcaaggggctggtgagcggcggcctgtacgagtcccacgtcgggtgccggccgtacagcatcccgccctgcgagcaccacgtgaacggctcccgcccgccctgcaccggggagggcgacacccccaagtgcagcaagatctgcgagcccggctactcccccacgtacaagcaggacaagcactacgggtacaacagctactccgtgagcaacagcgagaaggacatcatggccgagatctacaagaacggccccgtcgagggggccttctccgtgtacagcgacttcctcctgtacaagtccggcgtgtaccagcacgtcaccggggagatgatgggcggccacgccatccggatcctggggtggggcgtggagaacgggaccccctactggctcgtggcgaacagctggaacaccgactggggcgacaacgggttcttcaagatcctgcgcggccaggaccactgcggcatcgagtccgaggtcgtggccgggatcccccggacggaccagtactgggagaagatctga

SEQ ID NO: 1062 - RNA, 1020 nt, synthetic construct; identical to SEQ ID NO: 1061
  misc_feature 1..1020: note = AAC37547_variant
  source 1..1020: mol_type = other RNA

SEQ ID NO: 1063 - RNA, 1002 nt, synthetic construct
  misc_feature 1..1002: note = EAW62731_variant
  source 1..1002: mol_type = other RNA
atgaaccccaccctgatcctcgccgccttctgcctgggcatcgcgagcgccaccctgacgttcgaccactccctcgaggcccagtggaccaagtggaaggccatgcacaaccgcctgtacgggatgaacgaggagggctggcggcgcgccgtgtgggagaagaacatgaagatgatcgagctgcacaaccaggagtaccgggaggggaagcacagcttcaccatggcgatgaacgccttcggcgacatgacctccgaggagttccgccaggtcatgaacgggttccagaaccggaagccgcgcaagggcaaggtgttccaggagcccctcttctacgaggcgccccggagcgtggactggcgcgagaagggctacgtcacgcccgtgaagaaccaggggcagtgcggctcctgctgggccttcagcgccaccggggccctggagggccagatgttccggaagaccgggcgcctgatctccctcagcgagcagaacctggtggactgctccggcccgcagggcaacgaggggtgcaacggcgggctgatggactacgccttccagtacgtccaggacaacggcggcctcgacagcgaggagtcctacccctacgaggccaccgaggagagctgcaagtacaaccccaagtactccgtggccaacgacacggggttcgtggacatccccaagcaggagaaggcgctgatgaaggccgtcgccaccgtgggcccgatcagcgtggccatcgacgccgggcacgagtccttcctgttctacaaggagggcatctacttcgagcccgactgcagctccgaggacatggaccacggggtcctcgtggtgggctacggcttcgagagcaccgagtccgacaacaacaagtactggctggtcaagaacagctggggcgaggagtgggggatgggcgggtacgtgaagatggcgaaggaccggcgcaaccactgcgggatcgccagcgccgcctcctaccccaccgtgtga

SEQ ID NO: 1064 - RNA, 1002 nt, synthetic construct; identical to SEQ ID NO: 1063
  misc_feature 1..1002: note = AAA66974_variant
  source 1..1002: mol_type = other RNA

SEQ ID NO: 1065 - RNA, 456 nt, synthetic construct
  misc_feature 1..456: note = AAG17239_variant
  source 1..456: mol_type = other RNA
atggactacgccttccagtacgtgcaggacaacggcgggctggacagcgaggagtcctacccctacgaggccaccgaggagagctgcaagtacaacccgaagtactccgtcgcgaacgacaccggcttcgtggacatccccaagcaggagaaggccctcatgaaggccgtggccacggtcgggcccatcagcgtggccatcgacgcgggccacgagtccttcctgttctacaaggaggggatctacttcgagcccgactgcagctccgaggacatggaccacggcgtgctggtcgtgggctacgggttcgagagcaccgagtccgacaacaacaagtactggctcgtgaagaacagctggggcgaggagtgggggatgggcgggtacgtcaagatggccaaggaccgccggaaccactgcggcatcgcctccgccgcgagctacccgaccgtgtga

SEQ ID NO: 1066 - RNA, 984 nt, synthetic construct
  misc_feature 1..984: note = AAA51932_variant
  source 1..984: mol_type = other RNA
atgctgttcctcctgctgcccctcctggccgtgctgccgggcgacgggaacgccgacggcctcaaggagcccctgagcttccacgtcacctggatcgcgtccttctacaaccacagctggaagcagaacctggtgtccgggtggctcagcgacctgcagacccacacgtgggactccaacagctccaccatcgtgttcctgtgcccctggagccgcggcaacttctccaacgaggagtggaaggagctcgagaccctgttccggatccgcaccatccggagcttcgaggggatccgccggtacgcccacgagctgcagttcgagtaccccttcgagatccaggtcacgggcggctgcgagctccactccgggaaggtgagcggctccttcctgcagctggcctaccaggggagcgacttcgtgtccttccagaacaacagctggctcccgtaccccgtcgccggcaacatggccaagcacttctgcaaggtgctgaaccagaaccagcacgagaacgacatcacccacaacctgctctccgacacgtgcccccgcttcatcctggggctgctcgacgcgggcaaggcccacctccagcgccaggtgaagcccgaggcctggctgagccacggcccgtcccccgggcccggccacctccagctggtctgccacgtgagcgggttctaccccaagccggtgtgggtcatgtggatgcggggcgagcaggagcagcagggcacccagcgcggggacatcctgcccagcgccgacggcacctggtacctgcgggcgaccctggaggtggccgccggggaggccgccgacctgtcctgccgggtgaagcacagctccctcgagggccaggacatcgtcctgtactgggagcaccacagctccgtggggttcatcatcctggcggtgatcgtccccctcctgctgctcatcggcctggccctgtggttccgcaagcggtgcttctgctga

SEQ ID NO: 1067 - RNA, 1002 nt, synthetic construct
  misc_feature 1..1002: note = AAA51939_variant
  source 1..1002: mol_type = other RNA
atgctgctcctgcccttccagctgctcgccgtgctgttcccgggcgggaacagcgagcacgccttccagggccccacctccttccacgtcatccagaccagctccttcacgaacagcacctgggcgcagacccaggggtccggctggctggacgacctccagatccacgggtgggacagcgactccggcaccgccatcttcctgaagccctggagcaagggcaacttctccgacaaggaggtggccgagctggaggagatcttccgcgtgtacatcttcgggttcgcccgggaggtccaggacttcgccggcgacttccagatgaagtaccccttcgagatccaggggatcgcgggctgcgagctccacagcgggggcgccatcgtgtccttcctgcgcggcgccctcgggggcctggacttcctgagcgtgaagaacgcctcctgcgtcccgagccccgagggcgggtcccgggcgcagaagttctgcgccctgatcatccagtaccagggcatcatggagacggtgcgcatcctcctgtacgagacctgcccccggtacctgctcggggtgctgaacgccggcaaggccgacctgcagcgccaggtcaagcccgaggcctggctcagctccgggccgagccccggccccgggcggctgcagctggtgtgccacgtgtccggcttctaccccaagccggtctgggtgatgtggatgcgcggcgagcaggagcagcaggggacccagctcggcgacatcctgcccaacgcgaactggacctggtacctgcgggccacgctcgacgtggccgacggggaggccgccggcctgagctgccgcgtcaagcacagctccctggaggggcaggacatcatcctctactggcggaaccccaccagcatcggctccatcgtgctggcgatcatcgtgcccagcctgctcctgctgctctgcctggccctgtggtacatgcgccggcgctcctaccagaacatcccgtga

SEQ ID NO: 1068 - RNA, 1002 nt, synthetic construct
  misc_feature 1..1002: note = AAI26466_variant
  source 1..1002: mol_type = other RNA
atgctgttcctccagttcctgctgctcgccctgctgctccccggcggggacaacgccgacgcgagccaggagcacgtgtccttccacgtcatccagatcttcagcttcgtgaaccagtcctgggcccgcggccaggggagcggctggctggacgagctgcagacccacgggtgggactccgagagcggcaccatcatcttcctccacaactggtccaagggcaacttcagcaacgaggagctgtccgacctggagctcctgttccggttctacctgttcgggctcacgcgcgagatccaggaccacgccagccaggactactccaagtacccgttcgaggtgcaggtcaaggccggctgcgagctgcacagcgggaagtcccccgagggcttcttccaggtggccttcaacgggctggacctcctgagcttccagaacaccacctgggtgccctcccccggctgcggcagcctggcgcagtccgtctgccacctcctgaaccaccagtacgagggggtgaccgagacggtgtacaacctgatccggagcacgtgcccgcgcttcctcctgggcctgctcgacgccgggaagatgtacgtccaccgccaggtgcggcccgaggcctggctgtccagccggcccagcctgggctccggccagctcctgctggtgtgccacgccagcgggttctaccccaagccggtctgggtgacctggatgcgcaacgagcaggagcagctcggcaccaagcacggggacatcctgcccaacgcggacggcacctggtacctccaggtgatcctggaggtcgcctccgaggagcccgccgggctgagctgccgggtgcgccactccagcctgggcggccaggacatcatcctctactgggggcaccacttctccatgaactggatcgccctggtggtcatcgtgcccctggtgatcctcatcgtcctggtgctgtggttcaagaagcactgcagctaccaggacatcctctga

SEQ ID NO: 1069 - RNA, 1008 nt, synthetic construct
  misc_feature 1..1008: note = AAA59672_variant
  source 1..1008: mol_type = other RNA
atgggctgcctcctgttcctgctgctctgggccctgctgcaggcctgggggagcgcggaggtgccccagcgcctcttcccgctgcggtgcctgcagatctccagcttcgccaactccagctggacccgcaccgacggcctcgcctggctgggggagctgcagacgcactcctggagcaacgactccgacaccgtccggagcctcaagccctggtcccagggcaccttcagcgaccagcagtgggagaccctgcagcacatcttccgcgtgtaccggtccagcttcacgcgcgacgtgaaggagttcgccaagatgctgcggctctcctaccccctggagctgcaggtcagcgccgggtgcgaggtgcaccccggcaacgcgtccaacaacttcttccacgtggccttccagggcaaggacatcctcagcttccaggggacctcctgggagccgacccaggaggcgcccctgtgggtcaacctggccatccaggtgctcaaccaggacaagtggacccgcgagacggtgcagtggctgctgaacgggacctgcccccagttcgtcagcgggctcctggagtccggcaagagcgagctgaagaagcaggtcaagcccaaggcctggctcagccgggggccgtcccccggccccggccgcctgctgctcgtgtgccacgtgagcgggttctaccccaagccggtgtgggtgaagtggatgcggggcgagcaggagcagcaggggacccagcccggcgacatcctgcccaacgccgacgagacctggtacctgcgcgccacgctcgacgtcgtggccggcgaggccgcggggctgtcctgccgggtgaagcacagctccctggagggccaggacatcgtcctctactggggcggcagctacacctccatggggctgatcgccctggccgtgctcgcctgcctgctgttcctcctgatcgtgggcttcaccagccgcttcaagcggcagacctcctaccagggcgtcctgtga

SEQ ID NO: 1070 - RNA, 1167 nt, synthetic construct
  misc_feature 1..1167: note = EAW52830_variant
  source 1..1167: mol_type = other RNA
atgctgctcctgttcctcctgttcgagggcctgtgctgccccggggagaacaccgccgccccgcaggcgctgcagagctaccacctcgccgccgaggagcagctgtccttccgcatgctgcagaccagctccttcgccaaccacagctgggcccactccgagggcagcgggtggctcggcgacctgcagacgcacgggtgggacaccgtgctgggcaccatccggttcctcaagccctggtcccacggcaacttcagcaagcaggagctgaagaacctgcagtccctcttccagctgtacttccacagcttcatccagatcgtccaggcgtccgccgggcagttccagctggagtaccccttcgagatccagatcctcgccggctgccgcatgaacgcgccccagatcttcctgaacatggcctaccaggggagcgacttcctgtccttccagggcatcagctgggagccgtcccccggggccggcatccgggcccagaacatctgcaaggtgctcaaccgctacctggacatcaaggagatcctgcagagcctcctgggccacacgtgcccccggttcctggccgggctcatggaggccggcgagtccgagctgaagcgcaaggtgaagcccgaggcgtggctgagctgcgggccgtcccccggccccggccggctccagctggtctgccacgtgagcgggttctaccccaagccggtgtgggtcatgtggatgcgcggcgagcaggagcagcgggggacccagcgcggcgacgtgctgcccaacgccgacgagacctggtacctccgggccaccctggacgtggccgccggggaggcggccggcctgagctgccgcgtcaagcactccagcctcggcgggcacgacctgatcatccactggggcgggtactccatcttcctgatcctcatctgcctgaccgtgatcgtgacgctggtcatcctcgtggtggtcgacagccggctgaagaagcagtccagcaacaagaacatcctgagcccccacaccccctccccggtgttcctcatgggcgccaacacccaggacaccaagaactcccgccaccagttctgcctggcccaggtgagctggatcaagaaccgggtcctgaagaagtggaagacgcgcctcaaccagctgtggtga

SEQ ID NO: 1071 - RNA, 894 nt, synthetic construct
  misc_feature 1..894: note = AAA35581_variant
  source 1..894: mol_type = other RNA
atgaccacgccccgcaacagcgtgaacggcaccttcccggccgagcccatgaaggggcccatcgccatgcagtccggccccaagccgctgttccggcgcatgagctccctcgtcgggcccacccagagcttcttcatgcgggagtccaagaccctgggcgcggtgcagatcatgaacgggctgttccacatcgccctcggcggcctgctgatgatccccgccgggatctacgcccccatctgcgtgaccgtctggtacccgctctggggcgggatcatgtacatcatcagcggctccctgctggccgcgacggagaagaacagccgcaagtgcctcgtgaaggggaagatgatcatgaactccctgagcctgttcgccgccatctccggcatgatcctcagcatcatggacatcctgaacatcaagatctcccacttcctgaagatggagagcctcaacttcatccgggcccacaccccctacatcaacatctacaactgcgagcccgcgaacccctccgagaagaacagcccgtccacccagtactgctacagcatccagtccctgttcctgggcatcctcagcgtgatgctgatcttcgccttcttccaggagctggtcatcgccgggatcgtggagaacgagtggaagcggacctgcagccgccccaagtccaacatcgtgctcctgagcgccgaggagaagaaggagcagacgatcgagatcaaggaggaggtcgtgggcctgaccgagacctccagccagcccaagaacgaggaggacatcgagatcatccccatccaggaggaggaggaggaggagaccgagacgaacttcccggagccgccccaggaccaggagtccagccccatcgagaacgactccagcccctga

SEQ ID NO: 1072 - RNA, 1989 nt, synthetic construct
  misc_feature 1..1989: note = AAC18956_variant
  source 1..1989: mol_type = other RNA
atggagagcaagaccgagaagtggatggagcgcatccacctgaacgtgtccgagcggcccttcccgccccacatccagctcccgcccgagatccaggagagccaggaggtcaccctgacgtgcctgctcaacttctcctgctacggctaccccatccagctgcagtggctgctcgagggggtgcccatgcgccaggccgccgtgaccagcacctccctgaccatcaagagcgtcttcacgcggtccgagctgaagttcagcccccagtggtcccaccacggcaagatcgtgacctgccagctccaggacgcggacgggaagttcctgagcaacgacaccgtgcagctgaacgtcaagcacacccccaagctcgagatcaaggtgacgccgtccgacgccatcgtgcgcgagggcgacagcgtcaccatgacctgcgaggtgtccagcaccaaccccgagtacacgaccgtgtcctggctgaaggacgggaccagcctgaagaagcagaacaccttcacgctcaacctgcgggaggtcaccaaggaccagtccggcaagtactgctgccaggtgagcaacgacgtgggccccgggcgctccgaggaggtcttcctccaggtgcagtacgcccccgagccgagcaccgtgcagatcctgcacagccccgccgtcgagggctcccaggtggagttcctgtgcatgagcctggccaaccccctccccaccaactacacgtggtaccacaacgggaaggagatgcagggccggaccgaggagaaggtgcacatcccgaagatcctgccctggcacgcggggacctactcctgcgtcgccgagaacatcctgggcaccggccagcgcgggcccggcgccgagctcgacgtgcagtacccgcccaagaaggtgacgaccgtcatccagaaccccatgcccatccgggagggggacaccgtgaccctgagctgcaactacaactccagcaacccctccgtcacgcgctacgagtggaagccgcacggcgcctgggaggagcccagcctgggcgtgctcaagatccagaaggtggggtgggacaacaccaccatcgcgtgcgcccggtgcaactcctggtgcagctgggcctcccccgtcgccctgaacgtgcagtacgcgccccgcgacgtgcgggtccgcaagatcaagccgctgagcgagatccactccggcaacagcgtgtccctccagtgcgacttcagctccagccaccccaaggaggtgcagttcttctgggagaagaacgggcggctgctgggcaaggagtcccagctcaacttcgacagcatcagccccgaggacgccgggtcctacagctgctgggtcaacaactccatcggccagaccgccagcaaggcctggacgctggaggtgctgtacgccccgcgccggctccgcgtgtccatgagccccggcgaccaggtcatggaggggaagtccgccaccctgcggtgcgagagcgacgcgaacccgcccgtgtcccactacacctggttcgactggaacaaccagagcctgccctaccactcccagaagctccgcctggagcccgtgaaggtccagcacagcggcgcctactggtgccaggggaccaactccgtgggcaaggggcggagccccctgtccacgctcaccgtgtactacagccccgagaccatcggccgccgcgtcgccgtgggcctggggtcctgcctggccatcctcatcctggccatctgcggcctgaagctccagcggcgcgacgcggagagcagcgagatgcagcggccgccccggacctgcgacgacaccgtgacgtactccgccctgcacaagcgccaggtcggggactacgagaacgtgatccccgacttccccgaggacgagggcatccactacagcgagctgatccagttcggggtgggcgagcgcccgcaggcccaggagaacgtcgactacgtgatcctgaagcactga

SEQ ID NO: 1073 - RNA, 2544 nt, synthetic construct
  misc_feature 1..2544: note = AAB06448_variant
  source 1..2544: mol_type = other RNA
atgcacctcctcggcccctggctgctgctcctggtgctggagtacctcgccttcagcgactccagcaagtgggtcttcgagcacccggagaccctgtacgcctgggagggggcgtgcgtgtggatcccctgcacctaccgcgccctggacggcgacctcgagtccttcatcctgttccacaaccccgagtacaacaagaacacgagcaagttcgacgggacccggctgtacgagtccaccaaggacggcaaggtgcccagcgagcagaagcgcgtccagttcctcggggacaagaacaagaactgcaccctgtccatccacccggtgcacctgaacgacagcggccagctcggcctgcggatggagtccaagacggagaagtggatggagcgcatccacctgaacgtgagcgagcggcccttcccgccccacatccagctcccgcccgagatccaggagtcccaggaggtcaccctgacctgcctgctcaacttcagctgctacgggtaccccatccagctgcagtggctgctcgagggcgtgcccatgcgccaggccgccgtgacctccacgagcctgaccatcaagtccgtcttcacccggagcgagctgaagttctccccgcagtggagccaccacgggaagatcgtgacctgccagctccaggacgccgacggcaagttcctgtccaacgacacggtgcagctgaacgtcaagcacacccccaagctcgagatcaaggtgacccccagcgacgcgatcgtgcgcgagggggacagcgtcaccatgacgtgcgaggtgtccagctccaaccccgagtacaccaccgtgagctggctgaaggacggcacctccctgaagaagcagaacacgttcaccctcaacctgcgggaggtcaccaaggaccagagcggcaagtactgctgccaggtgtccaacgacgtggggcccggccgcagcgaggaggtcttcctccaggtgcagtacgcccccgagccctccaccgtgcagatcctgcacagccccgccgtcgaggggtcccaggtggagttcctgtgcatgagcctggccaacccgctccccacgaactacacctggtaccacaacggcaaggagatgcagggccggaccgaggagaaggtccacatccccaagatcctgccctggcacgcggggacctactcctgcgtggccgagaacatcctgggcacggggcagcgcggcccgggggccgagctcgacgtgcagtacccgcccaagaaggtcaccaccgtgatccagaaccccatgcccatccgggagggcgacaccgtgacgctgagctgcaactacaactccagcaacccctccgtcacccgctacgagtggaagccccacggcgcctgggaggagccgagcctgggggtgctcaagatccagaacgtgggctgggacaacaccaccatcgcctgcgcggcctgcaactcctggtgcagctgggccagccccgtcgccctgaacgtgcagtacgcgccccgggacgtgcgcgtccggaagatcaagcccctgtccgagatccacagcgggaactccgtgagcctccagtgcgacttctccagctcccacccgaaggaggtgcagttcttctgggagaagaacggccgcctgctggggaaggagagccagctgaacttcgactccatcagccccgaggacgccggctcctacagctgctgggtcaacaactccatcggccagacggccagcaaggcctggaccctcgaggtgctgtacgcgccccggcgcctgcgggtgtccatgagccccggggaccaggtcatggagggcaagtccgccaccctgacctgcgagagcgacgccaacccgcccgtgagccactacacctggttcgactggaacaaccagtccctgccctaccacagccagaagctgcgcctcgagcccgtgaaggtccagcactccggggcctactggtgccagggcacgaacagcgtggggaagggccgctccccgctgagcaccctgaccgtgtactactcccccgagaccatcggccggcgcgtcgccgtggggctcggcagctgcctggccatcctgatcctcgccatctgcgggctgaagctgcagcggcgctggaagcggacgcagtcccagcagggcctccaggagaacagctccggccagagcttcttcgtgcgcaacaagaaggtccggcgcgcgcccctgtccgaggggccccacagcctgggctgctacaacccgatgatggaggacgggatctcctacaccaccctccggttccccgagatgaacatcccccgcaccggcgacgccgagagctccgagatgcagcggcccccgcccgactgcgacgacacggtgacctacagcgccctgcacaagcgccaggtgggggactacgagaacgtcatccccgacttccccgaggacgagggcatccactactccgagctgatccagttcggcgtgggggagcggccgcaggcccaggagaacgtggactacgtcatcctcaagcactga

SEQ ID NO: 1074 - RNA, 2544 nt, synthetic construct; identical to SEQ ID NO: 1073
  misc_feature 1..2544: note = ABK41939_variant
  source 1..2544: mol_type = other RNA

SEQ ID NO: 1075 - RNA, 1605 nt, synthetic construct
  misc_feature 1..1605: note = CAE47548_variant
  source 1..1605: mol_type = other RNA
atgctgcgccggcgcggcagccccgggatgggcgtgcacgtcggggccgccctcggcgcgctgtggttctgcctgaccggggccctcgaggtccaggtgccggaggaccccgtggtggccctggtgggcaccgacgccacgctgtgctgctccttcagccccgagcccggcttctccctcgcccagctgaacctgatctggcagctcaccgacaccaagcagctggtccacagcttcgcggaggggcaggaccagggctccgcctacgccaaccggaccgccctgttcccggacctcctggcgcaggggaacgccagcctgcgcctccagcgggtgcgcgtggccgacgagggctccttcacgtgcttcgtcagcatccgggacttcgggtccgccgccgtgagcctccaggtggcggccccctactccaagcccagcatgaccctggagcccaacaaggacctgcgcccgggcgacaccgtcaccatcacgtgctccagctaccagggctaccccgaggccgaggtgttctggcaggacgggcagggcgtgcccctgaccgggaacgtcaccacctcccagatggccaacgagcagggcctgttcgacgtgcacagcatcctccgggtggtcctgggcgccaacgggacgtactcctgcctggtgcgcaaccccgtgctccagcaggacgcgcacagctccgtcaccatcaccccgcagcggagccccaccggcgccgtggaggtgcaggtccccgaggaccccgtggtcgccctggtggggacggacgccaccctgcgctgcagcttctccccggagcccggcttcagcctcgcccagctgaacctgatctggcagctcaccgacaccaagcagctggtgcactccttcacggaggggcgggaccagggcagcgcgtacgccaaccgcaccgccctgttccccgacctcctggcccagggcaacgcctccctgcggctccagcgcgtccgggtggcggacgaggggagcttcacgtgcttcgtgtccatccgcgacttcggcagcgccgccgtctccctccaggtggccgcgccctacagcaagccgtccatgaccctggagcccaacaaggacctgcggcccggggacaccgtgaccatcacgtgcagctcctaccgcggctaccccgaggccgaggtcttctggcaggacgggcagggcgtgccgctgaccggcaacgtgaccaccagccagatggccaacgagcaggggctgttcgacgtccactccgtgctccgggtggtcctgggcgccaacgggacctacagctgcctggtgcgcaaccccgtgctccagcaggacgcccacggctccgtcaccatcacggggcagcccatgaccttcccgcccgaggcgctgtgggtgaccgtgggcctgagcgtctgcctcatcgccctgctggtggccctggccttcgtgtgctggcgcaagatcaagcagtcctgcgaggaggagaacgccggcgcggaggaccaggacggggagggcgaggggagcaagaccgccctccagcccctgaagcacagcgactccaaggaggacgacggccaggagatcgcctga

SEQ ID NO: 1076 - RNA, 639 nt, synthetic construct
  misc_feature 1..639: note = BAG57312_variant
  source 1..639: mol_type = other RNA
atgcccctgctcctgctgctccccctgctgtgggccgacctcacccaccgccccaagatcctgatccccggcaccctggagcccgggcacagcaagaacctcacgtgctccgtgagctgggcctgcgagcagggcaccccgcccatcttctcctggctgagcgcggcccccacctccctggggccccggaccacgcacagctccgtcctcatcatcaccccgcgcccccaggaccacggcaccaacctgacctgccaggtgaagttcgccggggccggcgtgacgaccgagcggaccatccagctgaacgtcacctacgtgccccagaaccccacgaccggcatcttcccgggggacggcagcgggaagcaggagacccgcgccggcgtggtccacggggcgatcggcggcgccggggtgaccgccctcctggccctgtgcctctgcctgatcttcttcatcgtgaagacgcaccggcgcaaggcggcccggaccgccgtcggccgcaacgacacccaccccaccacggggtccgccagccccgtgtccgacggcgccagctggcaccccgtgtgcccggcggacacctccagccagtgcggcccgccctcctgccccatccagcacttccagaactga

SEQ ID NO: 1077 - RNA, 1095 nt, synthetic construct
  misc_feature 1..1095: note = AAK83654_variant
  source 1..1095: mol_type = other RNA
atgcccctgctcctgctgctcccgctgctgtgggccggcgccctcgcgatggaccccaacttctggctccaggtgcaggagagcgtcaccgtgcaggaggggctgtgcgtgctcgtcccctgcaccttcttccaccccatcccgtactacgacaagaactcccccgtgcacggctactggttccgcgagggggccatcatcagccgggactcccccgtggccacgaacaagctggaccaggaggtccaggaggagacccagggccgcttccggctgctcggggaccccagccgcaacaactgctccctgagcatcgtggacgcccggcgccgggacaacggctcctacttcttccgcatggagcggggcagcaccaagtactcctacaagagcccgcagctgtccgtgcacgtcaccgacctcacgcaccgccccaagatcctgatccccgggaccctggagcccggccacagcaagaacctgacctgctccgtgagctgggcctgcgagcaggggaccccgcccatcttctcctggctgagcgcggcccccacgtccctgggcccccggaccacccacagctccgtgctcatcatcaccccgcgcccccaggaccacgggacgaacctgacctgccaggtcaagttcgccggcgccggcgtgaccaccgagcggacgatccagctgaacgtgacctacgtcccccagaaccccaccaccgggatcttcccgggcgacgggagcggcaagcaggagacgcgcgcgggcgtggtgcacggggccatcggcggggccggcgtcaccgccctcctggccctgtgcctctgcctgatcttcttcatcgtgaagacccaccggcgcaaggcggcccggaccgccgtggggcgcaacgacacgcaccccaccaccggcagcgcctcccccaagcaccagaagaagtccaagctgcacggccccaccgagacgagcagctgctccggggccgcgccgaccgtcgagatggacgaggagctccactacgccagcctgaacttccacggcatgaacccctccaaggacaccagcaccgagtactccgaggtgcggacgcagtga

SEQ ID NO: 1078 - RNA, 1095 nt, synthetic construct; identical to SEQ ID NO: 1077
  misc_feature 1..1095: note = CAD36509_variant
  source 1..1095: mol_type = other RNA

SEQ ID NO: 1079 - RNA, 624 nt, synthetic construct
  misc_feature 1..624: note = AAA52295_variant
  source 1..624: mol_type = other RNA
atgcagagcggcacccactggcgcgtgctggggctctgcctgctgtccgtcggcgtgtgggggcaggacggcaacgaggagatgggcgggatcacccagacgccctacaaggtgagcatctccggcaccaccgtcatcctgacctgcccccagtaccccgggagcgagatcctctggcagcacaacgacaagaacatcggcggggacgaggacgacaagaacatcggctccgacgaggaccacctgagcctcaaggagttctccgagctggagcagagcgggtactacgtgtgctacccccggggctccaagcccgaggacgccaacttctacctgtacctccgcgcccgggtgtgcgagaactgcatggagatggacgtcatgagcgtggcgacgatcgtgatcgtcgacatctgcatcaccggcgggctgctgctcctggtgtactactggtccaagaaccgcaaggccaaggccaagccggtgacccggggcgccggggccggcggccgccagcgggggcagaacaaggagcgcccgccgcccgtccccaaccccgactacgagcccatccggaagggccagcgcgacctgtacagcgggctcaaccagcggcgcatctga

SEQ ID NO: 1080 - RNA, 495 nt, synthetic construct
  misc_feature 1..495: note = AAH25703_variant
  source 1..495: mol_type = other RNA
atgaagtggaaggccctgttcaccgccgcgatcctccaggcccagctgcccatcaccgaggcccagagcttcggcctgctcgaccccaagctgtgctacctgctcgacgggatcctgttcatctacggcgtgatcctgacggccctcttcctgcgcgtcaagttctcccggagcgccgacgcgcccgcctaccagcaggggcagaaccagctgtacaacgagctcaacctgggccgccgggaggagtacgacgtgctggacaagcgccgggggcgcgaccccgagatgggcggcaagccccagcggcgcaagaacccgcaggaggggctctacaacgagctgcagaaggacaagatggccgaggcctactccgagatcggcatgaagggggagcggcgccggggcaaggggcacgacggcctgtaccagggcctcagcaccgcgaccaaggacacctacgacgccctgcacatgcaggccctgccgccccgctga

SEQ ID NO: 1081 - RNA, 2229 nt, synthetic construct
  misc_feature 1..2229: note = CCDS7897.1_variant
  source 1..2229: mol_type = other RNA
atggacaagttctggtggcacgccgcctggggcctgtgcctcgtgcccctgagcctggcgcagatcgacctcaacatcacgtgccgcttcgccggggtcttccacgtggagaagaacggccggtactccatcagccgcaccgaggccgccgacctgtgcaaggccttcaactccaccctgccgaccatggcgcagatggagaaggccctcagcatcgggttcgagacctgccggtacggcttcatcgaggggcacgtggtcatcccccgcatccaccccaactccatctgcgccgccaacaacaccggcgtgtacatcctgacgagcaacacctcccagtacgacacctactgcttcaacgcgagcgcgcccccggaggaggactgcacctccgtgacggacctgcccaacgccttcgacggccccatcaccatcaccatcgtcaaccgggacgggacccgctacgtgcagaagggcgagtaccggacgaaccccgaggacatctacccgagcaaccccaccgacgacgacgtgtccagcgggtccagctccgagcgcagctccaccagcggcgggtacatcttctacaccttctccacggtccaccccatccccgacgaggacagcccgtggatcaccgacagcaccgaccggatccccgccaccacgctcatgtccaccagcgccaccgccaccgagacggccaccaagcgccaggagacctgggactggttctcctggctgttcctgcccagcgagtccaagaaccacctccacaccacgacccagatggccggcaccagctccaacaccatcagcgccggctgggagcccaacgaggagaacgaggacgagcgggaccgccacctgtccttcagcgggtccggcatcgacgacgacgaggacttcatcagctccacgatcagcaccaccccgcgggccttcgaccacaccaagcagaaccaggactggacgcagtggaacccctcccacagcaaccccgaggtgctgctccagaccaccacccgcatgaccgacgtggaccggaacgggacgaccgcgtacgagggcaactggaaccccgaggcccacccgcccctgatccaccacgagcaccacgaggaggaggagacgccccactccaccagcaccatccaggccaccccctccagcaccaccgaggagacggccacccagaaggagcagtggttcggcaaccgctggcacgaggggtaccggcagaccccgaaggaggacagccactccaccacgggcaccgccgcggccagcgcccacacctcccaccccatgcaggggcgcaccacgcccagccccgaggactccagctggaccgacttcttcaacccgatctcccaccccatgggccgggggcaccaggccggccgccggatggacatggacagctcccacagcatcaccctgcagcccaccgccaacccgaacacgggcctcgtcgaggacctggaccgcaccgggcccctgtccatgaccacccagcagagcaactcccagagcttctccacgagccacgagggcctcgaggaggacaaggaccaccccaccacctccaccctgacgagcagcaaccgcaacgacgtgaccgggggccggcgcgaccccaaccactccgaggggagcaccaccctgctcgagggctacacgtcccactacccgcacaccaaggagagccggaccttcatccccgtgacctccgcgaagacgggcagcttcggggtcaccgccgtgaccgtgggcgactccaacagcaacgtcaaccgctccctgagcggggaccaggacaccttccacccctccggcgggagccacaccacgcacggctccgagagcgacggccactcccacgggagccaggagggcggggccaacaccacctccggccccatccggaccccgcagatccccgagtggctgatcatcctcgccagcctgctggcgctcgccctgatcctggccgtgtgcatcgccgtgaactcccgccggcgctgcggccagaagaagaagctcgtcatcaacagcgggaacggcgccgtggaggaccggaagcccagcgggctgaacggcgaggcgtccaagagccaggagatggtgcacctggtcaacaaggagtccagcgagacgcccgaccagttcatgaccgccgacgagacccgcaacctccagaacgtggacatgaagatcggggtctga

SEQ ID NO: 1082 - RNA, 2100 nt, synthetic construct
  misc_feature 1..2100: note = XM_006718388.1_variant
  source 1..2100: mol_type = other RNA
atggacaagttctggtggcacgccgcctggggcctgtgcctcgtgcccctgagcctggcgcagatcgacctcaacatcacgtgccgcttcgccggggtcttccacgtggagaagaacggccggtactccatcagccgcaccgaggccgccgacctgtgcaaggccttcaactccaccctgccgaccatggcgcagatggagaaggccctcagcatcgggttcgagacctgccggtacggcttcatcgaggggcacgtggtcatcccccgcatccaccccaactccatctgcgccgccaacaacaccggcgtgtacatcctgacgagcaacacctcccagtacgacacctactgcttcaacgcgagcgcgcccccggaggaggactgcacctccgtgacggacctgcccaacgccttcgacggccccatcaccatcaccatcgtcaaccgggacgggacccgctacgtgcagaagggcgagtaccggacgaaccccgaggacatctacccgagcaaccccaccgacgacgacgtgtccagcgggtccagctccgagcgcagctccaccagcggcgggtacatcttctacaccttctccacggtccaccccatccccgacgaggacagcccgtggatcaccgacagcaccgaccggatccccgccaccacgctcatgtccaccagcgccaccgccaccgagacggccaccaagcgccaggagacctgggactggttctcctggctgttcctgcccagcgagtccaagaaccacctccacaccacgacccagatggccggcaccagctccaacaccatcagcgccggctgggagcccaacgaggagaacgaggacgagcgggaccgccacctgtccttcagcgggtccggcatcgacgacgacgaggacttcatcagctccacgatcagcaccaccccgcgggccttcgaccacaccaagcagaaccaggactggacgcagtggaacccctcccacagcaaccccgaggtgctgctccagaccaccacccgcatgaccgacgtggaccggaacgggacgaccgcgtacgagggcaactggaaccccgaggcccacccgcccctgatccaccacgagcaccacgaggaggaggagacgccccactccaccagcaccaccgcctccgcccacaccagccaccccatgcagggccgcaccacgccgagccccgaggactccagctggaccgacttcttcaaccccatctcccaccccatggggcggggccaccaggccgggcgccggatggacatggacagctcccacagcatcaccctgcagccgaccgcgaaccccaacacgggcctcgtcgaggacctggaccgcaccgggcccctgtccatgaccacccagcagagcaactcccagagcttctccacgagccacgagggcctcgaggaggacaaggaccacccgaccacctccaccctgacgagctccaaccggaacgacgtgaccggcgggcgccgcgaccccaaccacagcgagggctccaccaccctgctcgaggggtacacgagccactacccccacaccaaggagagccggaccttcatccccgtgacctccgccaagacgggcagcttcggggtcaccgccgtgaccgtgggcgactccaacagcaacgtcaaccgctccctgagcggcgaccaggacaccttccacccgtccgggggcagccacacgacccacgggtccgagagcgacggccactcccacgggagccaggagggcggcgccaacaccacctccgggcccatccggacgccccagatccccgagtggctgatcatcctcgccagcctgctggcgctcgccctgatcctggccgtgtgcatcgccgtgaactcccgccggcgctgcggccagaagaagaagctcgtcatcaacagcgggaacggcgcggtggaggaccggaagccgtccggcctgaacggggaggccagcaagtcccaggagatggtgcacctggtcaacaaggagagcagcgagacccccgaccagttcatgaccgccgacgagacccgcaacctccagaacgtggacatgaagatcggcgtctga

SEQ ID NO: 1083 - RNA, 1377 nt, synthetic construct
  misc_feature 1..1377: note = AAA35572_variant
  source 1..1377: mol_type = other RNA
atgaaccgcggcgtgcccttccggcacctcctcctggtcctgcagctcgccctgctgccggccgcgacccaggggaagaaggtggtgctcggcaagaagggggacaccgtcgagctgacgtgcaccgccagccagaagaagtccatccagttccactggaagaacagcaaccagatcaagatcctgggcaaccaggggtccttcctcaccaagggccccagcaagctgaacgaccgcgccgactcccggcgcagcctgtgggaccagggcaacttccccctcatcatcaagaacctgaagatcgaggactccgacacctacatctgcgaggtggaggaccagaaggaggaggtgcagctgctcgtcttcgggctgacggccaacagcgacacccacctcctgcagggccagtccctgaccctgaccctcgagagcccgcccgggtccagcccctccgtgcagtgccggagcccccgcggcaagaacatccagggcgggaagacgctgtccgtgagccagctggagctccaggactccggcacctggacctgcaccgtcctgcagaaccagaagaaggtggagttcaagatcgacatcgtggtcctggccttccagaaggcgagctccatcgtgtacaagaaggagggggagcaggtcgagttcagcttccccctcgccttcacggtggagaagctgaccggcagcggggagctgtggtggcaggccgagcgggcctccagctccaagagctggatcaccttcgacctcaagaacaaggaggtgtccgtgaagcgcgtcacccaggacccgaagctgcagatgggcaagaagctgcccctccacctgacgctgccccaggcgctcccccagtacgccggcagcgggaacctgaccctggccctcgaggccaagaccggcaagctgcaccaggaggtgaacctggtggtcatgcgggccacccagctccagaagaacctgacgtgcgaggtgtgggggccgacctcccccaagctgatgctcagcctgaagctggagaacaaggaggcgaaggtgtccaagcgcgagaaggccgtctgggtgctcaaccccgaggccggcatgtggcagtgcctgctgagcgactccgggcaggtcctgctcgagagcaacatcaaggtgctgcccacctggtccaccccggtgcagcccatggccctgatcgtcctcggcggcgtggccgggctgctgctgttcatcggcctggggatcttcttctgcgtgcggtgccgccaccggcgccggcaggcggagcgcatgagccagatcaagcggctgctctccgagaagaagacgtgccagtgcccccaccgcttccagaagacctgcagccccatctga

SEQ ID NO: 1084 - RNA, 186 nt, synthetic construct
  misc_feature 1..186: note = CAA44323_variant
  source 1..186: mol_type = other RNA
atgaagcgcttcctgttcctcctgctgaccatcagcctcctggtgatggtccagatccagaccggcctgtccgggcagaacgacacgagccagacctccagcccctccgccagctccaacatcagcggcgggatcttcctcttcttcgtggccaacgcgatcatccacctgttctgcttctcctga

SEQ ID NO: 1085 - RNA, 186 nt, synthetic construct
  misc_feature 1..186: note = AAP35780_variant
  source 1..186: mol_type = other RNA
atgaagcgcttcctgttcctcctgctgaccatcagcctcctggtgatggtccagatccagaccggcctgtccgggcagaacgacacgagccagacctccagcccctccgccagctccagcatgtccggcgggatcttcctcttcttcgtggccaacgcgatcatccacctgttctgcttcagctga

SEQ ID NO: 1086 - RNA, 186 nt, synthetic construct; identical to SEQ ID NO: 1084
  misc_feature 1..186: note = ACS44650_variant
  source 1..186: mol_type = other RNA

SEQ ID NO: 1087 - RNA, 954 nt, synthetic construct
  misc_feature 1..954: note = EAW93489_variant
  source 1..954: mol_type = other RNA
atgaccgtggcccgccccagcgtcccggccgcgctgcccctcctgggcgagctgccccggctcctgctgctcgtgctgctgtgcctccccgccgtgtggggcgactgcgggctgccgcccgacgtccccaacgcccagcccgccctggaggggcgcacctccttcccggaggacacggtgatcacctacaagtgcgaggagagcttcgtgaagatccccggcgagaaggactccgtcatctgcctcaaggggagccagtggtccgacatcgaggagttctgcaaccagaagtcctgccccaaccccggcgagatccggaacggccagatcgacgtgcccgggggcatcctgttcggggccaccatcagcttcagctgcaacaccggctacaagctgttcgggtccacgagctccttctgcctcatcagcggctccagcgtgcagtggtccgaccccctgcccgagtgccgcgagatctactgccccgcgccgccccagatcgacaacggcatcatccagggggagcgggaccactacggctaccgccagagcgtcacctacgcctgcaacaaggggttcaccatgatcggcgagcactccatctactgcaccgtgaacaacgacgagggcgagtggagcgggccgcccccggagtgccggggcaagtccctgacgagcaaggtgccgcccaccgtccagaagcccaccaccgtgaacgtgcccacgaccgaggtcagccccacctcccagaagaccacgaccaagaccaccacgcccaacgcccaggccacccgcagcacccccgtgtcccggaccacgaagcacttccacgagaccaccccgaacaaggggagcggcaccacgtccgggaccacccgcctcctgagcggccacacgtgcttcaccctgaccggcctcctggggaccctggtgaccatgggcctcctgacgtga

SEQ ID NO: 1088 - RNA, 882 nt, synthetic construct
  misc_feature 1..882: note = EAW93497_variant
  source 1..882: mol_type = other RNA
atgatcggcgagcacagcatctactgcaccgtgaacaacgacgagggggagtggtccgggcccccgcccgagtgccgcggcaagagcctgacctccaaggtcccgcccacggtgcagaagcccaccaccgtgaacgtccccaccacggaggtgagccccacctcccagaagaccaccacgaagaccaccacccccaacgcccagggcacggagaccccgagcgtgctccagaagcacaccaccgagaacgtctccgccacgcggaccccgcccacgccccagaagcccaccaccgtgaacgtgcccgcgaccatcgtcacccccacgccccagaagccgaccaccatcaacgtgcccgccaccggggtgagctccacgccccagcgccacaccatcgtcaacgtgagcgccaccggcaccctgcccaccctgcagaagccgacgcgggccaacgactccgccaccaagagccccgcggccgcccagacctccttcatcagcaagaccctctccacgaagacccccagcgccgcgcagaaccccatgatgaccaacgcctccgccacccaggccaccctgacggcccagaagttcaccaccgcgaaggtggccttcacccagagcccgtccgccgcccgcaagagcacgaacgtccacagccccgtgaccaacggcctgaagtccacccagcggttccccagcgcccacatcaccgcgacgcgctccacccccgtgagccggaccaccaagcacttccacgagacgaccccgaacaaggggtccggcaccaccagcgggacgacccgcctcctgtccggccacacgtgcttcaccctgaccgggctcctgggcaccctggtcaccatgggcctcctgacctga

SEQ ID NO: 1089 - RNA, 804 nt, synthetic construct
  misc_feature 1..804: note = EAW93493_variant
  source 1..804: mol_type = other RNA
atgatcggcgagcacagcatctactgcaccgtgaacaacgacgagggggagtggtccgggcccccgcccgagtgccgcggcaagagcctgacctccaaggtcccgcccacggtgcagaagcccaccaccgtgaacgtccccaccacggaggtgagccccacctcccagaagaccaccacgaagaccaccacccccaacgcccagggcacggagaccccgagcgtgctccagaagcacaccaccgagaacgtctccgccacgcggaccccgcccacgccccagaagcccaccaccgtgaacgtgcccgcgaccatcgtcacccccacgccccagaagccgaccaccatcaacgtgcccgccaccggggtgagctccacgccccagcgccacaccatcgtcaacgtgagcgccaccggcaccctgcccaccctgcagaagccgacgcgggccaacgactccgccaccaagagccccgcggccgcccagacctccttcatcagcaagaccctctccacgaagacccccagcgccgcgcagaaccccatgatgaccaacgcctccgccacccaggccaccctgacggcccagaagttcaccaccgcgaaggtggccttcacccagagcccgtccgccgcccccacgcgcagcacccccgtcagccggaccaccaagcacttccacgagacgacccccaacaagggctccgggaccaccagcggcacgacccgcctgctctccgggcacacgtgcttcaccctgaccggcctgctcgggaccctggtgaccatgggcctgctcacctga

SEQ ID NO: 1090 - RNA, 1146 nt, synthetic construct
  misc_feature 1..1146: note = AAA52168_variant
  source 1..1146: mol_type = other RNA
atgaccgtggcccgccccagcgtcccggccgcgctgcccctcctgggcgagctgccccggctcctgctgctcgtgctgctgtgcctccccgccgtgtggggcgactgcgggctgccgcccgacgtccccaacgcccagcccgccctggaggggcgcacctccttcccggaggacacggtgatcacctacaagtgcgaggagagcttcgtgaagatccccggcgagaaggactccgtcatctgcctcaaggggagccagtggtccgacatcgaggagttctgcaaccggagctgcgaggtgcccacccgcctgaactccgccagcctgaagcagccctacatcacccagaactacttcccggtgggcacggtcgtggagtacgagtgccggcccggctaccgccgggagccctccctcagccccaagctgacctgcctgcagaacctcaagtggtccaccgcggtggagttctgcaagaagaagtcctgcccgaaccccggggagatccgcaacggccagatcgacgtccccgggggcatcctgttcggggccaccatcagcttcagctgcaacacgggctacaagctgttcggctccaccagctccttctgcctcatcagcgggtccagcgtgcagtggagcgaccccctgccggagtgccgggagatctactgccccgccccgccccagatcgacaacggcatcatccagggggagcgcgaccactacggctaccggcagtccgtgacctacgcctgcaacaagggcttcaccatgatcggggagcacagcatctactgcacggtcaacaacgacgagggcgagtggtccgggcccccgcccgagtgccgcggcaagagcctgacctccaaggtgccgcccaccgtgcagaagcccaccacggtcaacgtgcccaccaccgaggtgagccccacctcccagaagacgaccaccaagaccacgacccccaacgcgcaggccacccggagcacccccgtctcccgcacgaccaagcacttccacgagaccacccccaacaaggggagcggcacgacctccggcaccacccggctcctgagcgggcacacgtgcttcaccctgaccggcctcctggggaccctggtgaccatgggcctcctgacgtga

SEQ ID NO: 1091 - RNA, 2577 nt, synthetic construct
  misc_feature 1..2577: note = CCDS73385.1_variant
  source 1..2577: mol_type = other RNA
atgctgcagaccaaggacctcatctggaccctgttcttcctgggcacggccgtgagcctccaggtcgacatcgtgccctcccagggggagatcagcgtgggcgagtccaagttcttcctgtgccaggtcgccggggacgcgaaggacaaggacatcagctggttctccccgaacggcgagaagctgacccccaaccagcagcgcatcagcgtggtgtggaacgacgactccagctccaccctcaccatctacaacgccaacatcgacgacgccgggatctacaagtgcgtcgtgacgggcgaggacggcagcgagtccgaggccaccgtgaacgtcaagatcttccagaagctgatgttcaagaacgcccccacgccccaggagttccgggagggggaggacgcggtgatcgtgtgcgacgtcgtgagctccctgccgcccaccatcatctggaagcacaagggccgcgacgtgatcctcaagaaggacgtccggttcatcgtgctgagcaacaactacctgcagatccgcgggatcaagaagaccgacgagggcacctaccggtgcgaggggcgcatcctcgcccggggcgagatcaacttcaaggacatccaggtgatcgtcaacgtgccgcccaccatccaggcccgccagaacatcgtgaacgccaccgcgaacctgggccagtccgtcacgctggtgtgcgacgccgaggggttccccgagcccaccatgagctggaccaaggacggcgagcagatcgagcaggaggaggacgacgagaagtacatcttctccgacgacagctcccagctcaccatcaagaaggtggacaagaacgacgaggccgagtacatctgcatcgccgagaacaaggccggggagcaggacgcgacgatccacctgaaggtcttcgccaagcccaagatcacctacgtggagaaccagaccgccatggagctggaggagcaggtcaccctcacgtgcgaggccagcggcgaccccatcccgagcatcacctggcggacctccacccgcaacatcagctccgaggagaaggccagctggacgcggcccgagaagcaggagaccctggacggccacatggtggtgcgctcccacgcgcgggtcagctccctgaccctcaagagcatccagtacaccgacgccggggagtacatctgcacggcctccaacaccatcggccaggacagccagtccatgtacctggaggtgcagtacgcccccaagctgcaggggcccgtggccgtctacacctgggagggcaaccaggtgaacatcacgtgcgaggtgttcgcgtacccgagcgccaccatctcctggttccgcgacgggcagctcctgcccagctccaactacagcaacatcaagatctacaacaccccctccgccagctacctggaggtcacccccgactccgagaacgacttcggcaactacaactgcaccgccgtgaaccggatcggccaggagagcctcgagttcatcctggtgcaggccgacacgccgagctcccccagcatcgaccaggtcgagccctactccagcaccgcccaggtgcagttcgacgagcccgaggcgaccgggggcgtgccgatcctgaagtacaaggccgagtggcgcgccgtcggggaggaggtgtggcactccaagtggtacgacgcgaaggaggccagcatggagggcatcgtgaccatcgtcgggctcaagcccgagaccacgtacgccgtgcggctggccgccctgaacggcaagggcctcggggagatctccgcggccagcgagttcaagacccagcccgtgcagggcgagccctccgccccgaagctggaggggcagatgggcgaggacgggaacagcatcaaggtcaacctgatcaagcaggacgacggcggctcccccatccgccactacctcgtgcggtaccgcgccctgagctccgagtggaagcccgagatccggctgccgagcgggtccgaccacgtgatgctcaagagcctggactggaacgccgagtacgaggtctacgtggtggcggagaaccagcagggcaagtccaaggccgcccacttcgtcttccgcaccagcgcccagcccaccgccatccccgcgaacgggagccccacgtccggcctgagcaccggcgccatcgtggggatcctcatcgtgatcttcgtcctgctgctcgtggtggtcgacatcacgtgctacttcctgaacaagtgcggcctgttcatgtgcatcgccgtgaacctctgcgggaaggccggcccgggggcgaagggcaaggacatggaggagggcaaggccgccttctccaaggacgagagcaaggagcccatcgtggaggtccgcaccgaggaggagcggacccccaaccacgacgggggcaagcacaccgagcccaacgagaccaccccgctgacggagcccgagaaggggcccgtggaggccaagcccgagtgccaggagaccgagaccaagccggcccccgcggaggtgaagaccgtccccaacgacgccacgcagaccaaggagaacgagtccaaggcctga

SEQ ID NO: 1092 - RNA, 867 nt, synthetic construct
  misc_feature 1..867: note = ABK41933_variant
  source 1..867: mol_type = other RNA
atgggccacacccgccggcaggggaccagcccctccaagtgcccgtacctgaacttcttccagctcctggtgctggccggcctcagccacttctgctccggggtcatccacgtgacgaaggaggtgaaggaggtcgccaccctgagctgcggccacaacgtgtccgtggaggagctggcccagacccgcatctactggcagaaggagaagaagatggtcctcaccatgatgagcggggacatgaacatctggcccgagtacaagaaccggacgatcttcgacatcaccaacaacctgtccatcgtgatcctggccctccgccccagcgacgagggcacctacgagtgcgtggtcctgaagtacgagaaggacgccttcaagcgggagcacctggccgaggtgaccctctccgtgaaggccgacttccccacgccgagcatctccgacttcgagatccccaccagcaacatccgccggatcatctgctccaccagcggcgggttccccgagccccacctgtcctggctggagaacggcgaggagctcaacgcgatcaacaccacggtcagccaggacccggagaccgagctgtacgccgtgtccagcaagctggacttcaacatgaccaccaaccactccttcatgtgcctcatcaagtacgggcacctccgcgtgaaccagacgttcaactggaacaccaccaagcaggagcacttccccgacaacctgctgcccagctgggccatcaccctgatcagcgtcaacggcatcttcgtgatctgctgcctgacgtactgcttcgcgccccggtgccgcgagcggcgccggaacgagcgcctccggcgcgagtccgtgcggccggtctga

SEQ ID NO: 1093 - RNA, 867 nt, synthetic construct; identical to SEQ ID NO: 1092
  misc_feature 1..867: note = AAA36045_variant
  source 1..867: mol_type = other RNA

SEQ ID NO: 1094 - RNA, 990 nt, synthetic construct
  misc_feature 1..990: note = CCDS3009.1_variant
  source 1..990: mol_type = other RNA
atggacccccagtgcaccatgggcctgagcaacatcctcttcgtgatggccttcctgctgtccggggccgcgccgctcaagatccaggcctacttcaacgagaccgccgacctgccctgccagttcgccaacagccagaaccagtccctgagcgagctcgtcgtgttctggcaggaccaggagaacctggtgctgaacgaggtctacctcggcaaggagaagttcgactccgtgcacagcaagtacatggggcgcacctccttcgacagcgactcctggaccctgcggctgcacaacctccagatcaaggacaagggcctgtaccagtgcatcatccaccacaagaagcccaccgggatgatccgcatccaccagatgaacagcgagctgtccgtgctcgccaacttcagccagcccgagatcgtcccgatctccaacatcaccgagaacgtgtacatcaacctgacgtgcagctccatccacggctaccccgagcccaagaagatgagcgtgctgctccggaccaagaactccaccatcgagtacgacggcgtcatgcagaagtcccaggacaacgtgaccgagctgtacgacgtgagcatcagcctgagcgtctccttccccgacgtgacgagcaacatgaccatcttctgcatcctcgagaccgacaagacccgcctgctgtccagcccgttctccatcgagctcgaggacccccagcccccgcccgaccacatcccctggatcacggcggtgctgcccaccgtcatcatctgcgtgatggtgttctgcctgatcctctggaagtggaagaagaagaagcggccccgcaacagctacaagtgcgggaccaacaccatggagcgggaggagtccgagcagacgaagaagcgcgagaagatccacatcccggagcggagcgacgaggcccagcgcgtcttcaagtccagcaagacctccagctgcgacaagtccgacacgtgcttctga

SEQ ID NO: 1095 - RNA, 708 nt, synthetic construct
  misc_feature 1..708: note = AAA59674_variant
  source 1..708: mol_type = other RNA
atggccctgcccgtgaccgccctcctgctgccgctcgcgctgctgctccacgccgcccgccccagccagttccgggtcagccccctggaccgcacctggaacctgggcgagacggtggagctcaagtgccaggtgctgctgagcaaccccacctccgggtgcagctggctgttccagccgcggggcgccgccgcgtcccccaccttcctcctgtacctcagccagaacaagcccaaggccgccgaggggctggacacccagcgcttctccggcaagcggctgggggacacgttcgtcctcaccctgagcgacttccgccgggagaacgagggctactacttctgctccgccctgagcaactccatcatgtacttcagccacttcgtgcccgtgttcctcccggcgaagcccaccaccacgcccgcgccccgcccgcccacccccgcccccaccatcgcctcccagccgctgagcctgcggcccgaggcctgccgccccgccgccggcggggccgtccacacccggggcctcgacttcgcctgcgacatctacatctgggcgcccctggccgggacgtgcggcgtgctgctcctgtccctggtgatcaccctctactgcaaccaccgcaaccggcgccgggtctgcaagtgcccgcgccccgtggtgaagtccggggacaagccctccctgagcgcccggtacgtctga

SEQ ID NO: 1096 - RNA, 2472 nt, synthetic construct
  misc_feature 1..2472: note = EAW57688_variant
  source 1..2472: mol_type = other RNA
atgaccgtgctgcaggagcccgtccaggccgccatctggcaggcgctcaaccactacgcctaccgcgacgccgtgttcctggccgagcggctgtacgccgaggtgcacagcgaggaggccctcttcctgctggcgacctgctactaccgctccggcaaggcctacaaggcctaccggctcctgaaggggcacagctgcacgaccccgcagtgcaagtacctgctcgcgaagtgctgcgtcgacctgtccaagctggccgagggcgagcagatcctcagcgggggcgtgttcaacaagcagaagtcccacgacgacatcgtgaccgagttcggggacagcgcctgcttcaccctgtccctgctcggccacgtctactgcaagacggaccgcctggccaagggcagcgagtgctaccagaagtccctgagcctcaaccccttcctgtggtcccccttcgagagcctgtgcgagatcggggagaagcccgacccggaccagaccttcaagttcacctccctccagaacttcagcaactgcctgcccaactcctgcaccacccaggtgcccaaccacagcctgtcccaccggcagcccgagaccgtgctcaccgagaccccgcaggacacgatcgagctgaaccgcctgaacctcgagagctccaacagcaagtacagcctgaacaccgactccagcgtctcctacatcgacagcgccgtgatctcccccgacaccgtgcccctgggcaccgggacgagcatcctctccaagcaggtccagaacaagcccaagaccggccggagcctgctcgggggcccggcggccctgagccccctgacgccctccttcggcatcctgcccctcgagaccccgtcccccggggacggcagctacctgcagaactacacgaacaccccgcccgtgatcgacgtgccctccaccggggcgcccagcaagaagtccgtcgcccgcatcggccagaccggcaccaagagcgtgttctcccagagcgggaactcccgggaggtgacgcccatcctggcccagacccagagcagcggcccccagacctccacgaccccgcaggtcctcagccccaccatcacctccccgcccaacgccctgccccgccggagctcccgcctgttcacgagcgactccagcaccaccaaggagaactccaagaagctcaagatgaagttcccgcccaagatccccaaccggaagaccaagagcaagacgaacaagggcgggatcacccagcccaacatcaacgactccctggagatcaccaagctggacagctccatcatcagcgaggggaagatctccaccatcacgccccagatccaggccttcaacctccagaaggccgccgccggcctgatgagcctgctccgcgagatgggcaaggggtacctggcgctgtgctcctacaactgcaaggaggccatcaacatcctgagccacctccccagccaccactacaacaccggctgggtgctgtgccagatcgggcgggcctacttcgagctgtccgagtacatgcaggccgagcgcatcttcagcgaggtgcggcgcatcgagaactaccgggtcgagggcatggagatctactccaccaccctctggcacctccagaaggacgtggccctgagcgtgctgtccaaggacctgaccgacatggacaagaacagcccggaggcgtggtgcgccgccgggaactgcttctccctgcagcgcgagcacgacatcgccatcaagttcttccagcgggcgatccaggtcgaccccaactacgcctacgcctacacgctcctgggccacgagttcgtgctgaccgaggagctcgacaaggccctggcctgcttccgcaacgcgatccgcgtcaacccccggcactacaacgcctggtacggcctggggatgatctactacaagcaggagaagttcagcctcgccgagatgcacttccagaaggccctggacatcaacccccagtccagcgtgctgctctgccacatcggcgtggtccagcacgccctgaagaagtccgagaaggcgctggacaccctcaacaaggccatcgtgatcgacccgaagaaccccctgtgcaagttccaccgcgccagcgtgctgttcgccaacgagaagtacaagtccgccctccaggagctggaggagctgaagcagatcgtccccaaggagagcctcgtgtacttcctgatcgggaaggtgtacaagaagctgggccagacccacctcgcgctgatgaacttctcctgggccatggacctggaccccaagggggccaacaaccagatcaaggaggccatcgacaagcggtacctcccggacgacgaggagcccatcacgcaggaggagcagatcatgggcaccgacgagagccaggagtccagcatgaccgacgcggacgacacccagctgcacgccgccgagtccgacgagttctga

SEQ ID NO: 1097 - RNA, 2475 nt, synthetic construct
  misc_feature 1..2475: note = AAB34378_variant
  source 1..2475: mol_type = other RNA
atgaccgtgctgcaggagcccgtccaggccgccatctggcaggcgctcaaccactacgcctaccgcgacgccgtgttcctggccgagcggctgtacgccgaggtgcacagcgaggaggccctcttcctgctggcgacctgctactaccgctccggcaaggcctacaaggcctaccggctcctgaaggggcacagctgcacgaccccgcagtgcaagtacctgctcgcgaagtgctgcgtcgacctgtccaagctggccgagggcgagcagatcctcagcgggggcgtgttcaacaagcagaagtcccacgacgacatcgtgaccgagttcggggacagcgcctgcttcaccctgtccctgctcggccacgtctactgcaagacggaccgcctggccaagggcagcgagtgctaccagaagtccctgagcctcaaccccttcctgtggtcccccttcgagagcctgtgcgagatcggggagaagcccgacccggaccagaccttcaagttcacctccctccagaacttcagcaactgcctgcccaactcctgcaccacccaggtgcccaaccacagcctgtcccaccggcagcccgagaccgtgctcaccgagaccccgcaggacacgatcgagctgaaccgcctgaacctcgagagctccaacagcaagtacagcctgaacaccgactccagcgtctcctacatcgacagcgccgtgatctcccccgacaccgtgcccctgggcaccgggacgagcatcctctccaagcaggtccagaacaagcccaagaccggccggagcctgctcgggggcccggcggccctgagccccctgacgccctccttcggcatcctgcccctcgagaccccgtcccccggggacggcagctacctgcagaactacacgaacaccccgcccgtgatcgacgtgccctccaccggggcgcccagcaagaagtccgtcgcccgcatcggccagaccggcaccaagagcgtgttctcccagagcgggaactcccgggaggtgacgcccatcctggcccagacccagagcagcggcccccagacctccacgaccccgcaggtcctcagccccaccatcacctccccgcccaacgccctgccccgccggagctcccgcctgttcacgagcgactccagcaccaccaaggagaactccaagaagctcaagatgaagttcccgcccaagatccccaaccggaagaccaagagcaagacgaacaagggcgggatcacccagcccaacatcaacgactccctggagatcaccaagctggacagctccatcatcagcgaggggaagatctccaccatcacgccccagatccaggccttcaacctccagaaggccgccgccgagggcctgatgagcctgctccgcgagatgggcaaggggtacctggcgctgtgctcctacaactgcaaggaggccatcaacatcctgagccacctccccagccaccactacaacaccggctgggtgctgtgccagatcgggcgggcctacttcgagctgtccgagtacatgcaggccgagcgcatcttcagcgaggtgcggcgcatcgagaactaccgggtcgagggcatggagatctactccaccaccctctggcacctccagaaggacgtggccctgagcgtgctgtccaaggacctgaccgacatggacaagaacagcccggaggcgtggtgcgccgccgggaactgcttctccctgcagcgcgagcacgacatcgccatcaagttcttccagcgggcgatccaggtcgaccccaactacgcctacgcctacacgctcctgggccacgagttcgtgctgaccgaggagctcgacaaggccctggcctgcttccgcaacgcgatccgcgtcaacccccggcactacaacgcctggtacggcctggggatgatctactacaagcaggagaagttcagcctcgccgagatgcacttccagaaggccctggacatcaacccccagtccagcgtgctgctctgccacatcggcgtggtccagcacgccctgaagaagtccgagaaggcgctggacaccctcaacaaggccatcgtgatcgacccgaagaaccccctgtgcaagttccaccgcgccagcgtgctgttcgccaacgagaagtacaagtccgccctccaggagctggaggagctgaagcagatcgtccccaaggagagcctcgtgtacttcctgatcgggaaggtgtacaagaagctgggccagacccacctcgcgctgatgaacttctcctgggccatggacctggaccccaagggggccaacaaccagatcaaggaggccatcgacaagcggtacctcccggacgacgaggagcccatcacgcaggaggagcagatcatgggcaccgacgagagccaggagtccagcatgaccgacgcggacgacacccagctgcacgccgccgagtccgacgagttctga

SEQ ID NO: 1098 - RNA, 1788 nt, synthetic construct
  misc_feature 1..1788: note = AAA51947_variant
  source 1..1788: mol_type = other RNA
atgcgcgtgctgctcgccgccctgggcctcctcttcctgggggcgctgcgggccttcccccaggaccgcccgttcgaggacacgtgccacggcaaccccagccactactacgacaaggccgtccggcgctgctgctaccggtgccccatggggctgttccccacccagcagtgcccgcagcgccccaccgactgccggaagcagtgcgagcccgactactacctggacgaggccgaccgctgcaccgcctgcgtgacctgctcccgggacgacctggtggagaagaccccctgcgcgtggaacagctcccgcgtctgcgagtgccggccgggcatgttctgcagcacctccgccgtgaacagctgcgcccgctgcttcttccactccgtgtgccccgccgggatgatcgtcaagttccccggcaccgcgcagaagaacaccgtgtgcgagcccgccagcccgggcgtgtcccccgcctgcgccagccccgagaactgcaaggagccctccagcgggaccatcccgcaggccaagcccacgcccgtctcccccgcgaccagctccgccagcaccatgccggtgcggggcgggacccgcctcgcccaggaggccgcctccaagctgacgcgggcgcccgacagcccctccagcgtgggccgccccagctccgacccggggctgagccccacccagccctgccccgagggctccggcgactgccggaagcagtgcgagccggactactacctcgacgaggccgggcgctgcaccgcctgcgtcagctgctcccgggacgacctggtggagaagaccccctgcgcctggaacagctcccgcacgtgcgagtgccggcccggcatgatctgcgccaccagcgcgaccaactcctgcgcccgctgcgtgccgtaccccatctgcgccgccgagaccgtcacgaagccccaggacatggccgagaaggacaccaccttcgaggcgcccccgctggggacccagcccgactgcaaccccacgcccgagaacggcgaggccccggccagcacctcccccacccagagcctcctggtggactcccaggccagcaagaccctgcccatccccacgtccgcgccggtggccctcagctccaccggcaagcccgtcctggacgccgggcccgtgctgttctgggtgatcctcgtcctggtggtggtcgtgggcagctccgccttcctgctctgccaccgccgggcctgccgcaagcggatccgccagaagctgcacctgtgctaccccgtccagaccagccagccgaagctcgagctggtggacagccggccccgccggtccagcacccagctgcgctccggggcgagcgtgacggagcccgtcgccgaggagcggggcctcatgtcccagcccctgatggagacctgccacagcgtgggggccgcctacctggagtccctcccgctgcaggacgccagccccgcgggcggcccctccagcccccgcgacctgccggagccccgggtgtccaccgagcacaccaacaacaagatcgagaagatctacatcatgaaggccgacacggtcatcgtggggaccgtgaaggccgagctccccgagggccgcgggctggccggcccggccgagcccgagctggaggaggagctcgaggcggaccacacgccccactaccccgagcaggagaccgagccgcccctggggagctgctccgacgtcatgctgagcgtggaggaggagggcaaggaggaccccctccccaccgccgcctccggcaagtga

SEQ ID NO: 1099 - RNA, 912 nt, synthetic construct
  misc_feature 1..912: note = EAW97060_variant
  source 1..912: mol_type = other RNA
atggccaccagccgctacgagcccgtggccgagatcggcgtcggggcgtacggcaccgtgtacaaggcccgggacccgcactccgggcacttcgtggccctcaagagcgtccgcgtgcccaacggcgggggcggcgggggcgggctgcccatctccacggtgcgggaggtcgccctgctgcgccggctcgaggccttcgagcaccccaacgtggtgcgcctgatggacgtctgcgcgaccagccggaccgaccgcgagatcaaggtgaccctggtgttcgagcacgtcgaccaggacctccggacgtacctggacaaggccccgccgcccggcctgcccgccgagaccatcaaggacctcatgcgccagttcctgcgggggctggacttcctccacgccaactgcatcgtgcaccgcgacctgaagccggagaacatcctggtgacctccggcggcaccgtcaagctcgcggacttcgggctggcccggatctacagctaccagatggccctgacgcccgtggtggtcaccctctggtaccgcgcccccgaggtgctgctgcagtccacctacgccacccccgtggacatgtggagcgtcggctgcatcttcgcggagatgttccggcgcaagcccctcttctgcgggaactccgaggccgaccagctgggcaagatcttcgacctgatcggcctcccgcccgaggacgactggccccgggacgtgagcctgccccgcggggccttcccgccccggggcccccgccccgtgcagtccgtcgtgcccgagatggaggagagcggggcccagctgctcctggagatgctgacgttcaacccccacaagcggatctccgccttccgcgcgctccagcacagctacctgcacaaggacgagggcaaccccgagtga

SEQ ID NO: 1100 - RNA, 912 nt, synthetic construct; identical to SEQ ID NO: 1099
  misc_feature 1..912: note = AAA35673_variant
  source 1..912: mol_type = other RNA

SEQ ID NO: 1101 - RNA, 690 nt, synthetic construct
  misc_feature 1..690: note = AAB50213_variant
  source 1..690: mol_type = other RNA
atggacgtgtgcgccaccagccgcaccgaccgggagatcaaggtcacgctggtgttcgagcacgtggaccaggacctccgcacctacctggacaaggcgcccccgcccggcctgcccgccgagaccatcaaggacctcatgcggcagttcctgcgcgggctggacttcctccacgccaactgcatcgtccaccgggacctgaagcccgagaacatcctggtgacctccggcgggacggtgaagctcgccgacttcggcctggcccgcatctacagctaccagatggccctgaccccggtcgtggtgaccctctggtaccgggcgcccgaggtcctgctgcagtccacctacgccacgcccgtggacatgtggagcgtggggtgcatcttcgccgagatgttccgccggaagcccctcttctgcggcaactccgaggccgaccagctgggcaagatcttcgacctgatcgggctcccgcccgaggacgactggccccgcgacgtcagcctgccccggggcgcgttcccgccccgcgggccccggcccgtgcagtccgtggtcccggagatggaggagagcggcgcccagctgctcctggagatgctgaccttcaacccccacaagcgcatctccgccttccgggccctccagcacagctacctgcacaaggacgaggggaaccccgagtga

SEQ ID NO: 1102 - RNA, 336 nt, synthetic construct
  misc_feature 1..336: note = AAH15669_variant
  source 1..336: mol_type = other RNA
atggccaccagccgctacgagcccgtggccgagatcggcgtcggggcgtacggcaccgtgtacaaggcccgggacccgcactccgggcacttcgtggccctcaagagcgtccgcgtgcccaacggcgggggcggcgggggcgggctgcccatctccacggtgcgggaggtcgccctgctgcgccggctcgaggccttcgagcaccccaacgtggtgcgcctgatggacgtctgcgcgaccagccggaccgaccgcgagatcaagcggtgcttcgtggagtccctgagctccgtggagaccctcaagccgacgagctgggccaagtccctgacctga

SEQ ID NO: 1103 - RNA, 429 nt, synthetic construct
  misc_feature 1..429: note = ACY78326_variant
  source 1..429: mol_type = other RNA
atggagcccgccgccggcagctccatggagccgagcgcggactggctggccaccgccgccgcccgcgggcgggtggaggaggtccgcgcgctcctggaggccggcgccctgcccaacgcccccaactcctacgggcggcgccccatccaggtgatgatgatgggcagcgcgcgggtggccgagctcctgctgctccacggggccgagccgaactgcgccgaccccgccaccctgacgcgccccgtccacgacgcggcccgggagggcttcctggacaccctcgtggtgctgcaccgcgccggcgccccctgcgccatgccgggggcggtctgcccctggacctggctgcggtcctgggccatcgccatgagccacgggacctgcgcccgcctccggggcgcccccgaggcggtgacgatgcccgcctga

SEQ ID NO: 1104 - RNA, 351 nt, synthetic construct
  misc_feature 1..351: note = EAW58598_variant
  source 1..351: mol_type = other RNA
atggagcccgccgccggcagctccatggagcccagcgcggactggctggccaccgccgccgcccgcgggcgggtggaggaggtccgcgcgctcctggaggccggcgccctgcccaacgcccccaactcctacgggcggcgccccatccaggtgggccgggggagcgcggccggcgccggcgacgggggccgcctctggcggaccaagttcgccggggagctggagtccggcagcgcctccatcctgcgcaagaaggggcggctccccggcgagttcagcgagggcgtgtgcaaccaccgcccgccgcccggggacgcgctgggcgcctgggaggccaaggaggaggagtga

SEQ ID NO: 1105 - RNA, 471 nt, synthetic construct
  misc_feature 1..471: note = AFN61598_variant
  source 1..471: mol_type = other RNA
atggagcccgccgccggcagctccatggagccgagcgcggactggctggccaccgccgccgcccgcgggcgggtggaggaggtccgcgcgctcctggaggccggcgccctgcccaacgcccccaactcctacgggcggcgccccatccaggtgatgatgatgggcagcgcgcgggtggccgagctcctgctgctccacggggccgagccgaactgcgccgaccccgccaccctgacgcgccccgtccacgacgcggcccgggagggcttcctggacaccctcgtggtgctgcaccgcgccggcgcccggctggacgtccgcgacgcctgggggcggctccccgtggacctggcggaggagctgggccaccgcgacgtggcccggtacctccgcgccgccgccgggggcacccgggggtccaaccacgcgcgcatcgacgccgccgagggcccgagcgacatccccgactga

SEQ ID NO: 1106 - RNA, 327 nt, synthetic construct
  misc_feature 1..327: note = CCQ43815_variant
  source 1..327: mol_type = other RNA
atggaggtgatgatgatgggcagcgcccgcgtcgccgagctgctcctgctgcacggggcggagcccaactgcgccgacccggccaccctcacccggcccgtgcacgacgccgcccgcgagggcttcctggacacgctggtggtcctccaccgggcgggggcccgcctggacgtgcgggacgcctggggccgcctgcccgtggacctcgccgaggagctggggcaccgggacgtcgcgcgctacctgcgggccgccgccggcggcacccgcgggtccaaccacgcccggatcgacgcggccgagggccccagcgacatcccggactga

SEQ ID NO: 1107 - RNA, 399 nt, synthetic construct
  misc_feature 1..399: note = AAA82236_variant
  source 1..399: mol_type = other RNA
atggtgcgccggttcctggtcaccctccgcatccggcgcgcctgcgggcccccgcgggtgcgcgtgttcgtcgtgcacatcccccggctgaccggggagtgggccgcgcccggcgcccccgccgccgtggccctggtcctcatgctgctgcgcagccagcggctcgggcagcagccgctgccccgccggcccggccacgacgacgggcagcgcccctccggcggcgcggccgccgccccgcggcgcggggcgcagctgcggcgcccccggcacagccaccccacgcgcgcccggcgctgccccggcgggctcccgggccacgccgggggcgccgcccccggccggggcgcggccggccgcgcccgctgcctggggccctccgcccggggccccggctga

SEQ ID NO: 1108 - RNA, 2109 nt, synthetic construct
  misc_feature 1..2109: note = CCDS12584.1_variant
  source 1..2109: mol_type = other RNA
atggagagcccctccgccccgccccaccgctggtgcatcccctggcagcggctgctcctgaccgccagcctgctcaccttctggaacccgcccacgaccgcgaagctgaccatcgagtccacccccttcaacgtggccgagggcaaggaggtcctgctcctggtgcacaacctgccccagcacctcttcgggtacagctggtacaagggcgagcgcgtggacgggaaccggcagatcatcggctacgtcatcgggacgcagcaggccacccccggcccggcctactccggccgcgagatcatctaccccaacgccagcctgctgatccagaacatcatccagaacgacaccgggttctacaccctccacgtgatcaagtccgacctggtgaacgaggaggcgacgggccagttccgggtctaccccgagctgcccaagccgagcatctccagcaacaactccaagcccgtggaggacaaggacgccgtggccttcacgtgcgagcccgagacccaggacgccacctacctctggtgggtcaacaaccagagcctgcccgtgtccccgcgcctgcagctcagcaacgggaaccggacgctgaccctgttcaacgtgacccgcaacgacaccgcgtcctacaagtgcgagacgcagaaccccgtcagcgcccggcgctccgacagcgtgatcctcaacgtgctgtacggccccgacgcccccaccatctccccgctgaacaccagctaccggagcggggagaacctcaacctgtcctgccacgccgccagcaacccgcccgcgcagtactcctggttcgtcaacggcaccttccagcagagcacgcaggagctgttcatccccaacatcaccgtgaacaactccggcagctacacgtgccaggcccacaactccgacaccgggctcaaccgcaccaccgtgaccaccatcacggtctacgccgagccgcccaagcccttcatcaccagcaacaactccaaccccgtggaggacgaggacgccgtggccctgacctgcgagcccgagatccagaacaccacgtacctgtggtgggtcaacaaccagagcctccccgtgagcccccggctgcagctgtccaacgacaaccgcaccctcaccctgctgtccgtgacccggaacgacgtcggcccgtacgagtgcgggatccagaacgagctcagcgtggaccactccgaccccgtcatcctgaacgtgctgtacggccccgacgaccccacgatcagcccgtcctacacctactaccgccccggcgtgaacctcagcctgtcctgccacgcggccagcaacccgcccgcccagtacagctggctgatcgacgggaacatccagcagcacacccaggagctgttcatctccaacatcaccgagaagaacagcggcctctacacgtgccaggccaacaactccgccagcgggcactcccggaccaccgtcaagaccatcaccgtgagcgcggagctgcccaagccctccatcagctccaacaacagcaagcccgtggaggacaaggacgccgtcgccttcacgtgcgagcccgaggcccagaacaccacctacctctggtgggtgaacggccagtccctgccggtgagcccccgcctgcagctctccaacgggaaccggaccctgacgctgttcaacgtcacccgcaacgacgcccgggcgtacgtgtgcggcatccagaacagcgtgtccgccaaccgcagcgaccccgtcaccctggacgtgctctacggccccgacaccccgatcatctccccgcccgacagcagctacctgtccggggccaacctgaacctcagctgccactccgccagcaaccccagcccccagtactcctggcgcatcaacggcatcccccagcagcacacccaggtgctgttcatcgcgaagatcacccccaacaacaacgggacctacgcctgcttcgtctccaacctggccaccggccggaacaacagcatcgtgaagtccatcacggtgagcgcctccgggaccagccccggcctctccgccggcgcgaccgtcgggatcatgatcggcgtgctggtgggggtcgccctgatctga

SEQ ID NO: 1109 - RNA, 1035 nt, synthetic construct
  misc_feature 1..1035: note = AAA51739_variant
  source 1..1035: mol_type = other RNA
atggggcccccgagcgccccgccctgccgcctgcacgtgccctggaaggaggtcctcctgaccgcctccctgctcaccttctggaacccgcccacgaccgcgaagctgaccatcgagagcacccccttcaacgtggccgagggcaaggaggtgctgctcctggcccacaacctgccccagaaccggatcggctactcctggtacaagggggagcgcgtcgacggcaacagcctcatcgtggggtacgtgatcggcacgcagcaggccacccccggccccgcctactccgggcgggagaccatctaccccaacgcgagcctgctgatccagaacgtcacccagaacgacacgggcttctacaccctccaggtgatcaagtccgacctggtgaacgaggaggccaccgggcagttccacgtctaccccgagctgccgaagcccagcatctccagcaacaactccaaccccgtggaggacaaggacgccgtggccttcacgtgcgagcccgaggtccagaacaccacctacctctggtgggtgaacggccagagcctgccggtgagcccccgcctgcagctctccaacgggaacatgaccctgaccctgctctccgtcaagcggaacgacgcgggcagctacgagtgcgagatccagaaccccgcctccgccaaccgcagcgaccccgtgacgctgaacgtgctgtacggcccggacgggcccaccatctcccccagcaaggccaactaccggcccggcgagaacctcaacctgagctgccacgccgcgtccaacccgcccgcccagtacagctggttcatcaacgggaccttccagcagtccacccaggagctgttcatccccaacatcacggtcaacaacagcggctcctacatgtgccaggcccacaacagcgccaccggcctcaaccgcaccaccgtgacgatgatcaccgtgtccgggagcgcccccgtcctgtccgcggtggccaccgtgggcatcaccatcggggtcctggcccgggtggccctcatctga

SEQ ID NO: 1110 - RNA, 1173 nt, synthetic construct
  misc_feature 1..1173: note = AAB04533_variant
  source 1..1173: mol_type = other RNA
atgggcgccaccaccatggaccagaagtccctgtgggccggggtggtcgtgctcctgctgctccagggcgggagcgcgtacaagctggtgtgctacttcacgaactggagccaggaccgccaggagcccggcaagttcaccccggagaacatcgaccccttcctgtgctcccacctcatctacagcttcgcctccatcgagaacaacaaggtcatcatcaaggacaagagcgaggtgatgctgtaccagaccatcaactccctgaagaccaagaaccccaagctcaagatcctgctgagcatcgggggctacctcttcggctccaaggggttccaccccatggtggacagctccacgagccggctggagttcatcaactccatcatcctgttcctccgcaaccacaacttcgacggcctggacgtcagctggatctacccggaccagaaggagaacacccacttcaccgtgctgatccacgagctcgccgaggccttccagaaggacttcaccaagtccacgaaggagcggctgctgctcaccgccggggtgagcgcgggccgccagatgatcgacaactcctaccaggtcgagaagctggccaaggacctggacttcatcaacctcctgagcttcgacttccacgggtcctgggagaagcccctgatcaccggccacaacagccccctcagcaagggctggcaggaccgggggccctccagctactacaacgtggagtacgccgtgggctactggatccacaaggggatgccgtccgagaaggtcgtgatgggcatccccacctacggccacagcttcacgctggcctccgcggagaccaccgtgggggcccccgccagcggccccggggccgccggcccgatcaccgagtccagcgggttcctggcgtactacgagatctgccagttcctcaagggcgccaagatcacgcgcctgcaggaccagcaggtcccctacgccgtgaagggcaaccagtgggtggggtacgacgacgtcaagtccatggagaccaaggtgcagttcctgaagaacctcaacctgggcggggccatgatctggagcatcgacatggacgacttcaccggcaagtcctgcaaccaggggccctaccccctggtgcaggccgtcaagcggagcctcggctccctgtga

SEQ ID NO: 1111 - RNA, 2832 nt, synthetic construct
  misc_feature 1..2832: note = AAD40367_variant
  source 1..2832: mol_type = other RNA
atgacccagcgcagcatcgccggccccatctgcaacctgaagttcgtgaccctcctggtcgccctgtccagcgagctcccgttcctgggggcgggcgtgcagctgcaggacaacgggtacaacggcctcctgatcgccatcaacccccaggtgcccgagaaccagaacctgatctccaacatcaaggagatgatcacggaggccagcttctacctcttcaacgccaccaagcggcgcgtcttcttccggaacatcaagatcctgatccccgccacctggaaggcgaacaacaactccaagatcaagcaggagagctacgagaaggccaacgtgatcgtgaccgactggtacggggcccacggcgacgacccgtacacgctgcagtaccgcggctgcgggaaggagggcaagtacatccacttcacccccaacttcctcctgaacgacaacctgaccgccgggtacggctcccgggggcgcgtcttcgtgcacgagtgggcgcacctccggtggggcgtgttcgacgagtacaacaacgacaagcccttctacatcaacggccagaaccagatcaaggtcacccgctgcagctccgacatcacggggatcttcgtgtgcgagaagggcccctgcccgcaggagaactgcatcatcagcaagctgttcaaggaggggtgcaccttcatctacaactccacccagaacgccaccgccagcatcatgttcatgcagtccctgagctccgtggtcgagttctgcaacgccagcacgcacaaccaggaggcccccaacctccagaaccagatgtgctccctgcggagcgcgtgggacgtgatcaccgactccgccgacttccaccacagcttccccatgaacggcaccgagctgcccccgccgcccaccttcagcctcgtgcaggccggcgacaaggtcgtgtgcctggtgctggacgtctccagcaagatggccgaggccgaccgcctcctgcagctgcagcaggcggccgagttctacctcatgcagatcgtggagatccacacgttcgtggggatcgcctccttcgacagcaagggcgagatccgggcccagctgcaccagatcaactccaacgacgaccgcaagctgctcgtcagctacctgcccaccaccgtgtccgccaagaccgacatcagcatctgctccgggctgaagaagggcttcgaggtggtcgagaagctcaacgggaaggcgtacggcagcgtgatgatcctggtcacgtccggcgacgacaagctgctcgggaactgcctgcccaccgtgctgagctccggcagcaccatccactccatcgccctcgggagctccgccgcccccaacctggaggagctgagccggctcaccggcgggctgaagttcttcgtgcccgacatctccaacagcaacagcatgatcgacgccttctcccgcatcagctccggcacgggcgacatcttccagcagcacatccagctggagagcaccggggagaacgtcaagccccaccaccagctcaagaacaccgtgaccgtggacaacacggtcggcaacgacaccatgttcctggtgacctggcaggcgtccgggccgcccgagatcatcctgttcgaccccgacggccggaagtactacaccaacaacttcatcacgaacctcaccttccgcaccgccagcctgtggatccccgggaccgccaagccgggccactggacgtacaccctgaacaacacccaccactccctgcaggccctcaaggtgaccgtcaccagccgggcgtccaacagcgccgtgccgcccgccacggtggaggccttcgtcgagcgcgactccctgcacttcccccaccccgtgatgatctacgccaacgtgaagcagggcttctaccccatcctgaacgcgaccgtcaccgccaccgtggagcccgagacgggggacccggtgaccctccggctgctggacgacggcgccggggccgacgtcatcaagaacgacggcatctacagccgctacttcttctccttcgccgcgaacggccggtacagcctcaaggtgcacgtgaaccactcccccagcatctccacccccgcccacagcatccccgggagccacgccatgtacgtcccgggctacaccgccaacgggaacatccagatgaacgcgccccgcaagtccgtgggccgcaacgaggaggagcggaagtgggggttcagccgcgtgtccagcggcggctccttcagcgtcctgggggtgcccgccggcccccacccggacgtgttcccgccctgcaagatcatcgacctggaggccgtcaaggtggaggaggagctcacgctgtcctggaccgcccccggggaggacttcgaccagggccaggccaccagctacgagatccggatgtccaagagcctgcagaacatccaggacgacttcaacaacgcgatcctcgtgaacacctccaagcgcaacccccagcaggccgggatccgggagatcttcacgttcagcccccagatctccaccaacggccccgagcaccagcccaacggcgagacccacgagagccaccgcatctacgtcgccatccgggccatggaccgcaactccctgcagagcgccgtgtccaacatcgcgcaggccccgctgttcatcccgcccaacagcgaccccgtgcccgcccgggactacctcatcctgaagggggtcctgaccgccatgggcctcatcgggatcatctgcctgatcatcgtggtgacgcaccacaccctgtcccgcaagaagcgggccgacaagaaggagaacggcaccaagctcctgtga

SEQ ID NO: 1112 - RNA, 708 nt, synthetic construct
  misc_feature 1..708: note = AAF82135_variant
  source 1..708: mol_type = other RNA
atggaggaggagacccacaccgacgccaagatccgcgccgagaacggcacggggagcagcccccggggcccggggtgcagcctgcgccacttcgcgtgcgagcagaacctcctgtcccggcccgacggcagcgcctccttcctgcagggggacaccagcgtgctcgccggcgtctacggccccgccgaggtgaaggtgtccaaggagatcttcaacaaggccaccctggaggtcatcctgcgccccaagatcgggctcccgggcgtggcggagaagtcccgggagcgcctgatccggaacacgtgcgaggccgtggtcctggggaccctccacccccgcacctccatcaccgtggtgctgcaggtcgtgagcgacgccggctccctgctcgcctgctgcctgaacgcggcctgcatggccctggtggacgccggggtccccatgcgggccctcttctgcggcgtggcgtgcgccctggacagcgacggcaccctggtgctcgaccccacgtccaagcaggagaaggaggcccgcgccgtcctgaccttcgccctggacagcgtggagcggaagctcctgatgtccagcaccaaggggctgtactccgacaccgagctccagcagtgcctggcggccgcccaggccgccagccagcacgtgttccgcttctaccgggagtccctgcagcgccggtacagcaagagctga

SEQ ID NO: 1113 - RNA, 1752 nt, synthetic construct
  misc_feature 1..1752: note = CCDS6312.1_variant
  source 1..1752: mol_type = other RNA
atggaggtggccgccaactgcagcctgcgcgtcaagcggcccctcctggacccgcgcttcgagggctacaagctgtccctcgagcccctgccctgctaccagctggagctcgacgcggccgtggccgaggtgaagctgcgggacgaccagtacaccctggagcacatgcacgccttcgggatgtacaactacctccactgcgacagctggtaccaggactccgtctactacatcgacaccctgggccgcatcatgaacctgacggtgatgctcgacaccgccctggggaagccccgggaggtgttccgcctgccgaccgacctcaccgcgtgcgacaaccggctgtgcgccagcatccacttctccagctccacgtgggtcaccctgagcgacggcaccgggcgcctctacgtgatcggcaccggcgagcgggggaactccgccagcgagaagtgggagatcatgttcaacgaggagctgggcgaccccttcatcatcatccactccatcagcctgctcaacgccgaggagcactccatcgcgacgctgctgctccgcatcgagaaggaggagctggacatgaaggggagcggcttctacgtgtccctggagtgggtcaccatcagcaagaagaaccaggacaacaagaagtacgagatcatcaagcgggacatcctccgcgggaagtccgtgccccactacgccgccatcgagcccgacggcaacggcctgatgatcgtgagctacaagtccctgaccttcgtccaggccgggcaggacctcgaggagaacatggacgaggacatcagcgagaagatcaaggagccgctgtactactggcagcagaccgaggacgacctgacggtgaccatccggctccccgaggacagcaccaaggaggacatccagatccagttcctgcccgaccacatcaacatcgtgctgaaggaccaccagttcctcgagggcaagctgtactccagcatcgaccacgagtccagcacctggatcatcaaggagtccaacagcctggagatctccctcatcaagaagaacgaggggctgacgtggcccgagctggtcatcggcgacaagcagggcgagctcatccgcgacagcgcccagtgcgcggccatcgccgagcggctgatgcacctgacctccgaggagctcaacccgaaccccgacaaggagaagccgccctgcaacgcccaggagctggaggagtgcgacatcttcttcgaggagagctccagcctgtgccgcttcgacgggaacaccctcaagaccacgcacgtggtgaacctgggctccaaccagtacctgttcagcgtcatcgtggaccccaaggagatgccctgcttctgcctgcggcacgacgtggacgccctcctgtggcagccccactccagcaagcaggacgacatgtgggagcacatcgcgaccttcaacgccctggggtacgtccaggcctccaagcgcgacaagaagttcttcgcctgcgcccccaactacagctacgcggccctctgcgagtgcctgcggcgcgtgttcatctaccggcagccggcccccatgtccaccgtgctgtacaaccgcaaggagggccgccaggtcggccaggtggccaagcagcaggtcgccagcctcgagaccaacgaccccatcctggggttccaggcgacgaacgagcggctgttcgtgctcaccaccaagaacctgttcctgatcaaggtgaacaccgagaactga

SEQ ID NO: 1114 - RNA, 1563 nt, synthetic construct
  misc_feature 1..1563: note = CCDS41288.1_variant
  source 1..1563: mol_type = other RNA
atgagcagccccctggcctccctctccaagacccgcaaggtgccgctgcccagcgagcccatgaaccccggccggcgcgggatccggatctacggcgacgaggacgaggtcgacatgctgtccgacgggtgcggcagcgaggagaagatctccgtgccgagctgctacgggggcatcggcgcccccgtgtcccgccaggtccccgcgagccacgactccgagctcatggccttcatgacccggaagctgtgggacctggagcagcaggtcaaggcccagacggacgagatcctcagcaaggaccagaagatcgccgccctggaggacctggtgcagaccctccgcccccacccggcggaggccaccctgcagcggcaggaggagctggagaccatgtgcgtgcagctccagcgccaggtgcgggagatggagcgcttcctgtccgactacgggctgcagtgggtgggcgagcccatggaccaggaggacagcgagtccaagacggtcagcgagcacggggagcgggactggatgaccgccaagaagttctggaagcccggcgactccctcgcgcccccggaggtggacttcgaccgcctgctggccagcctccaggacctgtccgagctggtggtcgagggggacacccaggtgacccccgtgcccggcggcgcccggctccgcacgctggagcccatcccgctgaagctctaccggaacgggatcatgatgttcgacggccccttccagcccttctacgaccccagcacccagcgctgcctgcgggacatcctggacgggttcttcccgagcgagctccagcgcctgtaccccaacggcgtccccttcaaggtgtccgacctgcggaaccaggtgtacctcgaggacggcctggaccccttcccgggggagggccgcgtcgtggggcggcagctgatgcacaaggccctcgaccgcgtggaggagcaccccggcagccgcatgaccgccgagaagttcctgaaccggctgcccaagttcgtcatccgccagggggaggtgatcgacatccggggccccatccgcgacaccctccagaactgctgcccgctgcccgcccggatccaggagatcgtggtcgagacgcccaccctggcggccgagcgcgagcggtcccaggagagcccgaacacccccgccccgcccctctccatgctgcgcatcaagagcgagaacggcgagcaggccttcctgctcatgatgcagcccgacaacaccatcggggacgtgcgggccctgctggcgcaggcccgcgtcatggacgcctccgccttcgagatcttcagcacgttcccgcccaccctctaccaggacgacaccctgaccctgcaggccgcgggcctcgtgcccaaggccgccctgctgctgcgggcccgccgggcccccaagtccagcctcaagttctcccccgggccctgccccggcccggggcccggccccagccccggcccggggcccggcccctcccccgggccgggccccgggcccagcccctgcccgggcccctcccccagcccgcagtga

SEQ ID NO: 1115 - RNA, 429 nt, synthetic construct
  misc_feature 1..429: note = AAA88022_variant
  source 1..429: mol_type = other RNA
atggccaccaagatcgacaaggaggcctgccgcgcggcctacaacctggtgcgggacgacggcagcgccgtcatctgggtgaccttcaagtacgacgggtccacgatcgtgcccggcgagcagggggccgagtaccagcacttcatccagcagtgcaccgacgacgtccgcctcttcgccttcgtgcggttcaccaccggcgacgcgatgagcaagcgctccaagttcgccctgatcacgtggatcggggagaacgtgagcggcctgcagcgggccaagaccggcaccgacaagaccctcgtcaaggaggtggtgcagaacttcgccaaggagttcgtcatctccgaccgcaaggagctggaggaggacttcatcaagagcgagctgaagaaggccgggggcgcgaactacgacgcccagacggagtga

SEQ ID NO: 1116 - RNA, 495 nt, synthetic construct
  misc_feature 1..495: note = CCQ43891_variant
  source 1..495: mol_type = other RNA
atggccacccgcgacccctgggtgtggatggccagcccggacttccaggcgcggaagggcaagcgcgtccaccaggagaccctggcccccggggagacgaaggacaagatggagctcctgggcctgcgggggcccctcgacctgctgggccccggggccctcctggccaccctgggcaagatggccccgggcgagcacaaggcgcagcgcgcccccaaggagtcccccgacaagaccgcccggtgggcccagcgcgacccccaggggccgcgggtgagcctcgagtacctggagcgccgggcgaccatgggccaccaggcctccctggaccaccaggggccccgcgccagccagggcgcctgggggctcggcgagcggacggtgtggaccgtcccccaggaccgccggggctccctggccaccgaggcgcgcatggagctgcaggggcccggcgtgccgcaggccagccgggcctcccgcgagacccagtggtga

SEQ ID NO: 1117 - RNA, 1623 nt, synthetic construct
  misc_feature 1..1623: note = AAO18361_variant
  source 1..1623: mol_type = other RNA
atgggccccggggagcgcgccggcgggggcggggacgccggcaagggcaacgcggccgggggcgggggcgggggccggagcgccaccaccgccggctcccgcgccgtgagcgcgctgtgcctcctgctgtccgtcgggagcgccgccgcctgcctcctgctgggcgtgcaggcggccgccctccaggggcgggtggccgccctggaggaggagcgcgagctgctccggcgcgcgggcccgcccggcgccctggacgcctgggccgagccccacctggagcggctcctgcgcgagaagctggacgggctcgccaagatccggacggcgcgcgaggccccctccgagtgcgtctgcccgcccggcccgcccgggcggcgcggcaagcccgggcggcgcggcgaccccggcccgcccgggcagagcggccgggacgggtaccccggccccctggggctggacggcaagcccggcctccccgggccgaagggcgagaagggggcccccggcgacttcgggccccgcggcgaccagggccaggacggggccgccgggcccccgggcccgcccggcccgcccggcgcgcgggggccgcccggcgacaccgggaaggacggcccccgcggggcccagggccccgccggccccaagggggagcccggccaggacggggagatgggccccaaggggccgcccggccccaagggcgagcccggggtgcccggcaagaagggggacgacggcaccccctcccagcccgggccgcccggccccaagggcgagcccgggagcatgggcccgcgcggggagaacggcgtggacggggcccccggccccaagggcgagcccgggcaccggggcaccgacggggccgcgggcccgcggggcgcccccgggctgaagggcgagcagggggacacggtcgtgatcgactacgacggccgcatcctggacgccctcaaggggccgcccggcccccagggcccgcccgggccgcccggcatccccggggccaagggcgagctggggctgcccggcgcgcccggcatcgacggggagaagggccccaaggggcagaagggcgaccccggggagcccggcccggccggcctcaagggggaggccggcgagatggggctgtccggcctgcccggcgccgacgggctcaagggcgagaagggggagagcgcctccgacagcctgcaggagtccctggcgcagctcatcgtggagcccgggcccccgggcccgcccggcccgcccggccccatggggctgcagggcatccaggggcccaagggcctggacggggccaagggcgagaagggcgccagcggggagcgcggcccctccgggctccccggccccgtcgggccgcccggcctgatcggcctgcccgggaccaagggcgagaaggggcggcccggcgagcccgggctcgacggcttccccggcccgcgcggggagaagggcgaccggagcgagcgcggggagaagggcgagcggggcgtgcccgggcgcaagggcgtgaaggggcagaagggcgagcccgggcccccgggcctggaccagccctgccccgtcggcccggacgggctgcccgtgcccggctgctggcacaagtga

SEQ ID NO: 1118 - RNA, 492 nt, synthetic construct
  misc_feature 1..492: note = CAG25548_variant
  source 1..492: mol_type = other RNA
atgctggcccgcgccctcctgctgtgcgcggtgctcgccctgagccacaccgccaacccctgctgctcccacccctgccagaaccggggcgtctgcatgagcgtggggttcgaccagtacaagtgcgactgcacccgcaccggcttctacggggagaactgctccacccccgagttcctgacccggatcaagctgttcctcaagcccacccccaacacggtgcactacatcctgacccacttcaagggcttctggaacgtcgtgaacaacatcccgttcctccgcaacgccatcatgagctacgtgctgacctcccggagccacctgatcgactccccgcccacctacaacgccgactacgggtacaagagctgggaggcgttctccaacctcagctactacacgcgcgccctgccgcccgtccccgacgactgccccacgcccctgggcgtgaaggccctccacgcctccgtgttccaggaccggagctga

SEQ ID NO: 1119 - RNA, 1632 nt, synthetic construct
  misc_feature 1..1632: note = AAC50809_variant
  source 1..1632: mol_type = other RNA
atgggcaccagcctgtcccccaacgacccgtggcccctcaaccccctgagcatccagcagaccacgctgctcctgctgctctccgtgctggccaccgtccacgtggggcagcgcctgctccggcagcgccggcgccagctgcggagcgcgcccccgggccccttcgcctggcccctgatcgggaacgccgccgccgtgggccaggccgcgcacctctccttcgcccgcctggcccggcgctacggggacgtcttccagatccggctgggcagctgccccatcgtggtgctcaacggcgagcgcgccatccaccaggcgctggtccagcaggggtccgccttcgccgaccggccggccttcgccagcttccgcgtggtgtccggcgggcggagcatggcgttcggccactactccgagcactggaaggtccagcgccgggccgcccacagcatgatgcgcaacttcttcacccggcagccccgctcccgccaggtgctggaggggcacgtgctcagcgaggcccgggagctggtcgccctgctcgtgcggggctccgcggacggcgccttcctggacccccgccccctgaccgtggtcgccgtggccaacgtgatgagcgccgtctgcttcgggtgccgctactcccacgacgacccggagttccgggagctcctgagccacaacgaggagttcggccgcacggtgggggcgggctccctggtggacgtcatgccctggctccagtacttccccaaccccgtgcggaccgtgttccgcgagttcgagcagctgaaccggaacttcagcaacttcatcctggacaagttcctccgccactgcgagagcctgcggccgggcgccgcgccccgcgacatgatggacgccttcatcctgtccgccgagaagaaggccgccggggacagccacggcgggggcgcccggctcgacctggagaacgtccccgccaccatcaccgacatcttcggggcgtcccaggacacgctgagcaccgccctccagtggctgctgctcctgttcacccgctaccccgacgtgcagacccgggtccaggccgagctggaccaggtggtgggccgcgaccggctcccgtgcatgggcgaccagcccaacctgccctacgtcctggccttcctctacgaggccatgcgcttctccagcttcgtgcccgtgacgatcccgcacgcgaccaccgccaacacctccgtcctggggtaccacatccccaaggacacggtggtgttcgtcaaccagtggagcgtgaaccacgaccccctgaagtggcccaacccggagaacttcgaccccgcccggttcctcgacaaggacggcctgatcaacaaggacctgacctcccgcgtgatgatcttcagcgtcgggaagcggcgctgcatcggcgaggagctgtccaagatgcagctgttcctcttcatcagcatcctggcccaccagtgcgacttccgggccaaccccaacgagccggcgaagatgaacttctcctacgggctcaccatcaagcccaagagcttcaaggtgaacgtgaccctgcgcgagtccatggagctgctcgacagcgccgtccagaacctgcaggccaaggagacgtgccagtga

SEQ ID NO: 1120 - RNA, 333 nt, synthetic construct
  misc_feature 1..333: note = NM_001129828_variant
  source 1..333: mol_type = other RNA
atgtggatgggcctgatccagctcgtggagggggtcaagcgcaaggaccagggcttcctggagaaggagttctaccacaagaccaacatcaagatgcggtgcgagttcctggcctgctggcccgccttcaccgtgctcggggaggcgtggcgcgaccaggtggactggagccggctgctgcgcgacgccggcctcgtcaagatgtcccggaagccgcgcgccagcagccccctgtccaacaaccacccgcccacgcccaagcggttcccccgccagcccgggcgggagaagggccccatcaaggaggtgccgggcaccaaggggtccccctga

SEQ ID NO: 1121 - RNA, 384 nt, synthetic construct
  misc_feature 1..384: note = NM_001129826_variant
  source 1..384: mol_type = other RNA
atgtggatgggcctgatccagctcgtggagggggtcaagcgcaaggaccagggcttcctggagaaggagttctaccacaagaccaacatcaagatgcggtgcgagttcctggcctgctggcccgccttcaccgtgctcggggaggcgtggcgcgaccaggtggactggagccggctgctgcgcgacgccggcctcgtcaagatgtcccggaagccgcgcgccagcagccccctgtccaacaaccacccgcccacgcccaagcggcgcgggtccggccggcaccccctgaaccccggccccgaggccctcagcaagttcccgcgccagcccgggcgggagaagggccccatcaaggaggtgcccgggaccaagggctccccgtga

SEQ ID NO: 1122 - RNA, 570 nt, synthetic construct
  misc_feature 1..570: note = AAI40914_variant
  source 1..570: mol_type = other RNA
atgaccgacaagaccgagaaggtggccgtcgaccccgagacggtgttcaagcgcccgcgggagtgcgacagcccctcctaccagaagcgccagcggatggccctgctcgcgcgcaagcagggcgccggggacagcctgatcgccggctccgccatgagcaaggccaagaagctgatgaccgggcacgcgatcccgccctcccagctcgacagccagatcgacgacttcaccggcttctccaaggaccggatgatgcagaagcccgggagcaacgcccccgtgggcggcaacgtcacctccagcttctccggggacgacctggagtgccgcgagacggccagctcccccaagagccagcgggagatcaacgccgacatcaagcgcaagctggtgaaggagctccggtgcgtgggccagaagtacgagaagatcttcgagatgctggagggggtccagggccccaccgcggtgcgcaagcggttcttcgagtccatcatcaaggaggccgcccgctgcatgcggcgcgacttcgtgaagcacctgaagaagaagctcaagcggatgatctga

SEQ ID NO: 1123 - RNA, 795 nt, synthetic construct
  misc_feature 1..795: note = AAH20662_variant
  source 1..795: mol_type = other RNA
atgctgcgcctcctgcggctggccctcgccttctacggccgcaccgcggaccccgccgagcggcaggggccgcagcagcagggcctgccccagggggacacccagctgacgaccgtgcagggcgtcgtgaccagcttctgcggggactacggcatgatcgacgagtccatctacttcagctccgacgtggtcaccggcaacgtgcccctcaaggtggggcagaaggtcaacgtggtggtcgaggaggacaagccccactacggcctgcgcgccatcaaggtggacgtggtcccgcggcacctgtacggggccggccccagcgactccgggacgcgcgtgctcatcggctgcgtgaccagcatcaacgaggacaacatctacatctccaacagcatctacttctccatcgccatcgtcagcgaggacttcgtgccctacaagggcgacctgctggaggtggagtactccaccgagcccgggatcagcaacatcaaggcgacctccgtcaagccgatccggtgcatccacacggaggaggtgtgcatcaccagcgtgcacggccgcaacggggtcatcgactacaccatcttcttcaccctcgactccgtgaagctgcccgacggctacgtgccccaggtcgacgacatcgtgaacgtcgtgatggtggagagcatccagttctgcttcatctggcgggccatctccatcacgcccgtccacaagagctccagcggcttccaggacgacgggggcctggggcgcccgaagcgggagcgccggagccagtccatctga

SEQ ID NO: 1124 - RNA, 2844 nt, synthetic construct
  misc_feature 1..2844: note = CCDS735.1_variant
  source 1..2844: mol_type = other RNA
atgagcctgccctcccgccagaccgccatcatcgtgaacccgcccccccccgagtacatcaacaccaagaagaacggccggctcacgaaccagctgcagtacctgcagaaggtcgtgctcaaggacctgtggaagcacagcttctcctggccgttccagcgccccgtggacgccgtcaagctgcagctccccgactactacaccatcatcaagaaccccatggacctgaacaccatcaagaagcggctggagaacaagtactacgcgaaggccagcgagtgcatcgaggacttcaacaccatgttctccaactgctacctctacaacaagccgggggacgacatcgtgctgatggcccaggccctggagaagctcttcatgcagaagctgagccagatgccccaggaggagcaggtggtcggcgtgaaggagcgcatcaagaaggggacgcagcagaacatcgccgtgtccagcgcgaaggagaagtccagcccctccgccaccgagaaggtcttcaagcagcaggagatccccagcgtgttcccgaagacctccatcagccccctgaacgtggtccagggcgcctccgtgaacagctccagccagaccgccgcgcaggtgacgaagggggtcaagcggaaggccgacaccaccacccccgccacgtccgccgtgaaggccagcagcgagttctcccccaccttcaccgagaagagcgtggcgctcccgcccatcaaggagaacatgcccaagaacgtcctgcccgactcccagcagcagtacaacgtggtgaagaccgtcaaggtgacggagcagctgcgccactgcagcgagatcctcaaggagatgctggccaagaagcacttctcctacgcctggccgttctacaaccccgtggacgtcaacgccctgggcctccacaactactacgacgtggtcaagaaccccatggacctgggcaccatcaaggagaagatggacaaccaggagtacaaggacgcctacaagttcgcggccgacgtgcggctgatgttcatgaactgctacaagtacaaccccccggaccacgaggtggtcaccatggcccgcatgctccaggacgtgttcgagacccacttcagcaagatccccatcgagcccgtggagtccatgcccctgtgctacatcaagacggacatcaccgagaccaccgggcgggagaacacgaacgaggccagctccgagggcaacagctccgacgacagcgaggacgagcgcgtcaagcggctggccaagctccaggagcagctgaaggcggtgcaccagcagctgcaggtgctctcccaggtcccgttccgcaagctgaacaagaagaaggagaagagcaagaaggagaagaagaaggagaaggtgaacaactccaacgagaacccccggaagatgtgcgagcagatgcgcctgaaggagaagagcaagcggaaccagcccaagaagcgcaagcagcagttcatcgggctcaagtccgaggacgaggacaacgccaagccgatgaactacgacgagaagcggcagctgagcctgaacatcaacaagctccccggcgacaagctggggcgcgtggtccacatcatccagtcccgggagcccagcctgagcaactccaaccccgacgagatcgagatcgacttcgagaccctcaaggccagcaccctgcgcgagctggagaagtacgtgtccgcctgcctccggaagcgcccgctgaagccccccgccaagaagatcatgatgagcaaggaggagctgcactcccagaagaagcaggagctcgagaagcgcctgctggacgtgaacaaccagctcaacagccggaagcgccagaccaagtccgacaagacgcagcccagcaaggcggtcgagaacgtgtcccggctgagcgagtccagctccagctccagctccagcagcgagtccgagagctccagctccgacctgagctccagcgactccagcgactccgagagcgagatgttcccgaagttcaccgaggtgaagcccaacgactcccccagcaaggagaacgtcaagaagatgaagaacgagtgcatccccccggagggccgcaccggcgtgacccagatcgggtactgcgtgcaggacacgacctccgccaacaccaccctggtccaccagacgacccccagccacgtgatgccccccaaccaccaccagctcgccttcaactaccaggagctggagcacctgcagaccgtgaagaacatctccccgctccagatcctgccccccagcggcgactccgagcagctgagcaacgggatcaccgtcatgcaccccagcggcgactccgacaccacgatgctcgagagcgagtgccaggccccggtgcagaaggacatcaagatcaagaacgcggactcctggaagagcctgggcaagcccgtgaagccctccggggtcatgaagagctccgacgagctgttcaaccagttccggaaggccgccatcgagaaggaggtgaaggcccgcacccaggagctcatccggaagcacctggagcagaacaccaaggagctgaaggccagccaggagaaccagcgcgacctcggcaacgggctgaccgtggagtccttcagcaacaagatccagaacaagtgctccggcgaggagcagaaggagcaccagcagagctccgaggcgcaggacaagagcaagctgtggctcctgaaggaccgggacctggcccgccagaaggagcaggagcggcgccggcgcgaggccatggtcgggacgatcgacatgaccctccagtccgacatcatgaccatgttcgagaacaacttcgactga

SEQ ID NO: 1125 - RNA, 543 nt, synthetic construct
  misc_feature 1..543: note = CCDS35455.1_variant
  source 1..543: mol_type = other RNA
atgcaggccgagggccgcgggaccggcgggagcaccggcgacgccgacgggcccggcggcccggggatccccgacggccccgggggcaacgccgggggccccggcgaggccggggccacgggcgggcggggcccgcgcggcgccggggccgcgcgggcctccggcccccgcgggggcgcgccccgggggccccacggcggcgccgcgagcgcccaggacgggcgctgcccgtgcggcgcccggcgccccgactcccggctgctcgagctgcacatcaccatgcccttcagctcccccatggaggccgagctggtgcgccggatcctcagccgcgacgccgcgccgctgccccggcccggggccgtcctgaaggacttcaccgtgtccggcaacctcctgttcatccgcctgaccgccgccgaccaccggcagctccagctgagcatctccagctgcctgcagcagctctccctgctgatgtggatcacgcagtgcttcctccccgtgttcctggcccaggcgccgagcgggcagcgccggtga

SEQ ID NO: 1126 - RNA, 633 nt, synthetic construct
  misc_feature 1..633: note = CAA10196_variant
  source 1..633: mol_type = other RNA
atgcaggccgagggccaggggaccggcgggagcaccggcgacgccgacgggcccggcggccccgggatccccgacggccccgggggcaacgccgggggccccggcgaggccggggccacgggcgggcgcggcccgcggggcgccggggccgcccgcgcctccggcccccgcgggggcgcgccccgggggccccacggcggcgccgcgagcgcccaggacgggcggtgcccgtgcggcgcccgccggcccgactcccgcctgctccagctgcacatcaccatgcccttcagctcccccatggaggccgagctggtgcggcgcatcctcagccgggacgccgcgccgctgccccgccccggggccgtcctgaaggacttcaccgtgtccggcaacctcctgttcatgagcgtgcgggaccaggaccgcgagggggccggccggatgcgcgtcgtgggctgggggctgggctccgccagccccgaggggcagaaggcccgggacctccgcaccccgaagcacaaggtgtccgagcagcggcccggcacgcccgggcccccgccgcccgagggcgcgcagggcgacgggtgccgcggcgtcgccttcaacgtgatgttcagcgcgccccacatctga

SEQ ID NO: 1127 - RNA, 1992 nt, synthetic construct
  misc_feature 1..1992: note = CCDS13459.1_variant
  source 1..1992: mol_type = other RNA
atggccgccaccgagatcagcgtgctgtccgagcagttcaccaagatcaaggagctcgagctgatgcccgagaagggcctgaaggaggaggagaaggacggggtctgccgcgagaaggaccaccggagcccgtccgagctcgaggcggagcgcacgagcggcgccttccaggactccgtgctggaggaggaggtggagctggtcctcgcccccagcgaggagtccgagaagtacatcctgaccctgcagaccgtgcacttcaccagcgaggccgtggagctccaggacatgtccctgctgagcatccagcagcaggagggggtccaggtggtggtccagcagcccggccccgggctcctgtggctggaggagggcccgcggcagtccctccagcagtgcgtggccatcagcatccagcaggagctgtacagcccccaggagatggaggtgctgcagttccacgcgctcgaggagaacgtcatggtggcctccgaggactccaagctggccgtgagcctggccgagacgaccggcctcatcaagctggaggaggagcaggagaagaaccagctgctcgcggagcgcaccaaggagcagctgttcttcgtcgagaccatgtccggggacgagcggagcgacgagatcgtgctgacggtgtccaacagcaacgtcgaggagcaggaggaccagcccaccgccggccaggccgacgccgagaaggccaagagcaccaagaaccagcgcaagaccaagggggcgaagggcacgttccactgcgacgtgtgcatgttcacctccagccggatgtccagcttcaaccgccacatgaagacccacacctccgagaagccccacctctgccacctgtgcctgaagacgttccggaccgtgaccctcctgcgcaaccacgtcaacacccacacggggacccggccgtacaagtgcaacgactgcaacatggccttcgtgaccagcggcgagctggtgcgccaccggcgctacaagcacacccacgagaagcccttcaagtgctccatgtgcaagtacgccagcgtcgaggcctccaagctcaagcggcacgtgcgcagccacacgggcgagcggcccttccagtgctgccagtgctcctacgccagccgcgacacctacaagctgaagcggcacatgcgcacccactccggggagaagccctacgagtgccacatctgccacacccggttcacgcagagcggcaccatgaagatccacatcctgcagaagcacggggagaacgtcccgaagtaccagtgcccccactgcgcgaccatcatcgcccgcaagtccgacctccgcgtgcacatgcggaacctgcacgcctacagcgccgccgagctgaagtgccgctactgctccgcggtgttccacgagcggtacgccctcatccagcaccagaagacccacaagaacgagaagcgcttcaagtgcaagcactgcagctacgcctgcaagcaggagcggcacatgacggcccacatccgcacccacaccggcgagaagcccttcacgtgcctgtcctgcaacaagtgcttccggcagaagcagctgctcaacgcccacttccgcaagtaccacgacgcgaacttcatccccaccgtctacaagtgcagcaagtgcggcaaggggttcagccggtggatcaacctgcaccgccactccgagaagtgcggcagcggggaggccaagtccgccgccagcggcaaggggcggcgcacccggaagcgcaagcagaccatcctgaaggaggcgaccaagggccagaaggaggccgccaagggctggaaggaggccgccaacggggacgaggcggccgccgaggaggcctccaccacgaagggcgagcagttcccgggggagatgttccccgtggcctgccgggagaccaccgcgcgcgtgaaggaggaggtcgacgagggcgtgacctgcgagatgctcctgaacacgatggacaagtga

SEQ ID NO: 1128 - RNA, 2148 nt, synthetic construct
  misc_feature 1..2148: note = CCDS11368.1_variant
  source 1..2148: mol_type = other RNA
atgagccaggtgatgtccagccccctgctcgccggcgggcacgccgtctccctggcgccgtgcgacgagccccgccggaccctgcaccccgcccccagcccgtccctccccccccagtgcagctactacaccacggagggctggggggcccaggccctgatggcccccgtgccgtgcatgggcccccccgggcgcctgcagcaggcgccccaggtggaggccaaggccacctgcttcctcccgtcccccggcgagaaggccctgggcacccccgaggacctggacagctacatcgacttctccctcgagagcctgaaccagatgatcctggagctcgaccccaccttccagctgctgccgcccgggacgggcgggtcccaggcggagctcgcccagagcaccatgtccatgcggaagaaggaggagagcgaggccctggacatcaagtacatcgaggtcacctccgcccgcagccggtgccacgacggcccccagcactgctccagcccctccgtgaccccgcccttcgggagcctgcgcagcggcggcctcctgctgtcccgggacgtgccccgcgagacgcggagctccagcgagtccctcatcttcagcgggaaccagggccgcgggcaccagcggcccctgccgccctccgagggcctgagcccccgccccccgaactcccccagcatctccatcccctgcatgggcagcaaggcctccagcccgcacgggctcggctcccccctggtcgcgagcccccggctggagaagcgcctcgggggcctggccccccagcgggggtcccgcatcagcgtgctgtccgccagcccggtgagcgacgtctcctacatgttcggcagctcccagagcctcctgcactccagcaactccagccaccagtccagctcccggagcctggagtcccccgccaacagctccagctccctccacagcctgggcagcgtgtccctgtgcacccgccccagcgacttccaggccccccggaacccgaccctcaccatggggcagccccgcacgccccactcccccccgctggcgaaggagcacgccagctcctgcccccccagcatcaccaactccatggtggacatccccatcgtcctgatcaacggctgcccggagcccgggagctcccccccccagcggaccccgggccaccagaacagcgtgcagcccggggccgcctcccccagcaacccctgcccggccacccgctccaacagccagacgctctccgacgcgcccttcaccacctgccccgagggcccggcccgcgacatgcagcccaccatgaagttcgtgatggacacgagcaagtactggttcaagcccaacatcacccgggagcaggccatcgagctgctgcgcaaggaggagcccggcgccttcgtcatccgggactccagctcctaccgcgggagcttcggcctcgccctgaaggtgcaggaggtgccggcgagcgcccagtcccggcccggggaggacagcaacgacctgatccgccacttcctcatcgagtccagcgccaagggcgtccacctgaagggggccgacgaggagccctacttcggctccctgagcgcgttcgtgtgccagcactccatcatggccctcgccctgccctgcaagctgaccatcccgcagcgggagctgggcggggccgacggcgccagcgactccaccgacagccccgcgtcctgccagaagaagagcgccgggtgccacacgctctacctgtccagcgtgtccgtcgagaccctgaccggcgccctcgccgtgcagaaggccatcagcaccacgttcgagcgcgacatcctgcccacccccaccgtggtccacttcaaggtgaccgagcagggcatcacgctgaccgacgtccagcggaaggtgttcttccgccggcactacccgctcaccaccctgcgcttctgcgggatggaccccgagcagcggaagtggcagaagtactgcaagccctcctggatcttcggcttcgtggcgaagagccagacggagccccaggagaacgtctgccacctgttcgccgagtacgacatggtgcagccggcctcccaggtgatcgggctcgtcaccgccctgctgcaggacgccgagcgcatgtga

SEQ ID NO: 1129 - RNA, 1302 nt, synthetic construct
  misc_feature 1..1302: note = AAH06510_variant
  source 1..1302: mol_type = other RNA
atggccctgcgcgtgacccggaacagcaagatcaacgccgagaacaaggcgaagatcaacatggccggcgccaagcgcgtccccaccgccccggccgcgacgtccaagcccgggctccggccccgcaccgccctgggcgacatcgggaacaaggtgagcgagcagctgcaggccaagatgcccatgaagaaggaggccaagccgtccgcgaccggcaaggtgatcgacaagaagctccccaagcccctggagaaggtccccatgctggtgccggtgcccgtcagcgagcccgtgcccgagccggagcccgagcccgagcccgagccggtgaaggaggagaagctctcccccgagcccatcctggtcgacaccgccagcccctccccgatggagacgagcgggtgcgcccccgccgaggaggacctgtgccaggccttctccgacgtgatcctcgcggtgaacgacgtcgacgccgaggacggcgccgaccccaacctgtgcagcgagtacgtgaaggacatctacgcctacctgcggcagctcgaggaggagcaggccgtgcgccccaagtacctgctgggccgggaggtcaccgggaacatgcgcgcgatcctcatcgactggctggtccaggtgcagatgaagttccggctgctccaggagaccatgtacatgaccgtgtccatcatcgaccgcttcatgcagaacaactgcgtgccgaagaagatgctgcagctggtgggcgtcacggccatgttcatcgccagcaagtacgaggagatgtacccgcccgagatcggggacttcgccttcgtgaccgacaacacctacaccaagcaccagatccggcagatggagatgaagatcctccgcgccctgaacttcggcctggggcggcccctccccctgcacttcctgcgccgggcgtccaagatcggcgaggtggacgtcgagcagcacacgctcgccaagtacctgatggagctgaccatgctcgactacgacatggtgcacttcccgcccagccagatcgccgccggcgccttctgcctggcgctgaagatcctcgacaacggggagtggacccccaccctgcagcactacctgtcctacacggaggagagcctcctgcccgtcatgcagcacctggccaagaacgtggtgatggtcaaccagggcctcaccaagcacatgaccgtgaagaacaagtacgccacctccaagcacgccaagatcagcacgctgccccagctgaactccgcgctcgtgcaggacctggccaaggccgtcgccaaggtgtga

SEQ ID NO: 1130 - RNA, 888 nt, synthetic construct
  misc_feature 1..888: note = AAA58392_variant
  source 1..888: mol_type = other RNA
atggagcaccagctgctctgctgcgaggtggagaccatccgccgggcctaccccgacgccaacctgctgaacgaccgcgtcctccgggcgatgctgaaggccgaggagacctgcgccccgagcgtgtcctacttcaagtgcgtgcagaaggaggtcctgcccagcatgcgcaagatcgtggccacgtggatgctcgaggtgtgcgaggagcagaagtgcgaggaggaggtcttccccctggccatgaactacctggaccggttcctctccctggagcccgtgaagaagtcccgcctgcagctcctgggcgcgacctgcatgttcgtggccagcaagatgaaggagaccatcccgctgaccgccgagaagctctgcatctacacggacaacagcatccggcccgaggagctgctgcagatggagctcctgctggtcaacaagctcaagtggaacctggccgcgatgacgccccacgacttcatcgagcacttcctgtccaagatgcccgaggccgaggagaacaagcagatcatccgcaagcacgcccagaccttcgtggccctctgcgccaccgacgtgaagttcatcagcaacccgccctccatggtcgcggccgggagcgtggtggccgccgtccagggcctgaacctgcggtcccccaacaacttcctcagctactaccgcctgacccggttcctgtcccgcgtgatcaagtgcgaccccgactgcctccgggcctgccaggagcagatcgaggcgctgctggagagctccctccgccaggcccagcagaacatggacccgaaggccgccgaggaggaggaggaggaggaggaggaggtggacctggcctgcacccccaccgacgtccgggacgtggacatctga

SEQ ID NO: 1131 - RNA, 651 nt, synthetic construct
  misc_feature 1..651: note = AAA36601_variant
  source 1..651: mol_type = other RNA
atgctgcgcctcagcgagcggaacatgaaggtgctgctggccgccgcgctcatcgccggctccgtcttcttcctgctgctccccgggccgagcgccgccgacgagaagaagaagggccccaaggtgaccgtgaaggtctacttcgacctgcgcatcggggacgaggacgtgggccgggtgatcttcgggctgttcggcaagaccgtccccaagacggtggacaacttcgtggccctcgcgaccggcgagaaggggttcggctacaagaactccaagttccaccgcgtcatcaaggacttcatgatccagggcggggacttcacccgcggggacggcaccggcggcaagagcatctacggggagcggttccccgacgagaacttcaagctgaagcactacgggccgggctgggtgtccatggccaacgccggcaaggacacgaacgggagccagttcttcatcaccaccgtgaagaccgcctggctggacggcaagcacgtcgtgttcgggaaggtgctcgagggcatggaggtcgtgcggaaggtggagtccacgaagaccgacagccgcgacaagcccctgaaggacgtcatcatcgcggactgcgggaagatcgaggtggagaagcccttcgccatcgccaaggagtga

SEQ ID NO: 1132 - RNA, 1044 nt, synthetic construct
  misc_feature 1..1044: note = AAD10634_variant
  source 1..1044: mol_type = other RNA
atgccccgcggccagaagtccaagctgcgggcccgcgagaagcggcgcaaggcccgggaggagacccaggggctcaaggtggcgcacgccaccgccgccgagaaggaggagtgcccgagcagctcccccgtcctgggcgacacgcccaccagctcccccgccgcggggatcccgcagaagccccagggcgccccgcccaccaccacggccgccgcggccgtgagctgcaccgagtccgacgagggggccaagtgccagggcgaggagaacgccagcttctcccaggccaccaccagcacggagtccagcgtgaaggaccccgtcgcgtgggaggccggcatgctgatgcacttcatcctccgcaagtacaagatgcgggagcccatcatgaaggccgacatgctgaaggtggtggacgagaagtacaaggaccacttcaccgagatcctgaacggggcctcccgccggctcgagctggtcttcggcctggacctcaaggaggacaaccccagcgggcacacctacaccctggtgtccaagctgaacctcacgaacgacggcaacctgagcaacgactgggacttcccccgcaacgggctgctcatgccgctgctgggcgtgatcttcctcaagggcaactccgccaccgaggaggagatctggaagttcatgaacgtcctgggggcgtacgacggcgaggagcacctgatctacggggagccccggaagttcatcacccaggacctcgtgcaggagaagtacctgaagtacgagcaggtccccaacagcgacccgccccgctaccagttcctgtggggcccccgggcctacgccgagaccacgaagatgaaggtgctcgagttcctggccaagatgaacggcgccacgccccgcgacttcccctcccactacgaggaggcgctgcgggacgaggaggagcgcgcccaggtgcggagcagcgtgcgcgcccggcgccggaccaccgccaccaccttccgcgcccgctcccgggcgccgttcagccgctccagccaccccatgtga

SEQ ID NO: 1133 - RNA, 2436 nt, synthetic construct
  misc_feature 1..2436: note = BAF91373_variant
  source 1..2436: mol_type = other RNA
atggagagccagggcgtgcccccggggccctaccgcgccaccaagctgtggaacgaggtcaccacgtccttccgggccggcatgcccctccgcaagcaccggcagcacttcaagaagtacgggaactgcttcaccgcgggcgaggccgtggactggctgtacgacctgctccgcaacaacagcaacttcgggcccgaggtgacccggcagcagaccatccagctgctgcgcaagttcctcaagaaccacgtcatcgaggacatcaagggccggtggggctccgagaacgtggacgacaacaaccagctgttccgcttcccggccacgagccccctgaagaccctcccccggcgctaccccgagctgcggaagaacaacatcgagaacttctccaaggacaaggacagcatcttcaagctgcgcaacctctcccggcgcaccccgaagcggcacgggctgcacctgagccaggagaacggcgagaagatcaagcacgagatcatcaacgaggaccaggagaacgccatcgacaaccgcgagctctcccaggaggacgtggaggaggtctggcggtacgtgatcctgatctacctgcagaccatcctcggggtgcccagcctggaggaggtcatcaaccccaagcaggtcatcccccagtacatcatgtacaacatggccaacacgtccaagcgcggcgtggtgatcctgcagaacaagagcgacgacctcccgcactgggtgctgtccgcgatgaagtgcctggccaactggccccggagcaacgacatgaacaaccccacctacgtggggttcgagcgcgacgtcttccggaccatcgccgactacttcctcgacctgcccgagccgctgctcaccttcgagtactacgagctgttcgtgaacatcctggtggtctgcggctacatcacggtgtccgaccgcagctccggcatccacaagatccaggacgacccccagagctccaagttcctccacctgaacaacctgaacagcttcaagagcaccgagtgcctcctgctgtccctcctgcaccgcgagaagaacaaggaggagagcgactccaccgagcggctgcagatcagcaaccccgggttccaggagcgctgcgccaagaagatgcagctcgtgaacctgcggaaccgccgggtctccgcgaacgacatcatgggcgggagctgccacaacctgatcggcctctccaacatgcacgacctgagctccaacagcaagccccgctgctgctccctggagggcatcgtggacgtgccggggaacagctccaaggaggccagctccgtcttccaccagagcttccccaacatcgagggccagaacaacaagctgttcctggagtccaagcccaagcaggagttcctgctcaacctgcacagcgaggagaacatccagaagcccttctccgccgggttcaagcggaccagcacgctgaccgtgcaggaccaggaggagctgtgcaacggcaagtgcaagagcaagcagctctgccgctcccagagcctgctgctccggtccagcacccgccggaactcctacatcaacaccccggtcgccgagatcatcatgaagcccaacgtggggcagggcagcacgtccgtgcagaccgccatggagagcgagctgggcgagtccagcgcgaccatcaacaagcgcctgtgcaagtccaccatcgagctcagcgagaactccctgctgcccgccagctccatgctcacggggacccagagcctgctgcagccccacctcgagcgggtcgccatcgacgccctgcagctgtgctgcctcctgctgccgccgcccaaccgccggaagctccagctgctgatgcgcatgatctcccggatgagccagaacgtggacatgcccaagctccacgacgccatgggcacccgcagcctgatgatccacaccttctcccggtgcgtgctgtgctgcgcggaggaggtcgacctcgacgagctgctggccgggcgcctcgtgagcttcctgatggaccaccaccaggagatcctccaggtgccctcctacctccagacggccgtcgagaagcacctggactacctgaagaagggccacatcgagaaccccggggacggcctcttcgcgcccctgccgacctacagctactgcaagcagatctccgcccaggagttcgacgagcagaaggtgagcacctcccaggccgccatcgccgagctgctcgagaacatcatcaagaaccgcagcctgcccctgaaggagaagcggaagaagctcaagcagttccagaaggagtaccccctgatctaccagaagcgcttccccaccacggagtccgaggccgccctgttcggcgacaagccgaccatcaagcagcccatgctcatcctgcggaagcccaagttccgcagcctgcggtga

SEQ ID NO: 1134 - RNA, 297 nt, synthetic construct
  misc_feature 1..297: note = AAA46940_variant
  source 1..297: mol_type = other RNA
atgcacggcgacacccccaccctgcacgagtacatgctcgacctgcagccggagacgaccgacctgtactgctacgagcagctcaacgacagctccgaggaggaggacgagatcgacgggcccgccggccaggccgagcccgaccgcgcgcactacaacatcgtgaccttctgctgcaagtgcgacagcaccctgcggctgtgcgtccagtccacgcacgtggacatccgcaccctcgaggacctgctgatggggaccctcggcatcgtgtgccccatctgcagccagaagccgtga

SEQ ID NO: 1135 - RNA, 318 nt, synthetic construct
  misc_feature 1..318: note = AAA46947_variant
  source 1..318: mol_type = other RNA
atgcacggccccaaggccaccctgcaggacatcgtgctccacctggagccgcagaacgagatccccgtcgacctgctctgccacgagcagctgagcgactccgaggaggagaacgacgagatcgacggggtgaaccaccagcacctccccgcccgccgggcggagccccagcgccacaccatgctctgcatgtgctgcaagtgcgaggcccggatcaagctggtggtcgagagctccgccgacgacctgcgcgccttccagcagctgttcctgaacacgctgagcttcgtgtgcccgtggtgcgcctcccagcagtga

SEQ ID NO: 1136 - RNA, 297 nt, synthetic construct
  misc_feature 1..297: note = AAA46951_variant
  source 1..297: mol_type = other RNA
atgcgcggcgagacccccaccctgcaggactacgtgctcgacctgcagccggaggccacggacctgcactgctacgagcagctccccgacagctccgacgaggaggacgtcatcgacagccccgccgggcaggcggagcccgacacctccaactacaacatcgtgaccttctgctgccagtgcaagagcaccctgcggctgtgcgtgcagtccacgcaggtcgacatccgcatcctccaggagctgctgatgggcagcttcgggatcgtgtgcccgaactgctccacccggctctga

SEQ ID NO: 1137 - RNA, 294 nt, synthetic construct
  misc_feature 1..294: note = AAA46959_variant
  source 1..294: mol_type = other RNA
atgcgcggccacaagcccaccctgaaggagtacgtgctcgacctgtacccggagcccaccgacctgtactgctacgagcagctcagcgactccagcgacgaggacgaggggctggaccggcccgacggccaggcccagcccgccacggcggactactacatcgtgacctgctgccacacgtgcaacaccaccgtccgcctgtgcgtgaactccaccgccagcgacctccggaccatccagcagctgctgatggggaccgtcaacatcgtgtgcccgacgtgcgcccagcagtga

SEQ ID NO: 1138 - RNA, 300 nt, synthetic construct
  misc_feature 1..300: note = AAA46967_variant
  source 1..300: mol_type = other RNA
atgcacggcgagatcaccaccctgcaggactacgtgctcgacctggagcccgaggccacggacctgtactgctacgagcagctctgcgacagctccgaggaggaggaggacaccatcgacgggccggccggccaggcgaagcccgacaccagcaactacaacatcgtcacctcctgctgcaagtgcgaggccacgctgcgcctgtgcgtgcagagcacccacatcgacatccggaagctcgaggacctgctgatggggaccttcggcatcgtgtgccccgggtgctcccagcgcgcctga

SEQ ID NO: 1139 - RNA, 330 nt, synthetic construct
  misc_feature 1..330: note = AAA47051_variant
  source 1..330: mol_type = other RNA
atgcgcggccccaagccgaccctgcaggagatcgtgctcgacctgtgcccctacaacgagatccagcccgtcgacctggtgtgccacgagcagctcggggagagcgaggacgagatcgacgagcccgaccacgccgtgaaccaccagcaccagctgctggcccggcgcgacgagccgcagcggcacaccatccagtgctcctgctgcaagtgcaacaacacgctccagctggtcgtggaggcgagccgcgacaccctgcggcagctccagcagctgttcatggactccctgggcttcgtgtgcccctggtgcgccaccgccaaccagtga

SEQ ID NO: 1140 - RNA, 321 nt, synthetic construct
  misc_feature 1..321: note = CAA52574_variant
  source 1..321: mol_type = other RNA
atgcacggcccccgcgagaccctgcaggagatcgtgctccacctggagccgcagaacgagctggaccccgtcgacctcctgtgctacgagcagctgagcgagtccgaggaggagaacgacgaggccgacggggtgagccacgcccagctccccgcgcggcgcgccgagccccagcggcacaagatcctgtgcgtgtgctgcaagtgcgacggccgcatcgagctgaccgtcgagtccagcgccgaggacctccggacgctgcagcagctgttcctctccaccctgagcttcgtgtgcccgtggtgcgccaccaaccagtga

SEQ ID NO: 1141 - RNA, 306 nt, synthetic construct
  misc_feature 1..306: note = M62877.1_variant
  source 1..306: mol_type = other RNA
atgcgcggcaacgtgccccagctgaaggacgtcgtgctccacctgaccccgcagaccgagatcgacctgcagtgctacgagcagttcgacagctccgaggaggaggacgaggtggacaacatgcgggaccagctccccgagcgccgggccgggcaggccacgtgctaccgcatcgaggcgccctgctgccggtgcagctccgtcgtgcagctggccgtggagagctccggcgacaccctgcgcgtcgtgcagcagatgctcatgggggagctgagcctggtgtgcccctgctgcgccaacaactga

SEQ ID NO: 1142 - RNA, 300 nt, synthetic construct
  misc_feature 1..300: note = CAA52586_variant
  source 1..300: mol_type = other RNA
atgcgcggcgacaaggccaccatcaaggactacatcctggacctccagcccgagaccacggacctgcactgctacgagcagctgggggacagctccgacgaggaggacaccgacggcgtggaccggccggacgggcaggccgagcaggcgaccagcaactactacatcgtcacctactgccactcctgcgacagcacgctccgcctgtgcatccactccaccgccaccgacctgcggaccctccagcagatgctgctgggcacgctccaggtggtgtgccccgggtgcgcccgcctgtga

SEQ ID NO: 1143 - RNA, 318 nt, synthetic construct
  misc_feature 1..318: note = CAA52597_variant
  source 1..318: mol_type = other RNA
atgcacggcaaggtgcccaccctgcaggacgtcgtgctcgagctgaccccgcagacggagatcgacctgcagtgcaacgagcagctcgacagctccgaggacgaggacgaggacgaggtggaccacctccaggagcgcccccagcaggcccggcaggccaagcagcacacgtgctacctgatccacgtcccctgctgcgagtgcaagttcgtggtgcagctggacatccagagcaccaaggaggacctgcgcgtcgtgcagcagctgctcatgggggcgctgaccgtgacctgccccctgtgcgcctccagcaactga

SEQ ID NO: 1144 - RNA, 297 nt, synthetic construct
  misc_feature 1..297: note = AAF13691_variant
  source 1..297: mol_type = other RNA
atgcgcggcaacaaccccaccctgcgggagtacatcctcgacctgcacccggagcccaccgacctgttctgctacgagcagctctgcgacagctccgacgaggacgagatcgggctggaccgccccgacggccaggcccagcccgccacggcgaactactacatcgtgacctgctgctacacgtgcgacaccaccgtccggctgtgcatcaacagcaccaccaccgacgtgcgcacgctccagcagctgctgatggggacctgcaccatcgtgtgcccgtcctgcgcccagcagtga

SEQ ID NO: 1145 - RNA, 324 nt, synthetic construct
  misc_feature 1..324: note = ACL12335_variant
  source 1..324: mol_type = other RNA
atgcacggccccaaggccaccctgtgcgacatcgtgctcgacctggagccgcagaactacgaggaggtcgacctggtgtgctacgagcagctccccgacagcgactccgagaacgagaaggacgagcccgacggggtgaaccaccccctgctgctcgcccgccgggcggagccgcagcgccacaacatcgtctgcgtgtgctgcaagtgcaacaaccagctgcagctggtggtcgagaccagccaggacggcctccgggccctgcagcagctgttcatggacacgctctccttcgtgtgccccctgtgcgccgccaaccagtga

SEQ ID NO: 1146 - RNA, 318 nt, synthetic construct
  misc_feature 1..318: note = AAA79500_variant
  source 1..318: mol_type = other RNA
atgcacggcaaggtccccaccctgcaggaggtcatcctcgagctggccccgcagaccgagatcgacctgcagtgcaacgagcagctcgacagctccgaggacgaggacgaggacgagatcgaccacctcctggagcgcccccagcaggcccggcaggcggagcagcacaagtgctacctgatccacgtgccctgctgcaagtgcgagctggtggtccagctggacatccagagcacgaaggaggagctccgcgtggtgcagcagctgctgatgggggccctcaccgtgacctgccccctgtgcgcctccagcaagtga

SEQ ID NO: 1147 - RNA, 1392 nt, synthetic construct
  misc_feature 1..1392: note = AAF80488_variant
  source 1..1392: mol_type = other RNA
atgggcaaggagaagacgcacatcaacatcgtggtcatcgggcacgtggacagcggcaagtccaccacgaccgggcacctgatctacaagtgcggcgggatcgacaagcgcaccatcgagaagttcgagaaggaggccgccgagatgggcaagggcagcttcaagtacgcgtgggtgctcgacaagctgaaggccgagcgggagcgcgggatcaccatcgacatctccctgtggaagttcgagacgaccaagtactacatcaccatcatcgacgcccccggccaccgggacttcatcaagaacatgatcaccgggacgagccaggccgactgcgccgtcctcatcgtggcggccggcgtgggggagttcgaggccggcatctccaagaacggccagacccgcgagcacgccctgctggcgtacaccctcggggtcaagcagctgatcgtgggcgtgaacaagatggacagcaccgagccggcctactccgagaagcggtacgacgagatcgtcaaggaggtgagcgcctacatcaagaagatcgggtacaaccccgccacggtgcccttcgtccccatctccggctggcacggcgacaacatgctggagccgagccccaacatgccctggttcaaggggtggaaggtggagcgcaaggagggcaacgcctccggggtgagcctcctggaggcgctggacaccatcctgcccccgacccggcccaccgacaagcccctgcgcctgcccctccaggacgtctacaagatcggcgggatcggcacggtgccggtgggccgggtcgagaccgggatcctgcgccccggcatggtggtgaccttcgcccccgtcaacatcaccacggaggtgaagtccgtggagatgcaccacgaggccctgagcgaggccctccccggggacaacgtcggcttcaacgtgaagaacgtctccgtgaaggacatccggcgcgggaacgtgtgcggcgacagcaagtccgacccgccccaggaggccgcgcagttcaccagccaggtcatcatcctgaaccaccccggccagatctccgccgggtacagccccgtgatcgactgccacaccgcccacatcgcctgcaagttcgccgagctgaaggagaagatcgaccggcgcagcggcaagaagctcgaggacaacccgaagtccctcaagagcggggacgcggccatcgtggagatggtccccggcaagcccatgtgcgtggagtccttcagccagtacccgcccctggggcggttcgccgtgcgcgacatgcggcagaccgtcgccgtgggcgtgatcaagaacgtcgagaagaagtccggcggggccggcaaggtgaccaagagcgcgcagaaggcccagaaggccgggaagtga

SEQ ID NO: 1148 - RNA, 2919 nt, synthetic construct
  misc_feature 1..2919: note = EAW51573_variant
  source 1..2919: mol_type = other RNA
atggacaccgacctgtacgacgagttcggcaactacatcgggcccgagctcgacagcgacgaggacgacgacgagctgggccgcgagaccaaggacctggacgagatggacgacgacgacgacgacgacgacgtgggggaccacgacgacgaccacccgggcatggaggtcgtgctccacgaggacaagaagtactaccccacggccgaggaggtgtacgggcccgaggtcgagaccatcgtgcaggaggaggacacccagcccctgaccgagccgatcatcaagcccgtgaagacgaagaagttcaccctgatggagcagaccctccccgtcaccgtgtacgagatggacttcctggccgacctgatggacaactccgagctcatccggaacgtgacgctgtgcggccacctccaccacggcaagacctgcttcgtcgactgcctcatcgagcagacccaccccgagatccgcaagcggtacgaccaggacctgtgctacaccgacatcctgttcacggagcaggagcgcggggtgggcatcaagagcaccccggtgaccgtcgtgctccccgacaccaaggggaagtcctacctgttcaacatcatggacacgcccggccacgtgaacttcagcgacgaggtcaccgcggggctgcggatctccgacggcgtggtgctgttcatcgacgccgccgagggcgtcatgctgaacaccgagcgcctgatcaagcacgccgtgcaggagcggctcgccgtgaccgtctgcatcaacaagatcgaccgcctgatcctggagctcaagctgcccccgacggacgcgtactacaagctgcggcacatcgtggacgaggtgaacgggctcatcagcatgtactccaccgacgagaacctgatcctgagccccctcctgggcaacgtctgcttctccagctcccagtacagcatctgcttcaccctggggtccttcgccaagatctacgccgacaccttcggcgacatcaactaccaggagttcgccaagcgcctctggggcgacatctacttcaaccccaagacgcggaagttcaccaagaaggcgcccaccagctccagccagcgctccttcgtggagttcatcctggagccgctgtacaagatcctcgcccaggtcgtgggggacgtggacaccagcctgccccggacgctggacgagctcggcatccacctgaccaaggaggagctgaagctcaacatccgccccctgctgcggctcgtctgcaagaagttcttcggggagttcaccggcttcgtggacatgtgcgtgcagcacatcccctccccgaaggtcggggccaagcccaagatcgagcacacctacacgggcggcgtggacagcgacctgggggaggccatgagcgactgcgaccccgacggccccctgatgtgccacaccaccaagatgtactccaccgacgacggggtgcagttccacgccttcggccgcgtcctcagcgggacgatccacgcgggccagccggtgaaggtgctgggcgagaactacaccctggaggacgaggaggactcccagatctgcaccgtcgggcggctgtggatcagcgtggcccgctaccacatcgaggtgaaccgggtccccgccggcaactgggtgctcatcgagggggtggaccagcccatcgtcaagaccgccaccatcacggagccccgcggcaacgaggaggcccagatcttccggccgctgaagttcaacaccacctccgtgatcaagatcgcggtggagcccgtcaaccccagcgagctgccgaagatgctcgacgggctgcgcaaggtgaacaagtcctaccccagcctgaccacgaaggtggaggagtccggcgagcacgtcatcctcggcaccggggagctgtacctggactgcgtgatgcacgacctccgcaagatgtacagcgagatcgacatcaaggtggccgaccccgtcgtgaccttctgcgagaccgtggtcgagacgtccagcctgaagtgcttcgccgagacccccaacaagaagaacaagatcaccatgatcgccgagccgctggagaagggcctcgccgaggacatcgagaacgaggtggtgcagatcacctggaaccggaagaagctgggggagttcttccagacgaagtacgactgggacctgctcgcggcccgctccatctgggccttcggccccgacgccaccggccccaacatcctggtcgacgacaccctgcccagcgaggtggacaaggccctcctggggtccgtgaaggacagcatcgtccagggcttccagtgggggacccgggagggcccgctgtgcgacgagctcatccgcaacgtgaagttcaagatcctggacgcggtggtcgcccaggagcccctgcaccgcgggggcggccagatcatccccacggcccggcgggtggtgtactccgccttcctcatggcgacgccccgcctgatggagccgtactacttcgtcgaggtgcaggcccccgccgactgcgtgagcgccgtctacaccgtgctggcccggcgccgggggcacgtgacccaggacgcgcccatccccggctccccgctctacaccatcaaggccttcatccccgccatcgacagcttcgggttcgagaccgacctgcgcacccacacccagggccaggccttcagcctgtccgtcttccaccactggcagatcgtgcccggggaccccctcgacaagagcatcgtgatccggccgctggagccccagcccgcgccccacctggcccgcgagttcatgatcaagacgcggcgccggaagggcctctccgaggacgtcagcatctccaagttcttcgacgacccgatgctgctggagctcgccaagcaggacgtggtcctgaactaccccatgtga

SEQ ID NO: 1149 - RNA, 1971 nt, synthetic construct
  misc_feature 1..1971: note = EAW50963_variant
  source 1..1971: mol_type = other RNA
atgcgccccagcggcaccgccggggccgcgctgctcgccctgctggccgccctctgcccggcctcccgggcgctggaggagaagaaggtgtgccagggcaccagcaacaagctgacgcagctcgggaccttcgaggaccacttcctgtccctgcagcgcatgttcaacaactgcgaggtcgtgctcggcaacctggagatcacctacgtgcagcggaactacgacctgagcttcctcaagaccatccaggaggtcgccgggtacgtgctgatcgccctgaacacggtggagcgcatccccctcgagaacctgcagatcatccggggcaacatgtactacgagaactcctacgccctggcggtcctcagcaactacgacgccaacaagaccggcctgaaggagctgcccatgcgcaacctccaggagatcctgcacggggccgtgcggttctccaacaaccccgccctgtgcaacgtggagagcatccagtggcgcgacatcgtctccagcgacttcctctccaacatgagcatggacttccagaaccacctgggctcctgccagaagtgcgacccgagctgccccaacgggtcctgctggggcgccggggaggagaactgccagaagctgaccaagatcatctgcgcgcagcagtgcagcggccggtgccgcggcaagtcccccagcgactgctgccacaaccagtgcgccgccgggtgcaccggcccccgggagtccgactgcctcgtgtgccgcaagttccgggacgaggccacgtgcaaggacacgtgcccgcccctgatgctgtacaaccccaccacctaccagatggacgtgaaccccgaggggaagtacagcttcggcgcgacctgcgtcaagaagtgcccgcgcaactacgtggtgaccgaccacggcagctgcgtccgggcctgcggggccgactcctacgagatggaggaggacggcgtgcgcaagtgcaagaagtgcgaggggccctgccggaaggtgtgcaacggcatcgggatcggcgagttcaaggacagcctctccatcaacgccaccaacatcaagcacttcaagaactgcaccagcatctccggcgacctgcacatcctgcccgtcgccttccgcggggacagcttcacgcacacgcccccgctcgacccccaggagctggacatcctgaagaccgtgaaggagatcaccggcttcctcctgatccaggcctggcccgagaaccggaccgacctgcacgcgttcgagaacctcgagatcatccgcgggcggaccaagcagcacggccagttctccctggccgtggtcagcctgaacatcacctccctcgggctgcgcagcctgaaggagatctccgacggcgacgtgatcatcagcggcaacaagaacctctgctacgccaacaccatcaactggaagaagctgttcgggacgtccggccagaagaccaagatcatcagcaaccgcggggagaactcctgcaaggccaccggccaggtgtgccacgccctgtgcagccccgaggggtgctggggcccggagccccgggactgcgtctcctgccgcaacgtgagccggggccgcgagtgcgtcgacaagtgcaacctcctggagggggagccccgggagttcgtggagaactccgagtgcatccagtgccaccccgagtgcctgccgcaggcgatgaacatcacgtgcaccggccgcgggcccgacaactgcatccagtgcgcccactacatcgacggcccccactgcgtgaagacctgccccgccggcgtcatgggggagaacaacaccctggtgtggaagtacgccgacgcgggccacgtgtgccacctctgccacccgaactgcacctacgggtgcacgggccccgggctggagggctgccccaccaacggcagctacatcgtcagccacttcccgcggtccttctacaagatgagcgtgcac

SEQ ID NO: 1150 - RNA, 3411 nt, synthetic construct
  misc_feature 1..3411: note = ADL28125_variant
  source 1..3411: mol_type = other RNA
atgcgccccagcggcaccgccggggccgcgctgctcgccctgctggccgccctctgcccggcctcccgggcgctggaggagaagaaggtgtgccagggcaccagcaacaagctgacgcagctcgggaccttcgaggaccacttcctgtccctgcagcgcatgttcaacaactgcgaggtcgtgctcggcaacctggagatcacctacgtgcagcggaactacgacctgagcttcctcaagaccatccaggaggtcgccgggtacgtgctgatcgccctgaacacggtggagcgcatccccctcgagaacctgcagatcatccggggcaacatgtactacgagaactcctacgccctggcggtcctcagcaactacgacgccaacaagaccggcctgaaggagctgcccatgcgcaacctccaggagatcctgcacggggccgtgcggttctccaacaaccccgccctgtgcaacgtggagagcatccagtggcgcgacatcgtctccagcgacttcctctccaacatgagcatggacttccagaaccacctgggctcctgccagaagtgcgacccgagctgccccaacgggtcctgctggggcgccggggaggagaactgccagaagctgaccaagatcatctgcgcgcagcagtgcagcggccggtgccgcggcaagtcccccagcgactgctgccacaaccagtgcgccgccgggtgcaccggcccccgggagtccgactgcctcgtgtgccgcaagttccgggacgaggccacgtgcaaggacacgtgcccgcccctgatgctgtacaaccccaccacctaccagatggacgtgaaccccgaggggaagtacagcttcggcgcgacctgcgtcaagaagtgcccgcgcaactacgtggtgaccgaccacggcagctgcgtccgggcctgcggggccgactcctacgagatggaggaggacggcgtgcgcaagtgcaagaagtgcgaggggccctgccggaaggtgtgcaacggcatcgggatcggcgagttcaaggacagcctctccatcaacgccaccaacatcaagcacttcaagaactgcaccagcatctccggcgacctgcacatcctgcccgtcgccttccgcggggacagcttcacgcacacgcccccgctcgacccccaggagctggacatcctgaagaccgtgaaggagatcaccggcttcctcctgatccaggcctggcccgagaaccggaccgacctgcacgcgttcgagaacctcgagatcatccgcgggcggaccaagcagcacggccagttctccctggccgtggtcagcctgaacatcacctccctcgggctgcgcagcctgaaggagatctccgacggcgacgtgatcatcagcggcaacaagaacctctgctacgccaacaccatcaactggaagaagctgttcgggacgtccggccagaagaccaagatcatcagcaaccgcggggagaactcctgcaaggccaccggccaggtgtgccacgccctgtgcagccccgaggggtgctggggcccggagccccgggactgcgtctcctgccgcaacgtgagccggggccgcgagtgcgtcgacaagtgcaacctcctggagggggagccccgggagttcgtggagaactccgagtgcatccagtgccaccccgagtgcctgccgcaggcgatgaacatcacgtgcaccggccgcgggcccgacaactgcatccagtgcgcccactacatcgacggcccccactgcgtgaagacctgccccgccggcgtcatgggggagaacaacaccctggtgtggaagtacgccgacgcgggccacgtgtgccacctctgccacccgaactgcacctacgggtgcacgggccccgggctggagggctgccccaccaacggcccgaagatccccagcatcgccaccgggatggtcggcgccctgctcctgctgctcgtggtggccctggggatcggcctgttcatgcggcgccggcacatcgtccgcaagcggaccctccgccggctgctgcaggagcgcgagctcgtggagcccctgacgcccagcggggaggccccgaaccaggcgctgctccggatcctgaaggagaccgagttcaagaagatcaaggtgctgggctccggcgccttcgggaccgtctacaagggcctctggatccccgagggggagaaggtgaagatccccgtggccatcaaggagctgcgcgaggccaccagccccaaggccaacaaggagatcctggacgaggcgtacgtcatggcctccgtggacaacccgcacgtgtgccggctcctgggcatctgcctgaccagcacggtccagctcatcacccagctgatgcccttcgggtgcctgctcgactacgtgcgcgagcacaaggacaacatcggctcccagtacctgctgaactggtgcgtgcagatcgccaagggcatgaactacctcgaggaccggcgcctggtccaccgcgacctggccgcccggaacgtgctcgtgaagacgccccagcacgtcaagatcaccgacttcgggctggcgaagctgctcggcgccgaggagaaggagtaccacgccgagggcgggaaggtgcccatcaagtggatggccctggagagcatcctgcaccgcatctacacccaccagtccgacgtgtggagctacggggtcaccgtgtgggagctcatgaccttcggctccaagccgtacgacggcatccccgcgagcgagatctccagcatcctggagaagggggagcggctgccccagcccccgatctgcaccatcgacgtgtacatgatcatggtcaagtgctggatgatcgacgccgactcccgccccaagttccgggagctcatcatcgagttcagcaagatggcccgcgacccccagcggtacctggtgatccagggcgacgagcgcatgcacctcccctccccgacggacagcaacttctaccgggccctgatggacgaggaggacatggacgacgtggtcgacgccgacgagtacctgatcccccagcaggggttcttctccagccccagcacctcccgcacgcccctgctcagctccctgagcgcgacctccaacaacagcaccgtggcctgcatcgaccggaacggcctgcagtcctgcccgatcaaggaggacagcttcctccagcgctactccagcgaccccaccggcgccctgaccgaggactccatcgacgacaccttcctgcccgtgccgggggagtggctcgtctggaagcagagctgctccagcacgtccagcacccactccgccgccgcgagcctgcagtgcccctcccaggtgctgccgcccgccagccccgagggcgagaccgtggccgacctccagacccagtga

SEQ ID NO: 1151 - RNA, 150 nt, synthetic construct
  misc_feature 1..150: note = CCO13722_variant
  source 1..150: mol_type = other RNA
atgtgcgcgacctgcgccatccagaccgcccccacgggcccgaacaagagctccctgagcgacttctccctccccctgaagctgcacttcctcagcaccatctccatcagccccttcgcctccaacaaggtgctgaccctgttcatctga

SEQ ID NO: 1152 - RNA, 1218 nt, synthetic construct
  misc_feature 1..1218: note = CCDS47587.1_variant
  source 1..1218: mol_type = other RNA
atgcgccccagcggcaccgccggggccgcgctgctcgccctgctggccgccctctgcccggcctcccgggcgctggaggagaagaaggtgtgccagggcaccagcaacaagctgacccagctcgggaccttcgaggaccacttcctgtccctgcagcgcatgttcaacaactgcgaggtcgtgctcggcaacctggagatcacctacgtgcagcggaactacgacctgagcttcctcaagaccatccaggaggtcgccgggtacgtgctgatcgccctgaacacggtggagcgcatccccctcgagaacctgcagatcatccggggcaacatgtactacgagaactcctacgccctggcggtcctcagcaactacgacgccaacaagaccggcctgaaggagctgcccatgcgcaacctccaggagatcctgcacggggccgtgcggttctccaacaaccccgccctgtgcaacgtggagagcatccagtggcgcgacatcgtctccagcgacttcctctccaacatgagcatggacttccagaaccacctgggctcctgccagaagtgcgacccgagctgccccaacgggtcctgctggggcgccggggaggagaactgccagaagctgaccaagatcatctgcgcgcagcagtgcagcggccggtgccgcggcaagtcccccagcgactgctgccacaaccagtgcgccgccgggtgcaccggcccccgggagtccgactgcctcgtgtgccgcaagttccgggacgaggccacgtgcaaggacacgtgcccgcccctgatgctgtacaaccccaccacctaccagatggacgtgaaccccgaggggaagtacagcttcggcgcgacctgcgtcaagaagtgcccgcgcaactacgtggtgaccgaccacggcagctgcgtccgggcctgcggggccgactcctacgagatggaggaggacggcgtgcgcaagtgcaagaagtgcgaggggccctgccggaaggtgtgcaacggcatcgggatcggcgagttcaaggacagcctctccatcaacgccaccaacatcaagcacttcaagaactgcaccagcatctccggcgacctgcacatcctgcccgtcgccttccgcggggacagcttcacgcacacgcccccgctcgacccccaggagctggacatcctgaagaccgtgaaggagatcaccggcctctcctga

SEQ ID NO: 1153 - RNA, 3633 nt, synthetic construct
  misc_feature 1..3633: note = AAG35789_variant
  source 1..3633: mol_type = other RNA
atgcgccccagcggcaccgccggggccgccctgctcgccctgctggccgccctctgcccggcctcccgggcgctggaggagaagaaggtgtgccagggcaccagcaacaagctgacgcagctcgggaccttcgaggaccacttcctgtccctgcagcgcatgttcaacaactgcgaggtcgtgctcggcaacctggagatcacctacgtgcagcggaactacgacctgagcttcctcaagaccatccaggaggtcgccgggtacgtgctgatcgccctgaacacggtggagcgcatccccctcgagaacctgcagatcatccggggcaacatgtactacgagaactcctacgccctggcggtcctcagcaactacgacgccaacaagaccggcctgaaggagctgcccatgcgcaacctccaggagatcctgcacggggccgtgcggttctccaacaaccccgccctgtgcaacgtggagagcatccagtggcgcgacatcgtctccagcgacttcctctccaacatgagcatggacttccagaaccacctgggctcctgccagaagtgcgacccgagctgccccaacgggtcctgctggggcgccggggaggagaactgccagaagctgaccaagatcatctgcgcgcagcagtgcagcggccggtgccgcggcaagtcccccagcgactgctgccacaaccagtgcgccgccgggtgcaccggcccccgggagtccgactgcctcgtgtgccgcaagttccgggacgaggccacgtgcaaggacacgtgcccgcccctgatgctgtacaaccccaccacctaccagatggacgtgaaccccgaggggaagtacagcttcggcgcgacctgcgtcaagaagtgcccgcgcaactacgtggtgaccgaccacggcagctgcgtccgggcctgcggggccgactcctacgagatggaggaggacggcgtgcgcaagtgcaagaagtgcgaggggccctgccggaaggtgtgcaacggcatcgggatcggcgagttcaaggacagcctctccatcaacgccaccaacatcaagcacttcaagaactgcaccagcatctccggcgacctgcacatcctgcccgtcgccttccgcggggacagcttcacgcacacgcccccgctcgacccccaggagctggacatcctgaagaccgtgaaggagatcaccggcttcctcctgatccaggcctggcccgagaaccggaccgacctgcacgcgttcgagaacctcgagatcatccgcgggcggaccaagcagcacggccagttctccctggccgtggtcagcctgaacatcacctccctcgggctgcgcagcctgaaggagatctccgacggcgacgtgatcatcagcggcaacaagaacctctgctacgccaacaccatcaactggaagaagctgttcgggacgtccggccagaagaccaagatcatcagcaaccgcggggagaactcctgcaaggccaccggccaggtgtgccacgccctgtgcagccccgaggggtgctggggcccggagccccgggactgcgtctcctgccgcaacgtgagccggggccgcgagtgcgtcgacaagtgcaacctcctggagggggagccccgggagttcgtggagaactccgagtgcatccagtgccaccccgagtgcctgccgcaggcgatgaacatcacgtgcaccggccgcgggcccgacaactgcatccagtgcgcccactacatcgacggcccccactgcgtgaagacctgccccgccggcgtcatgggggagaacaacaccctggtgtggaagtacgccgacgcgggccacgtgtgccacctctgccacccgaactgcacctacgggtgcacgggccccgggctggagggctgccccaccaacggcccgaagatccccagcatcgccaccgggatggtcggcgccctgctcctgctgctcgtggtggccctggggatcggcctgttcatgcggcgccggcacatcgtccgcaagcggaccctccgccggctgctgcaggagcgcgagctcgtggagcccctgacgcccagcggggaggccccgaaccaggcgctgctccggatcctgaaggagaccgagttcaagaagatcaaggtgctgggctccggcgccttcgggaccgtctacaagggcctctggatccccgagggggagaaggtgaagatccccgtggccatcaaggagctgcgcgaggccaccagccccaaggccaacaaggagatcctggacgaggcgtacgtcatggcctccgtggacaacccgcacgtgtgccggctcctgggcatctgcctgaccagcacggtccagctcatcacccagctgatgcccttcgggtgcctgctcgactacgtgcgcgagcacaaggacaacatcggctcccagtacctgctgaactggtgcgtgcagatcgccaagggcatgaactacctcgaggaccggcgcctggtccaccgcgacctggccgcccggaacgtgctcgtgaagacgccccagcacgtcaagatcaccgacttcgggctggcgaagctgctcggcgccgaggagaaggagtaccacgccgagggcgggaaggtgcccatcaagtggatggccctggagagcatcctgcaccgcatctacacccaccagtccgacgtgtggagctacggggtcaccgtgtgggagctcatgaccttcggctccaagccgtacgacggcatccccgcgagcgagatctccagcatcctggagaagggggagcggctgccccagcccccgatctgcaccatcgacgtgtacatgatcatggtcaagtgctggatgatcgacgccgactcccgccccaagttccgggagctcatcatcgagttcagcaagatggcccgcgacccccagcggtacctggtgatccagggcgacgagcgcatgcacctcccctccccgacggacagcaacttctaccgggccctgatggacgaggaggacatggacgacgtggtcgacgccgacgagtacctgatcccccagcaggggttcttctccagccccagcacctcccgcacgcccctgctcagctccctgagcgcgacctccaacaacagcaccgtggcctgcatcgaccggaacggcctgcagtcctgcccgatcaaggaggacagcttcctccagcgctactccagcgaccccaccggcgccctgaccgaggactccatcgacgacaccttcctgcccgtgccggagtacatcaaccagagcgtccccaagcggcccgccgggtccgtgcagaaccccgtgtaccacaaccagccgctcaaccccgcccccagccgcgacccccactaccaggacccgcactccacggcggtcggcaaccccgagtacctgaacaccgtgcagccgacctgcgtgaacagcaccttcgactcccccgcccactgggcccagaaggggagccaccagatctccctggacaaccccgactaccagcaggacttcttccccaaggaggccaagcccaacggcatcttcaaggggagcacggccgagaacgcggagtacctccgggtcgcgccccagagctccgagttcatcggcgcctga

SEQ ID NO: 1154 - RNA, 1395 nt, synthetic construct
  misc_feature 1..1395: note = AAI18666_variant
  source 1..1395: mol_type = other RNA
atggccgccgaggacgtgatcatctgcgcgcagcagtgcagcggccgctgccgggggaagtcccccagcgactgctgccacaaccagtgcgccgccggctgcaccgggccgcgcgagtccgactgcctggtctgccggaagttccgcgacgaggcgacctgcaaggacacgtgcccgcccctcatgctgtacaaccccaccacctaccagatggacgtgaaccccgagggcaagtacagcttcggggcgacctgcgtgaagaagtgcccccggaactacgtcgtgacggaccacggctcctgcgtgcgcgcctgcggcgccgacagctacgagatggaggaggacggggtccggaagtgcaagaagtgcgagggcccctgccgcaaggtgtgcaacgggatcggcatcggggagttcaaggactccctgagcatcaacgccaccaacatcaagcacttcaagaactgcacctccatcagcggcgacctccacatcctgcccgtggccttccggggcgactccttcacccacacgccgcccctggacccccaggagctcgacatcctgaagaccgtcaaggagatcaccgggttcctgctcatccaggcctggcccgagaaccgcaccgacctgcacgccttcgagaacctggagatcatccggggccgcacgaagcagcacgggcagttcagcctcgccgtggtgtccctgaacatcaccagcctgggcctccggtccctgaaggagatcagcgacggcgacgtcatcatctccgggaacaagaacctgtgctacgccaacaccatcaactggaagaagctgttcggcaccagcgggcagaagacgaagatcatctccaaccgcggcgagaacagctgcaaggccaccggccaggtgtgccacgcgctctgcagcccggaggggtgctggggccccgagccccgggactgcgtgtcctgccgcaacgtcagccgggggcgcgagtgcgtggacaagtgcaacctgctcgagggcgagccccgggagttcgtggagaactccgagtgcatccagtgccacccggagtgcctgccccaggccatgaacatcacgtgcaccgggcgcggccccgacaactgcatccagtgcgcccactacatcgacgggccccactgcgtcaagacctgcccggccggcgtgatgggcgagaacaacaccctggtgtggaagtacgccgacgcggggcacgtctgccacctctgccaccccaactgcacctacggctgcaccgggcccggcctggaggggtgccccacgaacggcccgaagatccccagcatcgccaccggcatggtgggggccctgctcctgctgctcgtggtcgccctgggcatcgggcccctgcacggccggtga

SEQ ID NO: 1155 - RNA, 3276 nt, synthetic construct
  misc_feature 1..3276: note = AAH94761_variant
  source 1..3276: mol_type = other RNA
atgcgccccagcggcaccgccggggccgcgctgctcgccctgctggccgccctctgccccgcctcccgggcgctggaggagaagaaggtgtgccagggcaccagcaacaagctgacgcagctcgggaccttcgaggaccacttcctgtccctgcagcgcatgttcaacaactgcgaggtcgtgctcggcaacctggagatcacctacgtgcagcggaactacgacctgagcttcctcaagaccatccaggaggtcgccgggtacgtgctgatcgccctgaacacggtggagcgcatccccctcgagaacctgcagatcatccggggcaacatgtactacgagaactcctacgccctggcggtcctcagcaactacgacgccaacaagaccggcctgaaggagctgcccatgcgcaacctccaggggcagaagtgcgacccctcctgcccgaacggcagctgctggggcgccggggaggagaactgccagaagctgaccaagatcatctgcgcccagcagtgctccgggcggtgccgcggcaagagcccctccgactgctgccacaaccagtgcgccgcgggctgcaccgggccccgggagagcgactgcctggtgtgccgcaagttccgggacgaggccacgtgcaaggacacgtgcccgcccctcatgctgtacaaccccaccacctaccagatggacgtgaaccccgagggcaagtactccttcggggcgacctgcgtcaagaagtgcccccgcaactacgtggtgaccgaccacggcagctgcgtccgggcctgcggcgccgactcctacgagatggaggaggacggggtgcgcaagtgcaagaagtgcgagggcccgtgccggaaggtgtgcaacgggatcggcatcggggagttcaaggacagcctgtccatcaacgccaccaacatcaagcacttcaagaactgcaccagcatctccggcgacctccacatcctgcccgtcgccttccgcggcgacagcttcacgcacaccccgcccctggacccccaggagctcgacatcctgaagaccgtgaaggagatcaccgggttcctgctcatccaggcctggcccgagaaccggacggacctgcacgccttcgagaacctggagatcatccgcggccggaccaagcagcacgggcagttcagcctcgccgtggtctccctgaacatcaccagcctgggcctccgctccctgaaggagatcagcgacggggacgtgatcatctccggcaacaagaacctgtgctacgcgaacaccatcaactggaagaagctgttcggcacgagcgggcagaagaccaagatcatctccaaccggggcgagaacagctgcaaggccaccggccaggtgtgccacgccctgtgctcccccgaggggtgctgggggcccgagccgcgcgactgcgtcagctgccgcaacgtgtcccggggccgcgagtgcgtggacaagtgcaacctgctcgagggcgagccccgggagttcgtcgagaacagcgagtgcatccagtgccaccccgagtgcctgccccaggccatgaacatcacgtgcaccgggcgcggcccggacaactgcatccagtgcgcccactacatcgacgggccccactgcgtgaagacctgccccgcgggcgtcatgggcgagaacaacaccctggtgtggaagtacgccgacgccgggcacgtgtgccacctctgccaccccaactgcacctacggctgcacggggccgggcctggaggggtgccccaccaacggccccaagatcccgtccatcgccaccggcatggtcggggcgctgctgctcctgctggtggtggccctcggcatcgggctgttcatgcggcgccggcacatcgtccgcaagcggaccctgcgccggctcctgcaggagcgcgagctggtggagcccctcacgcccagcggcgaggcccccaaccaggccctgctgcggatcctcaaggagaccgagttcaagaagatcaaggtgctggggtccggcgccttcggcaccgtctacaaggggctgtggatcccggagggcgagaaggtgaagatccccgtggcgatcaaggagctccgcgaggccaccagccccaaggccaacaaggagatcctggacgaggcctacgtcatggcctccgtggacaacccccacgtgtgccggctgctcgggatctgcctgaccagcacggtccagctgatcacccagctcatgccgttcggctgcctgctggactacgtgcgcgagcacaaggacaacatcgggtcccagtacctcctgaactggtgcgtgcagatcgcgaagggcatgaactacctggaggaccggcgcctcgtccaccgggacctggccgcccgcaacgtgctggtgaagacgccccagcacgtcaagatcaccgacttcggcctcgccaagctgctgggggccgaggagaaggagtaccacgcggagggcgggaaggtgcccatcaagtggatggccctcgagagcatcctgcaccgcatctacacccaccagagcgacgtgtggtcctacggcgtcaccgtgtgggagctgatgaccttcgggagcaagccctacgacggcatcccggcctccgagatcagctccatcctcgagaagggcgagcggctgccccagccgcccatctgcaccatcgacgtgtacatgatcatggtcaagtgctggatgatcgacgccgacagccgccccaagttccgggagctgatcatcgagttctccaagatggcgcgcgacccccagcggtacctcgtgatccagggggacgagcgcatgcacctccccagccccacggactccaacttctaccgggccctgatggacgaggaggacatggacgacgtggtcgacgccgacgagtacctcatcccgcagcagggcttcttcagctcccccagcacctcccgcacgcccctgctgagctccctcagcgccacctccaacaacagcaccgtggcctgcatcgaccggaacgggctgcagagctgccccatcaaggaggactccttcctgcagcgctacagctccgacccgaccggcgcgctcaccgaggacagcatcgacgacaccttcctgcccgtgcccggcgagtggctggtctggaagcagtcctgcagctccacgagctccacccacagcgccgccgcctccctccagtgcccgagccaggtgctgccgcccgcctcccccgagggggagaccgtggcggacctgcagacccagtga

SEQ ID NO: 1156 - RNA, 216 nt, synthetic construct
  misc_feature 1..216: note = CAA34902_variant
  source 1..216: mol_type = other RNA
atgcgccccagcggcaccgccggggccgcgctgctcgccctgctggccgccctctgcccggcctcccgggcgctggaggagaagaagggcaagggggtgagccgccggctgccccgccggccccgcatcgcgccccggaccccgcagcccgcccagccccgcacgggcgcccccgcccgggcccgcgccccggcccggcccttcctcttcccctga

SEQ ID NO: 1157 - RNA, 720 nt, synthetic construct
  misc_feature 1..720: note = AAH10992_variant
  source 1..720: mol_type = other RNA
atgcccctgggccacatcatgcgcctcgacctggagaagatcgccctggagtacatcgtgccgtgcctccacgaggtcgggttctgctacctggacaacttcctgggcgaggtggtgggggactgcgtcctcgagcgggtgaagcagctgcactgcaccggcgccctgcgcgacgggcagctcgcgggcccccgggccggcgtgagcaagcgccacctccgcggggaccagatcacctggatcggcgggaacgaggagggctgcgaggccatctccttcctgctcagcctgatcgaccggctggtcctctactgcgggtcccggctgggcaagtactacgtgaaggagcgcagcaaggccatggtggcctgctaccccggcaacgggacgggctacgtccggcacgtggacaaccccaacggggacggccgctgcatcacgtgcatctactacctgaacaagaactgggacgcgaagctccacggcgggatcctgcggatcttcccggagggcaagtccttcatcgccgacgtggagcccatcttcgaccgcctgctgttcttctggagcgaccggcgcaacccccacgaggtccagccctcctacgccacccggtacgccatgaccgtgtggtacttcgacgcggaggagcgcgccgaggccaagaagaagttccggaacctgacccgcaagaccgagagcgccctgaccgaggactga

SEQ ID NO: 1158 - RNA, 1566 nt, synthetic construct
  misc_feature 1..1566: note = BAH13456_variant
  source 1..1566: mol_type = other RNA
atggccaccagcctgcacgagggccccaccaaccagctcgacctgctgatccgcgccgtggaggcgtccgtccacagctccaacgcccactgcacggacaagaccatcgaggccgccgaggccctcctgcacatggagagcccgacctgcctgcgggactcccgcagccccgagttcatccacgcggccatgcggcccgacgtgatcaccgagacggtggtcgaggtgtccaccgaggagagcgagcccatggacacctccccgatccccaccagccccgactcccacgagcccatgaagaagaagaaggtggggcgcaagccgaagacgcagcagagccccatctccaacggcagccccgagctcgggatcaagaagaagccccgggagggcaaggggaacaccacctacctgtgggagttcctgctcgacctgctgcaggacaagaacacgtgcccgcgctacatcaagtggacgcagcgggagaagggcatcttcaagctcgtcgactccaaggccgtgagcaagctgtggggcaagcacaagaacaagcccgacatgaactacgagaccatggggcgcgccctgcggtactactaccagcgcggcatcctcgcgaaggtggaggggcagcggctggtctaccagttcaaggacatgcccaagaacatcgtggtgatcgacgacgacaagtccgagacctgcaacgaggacctggccggcaccacggacgagaagtccctcgagcgcgtcagcctgagcgccgagagcctgctcaaggccgcctccagcgtgcggtccgggaagaacagctcccccatcaactgcagccgcgcggagaagggcgtggcccgggtcgtgaacatcacctccccgggccacgacgccagctcccgcagccccaccaccacggcctccgtgagcgccaccgcggcgccccggaccgtccgcgtggccatgcaggtccccgtggtgatgacctccctggggcagaagatcagcacggtggccgtccagtccgtgaacgccggcgccccgctgatcaccagcacctcccccaccacggccaccagccccaaggtcgtgatccagaccatccccaccgtgatgccggcctccacggagaacggggacaagatcaccatgcagcccgccaagatcatcaccatccccgccacccagctcgcgcagtgccagctgcagaccaagagcaacctgaccggcagcggctccatcaacatcgtcgggacgcccctcgccgtgcgggccctgaccccggtgagcatcgcccacggcacccccgtcatgcgcctgtccatgcccacccagcaggcgagcgggcagaccccgccccgggtgatctccgccgtgatcaagggccccgaggtcaagagcgaggccgtggccaagaagcaggagcacgacgtgaagaccctccagctggtcgaggagaagcccgccgacgggaacaagaccgtgacgcacgtggtcgtggtgtccgcgccgagcgccatcgccctgcccgtcaccatgaagaccgagggcctcgtgacctgcgagaagtga

SEQ ID NO: 1159 - RNA, 810 nt, synthetic construct
  misc_feature 1..810: note = BAC67168_variant
  source 1..810: mol_type = other RNA
atggccgccgccctgttcgtgctcctgggcttcgccctgctcgggacccacggcgccagcggggccgccggcaccgtcttcacgaccgtggaggacctggggtccaagatcctgctgacctgcagcctcaacgactccgcgaccgaggtgacgggccaccgctggctgaagggcggggtcgtgctcaaggaggacgccctgcccggccagaagaccgagttcaaggtggacagcgacgaccagtggggcgagtactcctgcgtcttcctgccggagcccatggggaccgccaacatccagctccacgggccgccccgggtgaaggccgtcaagagctccgagcacatcaacgagggcgagaccgcgatgctggtgtgcaagagcgagtccgtgccgcccgtgacggactgggcctggtacaagatcaccgacagcgaggacaaggccctgatgaacggctccgagagccgcttcttcgtctccagctcccaggggcggagcgagctccacatcgagaacctgaacatggaggccgaccccggccagtaccgctgcaacgggacctccagcaagggctccgaccaggccatcatcaccctgcgggtgcgcagccacctcgcggccctgtggcccttcctgggcatcgtggccgaggtcctcgtgctggtgacgatcatcttcatctacgagaagcggcgcaagcccgaggacgtcctggacgacgacgacgccgggagcgcgcccctcaagtccagcggccagcaccagaacgacaaggggaagaacgtgcggcagcgcaactccagctga

SEQ ID NO: 1160 - RNA, 945 nt, synthetic construct
  misc_feature 1..945: note = AAA35723_variant
  source 1..945: mol_type = other RNA
atggccccgccccaggtgctggccttcggcctcctgctggcggccgccaccgccaccttcgccgcggcccaggaggagtgcgtctgcgagaactacaagctcgccgtgaactgcttcgtgaacaacaaccgccagtgccagtgcacgagcgtcggggcccagaacaccgtgatctgctccaagctggcggccaagtgcctggtgatgaaggccgagatgaacggcagcaagctcgggcggcgcgccaagcccgagggcgccctgcagaacaacgacgggctgtacgaccccgactgcgacgagtccggcctcttcaaggcgaagcagtgcaacggcaccagcatgtgctggtgcgtcaacaccgccggggtgcggcgcacggacaaggacaccgagatcacgtgctccgagcgggtgcgcacctactggatcatcatcgagctgaagcacaaggcccgggagaagccctacgacagcaagtccctgcgcaccgccctccagaaggagatcaccacccggtaccagctggacccgaagttcatcaccagcatcctgtacgagaacaacgtcatcacgatcgacctcgtgcagaactccagccagaagacccagaacgacgtggacatcgccgacgtcgcgtactacttcgagaaggacgtgaagggcgagtccctgttccacagcaagaagatggacctgaccgtgaacggggagcagctcgacctggaccccggccagaccctgatctactacgtcgacgagaaggcccccgagttctccatgcaggggctcaaggccggcgtgatcgccgtgatcgtcgtggtggtcatcgccgtggtggcgggcatcgtcgtgctggtcatcagccgcaagaagcggatggccaagtacgagaaggccgagatcaaggagatgggggagatgcaccgcgagctgaacgcctga

SEQ ID NO: 1161 - RNA, 2931 nt, synthetic construct
  misc_feature 1..2931: note = CCDS169.1_variant
  source 1..2931: mol_type = other RNA
atggagctgcaggccgcccgcgcgtgcttcgccctcctgtggggctgcgccctggccgccgcggccgccgcccaggggaaggaggtggtcctcctggacttcgcggccgccggcggggagctgggctggctcacccacccctacgggaagggctgggacctgatgcagaacatcatgaacgacatgccgatctacatgtacagcgtgtgcaacgtgatgtccggcgaccaggacaactggctgcggaccaactgggtctaccgcggggaggccgagcggatcttcatcgagctcaagttcacggtgcgcgactgcaacagcttccccggcggggcctccagctgcaaggagaccttcaacctgtactacgcggagtccgacctggactacggcaccaacttccagaagcgcctcttcaccaagatcgacacgatcgcccccgacgagatcaccgtgagctccgacttcgaggcccgccacgtcaagctgaacgtggaggagcggagcgtggggcccctgacccgcaagggcttctacctcgccttccaggacatcggcgcctgcgtcgcgctgctgtccgtgcgggtgtactacaagaagtgcccggagctcctgcaggggctggcccacttccccgagaccatcgccggcagcgacgccccctccctcgccacggtcgcggggacctgcgtggaccacgccgtggtgcccccgggcggcgaggagccccgcatgcactgcgccgtggacggggagtggctggtgcccatcggccagtgcctgtgccaggccgggtacgagaaggtcgaggacgcctgccaggcgtgcagccccggcttcttcaagttcgaggcctccgagagcccgtgcctcgagtgccccgagcacaccctgccctcccccgagggggccaccagctgcgagtgcgaggagggcttcttccgggccccgcaggaccccgcgtccatgccctgcacgcggcccccgagcgcgccccactacctgaccgccgtgggcatgggggccaaggtggagctccggtggaccccgccccaggactccggcgggcgcgaggacatcgtctacagcgtgacctgcgagcagtgctggcccgagagcggcgagtgcgggccctgcgaggcctccgtgcggtacagcgagccgccccacggcctgacgcgcacctccgtcaccgtgagcgacctggagccccacatgaactacaccttcacggtcgaggcccggaacggcgtgtccgggctcgtgaccagccgctccttccggaccgccagcgtctccatcaaccagaccgagccgcccaaggtgcgcctggagggccggagcacgacctccctgagcgtgtcctggagcatcccgccgccccagcagtcccgcgtctggaagtacgaggtgacctaccgcaagaagggggacagcaactcctacaacgtgcggcgcaccgagggcttcagcgtcacgctcgacgacctggcccccgacaccacctacctggtccaggtgcaggccctcacccaggaggggcagggcgccggctccaaggtccacgagttccagacgctgagccccgaggggagcggcaacctggcggtgatcgggggcgtggccgtcggcgtggtgctcctgctggtcctcgccggggtgggcttcttcatccaccggcgccggaagaaccagcgcgcccggcagtcccccgaggacgtgtacttcagcaagtccgagcagctgaagcccctgaagacctacgtcgacccccacacctacgaggaccccaaccaggccgtgctcaagttcaccacggagatccaccccagctgcgtgacccgccagaaggtcatcggggcgggcgagttcggggaggtgtacaagggcatgctgaagacctccagcggcaagaaggaggtgcccgtcgccatcaagaccctgaaggccgggtacaccgagaagcagcgggtggacttcctcggcgaggccgggatcatgggccagttctcccaccacaacatcatccgcctggagggggtgatcagcaagtacaagcccatgatgatcatcacggagtacatggagaacggcgcgctggacaagttcctgcgggagaaggacggcgagttctccgtcctccagctggtggggatgctgcgcggcatcgccgccgggatgaagtacctcgccaacatgaactacgtgcaccgggacctggccgcgcgcaacatcctggtcaacagcaacctcgtgtgcaaggtgtccgacttcggcctgagccgggtcctggaggacgacccggaggccacctacaccacctccgggggcaagatccccatccgctggacggcccccgaggccatcagctaccggaagttcacctccgccagcgacgtgtggtccttcggcatcgtgatgtgggaggtcatgacctacggggagcgcccctactgggagctcagcaaccacgaggtgatgaaggcgatcaacgacggcttccggctgccgacccccatggactgccccagcgccatctaccagctgatgatgcagtgctggcagcaggagcgcgcccgccggcccaagttcgccgacatcgtgtccatcctcgacaagctgatccgcgccccggacagcctgaagacgctcgcggacttcgacccccgggtctccatccgcctgcccagcacctccgggagcgagggcgtgcccttccggaccgtgtccgagtggctggagagcatcaagatgcagcagtacaccgagcacttcatggccgccgggtacacggccatcgagaaggtcgtgcagatgaccaacgacgacatcaagcgcatcggcgtgcggctcccgggccaccagaagcgcatcgcgtactccctgctggggctcaaggaccaggtcaacaccgtgggcatccccatctga

SEQ ID NO: 1162 - RNA, 2952 nt, synthetic construct
  misc_feature 1..2952: note = AAG43576_variant
  source 1..2952: mol_type = other RNA
atggactgccagctgagcatcctcctgctgctctcctgcagcgtgctggactccttcggcgagctgatcccccagccgagcaacgaggtcaacctcctggactccaagaccatccagggggagctgggctggatcagctacccctcccacgggtgggaggagatcagcggcgtggacgagcactacacccccatccgcacgtaccaggtgtgcaacgtcatggaccactcccagaacaactggctccggaccaactgggtgccccgcaacagcgcccagaagatctacgtggagctgaagttcaccctgcgggactgcaactccatcccgctcgtcctggggacctgcaaggagacgttcaacctgtactacatggagagcgacgacgaccacggcgtgaagttccgcgagcaccagttcaccaagatcgacaccatcgccgcggacgagtccttcacccagatggacctcggcgaccggatcctgaagctgaacacggagatccgcgaggtggggcccgtcaacaagaagggcttctacctcgccttccaggacgtgggggcctgcgtggccctggtcagcgtgcgggtgtacttcaagaagtgccccttcaccgtcaagaacctggccatgttccccgacaccgtgccgatggactcccagagcctcgtggaggtccgcggctcctgcgtgaacaacagcaaggaggaggacccgccccggatgtactgctccaccgagggggagtggctggtgcccatcggcaagtgcagctgcaacgcgggctacgaggagcgcgggttcatgtgccaggcctgccggcccggcttctacaaggccctggacgggaacatgaagtgcgccaagtgcccgccccacagctccacgcaggaggacggcagcatgaactgccgctgcgagaacaactacttccgggcggacaaggacccgccctccatggcctgcacccgcccgcccagcagcccccggaacgtcatctccaacatcaacgagacctccgtgatcctcgactggagctggcccctggacaccggcgggcgcaaggacgtgacgttcaacatcatctgcaagaagtgcggctggaacatcaagcagtgcgagccctgctcccccaacgtccggttcctgccccgccagttcgggctcaccaacaccaccgtgacggtcaccgacctgctggcccacaccaactacaccttcgagatcgacgccgtgaacggcgtgagcgagctctccagcccgccccggcagttcgccgcggtctccatcacgaccaaccaggccgcccccagccccgtgctgaccatcaagaaggaccgcacctcccggaacagcatctccctgagctggcaggagcccgagcaccccaacgggatcatcctcgactacgaggtgaagtactacgagaagcaggagcaggagacgtcctacaccatcctgcgcgcccgcggcaccaacgtcaccatcagcagcctgaagcccgacacgatctacgtgttccagatccgggcccgcaccgcggccggctacgggaccaactcccggaagttcgagttcgagaccagcccggactccttcagcatctccggcgagagctcccaggtggtcatgatcgccatcagcgccgccgtggcgatcatcctcctgacggtggtcatctacgtgctgatcgggcgcttctgcggctacaagtccaagcacggggccgacgagaagcggctccacttcggcaacggccacctgaagctgcccgggctccgcacctacgtggacccccacacctacgaggaccccacccaggccgtccacgagttcgccaaggagctggacgccaccaacatcagcatcgacaaggtggtgggcgcgggggagttcggcgaggtctgctccgggcggctgaagctcccgagcaagaaggagatctccgtggccatcaagacgctgaaggtgggctacaccgagaagcagcgccgggacttcctgggcgaggccagcatcatggggcagttcgaccaccccaacatcatccgcctcgagggcgtcgtgaccaagtccaagcccgtgatgatcgtcaccgagtacatggagaacgggagcctggactccttcctgcggaagcacgacgcccagttcacggtgatccagctggtgggcatgctccgcggcatcgcgagcgggatgaagtacctgagcgacatgggctacgtccaccgggacctggccgcccgcaacatcctcatcaactccaacctggtgtgcaaggtgagcgacttcgggctgtcccgggtcctcgaggacgaccccgaggccgcctacaccacccgcggcgggaagatcccgatccggtggaccagccccgaggcgatcgcctaccgcaagttcacgtccgccagcgacgtgtggtcctacggcatcgtgctgtgggaggtcatgagctacggcgagcggccctactgggagatgtccaaccaggacgtgatcaaggccgtggacgaggggtaccgcctgcccccgcccatggactgccccgccgcgctctaccagctgatgctggactgctggcagaaggaccgcaacaaccggcccaagttcgagcagatcgtcagcatcctcgacaagctgatccgcaacccgggctccctgaagatcatcaccagcgccgccgcccggccctccaacctcctgctggaccagagcaacgtggacatcaccaccttccgcacgaccggggactggctcaacggcgtgtggaccgcccactgcaaggagatcttcaccggggtcgagtactccagctgcgacacgatcgcgaagatctccaccgacgacatgaagaaggtgggcgtgaccgtcgtgggcccccagaagaagatcatcagctccatcaaggccctggagacccagagcaagaacgggcccgtgccggtctga

SEQ ID NO: 1163 - RNA, 2952 nt, synthetic construct
  misc_feature 1..2952: note = AAH63282_variant
  source 1..2952: mol_type = other RNA
atggactgccagctgagcatcctcctgctgctctcctgcagcgtgctggactccttcggcgagctgatcccccagccgagcaacgaggtcaacctcctggactccaagaccatccagggggagctgggctggatcagctacccctcccacgggtgggaggagatcagcggcgtggacgagcactacacccccatccgcacgtaccaggtgtgcaacgtcatggaccactcccagaacaactggctccggaccaactgggtgccccgcaacagcgcccagaagatctacgtggagctgaagttcaccctgcgggactgcaactccatcccgctcgtcctggggacctgcaaggagacgttcaacctgtactacatggagagcgacgacgaccacggcgtgaagttccgcgagcaccagttcaccaagatcgacaccatcgccgcggacgagtccttcacccagatggacctcggcgaccggatcctgaagctgaacacggagatccgcgaggtggggcccgtcaacaagaagggcttctacctcgccttccaggacgtgggggcctgcgtggccctggtcagcgtgcgggtgtacttcaagaagtgccccttcaccgtcaagaacctggccatgttccccgacaccgtgccgatggactcccagagcctcgtggaggtccgcggctcctgcgtgaacaacagcaaggaggaggacccgccccggatgtactgctccaccgagggggagtggctggtgcccatcggcaagtgcagctgcaacgcgggctacgaggagcgcgggttcatgtgccaggcctgccggcccggcttctacaaggccctggacgggaacatgaagtgcgccaagtgcccgccccacagctccacgcaggaggacggcagcatgaactgccgctgcgagaacaactacttccgggcggacaaggacccgccctccatggcctgcacccgcccgcccagcagcccccggaacgtcatctccaacatcaacgagacctccgtgatcctcgactggagctggcccctggacaccggcgggcgcaaggacgtgacgttcaacatcatctgcaagaagtgcggctggaacatcaagcagtgcgagccctgctcccccaacgtccggttcctgccccgccagttcgggctcaccaacaccaccgtgacggtcaccgacctgctggcccacaccaactacaccttcgagatcgacgccgtgaacggcgtgagcgagctctccagcccgccccggcagttcgccgcggtctccatcacgaccaaccaggccgcccccagccccgtgctgaccatcaagaaggaccgcacctcccggaacagcatctccctgagctggcaggagcccgagcaccccaacgggatcatcctcgactacgaggtgaagtactacgagaagcaggagcaggagacgtcctacaccatcctgcgcgcccgcggcaccaacgtcaccatcagcagcctgaagcccgacacgatctacgtgttccagatccgggcccgcaccgcggccggctacgggaccaactcccggaagttcgagttcgagaccagcccggactccttcagcatctccggcgagagctcccaggtggtcatgatcgccatcagcgccgccgtggcgatcatcctcctgacggtggtcatctacgtgctgatcgggcgcttctgcggctacaagtccaagcacggggccgacgagaagcggctccacttcggcaacggccacctgaagctgcccgggctccgcacctacgtggacccccacacctacgaggaccccacccagaccgtccacgagttcgccaaggagctggacgccacgaacatcagcatcgacaaggtggtgggcgccggggagttcggcgaggtctgctccgggcggctgaagctcccgagcaagaaggagatctccgtggcgatcaagaccctgaaggtgggctacaccgagaagcagcgccgggacttcctgggcgaggccagcatcatggggcagttcgaccaccccaacatcatccgcctcgagggcgtcgtgaccaagtccaagcccgtgatgatcgtcacggagtacatggagaacgggagcctggactccttcctgcggaagcacgacgcccagttcaccgtgatccagctggtgggcatgctccgcggcatcgccagcgggatgaagtacctgagcgacatgggctacgtccaccgggacctggcggcccgcaacatcctcatcaactccaacctggtgtgcaaggtgagcgacttcgggctgtcccgggtcctcgaggacgaccccgaggccgcctacaccacccgcggcgggaagatcccgatccggtggacgagccccgaggccatcgcgtaccgcaagttcacctccgccagcgacgtgtggtcctacggcatcgtgctgtgggaggtcatgagctacggcgagcggccctactgggagatgtccaaccaggacgtgatcaaggccgtggacgaggggtaccgcctgcccccgcccatggactgccccgccgccctctaccagctgatgctggactgctggcagaaggaccgcaacaaccggcccaagttcgagcagatcgtcagcatcctcgacaagctgatccgcaacccgggctccctgaagatcatcaccagcgcggccgcccggccctccaacctcctgctggaccagagcaacgtggacatcaccacgttccgcaccaccggggactggctcaacggcgtgtggaccgcccactgcaaggagatcttcacgggggtcgagtactccagctgcgacaccatcgccaagatctccaccgacgacatgaagaaggtgggcgtgaccgtcgtgggcccccagaagaagatcatcagctccatcaaggcgctggagacgcagagcaagaacgggcccgtgccggtctga

SEQ ID NO: 1164 - RNA, 1389 nt, synthetic construct
  misc_feature 1..1389: note = BAG54127_variant
  source 1..1389: mol_type = other RNA
atgcccatgagcaccatcctgccggtgacctccccctgcctccccgccacgggcgtcaccgtgtgggagctgatgaccttcggggccgagccctacgcgggcctgcgcctcgccgaggtgccggacctgctggagaagggggagcggctcgcccagccccagatctgcaccatcgacgtctacatggtgatggtgaagtgctggatgatcgacgagaacatccgccccacgttcaaggagctggccaacgagttcacccggatggcccgcgacccgccccggtacctggtcatcaagcgcgagagcggccccgggatcgcgcccggccccgagccgcacggcctcaccaacaagaagctggaggaggtggagctggagcccgagctcgacctggacctggacctcgaggccgaggaggacaacctggccaccacgaccctggggtccgccctcagcctgcccgtgggcaccctgaaccggccccgcgggtcccagagcctcctgtccccgagctccggctacatgcccatgaaccaggggaacctgggcgagagctgccaggagtccgcggtcagcggctccagcgagcggtgcccccgccccgtgtccctccacccgatgccccgggggtgcctggccagcgagtccagcgagggccacgtgaccgggtccgaggccgagctgcaggagaaggtcagcatgtgccgcagccggtcccgcagccggagcccccgcccccggggcgactccgcctaccactcccagcgccacagcctcctgacgccggtgacgcccctgtccccgcccggcctcgaggaggaggacgtgaacgggtacgtcatgcccgacacccacctgaagggcacccccagctcccgggaggggaccctgagctccgtgggcctcagctccgtgctggggaccgaggaggaggacgaggacgaggagtacgagtacatgaaccgccggcgccgccacagcccgccccacccgccccggccctccagcctggaggagctcggctacgagtacatggacgtcggctccgacctgagcgcctccctggggagcacccagagctgccccctccaccccgtgcccatcatgcccaccgcgggcacgaccccggacgaggactacgagtacatgaaccgccagcgggacgggggcgggcccggcggcgactacgccgccatgggggcctgccccgcctccgagcagggctacgaggagatgcgcgcgttccaggggcccggccaccaggccccgcacgtgcactacgcccggctgaagaccctgcgcagcctcgaggccaccgactccgccttcgacaaccccgactactggcacagccggctgttccccaaggcgaacgcccagcgcacgtga

SEQ ID NO: 1165 - RNA, 2766 nt, synthetic construct
  misc_feature 1..2766: note = BAG57868_variant
  source 1..2766: mol_type = other RNA
atgcgcgccaacgacgccctccaggtgctgggcctgctgttcagcctcgcgcgggggtccgaggtcggcaacagccaggccgtgtgccccgggaccctgaacggcctgtccgtgaccggggacgccgagaaccagtaccagacgctctacaagctgtacgagcgctgcgaggtcgtgatgggcaacctggagatcgtgctcaccggccacaacgccgacctgagcttcctgcagtggatccgggaggtcaccgggtacgtgctcgtggccatgaacgagttctccaccctgccgctgcccaacctccgcgtcgtgcggggcacccaggtgtacgacgggaagttcgcgatcttcgtcatgctgaactacaacaccaacagctcccacgccctgcgccagctccggctgacccagctgaccgagatcctcagcggcggggtgtacatcgagaagaacgacaagctgtgccacatggacacgatcgactggcgcgacatcgtgcgggaccgcgacgccgagatcgtcgtgaaggacaacggccggtcctgcccgccctgccacgaggtgtgcaagggccgctgctgggggcccggcagcgaggactgccagaccctgaccaagaccatctgcgcgccccagtgcaacgggcactgcttcggccccaaccccaaccagtgctgccacgacgagtgcgccggcgggtgctccggcccgcaggacacggactgcttcgcctgccggcacttcaacgacagcggggcctgcgtcccccgctgcccccagcccctcgtgtacaacaagctgaccttccagctggagccgaacccccacaccaagtaccagtacggcggggtgtgcgtcgcctcctgcccccacaacttcgtggtggaccagaccagctgcgtccgggcctgcccgcccgacaagatggaggtggacaagaacggcctcaagatgtgcgagccctgcggcgggctgtgccccaaggcgtgcgagggcacggggtccggcagccgcttccagaccgtcgactccagcaacatcgacgggttcgtgaactgcaccaagatcctgggcaacctcgacttcctgatcaccggcctgaacggggacccctggcacaagatcccggccctcgaccccgagaagctgaacgtgttccggacggtccgcgagatcaccggctacctgaacatccagtcctggccgccccacatgcacaacttcagcgtgttcagcaacctcaccaccatcgggggccggtccctgtacaaccgcgggttcagcctgctcatcatgaagaacctgaacgtgacgtccctgggcttccggagcctcaaggagatctccgccggccgcatctacatcagcgccaaccgccagctgtgctaccaccactccctgaactggaccaaggtcctccgggggcccaccgaggagcgcctggacatcaagcacaaccggccccgccgggactgcgtggccgagggcaaggtgtgcgaccccctgtgcagctccgggggctgctggggccccgggccgggccagtgcctcagctgccgcaactactcccgcgggggcgtctgcgtgacccactgcaacttcctgaacggggagccccgggagttcgcgcacgaggccgagtgcttcagctgccaccccgagtgccagccgatggagggcacggcgacctgcaacggctccgggagcgacacgtgcgcccagtgcgcccacttccgggacggcccccactgcgtgtccagctgcccccacggggtcctgggcgccaaggggcccatctacaagtacccggacgtgcagaacgagtgccgcccctgccacgagaactgcacccagggctgcaagggccccgagctgcaggactgcctcgggcagacgctggtgctgatcggcaagacccacctcaccatggccctgaccgtcatcgccgggctggtggtgatcttcatgatgctcggcgggacgttcctgtactggcggggccgccggatccagaacaagcgcgccatgcggcgctacctggagcggggcgagtccatcgagcccctcgacccgagcgagaaggccaacaaggtcctggcgcgcatcttcaaggagaccgagctgcggaagctcaaggtgctggggtccggcgtgttcgggaccgtccacaagggcgtgtggatccccgagggggagagcatcaagatccccgtgtgcatcaaggtcatcgaggacaagagcggccgccagtccttccaggccgtgaccgaccacatgctggccatcggcagcctcgaccacgcccacatcgtgcgcctgctggggctctgccccggctccagcctgcagctggtcacccagtacctcccgctggggtccctgctcgaccacgtgcggcagcaccgcggcgcgctgggcccccagctgctcctgaactggggcgtgcagatcgccaaggggatgtactacctggaggagcacgggatggtccaccggaacctcgccgcccgcaacgtgctgctcaagagcccctcccaggtgcaggtcgccgacttcggcgtggcggacctgctgcccccggacgacaagcagctgctctacagcgaggccaagacgcccatcaagtggatggccctggagtccatccacttcgggaagtacacccaccagagcgacgtgtggtcctacggccagtgcatctggatgcccagcctgccctccctcgccccggtcagcaacctgcccttcgagaccccctcctga

SEQ ID NO: 1166 - RNA, 3927 nt, synthetic construct
  misc_feature 1..3927: note = AAB59446_variant
  source 1..3927: mol_type = other RNA
atgaagcccgccaccggcctgtgggtgtgggtcagcctcctggtggccgcggggaccgtgcagccctccgacagccagtccgtctgcgccggcacggagaacaagctgagctccctcagcgacctggagcagcagtaccgcgccctgcggaagtactacgagaactgcgaggtggtgatggggaacctcgagatcacctccatcgagcacaaccgcgacctgagcttcctgcggtccgtccgcgaggtgaccggctacgtgctcgtcgccctgaaccagttccggtacctgcccctcgagaacctgcgcatcatccgggggaccaagctgtacgaggaccgctacgccctcgcgatcttcctgaactaccggaaggacggcaacttcggcctgcaggagctcgggctgaagaacctgacggagatcctcaacggcggggtgtacgtggaccagaacaagttcctgtgctacgccgacaccatccactggcaggacatcgtccgcaacccctggcccagcaacctgaccctcgtgtccaccaacggcagctccgggtgcggccggtgccacaagagctgcacgggccgctgctgggggccgaccgagaaccactgccagaccctgacccggacggtgtgcgccgagcagtgcgacggccgctgctacgggccctacgtctccgactgctgccaccgggagtgcgccggcggctgcagcgggcccaaggacaccgactgcttcgcgtgcatgaacttcaacgactccggcgcctgcgtgacccagtgcccccagaccttcgtgtacaacccgacgaccttccagctggagcacaacttcaacgccaagtacacctacggggccttctgcgtcaagaagtgcccccacaacttcgtggtggacagctccagctgcgtccgcgcctgccccagctccaagatggaggtggaggagaacggcatcaagatgtgcaagccctgcaccgacatctgcccgaaggcgtgcgacgggatcggcacgggcagcctcatgtccgcccagaccgtggacagctccaacatcgacaagttcatcaactgcaccaagatcaacgggaacctgatcttcctggtcaccggcatccacggggacccctacaacgccatcgaggccatcgaccccgagaagctcaacgtgttccggacggtccgcgagatcaccggcttcctgaacatccagagctggcccccgaacatgaccgacttctccgtgttcagcaacctggtgaccatcgggggccgggtcctctactccggcctgagcctgctcatcctgaagcagcaggggatcacgtccctgcagttccagagcctcaaggagatctccgccggcaacatctacatcaccgacaacagcaacctgtgctactaccacaccatcaactggaccacgctgttctccaccatcaaccagcgcatcgtgatccgggacaaccgcaaggcggagaactgcaccgccgaggggatggtgtgcaaccacctctgcagctccgacggctgctgggggcccggccccgaccagtgcctgagctgccgccggttctcccgcggccggatctgcatcgagagctgcaacctgtacgacggggagttccgcgagttcgagaacggcagcatctgcgtcgagtgcgacccccagtgcgagaagatggaggacgggctcctgacctgccacggcccgggccccgacaactgcacgaagtgctcccacttcaaggacgggcccaactgcgtggagaagtgccccgacggcctgcagggggccaacagcttcatcttcaagtacgccgacccggaccgggagtgccacccctgccaccccaactgcacccagggctgcaacgggcccacctcccacgactgcatctactacccgtggaccggccacagcaccctcccccagcacgcccgcacgcccctgatcgcggccggcgtgatcgggggcctgttcatcctggtcatcgtggggctcaccttcgccgtgtacgtccggcgcaagtccatcaagaagaagcgggccctgcgccggttcctggagaccgagctcgtggagccgctgacccccagcggcacggcccccaaccaggcgcagctgcgcatcctcaaggagaccgagctgaagcgggtgaaggtcctggggtccggcgccttcggcaccgtgtacaaggggatctgggtgcccgagggcgagaccgtcaagatcccggtggccatcaagatcctcaacgagacgaccgggcccaaggccaacgtggagttcatggacgaggcgctgatcatggccagcatggaccacccccacctggtccgcctcctgggcgtgtgcctgtcccccaccatccagctcgtgacccagctgatgccgcacgggtgcctgctcgagtacgtccacgagcacaaggacaacatcggcagccagctgctgctcaactggtgcgtgcagatcgccaagggcatgatgtacctggaggagcggcgcctggtgcaccgggacctcgccgcccgcaacgtcctggtgaagtcccccaaccacgtgaagatcacggacttcgggctggcgcggctcctggagggcgacgagaaggagtacaacgccgacgggggcaagatgcccatcaagtggatggccctggagtgcatccactaccgcaagttcacccaccagagcgacgtctggtcctacggggtgaccatctgggagctcatgaccttcggcggcaagccctacgacgggatcccgacgcgcgagatccccgacctgctggagaagggcgagcggctcccccagcccccgatctgcaccatcgacgtgtacatggtcatggtgaagtgctggatgatcgacgccgacagccgccccaagttcaaggagctggccgcggagttctcccggatggcccgcgacccccagcggtacctggtgatccagggggacgaccgcatgaagctccccagcccgaacgactccaagttcttccagaacctgctggacgaggaggacctcgaggacatgatggacgccgaggagtacctggtcccccaggccttcaacatcccgcccccgatctacaccagccgggcccgcatcgacagcaaccggtccgagatcggccacagcccgccgcccgcgtacacccccatgtccggcaaccagttcgtgtaccgcgacgggggcttcgccgccgagcagggggtgagcgtcccctaccgggcccccacgtccaccatccccgaggcgcccgtggcccagggcgccaccgccgagatcttcgacgacagctgctgcaacgggaccctgcgcaagcccgtggcgccccacgtccaggaggactccagcacgcagcggtactccgccgaccccaccgtgttcgcccccgagcgcagcccccggggcgagctcgacgaggagggctacatgacccccatgcgcgacaagccgaagcaggagtacctgaaccccgtggaggagaaccccttcgtctcccggcgcaagaacggggacctgcaggccctcgacaaccccgagtaccacaacgccagcaacggcccgcccaaggccgaggacgagtacgtgaacgagcccctgtacctgaacaccttcgcgaacacgctcgggaaggccgagtacctgaagaacaacatcctgtccatgcccgagaaggccaagaaggccttcgacaacccggactactggaaccacagcctcccgccccggtccaccctgcagcaccccgactacctgcaggagtacagcaccaagtacttctacaagcagaacggccgcatccggcccatcgtggccgagaaccccgagtacctctccgagttcagcctgaagcccgggaccgtcctgcccccgccgccctaccgccaccgcaacacggtggtgtga

SEQ ID NO: 1167 - RNA, 1461 nt, synthetic construct
  misc_feature 1..1461: note = CCDS46648.1_variant
  source 1..1461: mol_type = other RNA
atgatccagaccgtgcccgacccggccgcccacatcaaggaggcgctgagcgtcgtgtccgaggaccagagcctcttcgagtgcgcctacggcacgccccacctggccaagaccgagatgaccgcctccagctccagcgactacgggcagacctccaagatgagcccccgcgtgccccagcaggactggctgtcccagccgcccgcccgggtcaccatcaagatggagtgcaaccccagccaggtgaacggctcccgcaacagccccgacgagtgctccgtggcgaagggcgggaagatggtcgggagcccggacacggtgggcatgaactacggctcctacatggaggagaagcacatgcccccgcccaacatgaccaccaacgagcggcgcgtgatcgtccccgccgaccccaccctctggagcacggaccacgtgcggcagtggctggagtgggccgtgaaggagtacgggctgcccgacgtcaacatcctcctgttccagaacatcgacggcaaggagctgtgcaagatgaccaaggacgacttccagcgcctcaccccctcctacaacgccgacatcctgctgagccacctccactacctgcgggagaccccgctgccccacctcacgtccgacgacgtggacaaggcgctgcagaacagcccccgcctgatgcacgcccggaacaccgggggcgccgccttcatcttccccaacaccagcgtgtacccggaggccacccagcgcatcacgacccggcccgacctcccctacgagcccccgcgccggtccgcgtggaccgggcacggccaccccacgccccagagcaaggccgcccagccctccccgagcaccgtccccaagaccgaggaccagcgcccccagctggacccgtaccagatcctgggccccacctccagccggctcgccaaccccgggtccggccagatccagctgtggcagttcctgctcgagctgctgagcgactccagcaactccagctgcatcacctgggaggggacgaacggcgagttcaagatgaccgaccccgacgaggtggcccgccggtggggcgagcgcaagtccaagccgaacatgaactacgacaagctcagccgggcgctgcgctactactacgacaagaacatcatgaccaaggtgcacgggaagcggtacgcctacaagttcgacttccacggcatcgcccaggccctgcagccccacccgcccgagtccagcctctacaagtacccctccgacctgccctacatggggagctaccacgcccacccccagaagatgaacttcgtcgcgccccacccgcccgccctgcccgtgacctccagcagcttcttcgccgcccccaacccgtactggaactcccccacgggcgggatctaccccaacacccgcctccccaccagccacatgccgtcccacctgggcacctactactga

SEQ ID NO: 1168 - RNA, 1359 nt, synthetic construct
  misc_feature 1..1359: note = AAA19786_variant
  source 1..1359: mol_type = other RNA
atgagcgagacccccgcccagtgctccatcaagcaggagcgcatcagctacaccccgcccgagtcccccgtgcccagctacgcctccagcacgccgctgcacgtccccgtgccccgggcgctccgcatggaggaggactccatccggctgcccgcccacctccgcctgcagccgatctactggagccgggacgacgtggcccagtggctgaagtgggccgagaacgagttctccctgcgccccatcgacagcaacaccttcgagatgaacggcaaggccctcctgctgctcaccaaggaggacttccggtaccgcagcccccactccggggacgtcctgtacgagctgctccagcacatcctgaagcagcggaagccccgcatcctgttctccccgttcttccaccccggcaacagcatccacacccagcccgaggtgatcctccaccagaaccacgaggaggacaactgcgtgcagcggacgccccgcccgtccgtcgacaacgtgcaccacaacccgcccaccatcgagctgctgcaccggagccgctcccccatcaccaccaaccaccggcccagccccgaccccgagcagcgccccctccggtccccgctggacaacatgatccgccggctgagccccgcggagcgcgcccaggggccccggccccaccaggagaacaaccaccaggagagctacccgctctccgtgagccccatggagaacaaccactgccccgcctccagcgagtcccacccgaagcccagcagcccccgccaggagtccacgcgcgtcatccagctgatgccctccccgatcatgcaccccctgatcctcaacccccggcacagcgtggacttcaagcagtcccgcctgagcgaggacggcctgcaccgggaggggaagcccatcaacctctcccaccgcgaggacctggcctacatgaaccacatcatggtgagcgtctccccgcccgaggagcacgcgatgcccatcggccggatcgccgactgccgcctgctctgggactacgtgtaccagctgctgagcgactcccggtacgagaacttcatccgctgggaggacaaggagagcaagatcttccggatcgtggaccccaacggcctcgcccgcctgtgggggaaccacaagaaccggaccaacatgacctacgagaagatgtcccgcgccctgcggcactactacaagctcaacatcatccgcaaggagccgggccagcggctgctgttccgcttcatgaagacccccgacgagatcatgagcgggcggacggaccgcctcgagcacctggagagccaggagctggacgagcagatctaccaggaggacgagtgctga

SEQ ID NO: 1169 - RNA, 1971 nt, synthetic construct
  misc_feature 1..1971: note = AAH04817_variant
  source 1..1971: mol_type = other RNA
atggccagcaccgactactccacctacagccaggccgcggcccagcagggctactccgcctacacggcccagcccacccaggggtacgcccagaccacccaggcgtacggccagcagagctacgggacgtacggccagccgaccgacgtgtcctacacccaggcccagaccacggccacctacgggcagaccgcctacgcgaccagctacggccagccccccacgggctacaccacccccaccgccccgcaggcctactcccagcccgtccaggggtacggcacgggggcctacgacaccaccaccgccacggtgaccaccacccaggcgagctacgccgcccagtccgcctacggcacgcagcccgcctaccccgcgtacgggcagcagccggccgccaccgcccccacccgcccccaggacggcaacaagcccaccgagacgagccagccgcagtccagcaccggcgggtacaaccagccctccctgggctacgggcagagcaactactcctacccccaggtgcccggcagctacccgatgcagcccgtcaccgcccccccctcctacccgcccaccagctactccagcacgcagcccaccagctacgaccagtccagctactcccagcagaacacctacggccagcccagctcctacgggcagcagagctcctacggccagcagagctcctacgggcagcagccgcccaccagctaccccccccagacgggctcctacagccaggcgccgtcccagtacagccagcagtccagctcctacgggcagcagagctccttccggcaggaccaccccagcagcatgggcgtgtacggccaggagtccgggggcttcagcgggcccggcgagaaccgctccatgagcgggccggacaaccggggccgcggccgggggggcttcgaccgcgggggcatgtcccgggggggccgcggcgggggccgggggggcatgggcagcgccggggagcgcggcgggttcaacaagcccggcgggcccatggacgagggccccgacctcgacctgggcccgcccgtggaccccgacgaggactccgacaacagcgccatctacgtccaggggctgaacgactccgtgaccctcgacgacctggccgacttcttcaagcagtgcggcgtggtcaagatgaacaagcggaccgggcagcccatgatccacatctacctggacaaggagaccggcaagccgaagggggacgccaccgtgagctacgaggacccccccacggcgaaggccgccgtggagtggttcgacggcaaggacttccagggctccaagctcaaggtcagcctggcccgcaagaagcccccgatgaactccatgcgggggggcctgcccccccgcgaggggcggggcatgcccccgcccctccgcgggggccccggcgggcccggcgggccgggcgggcccatgggccggatgggcgggcgcggcggggaccggggcggcttccccccccgcgggccgcggggcagccgcgggaacccctccggcgggggcaacgtgcagcaccgcgcgggcgactggcagtgccccaacccggggtgcggcaaccagaacttcgcctggcggaccgagtgcaaccagtgcaaggcccccaagcccgaggggttcctgcccccgcccttcccccccccgggcggggaccgcggccggggcgggcccggcgggatgcgcggcgggcggggcggcctgatggaccgcgggggccccgggggcatgttccggggcgggcgcggcggggaccggggcgggttccgcggcggccgggggatggaccgcggcgggttcggcgggggccggcgcggcgggcccggcgggccgcccggccccctcatggagcagatggggggccggcgcggcgggcggggcgggcccggcaagatggacaagggggagcaccgccaggagcggcgcgaccgcccgtactga

SEQ ID NO: 1170 - RNA, 1998 nt, synthetic construct
  misc_feature 1..1998: note = AEA07595_variant
  source 1..1998: mol_type = other RNA
atgggccagaccgggaagaagtccgagaagggccccgtgtgctggcgcaagcgggtcaagagcgagtacatgcgcctgcggcagctcaagcgcttccggcgcgccgacgaggtcaagagcatgttctccagcaaccggcagaagatcctggagcgcaccgagatcctgaaccaggagtggaagcagcggcgcatccagccggtgcacatcctcacgtccgtgagctccctgcgggggacccgcgaggtggaggacgagaccgtgctgcacaacatcccctacatgggcgacgaggtcctcgaccaggacgggaccttcatcgaggagctgatcaagaactacgacggcaaggtgcacggcgaccgggagtgcgggttcatcaacgacgagatcttcgtggagctggtcaacgccctcggccagtacaacgacgacgacgacgacgacgacggggacgaccccgaggagcgcgaggagaagcagaaggacctggaggaccaccgggacgacaaggagagccggcccccgcgcaagttcccctccgacaagatcttcgaggcgatcagctccatgttccccgacaagggcacggccgaggagctgaaggagaagtacaaggagctcaccgagcagcagctgcccggggccctgccgcccgagtgcacccccaacatcgacggccccaacgccaagagcgtgcagcgcgagcagtccctccacagcttccacaccctgttctgccggcgctgcttcaagtacgactgcttcctgcacccgttccacgccacgcccaacacctacaagcggaagaacaccgagaccgcgctcgacaacaagccctgcggcccccagtgctaccagcacctggagggggccaaggagttcgccgccgcgctgacggccgagcgcatcaagaccccgcccaagcgccccggcgggcggcgccggggccgcctccccaacaactccagccggccgtccacccccaccatcaacgtgctggagagcaaggacacggactccgaccgcgaggccggcaccgagaccgggggcgagaacaacgacaaggaggaggaggagaagaaggacgagaccagcagctccagcgaggccaactcccggtgccagacgcccatcaagatgaagcccaacatcgagccgcccgagaacgtcgagtggagcggggccgaggcgtccatgttccgcgtgctgatcggcacctactacgacaacttctgcgccatcgcccggctcatcgggaccaagacctgccgccaggtgtacgagttccgggtcaaggagagctccatcatcgcccccgcccccgcggaggacgtggacacgccgccccgcaagaagaagcggaagcaccgcctgtgggccgcccactgccggaagatccagctgaagaagggccagaaccgcttccccggctgccggtgcaaggcccagtgcaacaccaagcagtgcccgtgctacctcgccgtgcgcgagtgcgaccccgacctgtgcctgacctgcggggcggccgaccactgggacagcaagaacgtctcctgcaagaactgcagcatccagcggggctccaagaagcacctcctgctggcccccagcgacgtggccgggtggggcatcttcatcaaggaccccgtgcagaagaacgagttcatctccgagtactgcggggagatcatcagccaggacgaggccgaccgccgcggcaaggtctacgacaagtacatgtgctccttcctcttcaacctgaacaacgacttcgtggtggacgcgacccggaagggcaacaagatccgcttcgccaaccacagcgtcaacccgaactgctacgccaaggtgatgatggtcaacggggaccaccggatcggcatcttcgccaagcgcgcgatccagacgggggaggagctgttcttcgactaccggtactcccaggccgacgccctcaagtacgtgggcatcgagcgcgagatggagatcccctga

SEQ ID NO: 1171 - RNA, 1005 nt, synthetic construct
  misc_feature 1..1005: note = EAW80068_variant
  source 1..1005: mol_type = other RNA
atgggccagaccgggaagaagtccgagaagggccccgtgtgctggcgcaagcgggtcaagagcgagtacatgcgcctgcggcagctcaagcgcttccggcgcgccgacgaggtcaagagcatgttctccagcaaccggcagaagatcctggagcgcaccgagatcctgaaccaggagtggaagcagcggcgcatccagccggtgcacatcctcacgtccgtgagctccctgcgggggacccgcgagtgcagcgtgacctccgacctggacttccccacccaggtgatccccctcaagacgctgaacgccgtcgcgagcgtgcccatcatgtactcctggagcccgctgcagcagaacttcatggtggaggacgagaccgtcctccacaacatcccctacatgggcgacgaggtgctggaccaggacgggaccttcatcgaggagctgatcaagaactacgacggcaaggtgcacggcgaccgggagtgcgggttcatcaacgacgagatcttcgtcgagctcgtgaacgccctgggccagtacaacgacgacgacgacgacgacgacggggacgaccccgaggagcgcgaggagaagcagaaggacctggaggaccaccgggacgacaaggagtcccggcccccgcgcaagttccccagcgacaagatcttcgaggccatctccagcatgttccccgacaagggcaccgccgaggagctcaaggagaagtacaaggagctgacggagcagcagctgcccggggccctcccgcccgagtgcacccccaacatcgacggccccaacgcgaagtccgtgcagcgcgagcagagcctgcactccttccacaccctgttctgccggcgctgcttcaagtacgactgcttcctccacccgttccacgccacccccaacacgtacaagcggaagaacaccgagaccgccctggacaacaagccctgcggcccccagtgctaccagcacctcccgctgctgccccgcaactga

SEQ ID NO: 1172 - RNA, 195 nt, synthetic construct
  misc_feature 1..195: note = CCO13726_variant
  source 1..195: mol_type = other RNA
atgcccctggtgaacatcatgatgatgaccatgatgatgatggagaccatcctcaagaaggagaagaagagccgcaagatctggcggatcacggagatgatcaagaaggccgcccacctgggcaacttcctgctcatcaagttcctgaagccgttcccccagtgcttccagatccgcgcgcagcagaagaactga

SEQ ID NO: 1173 - RNA, 2241 nt, synthetic construct
  misc_feature 1..2241: note = AAC51520_variant
  source 1..2241: mol_type = other RNA
atgggccagaccgggaagaagtccgagaagggccccgtgtgctggcgcaagcgggtcaagagcgagtacatgcgcctgcggcagctcaagcgcttccggcgcgccgacgaggtcaagagcatgttctccagcaaccggcagaagatcctggagcgcaccgagatcctgaaccaggagtggaagcagcggcgcatccagccggtgcacatcctcacgtccgtgagctccctgcgggggacccgcgagtgcagcgtgacctccgacctggacttccccacccaggtgatccccctcaagacgctgaacgccgtcgcgagcgtgcccatcatgtactcctggagcccgctgcagcagaacttcatggtggaggacgagaccgtcctccacaacatcccctacatgggcgacgaggtgctggaccaggacgggaccttcatcgaggagctgatcaagaactacgacggcaaggtgcacggcgaccgggagtgcgggttcatcaacgacgagatcttcgtcgagctcgtgaacgccctgggccagtacaacgacgacgacgacgacgacgacggggacgaccccgaggagcgcgaggagaagcagaaggacctggaggaccaccgggacgacaaggagtcccggcccccgcgcaagttccccagcgacaagatcttcgaggccatctccagcatgttccccgacaagggcaccgccgaggagctcaaggagaagtacaaggagctgacggagcagcagctgcccggggccctcccgcccgagtgcacccccaacatcgacggccccaacgcgaagtccgtgcagcgcgagcagagcctgcactccttccacaccctgttctgccggcgctgcttcaagtacgactgcttcctccacccgttccacgccacccccaacacgtacaagcggaagaacaccgagaccgccctggacaacaagccctgcggcccccagtgctaccagcacctggagggggccaaggagttcgcggccgccctcaccgccgagcgcatcaagacgccgcccaagcgccccggcgggcggcgccggggccgcctgcccaacaacagcagccggccgtccacccccaccatcaacgtcctggagagcaaggacaccgactccgaccgcgaggccggcacggagaccgggggcgagaacaacgacaaggaggaggaggagaagaaggacgagaccagctccagctccgaggcgaacagccggtgccagacccccatcaagatgaagcccaacatcgagccgcccgagaacgtggagtggtccggggccgaggccagcatgttccgcgtgctcatcggcacgtactacgacaacttctgcgccatcgcccggctgatcgggaccaagacctgccgccaggtctacgagttccgggtgaaggagtccagcatcatcgcgcccgccccggccgaggacgtggacaccccgccccgcaagaagaagcggaagcaccgcctgtgggccgcccactgccggaagatccagctcaagaaggacggctccagcaaccacgtctacaactaccagccctgcgaccacccccgccagccctgcgactccagctgcccctgcgtgatcgcgcagaacttctgcgagaagttctgccagtgctccagcgagtgccagaaccggttccccggctgccgctgcaaggcccagtgcaacacgaagcagtgcccgtgctacctggccgtgcgggagtgcgaccccgacctgtgcctgacctgcggggccgccgaccactgggactccaagaacgtcagctgcaagaactgcagcatccagcgcggctccaagaagcacctcctgctcgcgcccagcgacgtggccgggtggggcatcttcatcaaggaccccgtccagaagaacgagttcatctccgagtactgcggggagatcatcagccaggacgaggccgaccgccggggcaaggtgtacgacaagtacatgtgctccttcctgttcaacctgaacaacgacttcgtggtcgacgccacccgcaagggcaacaagatccggttcgcgaaccacagcgtgaacccgaactgctacgccaaggtgatgatggtcaacggggaccaccgcatcggcatcttcgccaagcgggccatccagaccggggaggagctgttcttcgactaccgctactcccaggccgacgcgctcaagtacgtgggcatcgagcgggagatggagatcccctga

SEQ ID NO: 1174 - RNA, 2124 nt, synthetic construct
  misc_feature 1..2124: note = AEN79481_variant
  source 1..2124: mol_type = other RNA
atgggccagaccgggaagaagtccgagaagggccccgtgtgctggcgcaagcgggtcaagagcgagtacatgcgcctgcggcagctcaagcgcttccggcgcgccgacgaggtcaagagcatgttctccagcaaccggcagaagatcctggagcgcaccgagatcctgaaccaggagtggaagcagcggcgcatccagccggtgcacatcctcacgtccgtgagctccctgcgggggacccgcgaggtggaggacgagaccgtgctgcacaacatcccctacatgggcgacgaggtcctcgaccaggacgggaccttcatcgaggagctgatcaagaactacgacggcaaggtgcacggcgaccgggagtgcgggttcatcaacgacgagatcttcgtggagctggtcaacgccctcggccagtacaacgacgacgacgacgacgacgacggggacgaccccgaggagcgcgaggagaagcagaaggacctggaggaccaccgggacgacaaggagagccggcccccgcgcaagttcccctccgacaagatcttcgaggcgatcagctccatgttccccgacaagggcacggccgaggagctgaaggagaagtacaaggagctcaccgagcagcagctgcccggggccctgccgcccgagtgcacccccaacatcgacggccccaacgccaagagcgtgcagcgcgagcagtccctccacagcttccacaccctgttctgccggcgctgcttcaagtacgactgcttcctgcacccgttccacgccacgcccaacacctacaagcggaagaacaccgagaccgcgctcgacaacaagccctgcggcccccagtgctaccagcacctggagggggccaaggagttcgccgccgcgctgacggccgagcgcatcaagaccccgcccaagcgccccggcgggcggcgccggggccgcctccccaacaactccagccggccgtccacccccaccatcaacgtgctggagagcaaggacacggactccgaccgcgaggccggcaccgagaccgggggcgagaacaacgacaaggaggaggaggagaagaaggacgagaccagcagctccagcgaggccaactcccggtgccagacgcccatcaagatgaagcccaacatcgagccgcccgagaacgtcgagtggagcggggccgaggcgtccatgttccgcgtgctgatcggcacctactacgacaacttctgcgccatcgcccggctcatcgggaccaagacctgccgccaggtgtacgagttccgggtcaaggagagctccatcatcgcccccgcccccgcggaggacgtggacacgccgccccgcaagaagaagcggaagcaccgcctgtgggccgcccactgccggaagatccagctgaagaaggacggcagctccaaccacgtgtacaactaccagccctgcgaccacccgcgccagccctgcgacagctcctgcccctgcgtcatcgcccagaacttctgcgagaagttctgccagtgcagctccgagtgccagaaccggttccccggctgccgctgcaaggcccagtgcaacaccaagcagtgcccgtgctacctcgcggtgcgggagtgcgaccccgacctgtgcctgacctgcggggccgccgaccactgggacagcaagaacgtgtcctgcaagaactgcagcatccagcgcggctccaagaagcacctcctgctggcccccagcgacgtcgccgggtggggcatcttcatcaaggaccccgtgcagaagaacgagttcatctccgagtactgcggggagatcatcagccaggacgaggcggaccgccggggcaaggtgtacgacaagtacatgtgcagcttcctcttcaacctgaacaacgacttcgtcgtggacgccacccgcaagggcaacaagatccggttcgccaaccactccgtcaacccgaactgctacgccaaggtgatgatggtgaacggggaccaccgcatcggcatcttcgcgaagcgggccatccagacgggggaggagctgttcttcgactaccgctacagccaggccgacgccctcaagtacgtcggcatcgagcgggagatggagatcccctga

SEQ ID NO: 1175 - RNA, 399 nt, synthetic construct
  misc_feature 1..399: note = AAB87141_variant
  source 1..399: mol_type = other RNA
atggtggaggccttctgcgccacctggaagctgaccaacagccagaacttcgacgagtacatgaaggcgctcggcgtcgggttcgccacgcgccaggtgggcaacgtgaccaagcccaccgtcatcatctcccaggagggggacaaggtggtgatccggaccctgagcacgttcaagaacaccgagatctccttccagctgggcgaggagttcgacgagaccaccgccgacgaccgcaactgcaagagcgtcgtgtccctcgacggggacaagctggtgcacatccagaagtgggacggcaaggagacgaacttcgtccgggagatcaaggacggcaagatggtgatgaccctgaccttcggggacgtggtcgccgtgcgccactacgagaaggcctga

SEQ ID NO: 1176 - RNA, 765 nt, synthetic construct
  misc_feature 1..765: note = CAA36870_variant
  source 1..765: mol_type = other RNA
atgtggcagctgctcctgcccaccgccctgctcctgctggtgagcgccggcatgcgcaccgaggacctcccgaaggcggtcgtgttcctggagccccagtggtaccgggtgctggagaaggactccgtcacgctcaagtgccagggggcctacagccccgaggacaactccacccagtggttccacaacgagagcctgatctccagccaggcctccagctacttcatcgacgccgccaccgtggacgactccggcgagtaccgctgccagaccaacctgagcacgctctccgaccccgtgcagctggaggtccacatcgggtggctgctcctgcaggcgccgcggtgggtgttcaaggaggaggaccccatccacctccgctgccacagctggaagaacaccgccctgcacaaggtgacctacctgcagaacggcaaggggcggaagtacttccaccacaactccgacttctacatccccaaggccaccctgaaggacagcggctcctacttctgccgcggcctcttcgggagcaagaacgtctccagcgagacggtgaacatcaccatcacccagggcctggccgtgtccaccatcagcagcttcttcccgcccgggtaccaggtctccttctgcctggtgatggtgctcctgttcgcggtcgacacgggcctgtacttcagcgtgaagaccaacatccggtccagcacccgcgactggaaggaccacaagttcaagtggcggaaggacccccaggacaagtga

SEQ ID NO: 1177 - RNA, 873 nt, synthetic construct
  misc_feature 1..873: note = CCDS1232.1_variant
  source 1..873: mol_type = other RNA
atgggcgggggcgccggggagcgcctgttcaccagctcctgcctcgtgggcctggtccccctggggctccggatcagcctggtgacctgccccctgcagtgcggcatcatgtggcagctcctgctgcccacggccctcctgctgctcgtgtccgcgggcatgcgcaccgaggacctgcccaaggccgtcgtgttcctggagccccagtggtaccgggtgctcgagaaggacagcgtcaccctgaagtgccagggggcctactccccggaggacaacagcacccagtggttccacaacgagtccctgatcagctcccaggccagctcctacttcatcgacgccgcgacggtggacgacagcggcgagtaccgctgccagaccaacctctccaccctgagcgaccccgtgcagctggaggtccacatcgggtggctcctgctgcaggcgccccggtgggtgttcaaggaggaggaccccatccacctccgctgccactcctggaagaacaccgccctgcacaaggtgacgtacctgcagaacggcaaggggcggaagtacttccaccacaacagcgacttctacatcccgaaggccaccctcaaggactccggcagctacttctgccgcggcctgttcgggtccaagaacgtcagcagcgagaccgtgaacatcaccatcacgcagggcctggccgtgtccaccatcagctccttcttcccgcccgggtaccaggtcagcttctgcctcgtgatggtgctgctgttcgccgtcgacaccggcctctacttctccgtgaagaccaacatccggagctccacgcgcgactggaaggaccacaagttcaagtggcggaaggacccccaggacaagtga

SEQ ID NO: 1178 - RNA, 807 nt, synthetic construct
  misc_feature 1..807: note = AAH74858_variant
  source 1..807: mol_type = other RNA
atgagcctgtccttcctcctgctgctgttcttcagccacctgatcctgtccgcctgggcccacggcgagaagcgcctcgcgcccaaggggcagccgggccccgccgccaccgaccggaacccccgcgggagctccagccggcagtccagctccagcgccatgtccagctccagcgcctccagctcccccgcggccagcctgggctcccaggggagcggcctggagcagagctccttccagtggagcccgtccggccgccggaccgggagcctctactgccgcgtgggcatcgggttccacctccagatctaccccgacggcaaggtcaacgggtcccacgaggccaacatgctgagcgtgctcgagatcttcgccgtgtcccagggcatcgtcggcatccgcggggtgttcagcaacaagttcctggcgatgtccaagaagggcaagctgcacgccagcgccaagttcacggacgactgcaagttccgggagcggttccaggagaactcctacaacacctacgccagcgccatccaccgcaccgagaagaccgggcgggagtggtacgtggcgctcaacaagcgcggcaaggccaagcggggctgcagcccccgcgtcaagccccagcacatctccacgcacttcctgccgcggttcaagcagtccgagcagcccgagctgagcttcaccgtgaccgtgcccgagaagaagaagcccccgtcccccatcaagcccaagatccccctcagcgccccgcgcaagaacaccaactccgtcaagtaccggctgaagttccgcttcgggtga

SEQ ID NO: 1179 - RNA, 117 nt, synthetic construct
  misc_feature 1..117: note = AAB06462_variant
  source 1..117: mol_type = other RNA
atgagcacccgctgcggcgaggccgggcgggcccgcggcacccagccccaccgggggtaccgcgcgcagaaccagccctacaagatgcacctgggcccgccccggctcgaggagtga

SEQ ID NO: 1180 - RNA, 2466 nt, synthetic construct
  misc_feature 1..2466: note = AAA59470_variant
  source 1..2466: mol_type = other RNA
atggtgagctggggccgcttcatctgcctggtcgtggtgaccatggccaccctctccctggcccggcccagcttctccctggtcgaggacacgaccctcgagccggaggagccgcccaccaagtaccagatcagccagcccgaggtgtacgtggcggcccccggggagtccctggaggtccgctgcctgctcaaggacgccgccgtgatcagctggaccaaggacggcgtgcacctggggcccaacaaccggacggtcctgatcggcgagtacctccagatcaagggggccacgccccgcgactccggcctgtacgcgtgcaccgccagccggaccgtggactccgagacctggtacttcatggtgaacgtcaccgacgccatcagctccggcgacgacgaggacgacaccgacggggccgaggacttcgtgagcgagaactccaacaacaagcgcgcgccctactggaccaacacggagaagatggagaagcggctgcacgccgtgccggccgccaacaccgtcaagttccgctgccccgccggcgggaaccccatgcccaccatgcggtggctcaagaacggcaaggagttcaagcaggagcaccgcatcgggggctacaaggtgcggaaccagcactggagcctgatcatggagtccgtggtcccgagcgacaagggcaactacacgtgcgtggtggagaacgagtacgggtccatcaaccacacctaccacctggacgtcgtggagcgcagcccccaccggcccatcctccaggcgggcctgcccgccaacgcctccaccgtggtcgggggcgacgtggagttcgtctgcaaggtgtacagcgacgcccagccgcacatccagtggatcaagcacgtggagaagaacggcagcaagtacgggcccgacggcctgccctacctcaaggtcctgaaggccgcgggggtgaacaccaccgacaaggagatcgaggtgctgtacatccgcaacgtcacgttcgaggacgccggcgagtacacgtgcctcgccgggaactccatcggcatcagcttccactccgcctggctgaccgtgctgcccgccccgggccgggagaaggagatcaccgcgagccccgactacctcgagatcgccatctactgcatcggggtgttcctgatcgcctgcatggtcgtgaccgtgatcctgtgccgcatgaagaacaccaccaagaagcccgacttctccagccagcccgccgtccacaagctcaccaagcggatcccgctgcgccgccaggtgacggtgtccgccgagagctccagctccatgaacagcaacacgcccctggtccggatcaccacccggctctccagcaccgcggacacccccatgctggccggcgtgtccgagtacgagctgcccgaggacccgaagtgggagttcccccgcgacaagctcaccctggggaagcccctgggcgaggggtgcttcggccaggtggtcatggccgaggccgtgggcatcgacaaggacaagccgaaggaggcggtgaccgtcgccgtgaagatgctcaaggacgacgccacggagaaggacctgagcgacctggtgtccgagatggagatgatgaagatgatcgggaagcacaagaacatcatcaacctcctgggcgcctgcacccaggacgggcccctgtacgtcatcgtggagtacgccagcaagggcaacctccgcgagtacctgcgggcgcgccggccgcccgggatggagtactcctacgacatcaaccgcgtgcccgaggagcagatgaccttcaaggacctggtcagctgcacctaccagctcgcccggggcatggagtacctggccagccagaagtgcatccaccgcgacctggccgcccggaacgtgctcgtgaccgagaacaacgtcatgaagatcgcggacttcggcctggcccgcgacatcaacaacatcgactactacaagaagacgaccaacgggcggctgcccgtgaagtggatggcccccgaggccctgttcgaccgcgtgtacacccaccagtccgacgtctggagcttcggcgtgctcatgtgggagatcttcaccctcgggggctccccctacccgggcatccccgtggaggagctgttcaagctgctgaaggaggggcaccggatggacaagcccgccaactgcacgaacgagctgtacatgatgatgcgcgactgctggcacgcggtccccagccagcggccgaccttcaagcagctcgtggaggacctggaccgcatcctgaccctcaccacgaacgaggagtacctggacctgtcccagcccctcgagcagtacagcccctcctaccccgacacccggagctcctgcagctccggcgacgacagcgtgttctccccggaccccatgccctacgagccctgcctgccgcagtacccccacatcaacgggagcgtcaagacctga

SEQ ID NO: 1181 - RNA, 1908 nt, synthetic construct
  misc_feature 1..1908: note = EAW74574_variant
  source 1..1908: mol_type = other RNA
atggccccgcccctgctcctgctgctcctggccagcggcgcggccgcctgccccctgccctgcgtgtgccagaacctctccgagagcctgtccaccctgtgcgcccaccgcgggctcctgttcgtgcccccgaacgtcgaccggcgcaccgtggagctgcggctcgccgacaacttcatccaggcgctgggcccgcccgacttccgcaacatgacggggctggtcgacctcaccctgagccggaacgccatcacccgcatcggcgcccgggccttcggggacctggagtccctccgcagcctgcacctggacggcaaccggctcgtggagctgggcaccgggtccctgcgcggccccgtgaacctccagcacctgatcctgagcgggaaccagctcggccggatcgcgcccggggccttcgacgacttcctggagtccctggaggacctcgacctgagctacaacaacctgcgccaggtcccctgggccggcatcggcgccatgcccgccctccacacgctgaacctggaccacaacctcatcgacgcgctgcccccgggggccttcgcccagctgggccagctctcccggctggacctgaccagcaaccgcctcgccaccctggcccccgaccccctgttctcccgggggcgcgacgcggaggccagccccgccccgctcgtgctgtccttcagcggcaaccccctgcactgcaactgcgagctcctgtggctgcggcgcctggcccggcccgacgacctcgagacctgcgcctccccgcccggcctggcggggcgctacttctgggccgtgcccgagggcgagttcagctgcgagccgcccctgatcgcccggcacacgcagcgcctctgggtcctggaggggcagcgcgccaccctgcggtgccgcgccctcggcgaccccgcgcccaccatgcactgggtggggcccgacgaccggctggtgggcaactccagccgcgcccgggccttccccaacggcaccctggagatcggggtcacgggcgccggggacgcgggcgggtacacgtgcatcgccaccaaccccgccggcgaggccaccgcccgcgtggagctccgggtgctggcgctgccccacggcgggaacagctccgccgagggcgggcgccccggcccgagcgacatcgccgcctccgcccggaccgcggccgagggggagggcaccctcgagagcgagcccgccgtccaggtgaccgaggtgaccgccacgtccggcctggtcagctgggggcccggccgccccgccgacccggtgtggatgttccagatccagtacaactccagcgaggacgagaccctgatctaccggatcgtgcccgcgtccagccaccacttcctcctgaagcacctggtccccggggccgactacgacctctgcctgctggccctctcccccgccgcgggcccgagcgacctgaccgccacccgcctgctcggctgcgcccacttctccacgctgcccgccagccccctgtgccacgccctccaggcgcacgtgctcgggggcaccctgaccgtggccgtcgggggcgtgctggtcgccgccctgctggtgttcaccgtggccctcctggtccgggggcgcggcgcgggcaacgggcggctgcccctcaagctgtcccacgtgcagagccagacgaacggcgggccgtcccccacccccaaggcccacccgccccgcagcccgccgccccggccccagcgctcctgcagcctggacctcggcgacgccgggtgctacggctacgcccggcgcctgggcggggcctgggcgcgccggagccactccgtgcacggcgggctgctcggcgccgggtgccgcggcgtcggcgggagcgccgagcggctggaggagtccgtggtgtga

SEQ ID NO: 1182 - RNA, 3297 nt, synthetic construct
  misc_feature 1..3297: note = EAW96782_variant
  source 1..3297: mol_type = other RNA
atgcccccgcgccagcccccccggcaggccggcgggggcctgagccgcgagttcgggaagctcctgcccgccctgtcccacagcccgctcggcgggctgggctccggcagcgggtccgtggcgcccggccaggggcgggccggcgccatggggagccgcacccccgagtcccccctgcacgccgtccagctccggtggggcccgcgccggcgcccccccctgctgcccctcctgctgctcctgctgccgccccccccccgggtgggcgggttcaacctcgacgccgaggcgccggccgtgctgagcggcccccccgggtccttcttcggcttcagcgtcgagttctaccgccccggcaccgacggggtgtccgtgctggtcggcgccccgaaggccaacacgagccagcccggggtgctccagggcggggcggtgtacctgtgcccctggggcgcctcccccacccagtgcaccccgatcgagttcgacagcaagggctcccggctgctcgagagctccctgagctccagcgagggggaggagcccgtcgagtacaagagcctgcagtggttcggcgccaccgtgcgcgcccacgggtccagcatcctcgcctgcgcgcccctgtactcctggcggacggagaaggagcccctgagcgacccggtgggcacctgctacctctccaccgacaacttcacccgcatcctggagtacgccccctgccggagcgacttctcctgggccgccgggcagggctactgccagggcgggttcagcgccgagttcacgaagaccggccgcgtcgtgctggggggccccgggtcctacttctggcagggccagatcctcagcgcgacccaggagcagatcgccgagtcctactacccggagtacctgatcaacctggtgcagggccagctccagacccggcaggccagctccatctacgacgacagctacctggggtactccgtcgccgtgggcgagttcagcggggacgacacggaggacttcgtggccggcgtccccaagggcaacctgacctacgggtacgtgaccatcctcaacggctccgacatccgcagcctgtacaacttctccggggagcagatggcgagctacttcggctacgccgtggccgccaccgacgtcaacggggacggcctggacgacctcctggtgggcgcccccctgctcatggaccggacgcccgacgggcgcccgcaggaggtgggccgggtctacgtgtacctgcagcaccccgcggggatcgagcccacccccaccctgaccctcacgggccacgacgagttcgggcgcttcggcagctccctgaccccgctgggcgacctcgaccaggacgggtacaacgacgtcgccatcggcgcccccttcgggggcgagacccagcagggggtggtgttcgtcttccccggcggccccgggggcctggggagcaagccgtcccaggtgctgcagcccctgtgggccgcgagccacacccccgacttcttcggctccgccctccgcgggggccgggacctggacggcaacgggtaccccgacctgatcgtgggcagcttcggggtcgacaaggccgtggtgtaccgcggccggccgatcgtctccgccagcgcctccctcacgatcttccccgcgatgttcaaccccgaggagcgcagctgctccctggagggcaaccccgtggcctgcatcaacctgagcttctgcctcaacgcctccgggaagcacgtggccgacagcatcggcttcaccgtcgagctgcagctggactggcagaagcagaaggggggcgtgcggcgcgccctcttcctggcgtcccggcaggccaccctgacccagacgctcctgatccagaacggggcccgcgaggactgccgggagatgaagatctacctgcgcaacgagagcgagttccgggacaagctctccccgatccacatcgccctgaacttcagcctggacccccaggcccccgtggacagccacggcctccgccccgcgctgcactaccagtccaagagccggatcgaggacaaggcccagatcctgctcgactgcggcgaggacaacatctgcgtcccggacctgcagctggaggtgttcggggagcagaaccacgtgtacctcggcgacaagaacgccctgaacctgaccttccacgcccagaacgtcggggagggcggggcgtacgaggccgagctccgcgtgaccgccccccccgaggccgagtactccggcctggtgcggcacccgggcaacttcagctccctgagctgcgactacttcgccgtcaaccagtcccgcctcctggtgtgcgacctggggaaccccatgaaggcgggcgccagcctctgggggggcctgcggttcaccgtgccccacctgcgcgacacgaagaagaccatccagttcgacttccagatcctctccaagaacctgaacaacagccagtccgacgtcgtgagcttccggctgtccgtggaggcccaggcccaggtcaccctcaacggggtgagcaagcccgaggccgtgctgttcccggtctccgactggcacccccgcgaccagccccagaaggaggaggacctgggccccgcggtgcaccacgtgtacgagctcatcaaccagggcccgagctccatcagccagggggtcctggagctgtcctgcccccaggccctcgagggccagcagctgctgtacgtgacccgcgtgacggggctcaactgcaccaccaaccaccccatcaaccccaagggcctggagctggacccggagggcagcctccaccaccagcagaagcgggaggcccccagccgctccagcgcctccagcgggccccagatcctgaagtgccccgaggccgagtgcttccggctgcgctgcgagctcggcccgctgcaccagcaggagtcccagagcctgcagctccacttccgggtctgggcgaagaccttcctgcagcgcgagcaccagcccttctccctgcagtgcgaggccgtgtacaaggccctcaagatgccctaccggatcctgccccgccagctgccgcagaaggagcggcaggtggccaccgcggtccagtggacgaaggccgaggggagctacggcgtgcccctctggatcatcatcctggccatcctgttcgggctcctgctgctcggcctgctgatctacatcctctacaagctgggcttcttcaagcgctccctgccctacgggaccgccatggagaaggcccagctcaagcccccggcgaccagcgacgcctga

SEQ ID NO: 1183 - RNA, 3597 nt, synthetic construct
  misc_feature 1..3597: note = EAX08808_variant
  source 1..3597: mol_type = other RNA
atggccgagcacccgcccctgctcgacaccacccagatcctgagctccgacatcagcctgctctccgcccccatcgtgagcgcggacggcacgcagcaggtcatcctggtccaggtgaaccccggggaggccttcaccatccgccgggaggacggccagttccagtgcatcaccgggcccgcccaggtccccatgatgtcccccaacggcagcgtgccgcccatctacgtgccgcccgggtacgcgccccaggtcatcgaggacaacggcgtgcgccgggtggtcgtggtgccccaggcccccgagttccaccccggctcccacaccgtcctgcaccgcagcccccacccgcccctccccgggttcatccccgtgcccacgatgatgccgcccccgccccggcacatgtactcccccgtgaccggcgccggggacatgaccacccagtacatgccccagtaccagagctcccaggtctacggcgacgtggacgcccacagcacgcacgggcgctccaacttccgggacgagcgcagctccaagacctacgagcggctgcagaagaagctgaaggaccgccagggcacccagaaggacaagatgagctccccgcccagcagcccccagaagtgcccctcccccatcaacgagcacaacggcctcatcaaggggcagatcgccggcgggatcaacaccggcagcgccaagatcaagtccggcaaggggaagggcgggacccaggtggacacggagatcgaggagaaggacgaggagaccaaggcgttcgaggccctgctgagcaacatcgtcaagccggtggcctccgacatccaggcccggaccgtggtcctcacgtggagcccgccctccagcctgatcaacggcgagaccgacgagtccagcgtgcccgagctgtacgggtacgaggtgctcatctccagcaccggcaaggacggcaagtacaagtccgtctacgtgggggaggagaccaacatcacgctgaacgacctgaagcccgccatggactaccacgcgaaggtccaggccgagtacaacagcatcaagggcaccccctccgaggccgagatcttcaccaccctcagctgcgagcccgacatccccaacccgccccgcatcgccaaccggacgaagaactccctgaccctgcagtggaaggcccccagcgacaacgggtccaagatccagaacttcgtgctcgagtgggacgagggcaaggggaacggcgagttctgccagtgctacatgggcagccagaagcagttcaagatcaccaagctgtcccccgcgatggggtgcaagttccgcctgagcgcccggaacgactacggcaccagcgggttctccgaggaggtgctctactacacgagcggctgcgccccgtccatgcccgccagccccgtcctgaccaaggccgggatcacctggctgtccctccagtggagcaagccctccggcaccccgagcgacgagggcatctcctacatcctggagatggaggaggagacgagcgggtacggcttcaagcccaagtacgacggggaggacctggcgtacaccgtgaagaacctccgccggtccaccaagtacaagttcaaggtgatcgcctacaacagcgagggcaagtccaaccccagcgaggtcgtggagttcaccacgtgccccgacaagccgggcatccccgtgaagccctccgtcaaggggaagatccacagccactccttcaagatcacctgggacccgcccaaggacaacggcggggccaccatcaacaagtacgtggtggagatggccgagggcagcaacgggaacaagtgggagatgatctacagcggcgccacccgcgagcacctgtgcgaccggctgaaccccggctgcttctaccgcctccgggtctactgcatctccgacgggggccagagcgcggtgtccgagagcctgctggtgcagacccccgccgtcccgcccgggccctgcctgcccccgcgcctccagggccgccccaaggccaaggagatccagctgcggtgggggccgcccctcgtggacggcggctcccccatcagctgctactccgtggagatgagccccatcgagaaggacgagccccgcgaggtctaccaggggtccgaggtggagtgcacggtgagctccctgctgcccggcaagacctacagcttccggctccgcgccgcgaacaagatggggttcggcccgttctccgagaagtgcgacatcaccaccgcccccgggccgcccgaccagtgcaagccgccccaggtcacgtgccggagcgcgacctgcgcccaggtgaactgggaggtgcccctgtccaacggcaccgacgtcaccgagtaccgcctggagtggggcggggtggagggcagcatgcagatctgctactgcgggcccggcctctcctacgagatcaaggggctgagccccgccacgacctactactgccgggtgcaggccctgtccgtcgtgggcgccggccccttcagcgaggtggtcgcctgcgtgaccccgcccagcgtgcccgggatcgtgacctgcctccaggagatctccgacgacgagatcgagaacccccactacagcccctccacgtgcctggccatcagctgggagaagccctgcgaccacggctccgagatcctggcctacagcatcgacttcggggacaagcagtccctgaccgtgggcaaggtgaccagctacatcatcaacaacctccagccggacaccacgtaccgcatccggatccaggcgctgaactccctgggcgccgggcccttcagccacatgatcaagctcaagaccaagcccctgccgcccgacccgccccgcctggagtgcgtcgccttctcccaccagaacctcaagctgaagtggggcgaggggacccccaagaccctgagcacggactccatccagtaccacctccagatggaggacaagaacggccggttcgtgagcctgtaccgcgggccctgccacacctacaaggtgcagcggctgaacgagtccaccagctacaagttctgcatccaggcctgcaacgaggccggcgagggccccctctcccaggagtacatcttcaccacgcccaagagcgtcccggcggccctgaaggcccccaagatcgagaaggtgaacgaccacatctgcgagatcacctgggagtgcctgcagcccatgaagggggaccccgtgatctactccctccaggtcatgctgggcaaggacagcgagttcaagcagatctacaaggggccggacagctccttccgctacagctccctgcagctcaactgcgagtaccggttccgcgtgtgcgccatccggcagtgccaggacagcctgggccaccaggacctggtggggccctactccaccaccgtcctcttcatcagccagcgcacggagccgcccgcgtccaccaaccgggacaccgtggagagcacccgcacgcgccgggccctgtccgacgagcagtgcgccgccgtgatcctggtcctcttcgccttcttcagcatcctgatcgcgttcatcatccagtacttcgtgatcaagtga

SEQ ID NO: 1184 - RNA, 3429 nt, synthetic construct
  misc_feature 1..3429: note = EAX08809_variant
  source 1..3429: mol_type = other RNA
atgagcggccccgcccaggtgcccatgatgtcccccaacgggagcgtcccgcccatctacgtgccgcccggctacgcgccccaggtgatcgaggacaacggggtccgccgggtggtggtcgtgccccaggcccccgagttccaccccggctcccacaccgtgctgcaccgcagcccccacccgcccctccccgggttcatccccgtccccaccatgatgccgcccccgccccggcacatgtactcccccgtgacgggcgccggcgacatgaccacccagtacatgccccagtaccagagctcccaggtgtacggggacgtcgacgcccacagcacccacggccgctccaacttccgggacgagcgcagctccaagacgtacgagcggctgcagaagaagctgaaggaccgccaggggacccagaaggacaagatgagctccccgcccagcagcccccagaagtgcccctcccccatcaacgagcacaacggcctcatcaaggggcagatcgccggcggcatcaacaccgggtccgccaagatcaagagcggcaaggggaagggcggcacccaggtggacacggagatcgaggagaaggacgaggagaccaaggcgttcgaggccctgctgtccaacatcgtgaagcccgtcgccagcgacatccaggcccggaccgtggtgctcacctggagcccgccctccagcctgatcaacggggagacggacgagtccagcgtccccgagctgtacggctacgaggtgctcatctccagcaccgggaaggacggcaagtacaagtccgtgtacgtcggggaggagaccaacatcaccctgaacgacctgaagccggcgatggactaccacgccaaggtgcaggccgagtacaacagcatcaagggcacgccctccgaggccgagatcttcaccaccctcagctgcgagcccgacatccccaacccgccccgcatcgccaaccggaccaagaactccctgacgctgcagtggaaggcgcccagcgacaacggctccaagatccagaacttcgtgctcgagtgggacgaggggaagggcaacggggagttctgccagtgctacatgggcagccagaagcagttcaagatcaccaagctgtcccccgccatggggtgcaagttccgcctgagcgcccggaacgactacggcacctccggcttcagcgaggaggtcctctactacacctccgggtgcgccccgagcatgcccgccagccccgtgctgacgaaggcgggcatcacctggctgtccctccagtggagcaagccctccgggaccccgagcgacgagggcatctcctacatcctggagatggaggaggagaccagcgggtacggcttcaagcccaagtacgacggcgaggacctggcctacacggtcaagaacctccgccggtccaccaagtacaagttcaaggtgatcgcctacaacagcgaggggaagtccaaccccagcgaggtggtcgagttcacgacctgccccgacaagccgggcatccccgtgaagccctccgtgaaggggaagatccacagccactccttcaagatcacctgggacccgcccaaggacaacggcggcgccaccatcaacaagtacgtcgtggagatggccgaggggagcaacggcaacaagtgggagatgatctactccggggcgacccgcgagcacctgtgcgaccggctgaaccccggctgcttctaccgcctccgggtgtactgcatcagcgacgggggccagtccgccgtcagcgagagcctgctggtgcagacccccgccgtgcccccgggcccctgcctgcccccgcgcctccaggggcggcccaaggccaaggagatccagctgcgctggggcccgcccctcgtcgacgggggctcccccatcagctgctactccgtggagatgagccccatcgagaaggacgagccccgcgaggtgtaccaggggtccgaggtcgagtgcacggtgagctccctgctgcccggcaagacctacagcttccggctccgcgccgcgaacaagatgggcttcgggccgttctccgagaagtgcgacatcaccaccgcccccggcccgcccgaccagtgcaagccgccccaggtgacctgccggagcgccacgtgcgcccaggtcaactgggaggtgcccctgtccaacgggaccgacgtgaccgagtaccgcctggagtggggcggggtcgagggcagcatgcagatctgctactgcggccccgggctctcctacgagatcaagggcctgagccccgcgaccacgtactactgccgggtgcaggccctgtccgtggtcggggccggccccttcagcgaggtggtggcctgcgtcaccccgccctccgtgcccgggatcgtgacctgcctccaggagatcagcgacgacgagatcgagaacccccactactccccctccacgtgcctggccatcagctgggagaagccctgcgaccacggcagcgagatcctggcgtacagcatcgacttcggcgacaagcagtccctcaccgtcgggaaggtgaccagctacatcatcaacaacctgcagccggacaccacctaccgcatccggatccaggccctgaactccctcggcgccgggcccttcagccacatgatcaagctgaagacgaagcccctgcccccggacccgccccgcctggagtgcgtggccttctcccaccagaacctcaagctgaagtggggcgagggcacccccaagaccctgagcaccgactccatccagtaccacctccagatggaggacaagaacgggcggttcgtcagcctgtaccgcggcccctgccacacgtacaaggtgcagcggctgaacgagtccaccagctacaagttctgcatccaggcctgcaacgaggcgggggagggccccctctcccaggagtacatcttcaccacccccaagagcgtgccggccgccctgaaggcccccaagatcgagaaggtcaacgaccacatctgcgagatcacgtgggagtgcctgcagcccatgaagggggaccccgtgatctactccctccaggtgatgctgggcaaggacagcgagttcaagcagatctacaagggcccggactccagcttccgctactccagcctgcagctcaactgcgagtaccggttccgcgtctgcgccatccggcagtgccaggacagcctggggcaccaggacctggtgggcccctactccaccaccgtcctcttcatcagccagcgcaccgagccgcccgcgtccacgaaccgggacaccgtggagagcacccgcacccggcgcgccctgtccgacgagcagtgcgccgccgtgatcctggtcctcttcgcgttcttcagcatcctgatcgccttcatcatccagtacttcgtgatcaagtga

SEQ ID NO: 1185 - RNA, 1020 nt, synthetic construct
  misc_feature 1..1020: note = EAW49214_variant
  source 1..1020: mol_type = other RNA
atgcccccgagcaagccccacccgcccgtggtcggcaaggtgacccaccacagcatcgagctgtactgggacctcgagaagaaggccaagcgccaggggccccaggagcagtggttccggttcagcatcgaggaggaggaccccaagatgcacacctacggcatcatctacacggggtacgccaccaagcacgtggtcgagggcctggagccccgcaccctgtaccggttccgcctcaaggtgacctcccccagcggggagtgcgagtactccccgctggtgagcgtctccacgacccgggagcccatcagctccgagcacctccaccgcgcggtgagcgtgaacgacgaggacctgctggtccggatcctgcagggcggccgcgtgaaggtggacgtccccaacaagttcgggttcaccgccctcatggtggccgcccagaagggctacacccggctggtgaagatcctggtctccaacgggacggacgtgaacctcaagaacggcagcgggaaggactccctgatgctggcctgctacgcgggccacctcgacgtggtcaagtacctgcgccggcacggcgccagctggcaggcccgcgacctcgggggctgcaccgccctgcactgggcggccgacgggggccactgctccgtgatcgagtggatgatcaaggacggctgcgaggtggacgtcgtggacaccgggagcggctggacgcccctgatgcgggtgtccgccgtcagcgggaaccagcgcgtggcctccctgctcatcgacgccggcgcgaacgtcaacgtgaaggaccggaacgggaagaccccgctgatggtggccgtcctgaacaaccacgaggagctcgtgcagctgctgctcgacaagggcgccgacgccagcgtgaagaacgagttcggcaagggggtcctggagatggcccgcgtgttcgaccggcagagcgtggtctccctgctcgaggagcgcaagaagaagcagcggcccaagaagtcctgcgtgtgctga

SEQ ID NO: 1186 - RNA, 3150 nt, synthetic construct
  misc_feature 1..3150: note = BAF84259_variant
  source 1..3150: mol_type = other RNA
atgggcagccgcacccccgagtccccgctgcacgccgtgcagctccggtgggggccccgccggcgcccccccctgctgccgctcctgctgctcctgctgcccccccccccgcgggtcggcgggttcaacctcgacgccgaggcgcccgccgtgctgagcggcccccccgggtccttcttcggcttcagcgtggagttctaccgcccgggcaccgacggggtctccgtgctggtgggcgcccccaaggccaacacgagccagcccggggtcctccagggcggggccgtgtacctgtgcccctggggcgcgtccccgacccagtgcacccccatcgagttcgacagcaagggctcccggctgctcgagagctccctgagctccagcgagggggaggagcccgtggagtacaagtccctgcagtggttcggcgccaccgtccgcgcccacgggagctccatcctcgcctgcgcgcccctgtacagctggcggacggagaaggagccgctgtccgaccccgtgggcacctgctacctcagcaccgacaacttcacccgcatcctggagtacgccccctgccggagcgacttctcctgggccgccggccaggggtactgccagggcgggttcagcgccgagttcacgaagaccggccgcgtggtcctggggggccccggctcctacttctggcaggggcagatcctcagcgcgacccaggagcagatcgccgagtcctactacccggagtacctgatcaacctggtgcagggccagctccagacccggcaggccagctccatctacgacgacagctacctggggtactccgtggccgtcggcgagttcagcggggacgacacggaggacttcgtggccggcgtgcccaagggcaacctgacctacgggtacgtcaccatcctcaacggctccgacatccgcagcctgtacaacttctccggggagcagatggcgagctacttcgcctacgccgtggccgccaccgacgtgaacggcgacgggctggacgacctcctggtcggcgcgcccctgctcatggaccggacgcccgacggccgcccgcaggaggtggggcgggtgtacgtctacctgcagcaccccgccggcatcgagtccacccccaccctgaccctcacggggcacgacgagttcggccgcttcggcagctccctgaccccgctgggggacctcgaccaggacggctacaacgacgtggccatcggggcccccttcggcggggagacccagcagggcgtcgtgttcgtgttccccggcgggcccggcgggctgggcagcaagccgtcccaggtcctgcagcccctctgggccgcgagccacacccccgacttcttcgggagcgccctgcggggcggccgcgacctggacgggaacggctaccccgacctcatcgtggggtccttcggcgtggacaaggccgtcgtgtaccgggggcgcccgatcgtgagcgcctccgcgagcctgacgatcttccccgccatgttcaaccccgaggagcgctcctgcagcctggagggcaaccccgtcgcctgcatcaacctgtccttctgcctcaacgccagcggcaagcacgtggccgactccatcgggttcaccgtggagctgcagctggactggcagaagcagaagggcggggtccggcgcgcgctcttcctggccagccggcaggccaccctgacccagacgctcctgatccagaacggcgcccgcgaggactgccgggagatgaagatctacctgcgcaacgagtccgagttccgggacaagctcagcccgatccacatcgccctgaacttctccctggacccccaggcgcccgtggacagccacgggctccgccccgccctgcactaccagtccaagagccggatcgaggacaaggcccagatcctgctcggctgcggcgaggacaacatctgcgtgccggacctgcagctggaggtcttcggggagcagaaccacgtgtacctcggcgacaagaacgccctgaacctgaccttccacgcccagaacgtgggggagggcggcgcgtacgaggccgagctccgcgtcaccgccccccccgaggccgagtactccgggctggtgcggcaccccggcaacttcagcagcctgtcctgcgactacttcgcggtgaaccagagccgcctcctggtctgcgacctggggaacccgatgaaggccggcgcctccctctgggggggcctgcggttcaccgtgccccacctgcgcgacacgaagaagaccatccagttcgacttccagatcctcagcaagaacctgaacaactcccagagcgacgtggtctccttccggctgagcgtggaggcccaggcccaggtgaccctcaacggcgtctccaagcccgaggcggtgctgttccccgtgagcgactggcacccgcgcgaccagccccaggaggaggaggacctggggcccgccgtccaccacgtgtacgagctcatcaaccagggcccgtccagcatctcccagggggtgctggagctgagctgcccccaggccctcgagggccagcagctgctgtacgtcacccgggtgacggggctcaactgcaccaccaaccaccccatcaaccccaagggcctggagctggacccggagggctccctccaccaccagcagaagcgcgaggcccccagccggtccagcgcctccagcgggccccagatcctgaagtgccccgaggcggagtgcttccgcctgcgctgcgagctcggcccgctgcaccagcaggagagccagtccctgcagctccacttccgggtgtgggccaagaccttcctgcagcgcgagcaccagcccttcagcctgcagtgcgaggccgtctacaaggccctcaagatgccctaccggatcctgccccgccagctgccgcagaaggagcggcaggtggccaccgcggtgcagtggacgaaggccgaggggtcctacggcgtccccctctggatcatcatcctggccatcctgttcgggctcctgctgctcggcctgctgatctacatcctctacaagctgggcttcttcaagcgcagcctgccctacgggaccgccatggagaaggcgcagctcaagcccccggccacctccgacgcctga

SEQ ID NO: 1187 - RNA, 3150 nt, synthetic construct
  misc_feature 1..3150: note = BAG35324_variant
  source 1..3150: mol_type = other RNA
atgggcagccgcacccccgagtccccgctgcacgccgtgcagctccggtgggggccccgccggcgcccgcccctgctgcccctcctgctgctcctgctgcccccgccgccccgggtcggcgggttcaacctcgacgccgaggcgcccgccgtgctgagcggcccgcccgggtccttcttcggcttcagcgtggagttctaccgccccggcaccgacggggtctccgtgctggtgggcgcccccaaggccaacacgagccagcccggggtcctccagggcggggccgtgtacctgtgcccctggggcgcgtcccccacccagtgcacccccatcgagttcgacagcaagggctcccggctgctcgagagctccctgagctccagcgagggggaggagcccgtggagtacaagtccctgcagtggttcggcgccaccgtccgcgcccacgggagctccatcctcgcctgcgcgcccctgtacagctggcggacggagaaggagccgctgtccgaccccgtggggacctgctacctcagcaccgacaacttcacccgcatcctggagtacgccccctgccggagcgacttctcctgggccgccggccagggctactgccagggcgggttcagcgccgagttcacgaagaccggccgcgtggtcctcgggggccccggctcctacttctggcaggggcagatcctgagcgcgacccaggagcagatcgccgagtcctactacccggagtacctgatcaacctggtgcagggccagctccagacccggcaggccagctccatctacgacgacagctacctggggtactccgtggccgtcggcgagttcagcggggacgacacggaggacttcgtggccggcgtgcccaagggcaacctgacctacgggtacgtcaccatcctcaacggctccgacatccgcagcctgtacaacttctccggggagcagatggcgagctacttcggctacgccgtggccgccaccgacgtgaacggggacggcctggacgacctcctggtcggcgcgcccctgctcatggaccggacgcccgacgggcgcccgcagggcgtggggcgggtgtacgtctacctgcagcaccccgccggcatcgagcccaccccgaccctgaccctcacgggccacgacgagttcgggcgcttcggctccagcctgacgcccctgggggacctcgaccaggacggctacaacgacgtggccatcggggcccccttcggcggcgagacccagcagggggtcgtgttcgtgttccccggcgggccgggcgggctgggctccaagctgagccaggtcctccagcccctgtgggccgcctcccacacccccgacttcttcggcagcgcgctgcgcgggggccgggacctcgacgggaacggctaccccgacctgatcgtggggagcttcggcgtggacaaggccgtcgtgtaccggggccgcccgatcgtgtccgccagcgcctccctgaccatcttccccgcgatgttcaaccccgaggagcgcagctgctccctggaggggaaccccgtcgcctgcatcaacctcagcttctgcctgaacgcctccggcaagcacgtggccgacagcatcgggttcaccgtggagctgcagctcgactggcagaagcagaagggcggggtccggcgcgccctgttcctggcgtcccggcaggccaccctcacccagacgctgctgatccagaacggcgcccgcgaggactgccgggagatgaagatctacctccgcaacgagagcgagttccgggacaagctgtccccgatccacatcgccctgaacttcagcctcgacccccaggcccccgtggactcccacggcctgcgccccgcgctgcactaccagagcaagtcccggatcgaggacaaggcccagatcctcctggactgcggggaggacaacatctgcgtgccggacctgcagctcgaggtcttcggcgagcagaaccacgtgtacctgggggacaagaacgccctgaacctcaccttccacgcccagaacgtgggcgagggcggggcctacgaggcggagctgcgcgtcaccgccccgcccgaggccgagtacagcggcctggtgcggcaccccgggaacttctccagcctcagctgcgactacttcgccgtgaaccagtcccgcctgctggtctgcgacctcggcaaccccatgaaggcgggggccagcctgtggggcggcctgcggttcaccgtgccccacctccgcgacacgaagaagaccatccagttcgacttccagatcctgtccaagaacctgaacaacagccagtccgacgtggtcagcttccggctctccgtggaggcccaggcccaggtgaccctgaacggggtcagcaagcccgaggccgtgctgttccccgtgtccgactggcacccgcgcgaccagccccagaaggaggaggacctcggccccgcggtccaccacgtgtacgagctgatcaaccaggggccgagctccatcagccagggcgtgctggagctctcctgcccccaggccctggaggggcagcagctgctctacgtcacccgggtgacgggcctgaactgcaccaccaaccaccccatcaaccccaagggcctggagctcgacccggaggggagcctgcaccaccagcagaagcgcgaggccccctcccggagctccgccagctccggcccccagatcctgaagtgccccgaggccgagtgcttccgcctccgctgcgagctggggccgctgcaccagcaggagagccagagcctccagctgcacttccgggtgtgggcgaagaccttcctgcagcgcgagcaccagcccttctccctccagtgcgaggccgtctacaaggccctgaagatgccctaccggatcctgccccgccagctcccgcagaaggagcgccaggtggccaccgccgtgcagtggacgaaggcggagggcagctacggggtccccctgtggatcatcatcctggccatcctcttcggcctgctgctcctgggcctgctcatctacatcctgtacaagctggggttcttcaagcggtccctcccctacggcaccgccatggagaaggcccagctgaagcccccggcgaccagcgacgcctga

SEQ ID NO: 1188 - RNA, 1401 nt, synthetic construct
  misc_feature 1..1401: note = BAG54537_variant
  source 1..1401: mol_type = other RNA
atgctgagcctccgccagcggatgatgcacgcccgcttccggaaccccctgtcccgccagccggcccggcccagctaccgccagggctacaacgggcggcccaacgtggagggcaaggtcctgcccgggtccaacggcaagccgaacgggcagcgcatcatcaacggcccccagggcaccaagtgggtggtggacctcgaccgggggctggtcctgaacgcggagggccgctacctccaggacagccacgggaaccccctgcggatcaagctgggcggggacggccgcaccatcgtggacctcgagggcacgcccgtggtctccccggacgggctgcccctgttcggccaggggcggcacggcacgcccctcgccaacgcccaggacaagcccatcctgagcctgggcgggaagccgctcgtgggcctggaggtgatcaagaagaccacccacccgcccaccaccaccatgcagcccaccacgaccaccacgcccctgcccaccaccaccacgccccgccccaccaccgccaccacccggcgcacgaccacccggcgcccgaccacgaccgtccggaccaccacgcgcaccaccaccacgaccacccccaagcccaccacgcccatcccgacctgcccgcccgggaccctcgagcggcacgacgacgacggcaacctgatcatgtccagcaacgggatccccgagtgctacgccgaggaggacgagttctccggcctggagaccgacaccgcggtgcccacggaggaggcctacgtgatctacgacgaggactacgagttcgagaccagccgcccgcccaccaccacggagccctccaccaccgccaccacgccccgcgtcatccccgaggagggcgccatcagctccttccccgaggaggagttcgacctcgcggggcggaagcgcttcgtggccccgtacgtgacctacctgaacaaggaccccagcgccccctgctccctgaccgacgccctcgaccacttccaggtcgacagcctggacgagatcatccccaacgacctgaagaagtccgacctcccgccccagcacgcgccccggaacatcaccgtggtggccgtcgagggctgccacagcttcgtgatcgtggactgggacaaggccacgcccggggacgtcgtgaccggctacctggtgtactccgccagctacgaggacttcatccgcaacaagtggagcacccaggcctccagcgtcacccacctcccgatcgagaacctgaagcccaacacgcggtactacttcaaggtgcaggcccagaacccccacgggtacggccccatctccccgagcgtctccttcgtgaccgagagcgacaaccccctgctggtggtccgcccgcccggcggggagcccatctga

SEQ ID NO: 1189 - RNA, 471 nt, synthetic construct
  misc_feature 1..471: note = BAG58437_variant
  source 1..471: mol_type = other RNA
atggaggagcagcgcaacgaggagatccagagcttcatctactccctgaagcagatgctcctgaacgtggaggccaacagcgccaaggtccaggaggacctggaggcggagttccagtccctcttcagcctgctggaggagctcaaggagggcatgctgatgaagatcaagcaggaccgggcctcccgcacctacgagctgcagaaccagctcgccgcctgcacccgggccctggagagctccgaggagctgctcgagacggcgaaccagaccctgcaggccatggacagcgaggacttcccccaggccgccaagcagatcaaggacggggtgaccatggcgccggccttccgcctgtccctcaaggccaaggtgagcgacaacatgtcccacctgatggtcgacttcgcccaggagcggcagatgctgcaggccctcaagttcctgcccggcgagcgcgggacccactga

SEQ ID NO: 1190 - RNA, 921 nt, synthetic construct
  misc_feature 1..921: note = BAH14721_variant
  source 1..921: mol_type = other RNA
atgatcttcgaggagcacggcttccgccggaccacgcccccgaccaccgccacccccatccgccaccggccccgcccctacccgcccaacgtggggcaggaggccctgagccagaccacgatctcctgggcgcccttccaggacaccagcgagtacatcatctcctgccaccccgtcggcaccgacgaggagccgctccagttccgggtgcccgggaccagcacgtccgccaccctgaccggcctgacccgcggggccacgtacaacatcatcgtggaggccctcaaggaccagcagcggcacaaggtccgcgaggaggtggtgaccgtcggcaacagcgtgaacgagggcctgaaccagcccaccgacgactcctgcttcgacccctacaccgtgagccactacgccgtcggggacgagtgggagcggatgtccgagagcggcttcaagctgctctgccagtgcctggggttcggctccgggcacttccgctgcgacagctcccggtggtgccacgacaacggcgtgaactacaagatcggcgagaagtgggaccgccagggggagaacggccagatgatgagctgcacgtgcctggggaacggcaagggcgagttcaagtgcgacccgcacgaggcgacctgctacgacgacgggaagacctaccacgtgggcgagcagtggcagaaggagtacctcggggccatctgctcctgcacgtgcttcggcgggcagcggggctggcgctgcgacaactgccggcgccccggcggggagcccagccccgagggcaccaccgggcagtcctacaaccagtacagccagcggtaccaccagcgcaccaacaccaacgtcaactgcccgatcgagtgcttcatgcccctggacgtgcaggccgaccgggaggactcccgcgagtga

SEQ ID NO: 1191 - RNA, 1920 nt, synthetic construct
  misc_feature 1..1920: note = BAG61560_variant
  source 1..1920: mol_type = other RNA
atggagaagatcctgttctacctcttcctgatcggcatcgccgtgaaggcccagatctgccccaagcgctgcgtctgccagatcctgagcccgaacctcgcgaccctgtgcgccaagaaggggctcctgttcgtgccgcccaacatcgaccggcgcaccgtggagctgcggctggccgacaacttcgtcacgaacatcaagcgcaaggacttcgccaacatgacctccctcgtggacctgaccctgagccggaacaccatctccttcatcacgccccacgccttcgcggacctccgcaacctgcggagcctgcacctcaactccaaccgcctgaccaagatcaccaacgacatgttcagcggcctgtccaacctccaccacctgatcctgaacaacaaccagctcaccctgatcagctccacggccttcgacgacgtgttcgccctggaggagctcgacctgagctacaacaacctggagaccatcccctgggacgccgtcgagaagatggtgtccctccacaccctgagcctggaccacaacatgatcgacaacatccccaaggggaccttctcccacctccacaagatgacgcggctggacgtgaccagcaacaagctgcagaagctcccgcccgaccccctgttccagcgcgcgcaggtcctggccacctccggcatcatcagcccctccaccttcgccctcagcttcgggggcaaccccctgcactgcaactgcgagctgctctggctgcggcgcctgtcccgggagtacgacctcgagacgtgcgccagcccgcccctgctgaccggccgctacttctggagcatccccgaggaggagttcctctgcgagccgcccctgatcacccggcacacccacgagatgcgcgtgctggaggggcagcgggccacgctccgctgcaaggcgcggggcgaccccgagcccgccatccactggatctcccccgaggggaagctgatcagcaacgccacccgctccctggtgtacgacaacggcaccctggacatcctcatcaccacggtcaaggacaccggggccttcacgtgcatcgccagcaaccccgcgggcgaggccacccagatcgtggacctgcacatcatcaagctgccgcacctcctgaactccaccaaccacatccacgagcccgaccccggcagctccgacatcagcacctccaccaagagcgggtccaacaccagctccagcaacgacggcatcacgtccctgaccgccacccgggtggtcgggtgcatccagttcaccacggagcaggactacgtgcgctgccacttcatgcagagccagttcctcggcggcaccatgatcatcatcatcgggggcatcatcgtggcctccgtcctggtgttcatcatcatcctgatgatccgctacaaggtgtgcaacaacaacgggcagcacaaggtcaccaaggtgagcaacgtgtactcccagaccaacggcgcccagatccaggggtgcagcgtcaccctcccccagagcgtgtccaagcaggcggtcggccacgaggagaacgcccagtgctgcaaggccacgagcgacaacgtgatccagtccagcgagacctgctccagccaggactccgccaccaccacgagcgccctgccgccctcctggaccagctccaccagcgtgtcccagaagcagaagcggaagaccggcacgaagcccagcaccgagccccagaacgaggcggtcaccaacgtggagtcccagaacaccaaccgcaacaacagcacggccctgcagctcgcctcccggccgcccgacagcgtgaccgaggggcccaccagcaagcgcgcccacatcaagccgaacgcgctgctgaccaacgtcgaccagatcgtgcaggagacgcagcggctcgagctgatctga

SEQ ID NO: 1192 - RNA, 1014 nt, synthetic construct
  misc_feature 1..1014: note = BAG61984_variant
  source 1..1014: mol_type = other RNA
atgatcttcgaggagcacggcttccgccggaccacgcccccgaccaccgccacccccatccgccaccggccccgcccctacccgcccaacgtgggggaggagatccagatcggccacatcccccgggaggacgtcgactaccacctgtacccccacgggccgggcctcaaccccaacgccagcaccgggcaggaggccctgtcccagacgaccatcagctgggcccccttccaggacacctccgagtacatcatcagctgccaccccgtgggcaccgacgaggagccgctgcagttccgcgtgcccggcacgtccaccagcgccaccctcaccgggctgacgcggggcgccacctacaacatcatcgtcgaggccctgaaggaccagcagcgccacaaggtgcgggaggaggtggtcaccgtggggaactccgtgaacgagggcctcaaccagcccaccgacgacagctgcttcgacccctacacggtctcccactacgcggtgggggacgagtgggagcgcatgagcgagtccggcttcaagctgctgtgccagtgcctcggcttcgggagcggccacttccggtgcgactccagccgctggtgccacgacaacggggtgaactacaagatcggcgagaagtgggaccggcagggcgagaacgggcagatgatgtcctgcacgtgcctgggcaacgggaagggcgagttcaagtgcgacccgcacgaggcgacctgctacgacgacgggaagacctaccacgtcggcgagcagtggcagaaggagtacctgggcgccatctgcagctgcacgtgcttcgggggccagcgcgggtggcggtgcgacaactgccgccggcccggcggggagccctcccccgagggcaccaccggccagagctacaaccagtactcccagcgctaccaccagcggaccaacaccaacgtgaactgcccgatcgagtgcttcatgcccctcgacgtgcaggccgaccgcgaggacagccgggagtga

SEQ ID NO: 1193 - RNA, 3045 nt, synthetic construct
  misc_feature 1..3045: note = BAG62013_variant
  source 1..3045: mol_type = other RNA
atgcgcgtgacctgggcccccccgcccagcatcgacctgaccaacttcctcgtccggtactcccccgtgaagaacgaggaggacgtggccgagctgagcatctcccccagcgacaacgcggtcgtgctgacgaacctcctgccgggcaccgagtacgtggtctccgtgagctccgtgtacgagcagcacgagagcacccccctgcgcgggcggcagaagaccggcctcgactcccccacggggatcgacttcagcgacatcaccggcaactccttcaccgtccactggatcgccccccgcgccaccatcacggggtaccggatccgccaccacccggagcacttcagcggccggccccgcgaggaccgggtgccccactcccgcaacagcatcaccctgaccaacctgacccccggcacggagtacgtggtctccatcgtggccctcaacgggcgggaggagagcccgctgctgatcggccagcagtccaccgtgagcgacgtcccccgcgacctcgaggtggtggccgcgacccccacctccctgctgatcagctgggacgcccccgccgtcacggtgcggtactaccgcatcacctacggggagaccggcgggaacagcccggtgcaggagttcaccgtccccggctccaagagcacggccaccatctccggcctcaagcccggggtggactacaccatcaccgtgtacgcggtcacgggccggggggacagccccgcctccagcaagccgatctccatcaactaccgcaccgagatcgacaagcccagccagatgcaggtgaccgacgtccaggacaactccatcagcgtgaagtggctgccctccagctcccccgtgaccggctaccgggtcacgaccaccccgaagaacggccccgggcccaccaagacgaagaccgccggccccgaccagaccgagatgaccatcgaggggctgcagccgacggtggagtacgtggtcagcgtgtacgcccagaacccctccggcgagagccagcccctcgtgcagaccgccgtcaccaccatcccggcgcccaccgacctgaagttcacgcaggtgacccccacctccctgagcgcccagtggacccccccgaacgtgcagctcacggggtaccgcgtccgggtgacccccaaggagaagaccggccccatgaaggagatcaacctggcccccgactccagcagcgtggtcgtgtccggcctgatggtggccaccaagtacgaggtcagcgtgtacgccctcaaggacacgctgacctcccgcccggcgcagggggtggtcaccaccctggagaacgtgagccccccccggcgcgcccgcgtgacggacgccaccgagaccaccatcacgatctcctggcggaccaagaccgagaccatcacgggcttccaggtcgacgccgtgcccgccaacgggcagaccccgatccagcgcaccatcaagcccgacgtgcggagctacaccatcacgggcctccagcccgggaccgactacaagatctacctgtacaccctgaacgacaacgcgcgctccagccccgtcgtgatcgacgcctccaccgccatcgacgccccgagcaacctccggttcctggccacgacccccaactccctgctcgtgagctggcagcccccccgcgcgcggatcaccggctacatcatcaagtacgagaagccgggctcccccccccgcgaggtcgtgccccggccgcgccccggggtgaccgaggccacgatcaccggcctggagcccgggaccgagtacaccatctacgtcatcgccctgaagaacaaccagaagagcgagccgctcatcggccggaagaagacggacgagctgccccagctggtgaccctcccccaccccaacctgcacgggccggagatcctggacgtgccctccaccgtccagaagacccccttcgtgacccaccccggctacgacacgggcaacgggatccagctcccgggcaccagcgggcagcagccctccgtgggccagcagatgatcttcgaggagcacggcttccgccggaccaccccccccacgaccgccaccccgatccgccaccggccccgcccctaccccccgaacgtcggggaggagatccagatcggccacatcccccgggaggacgtggactaccacctgtacccccacgggcccggcctgaacccgaacgcgagcaccgggcaggaggccctcagccagacgaccatctcctgggcccccttccaggacaccagcgagtacatcatctcctgccaccccgtgggcaccgacgaggagcccctgcagttccgcgtcccgggcacgagcacctccgccaccctgaccgggctcacgcggggcgccacctacaacatcatcgtggaggcgctgaaggaccagcagcgccacaaggtgcgcgaggaggtcgtgaccgtggggaacagcgtcaacgagggcctgaaccagcccaccgacgactcctgcttcgacccctacacggtgagccactacgccgtgggggacgagtgggagcggatgtccgagagcggcttcaagctgctctgccagtgcctgggcttcgggtccggccacttccgctgcgacagctcccggtggtgccacgacaacggggtcaactacaagatcggcgagaagtgggaccgccagggggagaacggccagatgatgagctgcacctgcctgggcaacgggaagggcgagttcaagtgcgacccccacgaggccacctgctacgacgacgggaagacctaccacgtgggcgagcagtggcagaaggagtacctcggggccatctgctcctgcacgtgcttcggcggccagcgggggtggcgctgcgacaactgccggcgcccgggcggggagcccagccccgagggcaccaccggccagtcctacaaccagtacagccagcggtaccaccagcgcaccaacacgaacgtcaactgcccgatcgagtgcttcatgcccctggacgtgcaggccgaccgggaggactcccgcgagtga

SEQ ID NO: 1194 - RNA, 2685 nt, synthetic construct
  misc_feature 1..2685: note = BAG62178_variant
  source 1..2685: mol_type = other RNA
atgcgcgtgacctgggcgcccccgcccagcatcgacctgaccaacttcctcgtccggtactcccccgtgaagaacgaggaggacgtggccgagctgagcatctcccccagcgacaacgccgtcgtgctgacgaacctcctgccgggcaccgagtacgtggtctccgtgagctccgtgtacgagcagcacgagagcacgcccctgcgcgggcggcagaagaccggcctcgactcccccaccgggatcgacttcagcgacatcaccgccaactccttcaccgtccactggatcgcgccccgcgccaccatcacgggctaccggatccgccaccacccggagcacttcagcgggcggccccgcgaggaccgggtgccccactcccgcaacagcatcaccctgaccaacctgacccccggcacggagtacgtggtctccatcgtggccctcaacggccgggaggagagcccgctgctgatcgggcagcagtccaccgtgagcgacgtcccccgcgacctcgaggtggtggccgccacccccacctccctgctgatcagctgggacgcccccgccgtcacggtgcggtactaccgcatcacctacggcgagaccgggggcaacagcccggtgcaggagttcaccgtccccgggtccaagagcacggcgaccatctccggcctcaagcccggcgtggactacaccatcaccgtgtacgccgtcacggggcggggcgacagccccgcctccagcaagccgatctccatcaactaccgcaccgagatcgacaagcccagccagatgcaggtcaccgacgtccaggacaactccatcagcgtgaagtggctgccctccagctcccccgtgaccgggtaccgggtcacgaccaccccgaagaacggccccggccccaccaagacgaagaccgccgggcccgaccagaccgagatgaccatcgagggcctgcacccgacggtggagtacgtggtgagcgtgtacgcccagaacccctccggggagagccagcccctcgtgcagaccgccgtcaccaccatcccggcccccaccgacctgaagttcacccaggtgacccccacctccctgagcgcccagtggacgcccccgaacgtgcagctcaccggctaccgcgtccgggtgacccccaaggagaagaccgggcccatgaaggagatcaacctggcccccgactccagcagcgtggtcgtgtccggcctgatggtggccaccaagtacgaggtcagcgtgtacgcgctcaaggacacgctgacctcccgcccggcccagggcgtggtcaccaccctggagaacgtgagcccgccccggcgcgcccgcgtgacggacgccaccgagaccaccatcacgatctcctggcggaccaagaccgagaccatcacggggttccaggtcgacgccgtgcccgcgaacggccagaccccgatccagcgcaccatcaagcccgacgtgcggagctacaccatcacggggctccagcccggcaccgactacaagatctacctgtacaccctgaacgacaacgcccgctccagccccgtcgtgatcgacgcctccaccgccatcgacgccccgagcaacctccggttcctggcgacgacccccaactccctgctcgtgagctggcagccgccccgcgcccggatcaccgggtacatcatcaagtacgagaagcccggctccccgccccgcgaggtcgtgccccggccccgccccggcgtgaccgaggccacgatcaccgggctggagcccggcaccgagtacaccatctacgtcatcgccctgaagaacaaccagaagtccgagccgctcatcgggcggaagaagacgggccaggaggcgctgagccagaccaccatcagctgggcccccttccaggacacctccgagtacatcatcagctgccaccccgtggggaccgacgaggagcccctgcagttccgcgtgccgggcacgagcacctccgccaccctcaccggcctgacgcgcggggccacctacaacatcatcgtcgaggccctgaaggaccagcagcggcacaaggtgcgggaggaggtgatcaccgtcggcaacagcgtgaacgaggggctcaaccagcccaccgacgactcctgcttcgacccctacacggtgagccactacgcggtcggcgacgagtgggagcgcatgtccgagagcggcttcaagctgctgtgccagtgcctcgggttcggctccgggcacttccggtgcgacagctcccgctggtgccacgacaacggcgtgaactacaagatcggggagaagtgggaccggcagggcgagaacggccagatgatgagctgcacgtgcctggggaacggcaagggggagttcaagtgcgacccccacgaggcgacctgctacgacgacggcaagacctaccacgtgggggagcagtggcagaaggagtacctgggcgccatctgctcctgcacgtgcttcggcgggcagcgcggctggcgctgcgacaactgccggcgccccgggggcgagcccagccccgaggggaccaccggccagtcctacaaccagtacagccagcggtaccaccagcgcaccaacacgaacgtcaactgccccatcgagtgcttcatgccgctcgacgtgcaggccgaccgggaggactcccgcgagtga

SEQ ID NO: 1195 - RNA, 1152 nt, synthetic construct
  misc_feature 1..1152: note = BAH12351_variant
  source 1..1152: mol_type = other RNA
atggccagcgccttccgcctgtccctcaagcccaaggtgagcgacaacatgacccacctgatggtcgacttctcccaggagcggcagatgctgcagaccctcaagttcctgccggtgcccaaggcgcccgagatcgaccccgtggagtgcctggtcgccgacaacagcgtgacggtggcctggcgcatgccggaggaggacaacaagatcgaccacttcatcctcgagcaccggaagaccaacttcgacggcctgccccgcgtcaaggacgagcggtgctgggagatcatcgacaacatcaaggggaccgagtacaccctgtccggcctcaagttcgacagcaagtacatgaacttccgcgtgcgggcctgcaacaaggccgtggcgggggagtactccgaccccgtcacgctggagaccaaggccctgaacttcaacctcgacaacagctccagccacctgaacctgaaggtggaggacacgtgcgtggagtgggaccccaccggcgggaagggccaggagtccaagatcaagggcaaggagaacaaggggagcgtccacgtgacctccctcaagaagcacaccagcggcaccccgtcccccaagcgcaccagcgtggggtcccggccgcccgccgtccgcggcagccgggaccgcttcacgggggagtcctacaccgtgctgggcgacaccgccatcgagagcggccagcactactgggaggtgaaggcgcagaaggactgcaagagctactccgtcggggtggcctacaagaccctgggcaagttcgaccagctcgggaagacgaacaccagctggtgcatccacgtgaacaactggctgcagaacaccttcgccgccaagcacaacaacaaggtcaaggccctggacgtgaccgtgcccgagaagatcggcgtcttctgcgacttcgacggcgggcagctctccttctacgacgcgaacagcaagcagctgctgtactccttcaagacgaagttcacccagcccgtgctccccggcttcatggtctggtgcgggggcctgagcctgtccaccgggatgcaggtccccagcgccgtgcggaccctccagaagtccgagaacggcatgacgggcagcgcctccagcctgaacaacgtggtgacccagtga

SEQ ID NO: 1196 - RNA, 441 nt, synthetic construct
  misc_feature 1..441: note = BAH14175_variant
  source 1..441: mol_type = other RNA
atgcccccgagcaagccccacccgcccgtggtcggcaaggtgacccaccactccatcgagctgtactgggacctcgagaagaaggccaagcgccaggggccccaggagcagtggttccggttcagcatcgaggaggaggaccccaagatgcacacctacggcatcatctacacggggtacgccaccaagcacgtggtcgagggcctggagccccgcaccctgtaccggttccgcctcaaggtgacctcccccagcggggagtgcgagtactccccgctggtgagcgtctccacgaccagcgagtactccgaccggccccacagccccctgtcccgcagcatggagatgacctccaacctcgagaagatcttctgcctgagcttcggcctgacccggtcccgcaacgacacgatcttcaagcactgcaacaacatctgctga

SEQ ID NO: 1197 - RNA, 2055 nt, synthetic construct
  misc_feature 1..2055: note = EAX08810_variant
  source 1..2055: mol_type = other RNA
atggccgagcacccgcccctgctcgacaccacccagatcctgagctccgacatcagcctgctctccgcccccatcgtgagcgcggacggcacgcagcaggtcatcctggtccaggtgaaccccggggaggccttcaccatccgccgggaggacggccagttccagtgcatcaccgggcccgcccaggtgccgatgatgtcccccaacggcagcgtgccgcccatctacgtgccgcccgggtacgcgccccaggtcatcgaggacaacggcgtgcgccgggtggtcgtggtgccccaggcccccgagttccaccccggctcccacaccgtcctgcaccgcagcccccacccgcccctccccgggttcatccccgtgcccacgatgatgccgcccccgccccggcacatgtactcccccgtgaccggcgccggggacatgaccacccagtacatgccccagtaccagagctcccaggtctacggcgacgtggacgcccacagcacgcacgggcgctccaacttccgggacgagcgcagctccaagacctacgagcggctgcagaagaagctgaaggaccgccagggcacccagaaggacaagatgagctccccgcccagcagcccccagaagtgcccctcccccatcaacgagcacaacggcctcatcaaggggcagatcgccggcgggatcaacaccggcagcgccaagatcaagtccggcaaggggaagggcgggacccaggtggacacggagatcgaggagaaggacgaggagaccaaggcgttcgaggccctgctgagcaacatcgtcaagccggtggcctccgacatccaggcccggaccgtggtcctcacgtggagcccgccctccagcctgatcaacggcgagaccgacgagtccagcgtgcccgagctgtacgggtacgaggtgctcatctccagcaccggcaaggacggcaagtacaagtccgtctacgtgggggaggagaccaacatcacgctgaacgacctgaagcccgccatggactaccacgcgaaggtccaggccgagtacaacagcatcaagggcaccccctccgaggccgagatcttcaccaccctcagctgcgagcccgacatccccaacccgccccgcatcgccaaccggacgaagaactccctgaccctgcagtggaaggcccccagcgacaacgggtccaagatccagaacttcgtgctcgagtgggacgagggcaaggggaacggcgagttctgccagtgctacatgggcagccagaagcagttcaagatcaccaagctgtcccccgcgatggggtgcaagttccgcctgagcgcccggaacgactacggcaccagcgggttctccgaggaggtgctctactacacgagcggctgcgccccgtccatgcccgccagccccgtcctgaccaaggccgggatcacctggctgtccctccagtggagcaagccctccggcaccccgagcgacgagggcatctcctacatcctggagatggaggaggagacgagcgggtacggcttcaagcccaagtacgacggggaggacctggcgtacaccgtgaagaacctccgccggtccaccaagtacaagttcaaggtgatcgcctacaacagcgagggcaagtccaaccccagcgaggtcgtggagttcaccacgtgccccgacaagccgggcatccccgtgaagccctccgtcaaggggaagatccacagccactccttcaagatcacctgggacccgcccaaggacaacggcggggccaccatcaacaagtacgtggtggagatggccgagggcagcaacgggaacaagtgggagatgatctacagcggcgccacccgcgagcacctgtgcgaccggctgaaccccggctgcttctaccgcctccgggtctactgcatctccgacgggggccagagcgcggtgtccgagagcctgctggtgcagacccccgccgtcccgcccgggccctgcctgcccccgcgcctccagggccgccccaaggccaaggagatccagacgccctccgggtga

SEQ ID NO: 1198 - RNA, 492 nt, synthetic construct
  misc_feature 1..492: note = AAG35520_variant
  source 1..492: mol_type = other RNA
atgagcgagtccggcttcaagctgctctgccagtgcctggggttcggcagcgggcacttccgctgcgactccagccggtggtgccacgacaacggcgtgaactacaagatcggggagaagtgggaccgccagggcgagaacggccagatgatgtcctgcacgtgcctggggaacggcaagggggagttcaagtgcgacccccacgaggcgacctgctacgacgacggcaagacctaccacgtcggggagcagtggcagaaggagtacctcggcgccatctgcagctgcacgtgcttcggcgggcagcggggctggcgctgcgacaactgccggcgccccgggggcgagccgtcccccgagggcaccaccgggcagagctacaaccagtactcccagcggtaccaccagcgcaccaacaccaacgtgaactgccccatcgagtgcttcatgccgctggacgtgcaggccgaccgggaggacagccgcgagtga

SEQ ID NO: 1199 - RNA, 1143 nt, synthetic construct
  misc_feature 1..1143: note = AAA52471_variant
  source 1..1143: mol_type = other RNA
atgatgttcagcggcttcaacgccgactacgaggcctccagctcccgctgcagctccgcgagccccgccggggactccctgagctactaccactccccggccgacagcttctccagcatgggctcccccgtgaacgcccaggacttctgcaccgacctcgccgtcagctccgcgaacttcatccccaccgtgacggccatcagcacctcccccgacctgcagtggctggtgcagccggccctcgtcagctccgtggcccccagccagacccgggcgccccaccccttcggggtgccggcccccagcgccggcgcctactcccgcgccggggtcgtgaagaccatgacgggcggccgggcgcagagcatcgggcgccggggcaaggtggagcagctgtcccccgaggaggaggagaagcgccggatccgccgggagcgcaacaagatggccgccgccaagtgccggaaccgccggcgcgagctgaccgacaccctccaggccgagaccgaccagctggaggacgagaagtccgcgctgcagacggagatcgccaacctcctgaaggagaaggagaagctggagttcatcctcgccgcccaccggcccgcctgcaagatcccggacgacctggggttccccgaggagatgagcgtcgcgagcctggacctcaccggcgggctgcccgaggtggccacccccgagtccgaggaggccttcaccctgccgctcctgaacgaccccgagcccaagcccagcgtggagccggtcaagtccatcagctccatggagctgaagacggagcccttcgacgacttcctcttccccgccagctcccgccccagcggctccgagaccgcccggagcgtgccggacatggacctgtccggcagcttctacgcggccgactgggagcccctgcactccgggagcctcggcatggggcccatggccaccgagctggagcccctgtgcaccccggtggtcacgtgcacccccagctgcaccgcctacacctccagcttcgtgttcacgtaccccgaggcggactccttcccgagctgcgccgccgcccaccgcaagggctccagctccaacgagcccagctccgacagcctctccagccccaccctgctggccctctga

SEQ ID NO: 1200 - RNA, 1296 nt, synthetic construct
  misc_feature 1..1296: note = AAG53607_variant
  source 1..1296: mol_type = other RNA
atgcccaacccgcgccccggcaagcccagcgccccctccctggccctcgggccgagccccggcgcgtcccccagctggcgggccgcccccaaggcctccgacctgctgggggcccgcggccccgggggcaccttccagggccgggacctccgcgggggcgcgcacgccagctccagctccctgaaccccatgccgcccagccagctgcagctcccgaccctgcccctggtgatggtcgccccctccggggcccggctcggccccctgccgcacctccaggcgctgctgcaggaccgcccccacttcatgcaccagctgagcacggtggacgcccacgcccggacccccgtgctccaggtccaccccctggagtccccggccatgatcagcctgaccccgcccaccacggccaccggggtgttctccctcaaggcgcgccccggcctgccgcccggcatcaacgtggccagcctggagtgggtctcccgggagcccgccctcctgtgcaccttccccaaccccagcgcgccccgcaaggactccaccctgagcgccgtgccccagagctcctacccgctcctggccaacggggtgtgcaagtggcccggctgcgagaaggtcttcgaggagcccgaggacttcctgaagcactgccaggccgaccacctcctggacgagaaggggcgggcccagtgcctgctccagcgcgagatggtgcagagcctggagcagcagctggtgctcgagaaggagaagctgtccgccatgcaggcccacctggcgggcaagatggccctcacgaaggccagctccgtcgccagctccgacaagggcagctgctgcatcgtggccgcggggtcccagggccccgtggtcccggcctggagcgggccccgggaggcccccgactccctgttcgccgtgcgccggcacctgtggggcagccacgggaactccaccttccccgagttcctccacaacatggactacttcaagttccacaacatgcgcccgcccttcacctacgcgaccctgatccggtgggccatcctggaggcccccgagaagcagcgcacgctcaacgagatctaccactggttcacccggatgttcgccttcttccgcaaccaccccgccacctggaagaacgcgatccggcacaacctgagcctgcacaagtgcttcgtgcgcgtcgagtccgagaagggcgccgtgtggaccgtggacgagctcgagttccgcaagaagcggagccagcgcccgtcccggtgcagcaaccccacgcccggcccctga

SEQ ID NO: 1201 - RNA, 1098 nt, synthetic construct
  misc_feature 1..1098: note = AAA52639_variant
  source 1..1098: mol_type = other RNA
atgtggctgcgcagccaccggcagctctgcctggccttcctgctcgtgtgcgtcctgtccgtgatcttcttcctgcacatccaccaggacagcttcccccacggcctcgggctgtccatcctgtgcccggaccgccggctcgtgaccccgcccgtcgccatcttctgcctgcccggcaccgcgatggggcccaacgccagctccagctgcccccagcaccccgcctccctgagcggcacgtggaccgtgtaccccaacgggcgcttcggcaaccagatgggccagtacgccaccctcctggccctggcgcagctcaacgggcggcgcgccttcatcctgccggccatgcacgccgcgctggcccccgtgttccggatcaccctccccgtcctggcccccgaggtggactcccgcacgccgtggcgggagctgcagctccacgactggatgagcgaggagtacgccgacctgcgcgaccccttcctgaagctctccggcttcccctgcagctggaccttcttccaccacctccgggagcagatccgccgggagttcaccctgcacgaccacctccgcgaggaggcccagtccgtgctggggcagctgcggctgggccgcaccggggaccggccccgcacgttcgtcggcgtgcacgtgcggcgcggcgactacctgcaggtcatgccgcagcggtggaagggggtggtgggcgacagcgcgtacctgcgccaggccatggactggttccgcgcccggcacgaggcccccgtcttcgtggtgacctccaacgggatggagtggtgcaaggagaacatcgacaccagccagggcgacgtcaccttcgccggcgacgggcaggaggcgacgccctggaaggacttcgccctcctgacccagtgcaaccacaccatcatgaccatcggcacgttcgggttctgggccgcctacctggccggcggggacaccgtgtacctcgcgaacttcaccctgcccgactccgagttcctgaagatcttcaagccggaggccgccttcctccccgagtgggtgggcatcaacgccgacctgagccccctgtggaccctcgccaagccctga

SEQ ID NO: 1202 - RNA, 1380 nt, synthetic construct
  misc_feature 1..1380: note = EAW58359_variant
  source 1..1380: mol_type = other RNA
atggcgcccctgtgcccgagcccctggctccccctgctgatccccgccccggcccccggcctcaccgtgcagctgctgctctccctgctgctcctggtccccgtgcacccccagcgcctgccgcggatgcaggaggacagccccctcgggggcgggtccagcggcgaggacgaccccctgggggaggaggacctgccctccgaggaggacagcccgcgcgaggaggacccgcccggcgaggaggacctccccggcgaggaggacctgcccggggaggaggacctgcccgaggtgaagcccaagtccgaggaggagggcagcctcaagctggaggacctgcccaccgtcgaggccccgggggacccccaggagccccagaacaacgcccaccgggacaaggagggcgacgaccagtcccactggcgctacgggggcgacccgccctggccccgggtgagccccgcctgcgccggccgcttccagtcccccgtggacatccggccgcagctcgcggccttctgccccgccctgcgccccctggagctcctggggttccagctgccgcccctccccgagctgcggctgcgcaacaacggccacagcgtccagctcacgctgcccccggggctggagatggccctcggccccggccgggagtaccgcgcgctgcagctgcacctccactggggcgccgccgggcggcccgggtccgagcacaccgtggagggccaccgcttccccgccgagatccacgtggtccacctgagcaccgccttcgcgcgggtggacgaggccctggggcgcccgggcggcctcgccgtgctggccgccttcctggaggaggggcccgaggagaactccgcgtacgagcagctcctgagccggctggaggagatcgccgaggagggctccgagacccaggtccccgggctcgacatcagcgccctgctgccctccgacttcagccgctacttccagtacgagggcagcctcacgaccccgccctgcgcccagggggtgatctggaccgtgttcaaccagaccgtcatgctgtccgccaagcagctgcacacgctgagcgacaccctctggggccccggcgactcccggctgcagctgaacttccgcgcgacccagcccctcaacgggcgggtgatcgaggccagcttcccggccggcgtggactccagcccccgcgccgccgagcccgtccagctgaactcctgcctggcggccggggacatcctcgccctggtgttcggcctcctgttcgccgtgaccagcgtcgcgttcctggtgcagatgcgccggcagcaccgccgggggacgaagggcggcgtgtcctaccgccccgccgaggtcgccgagaccggggcctga

SEQ ID NO: 1203 - RNA, 417 nt, synthetic construct
  misc_feature 1..417: note = U19142.1_variant
  source 1..417: mol_type = other RNA
atgagctggcgcggccggtccacctaccgcccccggccgcgccggtacgtggagccgcccgagatgatcgggcccatgcgccccgagcagttcagcgacgaggtcgagcccgccacccccgaggagggcgagcccgccacgcagcggcaggacccggcggccgcccaggagggggaggacgagggcgcctccgccgggcagggccccaagcccgaggcggacagccaggagcagggccacccccagaccgggtgcgagtgcgaggacggcccggacgggcaggagatggacccgcccaaccccgaggaggtgaagacccccgaggaggagatgcgctcccactacgtggcccagaccggcatcctgtggctcctgatgaacaactgcttcctgaacctcagcccccggaagccctga

SEQ ID NO: 1204 - RNA, 351 nt, synthetic construct
  misc_feature 1..351: note = AAH69397_variant
  source 1..351: mol_type = other RNA
atgagctggcgcggccggtccacctaccgcccccggccgcgccggtacgtggagccgcccgagatgatcgggcccatgcgccccgagcagttcagcgacgaggtcgagcccgccacccccgaggagggcgagcccgccacgcagcggcaggacccggcggccgcccaggaggggcaggacgagggcgcctccgccgggcagggccccaagcccgaggcgcacagccaggagcagggccacccccagaccgggtgcgagtgcgaggacggcccggacgggcaggagatggacccgcccaaccccgaggaggtgaagacccccgaggagggcgagaagcagtcccagtgctga

SEQ ID NO: 1205 - RNA, 357 nt, synthetic construct
  misc_feature 1..357: note = AAA82746_variant
  source 1..357: mol_type = other RNA
atgaacctgagccgcggcaagtccacctactactggccccggccgcgccggtacgtgcagccgcccgaggtcatcgggcccatgcgccccgagcagttcagcgacgaggtggagcccgccacccccgaggagggcgagcccgccacgcagcggcaggacccggcggccgcccaggagggggaggacgagggcgcctccgccgggcagggccccaagcccgaggcggacagccaggagcagggccacccccagaccgggtgcgagtgcgaggacggcccggacgggcaggagatggacccgcccaaccccgaggaggtgaagacccccgaggagggcgagaagcagtcccagtgctga

SEQ ID NO: 1206 - RNA, 354 nt, synthetic construct
  misc_feature 1..354: note = AAH69470_variant
  source 1..354: mol_type = other RNA
atgagctggcgcggccggtccacctactactggccccgcccgcggcgctacgtgcagccgcccgagatgatcgggcccatgcggcccgagcagttcagcgacgaggtcgagcccgccacccccgaggagggcgagcccgccacgcagcgccaggacccggcggccgcccaggagggggaggacgagggcgcctccgccgggcagggccccaagcccgaggcggacagccaggagcagggccacccccagaccgggtgcgagtgcgaggacggcccggacgggcaggagatggacccgcccaaccccgaggaggtgaagacccccgaggagggcgaggggcagtcccagtgctga

SEQ ID NO: 1207 - RNA, 354 nt, synthetic construct
  misc_feature 1..354: note = AAA82748_variant
  source 1..354: mol_type = other RNA
atgagctggcgcggccggtccacctactactggccccgcccgcggcgctacgtgcagccgcccgaggtcatcgggcccatgcggcccgagcagttcagcgacgaggtggagcccgccacccccgaggagggcgagcccgccacgcagcgccaggacccggcggccgcccaggagggggaggacgagggcgcctccgccgggcagggccccaagcccgaggcggacagccaggagcagggccacccccagaccgggtgcgagtgcgaggacggcccggacgggcaggagatggacccgcccaaccccgaggaggtgaagacccccgaggagggcgagaagcagtcccagtgctga

SEQ ID NO: 1208 - RNA, 354 nt, synthetic construct
  misc_feature 1..354: note = AAA82749_variant
  source 1..354: mol_type = other RNA
atgagctggcgcggccggtccacctactactggccccgcccgcggcgctacgtgcagccgcccgaggtcatcgggcccatgcggcccgagcagttcagcgacgaggtggagcccgccacccccgaggagggcgagcccgccacgcagcgccaggacccggcggccgcccaggagggggaggacgagggcgcctccgccgggcagggccccaagcccgaggcggacagccaggagcagggccacccccagaccgggtgcgagtgcgaggacggcccggacgggcaggaggtggacccgcccaaccccgaggaggtcaagacccccgaggagggcgagaagcagtcccagtgctga

SEQ ID NO: 1209 - RNA, 354 nt, synthetic construct
  misc_feature 1..354: note = AAC25989_variant
  source 1..354: mol_type = other RNA
atgagctggcgcggccggtccacctactactggccccgcccgcggcgctacgtgcagccgcccgagatgatcgggcccatgcggcccgagcagttcagcgacgaggtcgagcccgccacccccgaggagggcgagcccgccacgcagcgccaggacccggcggccgcccaggagggggaggacgagggcgcctccgccgggcagggccccaagcccgaggcgcacagccaggagcagggccacccccagaccgggtgcgagtgcgaggacggcccggacgggcaggagatggacccgcccaaccccgaggaggtgaagacccccgaggagggcgagaagcagtcccagtgctga

SEQ ID NO: 1210 - RNA, 351 nt, synthetic construct
  misc_feature 1..351: note = AAC33676_variant
  source 1..351: mol_type = other RNA
atgagctggcgcggccggtccacctaccgcccccggccgcgccggtacgtggagccgcccgagatgatcgggcccatgcgccccgagcagttcagcgacgaggtcgagcccgccacccccgaggagggcgagcccgccacgcagcggcaggacccggcggccgcccaggagggggaggacgagggcgcctccgccgggcagggccccaagcccgaggcggacagccaggagcagggccacccccagaccgggtgcgagtgcgaggacggcccggacgggcaggagatggacccgcccaaccccgaggaggtgaagacccccgaggagggcgagaagcagtcccagtgctga

SEQ ID NO: 1211 - RNA, 1344 nt, synthetic construct
  misc_feature 1..1344: note = AAA35657_variant
  source 1..1344: mol_type = other RNA
atggagctgctcaagctgaaccgcagcgtgcagggcaccgggcccggcccgggggcctccctgtgccggcccggcgcgcccctcctgaacagctccagcgtcgggaacctgtcctgcgagcccccgcgcatccggggcgccggcacccgcgagctcgagctggccatccggatcacgctgtacgccgtgatcttcctcatgagcgtcgggggcaacatgctgatcatcgtggtgctggggctctcccgccggctgcgcaccgtgaccaacgccttcctgctcagcctggccgtctccgacctgctcctggcggtggcctgcatgcccttcaccctgctccccaacctgatgggcacgttcatcttcgggaccgtgatctgcaaggccgtcagctacctgatgggcgtgtccgtgagcgtctccaccctcagcctggtggccatcgcgctggagcggtactccgccatctgccgccccctccaggcccgggtgtggcagacccgcagccacgccgcccgggtcatcgtggcgacgtggctgctgtccggcctcctgatggtgccgtaccccgtctacaccgtggtgcagcccgtcgggccccgcgtgctgcagtgcgtgcaccggtggccgagcgcccgcgtccggcagacctggtccgtgctcctgctgctcctgctgttcttcatccccggcgtcgtgatggccgtggcctacgggctcatcagccgcgagctgtacctgggcctccggttcgacggcgacagcgactccgacagccagtcccgcgtccggaaccagggcgggctgcccggggccgtgcaccagaacggccgctgccgccccgagaccggggcggtgggcgaggacagcgacggctgctacgtccagctgccgcggtcccgccccgccctcgagctgacggccctgaccgcccccgggcccggcagcgggtcccggccgacccaggccaagctcctggcgaagaagcgcgtggtgcggatgctgctggtcatcgtggtgctgttcttcctgtgctggctgcccgtctacagcgccaacacctggcgcgccttcgacggccccggggcccaccgggccctctccggcgcgcccatcagcttcatccacctcctgtcctacgccagcgcctgcgtgaacccgctcgtgtactgcttcatgcaccgccggttccgccaggcctgcctggagacgtgcgcgcggtgctgcccccgcccgccccgggcccgcccccgggccctgcccgacgaggacccgcccaccccctccatcgccagcctctcccgcctgagctacaccaccatctccacgctgggccccgggtga

SEQ ID NO: 1212 - RNA, 2226 nt, synthetic construct
  misc_feature 1..2226: note = AAD22449_variant
  source 1..2226: mol_type = other RNA
atggccctgttcaccccctggaagctcagctcccagaagctggggttcttcctggtgaccttcgggttcatctggggcatgatgctcctgcacttcacgatccagcagcgcacccagccggagagctccagcatgctgcgggagcagatcctcgacctgtccaagcgctacatcaaggccctggcggaggagaaccggaacgtcgtggacgggccctacgccggcgtgatgaccgcctacgacctcaagaagaccctggccgtcctgctcgacaacatcctgcagcgcatcgggaagctggagagcaaggtggacaacctcgtggtcaacggcacgggcaccaactccaccaacagcaccacggccgtgccctccctggtggcgctggagaagatcaacgtcgccgacatcatcaacggggcccaggagaagtgcgtgctgcccccgatggacggctacccccactgcgaggggaagatcaagtggatgaaggacatgtggcggagcgacccctgctacgccgactacggcgtggacgggtccacgtgcagcttcttcatctacctgtccgaggtcgagaactggtgcccccacctcccgtggcgcgcgaagaacccctacgaggaggccgaccacaacagcctcgccgagatccggaccgacttcaacatcctgtactccatgatgaagaagcacgaggagttccgctggatgcggctgcgcatccggcgcatggccgacgcctggatccaggcgatcaagagcctcgccgagaagcagaacctggagaagcggaagcgcaagaaggtgctggtgcacctcggcctgctgaccaaggagtccggcttcaagatcgccgagaccgccttcagcgggggccccctcggggagctggtccagtggtccgacctgatcaccagcctctacctgctgggccacgacatccggatcagcgcctccctcgcggagctgaaggagatcatgaagaaggtggtgggcaaccgcagcgggtgccccaccgtcggcgaccggatcgtggagctgatctacatcgacatcgtggggctcgcccagttcaagaagaccctgggcccgtcctgggtccactaccagtgcatgctgcgcgtgctcgacagcttcgggacggagcccgagttcaaccacgccaactacgcccagtccaagggccacaagaccccctggggcaagtggaacctgaacccccagcagttctacaccatgttcccgcacacccccgacaacagcttcctggggttcgtggtcgagcagcacctcaactccagcgacatccaccacatcaacgagatcaagcggcagaaccagtccctggtgtacggcaaggtcgacagcttctggaagaacaagaagatctacctggacatcatccacacgtacatggaggtgcacgccaccgtgtacgggtccagcaccaagaacatcccctcctacgtcaagaaccacggcatcctcagcgggcgcgacctgcagttcctgctgcgggagaccaagctgttcgtgggcctgggcttcccctacgaggggccggcgcccctggaggccatcgccaacggctgcgccttcctcaaccccaagttcaacccgcccaagtccagcaagaacacggacttcttcatcgggaagcccaccctgcgcgagctgacctcccagcacccctacgccgaggtgttcatcggccgcccccacgtctggaccgtggacctcaacaaccaggaggaggtggaggacgcggtcaaggccatcctgaaccagaagatcgagccgtacatgccctacgagttcacgtgcgaggggatgctgcagcggatcaacgccttcatcgagaagcaggacttctgccacggccaggtgatgtggcccccgctcagcgccctccaggtgaagctggcggagcccggccagtcctgcaagcaggtctgccaggagagccagctcatctgcgagcccagcttcttccagcacctgaacaaggacaaggacatgctgaagtacaaggtgacctgccagtccagcgagctcgccaaggacatcctggtgccctccttcgacccgaagaacaagcactgcgtcttccagggggacctgctcctgttcagctgcgccggcgcccacccccgccaccagcgggtgtgcccctgccgcgacttcatcaagggccaggtggccctgtgcaaggactgcctctga

SEQ ID NO: 1213 - RNA, 1743 nt, synthetic construct
  misc_feature 1..1743: note = EAX11770_variant
  source 1..1743: mol_type = other RNA
atggccggcaccgtgcgcaccgcctgcctggtcgtggcgatgctcctgagcctggacttccccgggcaggcccagccgcccccgccgccgcccgacgccacgtgccaccaggtgcggtccttcttccagcgcctccagcccggcctgaagtgggtccccgagacccccgtgcccgggagcgacctccaggtgtgcctgcccaagggcccgacctgctgctcccggaagatggaggagaagtaccagctgaccgcccgcctgaacatggagcagctcctgcagagcgcctccatggagctgaagttcctcatcatccagaacgcggccgtcttccaggaggccttcgagatcgtggtgcggcacgccaagaactacacgaacgcgatgttcaagaacaactaccccagcctgacgccccaggccttcgagttcgtcggggagttcttcaccgacgtgtccctgtacatcctcggcagcgacatcaacgtggacgacatggtcaacgagctgttcgactccctgttccccgtgatctacacccagctcatgaaccccggcctgccggacagcgccctggacatcaacgagtgcctccgcggggcccggcgcgacctgaaggtgttcggcaacttccccaagctgatcatgacccaggtctccaagagcctccaggtgacccggatcttcctgcaggccctgaacctcgggatcgaggtgatcaacaccaccgaccacctgaagttctccaaggactgcggccgcatgctgacgcggatgtggtactgcagctactgccaggggctcatgatggtcaagccctgcggcggctactgcaacgtggtgatgcaggggtgcatggcgggcgtcgtggagatcgacaagtactggcgcgagtacatcctgtccctggaggagctcgtgaacgggatgtaccggatctacgacatggagaacgtcctgctgggcctcttcagcaccatccacgactccatccagtacgtgcagaagaacgccggcaagctgaccaccacgatcgggaagctgtgcgcccacagccagcagcgccagtaccggtccgcctactaccccgaggacctcttcatcgacaagaaggtcctgaaggtggcccacgtggagcacgaggagaccctgagcagccgccggcgcgagctcatccagaagctgaagtccttcatcagcttctactccgcgctgcccggctacatctgcagccactcccccgtcgccgagaacgacaccctctgctggaacgggcaggagctggtggagcggtacagccagaaggccgcccgcaacggcatgaagaaccagttcaacctgcacgagctcaagatgaaggggcccgagcccgtggtctcccagatcatcgacaagctgaagcacatcaaccagctgctgcggaccatgagcatgccgaagggccgcgtgctcgacaagaacctggacgaggagggcttcgagtccggggactgcggcgacgacgaggacgagtgcatcgggggcagcggggacggcatgatcaaggtgaagaaccagctgcgcttcctcgccgagctggcgtacgacctggacgtcgacgacgcccccggcaactcccagcaggccacgcccaaggacaacgagatcagcaccttccacaacctcgggaacgtgcacagccccctgaagctgctcacctccatggccatctccgtggtctgcttcttcttcctggtgcactga

SEQ ID NO: 1214 - RNA, 1743 nt, synthetic construct; identical to SEQ ID NO: 1213
  misc_feature 1..1743: note = AAA93471_variant
  source 1..1743: mol_type = other RNA

SEQ ID NO: 1215 - RNA, 1743 nt, synthetic construct
  misc_feature 1..1743: note = AAH35972_variant
  source 1..1743: mol_type = other RNA
atggccggcaccgtgcgcaccgcctgcctggtcgtggcgatgctcctgagcctggacttccccgggcaggcccagccgcccccgccgccgcccgacgccacgtgccaccaggtgcggtccttcttccagcgcctccagcccggcctgaagtgggtccccgagacccccgtgcccgggagcgacctccaggtgtgcctgcccaagggcccgacctgctgctcccggaagatggaggagaagtaccagctgaccgcccgcctgaacatggagcagctcctgcagagcgcctccatggagctgaagttcctcatcatccagaacgcggccgtcttccaggaggccttcgagatcgtggtgcggcacgccaagaactacacgaacgcgatgttcaagaacaactaccccagcctgacgccccaggccttcgagttcgtcggggagttcttcaccgacgtgtccctgtacatcctcggcagcgacatcaacgtggacgacatggtcaacgagctgttcgactccctgttccccgtgatctacacccagctcatgaaccccggcctgccggacagcgccctggacatcaacgagtgcctccgcggggcccggcgcgacctgaaggtgttcggcaacttccccaagctgatcatgacccaggtctccaagagcctccaggtgacccggatcttcctgcaggccctgaacctcgggatcgaggtgatcaacaccaccgaccacctgaagttctccaaggactgcggccgcatgctgacgcggatgtggtactgcagctactgccaggggctcatgatggtcaagccctgcggcggctactgcaacgtggtgatgcaggggtgcatggcgggcgtcgtggagatcgacaagtactggcgcgagtacatcctgtccctggaggagctcgtgaacgggatgtaccggatctacgacatggagaacgtcctgctgggcctcttcagcaccatccacgactccatccagtacgtgcagaagaacgccggcaagctgaccaccacgatcgggaagctgtgcgcccacagccagcagcgccagtaccggttcgcctactaccccgaggacctcttcatcgacaagaaggtcctgaaggtggcccacgtggagcacgaggagaccctgtccagccgccggcgcgagctcatccagaagctcaagagcttcatctccttctacagcgcgctgcccggctacatctgctcccacagccccgtcgccgagaacgacaccctgtgctggaacgggcaggagctggtggagcggtactcccagaaggccgcccgcaacggcatgaagaaccagttcaacctgcacgagctcaagatgaaggggcccgagcccgtggtcagccagatcatcgacaagctgaagcacatcaaccagctgctgcggaccatgtccatgccgaagggccgcgtgctcgacaagaacctggacgaggagggcttcgagagcggggactgcggcgacgacgaggacgagtgcatcgggggctccggggacggcatgatcaaggtgaagaaccagctgcgcttcctcgccgagctggcgtacgacctggacgtcgacgacgcccccggcaacagccagcaggccacgcccaaggacaacgagatctccaccttccacaacctcgggaacgtgcacagccccctgaagctgctcacctccatggccatcagcgtggtctgcttcttcttcctggtgcactga

SEQ ID NO: 1216 - RNA, 1683 nt, synthetic construct
  misc_feature 1..1683: note = EAW93784_variant
  source 1..1683: mol_type = other RNA
atggagtgcctgtactacttcctcggcttcctgctgctcgccgcccgcctgcccctggacgcggccaagcggttccacgacgtgctcgggaacgagcgcccgagcgcctacatgcgggagcacaaccagctgaacggctggtccagcgacgagaacgactggaacgagaagctgtaccccgtctggaagcgcggggacatgcggtggaagaactcctggaagggcgggcgcgtgcaggccgtgctcaccagcgactcccccgccctggtcggcagcaacatcaccttcgcggtgaacctgatcttcccccggtgccagaaggaggacgccaacggcaacatcgtgtacgagaagaactgccgcaacgaggccgggctctccgccgacccgtacgtctacaactggacggcgtggagcgaggactccgacggcgagaacgggaccggccagagccaccacaacgtgttccccgacgggaagcccttcccccaccacccgggctggcggcgctggaacttcatctacgtgttccacaccctgggccagtacttccagaagctggggcggtgctccgtccgcgtgagcgtgaacaccgccaacgtcacgctcggcccccagctgatggaggtgaccgtgtaccggcgccacgggcgggcctacgtccccatcgcccaggtgaaggacgtgtacgtcgtgaccgaccagatccccgtgttcgtcaccatgttccagaagaacgaccgcaactccagcgacgagacgttcctgaaggacctcccgatcatgttcgacgtgctgatccacgacccctcccacttcctgaactacagcaccatcaactacaagtggtccttcggcgacaacaccggcctcttcgtgagcaccaaccacacggtcaaccacacctacgtgctgaacgggaccttctccctgaacctcaccgtcaaggccgcggcccccggcccctgcccgcccccgccgcccccgccccggcccagcaagcccacgcccagcctggggcccgccggcgacaaccccctggagctctcccgcatccccgacgagaactgccagatcaaccggtacgggcacttccaggccaccatcaccatcgtggagggcatcctggaggtgaacatcatccagatgaccgacgtcctgatgcccgtgccctggccggagagctccctcatcgacttcgtggtcacgtgccagggcagcatccccaccgaggtgtgcaccatcatctccgacccgacctgcgagatcacgcagaacaccgtgtgcagccccgtcgacgtggacgagatgtgcctgctgaccgtgcgccggaccttcaacgggtccggcacgtactgcgtcaacctcaccctgggggacgacaccagcctggccctcacctccacgctgatcagcgtgcccgaccgcgaccccgcgagccccctgcgcatggccaactccgccctcatctccgtgggctgcctggccatcttcgtcaccgtgatcagcctgctcgtgtacaagaagcacaaggagtacaaccccatcgagaactccccggggaacgtcgtgcggagcaagggcctgtccgtgttcctgaaccgcgccaaggcggtcttcttccccggcaaccaggagaaggaccccctcctgaagaaccaggagttcaagggggtgagctga

SEQ ID NO: 1217 - RNA, 1719 nt, synthetic construct
  misc_feature 1..1719: note = AAH32783_variant
  source 1..1719: mol_type = other RNA
atggagtgcctgtactacttcctcggcttcctgctgctcgccgcccgcctgcccctggacgcggccaagcggttccacgacgtgctcgggaacgagcgcccgagcgcctacatgcgggagcacaaccagctgaacggctggtccagcgacgagaacgactggaacgagaagctgtaccccgtctggaagcgcggggacatgcggtggaagaactcctggaagggcgggcgcgtgcaggccgtgctcaccagcgactcccccgccctggtcggcagcaacatcaccttcgcggtgaacctgatcttcccccggtgccagaaggaggacgccaacggcaacatcgtgtacgagaagaactgccgcaacgaggccgggctctccgccgacccgtacgtctacaactggacggcgtggagcgaggactccgacggcgagaacgggaccggccagagccaccacaacgtgttccccgacgggaagcccttcccccaccacccgggctggcggcgctggaacttcatctacgtgttccacaccctgggccagtacttccagaagctggggcggtgctccgtccgcgtgagcgtgaacaccgccaacgtcacgctcggcccccagctgatggaggtgaccgtgtaccggcgccacgggcgggcctacgtccccatcgcccaggtgaaggacgtgtacgtcgtgaccgaccagatccccgtgttcgtcaccatgttccagaagaacgaccgcaactccagcgacgagacgttcctgaaggacctcccgatcatgttcgacgtgctgatccacgacccctcccacttcctgaactacagcaccatcaactacaagtggtccttcggcgacaacaccggcctcttcgtgagcaccaaccacacggtcaaccacacctacgtgctgaacgggaccttctccctgaacctcaccgtcaaggccgcggcccccggcccctgcccgcccccgccgcccccgccccggcccagcaagcccacgcccagcctggccaccaccctgaagtcctacgacagcaacacccccgggcccgccggcgacaaccccctcgagctgtcccgcatccccgacgagaactgccagatcaaccggtacgggcacttccaggccacgatcaccatcgtggagggcatcctggaggtgaacatcatccagatgaccgacgtcctcatgcccgtgccgtggcccgagagctccctgatcgacttcgtggtgacctgccagggcagcatccccacggaggtctgcaccatcatctccgacccgacctgcgagatcacccagaacacggtgtgcagccccgtcgacgtggacgagatgtgcctgctcaccgtgcgccggaccttcaacgggtccggcacctactgcgtcaacctgacgctgggggacgacaccagcctcgcgctgacctccaccctgatcagcgtgcccgaccgcgaccccgccagccccctccgcatggccaactccgccctgatctccgtgggctgcctggccatcttcgtcacggtgatcagcctcctggtgtacaagaagcacaaggagtacaacccgatcgagaactcccccgggaacgtcgtgcggagcaagggcctgtccgtgttcctcaaccgcgcgaaggccgtcttcttccccggcaaccaggagaaggaccccctgctgaagaaccaggagttcaagggggtgagctga

SEQ ID NO: 1218 - RNA, 621 nt, synthetic construct
  misc_feature 1..621: note = CAD43718_variant
  source 1..621: mol_type = other RNA
atggagtgcctgtactacttcctcggcttcctgctgctcgccgcccgcctgcccctggacgcggccaagcggttccacgacgtgctcgggaacgagcgcccgagcgcctacatgcgggagcacaaccagctgaacggctggtccagcgacgagaacgactggaacgagaagctgtaccccgtctggaagcgcggggacatgcggtggaagaactcctggaagggcgggcgcgtgcaggccgtgctcaccagcgactcccccgccctggtcggcagcaacatcaccttcgcggtgaacctgatcttcccccggtgccagaaggaggacgccaacggcaacatcgtgtacgagaagaactgccgcaacgaggccgggctctccgccgacccgtacgtctacaactggacggcgtggagcgaggactccgacggcgagaacgggaccggccagagccaccacaacgtgttccccgacgggaagcccttcccccaccacccgggctggcggcgctggaacttcatctacgtgttccacaccctggactggctgctccagacccccaagctgctgctctacctgtccctgaagttccagcccagcctcttcctgctgtacaactga

SEQ ID NO: 1219 - RNA, 621 nt, synthetic construct
  misc_feature 1..621: note = AAH11595_variant
  source 1..621: mol_type = other RNA
atggagtgcctgtactacttcctcggcttcctgctgctcgccgcccgcctgcccctggacgcggccaagcggttccacgacgtgctcgggaacgagcgcccgagcgcctacatgcgggagcacaaccagctgaacggctggtccagcgacgagaacgactggaacgagaagctgtaccccgtctggaagcgcggggacatgcggtggaagaactcctggaagggcgggcgcgtgcaggccgtgctcaccagcgactcccccgccctggtcggcagcaacatcaccttcgcggtgaacctgatcttcccccggtgccagaaggaggacgccaacggcaacatcgtgtacgagaagaactgccgcaacgaggccgggctctccgccgacccgtacgtctacaactggacggcgtggagcgaggactccgacggcgagaacgggaccggccagagccaccacaacgtgttccccgacgggaagcccttcccccaccacccgggctggcggcgctggaacttcatctacgtgttccacaccctgggctggctgctccagacccccaagctgctgctctacctgtccctgaagttccagcccagcctcttcctgctgtacaactga

SEQ ID NO: 1220 - RNA, 2640 nt, synthetic construct
  misc_feature 1..2640: note = CCDS5600.1_variant
  source 1..2640: mol_type = other RNA
atgaagatgctgacccgcctccaggtgctgaccctggccctcttcagcaagggcttcctgctgtccctcggggaccacaacttcctgcggcgcgagatcaagatcgagggcgacctggtcctcgggggcctgttccccatcaacgagaaggggacgggcaccgaggagtgcggccggatcaacgaggaccgcgggatccagcggctggaggccatgctgttcgcgatcgacgagatcaacaaggacgactacctcctgccgggcgtgaagctcggggtgcacatcctggacacgtgcagccgcgacacctacgccctggagcagtccctcgagttcgtccgggccagcctgaccaaggtggacgaggccgagtacatgtgccccgacggctcctacgccatccaggagaacatccccctgctcatcgcgggggtgatcggcggcagctactccagcgtctccatccaggtggccaacctgctgcgcctcttccagatcccccagatcagctacgcctccaccagcgccaagctgtccgacaagagccggtacgactacttcgcgcgcaccgtgccgcccgacttctaccaggccaaggccatggccgagatcctgcggttcttcaactggacctacgtctccacggtggccagcgagggggactacggcgagaccgggatcgaggcgttcgagcaggaggcccgcctccggaacatctgcatcgccaccgccgagaaggtgggccgctccaacatccgcaagagctacgactccgtcatccgggagctgctgcagaagcccaacgcccgggtggtggtcctcttcatgcgcagcgacgacagccgggagctgatcgcggccgcctcccgcgccaacgccagcttcacctgggtggcgtccgacggctggggcgcccaggagagcatcatcaaggggtccgagcacgtggcctacggggccatcacgctggagctcgccagccagcccgtccggcagttcgaccgctacttccagtccctgaacccgtacaacaaccaccgcaacccctggttccgggacttctgggagcagaagttccagtgcagcctgcagaacaagcgcaaccaccggcgcgtgtgcgacaagcacctcgcgatcgactccagcaactacgagcaggagtccaagatcatgttcgtggtcaacgccgtgtacgccatggcccacgcgctgcacaagatgcagcggaccctgtgccccaacaccaccaagctctgcgacgccatgaagatcctggacggcaagaagctgtacaaggactacctcctgaagatcaacttcacggcccccttcaacccgaacaaggacgccgacagcatcgtgaagttcgacaccttcggggacggcatgggccgctacaacgtcttcaacttccagaacgtcgggggcaagtactcctacctgaaggtggggcactgggccgagaccctcagcctggacgtgaactccatccactggagccggaactccgtgcccaccagccagtgctccgacccctgcgcgcccaacgagatgaagaacatgcagccgggcgacgtctgctgctggatctgcatcccctgcgagccctacgagtacctggccgacgagttcacgtgcatggactgcgggagcggccagtggcccaccgccgacctcaccggctgctacgacctgccggaggactacatccgctgggaggacgcctgggccatcgggcccgtgaccatcgcgtgcctgggcttcatgtgcacgtgcatggtggtcaccgtgttcatcaagcacaacaacacgcccctggtgaaggccagcgggcgggagctctgctacatcctgctgttcggcgtcgggctctcctactgcatgaccttcttcttcatcgccaagcccagcccggtgatctgcgccctgcgccggctgggcctcggctccagcttcgccatctgctactccgcgctgctgaccaagaccaactgcatcgcccgcatcttcgacggggtgaagaacggcgcccagcggcccaagttcatcagcccctccagccaggtcttcatctgcctcgggctgatcctggtgcagatcgtgatggtctccgtgtggctcatcctggaggcccccggcacccgccggtacaccctggcggagaagcgcgagacggtgatcctcaagtgcaacgtcaaggacagctccatgctgatcagcctgacctacgacgtgatcctcgtgatcctgtgcaccgtctacgccttcaagacccggaagtgcccggagaacttcaacgaggccaagttcatcggcttcacgatgtacacgacctgcatcatctggctggccttcctccccatcttctacgtgacctccagcgactaccgcgtgcagaccaccaccatgtgcatctccgtcagcctgtccgggttcgtggtgctgggctgcctcttcgcccccaaggtccacatcatcctgttccagccgcagaagaacgtggtgacccaccggctgcacctcaaccgcttcagcgtcagcgggaccggcacgacctactcccagagctccgcgagcacctacgtgcccaccgtgtgcaacgggcgcgaggtcctggactccacgaccagctccctgtga

SEQ ID NO: 1221 - RNA, 1947 nt, synthetic construct
  misc_feature 1..1947: note = CCDS4977.1_variant
  source 1..1947: mol_type = other RNA
atgagccaccacggcggggcccccaaggcctccacctgggtggtcgcgagccgccggtccagcaccgtgtcccgcgccccggagcggcgccccgccgaggagctgaaccggacgggccccgaggggtacagcgtgggccgcgggggccggtggcgcggcacctcccggcccccggaggccgtcgccgcggggcacgaggagctccccctgtgcttcgccctcaagagccacttcgtgggcgccgtgatcgggcgcggcgggtccaagatcaagaacatccagagcaccaccaacacgaccatccagatcatccaggagcagcccgagtccctggtcaagatcttcggcagcaaggccatgcagaccaaggcgaaggccgtgatcgacaacttcgtgaagaagctggaggagaactacaactccgagtgcggcatcgacaccgccttccagcccagcgtcgggaaggacggctccacggacaacaacgtggtggccggggaccggccgctgatcgactgggaccagatccgcgaggagggcctcaagtggcagaagaccaagtgggccgacctgccgcccatcaagaagaacttctacaaggagagcaccgcgacctccgccatgagcaaggtcgaggccgactcctggcggaaggagaacttcaacatcacgtgggacgacctgaaggacggcgagaagcgccccatccccaacccgacctgcaccttcgacgacgccttccagtgctaccccgaggtgatggagaacatcaagaaggccgggttccagaagcccacccccatccagagccaggcgtggcccatcgtgctccagggcatcgacctgatcggggtcgcccagacgggcaccgggaagaccctgtgctacctcatgcccggcttcatccacctggtgctgcagcccagcctcaagggccagcggaaccgcccggggatgctggtgctgacccccacgcgggagctcgccctgcaggtcgagggcgagtgctgcaagtactcctacaaggggctgcgcagcgtgtgcgtgtacggcgggggcaaccgggacgagcagatcgaggagctcaagaagggcgtcgacatcatcatcgccacccccgggcgcctgaacgacctgcagatgtccaacttcgtgaacctcaagaacatcacctacctggtgctggacgaggccgacaagatgctcgacatgggcttcgagccccagatcatgaagatcctgctggacgtccggccggaccgccagaccgtgatgacgagcgcgacctggccccactccgtccaccgcctcgcccagagctacctgaaggagcccatgatcgtgtacgtggggaccctggacctcgtcgccgtgtccagcgtgaagcagaacatcatcgtcaccacggaggaggagaagtggtcccacatgcagaccttcctgcagagcatgtccagcaccgacaaggtgatcgtgttcgtctcccggaaggccgtggccgaccacctgagctccgacctcatcctgggcaacatcagcgtggagtccctgcacggggaccgcgagcagcgggaccgcgagaaggcgctcgagaacttcaagaccggcaaggtccggatcctgatcgccacggacctggccagccgcggcctcgacgtgcacgacgtgacccacgtctacaacttcgacttcccccggaacatcgaggagtacgtgcaccgcatcgggcggaccggccgcgccgggcggaccggcgtgtccatcacgaccctgacccgcaacgactggcgggtcgcgagcgagctgatcaacatcctcgagcgcgccaaccagagcatcccggaggagctggtgtccatggccgagcggttcaaggcccaccagcagaagcgcgagatggagcggaagatggagcgcccccagggccggcccaagaagttccactga

SEQ ID NO: 1222 - RNA, 1209 nt, synthetic construct
  misc_feature 1..1209: note = ACD02430_variant
  source 1..1209: mol_type = other RNA
atggcccagaaggagggcgggcgcaccgtgccctgctgcagccggccgaaggtcgccgcgctgaccgccggcacgctcctgctgctcaccgccatcggggccgcctcctgggcgatcgtggccgtgctgctgcgcagcgaccaggagcccctctaccccgtccaggtgtccagcgccgacgcccggctgatggtgttcgacaagaccgagggcacctggcgcctgctctgctccagccggtccaacgcgcgcgtcgccgggctgagctgcgaggagatgggcttcctgcgggccctcacgcactccgagctggacgtgcgcaccgccggcgccaacgggaccagcggcttcttctgcgtggacgaggggcggctgccccacacccagcgcctcctggaggtcatctccgtgtgcgactgcccgcggggccgcttcctggcggccatctgccaggactgcgggcggcgcaagctccccgtggaccggatcgtcggcggccgcgacacgagcctggggcggtggccctggcaggtctccctgcgctacgacggcgcccacctctgcgggggcagcctgctgtccggcgactgggtgctcaccgccgcccactgcttccccgagcggaaccgcgtgctgagccggtggcgcgtgttcgcgggggccgtggcccaggcctccccgcacggcctgcagctcggggtccaggccgtggtgtaccacggcgggtacctgcccttccgcgaccccaacagcgaggagaactccaacgacatcgcgctggtccacctcagcagccccctgccgctgaccgagtacatccagcccgtgtgcctccccgccgccggccaggccctggtggacggcaagatctgcaccgtcacggggtggggcaacacccagtactacgggcagcaggccggcgtgctgcaggaggcgcgggtccccatcatctccaacgacgtgtgcaacggggccgacttctacggcaaccagatcaagccgaagatgttctgcgccggctaccccgagggcgggatcgacgcctgccagggggacagcggcgggcccttcgtgtgcgaggactccatcagccgcacgccccggtggcgcctctgcggcatcgtctcctggggcaccgggtgcgcgctggcccagaagccgggcgtgtacaccaaggtgagcgacttccgggagtggatcttccagtga

SEQ ID NO: 1223 - RNA, 1254 nt, synthetic construct
  misc_feature 1..1254: note = AAA36013_variant
  source 1..1254: mol_type = other RNA
atggcccagaaggagggcgggcgcaccgtgccctgctgcagccggccgaaggtcgccgcgctgaccgccggcacgctcctgctgctcaccgccatcggggccgcctcctgggcgatcgtggccgtgctgctgcgcagcgaccaggagcccctctaccccgtccaggtgtccagcgccgacgcccggctgatggtgttcgacaagaccgagggcacctggcgcctgctctgctccagccggtccaacgcgcgcgtcgccgggctgagctgcgaggagatgggcttcctgcgggccctcacgcactccgagctggacgtgcgcaccgccggcgccaacgggaccagcggcttcttctgcgtggacgaggggcggctgccccacacccagcgcctcctggaggtcatctccgtgtgcgactgcccgcggggccgcttcctggcggccatctgccaggactgcgggcggcgcaagctccccgtggaccggatcgtcggcggccgcgacacgagcctggggcggtggccctggcaggtctccctgcgctacgacggcgcccacctctgcgggggcagcctgctgtccggcgactgggtgctcaccgccgcccactgcttccccgagcggaaccgcgtgctgagccggtggcgcgtgttcgcgggggccgtggcccaggcctccccgcacggcctgcagctcggggtccaggccgtggtgtaccacggcgggtacctgcccttccgcgaccccaacagcgaggagaactccaacgacatcgcgctggtccacctcagcagccccctgccgctgaccgagtacatccagcccgtgtgcctccccgccgccggccaggccctggtggacggcaagatctgcaccgtcacggggtggggcaacacccagtactacgggcagcaggccggcgtgctgcaggaggcgcgggtccccatcatctccaacgacgtgtgcaacggggccgacttctacggcaaccagatcaagccgaagatgttctgcgccggctaccccgagggcgggatcgacgcctgccagggggacagcggcgggcccttcgtgtgcgaggactccatcagccgcacgccccggtggcgcctctgcggcatcgtctcctggggcaccgggtgcgcgctggcccagaagccgggcgtgtacaccaaggtgagcgacttccgggagtggatcttccaggccatcaagacccactccgaggccagcgggatggtcacccagctgtga

SEQ ID NO: 1224 - RNA, 2940 nt, synthetic construct
  misc_feature 1..2940: note = BAG62073_variant
  source 1..2940: mol_type = other RNA
atggagctggccgccctctgccgctggggcctgctgctcgcgctgctgcccccgggggccgccagcacccaggacaactacctctccaccgacgtgggcagctgcacgctggtctgccccctgcacaaccaggaggtgaccgccgaggacgggacccagcggtgcgagaagtgctccaagccctgcgcccgcgtgtgctacggcctcgggatggagcacctccgggaggtccgcgcggtgaccagcgccaacatccaggagttcgccggctgcaagaagatcttcggctccctggccttcctgcccgagagcttcgacggggacccggcgtccaacacggcgcccctgcagcccgagcagctccaggtgttcgagaccctggaggagatcaccggctacctgtacatcagcgcctggcccgactccctgccggacctcagcgtcttccagaacctccaggtgatccgggggcgcatcctgcacaacggcgcctactccctgaccctgcaggggctgggcatcagctggctcggcctgcggtccctgcgcgagctcgggagcggcctggccctgatccaccacaacacgcacctctgcttcgtgcacaccgtcccctgggaccagctgttccggaacccccaccaggccctgctccacaccgccaaccgccccgaggacgagtgcgtgggggagggcctggcctgccaccagctgtgcgcccggggccactgctgggggccgggccccacccagtgcgtgaactgctcccagttcctccgcgggcaggagtgcgtcgaggagtgccgggtgctgcagggcctgccccgcgagtacgtgaacgcccggcactgcctcccctgccacccggagtgccagccccagaacgggagcgtcacgtgcttcggccccgaggcggaccagtgcgtggcctgcgcccactacaaggacccgcccttctgcgtggcccgctgcccctccggcgtcaagcccgacctgagctacatgcccatctggaagttccccgacgaggagggggcctgccagccctgccccatcaactgcacccactcctgcgtggacctggacgacaagggctgccccgcggagcagcgggccagcccgctcaccagcatcatctccgccgtggtcgggatcctgctggtggtggtcctcggcgtggtcttcgggatcctgatcaagcgccggcagcagaagatccgcaagtacaccatgcggcgcctgctccaggagacggagctggtggagcccctgacccccagcggcgccatgccgaaccaggcccagatgcgcatcctgaaggagaccgagctccggaaggtgaaggtcctgggctccggggcgttcggcaccgtgtacaaggggatctggatccccgacggcgagaacgtgaagatccccgtcgccatcaaggtgctgcgcgagaacacgagccccaaggccaacaaggagatcctcgacgaggcctacgtgatggcgggggtcggctccccgtacgtgagccggctgctgggcatctgcctcacctccaccgtgcagctggtcacccagctgatgccctacgggtgcctcctggaccacgtgcgcgagaaccggggccgcctggggagccaggacctcctgaactggtgcatgcagatcgccaagggcatgtcctacctggaggacgtgcggctcgtccaccgcgacctggccgcccggaacgtgctggtcaagagccccaaccacgtgaagatcacggacttcggcctcgcccgcctgctggacatcgacgagaccgagtaccacgcggacgggggcaaggtgcccatcaagtggatggccctcgagtccatcctgcggcgccggttcacccaccagagcgacgtgtggtcctacggggtcaccgtgtgggagctgatgacgttcggcgccaagccgtacgacgggatccccgcccgcgagatccccgacctcctggagaagggcgagcggctgccccagccgcccatctgcaccatcgacgtgtacatgatcatggtcaagtgctggatgatcgacagcgagtgccgcccccggttccgcgagctcgtgtccgagttcagccggatggcccgcgacccccagcgcttcgtggtcatccagaacgaggacctgggcccggcgagccccctggactccaccttctaccggtccctcctggaggacgacgacatgggggacctggtggacgccgaggagtacctcgtgccccagcagggcttcttctgccccgacccggcccccggggccggcgggatggtccaccaccgccaccggagcagctccacccgcagcggcggcggggacctgacgctgggcctcgagccctccgaggaggaggcgccccggagcccgctggccccctccgagggggccggcagcgacgtgttcgacggggacctgggcatgggcgccgccaaggggctccagtccctgcccacccacgacccgagccccctgcagcgctactccgaggaccccaccgtgcccctcccgagcgagaccgacggctacgtcgcgcccctgacgtgctccccgcagcccgagtacgtgaaccagcccgacgtgcggccccagccgcccagcccccgcgaggggcccctgcccgccgcccggcccgccggcgccaccctcgagcgcccgaagaccctgtcccccgggaagaacggcgtcgtgaaggacgtgttcgcgttcggcggggccgtcgagaaccccgagtacctgacgccccagggcggggccgccccgcagccccacccgccgcccgccttcagccccgcgttcgacaacctctactactgggaccaggacccgcccgagcggggcgccccgccctccaccttcaagggcacccccaccgccgagaaccccgagtacctggggctggacgtgcccgtgtga

SEQ ID NO: 1225 - RNA, 264 nt, synthetic construct
  misc_feature 1..264: note = CCQ43016_variant
  source 1..264: mol_type = other RNA
atgatgcgcatgaagaccttcgtgatgatccacttccacctgatgaacggcgggaaggccaagctctacagccggccccacgccaagctgctgccggagcagcgcgtcaccgacaagacgggcgcgcccgtggagtggcccgggcagacccagtgctccaccgagacccagacgctcgccgccatgcccgcccaggccgtgatgcgggtgacctgcaccgtcgtggacatgcacaagagcgagtgcgcgccggcccagacctga

SEQ ID NO: 1226 - RNA, 3768 nt, synthetic construct
  misc_feature 1..3768: note = AAI67147_variant
  source 1..3768: mol_type = other RNA
atggagctggccgccctctgccgctggggcctgctgctcgcgctgctgcccccgggggccgccagcacccaggtgtgcaccggcacggacatgaagctccggctgcccgcctcccccgagacccacctggacatgctccgccacctgtaccaggggtgccaggtcgtgcagggcaacctggagctcacctacctgcccaccaacgccagcctgtccttcctccaggacatccaggaggtgcaggggtacgtcctgatcgcgcacaaccaggtgcgccaggtgccgctgcagcggctccggatcgtccgcggcacgcagctgttcgaggacaactacgccctggccgtgctcgacaacggcgaccccctgaacaacaccacccccgtgaccggggccagccccggcgggctgcgggagctccagctgcgctccctgacggagatcctcaagggcggggtcctgatccagcggaacccgcagctgtgctaccaggacaccatcctctggaaggacatcttccacaagaacaaccagctggcgctgaccctcatcgacaccaaccgcagccgggcctgccacccctgctcccccatgtgcaagggcagccgctgctggggcgagtccagcgaggactgccagtccctgacgcggaccgtgtgcgccgggggctgcgcccgctgcaaggggcccctgccgaccgactgctgccacgagcagtgcgccgcgggctgcaccggccccaagcacagcgactgcctcgcctgcctgcacttcaaccactccgggatctgcgagctgcactgccccgccctcgtgacgtacaacaccgacaccttcgagagcatgcccaacccggagggccggtacaccttcggggcctcctgcgtcacggcctgcccctacaactacctgagcaccgacgtgggctcctgcaccctggtgtgccccctccacaaccaggaggtcaccgcggaggacgggacgcagcgctgcgagaagtgcagcaagccctgcgcccgggtgtgctacggcctgggcatggagcacctccgcgaggtgcgggccgtcacctccgccaacatccaggagttcgccgggtgcaagaagatcttcggcagcctggcgttcctgccggagagcttcgacggggaccccgcctccaacaccgcgcccctgcagcccgagcagctccaggtgttcgagaccctggaggagatcacgggctacctgtacatcagcgcctggccggactccctgcccgacctcagcgtgttccagaacctgcaggtcatccgcgggcggatcctgcacaacggcgcctactccctcaccctgcagggcctggggatcagctggctcggcctgcgctccctgcgcgagctcgggagcggcctggccctgatccaccacaacacccacctctgcttcgtgcacaccgtgccctgggaccagctgttccggaacccccaccaggccctgctccacacggccaaccgccccgaggacgagtgcgtcggggagggcctggcctgccaccagctgtgcgcgcggggccactgctgggggcccggccccacccagtgcgtgaactgctcccagttcctccgcgggcaggagtgcgtcgaggagtgccgggtgctgcagggcctgccgcgcgagtacgtgaacgcccggcactgcctcccctgccaccccgagtgccagccccagaacggcagcgtgacctgcttcgggccggaggccgaccagtgcgtggcctgcgcccactacaaggacccgcccttctgcgtggcgcgctgcccctccggcgtcaagcccgacctgagctacatgcccatctggaagttccccgacgaggagggggcctgccagccctgcccgatcaactgcacccactcctgcgtggacctggacgacaagggctgccccgccgagcagcgggccagccccctcacgtccatcatcagcgccgtggtcgggatcctgctggtggtggtcctcggcgtggtgttcggcatcctgatcaagcgccggcagcagaagatccgcaagtacaccatgcggcgcctgctccaggagaccgagctggtcgagcccctgaccccgtccggggcgatgcccaaccaggcccagatgcggatcctcaaggagaccgagctgcgcaaggtgaaggtgctgggcagcggggccttcggcacggtctacaaggggatctggatccccgacggcgagaacgtgaagatccccgtggccatcaaggtcctccgggagaacacctccccgaaggccaacaaggagatcctggacgaggcgtacgtgatggccggcgtggggagcccctacgtcagccgcctgctcggcatctgcctgacctccaccgtgcagctggtgacgcagctcatgccctacgggtgcctgctggaccacgtccgggagaaccgcggccgcctcgggagccaggacctgctgaactggtgcatgcagatcgccaagggcatgtcctacctcgaggacgtgcggctggtgcaccgcgacctggccgcgcggaacgtcctcgtcaagagccccaaccacgtgaagatcaccgacttcggcctggcccgcctgctcgacatcgacgagaccgagtaccacgccgacgggggcaaggtcccgatcaagtggatggccctggagtccatcctgcggcgccggttcacccaccagagcgacgtgtggtcctacggggtgacggtctgggagctcatgaccttcggcgccaagccctacgacgggatccccgcgcgcgagatcccggacctgctggagaagggcgagcggctcccccagccgcccatctgcaccatcgacgtgtacatgatcatggtgaagtgctggatgatcgacagcgagtgccgcccccggttccgcgagctggtctccgagttcagccggatggcccgcgacccccagcggttcgtggtgatccagaacgaggacctgggccccgccagccccctcgactccaccttctaccgctccctgctggaggacgacgacatgggggacctcgtcgacgccgaggagtacctggtgccgcagcagggcttcttctgccccgaccccgcccccggggcgggcggcatggtgcaccaccggcaccgcagctccagcacgcggtccgggggcggggacctgaccctcggcctggagccgagcgaggaggaggcgccccgcagccccctggccccctccgagggggccggcagcgacgtcttcgacggcgacctcgggatgggcgccgccaaggggctgcagtccctgccgacccacgaccccagccccctccagcggtactccgaggaccccaccgtgccgctgcccagcgagacggacggctacgtggcgcccctgacctgctccccgcagcccgagtacgtcaaccagcccgacgtgcgcccccagcccccgagcccccgcgaggggcccctcccggccgcccggcccgccggcgccaccctggagcgccccaagaccctgtcccccggcaagaacggggtggtcaaggacgtgttcgccttcggcggggccgtcgagaacccggagtacctcacgccccagggcggggccgcgccccagccccacccgccgcccgccttcagccccgccttcgacaacctgtactactgggaccaggacccgcccgagcggggcgccccgccctccaccttcaagggcacccccaccgccgagaaccccgagtacctggggctcgacgtgcccgtgtga

SEQ ID NO: 1227 - RNA, 1260 nt, synthetic construct
  misc_feature 1..1260: note = AAD56009_variant
  source 1..1260: mol_type = other RNA
atggagctggccgccctctgccgctggggcctgctgctcgccctgctgcccccgggggccgccagcacccaggtgtgcaccggcacggacatgaagctccggctgcccgcctcccccgagacccacctggacatgctccgccacctgtaccaggggtgccaggtcgtgcagggcaacctggagctcacctacctgcccaccaacgccagcctgtccttcctccaggacatccaggaggtgcaggggtacgtcctgatcgcgcacaaccaggtgcgccaggtgccgctgcagcggctccggatcgtccgcggcacgcagctgttcgaggacaactacgccctggccgtgctcgacaacggcgaccccctgaacaacaccacccccgtgaccggggccagccccggcgggctgcgggagctccagctgcgctccctgacggagatcctcaagggcggggtcctgatccagcggaacccgcagctgtgctaccaggacaccatcctctggaaggacatcttccacaagaacaaccagctggcgctgaccctcatcgacaccaaccgcagccgggcctgccacccctgctcccccatgtgcaagggcagccgctgctggggcgagtccagcgaggactgccagtccctgacgcggaccgtgtgcgccgggggctgcgcccgctgcaaggggcccctgccgaccgactgctgccacgagcagtgcgccgcgggctgcaccggccccaagcacagcgactgcctcgcctgcctgcacttcaaccactccgggatctgcgagctgcactgccccgccctcgtgacgtacaacaccgacaccttcgagagcatgcccaacccggagggccggtacaccttcggggcctcctgcgtcacggcctgcccctacaactacctgagcaccgacgtgggctcctgcaccctggtgtgccccctccacaaccaggaggtcaccgcggaggacgggacgcagcgctgcgagaagtgcagcaagccctgcgcccggggcacccactccctgccgccccgccccgccgccgtgcccgtgccgctgcggatgcagcccggccccgcccaccccgtcctcagcttcctgcgcccgagctgggacctggtgtccgcgttctacagcctccccctggcgcccctgtccccgaccagcgtgcccatctcccccgtcagcgtggggcggggccccgacccggacgcccacgtggccgtcgacctgtcccgctacgaggggtga

SEQ ID NO: 1228 - RNA, 546 nt, synthetic construct
  misc_feature 1..546: note = U70863.1_variant
  source 1..546: mol_type = other RNA
ggcagccactccatgcgctacttcttcaccagcgtgtcccggcccgggcgcggcgagccgcggttcatcgccgtcgggtacgtggacgacacccagttcgtgcgcttcgacagcgacgccgcgtcccagcggatggagccccgcgccccctggatcgagcaggagggccccgagtactgggacggggagacgcggaaggtcaaggcccacagccagacccaccgcgtggacctgggcaccctccggggctactacaaccagtccgaggccgggagccacaccgtgcagcgcatgtacggctgcgacgtcgggtccgactggcggttcctgcgcggctaccaccagtacgcctacgacgggaaggactacatcgcgctgaaggaggacctccggagctggacggccgccgacatggccgcgcagaccaccaagcacaagtgggagaccgcccacgtggccgagcagctgcgcgcctacctggagggcacgtgcgtggagtggctccggcgctacctggagaacggcaaggagaccctgcagcggacc

SEQ ID NO: 1229 - RNA, 543 nt, synthetic construct
  misc_feature 1..543: note = AH009136.2_variant
  source 1..543: mol_type = other RNA
agccactccatgcgctacttcttcaccagcgtgtcccggcccggccgcggggagccgcggttcatcgccgtcggctacgtggacgacacccagttcgtgcgcttcgacagcgacgccgcgtcccagcggatggagccccgcgccccctggatcgagcaggaggggcccgagtactgggacggcgagacgcggaaggtcaaggcccacagccagacccaccgcgtggacctggggaccctccggggctactacaaccagtccgaggccggcagccacaccgtgcagcgcatgtacgggtgcgacgtcggctccgactggcggttcctgcgcgggtaccaccagtacgcctacgacggcaaggactacatcgcgctgaaggaggacctccggagctggacggccgccgacatggccgcgcagaccaccaagcacaagtgggaggccgcccacgtggccgagcagctgcgcgcctacctggaggggacctgcgtggagtggctccggcgctacctggagaacggcaaggagacgctgcagcggacc

SEQ ID NO: 1230 - RNA, 705 nt, synthetic construct
  misc_feature 1..705: note = AAG09781_variant
  source 1..705: mol_type = other RNA
atgctgcgcgtgcccgagccgcggcccggcgaggccaaggccgagggggcggccccgcccacccccagcaagcccctcacctccttcctgatccaggacatcctgcgcgacggcgcccagcggcagggcgggcgcacgagctcccagcggcagcgcgaccccgagcccgagccggagcccgagcccgagggcgggcggagccgcgccggcgcccagaacgaccagctctccaccgggccccgggcggccccggaggaggccgagaccctggccgagaccgagcccgagcgccacctgggcagctacctcctggactccgagaacacgagcggggcgctgccccggctcccccagaccccgaagcagccccagaagcgctcccgggccgccttcagccacacccaggtcatcgagctggagcgcaagttctcccaccagaagtacctgagcgcccccgagcgggcccacctcgcgaagaacctgaagctgaccgagacccaggtgaagatctggttccagaaccgccggtacaagacgaagcgcaagcagctctccagcgagctgggcgacctggagaagcactccagcctccccgccctgaaggaggaggccttctcccgggccagcctggtgtccgtctacaacagctacccgtactacccctacctctactgcgtggggagctggtcccccgccttctggtga

SEQ ID NO: 1231 - RNA, 942 nt, synthetic construct
  misc_feature 1..942: note = BAG37303_variant
  source 1..942: mol_type = other RNA
atggccagcttccgcaagctgaccctctccgagaaggtgcccccgaaccaccccagccggaagaaggtcaacttcctggacatgtccctggacgacatcatcatctacaaggagctcgagggcaccaacgccgaggaggagaagaacaagcgccagaaccacagcaagaaggagtcccccagccggcagcagtccaaggcgcaccgccaccggcaccgccgggactacagccgctgccggtccaacagcgaggaggggaaccacgacaagaagccctcccagaagccgagcggcttcaagtccgggcagcaccccctgaacggccagcccctgatcgagcaggagaagtgcagcgacaactacgaggcccaggccgagaagaaccaggggcagtccgagggcaaccagcaccagagcgagggcaaccccgacaagtccgaggagagccaggggcagccggaggagaaccaccactccgagcgcagccggaaccacctcgagcgcagcctgtcccagagcgaccggtcccagggccagctgaagcgccaccacccccagtacgagcggagccacgggcagtacaagcgctcccacggccagagcgagcggtcccacgggcacagcgagcgctcccacggccacagcgagcggtcccacggccacagcgagcgctcccacgggcacagcaagcggtcccgcagccagggcgacctcgtggacacgcagtccgacctgatcgccacccagcgcgacctgatcgccacccagaaggacctcatcgcgacccagcgggacctgatcgccacgcagcgcgacctgatcgtgacccagcgggacctcgtcgccaccgagcgcgacctgatcaaccagagcgggcggtcccacggccagagcgagcgccaccagcggtacagcaccggcaagaacacgatcaccacctga

SEQ ID NO: 1232 - RNA, 942 nt, synthetic construct
  misc_feature 1..942: note = AAI28135_variant
  source 1..942: mol_type = other RNA
atggccagcttccgcaagctgaccctctccgagaaggtgcccccgaaccaccccagccggaagaaggtcaacttcctggacatgtccctggacgacatcatcatctacaaggagctcgagggcaccaacgccgaggaggagaagaacaagcgccagaaccacagcaagaaggagtcccccagccggcagcagtccaaggcgcaccgccaccggcaccgccgggggtacagccgctgccggtccaacagcgaggagggcaaccacgacaagaagccctcccagaagccgagcgggttcaagtccggccagcaccccctgaacgggcagcccctgatcgagcaggagaagtgcagcgacaactacgaggcccaggccgagaagaaccagggccagtccgagggcaaccagcaccagagcgaggggaaccccgacaagtccgaggagagccagggccagccggaggagaaccaccactccgagcgcagccggaaccacctcgagcgcagcctgtcccagagcgaccggtcccaggggcagctgaagcgccaccacccccagtacgagcggagccacggccagtacaagcgctcccacgggcagagcgagcggtcccacggccacagcgagcgctcccacggccacagcgagcggtcccacgggcacagcgagcgctcccacggccacagcaagcggtcccgcagccagggggacctcgtggacacgcagtccgacctgatcgccacccagcgcgacctgatcgccacccagaaggacctcatcgcgacccagcgggacctgatcgccacgcagcgcgacctgatcgtgacccagcgggacctcgtcgccaccgagcgcgacctgatcaaccagagcggccggtcccacggccagagcgagcgccaccagcggtacagcaccgggaagaacacgatcaccacctga

SEQ ID NO: 1233 - RNA, 384 nt, synthetic construct
  misc_feature 1..384: note = 12543784_variant
  source 1..384: mol_type = other RNA
atgatcaagaagaacctgaagaagctcggcatcgaggagacctacctgaacatcatcaaggccatctacgaccgccccaccgccagcatccagaagacggagaacctgtccaccaagaccgggaccagccaggagtaccacctctccccgctgtggttctacatcgtgctggagatcctcgcgagcacgatccggcaggagaagaacctgaaggacatccacaccgagaaggaggaggtcaagctgtccctcttcgccgacgccatgatcctgtacctgaagaagcccaacgacagcacccgcaagctcctggagctgatcaagaagatccactccagctgccggatcaagatcaacatccacttcgccttctgctcccagtga

SEQ ID NO: 1234 - RNA, 1926 nt, synthetic construct
  misc_feature 1..1926: note = AAA63226_variant
  source 1..1926: mol_type = other RNA
atggccaaggccgcggccatcggcatcgacctggggaccacctacagctgcgtgggcgtgttccagcacgggaaggtggagatcatcgccaacgaccagggcaaccgcacgaccccctcctacgtggccttcaccgacaccgagcggctcatcggggacgccgcgaagaaccaggtcgccctgaacccgcagaacacggtgttcgacgccaagcgcctgatcggccggaagttcggcgaccccgtggtccagagcgacatgaagcactggcccttccaggtgatcaacgacggggacaagcccaaggtgcaggtctcctacaagggcgagaccaaggccttctacccggaggagatcagctccatggtgctcaccaagatgaaggagatcgcggaggcctacctggggtaccccgtgaccaacgccgtcatcacggtgcccgcctacttcaacgacagccagcgccaggccaccaaggacgcgggcgtgatcgccgggctgaacgtcctccggatcatcaacgagcccaccgccgccgccatcgcgtacggcctggaccgcaccggcaagggggagcggaacgtgctgatcttcgacctcggcgggggcacgttcgacgtgtccatcctgaccatcgacgacggcatcttcgaggtcaaggccaccgccggggacacccacctgggcggggaggacttcgacaaccgcctcgtgaaccacttcgtggaggagttcaagcggaagcacaagaaggacatcagccagaacaagcgcgccgtccggcgcctgcggacggcctgcgagcgcgcgaagcggaccctgtccagctccacccaggccagcctcgagatcgactccctgttcgagggcatcgacttctacaccagcatcacgcgcgcccggttcgaggagctgtgctccgacctcttccgcagcaccctggagccggtggagaaggccctgcgggacgccaagctcgacaaggcgcagatccacgacctggtgctggtcgggggctccacccgcatccccaaggtgcagaagctcctgcaggacttcttcaacggccgggacctgaacaagagcatcaaccccgacgaggccgtcgcctacggggccgcggtgcaggccgccatcctcatgggcgacaagtccgagaacgtgcaggacctgctgctcctggacgtcgcgcccctgagcctcgggctggagaccgccggcggggtgatgacggccctgatcaagcgcaacagcaccatcccgaccaagcagacccagatcttcacgacctactccgacaaccagcccggcgtgctcatccaggtctacgagggcgagcgcgccatgaccaaggacaacaacctgctggggcggttcgagctcagcggcatcccgcccgcgccccgcggggtgccccagatcgaggtgaccttcgacatcgacgccaacggcatcctgaacgtcacggccaccgacaagtccaccgggaaggccaacaagatcaccatcacgaacgacaagggccggctgagcaaggaggagatcgagcgcatggtgcaggaggccgagaagtacaaggccgaggacgaggtgcagcgggagcgcgtctccgccaagaacgccctcgagagctacgcgttcaacatgaagtccgccgtggaggacgagggcctgaaggggaagatcagcgaggccgacaagaagaaggtgctggacaagtgccaggaggtcatctcctggctcgacgccaacaccctggcggagaaggacgagttcgagcacaagcggaaggagctggagcaggtctgcaaccccatcatcagcggcctctaccagggggccggcggccccgggccgggcgggttcggcgcccaggggcccaagggcggctccgggagcggccccaccatcgaggaggtggactga

SEQ ID NO: 1235 - RNA, 1926 nt, synthetic construct; identical to SEQ ID NO: 1234
  misc_feature 1..1926: note = AAA63227_variant
  source 1..1926: mol_type = other RNA

SEQ ID NO: 1236 - RNA, 627 nt, synthetic construct
  misc_feature 1..627: note = AAI21098_variant
  source 1..627: mol_type = other RNA
atggccctgggccagaagctgttcatcaccatgagccgcggggccggccggctgcaggggaccctgtgggcgctcgtgttcctgggcatcctggtcgggatggtggtgccctccccggccggcacgcgcgccaacaacaccctcctggacagccggggctgggggaccctgctctcccgcagccgggccggcctggccggggagatcgcgggcgtcaactgggagtccgggtacctggtgggcatcaagcgccagcggcgcctctactgcaacgtgggcatcgggttccacctccaggtcctgcccgacggccggatcagcgggacccacgaggagaacccctactccctcctggagatcagcacggtggagcgcggcgtggtctccctgttcggcgtgcggagcgccctcttcgtggccatgaactccaaggggcgcctgtacgccacccccagcttccaggaggagtgcaagttccgggagaccctgctcccgaacaactacaacgcgtacgagtccgacctgtaccagggcacctacatcgccctgagcaagtacgggcgcgtcaagcggggctccaaggtgagccccatcatgacggtgacccacttcctcccccgcatctga

SEQ ID NO: 1237 - RNA, 1569 nt, synthetic construct
  misc_feature 1..1569: note = BAA74724_variant
  source 1..1569: mol_type = other RNA
atgccccgcgccccgcggtgccgcgccgtgcggagcctgctccgctcccactaccgggaggtcctgcccctggcgaccttcgtgcgccggctcggcccccaggggtggcgcctggtgcagcggggcgaccccgccgccttccgcgccctggtcgcccagtgcctcgtgtgcgtgccgtgggacgcgcggcccccgcccgccgcccccagcttccgccaggtctcctgcctgaaggagctggtggcccgggtgctccagcgcctgtgcgagcgcggggcgaagaacgtcctggccttcggcttcgccctcctggacggggcccggggcggcccgcccgaggccttcaccacgagcgtgcggtcctacctgcccaacaccgtgaccgacgcgctccgcgggagcggcgcctgggggctgctgctccggcgcgtcggcgacgacgtgctggtgcacctcctcgcccggtgcgccctgttcgtcctggtggccccctcctgcgcgtaccaggtgtgcgggccgcccctctaccagctgggcgccgccacccaggcccgcccgccgccccacgccagcggcccccgccggcgcctggggtgcgagcgggcgtggaaccactccgtccgcgaggccggcgtgcccctggggctgcccgcccccggcgcccggcgccggggcgggagcgcctcccgcagcctgcccctccccaagcggccccgccggggcgcggcccccgagcccgagcgcacgcccgtggggcagggctcctgggcccacccggggcggacccgcggccccagcgaccggggcttctgcgtcgtgtcccccgcccgcccggcggaggaggccaccagcctggagggggccctgtccggcacccggcacagccacccctccgtggggcgccagcaccacgccggcccgcccagcacgagccggccgccccgcccctgggacaccccctgcccgcccgtctacgccgagaccaagcacttcctctactccagcggggacaaggagcagctgcgcccctccttcctgctcagctccctgcggcccatcctgaccggcgcgcgccggctcgtggagacgatcttcctgggcagctcccccgggtgccagggcctgcccgccgggtgccccgcctgccccagcgccaccggcaagtgcgggccgtgcttctggtcctgcctcggcaccacccgcagcgcccccacgggctgctccagccggcgcaccgcgcggtgcgagctgcgcagcccccagcagcccgtctccgtgccggggcggagcccccgcgccctgtggcggccgccccgccggcgcacccagacccccgtggcctggtgctcctgctccgccagcacggcgcccctcgccggcgtccggctgcgcgccgggctgcccgccccggccggcgcgccccggcccctcggcctgcaggcccagcgccggcgcttcctgcggaacaccaagaagttcatctccctggggaagcacgccaagctcagcctgcaggagctgacctggaagatgagcgtgcgcgactgcgcctggctccgccggtccccc

SEQ ID NO: 1238 - RNA, 1680 nt, synthetic construct
  misc_feature 1..1680: note = BAA23606_variant
  source 1..1680: mol_type = other RNA
atgcgcctgcaccggctccgcgcccggctgagcgccgtggcgtgcggcctgctcctgctgctcgtccgcgggcagggccaggactccgccagccccatccggaccacccacacgggccaggtgctggggtccctggtgcacgtcaagggggccaacgccggcgtgcagaccttcctcggcatcccgttcgccaagccgcccctggggcccctgcgcttcgcgccgcccgagccgcccgagagctggtccggcgtgcgggacgggaccacccaccccgccatgtgcctccaggacctgacggccgtcgagagcgagttcctgtcccagttcaacatgaccttccccagcgactccatgagcgaggactgcctctacctgtccatctacacccccgcccacagccacgagggctccaacctgcccgtgatggtgtggatccacgggggcgcgctcgtcttcggcatggccagcctgtacgacgggtccatgctggccgccctcgagaacgtggtggtcgtgatcatccagtaccgcctgggcgtgctggggttcttcagcaccggcgacaagcacgccacgggcaactgggggtacctcgaccaggtcgcggccctgcggtgggtgcagcagaacatcgcccacttcggcgggaaccccgaccgcgtgaccatcttcggcgagtccgccgggggcaccagcgtctccagcctggtggtgagccccatctcccagggcctcttccacggggccatcatggagagcggcgtcgcgctgctgcccgggctcatcgcctccagcgccgacgtgatctccaccgtggtcgccaacctgagcgcctgcgaccaggtggactccgaggcgctggtcggctgcctccggggcaagagcaaggaggagatcctggccatcaacaagcccttcaagatgatcccgggggtggtggacggcgtcttcctgccccgccacccccaggagctcctggcctccgccgacttccagcccgtgccgagcatcgtgggggtcaacaacaacgagttcggctggctgatccccaaggtgatgcggatctacgacacgcagaaggagatggaccgcgaggcctcccaggcggccctccagaagatgctgaccctgctcatgctgccgcccaccttcggggacctgctccgggaggagtacatcggcgacaacggggacccccagaccctgcaggcccagttccaggagatgatggccgacagcatgttcgtgatccccgcgctgcaggtcgcccacttccagtgctcccgcgcccccgtgtacttctacgagttccagcaccagcccagctggctcaagaacatccggccgccccacatgaaggccgaccacggcgacgagctgcccttcgtgttccgctccttcttcggcgggaactacatcaagttcacggaggaggaggagcagctgagccggaagatgatgaagtactgggccaacttcgcgcgcaacggcaacccgaacggggagggcctgccccactggcccctcttcgaccaggaggagcagtacctgcagctgaacctccagcccgccgtcggccgggccctgaaggcccaccgcctgcagttctggaagaaggccctcccgcagaagatccaggagctggaggagcccgaggagcgccacaccgagctgtga

SEQ ID NO: 1239 - RNA, 1740 nt, synthetic construct
  misc_feature 1..1740: note = AAH65269_variant
  source 1..1740: mol_type = other RNA
atgaacaagctgtacatcggcaacctcagcgagaacgccgccccctccgacctggagagcatcttcaaggacgcgaagatcccggtgtccgggcccttcctggtcaagaccggctacgccttcgtggactgccccgacgagagctgggccctcaaggccatcgaggccctgtccgggaagatcgagctgcacggcaagcccatcgaggtggagcacagcgtcccgaagcgccagcggatccgcaagctccagatccggaacatcccgccccacctccagtgggaggtgctggactccctgctggtgcagtacggggtcgtggagagctgcgagcaggtcaacaccgactccgagacggcggtggtgaacgtgacctacagctccaaggaccaggcccgccaggccctggacaagctcaacggcttccagctggagaacttcaccctgaaggtcgcctacatccccgacgagatggcggcccagcagaaccccctccagcagccccggggccgccgggggctgggccagcgcgggagctcccggcagggcagccccgggtccgtgagcaagcagaagccctgcgacctgccgctccgcctgctggtgcccacccagttcgtcggcgccatcatcggcaaggagggggccacgatccggaacatcaccaagcagacccagtccaagatcgacgtgcaccgcaaggagaacgccggcgcggccgagaagtccatcaccatcctcagcacgcccgaggggaccagcgccgcctgcaagagcatcctggagatcatgcacaaggaggcccaggacatcaagttcaccgaggagatccccctgaagatcctcgcgcacaacaacttcgtgggccggctgatcggcaaggaggggcgcaacctgaagaagatcgagcaggacaccgacacgaagatcaccatctccccgctccaggagctgaccctgtacaaccccgagcggaccatcacggtcaagggcaacgtggagacctgcgccaaggccgaggaggagatcatgaagaagatccgcgagagctacgagaacgacatcgcctccatgaacctccaggcccacctgatccccgggctgaacctcaacgcgctgggcctgttcccgcccaccagcgggatgcccccgcccacctccggcccgcccagcgccatgacgccgccctacccccagttcgagcagtccgagaccgagaccgtgcacctcttcatccccgccctgagcgtcggcgccatcatcgggaagcagggccagcacatcaagcagctgtcccggttcgccggggcgagcatcaagatcgcccccgccgaggcccccgacgcgaaggtgcgcatggtgatcatcaccggcccgcccgaggcccagttcaaggcccaggggcggatctacggcaagatcaaggaggagaacttcgtctcccccaaggaggaggtgaagctcgaggcccacatccgcgtccccagcttcgccgcgggccgggtgatcgggaagggcgggaagacggtgaacgagctgcagaacctgtccagcgccgaggtcgtggtgccccgcgaccagacccccgacgagaacgaccaggtcgtggtgaagatcaccggccacttctacgcctgccaggtcgcccagcgcaagatccaggagatcctcacccaggtgaagcagcaccagcagcagaaggccctgcagtccgggcccccgcagagccggcgcaagtga

SEQ ID NO: 1240 - RNA, 537 nt, synthetic construct
  misc_feature 1..537: note = AAA63207_variant
  source 1..537: mol_type = other RNA
atgcacagctccgccctgctctgctgcctggtgctgctcaccggcgtgcgcgccagccccgggcagggcacccagtccgagaacagctgcacgcacttcccggggaacctgcccaacatgctgcgggacctccgcgacgcgttctcccgggtgaagaccttcttccagatgaaggaccagctggacaacctgctcctgaaggagagcctgctcgaggacttcaagggctacctggggtgccaggccctgtccgagatgatccagttctacctcgaggaggtgatgccccaggccgagaaccaggaccccgacatcaaggcccacgtcaacagcctgggcgagaacctgaagaccctccgcctgcggctgcgccggtgccaccgcttcctcccgtgcgagaacaagtccaaggccgtggagcaggtcaagaacgcgttcaacaagctgcaggagaagggcatctacaaggccatgagcgagttcgacatcttcatcaactacatcgaggcctacatgaccatgaagatccggaactga

SEQ ID NO: 1241 - RNA, 1143 nt, synthetic construct
  misc_feature 1..1143: note = AAB17170_variant
  source 1..1143: mol_type = other RNA
atggccttcgtgtgcctggccatcggctgcctctacaccttcctgatcagcaccacgttcgggtgcacctccagctccgacaccgagatcaaggtcaacccgccccaggacttcgagatcgtggaccccggctacctggggtacctctacctgcagtggcagccgcccctgagcctcgaccacttcaaggagtgcaccgtggagtacgagctgaagtaccgcaacatcggctccgagacgtggaagaccatcatcaccaagaacctgcactacaaggacgggttcgacctcaacaagggcatcgaggcgaagatccacaccctgctgccctggcagtgcacgaacggcagcgaggtccagtccagctgggccgagaccacctactggatcagcccccaggggatccccgagaccaaggtgcaggacatggactgcgtgtactacaactggcagtacctcctgtgctcctggaagcccggcatcggggtcctgctcgacacgaactacaacctgttctactggtacgagggcctggaccacgccctccagtgcgtggactacatcaaggccgacgggcagaacatcggctgccggttcccgtacctggaggcctccgactacaaggacttctacatctgcgtgaacggcagctccgagaacaagcccatccgcagctcctacttcaccttccagctgcagaacatcgtcaagcccctgcccccggtgtacctcaccttcacccgggagagctcctgcgagatcaagctgaagtggagcatccccctcgggcccatccccgcgcgctgcttcgactacgagatcgagatccgggaggacgacacgaccctggtgaccgccaccgtcgagaacgagacgtacaccctgaagaccaccaacgagacgcgccagctctgcttcgtggtgcggtccaaggtcaacatctactgcagcgacgacggcatctggagcgagtggtccgacaagcagtgctgggagggggaggacctgagcaagaagaccctgctccgcttctggctgccgttcggcttcatcctgatcctcgtgatcttcgtgaccggcctgctgctccggaagcccaacacctaccccaagatgatccccgagttcttctgcgacacgtga

SEQ ID NO: 1242 - RNA, 819 nt, synthetic construct
  misc_feature 1..819: note = AAA67527_variant
  source 1..819: mol_type = other RNA
atggacagctacctgctcatgtggggcctgctgaccttcatcatggtgcccgggtgccaggccgagctctgcgacgacgacccgcccgagatcccccacgccaccttcaaggcgatggcctacaaggagggcacgatgctgaactgcgagtgcaagcgcgggttccggcgcatcaagtccggcagcctgtacatgctctgcaccgggaactccagccactccagctgggacaaccagtgccagtgcacctccagcgccacccggaacacgaccaagcaggtcacgccccagccggaggagcagaaggagcgcaagaccaccgagatgcagtcccccatgcagcccgtggaccaggccagcctgcccggccactgccgggagccgccgccctgggagaacgaggccaccgagcgcatctaccacttcgtggtcggccagatggtgtactaccagtgcgtgcaggggtaccgggcgctgcaccgcggccccgccgagtccgtctgcaagatgacccacgggaagacccggtggacgcagccccagctcatctgcaccggcgagatggagaccagccagttccccggggaggagaagccccaggcctcccccgagggccgcccggagagcgagacctcctgcctggtgacgaccaccgacttccagatccagaccgagatggccgcgacgatggagaccagcatcttcaccaccgagtaccaggtggccgtcgccggctgcgtgttcctgctcatctccgtgctgctgctcagcgggctgacgtggcagcggcgccagcggaagtcccgccggaccatctga

SEQ ID NO: 1243 - RNA, 1656 nt, synthetic construct
  misc_feature 1..1656: note = AAA59143_variant
  source 1..1656: mol_type = other RNA
atggccgcccccgcgctgagctggcgcctcccgctgctgatcctcctgctgcccctcgccacctcctgggccagcgccgccgtgaacggcacctcccagttcacgtgcttctacaacagccgggcgaacatctcctgcgtctggagccaggacggggccctgcaggacacctcctgccaggtgcacgcctggcccgaccgccggcgctggaaccagacctgcgagctgctccccgtgagccaggcctcctgggcgtgcaacctgatcctgggcgccccggacagccagaagctcaccacggtcgacatcgtgaccctgcgggtgctgtgccgcgagggggtccggtggcgcgtgatggccatccaggacttcaagcccttcgagaacctccggctgatggcccccatctccctccaggtggtccacgtggagacccaccgctgcaacatcagctgggagatctcccaggccagccactacttcgagcggcacctggagttcgaggcgcgcaccctgtcccccggccacacgtgggaggaggccccgctgctcaccctgaagcagaagcaggagtggatctgcctggagaccctcacccccgacacgcagtacgagttccaggtgcgggtcaagcccctgcagggggagttcaccacctggagcccctggtcccagccgctggccttccgcaccaagcccgccgccctcggcaaggacacgatcccctggctgggccacctcctggtggggctgagcggcgcgttcgggttcatcatcctggtgtacctcctgatcaactgccggaacaccggcccctggctgaagaaggtcctcaagtgcaacaccccggacccctccaagttcttcagccagctgagctccgagcacgggggcgacgtgcagaagtggctgagctcccccttccccagctccagcttctccccgggcgggctcgcccccgagatcagccccctggaggtgctggagcgcgacaaggtcacccagctcctgctgcagcaggacaaggtgcccgagccggcctccctcagctccaaccacagcctgacgtcctgcttcaccaaccagggctacttcttcttccacctccccgacgccctggagatcgaggcctgccaggtgtacttcacctacgacccctacagcgaggaggaccccgacgagggggtcgcgggcgccccgaccggctccagcccccagcccctgcagccgctgtccggggaggacgacgcctactgcacgttccccagccgggacgacctgctcctgttctcccccagcctgctcggcgggcccagcccgccctccaccgcccccggcgggagcggcgccggcgaggagcgcatgcccccgtccctgcaggagcgggtgccccgcgactgggacccccagcccctggggccgcccacccccggcgtgcccgacctcgtcgacttccagccgccgcccgagctggtgctgcgggaggcgggggaggaggtccccgacgccggcccccgcgagggggtgagcttcccctggtcccgcccgcccggccagggcgagttccgggccctcaacgcccgcctgcccctgaacaccgacgcgtacctcagcctgcaggagctgcaggggcaggaccccacgcacctcgtgtga

SEQ ID NO: 1244 - RNA, 1110 nt, synthetic construct
  misc_feature 1..1110: note = AAA59145_variant
  source 1..1110: mol_type = other RNA
atgctgaagcccagcctcccgttcacctccctgctgttcctccagctgcccctgctcggcgtggggctgaacaccacgatcctgacccccaacggcaacgaggacaccaccgccgacttcttcctcacgaccatgcccaccgacagcctgtccgtcagcaccctgccgctccccgaggtgcagtgcttcgtgttcaacgtcgagtacatgaactgcacgtggaactccagctccgagccccagcccaccaacctgaccctgcactactggtacaagaacagcgacaacgacaaggtgcagaagtgctcccactacctcttcagcgaggagatcacctccgggtgccagctgcagaagaaggagatccacctgtaccagacgttcgtggtccagctccaggacccgcgcgagccccggcgccaggccacccagatgctgaagctgcagaacctcgtgatcccctgggcgcccgagaacctgaccctgcacaagctcagcgagtcccagctggagctgaactggaacaaccggttcctcaaccactgcctggagcacctggtgcagtaccgcaccgactgggaccacagctggacggagcagtccgtcgactaccggcacaagttcagcctcccgtccgtggacggccagaagcgctacaccttccgggtgcgcagccggttcaaccccctgtgcgggtccgcccagcactggagcgagtggagccaccccatccactggggctccaacaccagcaaggagaaccccttcctgttcgccctcgaggccgtcgtgatctccgtgggcagcatggggctgatcatctccctgctctgcgtctacttctggctggagcgcaccatgccgcggatccccacgctgaagaacctcgaggacctggtgaccgagtaccacggcaacttcagcgcctggtccggggtgagcaagggcctggcggagtccctccagcccgactacagcgagcgcctgtgcctggtctccgagatcccgcccaagggcggggccctcggcgaggggcccggcgccagcccctgcaaccagcactccccctactgggccccgccctgctacaccctgaagcccgagacctga

SEQ ID NO: 1245 - RNA, 405 nt, synthetic construct
  misc_feature 1..405: note = AAA74469_variant
  source 1..405: mol_type = other RNA
atgcgcatgctgctccacctgagcctgctcgccctgggcgccgcgtacgtgtacgccatccccaccgagatcccgacctccgccctggtcaaggagacgctcgccctgctgagcacccaccggaccctcctgatcgccaacgagaccctgcgcatccccgtgcccgtgcacaagaaccaccagctctgcacggaggagatcttccaggggatcggcaccctggagtcccagaccgtccagggcgggaccgtggagcggctgttcaagaacctcagcctgatcaagaagtacatcgacgggcagaagaagaagtgcggcgaggagcgccggcgcgtgaaccagttcctggactacctccaggagttcctgggcgtcatgaacacggagtggatcatcgagtcctga

SEQ ID NO: 1246 - RNA, 555 nt, synthetic construct
  misc_feature 1..555: note = AAH06487_variant
  source 1..555: mol_type = other RNA
atggtgcgcaagctgaagttccacgagcagaagctcctgaagcaggtcgacttcctgaactgggaggtgaccgaccacaacctccacgagctgcgggtgctgcgccggtaccgcctccagcggcgcgaggactacacccggtacaaccagctgagccgcgccgtccgggagctggcccgccggctccgcgacctgcccgagcgggaccagttccgcgtgcgggcgtccgccgccctgctcgacaagctgtacgccctgggcctcgtgccgacgcgcgggagcctggagctgtgcgacttcgtcaccgcctccagcttctgccggcgccggctccccaccgtgctgctgaagctccgcatggcgcagcacctccaggccgccgtggccttcgtcgagcagggccacgtgcgggtggggcccgacgtcgtgaccgaccccgcgttcctggtgacgcgctccatggaggacttcgtcacctgggtggacagctccaagatcaagcgccacgtgctggagtacaacgaggagcgggacgacttcgacctggaggcctga

SEQ ID NO: 1247 - RNA, 3150 nt, synthetic construct
  misc_feature 1..3150: note = AAH08786_variant
  source 1..3150: mol_type = other RNA
atgggcagccgcacccccgagtccccgctgcacgccgtgcagctccggtgggggccccgccggcgcccccccctgctgccgctcctgctgctcctgctgcccccccccccgcgggtcggcgggttcaacctcgacgccgaggcgcccgccgtgctgagcggcccccccgggtccttcttcggcttcagcgtggagttctaccgcccgggcaccgacggggtctccgtgctggtgggcgcccccaaggccaacacgagccagcccggggtcctccagggcggggccgtgtacctgtgcccctggggcgcgtccccgacccagtgcacccccatcgagttcgacagcaagggctcccggctgctcgagagctccctgagctccagcgagggggaggagcccgtggagtacaagtccctgcagtggttcggcgccaccgtccgcgcccacgggagctccatcctcgcctgcgcgcccctgtacagctggcggacggagaaggagccgctgtccgaccccgtgggcacctgctacctcagcaccgacaacttcacccgcatcctggagtacgccccctgccggagcgacttctcctgggccgccggccaggggtactgccagggcgggttcagcgccgagttcacgaagaccggccgcgtggtcctggggggccccggctcctacttctggcaggggcagatcctcagcgcgacccaggagcagatcgccgagtcctactacccggagtacctgatcaacctggtgcagggccagctccagacccggcaggccagctccatctacgacgacagctacctggggtactccgtggccgtcggcgagttcagcggggacgacacggaggacttcgtggccggcgtgcccaagggcaacctgacctacgggtacgtcaccatcctcaacggctccgacatccgcagcctgtacaacttctccggggagcagatggcgagctacttcggctacgccgtggccgccaccgacgtgaacggggacggcctggacgacctcctggtcggcgcccccctgctcatggaccggacgcccgacgggcgcccgcaggaggtgggccgggtgtacgtctacctgcagcaccccgcggggatcgagcccaccccgaccctgaccctcacgggccacgacgagttcggccgcttcgggtccagcctgacccccctgggcgacctcgaccaggacgggtacaacgacgtggccatcggcgcccccttcgggggcgagacccagcagggcgtcgtgttcgtgttccccgggggcccggggggcctggggtccaagcccagccaggtcctgcagcccctctgggccgcctcccacacccccgacttcttcggcagcgcgctgcggggcgggcgcgacctggacggcaacgggtacccggacctcatcgtgggcagcttcggggtggacaaggccgtcgtgtaccggggccgccccatcgtgtccgccagcgcctccctgacgatcttccccgcgatgttcaaccccgaggagcgcagctgctccctggagggcaacccggtcgcctgcatcaacctgagcttctgcctcaacgcctccgggaagcacgtggccgacagcatcggcttcaccgtggagctgcagctggactggcagaagcagaaggggggcgtccggcgcgccctcttcctggcgtcccggcaggccaccctgacccagacgctcctgatccagaacggggcccgcgaggactgccgggagatgaagatctacctgcgcaacgagagcgagttccgggacaagctctcccccatccacatcgccctgaacttcagcctggacccccaggcccccgtggactcccacggcctccgcccggcgctgcactaccagagcaagtcccggatcgaggacaaggcccagatcctgctcgactgcggcgaggacaacatctgcgtgcccgacctgcagctggaggtcttcggggagcagaaccacgtgtacctcggcgacaagaacgccctgaacctgaccttccacgcccagaacgtgggggagggcggcgcctacgaggcggagctccgcgtcaccgccccccccgaggccgagtacagcgggctggtgcggcacccgggcaacttctccagcctgagctgcgactacttcgccgtgaaccagtcccgcctcctggtctgcgacctggggaaccccatgaaggcgggcgccagcctctgggggggcctgcggttcaccgtgccccacctgcgcgacacgaagaagaccatccagttcgacttccagatcctctccaagaacctgaacaacagccagtccgacgtggtcagcttccggctgtccgtggaggcccaggcccaggtgaccctcaacggcgtcagcaagcccgaggccgtgctgttcccggtgtccgactggcacccccgcgaccagccccagaaggaggaggacctggggccggcggtccaccacgtgtacgagctcatcaaccagggccccagctccatcagccagggggtgctggagctgtcctgcccccaggccctcgagggccagcagctgctgtacgtcacccgggtgacggggctcaactgcaccaccaaccaccccatcaacccgaagggcctggagctggaccccgagggcagcctccaccaccagcagaagcgcgaggccccctcccggagctccgccagctccgggccccagatcctgaagtgcccggaggccgagtgcttccgcctgcgctgcgagctcggccccctgcaccagcaggagagccagagcctgcagctccacttccgggtgtgggcgaagaccttcctgcagcgcgagcaccagcccttctccctgcagtgcgaggccgtctacaaggccctcaagatgccctaccggatcctgccgcgccagctgccccagaaggagcggcaggtggccaccgccgtgcagtggacgaaggcggaggggagctacggcgtccccctctggatcatcatcctggccatcctgttcgggctcctgctgctcggcctgctgatctacatcctctacaagctgggcttcttcaagcgctccctgccctacgggaccgccatggagaaggcccagctcaagccgcccgcgaccagcgacgcctga

SEQ ID NO: 1248 - RNA, 2397 nt, synthetic construct
  misc_feature 1..2397: note = AAH20057_variant
  source 1..2397: mol_type = other RNA
atgaacctgcagcccatcttctggatcggcctcatcagctccgtgtgctgcgtcttcgcccagaccgacgagaaccgctgcctgaaggccaacgccaagagctgcggggagtgcatccaggcgggcccgaactgcgggtggtgcaccaactccacgttcctgcaggagggcatgcccaccagcgcccggtgcgacgacctcgaggccctgaagaagaaggggtgcccgcccgacgacatcgagaacccccgcggctccaaggacatcaagaagaacaagaacgtgaccaaccggagcaagggcaccgccgagaagctgaagcccgaggacatcacgcagatccagccccagcagctcgtgctgcgcctgcggtccggggagccccagaccttcaccctcaagttcaagcgcgcggaggactacccgatcgacctgtactacctgatggacctcagctactccatgaaggacgacctggagaacgtcaagagcctgggcaccgacctcatgaacgagatgcggcgcatcacgtccgacttccggatcgggttcggcagcttcgtggagaagaccgtgatgccctacatctccaccacccccgccaagctgcgcaacccctgcacgagcgagcagaactgcacctccccgttcagctacaagaacgtcctgtccctcaccaacaagggggaggtgttcaacgagctggtgggcaagcagcggatcagcggcaacctggactcccccgagggcgggttcgacgccatcatgcaggtcgccgtgtgcgggagcctcatcggctggcgcaacgtgacccggctgctggtcttcagcacggacgcgggcttccacttcgccggggacggcaagctcgggggcatcgtgctgcccaacgacgggcagtgccacctggagaacaacatgtacaccatgtcccactactacgactaccccagcatcgcccacctcgtgcagaagctgtccgagaacaacatccagaccatcttcgccgtcaccgaggagttccagccggtgtacaaggagctgaagaacctcatccccaagagcgccgtgggcacgctgtccgcgaacagctccaacgtcatccagctgatcatcgacgcctacaacagcctctccagcgaggtgatcctggagaacggcaagctgtccgagggggtgaccatcagctacaagtcctactgcaagaacggcgtcaacgggaccggcgagaacgggcgcaagtgcagcaacatctccatcggcgacgaggtgcagttcgagatcagcatcacctccaacaagtgccccaagaaggacagcgactccttcaagatccggcccctcggcttcacggaggaggtggaggtcatcctgcagtacatctgcgagtgcgagtgccagagcgaggggatcccggagagccccaagtgccacgagggcaacgggaccttcgagtgcggcgcctgccgctgcaacgaggggcgggtgggccgccactgcgagtgctccaccgacgaggtcaacagcgaggacatggacgcctactgccggaaggagaactccagcgagatctgctccaacaacggcgagtgcgtgtgcgggcagtgcgtgtgccgcaagcgggacaacaccaacgagatctacagcggcaagttctgcgagtgcgacaacttcaactgcgaccgctccaacgggctgatctgcggcggcaacggggtctgcaagtgccgcgtgtgcgagtgcaaccccaactacacgggcagcgcctgcgactgctccctcgacaccagcacgtgcgaggcgtccaacgggcagatctgcaacggccgggggatctgcgagtgcggcgtgtgcaagtgcaccgaccccaagttccagggccagacctgcgagatgtgccagacctgcctgggggtctgcgccgagcacaaggagtgcgtgcagtgccgcgccttcaacaagggcgagaagaaggacacgtgcacccaggagtgcagctacttcaacatcaccaaggtggagtcccgggacaagctgccgcagcccgtccagcccgaccccgtgagccactgcaaggagaaggacgtggacgactgctggttctacttcacctactccgtcaacgggaacaacgaggtgatggtgcacgtcgtggagaacccggagtgccccaccggccccgacatcatcccgatcgtggccggggtcgtggccggcatcgtgctcatcggcctggcgctgctcctgatctggaagctgctcatgatcatccacgaccgccgggagttcgccaagttcgagaaggagaagatgaacgccaagtgggacaccggggagaaccccatctacaagagcgccgtcaccacggtggtgaaccccaagtacgagggcaagtga

SEQ ID NO: 1249 - RNA, 2367 nt, synthetic construct
  misc_feature 1..2367: note = AAA36122_variant
  source 1..2367: mol_type = other RNA
atgggcatcgagctgctctgcctgttcttcctgttcctcgggcgcaacgaccacgtgcagggcgggtgcgccctgggcggggccgagacctgcgaggactgcctgctcatcggcccccagtgcgcgtggtgcgcccaggagaacttcacccacccgagcggcgtcggggagcggtgcgacacgcccgccaacctgctggccaagggctgccagctcaacttcatcgagaaccccgtgtcccaggtggagatcctgaagaacaagcccctgagcgtcgggcgccagaagaactccagcgacatcgtgcagatcgccccgcagtccctcatcctgaagctgcggcccggcggggcgcagaccctccaggtgcacgtccgccagaccgaggactaccccgtggacctgtactacctgatggacctcagcgcctccatggacgacgacctgaacaccatcaaggagctgggcagccggctctccaaggagatgagcaagctgacgtccaacttccgcctgggcttcgggagcttcgtggagaagcccgtctccccgttcgtgaagaccacccccgaggagatcgccaacccctgcagctccatcccctacttctgcctcccgaccttcggcttcaagcacatcctgcccctgacgaacgacgccgagcggttcaacgagatcgtgaagaaccagaagatcagcgcgaacatcgacacccccgagggcgggttcgacgccatcatgcaggccgccgtctgcaaggagaagatcggctggcgcaacgactccctccacctcctggtgttcgtgagcgacgccgactcccacttcgggatggacagcaagctggcgggcatcgtcatccccaacgacgggctgtgccacctggacagcaagaacgagtactccatgagcaccgtgctcgagtacccgaccatcggccagctgatcgacaagctggtgcagaacaacgtcctcctgatcttcgccgtgacgcaggagcaggtccacctgtacgagaactacgccaagctcatccccggggccaccgtgggcctgctgcagaaggactccggcaacatcctccagctgatcatcagcgcctacgaggagctgcggtccgaggtggagctcgaggtgctgggggacaccgagggcctgaacctcagcttcaccgcgatctgcaacaacgggacgctgttccagcaccagaagaagtgctcccacatgaaggtcggcgacaccgccagcttctccgtgaccgtcaacatcccccactgcgagcgccggagccgccacatcatcatcaagcccgtggggctgggcgacgccctggagctcctggtgtccccggagtgcaactgcgactgccagaaggaggtcgaggtgaacagctccaagtgccaccacggcaacgggagcttccagtgcggcgtgtgcgcctgccaccccgggcacatgggcccccggtgcgagtgcggggaggacatgctgtccaccgacagctgcaaggaggcccccgaccacccgtcctgcagcggccgcggcgactgctactgcgggcagtgcatctgccacctctccccctacggcaacatctacgggccctactgccagtgcgacaacttcagctgcgtccggcacaagggcctgctgtgcggcgggaacggcgactgcgactgcggggagtgcgtgtgccgcagcggctggacgggggagtactgcaactgcaccacctccaccgacagctgcgtgtccgaggacggcgtcctctgcagcggccgcggggactgcgtgtgcggcaagtgcgtgtgcacgaaccccggggcgtccggcccgacctgcgagcggtgcccgacctgcggggacccctgcaacagcaagcggtcctgcatcgagtgccacctgagcgccgccggccaggcccgcgaggagtgcgtcgacaagtgcaagctggccggcgcgaccatctccgaggaggaggacttcagcaaggacgggtccgtgagctgctccctccagggcgagaacgagtgcctgatcacgttcctgatcaccaccgacaacgaggggaagaccatcatccacagcatcaacgagaaggactgccccaagccgcccaacatccccatgatcatgctcggcgtgtccctggccatcctgctcatcggggtcgtgctgctgtgcatctggaagctcctggtgagcttccacgaccggaaggaggtcgccaagttcgaggccgagcgctccaaggcgaagtggcagacgggcaccaaccccctgtaccgcggcagcaccagcaccttcaagaacgtgacgtacaagcaccgggagaagcagaaggtggacctctccaccgactgctga

SEQ ID NO: 1250 - RNA, 786 nt, synthetic construct
  misc_feature 1..786: note = EAW71937_variant
  source 1..786: mol_type = other RNA
atgtgggacctggtgctcagcatcgccctgtccgtcggctgcaccggggccgtgcccctgatccagagccgcatcgtgggcgggtgggagtgcgagaagcactcccagccgtggcaggtcgcggtgtacagccacggctgggcccactgcgggggcgtgctcgtccacccccagtgggtgctgaccgccgcccactgcctgaagaagaactcccaggtgtggctcggccggcacaacctgttcgagcccgaggacacggggcagcgcgtccccgtgagccactccttcccgcaccccctgtacaacatgagcctcctgaagcaccagtccctgcggcccgacgaggacagctcccacgacctcatgctgctgcgcctcagcgagcccgccaagatcaccgacgtggtcaaggtgctgggcctgccgacccaggagcccgcgctcgggaccacgtgctacgcctccggctgggggagcatcgagcccgaggagttcctgcggccccgctccctgcagtgcgtgagcctccacctcctgtccaacgacatgtgcgcccgggcctacagcgagaaggtcaccgagttcatgctgtgcgcgggcctgtggaccggcgggaaggacacgtgcggcggggactccggcggcccgctggtgtgcaacggggtgctccagggcatcaccagctgggggcccgagccctgcgccctgcccgagaagccggccgtctacaccaaggtggtgcactaccgcaagtggatcaaggacaccatcgccgccaacccctga

SEQ ID NO: 1251 - RNA, 672 nt, synthetic construct
  misc_feature 1..672: note = EAW71938_variant
  source 1..672: mol_type = other RNA
atgtgggacctggtgctcagcatcgccctgtccgtcggctgcaccggggccgtgcccctgatccagagccgcatcgtgggcgggtgggagtgcgagaagcactcccagccgtggcaggtcgcggtgtacagccacggctgggcccactgcgggggcgtgctcgtccacccccagtgggtgctgaccgccgcccactgcctgaagaagaactcccaggtgtggctcggccggcacaacctgttcgagcccgaggacaccgggcagcgcgtccccgtgagccactccttcccgcaccccctgtacaacatgagcctcctgaagcaccagtccctgcggcccgacgaggacagctcccacgacctcatgctgctgcgcctcagcgagcccgccaagatcaccgacgtggtcaaggtgctgggcctgccgacccaggagcccgcgctcgggaccacgtgctacgcctccggctgggggagcatcgagcccgaggagttcctgcggccccgctccctgcagtgcgtgagcctccacctcctgtccaacgacatgtgcgcccgggcctacagcgagaaggtcaccgagttcatgctgtgcgcgggcctgtggaccggcgggaaggacacgtgcggcgtgtcccacccgtacagccagcacctggaggggaagggctga

SEQ ID NO: 1252 - RNA, 189 nt, synthetic construct
  misc_feature 1..189: note = BAF98781_variant
  source 1..189: mol_type = other RNA
atgagcctgctcaagcaccagtccctgcgccccgacgaggacagctcccacgacctgatgctcctgcggctgagcgagccggccaagatcaccgacgtggtcaaggtgctcggcctgcccacccaggagcccgccctggggacgacctgctacgcgtccggctgggggagcatcgagcccgaggagtga

SEQ ID NO: 1253 - RNA, 735 nt, synthetic construct
  misc_feature 1..735: note = BAG62239_variant
  source 1..735: mol_type = other RNA
atgggcaccctgtgggggtgccccggcgccccgcccgtgggggcccacagctgccccctccccaaggaggtctcccgcaccctgggcagcggggagggcatggcggtgtcccaccggaacaacagcggcatgctgccgcccgggtccctcctgcgcaacagccaggtgtggctgggccggcacaacctcttcgagcccgaggacacggggcgccgggtccccgtgtcccacagcttcccgcaccccctgtacaacatgtccctgctcaagcaccagagcctgcgccccgacgaggactccagccacgacctgatgctcctgcggctgtccgagcccgccaagatcaccgacgtggtcaaggtgctcggcctgccgacccaggagcccgccctggggaccacgtgctacgccagcggctggggctccatcgagcccgaggagttcctccgcccccggagcctgcagtgcgtgtccctgcacctcctgagcaacgacatgtgcgcccgcgcgtactccgagaaggtcaccgagttcatgctgtgcgccgggctctggaccggcgggaaggacacgtgcggcggcgacagcgggggcccgctggtgtgcaacggggtgctgcagggcatcaccagctgggggcccgagccctgcgccctccccgagaagccggccgtctacaccaaggtggtgcactaccggaagtggatcaaggacaccatcgcggccaacccctga

SEQ ID NO: 1254 - RNA, 786 nt, synthetic construct; identical to SEQ ID NO: 1250
  misc_feature 1..786: note = AAA74454_variant
  source 1..786: mol_type = other RNA

SEQ ID NO: 1255 - RNA, 150 nt, synthetic construct
  misc_feature 1..150: note = AAR10469_variant
  source 1..150: mol_type = other RNA
atgtgggacctggtgctcagcatcgccctgtccgtcggctgcaccgggatcgcccgcagcggctgggtggggaccacgtgcctgtccctcaagacccaggcgcggggcagcctgtccgccaccgccagccacacccgctccacgatctga

SEQ ID NO: 1256 - RNA, 543 nt, synthetic construct
  misc_feature 1..543: note = AAR10468_variant
  source 1..543: mol_type = other RNA
atgtgggacctggtgctcagcatcgccctgtccgtcggctgcaccggggccgtgcccctgatccagagccgcatcgtgggcgggtgggagtgcgagaagcactcccagccgtggcaggtcgcggtgtacagccacggctgggcccactgcgggggcgtgctcgtccacccccagtgggtgctgaccgccgcccactgcctgaagaagaactcccaggtgtggctcggccggcacaacctgttcgagcccgaggacacggggcagcgcgtccccgtgagccactccttcccgcaccccctgtacaacatgagcctcctgaagcaccagtccctgcggcccgacgaggacagctcccacgacctcatgctgctgcgcctcagcgagcccgccaagatcaccgacgtggtcaaggtgctgggcctgccgacccaggagcccgcgctcgggaccacgtgctacgcctccggctgggggagcatcgagcccgaggagtgcacccccggcccggacggcgtggccgggtcccccgacgcctgggtctga

SEQ ID NO: 1257 - RNA, 765 nt, synthetic construct
  misc_feature 1..765: note = EAW71943_variant
  source 1..765: mol_type = other RNA
atggccaccgccggcaacccctgggggtggttcctgggctacctcatcctgggggtggcgggcagcctggtctccgggagctgctcccagatcatcaacggcgaggactgcagcccgcactcccagccctggcaggccgccctcgtgatggagaacgagctgttctgcagcggcgtgctggtccacccccagtgggtgctctccgccgcccactgcttccagaacagctacaccatcgggctgggcctgcactccctcgaggcggaccaggagcccgggagccagatggtggaggcctccctgagcgtccgccacccggagtacaaccggcccctgctcgccaacgacctgatgctgatcaagctcgacgagtccgtgagcgagtccgacacgatccgcagcatctccatcgccagccagtgccccaccgcgggcaactcctgcctggtgagcgggtggggcctgctcgccaacggccggatgcccaccgtcctgcagtgcgtgaacgtgagcgtcgtgtccgaggaggtgtgcagcaagctgtacgacccgctctaccacccctccatgttctgcgccgggggcgggcaggaccagaaggacagctgcaacggcgactccggcgggcccctgatctgcaacggctacctgcaggggctcgtcagcttcggcaaggccccctgcggccaggtgggggtgccgggcgtctacaccaacctgtgcaagttcacggagtggatcgagaagaccgtgcaggcctcctga

SEQ ID NO: 1258 - RNA, 228 nt, synthetic construct
  misc_feature 1..228: note = AAX30051_variant
  source 1..228: mol_type = other RNA
atggccaccgccggcaacccctgggggtggttcctgggctacctcatcctgggggtggcgggcagcctggtctccgggagctgctcccagatcatcaacggcgaggactgcagcccgcactcccagccctggcaggccgccctcgtgatggagaacgagctgttctgcagcggcgtgctggtccacccccagtgggtgctctccgccgcccactgcttccagaagtga

SEQ ID NO: 1259 - RNA, 588 nt, synthetic construct
  misc_feature 1..588: note = AAL14782_variant
  source 1..588: mol_type = other RNA
atggccaccgccggcaacccctgggggtggttcctgggctacctcatcctgggggtggcgggcagcctggtctccgggagctgctcccagatcatcaacggcgaggactgcagcccgcactcccagccctggcaggccgccctcgtgatggagaacgagctgttctgcagcggcgtgctggtccacccccagtgggtgctctccgccgcccactgcttccagaacagctacaccatcgggctgggcctgcactccctcgaggcggaccaggagcccgggagccagatggtggaggcctccctgagcgtccgccacccggagtacaaccggcccctgctcgccaacgacctgatgctgatcaagctcgacgagtccgtgagcgagtccgacacgatccgcagcatctccatcgccagccagtgccccaccgcgggcaactcctgcctggtgagcgggtggggcctgctcgccaacggcgagctgaccggggtctgcctgcccagctcccggcgcagctccgcccagagccggggcctcacccagtccagcgcctcccaggccgagtgcctgccgtgctgcagcgcgtga

SEQ ID NO: 1260 - RNA, 480 nt, synthetic construct
  misc_feature 1..480: note = AAL14781_variant
  source 1..480: mol_type = other RNA
atggccaccgccggcaacccctgggggtggttcctgggctacctcatcctgggggtggcgggcagcctggtctccgggagctgctcccagatcatcaacggcgaggactgcagcccgcactcccagccctggcaggccgccctcgtgatggagaacgagctgttctgcagcggcgtgctggtccacccccagtgggtgctctccgccgcccactgcttccagaacagctacaccatcgggctgggcctgcactccctcgaggcggaccaggagcccgggagccagatggtggaggcctccctgagcgtccgccacccggagtacaaccggcccctgctcgccaacgacctgatgctgatcaagctcgacgagtccgtgagcgagtccgacacgatccgcagcatctccatcgccagccagtgccccaccgcgggcaactcctgcctggtgagcgggtggggcctgctcgccaacggctga

SEQ ID NO: 1261 - RNA, 765 nt, synthetic construct
  misc_feature 1..765: note = AAD21580_variant
  source 1..765: mol_type = other RNA
atggccaccgccggcaacccctgggggtggttcctgggctacctcatcctgggggtggcgggcagcctggtctccgggagctgctcccagatcatcaacggcgaggactgcagcccgcactcccagccctggcaggccgccctcgtgatggagaacgagctgttctgcagcggcgtgctggtccacccccagtgggtgctctccgccgcccactgcttccagaacagctacaccatcgggctgggcctgcactccctcgaggcggaccaggagcccgggagccagatggtggaggcctccctgagcgtccgccacccggagtacaaccggcccctgctcgccaacgacctgatgctgatcaagctcgacgagtccgtgagcgagtccgacacgatccgcagcatctccatcgccagccagtgccccaccgcgggcaactcctgcctggtgagcgggtggggcctgctcgccaacggccggatgcccaccgtcctgcagtgcgtgaacgtgagcgtcgtgtccgaggaggtgtgcagcaagctgtacgacccgctctaccacccctccatgttctgcgccgggggcgggcacgaccagaaggacagctgcaacggcgactccggcgggcccctgatctgcaacggctacctgcaggggctcgtcagcttcggcaaggccccctgcggccaggtgggggtgccgggcgtctacaccaacctgtgcaagttcacggagtggatcgagaagaccgtgcaggcctcctga

SEQ ID NO: 1262 - RNA, 2673 nt, synthetic construct
  misc_feature 1..2673: note = AAC83230_variant
  source 1..2673: mol_type = other RNA
atgagccagggcatcctgtccccgcccgccgggctcctgagcgacgacgacgtggtcgtgtcccccatgttcgagagcaccgccgcggacctgggctccgtggtccgcaagaacctcctgagcgactgctccgtggtgagcacctccctggaggacaagcagcaggtccccagcgaggactccatggagaaggtgaaggtgtacctccgggtccgccccctgctgccgagcgagctcgagcggcaggaggaccaggggtgcgtgcgcatcgagaacgtggagacgctggtcctgcaggcccccaaggactccttcgccctcaagagcaacgagcggggcatcgggcaggccacccaccgcttcaccttctcccagatcttcggccccgaggtgggccaggccagcttcttcaacctgaccgtgaaggagatggtcaaggacgtgctgaaggggcagaactggctcatctacacgtacggcgtgaccaactccgggaagacccacaccatccagggcacgatcaaggacgggggcatcctgccccggagcctggcgctcatcttcaactccctgcagggccagctgcacccgacccccgacctcaagcccctgctgagcaacgaggtcatctggctcgacagcaagcagatccgccaggaggagatgaagaagctgtccctgctcaacgggggcctgcaggaggaggagctgagcacctccctcaagcggagcgtgtacatcgagtcccgcatcgggaccagcacgtccttcgacagcggcatcgccggcctgtccagcatctcccagtgcaccagctccagccagctggacgagacctcccaccggtgggcccagcccgacaccgccccgctccccgtgcccgcgaacatccgcttcagcatctggatctccttcttcgagatctacaacgagctgctgtacgacctcctggagcccccgagccagcagcggaagcgccagacgctgcggctctgcgaggaccagaacgggaacccctacgtcaaggacctgaactggatccacgtgcaggacgccgaggaggcctggaagctgctcaaggtgggccgcaagaaccagtccttcgccagcacccacctgaaccagaacagctcccggagccactccatcttcagcatccgcatcctgcacctccagggggagggcgacatcgtccccaagatctccgagctgagcctgtgcgacctcgccgggtccgagcggtgcaaggaccagaagtccggcgagcgcctgaaggaggcgggcaacatcaacacctccctgcacaccctggggcggtgcatcgccgccctccgccagaaccagcagaaccgcagcaagcagaacctggtgcccttccgggactccaagctgacgcgcgtcttccagggcttcttcaccgggcggggccgcagctgcatgatcgtgaacgtgaacccgtgcgcctccacctacgacgagaccctccacgtcgccaagttcagcgcgatcgcctcccagctggtgcacgccccgcccatgcagctggggttccccagcctccactccttcatcaaggagcacagcctccaggtgagcccctccctggagaagggcgccaaggccgacacgggcctggacgacgacatcgagaacgaggcggacatcagcatgtacgggaaggaggagctgctgcaggtcgtggaggccatgaagaccctcctgctgaaggagcggcaggagaagctccagctggagatgcacctccgcgacgagatctgcaacgagatggtggagcagatgcagcagcgggagcagtggtgctccgagcacctggacacccagaaggagctgctggaggagatgtacgaggagaagctcaacatcctgaaggagagcctgacctccttctaccaggaggagatccaggagcgcgacgagaagatcgaggagctcgaggccctgctgcaggaggcccggcagcagagcgtcgcccaccagcagtccggcagcgagctcgcgctgcgccggtcccagcgcctggccgccagcgcctccacgcagcagctccaggaggtgaaggcgaagctgcagcagtgcaaggccgagctgaacagcaccaccgaggagctccacaagtaccagaagatgctggagcccccgccctccgccaagcccttcaccatcgacgtggacaagaagctggaggaggggcagaagaacatccggctcctgcgcacggagctgcagaagctcggcgagagcctgcagtccgccgagcgggcctgctgccacagcaccggggcgggcaagctgcgccaggccctcacgacctgcgacgacatcctgatcaagcaggaccagaccctggccgagctccagaacaacatggtcctggtgaagctggacctccggaagaaggccgcctgcatcgcggagcagtaccacaccgtgctgaagctgcagggccaggtctccgccaagaagcgcctcgggaccaaccaggagaaccagcagcccaaccagcagcccccgggcaagaagcccttcctgcggaacctgctcccccgcaccccgacctgccagagctccacggactgcagcccctacgcccgcatcctgcggagccgccggagccccctgctcaagagcgggcccttcggcaagaagtactga

SEQ ID NO: 1263 - RNA, 1113 nt, synthetic construct
  misc_feature 1..1113: note = AAH34621_variant
  source 1..1113: mol_type = other RNA
atggccatcaccctggaggaggccccctggctcggctggctgctggtgaaggcgctcatgcgcttcgccttcatggtcgtgaacaacctggtggccatcccgagctacatctgctacgtcatcatcctgcagcccctccgggtgctggactccaagcgcttctggtacatcgaggggatcatgtacaagtggctgctcggcatggtggccagctgggggtggtacgccggctacaccgtcatggagtggggcgaggacatcaaggcggtgtccaaggacgaggccgtgatgctggtcaaccaccaggccacgggggacgtgtgcaccctgatgatgtgcctccaggacaagggcctggtggtcgcccagatgatgtggctgatggaccacatcttcaagtacaccaacttcgggatcgtgagcctcgtgcacggcgacttcttcatccggcaggggcgctcctaccgggaccagcagctgctgctcctgaagaagcacctggagaacaactaccgcagccgggaccgcaagtggatcgtcctcttccccgagggcgggttcctgcggaagcgccgggagacctcccaggcgttcgccaagaagaacaacctgcccttcctcacgaacgtgaccctgccgcgcagcggcgccaccaagatcatcctgaacgccctcgtggcccagcagaagaacggctcccccgccgggggcgacgcgaaggagctggacagcaagtccaaggggctgcagtggatcatcgacaccacgatcgcctaccccaaggccgagcccatcgacatccagacctggatcctcggctaccggaagccgaccgtcacccacgtgcactaccgcatcttccccatcaaggacgtgcccctggagacggacgacctgaccacctggctctaccagcggttcgtcgagaaggaggacctgctgagccacttctacgagaccggcgccttcccgccctccaaggggcacaaggaggcggtgagccgcgagatgacgctctccaacctgtggatcttcctgatccagagcttcgccttcctctccggctacatgtggtacaacatcatccagtacttctaccactgcctgttctga

SEQ ID NO: 1264 - RNA, 2178 nt, synthetic construct
  misc_feature 1..2178: note = AAH14924_variant
  source 1..2178: mol_type = other RNA
atggccatggacagctccctgcaggcccgcctcttccccggcctggcgatcaagatccagcggagcaacgggctgatccactccgccaacgtgcgcaccgtcaacctcgagaagtcctgcgtgagcgtggagtgggccgagggcggggccaccaagggcaaggagatcgacttcgacgacgtcgccgcgatcaacccggagctgctgcagctcctgcccctgcaccccaaggacaacctccccctgcaggagaacgtgacgatccagaagcagaagcggcgcagcgtgaactccaagatcccggcccccaaggagagcctgcggtcccgcagcacccggatgtccaccgtcagcgagctccgcatcaccgcccaggagaacgacatggaggtggagctgcccgccgcggccaactcccggaagcagttcagcgtgcccccggcccccacgcgcccctcctgccccgccgtcgccgagatcccgctgcggatggtgagcgaggagatggaggagcaggtccactccatccgcgggagctccagcgcgaaccccgtgaacagcgtgcggcgcaagtcctgcctcgtgaaggaggtcgagaagatgaagaacaagcgggaggagaagaaggcccagaacagcgagatgcgcatgaagcgggcccaggagtacgactccagcttccccaactgggagttcgcccgcatgatcaaggagttccgggccaccctggagtgccaccccctgaccatgaccgacccgatcgaggagcaccgcatctgcgtgtgcgtgcggaagcgccccctcaacaagcaggagctggcgaagaaggagatcgacgtcatctccatccccagcaagtgcctgctcctggtgcacgagcccaagctgaaggtggacctcacgaagtacctggagaaccaggccttctgcttcgacttcgccttcgacgagaccgcctccaacgaggtcgtgtaccgcttcaccgcccggccgctggtgcagaccatcttcgagggcggcaaggcgacgtgcttcgcctacgggcagaccggcagcgggaagacccacaccatgggcggggacctctccggcaaggcccagaacgccagcaagggcatctacgccatggcgtcccgcgacgtcttcctgctgaagaaccagccctgctaccggaagctcgggctggaggtgtacgtcacgttcttcgagatctacaacggcaagctgttcgacctcctgaacaagaaggccaagctgcgcgtgctcgaggacgggaagcagcaggtccaggtggtgggcctgcaggagcacctggtgaacagcgccgacgacgtcatcaagatgatcgacatgggctccgcctgccggaccagcgggcagaccttcgcgaactccaacagctcccgcagccacgcctgcttccagatcatcctccgggccaagggccgcatgcacgggaagttctccctggtggacctggccggcaacgagcgcggggccgacaccagcagcgcggaccggcagacgcggatggagggcgccgagatcaacaagtccctcctggccctgaaggagtgcatccgcgccctcggccagaacaaggcccacacccccttccgggagagcaagctgacccaggtgctgcgcgactccttcatcggggagaacagccggacctgcatgatcgcgacgatctcccccggcatcagctcctgcgagtacaccctcaacaccctgcgctacgccgaccgggtcaaggagctgagcccgcactccgggcccagcggcgagcagctgatccagatggagaccgaggagatggaggcctgctccaacggggccctcatccccggcaacctgagcaaggaggaggaggagctgtccagccagatgtccagcttcaacgaggccatgacgcagatccgcgagctcgaggagaaggcgatggaggagctgaaggagatcatccagcagggccccgactggctggagctctccgagatgaccgagcagccggactacgacctggagaccttcgtgaacaaggccgagagcgccctggcccagcaggcgaagcacttcagcgccctccgggacgtgatcaaggccctgcgcctggccatgcagctcgaggagcaggcctcccgccagatcagctccaagaagcggccccagtga

SEQ ID NO: 1265 - RNA, 342 nt, synthetic construct
  misc_feature 1..342: note = AAH62223_variant
  source 1..342: mol_type = other RNA
atgaacttctacctgctcctggccagctccatcctgtgcgccctcatcgtgttctggaagtaccgccggttccagcgcaacaccggcgagatgagctccaacagcaccgcgctggccctggtccggccctccagctccgggctcatcaacagcaacacggacaacaacctggccgtgtacgacctgtcccgcgacatcctcaacaacttcccgcacagcatcgcccggcagaagcgcatcctggtgaacctgtccatggtcgagaacaagctcgtggagctggagcacaccctgctcagcaagggcttccgcggggccagcccccaccggaagtccacctga

SEQ ID NO: 1266 - RNA, 2583 nt, synthetic construct
  misc_feature 1..2583: note = AAA56833_variant
  source 1..2583: mol_type = other RNA
atgggcccctgggggtggaagctgcgctggaccgtggccctcctgctggccgcggccggcaccgccgtcggggaccggtgcgagcgcaacgagttccagtgccaggacggcaagtgcatcagctacaagtgggtgtgcgacgggtccgccgagtgccaggacggcagcgacgagtcccaggagacgtgcctcagcgtgacctgcaagtccggcgacttcagctgcgggggccgggtcaaccgctgcatcccgcagttctggcggtgcgacggccaggtggactgcgacaacgggtccgacgagcaggggtgcccgcccaagacctgcagccaggacgagttccgctgccacgacggcaagtgcatctcccggcagttcgtgtgcgacagcgaccgcgactgcctggacggctccgacgaggccagctgccccgtcctgacctgcgggcccgcgtccttccagtgcaacagctccacgtgcatcccccagctctgggcctgcgacaacgaccccgactgcgaggacggcagcgacgagtggccccagcggtgccgcgggctgtacgtgttccagggcgactccagcccgtgctccgccttcgagttccactgcctgagcggcgagtgcatccacagctcctggcggtgcgacgggggccccgactgcaaggacaagagcgacgaggagaactgcgccgtggcgacctgccgccccgacgagttccagtgctccgacgggaactgcatccacggcagccggcagtgcgaccgcgagtacgactgcaaggacatgtccgacgaggtcgggtgcgtgaacgtgaccctctgcgagggccccaacaagttcaagtgccacagcggcgagtgcatcaccctggacaaggtctgcaacatggcccgggactgccgcgactggtccgacgagccgatcaaggagtgcgggacgaacgagtgcctggacaacaacggcgggtgcagccacgtgtgcaacgacctcaagatcggctacgagtgcctgtgccccgacgggttccagctggtggcccagcggcgctgcgaggacatcgacgagtgccaggaccccgacacgtgctcccagctctgcgtcaacctggagggcggctacaagtgccagtgcgaggaggggttccagctggacccccacaccaaggcctgcaaggccgtgggcagcatcgcgtacctcttcttcaccaaccggcacgaggtgcgcaagatgacgctggaccggtccgagtacaccagcctgatcccgaacctccgcaacgtcgtggccctggacaccgaggtggcctccaaccgcatctactggagcgacctgtcccagcggatgatctgcagcacccagctcgaccgcgcccacggggtctccagctacgacacggtgatctcccgggacatccaggcccccgacggcctggcggtggactggatccacagcaacatctactggaccgacagcgtcctggggaccgtgtccgtcgccgacaccaagggcgtgaagcgcaagaccctcttccgggagaacggcagcaagccccgcgccatcgtggtcgaccccgtgcacgggttcatgtactggaccgactggggcaccccggccaagatcaagaagggcgggctgaacggcgtggacatctactccctggtcaccgagaacatccagtggcccaacgggatcacgctcgacctgctgagcggccggctctactgggtggactccaagctgcacagcatctccagcatcgacgtgaacgggggcaaccgcaagaccatcctggaggacgagaagcggctcgcccaccccttctccctggcggtcttcgaggacaaggtgttctggaccgacatcatcaacgaggccatcttcagcgccaaccgcctgaccgggtccgacgtgaacctcctggccgagaacctgctcagccccgaggacatggtcctgttccacaacctgacgcagccgcggggcgtgaactggtgcgagcgcaccaccctctccaacggcgggtgccagtacctgtgcctgcccgcgccccagatcaacccccacagcccgaagttcacgtgcgcctgccccgacggcatgctcctggcccgggacatgcgctcctgcctgaccgaggccgaggccgcggtggccacccaggagaccagcaccgtccggctgaaggtgtccagcacggccgtgcgcacccagcacaccaccacccggcccgtcccggacacgagccgcctccccggggccacccccggcctgaccaccgtggagatcgtgacgatgtcccaccaggccctgggggacgtcgcgggccggggcaacgagaagaagcccagctccgtgcgcgccctcagcatcgtgctgccgatcgtcctgctcgtgttcctgtgcctgggggtgttcctcctgtggaagaactggcgcctgaagaacatcaactccatcaacttcgacaaccccgtctaccagaagaccaccgaggacgaggtgcacatctgccacaaccaggacggctacagctacccctcccggcagatggtgagcctcgaggacgacgtcgcctga

SEQ ID NO: 1267 - RNA, 1302 nt, synthetic construct
  misc_feature 1..1302: note = CAA70989_variant
  source 1..1302: mol_type = other RNA
atggtgtggaaggtcgccgtgttcctgagcgtggccctcggcatcggggcggtccccatcgacgacccggaggacggcgggaagcactgggtggtgatcgtcgccggctccaacgggtggtacaactaccgccaccaggccgacgcctgccacgcctaccagatcatccaccggaacggcatccccgacgagcagatcgtggtgatgatgtacgacgacatcgcgtacagcgaggacaaccccacccccggcatcgtcatcaaccgcccgaacgggaccgacgtgtaccagggcgtgcccaaggactacacgggggaggacgtcacgccccagaacttcctggccgtgctgcggggcgacgccgaggccgtgaaggggatcggctccggcaaggtcctcaagagcgggccccaggaccacgtgttcatctacttcaccgaccacggctccaccgggatcctggtgttcccgaacgaggacctgcacgtcaaggacctcaacgagaccatccactacatgtacaagcacaagatgtaccgcaagatggtgttctacatcgaggcgtgcgagagcggctccatgatgaaccacctccccgacaacatcaacgtgtacgccaccaccgccgccaacccccgggagagctcctacgcctgctactacgacgagaagcgcagcacctacctgggcgactggtactccgtcaactggatggaggacagcgacgtggaggacctgacgaaggagaccctgcacaagcagtaccacctggtgaagtcccacaccaacaccagccacgtcatgcagtacgggaacaagacgatctccaccatgaaggtgatgcagttccagggcatgaagcggaaggcgagctcccccgtcccgctcccgcccgtgacccacctggacctgacccccagccccgacgtgcccctcacgatcatgaagcgcaagctgatgaacaccaacgacctggaggagtcccggcagctcaccgaggagatccagcgccacctggacgcccggcacctgatcgagaagtccgtccgcaagatcgtgagcctcctggccgccagcgaggccgaggtggagcagctgctcagcgagcgggcgcccctgaccgggcactcctgctaccccgaggccctgctccacttccgcacgcactgcttcaactggcacagcccgacctacgagtacgccctgcggcacctgtacgtcctcgtgaacctgtgcgagaagccctaccccctgcaccgcatcaagctctccatggaccacgtgtgcctgggccactactga

SEQ ID NO: 1268 - RNA, 1797 nt, synthetic construct
  misc_feature 1..1797: note = AAL36991_variant
  source 1..1797: mol_type = other RNA
atgacccccatcgtgaccgtcctgatctgcctcggcctgagcctggggccgcgcacgcacgtgcagaccggcaccatccccaagcccaccctctgggccgagcccgactccgtgatcacgcaggggagcccggtcaccctgtcctgccagggcagcctggaggcccaggagtaccggctctaccgcgagaagaagtccgcgagctggatcacccggatccgccccgagctggtgaagaacgggcagttccacatcccctccatcacctgggagcacacgggccggtacggctgccagtactacagccgcgcccggtggtccgagctgagcgaccccctcgtgctggtcatgaccggggcctacccgaagcccaccctgtccgcccagcccagccccgtggtgacctccggcgggcgcgtcacgctccagtgcgagagccaggtggccttcggcgggttcatcctgtgcaaggagggcgaggaggagcacccgcagtgcctgaactcccagccccacgcgcggggcagctcccgcgccatcttcagcgtggggcccgtctcccccaaccggcgctggagccaccggtgctacggctacgacctcaacagcccgtacgtgtggtccagcccctccgacctgctggagctcctggtgcccggggtcagcaagaagccctccctgagcgtgcagccgggccccgtggtcgcccccggcgagtccctcaccctgcagtgcgtgagcgacgtggggtacgaccgcttcgtcctgtacaaggagggcgagcgggacctccgccagctgcccgggcggcagccgcaggccggcctgtcccaggcgaacttcaccctcgggcccgtgagccgctcctacggcggccagtaccggtgctacggggcccacaacctgagctccgagtgcagcgccccctccgaccccctggacatcctcatcaccggccagatccgcgggacgccgttcatcagcgtgcagcccggccccaccgtcgcctccggggagaacgtgaccctgctgtgccagagctggcggcagttccacaccttcctcctgacgaaggccggcgcggccgacgccccgctgcgcctccgctccatccacgagtaccccaagtaccaggccgagttccccatgagccccgtcaccagcgcccacgcgggcacctaccggtgctacgggtccctgaacagcgacccgtacctgctctcccaccccagcgagcccctggagctggtggtgtccggccccagcatggggtccagcccgccgcccaccggccccatctccacgcccgccgggcccgaggaccagcccctcacccccaccggcagcgacccgcagtccggcctggggcgccacctgggcgtcgtgatcgggatcctcgtggccgtcgtgctgctgctcctgctgctgctcctgctgttcctcatcctgcggcaccgccggcagggcaagcactggaccagcacgcagcgcaaggccgacttccagcaccccgccggcgcggtggggcccgagcccaccgaccggggcctgcagtggcgctccagcccggccgccgacgcccaggaggagaacctctacgccgcggtcaaggacacccagcccgaggacggggtggagatggacacccgggccgccgcctccgaggcgccccaggacgtgacgtacgcccagctgcacagcctgaccctccgccggaaggccaccgagcccccgccctcccaggagcgcgagcccccggccgagcccagcatctacgccaccctggcgatccactga

SEQ ID NO: 1269 - RNA, 498 nt, synthetic construct
  misc_feature 1..498: note = CCDS6385.2_variant
  source 1..498: mol_type = other RNA
atggccctgctcgccctgctgctcgtggtcgcgctgccccgcgtgtggaccgacgccaacctgaccgcccggcagcgcgacccggaggacagccagcggacggacgagggcgacaaccgcgtgtggtgccacgtctgcgagcgggagaacaccttcgagtgccagaacccccgccggtgcaagtggaccgagccctactgcgtgatcgccgccgtgaagatcttcccccgcttcttcatggtcgcgaagcagtgctccgccgggtgcgccgccatggagcggccgaagcccgaggagaagcgcttcctcctggaggagcccatgcccttcttctacctgaagtgctgcaagatccggtactgcaacctcgagggcccgcccatcaacagctccgtgttcaaggagtacgcggggagcatgggcgagtcctgcgggggcctgtggctggccatcctcctgctgctcgccagcatcgccgccggcctgtccctgagctga

SEQ ID NO: 1270 - RNA, 375 nt, synthetic construct
  misc_feature 1..375: note = AAA68873_variant
  source 1..375: mol_type = other RNA
atgagcctggagcagaagtcccagcactgcaagcccgaggagggcctcgacacccaggaggaggccctggggctggtgggcgtccaggccgcgaccacggaggagcaggaggccgtgagctccagctccccgctcgtgcccgggaccctgggcgaggtccccgccgccgggagccccggcccgctgaagtccccgcagggcgccagcgcgatccccaccgccatcgacttcaccctctggcgccagtccatcaaggggagctccaaccaggaggaggagggccccagcacgtcccccgaccccgagagcgtgttccgggccgccctgtccaagaaggtggcggacctgatccacttcctcctgctgaagtactga

SEQ ID NO: 1271 - RNA, 957 nt, synthetic construct
  misc_feature 1..957: note = AAH02455_variant
  source 1..957: mol_type = other RNA
atgctgctcggccagaagtcccagcgctacaaggccgaggaggggctgcaggcccagggcgaggcgcccgggctgatggacgtgcagatcccgaccgccgaggagcagaaggccgccagcagctccagcaccctcatcatgggcacgctggaggaggtcaccgactccgggagcccctccccgccccagagccccgagggcgcctccagctccctgaccgtgaccgacagcacgctctggtcccagagcgacgagggctccagctccaacgaggaggaggggcccagcacctcccccgaccccgcgcacctggagagcctgttccgggaggccctcgacgagaaggtggccgagctggtccgcttcctgctccggaagtaccagatcaaggagccggtgaccaaggccgagatgctggagagcgtgatcaagaactacaagaaccacttccccgacatcttctccaaggcgagcgagtgcatgcaggtcatcttcggcatcgacgtgaaggaggtggaccccgccgggcactcctacatcctggtgacctgcctcggcctgagctacgacgggctgctcggcgacgaccagtccacgcccaagaccggcctgctgatcatcgtcctcgggatgatcctgatggagggcagccgcgccccggaggaggccatctgggaggccctgtccgtgatggggctctacgacggccgggagcacagcgtctactggaagctgcgcaagctgctcacccaggagtgggtgcaggagaactacctggagtaccggcaggcgcccggctccgaccccgtgcgctacgagttcctgtgggggccccgggccctcgccgagaccagctacgtcaaggtgctggagcacgtggtccgcgtgaacgcccgggtgcgcatctcctacccgagcctgcacgaggaggccctcggcgaggagaagggggtctga

SEQ ID NO: 1272 - RNA, 1290 nt, synthetic construct
  misc_feature 1..1290: note = AAH04479_variant
  source 1..1290: mol_type = other RNA
atggagacccagttccgccggggcgggctgggctgcagccccgcctccatcaagcgcaagaagaagcgggaggacagcggggacttcggcctccaggtgtccaccatgttcagcgaggacgacttccagtccacggagcgcgccccgtacgggccccagctgcagtggagccaggacctgccccgggtccaggtgttccgcgagcaggcgaacctcgaggaccggagcccccgccggacccagcgcatcaccggcggcgagcaggtcctgtgggggccgatcacccagatcttccccacggtgcggcccgccgacctgacccgcgtgatcatgcccctcgagcagcggtcccagcactgcaagccggaggagggcctgcaggcccaggaggaggacctggggctcgtgggcgcccaggccctgcaggcggaggagcaggaggccgccttcttctccagcaccctgaacgtcgggaccctcgaggagctgcccgccgcggagtcccccagcccgccgcagagcccccaggaggagtccttctcccccacggccatggacgccatcttcggcagcctgtccgacgagggcagcgggtcccaggagaaggagggccccagcaccagcccggacctcatcgaccccgagtccttcagccaggacatcctgcacgacaagatcatcgacctggtgcacctcctgctgcgcaagtaccgggtgaaggggctcatcaccaaggccgagatgctgggctccgtcatcaagaactacgaggactacttccccgagatcttccgcgaggccagcgtgtgcatgcagctcctgttcggcatcgacgtgaaggaggtcgaccccacctcccacagctacgtgctggtgacgtccctgaacctcagctacgacgggatccagtgcaacgagcagtccatgcccaagagcggcctgctgatcatcgtcctcggggtgatcttcatggagggcaactgcatccccgaggaggtgatgtgggaggtcctgtccatcatgggggtgtacgcgggccgggagcacttcctgttcggcgagcccaagcgcctcctgacccagaactgggtgcaggagaagtacctggtctaccgccaggtgcccgggaccgacccggcctgctacgagttcctctggggcccccgggcccacgccgagaccagcaagatgaaggtgctggagtacatcgccaacgcgaacgggcgggaccccacgtcctaccccagcctgtacgaggacgccctccgcgaggagggcgagggggtctga

SEQ ID NO: 1273 - RNA, 1110 nt, synthetic construct
  misc_feature 1..1110: note = EAW99421_variant
  source 1..1110: mol_type = other RNA
atgccccgcgccccgaagcggcagcgctgcatgcccgaggaggacctgcagagccagtccgagacccagggcctcgagggggcccaggcgcccctggccgtggaggaggacgccagctccagcacctccacgagctccagcttcccctccagcttcccgtccagctccagctccagctccagctcctgctaccccctgatccccagcacccccgaggaggtcagcgccgacgacgagaccccgaacccgccccagtccgcccagatcgcgtgcagctcccccagcgtggtggcctccctccccctggaccagagcgacgagggctccagctcccagaaggaggagagcccctccaccctgcaggtcctccccgacagcgagtccctgccccggagcgagatcgacgagaaggtgacggacctggtgcagttcctcctgttcaagtaccagatgaaggagccgatcaccaaggccgagatcctggagtccgtcatcaagaactacgaggaccacttccccctcctgttcagcgaggcctccgagtgcatgctgctcgtgttcgggatcgacgtgaaggaggtcgaccccaccggccacagcttcgtgctggtgacctccctggggctcacgtacgacggcatgctgagcgacgtccagagcatgcccaagaccggcatcctgatcctcatcctgtccatcatcttcatcgaggggtactgcaccccggaggaggtgatctgggaggcgctgaacatgatgggcctctacgacgggatggagcacctgatctacggcgagccccgcaagctgctcacccaggactgggtgcaggagaactacctggagtaccggcaggtccccgggagcgaccccgcccgctacgagttcctgtggggcccgcgggcccacgccgagatccgcaagatgtccctcctgaagttcctggccaaggtgaacggcagcgacccccggtccttccccctctggtacgaggaggcgctgaaggacgaggaggagcgcgcccaggaccggatcgccacgaccgacgacaccaccgccatggccagcgcgtccagctccgccacggggagcttctcctaccccgagtga

SEQ ID NO: 1274 - RNA, 945 nt, synthetic construct
  misc_feature 1..945: note = AAH03408_variant
  source 1..945: mol_type = other RNA
atgcccctggagcagcgcagccagcactgcaagccggaggagggcctcgaggcccagggggaggccctgggcctggtgggggcgcaggcccccgccaccgaggagcaggagaccgcctccagctccagcacgctcgtcgaggtgaccctgcgggaggtgcccgccgcggagtcccccagcccgccccacagcccccagggcgcctccaccctgcccaccacgatcaactacaccctctggtcccagagcgacgaggggtccagcaacgaggagcaggagggcccgtccaccttccccgacctggagaccagcttccaggtcgccctgtcccgcaagatggccgagctcgtgcacttcctgctgctcaagtaccgggcgcgcgagcccttcacgaaggccgagatgctgggcagcgtgatccggaacttccaggacttcttccccgtcatcttctccaaggccagcgagtacctgcagctcgtgttcgggatcgaggtggtcgaggtggtgcgcatcggccacctgtacatcctggtgacctgcctcgggctgtcctacgacggcctgctcggggacaaccagatcgtcccgaagaccggcctgctgatcatcgtgctcgccatcatcgccaaggagggcgactgcgcgcccgaggagaagatctgggaggagctgagcgtcctggaggccagcgacgggcgggaggactccgtgttcgcccacccccgcaagctcctgacccaggacctggtgcaggagaactacctcgagtaccggcaggtccccggcagcgacccggcctgctacgagttcctgtgggggccccgcgccctggtggagacgtcctacgtgaaggtcctccaccacctcctgaagatcagcggcggcccccacatctcctacccgcccctgcacgagtgggcgttccgggagggggaggagtga

SEQ ID NO: 1275 - RNA, 930 nt, synthetic construct
  misc_feature 1..930: note = AAA03229_variant
  source 1..930: mol_type = other RNA
atgagcctggagcagcgctccctccactgcaagcccgaggaggccctggaggcccagcaggaggcgctgggcctcgtgtgcgtccaggccgccaccagctccagctccccgctggtgctggggaccctcgaggaggtgcccacggccggcagcaccgacccgccccagtccccgcagggggccagcgcgttccccaccaccatcaacttcacgcggcagcgccagccctccgagggcagctccagccgggaggaggaggggccctccaccagctgcatcctggagtccctgttccgcgccgtcatcaccaagaaggtggccgacctcgtgggcttcctgctgctcaagtaccgggcccgcgagcccgtcaccaaggcggagatgctggagagcgtgatcaagaactacaagcactgcttccccgagatcttcggcaaggcctccgagagcctgcagctcgtgttcgggatcgacgtcaaggaggccgaccccacgggccactcctacgtgctggtgacctgcctggggctcagctacgacggcctgctgggggacaaccagatcatgcccaagaccggcttcctcatcatcgtcctggtgatgatcgccatggagggcgggcacgccccggaggaggagatctgggaggagctgagcgtgatggaggtctacgacggccgggagcactccgcgtacggggagccccgcaagctcctgacccaggacctggtgcaggagaagtacctcgagtaccgccaggtgcccgacagcgaccccgcccggtacgagttcctgtggggcccgcgggccctggccgagacgtcctacgtcaaggtgctcgagtacgtgatcaaggtcagcgcccgcgtgcggttcttcttcccctccctgcgcgaggcggccctgcgggaggaggaggagggcgtgtga

SEQ ID NO: 1276 - RNA, 945 nt, synthetic construct
  misc_feature 1..945: note = AAA17729_variant
  source 1..945: mol_type = other RNA
atgcccctggagcagcgcagccagcactgcaagccggaggagggcctcgaggcccgcggggaggccctgggcctggtgggggcgcaggcccccgccaccgaggagcagcagaccgcctccagctccagcacgctcgtcgaggtgaccctgggcgaggtgcccgccgcggactcccccagcccgccccacagcccccagggggcctcctccttcagcaccaccatcaactacacgctgtggcggcagtccgacgagggcagctccaaccaggaggaggagggcccccggatgttcccggacctcgagagcgagttccaggccgccatctcccgcaagatggtcgagctggtgcacttcctgctcctgaagtaccgggcgcgcgagcccgtgaccaaggccgagatgctggagagcgtcctccggaactgccaggacttcttccccgtgatcttctccaaggccagcgagtacctgcagctggtgttcgggatcgaggtcgtggaggtggtccccatctcccacctctacatcctggtgacctgcctgggcctcagctacgacgggctgctgggcgacaaccaggtgatgccgaagaccgggctcctgatcatcgtcctggccatcatcgccatcgagggcgactgcgcgcccgaggagaagatctgggaggagctcagcatgctggaggtgttcgagggccgcgaggactccgtgttcgcccacccccggaagctgctcatgcaggacctggtccaggagaactacctggagtaccgccaggtgcccgggagcgacccggcctgctacgagttcctctggggcccccgggccctgatcgagacgtcctacgtgaaggtcctgcaccacaccctcaagatcgggggcgagccccacatcagctacccgcccctgcacgagcgcgccctgcgggagggcgaggagtga

SEQ ID NO: 1277 - RNA, 945 nt, synthetic construct
  misc_feature 1..945: note = AAA17446_variant
  source 1..945: mol_type = other RNA
atgcccctggagcagcgcagccagcactgcaagcccgaggagggcctcgaggcccgcggggaggccctgggcctggtgggggcgcaggcccccgccaccgaggagcaggaggccgcctccagctccagcaccctcgtcgaggtgacgctgggcgaggtgcccgcggccgagtcccccgacccgccccagagcccccagggggcctccagcctgcccaccaccatgaactacccgctctggtcccagagctacgaggactccagcaaccaggaggaggagggcccctccaccttccccgacctggagagcgagttccaggccgcgctgtcccggaaggtcgccgagctcgtgcacttcctgctgctcaagtaccgggcccgcgagcccgtgacgaaggccgagatgctgggcagcgtcgtggggaactggcagtacttcttcccggtgatcttctccaaggccagctccagcctgcagctcgtcttcggcatcgagctgatggaggtggaccccatcgggcacctgtacatcttcgcgacctgcctcggcctgagctacgacgggctgctcggcgacaaccagatcatgcccaaggccggcctgctgatcatcgtgctcgccatcatcgcccgggagggggactgcgcccccgaggagaagatctgggaggagctgtccgtcctggaggtgttcgagggccgcgaggacagcatcctcggggacccgaagaagctgctgacccagcacttcgtgcaggagaactacctcgagtaccggcaggtccccggctccgaccccgcgtgctacgagttcctgtggggcccccgcgccctggtggagaccagctacgtgaaggtcctccaccacatggtgaagatctccgggggcccgcacatcagctacccgcccctgcacgagtgggtgctgcgggagggggaggagtga

SEQ ID NO: 1278 - RNA, 954 nt, synthetic construct
  misc_feature 1..954: note = EAW99410_variant
  source 1..954: mol_type = other RNA
atgagctccgagcagaagtcccagcactgcaagcccgaggagggcgtggaggcccaggaggaggccctggggctcgtcggcgcgcaggccccgaccaccgaggagcaggaggccgccgtgagcagctccagccccctggtgcccgggacgctggaggaggtccccgccgcggagtccgccggcccgccccagagcccccagggggcctccgccctccccaccaccatcagcttcacgtgctggcgccagccgaacgagggctccagctcccaggaggaggagggccccagcacctcccccgacgcggagagcctgttccgggaggccctgtccaacaaggtggacgagctcgcccacttcctgctgcgcaagtaccgggccaaggagctcgtgaccaaggccgagatgctggagcgcgtcatcaagaactacaagcggtgcttccccgtgatcttcgggaaggcgagcgagtccctgaagatgatcttcggcatcgacgtgaaggaggtcgacccggccagcaacacctacaccctcgtgacgtgcctggggctgagctacgacggcctcctggggaacaaccagatcttccccaagaccggcctgctcatcatcgtgctgggcaccatcgccatggagggggactccgccagcgaggaggagatctgggaggagctgggcgtcatgggggtgtacgacggccgcgagcacaccgtgtacggcgagccccggaagctcctgacgcaggactgggtccaggagaactacctggagtaccgccaggtgcccgggtccaacccggcccggtacgagttcctctggggcccccgcgcgctggccgagaccagctacgtgaaggtcctggagcacgtggtgcgggtcaacgcccgcgtgcggatcgcctacccctccctccgcgaggccgcgctgctggaggaggaggagggggtgtga

SEQ ID NO: 1279 - RNA, 954 nt, synthetic construct; identical to SEQ ID NO: 1278
  misc_feature 1..954: note = AAA68871_variant
  source 1..954: mol_type = other RNA

SEQ ID NO: 1280 - RNA, 954 nt, synthetic construct
  misc_feature 1..954: note = AAY27261_variant
  source 1..954: mol_type = other RNA
atgagctccgagcagaagtcccagcactgcaagcccgaggagggcgtggaggcccaggaggaggccctggggctcgtcggcgcgcaggccccgaccaccgaggagcaggaggccgccgtgagcagctccagccccctggtgcccgggacgctggaggaggtccccgccgcggagtccgccggcccgccccagagcccccagggggcctccgccctccccaccaccatcagcttcacgtgctggcgccagccgaacgagggctccagctcccaggaggaggagggccccagcacctcccccgacgcggagagcctgttccgggaggccctgtccaacaaggtggacgagctcgcccacttcctgctgcgcaagtaccgggccaaggagctcgtgaccaaggccgagatgctggagcgcgtcatcaagaactacaagcggtgcttccccgtgatcttcgggaaggcgagcgagtccctgaagatgatcttcggcatcgacgtgaaggaggtcgacccgaccagcaacacctacacgctcgtgacctgcctggggctgagctacgacggcctcctggggaacaaccagatcttccccaagaccggcctgctcatcatcgtgctgggcaccatcgccatggagggggactccgccagcgaggaggagatctgggaggagctgggcgtcatgggggtgtacgacggccgcgagcacacggtgtacggcgagccccggaagctcctgacccaggactgggtccaggagaactacctggagtaccgccaggtgcccgggtccaacccggcccggtacgagttcctctggggcccccgcgccctggcggagaccagctacgtgaaggtcctggagcacgtggtgcgggtcaacgcccgcgtgcggatcgcctacccctccctccgcgaggccgccctgctggaggaggaggagggggtgtga

SEQ ID NO: 1281 - RNA, 945 nt, synthetic construct
  misc_feature 1..945: note = BAF82126_variant
  source 1..945: mol_type = other RNA
atgcccctggagcagcgcagccagcactgcaagccggaggagggcctcgaggcccgcggggaggccctgggcctggtgggggcgcaggcccccgccaccgaggagcaggaggccgcctccagctccagcaccctcgtcgaggtgacgctgggcgaggtgcccgcggccgagtcccccgacccgccccagagcccccagggggcctccagcctgcccaccaccatgaactacccgctctggtcccagagctacgaggactccagcaaccaggaggaggagggcccctccaccttccccgacctggagagcgagttccaggccgcgctgtcccggaagctcgccaagctggtccacttcctgctcctgaagtaccgggcccgcgagcccgtgacgaaggccgagatgctgggcagcgtggtcgggaactggcagtacttcttcccggtgatcttctccaaggccagcgactccctccagctggtgttcggcatcgagctgatggaggtcgaccccatcgggcacgtgtacatcttcgcgacctgcctcggcctgagctacgacgggctgctcggcgacaaccagatcatgcccaagaccggcttcctgatcatcatcctggccatcatcgccaaggagggggactgcgcccccgaggagaagatctgggaggagctcagcgtgctggaggtcttcgagggccgggaggacatcatcttcggggacccgaagaagctgctcacccagtacttcgtgcaggagaactacctggagtaccgccaggtgcccggctccgaccccgcctgctacgagttcctgtggggcccccgggcgctcatcgagacgagctacgtcaaggtgctgcaccacatggtgaagatctccgggggcccgcgcatcagctaccccctgctccacgagtgggccctgcgggagggggaggagtga

SEQ ID NO: 1282 - RNA, 945 nt, synthetic construct
  misc_feature 1..945: note = AAA19006_variant
  source 1..945: mol_type = other RNA
atgcccctggagcagcgcagccagcactgcaagccggaggagggcctcgaggcccgcggggaggccctgggcctggtgggggcgcaggcccccgccaccgaggagcaggaggccgcctccagctccagcaccctcgtcgaggtgacgctgggcgaggtgcccgcggccgagtcccccgacccgccccagagcccccagggggcctccagcctgcccaccaccatgaactacccgctctggtcccagagctacgaggactccagcaaccaggaggaggagggcccctccaccttccccgacctggagagcgagttccaggccgcgctgtcccggaaggtcgccaagctcgtgcacttcctgctgctcaagtaccgggcccgcgagcccgtgacgaaggccgagatgctgggcagcgtcgtggggaactggcagtacttcttcccggtgatcttctccaaggccagcgactccctgcagctcgtcttcggcatcgagctgatggaggtggaccccatcgggcacgtgtacatcttcgcgacctgcctgggcctcagctacgacgggctgctgggcgacaaccagatcatgcccaagaccggcttcctcatcatcatcctggccatcatcgccaaggagggggactgcgcccccgaggagaagatctgggaggagctgagcgtcctcgaggtgttcgagggccgggaggactccatcttcggggacccgaagaagctgctgacccagtacttcgtgcaggagaactacctcgagtaccgccaggtccccggcagcgaccccgcctgctacgagttcctgtggggcccccgggcgctgatcgagacgtcctacgtgaaggtgctccaccacatggtcaagatcagcgggggcccgcgcatctcctaccccctgctgcacgagtgggccctccgggagggggaggagtga

SEQ ID NO: 1283 - RNA, 945 nt, synthetic construct
  misc_feature 1..945: note = CAG46567_variant
  source 1..945: mol_type = other RNA
atgcccctggagcagcgcagccagcactgcaagccggaggagggcctcgaggcccgcggggaggccctgggcctggtgggggcgcaggcccccgccaccgaggagcaggaggccgcctccagctccagcaccctcgtcgaggtgacgctgggcgaggtgcccgcggccgagtcccccgacccgccccagagcccccagggggcctccagcctgcccaccaccatgaactacccgctctggtcccagagctacgaggactccagcaaccaggaggaggagggcccctccaccttccccgacctggagagcgagttccaggccgcgctgtcccggaaggtcgccaagctcgtgcacttcctgctgctcaagtaccgggcccgcgagcccgtgacgaaggccgagatgctgggcagcgtcgtggggaactggcagtacttcttcccggtgatcttctccaaggccagcgactccctgcagctcgtcttcggcatcgagctgatggaggtggaccccatcgggcacgtgtacatcttcgcgacctgcctgggcctcagctacgacgggctgctgggcgacaaccagatcatgcccaagaccggcttcctcatcatcatcctggccatcatcgccaaggagggggactgcgcccccgaggagaagatctgggaggagctgagcgtcctcgaggtgttcgagggccgggaggactccatcttcggggacccgaagaagctgctgacccagtacttcgtgcaggagaactacctcgagtaccgccaggtccccggcagcgaccccgcctgctacgagttcctgtggggcccccgggcgctgatcgagacgtcctacgtgaaggtgctccaccacatggtcaagatcagcgggggcccgcgcatctcctaccccctgctgcacgagtgggccttccgggagggggaggagtga

SEQ ID NO: 1284 - RNA, 948 nt, synthetic construct
  misc_feature 1..948: note = AAA68877_variant
  source 1..948: mol_type = other RNA
atgagcctggagcagcgcagcccccactgcaagccggacgaggacctcgaggcccagggcgaggacctggggctgatgggcgcccaggagcccaccggggaggaggaggagaccacgtcctccagcgactccaaggaggaggaggtgagcgcggccggctccagctccccgccccagagcccccagggcggggcctccagctccatcagcgtctactacaccctctggtcccagttcgacgagggcagctccagccaggaggaggaggagccctccagcagcgtggaccccgcccagctggagttcatgttccaggaggccctgaagctcaaggtggcggagctggtccacttcctgctccacaagtaccgggtgaaggagcccgtgaccaaggccgagatgctggagtccgtcatcaagaactacaagcgctacttcccggtgatcttcgggaaggccagcgagttcatgcaggtcatcttcggcaccgacgtgaaggaggtggaccccgccgggcactcctacatcctggtgacggcgctcggcctgagctgcgactccatgctgggggacggccacagcatgcccaaggccgccctcctgatcatcgtcctgggcgtgatcctcaccaaggacaactgcgcccccgaggaggtgatctgggaggccctgtccgtcatgggggtgtacgtgggcaaggagcacatgttctacggggagccgcggaagctgctcacccaggactgggtccaggagaactacctggagtaccgccaggtgcccggcagcgaccccgcgcactacgagttcctgtggggctccaaggcccacgccgagaccagctacgagaaggtgatcaactacctcgtcatgctgaacgcccgggagcccatctgctacccgtccctgtacgaggaggtgctcggggaggagcaggagggcgtgtga

SEQ ID NO: 1285 - RNA, 1044 nt, synthetic construct
  misc_feature 1..1044: note = AAI01309_variant
  source 1..1044: mol_type = other RNA
atgccccgcggccagaagtccaagctgcgggcccgcgagaagcggcgccaggcccgcgggggcctcgaggacctgatcgacgcgctggacatcctcgaggaggaggaggagagcccgcccagcgcctccgcctgcctgaaggacgtgttccagagctccctggacggggccagcaacaacccccacggcctccgggaggcccagtccaccagcacctccgcgacggccgccagccacacccggcaccccgagggggtgaacgaccagatggaggagcgcccgatctgcacccaggacctggaggccaccgactccttcccccggggccccgtggacgagaaggtgatcatcctggtccactacctcctgtacaagtaccagatgaaggagcccatcacgaaggcggacatgctgcgcaacgtgacccagatgagcaagtcccagttcccggtgatcctcagccgggcctccgagcacctggagctgatcttcggcctcgacctgaaggaggtcgagcccaacaagcacatctacgtgctggtgaacaagctcgacctggggtgcgacgccaagctgagcgacgagaccggcgtccccaagaccgggctcctgatgacggtgctgggcatcatcttcaccaacgggaactgcgtggccgaggaggaggtctggaaggtgttcaacaccatgggcctctacgacggcatcgagcacttcatgttcggggagccccgcaagctgctgaccaaggacctcgtgaaggagaactacctggagtaccagcaggtcccgaactccgacccgccccggtaccagttcctgtggggcccccgcgcccacgcggagacgagcaagatgaaggtgctcgagttcctggccaaggtgaacgacaccgccccctccgagttcagcaactggtacaccgaggccctgcaggacgaggaggagcgggcccgcgcgcgggtcgccgccaaggcccgcgtgagcgccaccgcgggggcccggtccaaggtcaagagctccaagagctcccagctccagtga

SEQ ID NO: 1286 - RNA, 975 nt, synthetic construct
  misc_feature 1..975: note = CCDS43927.1_variant
  source 1..975: mol_type = other RNA
atgagccaggaccaggagagcccccgctgcacccacgaccagcacctccagaccttctccgagacgcagtccctggaggtggcccaggtcagcaaggccctggagaagaccctgctctccagctcccacccgctggtgcccggcaagctgaaggaggcgcccgccgccaaggccgagagccccctcgaggtgccgcagtccttctgcagctccagcatcgccgtcaccaccacgtccagctccgagagcgacgaggcgtccagcaaccaggaggaggaggactcccccagcagctccgaggacaccagcgacccccggaacgtgcccgccgacgccctggaccagaaggtggccttcctggtcaacttcatgctccacaagtgccagatgaagaagccgatcaccaaggcggacatgctgaagatcatcatcaaggacgacgagtcccacttcagcgagatcctgctccgcgcctccgagcacctggagatgatcttcgggctggacgtggtggaggtcgaccccaccacgcactgctacggcctcttcatcaagctggggctgacctacgacggcatgctcagcggggagaagggcgtgcccaagaccggcctgctgatcatcgtgctcggggtcatcttcatgaagggcaaccgggccaccgaggaggaggtgtgggaggtgctgaacctgacgggggtctactccggcaagaagcacttcatcttcggggagccccgcatgctcatcaccaaggacttcgtgaaggagaagtacctggagtaccagcaggtcgccaacagcgacccggcccggtacgagttcctgtggggcccccgcgcgaaggccgagacctccaagatgaaggtgctcgagttcgtggccaaggtgcacggcagctacccccactccttccccagccagtacgccgaggccctgaaggaggaggaggagcgggcgcgcgcccggatctga

SEQ ID NO: 1287 - RNA, 1011 nt, synthetic construct
  misc_feature 1..1011: note = CCDS59524.1_variant
  source 1..1011: mol_type = other RNA
atgccccgcggccaggccagcaagcggcgcgcccgggagaagcgccggcaggcgcgcggggaggaccagtgcctgggcggggcccaggccaccgccgccgagaaggagaagctcccgtccagctccagccccgcgtgccagtccccgccccagagcttccccaacgccggcatcccccaggagtcccagcgggccagctacccctccagccccgcctccgcggtgagcctgacctccagcgacgagggggccaagggccagaagggcgagtccccgaacagcttccacgggccctccagctccgagagcacgggccgcgacctgctcaacaccaagaccggggagctggtccagttcctgctcaacaagtacatccggaaggagcccatcacccgcgaggccatgctgaaggtgatcaaccggaagtacaagcagcacttccccgagatcctgcgccggagcacggagaacgtggaggtcgtgttcggcctctacctgaaggagatggacccgtcccgccagagctacgtgctggtcgggaagctcgacttccccaaccagggctccctgagcgacggcgggggcttccccctgtccgggctcctgatggtgctgctcagcaccatcttcatgcacggcaaccgggccaccgaggaggagatgtgggagtgcctgaacgccctgggcatgtacaaggggcgcaagcacttcatctacggcgagccccaggagctcgtgaccaaggacctggtccgggaggggtacctggagtaccagcaggtcccgtccagcgacccgccccgctacgagttcctctggggcccccgggcgcgcgccgagacgtccaagatgaaggtgctggagttcgtggccaagctgaacgacaccgtggccagcacctacaagtcccggtacgaggaggccctccgcgaggaggaggagcaggcgcgcgcccgggccgtggcccgcgacagcgcccgggcgcgcgcctcccggagcttccagccctga

SEQ ID NO: 1288 - RNA, 1044 nt, synthetic construct
  misc_feature 1..1044: note = AAC23616_variant
  source 1..1044: mol_type = other RNA
atgccccgcggccagaagtccaagctgcgggcccgcgagaagcggcgcaaggcccgggaggagacccaggggctcaaggtgcgccacgcgaccgccgccgagaaggaggagtgcccgagcagctcccccgtcctgggcgacacgcccaccagctcccccgccgccgggatcccgcagaagccccagggcgcgccgcccaccaccacggccgccgccgcggtgagctgcaccgagtccgacgagggggccaagtgccagggcgaggagaacgccagcttctcccaggccaccaccagcacggagtccagcgtgaaggaccccgtcgcctgggaggcgggcatgctgatgcacttcatcctccggaagtacaagatgcgcgagcccatcatgaaggccgacatgctgaaggtggtggacgagaagtacaaggaccacttcaccgagatcctgaacggggcctcccggcgcctcgagctggtcttcggcctggacctcaaggaggacaaccccagctcccacacctacaccctggtgagcaagctgaacctcacgaacgacgggaacctgtccaacgactgggacttcccccggaacggcctgctcatgccgctgctgggggtgatcttcctcaagggcaacagcgccaccgaggaggagatctggaagttcatgaacgtcctgggcgcctacgacggggaggagcacctgatctacggcgagccccgcaagttcatcacccaggacctcgtgcaggagaagtacctgaagtacgagcaggtccccaactccgacccgccccggtaccagttcctgtgggggccccgcgcgtacgccgagaccacgaagatgaaggtgctcgagttcctggccaagatgaacggcgccacgccccgggacttccccagccactacgaggaggccctgcgcgacgaggaggagcgggcccaggtgcgcagctccgtgcgggcgcgccggcgcaccaccgccaccaccttccgcgcccggagccgcgccccgttctcccggagctcccaccccatgtga

SEQ ID NO: 1289 - RNA, 960 nt, synthetic construct
  misc_feature 1..960: note = AAD10635_variant
  source 1..960: mol_type = other RNA
atgccccgcggccagaagtccaagctgcgggcccgcgagaagcggcgcaaggcccgggacgagacccgcgggctcaacgtgccgcaggtcaccgaggcggaggaggaggaggccccctgctgcagcagctccgtgagcggcggggccgcctccagctcccccgccgcgggcatcccccaggagccgcagcgggcccccacgaccgccgccgcggccgccgccggggtgagctccaccaagagcaagaagggcgccaagtcccaccagggcgagaagaacgcgagctccagccaggcctccaccagcacgaagtcccccagcgaggaccccctgacccgcaagtccgggagcctggtccagttcctcctgtacaagtacaagatcaagaagtccgtgaccaagggcgagatgctgaagatcgtggggaagcggttccgcgagcacttcccggagatcctcaagaaggccagcgagggcctgagcgtcgtgttcgggctggagctcaacaaggtgaaccccaacggccacacctacacgttcatcgacaaggtcgacctgaccgacgaggagtccctgctcagctcctgggacttcccccggcgcaagctgctgatgcccctcctgggcgtgatcttcctgaacgggaacagcgccaccgaggaggagatctgggagttcctcaacatgctgggcgtgtacgacggggaggagcactccgtcttcggcgagccgtggaagctgatcaccaaggacctcgtgcaggagaagtacctggagtacaagcaggtccccagctccgacccgccccggttccagttcctgtggggcccccgcgcctacgcggagacgagcaagatgaaggtgctcgagttcctggccaaggtgaacgggaccaccccctgcgccttccccacccactacgaggaggccctgaaggacgaggagaaggccggcgtgtga

SEQ ID NO: 1290 - RNA, 1041 nt, synthetic construct
  misc_feature 1..1041: note = AAD10636_variant
  source 1..1041: mol_type = other RNA
atgccccgcggccagaagtccaccctgcacgcccgggagaagcgccagcagacccgggggcagacgcaggaccaccagggcgcccagatcaccgcgaccaacaagaagaaggtgagcttcagctccccgctcatcctgggggccaccatccagaagaagtccgccggccgcagccggagcgccctgaagaagccccagcgcgccctctccacgaccaccagcgtcgacgtgtcctacaagaagtcctacaagggggcgaacagcaagatcgagaagaagcagagcttctcccagggcctgagctccaccgtgcagagccggacggaccccctgatcatgaagaccaacatgctcgtccagttcctgatggagatgtacaagatgaagaagcccatcatgaaggccgacatgctgaagatcgtgcagaagtcccacaagaactgcttcccggagatcctcaagaaggccagcttcaacatggaggtggtcttcggcgtggacctgaagaaggtggactccaccaaggacagctacgtcctggtgagcaagatggacctccccaacaacgggaccgtgacgcgcggccgggggttccccaagaccggcctgctgctcaacctgctgggggtcatcttcatgaagggcaactgcgccaccgaggagaagatctgggagttcctcaacaagatgcgcatctacgacggcaagaagcacttcatcttcggggagccccggaagctgatcacccaggacctggtgaagctcaagtacctggagtaccgccaggtgccgaactccaaccccgcgcggtacgagttcctgtggggcccccgcgcccacgccgagacgagcaagatgaaggtcctcgagttctgggccaaggtgaacaagaccgtgccctccgccttccagttctggtacgaggaggcgctgcgggacgaggaggagcgcgtccaggccgccgccatgctgaacgacgggagctccgccatgggccggaagtgcagcaaggcgaaggcctccagctccagccacgcctga

SEQ ID NO: 1291 - RNA, 1041 nt, synthetic construct
  misc_feature 1..1041: note = AAC23619_variant
  source 1..1041: mol_type = other RNA
atgccccgcggccagaagtccaagctgcgggcccgcgagaagcggcagcgcacccgggggcagacccaggacctcaaggtgggccagccgacggccgcggagaaggaggagagccccagctccagctccagcgtcctgcgcgacaccgcctccagctccctggccttcgggatcccccaggagccccagcgggagccgcccaccaccagcgccgccgcggccatgtcctgcacgggcagcgacaagggggacgagtcccaggacgaggagaacgccagctccagccaggcctccaccagcaccgagcgctccctcaaggacagcctgacccggaagacgaagatgctggtgcagttcctcctgtacaagtacaagatgaaggagcccaccaccaaggcggagatgctgaagatcatcagcaagaagtacaaggagcacttccccgagatcttccgcaaggtgtcccagcggaccgagctcgtcttcggcctggccctgaaggaggtgaacccgacgacccacagctacatcctcgtgtccatgctgggccccaacgacgggaaccagagctccgcctggaccctgccccgcaacggcctcctgatgcccctgctcagcgtcatcttcctgaacgggaactgcgcccgggaggaggagatctgggagttcctgaacatgctcggcatctacgacgggaagcgccacctgatcttcggcgagccgcggaagctgatcacccaggacctcgtgcaggagaagtacctggagtaccagcaggtccccaactccgacccgccccgctaccagttcctgtggggcccccgggcccacgcggagacgagcaagatgaaggtgctcgagttcctggccaaggtgaacgacaccacccccaacaacttccccctgctctacgaggaggccctgcgcgacgaggaggagcgggccggggcccgcccccgggtggcggcccgccgcggcaccacggccatgacctccgcctacagccgggccacctccagctccagctcccagccgatgtga

SEQ ID NO: 1292 - RNA, 828 nt, synthetic construct
  misc_feature 1..828: note = CCDS65233.1_variant
  source 1..828: mol_type = other RNA
atgaccagcgccggcgtgttcaacgccgggtccgacgagcgcgcgaacagccgggacgaggagtacccctgctccagcgaggtctccccgagcaccgagtccagctgctccaacttcatcaacatcaaggtgggcctgctcgagcagttcctgctgtacaagttcaagatgaagcagcgcatcctcaaggaggacatgctgaagatcgtgaacccccggtaccagaaccagttcgccgagatccaccgccgggccagcgagcacatcgaggtcgtgttcgccgtggacctgaaggaggtcaaccccacgtgccacctctacgacctggtgtccaagctgaagctccccaacaacgggcgcatccacgtgggcaaggtcctgccgaagaccgggctgctcatgaccttcctggtggtgatcttcctgaagggcaactgcgccaacaaggaggacacctggaagttcctcgacatgatgcagatctacgacggcaagaagtactacatctacggggagccccggaagctgatcacgcaggacttcgtccgcctgacctacctcgagtaccaccaggtgccctgcagctaccccgcgcactaccagttcctgtggggcccgcgggcctacaccgagacctccaagatgaaggtgctggagtacctcgccaaggtcaacgacatcgcccccggggcgttcagctcccagtacgaggaggccctgcaggacgaggaggagagcccctcccagcgctgcagccggaactggcactactgctccggccaggactgcctgcgcgccaagttcagcagcttctcccagccctactga

SEQ ID NO: 1293 - RNA, 1224 nt, synthetic construct
  misc_feature 1..1224: note = AAH67286_variant
  source 1..1224: mol_type = other RNA
atgccccgcggccacaagagcaagctgcggacctgcgagaagcgccaggagaccaacgggcagccgcagggcctcacggggccccaggccaccgccgagaagcaggaggagtcccacagctccagctccagctcccgggcgtgcctgggcgactgccgccggagctccgacgccagcatcccccaggagtcccagggggtgagccccaccggctccccggacgccgtcgtgagctactccaagagcgacgtggccgccaacggccaggacgagaagtcccccagcacctcccgcgacgcgagcgtcccccaggagagccagggggcctcccccacgggcagcccggacgccggggtgtccggcagcaagtacgacgtggccgcgaacgggcaggacgagaagtcccccagcacctcccacgacgtcagcgtgccccaggagtcccagggcgccagccccaccggctccccggacgccggggtgagcggctccaagtacgacgtcgccgccgagggggaggacgaggagagcgtgtccgcgagccagaaggccatcatcttcaagcggctgtccaaggacgccgtgaagaagaaggcctgcaccctcgcccagttcctgcagaagaagttcgagaagaaggagagcatcctgaaggcggacatgctcaagtgcgtccgccgggagtacaagccctacttcccccagatcctgaaccgcacgtcccagcacctggtggtggccttcggcgtcgagctcaaggagatggacagcagcggcgagtcctacaccctggtgagcaagctggggctcccctccgagggcatcctgagcggggacaacgccctgccgaagtccggcctcctgatgagcctgctcgtggtcatcttcatgaacgggaactgcgccaccgaggaggaggtgtgggagttcctgggcctgctcggcatctacgacgggatcctgcactccatctacggcgacgcccggaagatcatcaccgaggacctggtgcaggacaagtacgtcgtgtaccgccaggtgtgcaacagcgacccgccctgctacgagttcctctgggggccccgggcgtacgccgagacgaccaagatgcgcgtcctgcgggtgctggccgactccagcaacacctcccccggcctctacccccacctgtacgaggacgccctgatcgacgaggtcgagcgcgccctccggctgcgcgcgtga

SEQ ID NO: 1294 - RNA, 3429 nt, synthetic construct
  misc_feature 1..3429: note = CCDS35417.1_variant
  source 1..3429: mol_type = other RNA
atgggcgacaaggacatgcccaccgccgggatgccgagcctgctccagtccagctccgagagcccccagtcctgccccgagggcgaggacagccagagccccctgcagatcccgcagagctcccccgagagcgacgacaccctgtaccccctccagagcccccagtcccgctccgagggggaggacagctccgacccgctgcagcggccgcccgagggcaaggacagccagagccccctgcagatcccccagtcctcccccgagggggacgacacgcagagccccctccagaacagccagtccagccccgagggcaaggactccctgagcccgctggagatctcccagagcccgcccgagggcgaggacgtgcagagccccctccagaaccccgcctcctccttcttcagctccgcgctgctgagcatcttccagtccagccccgagtccacccagagccccttcgaggggttcccccagtccgtcctccagatcccggtgagcgccgcctccagcagcaccctggtgtccatcttccagagctcccccgagagcacccagtcccccttcgagggcttcccccagagcccgctgcagatccccgtctcccgcagcttctccagcacgctcctgtccatcttccagagctcccccgagcggacccagagcaccttcgaggggttcgcccagtccccgctgcagatccccgtgagcccctccagcagctccaccctcctgagcctgttccagtccttcagcgagcgcacgcagtccaccttcgagggcttcgcccagagctccctccagatccccgtgagcccgtccttcagctccaccctggtcagcctgttccagtccagccccgagcggacccagtccacgttcgaggggttcccccagagccccctccagatcccggtgtccagctccagcagctccaccctgctgagcctcttccagtccagccccgagcgcacccactccaccttcgagggcttcccccagagcctgctgcagatccccatgacgtccagcttctccagcaccctcctgtccatcttccagagctccccggagagcgcgcagtccaccttcgagggcttcccccagagccccctgcagatccccgggtccccgagcttctccagcaccctcctgagcctgttccagtccagccccgagcggacgcactccaccttcgagggcttcccccagagccccctccagatcccgatgacctccagcttctccagcaccctgctgtccatcctccagagctcccccgagagcgcccagtccgccttcgaggggttcccccagagccccctgcagatcccggtgtccagctccttcagctacacgctgctctccctgttccagagcagccccgagcgcacccactccaccttcgagggcttcccccagagcccgctgcagatccccgtctccagctccagctccagctccaccctcctgagcctgttccagtccagccccgagtgcacgcagtccaccttcgagggcttcccccagagcccgctccagatcccccagtccccgcccgagggggagaacacccacagccccctgcagatcgtgccctccctgcccgagtgggaggacagcctgagcccccactacttcccgcagtccccgccccagggcgaggacagcctcagcccccactacttcccccagtccccgccccagggggaggactccctgagcccccactacttcccccagagcccccagggcgaggactccctgagcccccactacttcccccagtccccgccccagggggaggactccatgagccccctctacttcccccagtccccgctgcagggcgaggagttccagagctccctgcagagccccgtgtccatctgcagctccagcaccccctccagcctcccgcagagcttccccgagtccagccagtccccgcccgagggccccgtccagagccccctgcacagcccccagtccccgcccgaggggatgcactcccagagccccctgcagtcccccgagtccgcccccgagggcgaggactccctcagcccgctgcagatcccccagagccccctggagggggaggactccctctccagcctgcacttcccccagtccccgcccgagtgggaggacagcctgagccccctccacttcccccagttcccgccccagggcgaggacttccagtccagcctgcagtcccccgtgagcatctgctccagctccacgagcctgtccctcccccagagcttcccggagagcccccagtccccgcccgaggggcccgcgcagagccccctgcagcggcccgtgtcctccttcttcagctacaccctggcctccctcctgcagagctcccacgagagcccgcagagcccgcccgagggccccgcccagagccccctgcagtcccccgtctccagcttcccctccagcacctccagctccctcagccagtccagccccgtgtccagcttcccgtccagcacctccagctccctgagcaagagctcccccgagagccccctgcagtcccccgtgatcagcttctccagctccacgagcctctccccgttcagcgaggagtccagctcccccgtcgacgagtacaccagctccagcgacaccctgctggagtccgacagcctcaccgactccgagagcctgatcgagagcgagcccctgttcacctacacgctcgacgagaaggtggacgagctggcccgcttcctgctcctgaagtaccaggtgaagcagcccatcaccaaggccgagatgctgaccaacgtcatctcccggtacaccggctacttcccggtgatcttccgcaaggcgcgggagttcatcgagatcctcttcgggatcagcctgcgcgaggtggaccccgacgactcctacgtcttcgtgaacacgctggacctcaccagcgagggctgcctgtccgacgagcaggggatgagccagaaccggctgctcatcctgatcctgtccatcatcttcatcaagggcacctacgccagcgaggaggtcatctgggacgtgctctccgggatcggcgtgcgcgccggccgggagcacttcgccttcggggagccccgcgagctgctgaccaaggtctgggtgcaggagcactacctcgagtaccgggaggtgcccaacagctccccgccccgctacgagttcctgtggggcccccgggcccacagcgaggtcatcaagcgcaaggtggtggagttcctggcgatgctcaagaacacggtccccatcaccttcccgtccagctacaaggacgccctgaaggacgtggaggagcgcgcccaggccatcatcgacaccaccgacgactccacggccaccgagagcgcgtccagctccgtgatgagccccagcttctccagcgagtga

SEQ ID NO: 1295 - RNA, 1122 nt, synthetic construct
  misc_feature 1..1122: note = AAF07210_variant
  source 1..1122: mol_type = other RNA
atgccgcccgtgcccggcgtccccttccgcaacgtggacaacgacagccccacctccgtggagctggaggactgggtcgacgcccagcaccccaccgacgaggaggaggaggaggccagctccgcgagctccacgctctacctggtgttcagcccctccagcttctccaccagctccagcctgatcctcgggggccccgaggaggaggaggtgccctccggggtcatcccgaacctgaccgagagcatcccctccagcccgccccagggcccgccccaggggccctcccagagccccctgtccagctgctgcagctccttcagctggtccagcttctccgaggagagctccagccagaagggcgaggacaccggcacgtgccaggggctcccggactccgagagctccttcacctacaccctggacgagaaggtggccgagctggtggagttcctcctgctgaagtacgaggccgaggagcccgtcaccgaggccgagatgctcatgatcgtgatcaagtacaaggactacttccccgtgatcctgaagcgggcccgcgagttcatggagctcctgttcggcctggcgctgatcgaggtcgggcccgaccacttctgcgtgttcgccaacacggtgggcctcaccgacgaggggagcgacgacgagggcatgccggagaactccctgctgatcatcatcctcagcgtcatcttcatcaagggcaactgcgcctccgaggaggtgatctgggaggtgctgaacgccgtcggggtgtacgcgggccgggagcacttcgtgtacggggagccccgcgagctgctcaccaaggtctgggtgcagggccactacctggagtaccgggaggtgccccacagctccccgccctactacgagttcctgtggggcccccgcgcccacagcgagtccatcaagaagaaggtcctcgagttcctggccaagctgaacaacaccgtgcccagcagcttcccctcctggtacaaggacgccctcaaggacgtcgaggagcgggtgcaggccacgatcgacaccgcggacgacgccaccgtgatggccagcgagtccctgagcgtcatgtccagcaacgtgtccttcagcgagtga

SEQ ID NO: 1296 - RNA, 1932 nt, synthetic construct
  misc_feature 1..1932: note = AAM08355_variant
  source 1..1932: mol_type = other RNA
atgctgctcccctgccactgggtgctggacgccaccttcagcgacggctccctggggcagtgggtcaagaacacctgcgccacgtacgcgctcagcccggtggtgctgcccccccagccccagccgcgcaagaaggccaccgacaaggactactccgccttccacctgggccacctccgggaggtccgcctgttcctgcgggggggcaccagcgaccagcgcatggactccctcgtgctgtgccccacctacttcaagctgtggcggacgctcagcgggtcccccggcctgcagctgagcgacctccacttcggctcccagcccgaggggaagttcagcctgcgccgggccgtgtccgtcaagcagcgcgaggagccgcaggactggcccctgaacgagaagcggaccctctggaaggacagcgacctgcccacctggcgccggggcaccgggtacacgctgtccctccccgccgtgagcccgggcaagcgcctgtggggggagaaggcgggctccctgcccgagagcgagcccctcttcacctacaccctggacgagaaggtggacaagctggtccagttcctcctgctgaagtaccaggccaaggagcccctcacccgggccgagatgcagatgaacgtgatcaacacgtacaccggctacttcccgatgatcttccgcaaggcccgggagttcatcgagatcctgttcgggatctccctgaccgaggtggaccccgaccacttctacgtcttcgtgaacaccctcgacctgacgtgcgagggcagcctgtccgacgagcaggggatgccccagaaccgcctcctgatcctgatcctcagcgtgatcttcatcaagggcaactgcgcgagcgaggaggtcatctgggaggtgctgaacgccatcggcccctggtccgccctggccgggttcgccgacgtgctcagccggctggcgctgtgggagtccgagggcccggaggccttctgcgaggagagcgggctccgctccgccgagggcagcgtcctggacctggccaacccccaggggctcgccggccaccggcaggaggacggccgccgggggctgaccgaggcgtccccccagcagaagaagggcggggaggacgaggacatgcccgccgccggcatgccgcccctgccccagagccccccggagatccccccccaggggccgcccaagatctccccccagggccccccgcagagccccccccagtcccccctggacagctgctccagcccgctcctgtggacccgcctggacgaggagtccagctccgaggaggaggacaccgccacgtggcacgccctccccgagagcgagtccctgccccgctacgcgctggacgagaaggtggccgagctcgtgcagttcctgctgctcaagtaccagaccaaggagcccgtcaccaaggccgagatgctgaccacggtgatcaagaagtacaaggactacttcccgatgatcttcggcaaggcccacgagttcatcgagctgatcttcgggatcgccctcaccgacatggaccccgacaaccacagctacttcttcgaggacaccctggacctgacctacgagggcagcctcatcgacgaccaggggatgcccaagaactgcctgctgatcctcatcctgtccatgatcttcatcaagggcagctgcgtgcccgaggaggtcatctgggaggtgctgtccgcgatcgggccgatccagcggcccgcccgcgaggtcctcgagttcctgagcaagctgtccagcatcatcccctccgccttccccagctggtacatggacgccctcaaggacatggaggaccgggcgcaggccatcatcgacacgaccgacgacgccaccgccatggcctccgcgagcccgtccgtgatgagcaccaacttctgccccgagtga

SEQ ID NO: 1297 - RNA, 2337 nt, synthetic construct
  misc_feature 1..2337: note = AAG23757_variant
  source 1..2337: mol_type = other RNA
atggcccagaagatggactgcggcgccgggctgctcggcttccaggcggaggccagcgtggaggactccgccctgctgatgcagaccctcatggaggccatccagatcagcgaggcccccccgaccaaccaggcgacggccgccgcctccccccagagctcccagccccccaccgcgaacgagatggccgacatccaggtcagcgccgccgccgcgcgcccgaagtccgccttcaaggtgcagaacgccaccaccaaggggcccaacggcgtgtacgacttcagccaggcccacaacgccaaggacgtccccaacacgcagcccaaggcggccttcaagtcccagaacgccaccccgaaggggcccaacgccgcctacgacttcagccaggcggccaccaccggcgagctggccgccaacaagtccgagatggccttcaaggcgcagaacgccacgaccaaggtgggccccaacgccacctacaacttcagccagtccctgaacgccaacgacctcgcgaacagccggcccaagaccccgttcaaggcctggaacgacacgaccaaggcccccaccgccgacacccagacgcagaacgtgaaccaggccaagatggcgacctcccaggccgacatcgagaccgaccccgggatcagcgagcccgacggcgccaccgcccagacgtccgccgacgggagccaggcgcagaacctggagtcccgcaccatcatccggggcaagcgcacccggaagatcaacaacctgaacgtcgaggagaacagcagcggggaccagcgccgggccccgctcgccgccggcacctggcgctccgcccccgtgcccgtgacgacccagaaccccccgggcgcgccccccaacgtcctgtggcagacccccctggcctggcagaacccgagcgggtggcagaaccagaccgcccggcagacgccccccgcccgccagtcccccccggcgcggcagaccccccccgcctggcagaacccggtggcctggcagaaccccgtgatctggcccaaccccgtcatctggcagaacccggtgatctggcccaaccccatcgtgtggcccggcccggtcgtgtggcccaaccccctcgcctggcagaaccccccggggtggcagaccccccccggctggcagacccccccgggctggcaggggccccccgactggcagggccccccggactggcccctgccccccgactggccgctgccccccgactggccgctccccacggactggcccctgcccccggactggatccccgccgactggcccatccccccggactggcagaacctgcgccccagccccaacctccggccctccccgaacagccgcgcgtcccagaaccccggggccgcccagccccgggacgtggccctgctgcaggagcgcgccaacaagctcgtcaagtacctgatgctgaaggactacaccaaggtgcccatcaagcggagcgagatgctccgcgacatcatccgggagtacaccgacgtgtacccggagatcatcgagcgcgcgtgcttcgtcctggagaagaagttcggcatccagctgaaggagatcgacaaggaggagcacctctacatcctgatctccacccccgagagcctggccgggatcctcggcacgaccaaggacacccccaagctgggcctgctcctggtgatcctgggggtgatcttcatgaacggcaaccgggcctccgaggccgtcctctgggaggccctgcgcaagatggggctgcgccccggcgtgcggcacccgctcctgggggacctgcgcaagctcctgacctacgagttcgtcaagcagaagtacctggactaccggcgcgtgcccaacagcaacccccccgagtacgagttcctctggggcctgcggtcctaccacgagaccagcaagatgaaggtgctgcgcttcatcgcggaggtccagaagcgggacccgcgcgactggacggcccagttcatggaggccgccgacgaggcgctcgacgccctggacgccgccgccgcggaggccgaggcccgggccgaggcccgcacccggatgggcatcggggacgaggcggtgtccggcccctggagctgggacgacatcgagttcgagctgctgacctgggacgaggagggggacttcggcgacccctggtcccgcatccccttcaccttctgggcccggtaccaccagaacgcccgcagccggttcccgcagacgttcgccgggcccatcatcggccccggcgggaccgcctccgcgaacttcgccgccaacttcggcgccatcgggttcttctgggtggagtga

SEQ ID NO: 1298 - RNA, 1821 nt, synthetic construct
  misc_feature 1..1821: note = AAD28598_variant
  source 1..1821: mol_type = other RNA
atgagcgacacctccgagagcggcgccgggctgacccgcttccaggccgaggcgtccgagaaggacagctccagcatgatgcagacgctgctgaccgtgacccagaacgtcgaggtgcccgagaccccgaaggcctccaaggccctggaggtgagcgaggacgtcaaggtgtccaaggccagcggcgtgtccaaggccacggaggtcagcaagacccccgaggcgcgggaggcccccgccacccaggcctccagcaccacgcagctcaccgacacccaggtgctggcggccgagaacaagtccctggccgccgacaccaagaagcagaacgccgacccccaggcggtgacgatgccggccaccgagaccaagaaggtcagccacgtggccgacaccaaggtgaacacgaaggcccaggagaccgaggccgcgccctcccaggcccccgccgacgagcccgagccggagagcgccgccgcgcagtcccaggagaaccaggacacccgccccaaggtcaaggccaagaaggcccggaaggtgaagcacctcgacggggaggaggacggcagcagcgaccagtcccaggccagcgggaccacgggcggccgccgggtgtccaaggccctgatggcgagcatggcccgccgggcctcccgcgggcccatcgccttctgggcgcggcgcgccagccggacccgcctggccgcctgggcccggcgcgcgctcctgtccctgcggagccccaaggcccgccggggcaaggcccgccggcgcgccgccaagctccagtccagccaggagccggaggcgcccccgccccgggacgtcgccctgctgcaggggcgcgccaacgacctcgtgaagtacctgctggccaaggaccagaccaagatccccatcaagcgctccgacatgctcaaggacatcatcaaggagtacaccgacgtgtaccccgagatcatcgagcgggccggctacagcctggagaaggtcttcgggatccagctgaaggagatcgacaagaacgaccacctctacatcctgctgtccacgctcgagcccaccgacgcgggcatcctgggcaccaccaaggacagccccaagctggggctcctgatggtgctgctctccatcatcttcatgaacggcaaccgcagctccgaggccgtgatctgggaggtcctgcggaagctggggctccgcccgggcatccaccacagcctgttcggcgacgtgaagaagctgatcacggacgagttcgtgaagcagaagtacctcgactacgcccgggtccccaactccaacccgcccgagtacgagttcttctgggggctgcgcagctactacgagaccagcaagatgaaggtgctgaagttcgcctgcaaggtccagaagaaggaccccaaggagtgggcggcccagtaccgggaggccatggaggccgacctcaaggccgcggccgaggccgccgccgaggcgaaggcccgcgccgagatccgggcccgcatgggcatcgggctgggctccgagaacgccgcggggccctgcaactgggacgaggccgacatcggcccctgggccaaggcccggatccaggcgggcgccgaggccaaggccaaggcccaggagagcgggtccgcgagcaccggcgcctccaccagcacgaacaactccgccagcgcctccgccagcacctccgggggcttcagcgcgggggcctccctgaccgccaccctcacgttcggcctgttcgccggcctcgggggcgccggggcgagcacctccggcagctccggggcctgcggcttcagctacaagtga

SEQ ID NO: 1299 - RNA, 2226 nt, synthetic construct
  misc_feature 1..2226: note = AAH63838_variant
  source 1..2226: mol_type = other RNA
atggccgagggcagcttctccgtgcagagcgagtcctacagcgtcgaggacatggacgaggggtccgacgaggtgggcgaggaggagatggtggaggggaacgactacgaggagttcggcgccttcgggggctacggcaccctgaccagcttcgacatccacatcctccgcgcgttcgggtccctgggccccgggctgcggatcctcagcaacgagccgtgggagctggagaaccccgtcctggcccagacgctcgtggaggccctgcagctggaccccgagaccctcgccaacgagaccgccgcgcgcgccgccaacgtggcccgggcggccgcctccaaccgcgccgcccgggcggccgccgccgccgcgcgcaccgccttcagccaggtcgtggcctcccaccgggtggccacgccccaggtcagcggcgaggacacccagccgaccacctacgccgcggaggcccaggggcccacgcccgagcccccgctggccagcccccagaccagccagatgctggtgacctccaagatggccgcccccgaggcgcccgccaccagcgcccagtcccagacgggcagcccggcccaggaggcggccaccgagggcccctccagcgcctgcgccttcagccaggccccctgcgcgcgcgaggtggacgccaaccggccctccaccgccttcctcgggcagaacgacgtcttcgacttcacccagccggccggcgtgagcgggatggccttcccccgccccaagcggcccgcgccggcccaggaggccgccacggagggcccctccgccgcgagcggcgtgccccagaccgggcccggccgcgaggtcgccgccacccggccgaagaccacgaagtccgggaaggccctggcgaagacccgctgggtggagccccagaacgtggtcgccgccgccgccgcgaaggccaagatggccaccagcatccccgagcccgagggcgccgccgcggccaccgcccagcactccgccgagccgtgggcccggatgggcgggaagcgcacgaagaagtccaagcacctggacgacgagtacgagtccagcgaggaggagcgggagacccccgcggtgcccccgacctggcgcgcctcccagcccagcctcaccgtgcgggcccagctggccccgcgcccgcccatggcgccccggtcccagatccccagccgccacgtcctgtgcctcccgccccgcaacgtgacgctgctgcaggagcgggccaacaagctcgtgaagtacctgatgatcaaggactacaagaagatccccatcaagcgcgccgacatgctgaaggacgtcatccgggagtacgacgagcacttccccgagatcatcgagcgcgccacctacaccctcgagaagaagttcggcatccacctgaaggagatcgacaaggaggagcacctgtacatcctcgtgtgcacccgggactccagcgcccgcctgctggggaagacgaaggacacgccccggctctccctgctgctcgtcatcctgggcgtgatcttcatgaacgggaaccgcgcgagcgaggccgtgctgtgggaggccctccggaagatgggcctgcgccccggggtccggcaccccttcctgggcgacctccgcaagctgatcaccgacgacttcgtgaagcagaagtacctggagtacaagaagatccccaactccaacccgcccgagtacgagttcctctggggcctgcgggcccgccacgagaccagcaagatgcgggtgctgcgcttcatcgcccagaaccagaaccgggacccccgcgagtggaaggcgcacttcctcgaggccgtcgacgacgccttcaagaccatggacgtggacatggccgaggagcacgcccgggcgcagatgcgcgcccagatgaacatcggggacgaggccctgatcggccgctggagctgggacgacatccaggtggagctgctcacctgggacgaggacggggacttcggcgacgcctgggcccggatccccttcgcgttctgggcccgctaccaccagtacatcctgaactccaaccgggccaaccgccgggccacctggcgcgcgggggtcagctccggcaccaacggcggggccagcacctccgtgctggacggccccagcacgtccagcaccatccggacccgcaacgccgcccgggccggggcgtccttcttcagctggatccagcaccgctga

SEQ ID NO: 1300 - RNA, 1122 nt, synthetic construct
  misc_feature 1..1122: note = CAG33449_variant
  source 1..1122: mol_type = other RNA
atgccgcccgtgcccggcgtccccttccgcaacgtggacaacgacagccccacctccgtggagctggaggactgggtcgacgcccagcaccccaccgacgaggaggaggaggaggccagctccgcgagctccacgctctacctggtgttcagcccctccagcttctccaccagctccagcctgatcctcgggggccccgaggaggaggaggtgccctccggggtcatcccgaacctgaccgagagcatcccctccagcccgccccagggcccgccccaggggccctcccagagccccctgtccagctgctgcagctccttcagctggtccagcttctccgaggagagctccagccagaagggcgaggacaccggcacgtgccaggggctcccggactccgagagctccttcacctacaccctggacgagaaggtggccgagctggtggagttcctcctgctgaagtacgaggccgaggagcccgtcaccgaggccgagatgctcatgatcgtgatcaagtacaaggactacttccccgtgatcctgaagcgggcccgcgagttcatggagctcctgttcggcctggcgctgatcgaggtcgggcccgaccacttctgcgtgttcgccaacacggtgggcctcaccgacgaggggagcgacgacgagggcatgccggagaactccctgctgatcatcatcctcagcgtcatcttcatcaagggcaactgcgcctccgaggaggtgatctgggaggtgctgaacgccgtcggggtgtacgcgggccgggagcacttcgtgtacggggagccccgcgagctgctcaccaaggtctgggtgcagggccactacctggagtaccgggaggtgccccacagctccccgccctactacgagttcctgtggggcccccgcgcccacagcgagtccatcaagaagaaggtcctcgagttcctggccaagctgaacaacaccgtgcccagcagcttcccctcctggtacaaggacgccctcaaggacgtcgaggagcgggtgcaggccacgatcgacaccgcggacgacgccaccgtgatggccagcgagtccctgagcgtcatgtccagcaacgtgtccttcagcgactga

SEQ ID NO: 1301 - RNA, 2874 nt, synthetic construct
  misc_feature 1..2874: note = AAM08354_variant
  source 1..2874: mol_type = other RNA
atgagcctggtgtcccagaacagccgccggcgccggcgccgggtcgccaaggccaccgcgcacaactccagctggggcgagatgcaggcccccaacgccccggggctccccgccgacgtgcccggctccgacgtgccccaggggccgagcgactcccagatcctgcagggcctgtgcgccagcgaggggccctccaccagcgtcctccccacgtccgcggagggccccagcaccttcgtgccgcccaccatctccgaggccagctccgccagcggccagcccaccatctccgaggggcccggcacgagcgtgctgccgaccccctccgaggggctgagcaccagcggcccgcccaccatctccaaggggctctgcacgagcgtcaccctggccgcgtccgagggccgcaacaccagccggccgcccacctccagcgaggagccctccacgagcgtgccgcccaccgcctccgaggtgcccagcacctccctgccgcccacccccggcgaggggacgagcacctccgtcccgcccaccgcctacgagggccccagcacctccgtggtgcccacgcccgacgaggggcccagcacctccgtcctccccacccccggcgagggccccgggaccagcgtgcccctggccgccacggagggcctgtccaccagcgtgcaggcgaccccggacgaggggcccagcacctccgtcccgcccacggccaccgagggcctcagcacccccgtgccgcccacccgcgacgaggggccctccacgagcgtgcccgccacccccggcgagggcccctccaccagcgtcctgcccgccgcctccgacgggcagagcatctccctggtgccgacccggggcaaggggagctccacgagcgtgccgcccaccgcgaccgagggcctctccaccagcgtccagcccaccgccggggagggctccagcacgtccgtgccgcccacccccggcgggggcctgagcaccagcgtgccgcccaccgccacggaggagctgtccaccagcgtcccgcccacccccggggagggcccctccaccagcgtgctccccatccccggggagggcctgtccacgagcgtcccgcccaccgcctccgacggcagcgacacctccgtgccgcccacccccggggagggcgccagcacgctggtgcagcccaccgcgcccgacgggcccggctccagcgtcctccccaaccccggcgaggggccctccaccctgttcagctccagcgcctccgtggaccgcaaccccagcaagtgctccctggtgctcccgagcccccgggtcaccaaggccagcgtggactccgacagcgagggccccaagggggccgagggccccatcgagttcgaggtgctgcgcgactgcgagtccccgaacagcatctccatcatggggctgaacacgagccgggtcgccatcaccctcaagccccaggaccccatggagcagaacgtggcggagctgctgcagttcctcctggtgaaggaccagtccaagtaccccatccgcgagagcgagatgcgggagtacatcgtcaaggagtaccgcaaccagttcccggagatcctgcggcgcgccgccgcccacctcgagtgcatcttccggttcgagctgcgcgagctggaccccgaggcgcacacctacatcctcctgaacaagctgggccccgtgcccttcgagggcctcgaggagtccccgaacgggcccaagatgggcctgctgatgatgatcctcgggcagatcttcctgaacggcaaccaggccaaggaggccgagatctgggagatgctgtggcggatgggggtgcagcgcgagcgccggctcagcatcttcggcaaccccaagcgcctgctgtccgtcgagttcgtgtggcagcggtacctcgactaccgcccggtgaccgactgcaagcccgtcgagtacgagttcttctggggcccccggagccacctggagacgaccaagatgaagatcctgaagttcatggccaagatctacaacaaggaccccatggactggccggagaagtacaacgaggccctggaggaggacgcggcccgcgccttcgccgaggggtggcaggccctcccccacttccggcgccccttcttcgaggaggcggccgccgaggtgccctccccggacagcgaggtgtccagctactccagcaagtacgcgccccactcctggcccgagagccggctggagagcaaggcccgcaagctggtccagctgttcctcctgatggactccaccaagctccccatcccgaagaagggcatcctgtactacatcgggcgggagtgcagcaaggtgttccccgacctgctcaaccgcgccgcccggaccctgaaccacgtgtacggcacggagctggtcgtgctcgacccccgcaaccactcctacaccctgtacaaccggcgcgagatggaggagaccgaggagatcgtggacagccccaaccggccggggaacaacttcctgatgcaggtcctctccttcatcttcatcatgggcaaccacgcccgcgagagcgccgtgtgggcgttcctgcggggcctgggggtgcaggccggccgcaagcacgtcatcacgtgccgctacctctcccagcggtacatcgacagcctgcgcgtgcccgactccgaccccgtgcagtacgagttcgtctgggggccccgggcccgcctggagaccagcaagatgaaggccctccggtacgtggcccgcatccaccggaaggagccgcaggactggccccagcagtaccgcgaggcgatggaggacgaggccaaccgggccgacgtgggccaccgccagatcttcgtccacaacttccggtga

SEQ ID NO: 1302 - RNA, 1572 nt, synthetic construct
  misc_feature 1..1572: note = AAH93964_variant
  source 1..1572: mol_type = other RNA
atgagcctggtgtcccagaacgcccgccactgcagcgccgagatcaccgcggactacggcgacgggcggggcgagatccaggccaccaacgcctccgggagccccacgtccatgctcgtcgtggacgccccgcagtgcccccaggcccccatcaacagccagtgcgtgaacacctcccaggcggtccaggaccccaacgacctggaggtgctgatcgacgagcagagccgccggctcggcgccctgcgcgtgcacgacccgctggaggaccggtccatcgccctcgtcaacttcatgcgcatgaagtcccagaccgaggggagcatccagcagagcgagatgctggagttcctgcgggagtactccgaccagttccccgagatcctccgccgggccagcgcgcacctggaccaggtgttcggcctgaacctccgcgtgatcgacccccaggccgacacctacaacctggtctccaagcggggcttccagatcacggaccgcatcgccgagagcctggacatgcccaaggcctccctcctggccctggtgctcgggcacatcctgctgaacggcaaccgggcgcgcgaggccagcatctgggacctcctgctgaaggtggacatgtgggacaagccgcagcggatcaacaacctcttcgggaacacccgcaacctgctgaccaccgacttcgtctgcatgcggttcctcgagtactggcccgtgtacggcacgaaccccctggagttcgagttcctgtgggggtcccgcgcccaccgggagatcaccaagatggaggccctcaagttcgtgagcgacgcccacgacgaggagccctggagctggccggaggagtacaacaaggcgctggagggcgacaagaccaaggagcgctccctgaccgccggcctcgagttctggagcgaggacacgatgaacgacaaggccaacgacctggtccagctggccatctccgtgaccgaggagatgctccccatccaccaggacgagctgctggcccacaccgggaaggagttcgaggacgtgttccccaacatcctcaaccgggcgaccctgatcctggacatgttctacggcctcagcctgatcgaggtcgacacgtccgagcacatctacctgctcgtgcagcagcccgagagcgaggaggagcaggtcatgctggagtccctggggcgcccgacccaggagtacgtgatgcccatcctcggcctgatcttcctgatgggcaaccgcgtgaaggaggccaacgtgtggaacctgctccggcgcttcagcgtcgacgtggggcggaagcactccatcacccgcaagctgatgcggcagcgctacctggagtgccggcccctcagctactccaaccccgtcgagtacgagctgctgtggggcccgcgcgcccaccacgagaccatcaagatgaaggtgctcgagtacatggcccggctgtaccgcaagcggccccagaactggcccgagcagtaccgcgaggccgtggaggacgaggaggcgcgggccaagagcgaggccacgatcatgttcttcctggaccccacctga

SEQ ID NO: 1303 - RNA, 924 nt, synthetic construct
  misc_feature 1..924: note = CCDS3269.1_variant
  source 1..924: mol_type = other RNA
atgctgcagacccccgagagccgcggcctcccggtgccccaggccgagggggagaaggacggcgggcacgacggcgagacccgggcccccacggcgtcccaggagcgccccaaggaggagctgggggccggccgggaggagggcgccgccgagccggccctgacccgcaagggggcgcgggccctcgccgccaaggcgctggcccgccggcgcgcctaccggcgcctgaaccggaccgtcgccgagctcgtgcagttcctgctggtgaaggacaagaagaagtcccccatcacccgcagcgagatggtcaagtacgtgatcggcgacctcaagatcctgttccccgacatcatcgcccgggcggccgagcacctccgctacgtgttcgggttcgagctgaagcagttcgaccggaagcaccacacgtacatcctgatcaacaagctgaagcccctcgaggaggaggaggaggaggacctgggcggggacggcccgcgcctgggcctcctgatgatgatcctggggctcatctacatgcggggcaacagcgcccgcgaggcccaggtctgggagatgctgcggcgcctgggggtgcagccctccaagtaccacttcctcttcggctaccccaagcggctgatcatggaggacttcgtgcagcagcgctacctgagctaccgccgggtcccccacaccaacccgcccgagtacgagttctcctggggcccccgcagcaacctcgagatctccaagatggaggtgctggggttcgtggccaagctgcacaagaaggagccccagcactggccggtccagtaccgggaggcgctcgccgacgaggccgaccgcgcccgggccaaggcgcgcgccgaggccagcatgcgggcccgcgcctccgcgcgggccggcatccacctgtggtga

SEQ ID NO: 1304 - RNA, 660 nt, synthetic construct
  misc_feature 1..660: note = AAD31314_variant
  source 1..660: mol_type = other RNA
atgccccgcggccgcaagagccggcggcgccggaacgcccgcgccgcggaggagaaccggaacaaccgcaagatccaggcctccgaggccagcgagaccccgatggccgcctccgtggtcgcgagcacccccgaggacgacctgtccgggcccgaggaggaccccagcacgccggaggaggcctccaccacccccgaggaggccagctccaccgcccaggcgcagaagcccagcgtgccccggtccaacttccagggcacgaagaagtccctcctgatgagcatcctggccctcatcttcatcatggggaacagcgccaaggaggccctggtgtggaaggtcctgggcaagctcgggatgcagccgggccgccagcactccatcttcggcgaccccaagaagatcgtgaccgaggagttcgtgcggcgcgggtacctgatctacaagcccgtcccccggagctccccggtggagtacgagttcttctggggcccccgcgcccacgtggagagctccaagctgaaggtcatgcacttcgtggcgcgggtgcgcaaccggtgcagcaaggactggccctgcaactacgactgggacagcgacgacgacgccgaggtcgaggccatcctcaactccggggcccgcggctacagcgccccctga

SEQ ID NO: 1305 - RNA, 3750 nt, synthetic construct
  misc_feature 1..3750: note = CCDS73700.1_variant
  source 1..3750: mol_type = other RNA
atgagccagctgtccaagaacctcggcgacagctcccccccggccgaggcccccaagccccccgtgtacagccgcccgaccgtcctgatgcgggcgccccccgcctccagccgcgcccccccggtgccctgggacccccccccgatcgacctgcaggcctccctcgccgcgtggcaggccccccagcccgcctgggaggccccccaggggcagctgccggcgcccgtggtccccatgacccagcccccggccctgggcgggcccatcgtgcccgcccccccgctcggcgggcccatgggcaagccccccacgccgggcgtgctgatggtccacccccccccgcccggggcccccatggcccagcccccgacccccggcgtgctgatggtgcaccccagcgcgcccggggccccgatggcccaccccccccccccgggcacccccatgtcccacccccccccgcccgggacccccatggcccaccccccgccccccggcacgcccatggcccacccgccccccccgggcacccccatggtccacccccccccgcccgggacccccatggcgcaccccccgccccccggcacccccatggcccacccgcccccccccgggacgccgatggcccaccccccccccccgggcacccccatggcccacccccccccgcccggcacccccatggcccagcccccggcgcccggggtgctcatggcccagcccctgaccccgggcgtgctgatggtccagcccgccgcccccggggcccccatggtgcagccgccccccgcggccatgatgacgcagccccagccgagcggcgcccccatggccaagccccccgggccgggcgtgctcatgatccacccccccggcgcgcgggcccccatgacccagccgcccgcctccggggcccccatggcccagcccgcggccccgcccgcccagcccatggcccccccggcccagcccatggcgagctgggccccccaggcccagcccctgatcctgcagatccagtcccaggtcatccgcgccccgccccaggtgccccagggcccgcaggccccccccgcgcagctcgccacccccccggggtggcaggccaccagccccggctggcaggccacgcagcaggggtggcaggcgacccccctgacctggcagaccacgcaggtgacctggcaggcccccgccgtcacctggcaggtgccgccccccatgcggcagggccccccgcccatccgccccggccccccgcccatccggcccgggcccccgcccgtgcgccaggccccccccctgatccggcaggccccgcccgtcatccgccaggcgcccccggtgatccggcaggccccccccgtgatccgccaggcccccgccgtcatccggcaggccccgcccgtgatccgccaggcgccccccgtcatccggcaggccccgcccgtgatccgccaggccccccccctcatccggcaggccccgccccccatccgccccgccccgcaggtgctggcgacccagccccccctgtggcaggccctccccccgcccccccccctgcggcaggccccgcaggcccgcctgcccgcgccccaggtccaggccgccccccaggtgccgacggccccccccgccacccaggtgccggcggccccccccgccggcccccaggtcccgcagcccgtgctccccgcccccctgtccgccccgctgagcgcgccccaggccgtgcactgcccctccatcatctggcaggcccccaaggggcagccgcccgtcccccacgagatccccaccagcatggagttccaggaggtgcagcagacccaggccctcgcctggcaggcgcagaaggccccgacgcacatctggcagcccctgcccgcccaggaggcccagcggcaggcccccccgctggtgcagctcgagcagcccttccagggcgcgcccccctcccagaaggccgtccagatccagctgccgccccagcaggcccaggccagcgggccccaggcggaggtgcccaccctgccgctccagcccagctggcaggcccccccggccgtgctgcaggcccagcccggcccccccgtcgccgcggccaacttcccgctgggctccgccaagagcctcatgaccccctccggggagtgccgcgccagctccatcgaccgccggggcagctccaaggagcgccggaccagctccaaggagcgccgggcccccagcaaggaccgcatgatcttcgcggccacgttctgcgcccccaaggccgtgtccgccgcgcgggcccacctgccggccgcctggaagaacctgcccgcgacccccgagaccttcgcccccagctccagcgtgttcccggccacctcccagttccagcccgccagcctcaacgccttcaaggggccctccgcggccagcgagacgcccaagtccctgccgtacgccctgcaggaccccttcgcctgcgtcgaggccctccccgcggtgccctgggtgccgcagcccaacatgaacgccagcaaggccagccaggccgtccccaccttcctgatggccaccgcggccgccccccaggccaccgcgaccacgcaggaggcctccaagaccagcgtggagccgccccgccggtccggcaaggccacccgcaagaagaagcacctggaggcccaggaggacagccggggccacaccctcgccttccacgactggcaggggccccgcccctgggagaacctgaacctgtccgactgggaggtgcagagcccgatccaggtctccggcgactgggagcaccccaacacgccccgggggctcagcggctgggaggggccgtccaccagccgcatcctgtccggctgggagggccccagcgcgtcctgggccctgagcgcctgggaggggccctccaccagccgggccctgggcctctccgagagccccgggagctccctgccggtggtggtcagcgaggtggcctccgtgagccccggctccagcgcgacccaggacaactccaaggtcgaggcccagcccctgagccccctcgacgagcgcgccaacgccctggtgcagttcctgctcgtgaaggaccaggccaaggtcccggtgcagcggtccgagatggtgaaggtcatcctgcgcgagtacaaggacgagtgcctggacatcatcaaccgggcgaacaacaagctcgagtgcgccttcgggtaccagctgaaggagatcgacacgaagaaccacgcctacatcatcatcaacaagctgggctaccacaccggcaacctcgtggccagctacctggaccgccccaagttcgggctgctcatggtggtcctgtccctgatcttcatgaagggcaactgcgtgcgcgaggacctcatcttcaacttcctgttcaagctggggctcgacgtgcgggagaccaacggcctgttcgggaacaccaagaagctgatcacggaggtcttcgtgcgccagaagtacctcgagtaccggcgcatcccctacaccgagcccgccgagtacgagttcctgtggggcccgcgggcgttcctggagaccagcaagatgctcgtgctgcgcttcctggccaagctccacaagaaggacccccagtcctggcccttccactacctggaggccctggccgagtgcgagtgggaggacaccgacgaggacgagcccgacacgggcgacagcgcgcacgggccgacctcccggccccccccccgctga

SEQ ID NO: 1306 - RNA, 282 nt, synthetic construct
  misc_feature 1..282: note = AAC39608_variant
  source 1..282: mol_type = other RNA
atgaagctgctcatggtgctgatgctggccgccctcagccagcactgctacgcgggctccgggtgcccgctgctggagaacgtcatcagcaagaccatcaacccccaggtgtccaagaccgagtacaaggagctcctgcaggagttcatcgacgacaacgccacgaccaacgccatcgacgagctgaaggagtgcttcctcaaccagaccgacgagaccctgagcaacgtggaggtcttcatgcagctgatctacgactccagcctctgcgacctgttctga

SEQ ID NO: 1307 - RNA, 363 nt, synthetic construct
  misc_feature 1..363: note = AAH67220_variant
  source 1..363: mol_type = other RNA
atgaagctgctcatggtgctgatgctggccgccctcagccagcactgctacgcgggctccgggtgccccctgctggagaacgtcatcagcaagaccatcaacccccaggtgtccaagaccgagtacaaggagctcctgcaggagttcatcgacgacaacgccacgaccaacgccatcgacgagctgaaggagtgcttcctcaaccagaccgacgagaccctgagcaacgtggaggtcttcatggtgatctccttcagctcctacaagctgttcaagagcccggaccagggccaggtggggtccagcttcctcacggacaacgccaaggccacctccgagcaggcgttcagctacatcggctga

SEQ ID NO: 1308 - RNA, 357 nt, synthetic construct
  misc_feature 1..357: note = AAA19238_variant
  source 1..357: mol_type = other RNA
atgccccgcgaggacgcccacttcatctacggctaccccaagaaggggcacggccacagctacaccaccgccgaggaggcggccgggatcggcatcctgacggtgatcctcggggtcctgctgctcatcggctgctggtactgccggcgccggaacggctaccgcgccctgatggacaagtccctgcacgtggggacccagtgcgccctcacccggcgctgcccccaggagggcttcgaccaccgggacagcaaggtgtccctgcaggagaagaactgcgagcccgtcgtgcccaacgccccgcccgcgtacgagaagctgagcgccgagcagtccccgccgccctacagcccctga

SEQ ID NO: 1309 - RNA, 1482 nt, synthetic construct
  misc_feature 1..1482: note = EAW93427_variant
  source 1..1482: mol_type = other RNA
atgctgccccgctgggagctcgccctgtacctgctcgccagcctgggcttccacttctactccttctacgaggtgtacaaggtcagccgggagcacgaggaggagctggaccaggagttcgagctcgagaccgacaccctgttcgggggcctgaagaaggacgcgacggacttcgagtggtccttctggatggagtgggggaagcagtggctcgtgtggctgctgctcggccacatggtggtcagccagatggccaccctgctggcccgcaagcaccggccgtggatcctcatgctgtacgggatgtgggcctgctggtgcgtgctgggcacccccggcgtggccatggtcctcctgcacaccacgatctccttctgcgtggcgcagttccgcagccagctgctcacctggctgtgctccctgctcctgctgagcaccctccggctgcagggggtggaggaggtcaagcgccggtggtacaagaccgagaacgagtactacctgctccagttcacgctgaccgtgcgctgcctgtactacacctccttcagcctcgagctgtgctggcagcagctgcccgccgcctccaccagctactccttcccctggatgctcgcctacgtgttctactacccggtcctgcacaacggccccatcctgagcttctccgagttcatcaagcagatgcagcagcaggagcacgacagcctcaaggcgtccctgtgcgtgctggccctcgggctgggccggctgctctgctggtggtggctggccgagctgatggcccacctcatgtacatgcacgccatctacagctccatccccctgctggagacggtgagctgctggaccctcgggggcctggcgctggcccaggtcctgttcttctacgtgaagtacctcgtgctgttcggcgtccccgccctgctcatgcgcctggacgggctgaccccgcccgccctcccccggtgcgtgagcaccatgttctccttcacgggcatgtggcgctacttcgacgtggggctgcacaacttcctgatccggtacgtctacatccccgtgggcggcagccagcacgggctcctgggcaccctgttctccaccgccatgaccttcgcgttcgtgagctactggcacgggggctacgactacctctggtgctgggccgccctgaactggctgggggtcacggtggagaacggcgtccgccggctcgtggagaccccgtgcatccaggactccctggcccgctacttcagcccccaggcccggcgccggttccacgcggccctggcctcctgcagcacctccatgctcatcctgagcaacctggtgttcctcggcgggaacgaggtcggcaagacctactggaaccgcatcttcatccaggggtggccctgggtgacgctgtccgtgctgggcttcctctactgctacagccacgtcgggatcgcctgggcccagacctacgcgaccgactga

SEQ ID NO: 1310 - RNA, 954 nt, synthetic construct
  misc_feature 1..954: note = AAD41349_variant
  source 1..954: mol_type = other RNA
atggccgtgcagggcagccagcgccggctgctcgggtccctgaacagcacccccaccgccatcccccagctgggcctcgcggccaaccagacgggggcccgctgcctggaggtctccatcagcgacggcctgttcctctccctggggctggtgagcctcgtggagaacgccctggtcgtggccaccatcgcgaagaaccggaacctgcactcccccatgtactgcttcatctgctgcctcgccctgagcgacctgctcgtgtccggcagcaacgtcctggagaccgccgtgatcctgctcctggaggccggcgcgctggtggcccgcgccgccgtcctccagcagctggacaacgtgatcgacgtgatcacgtgctccagcatgctgtccagcctctgcttcctgggggccatcgcggtcgaccggtacatctccatcttctacgccctgcgctaccacagcatcgtgaccctcccccgggcccgccgggccgtggccgcgatctgggtcgcctccgtggtgttcagcaccctgttcatcgcctactacgaccacgtcgccgtgctgctctgcctggtggtcttcttcctggccatgctcgtgctgatggcggtgctgtacgtccacatgctcgcccgcgcctgccagcacgcccagggcatcgcccggctgcacaagcgccagcggcccgtgcaccaggggttcggcctgaagggggcggtcaccctcaccatcctgctgggcatcttcttcctctgctggggcccgttcttcctgcacctgacgctcatcgtgctgtgccccgagcacccgacctgcgggtgcatcttcaagaacttcaacctgttcctcgccctgatcatctgcaacgccatcatcgaccccctgatctacgccttccactcccaggagctgcgccggaccctcaaggaggtgctgacctgcagctggtga

SEQ ID NO: 1311 - RNA, 954 nt, synthetic construct; identical to SEQ ID NO: 1310
  misc_feature 1..954: note = AHC09522_variant
  source 1..954: mol_type = other RNA

SEQ ID NO: 1312 - RNA, 954 nt, synthetic construct
  misc_feature 1..954: note = AHC09804_variant
  source 1..954: mol_type = other RNA
atggccgtgcagggcagccagcgccggctgctcgggtccctgaacagcacccccaccgccatcccccagctgggcctcgcggccaaccagacgggggcccgctgcctggaggtctccatcagcgacggcctgttcctctccctggggctggtgagcctcgtggagaacgccctggtcgtggccaccatcgcgaagaaccggaacctgcactcccccatgtactgcttcatctgctgcctcgccctgagcgacctgctcgtgtccggcagcaacgtcctggagaccgccgtgatcctgctcctggaggccggcgcgctggtggcccgcgccgccgtcctccagcagctggacaacgtgatcgacgtgatcacgtgctccagcatgctgtccagcctctgcttcctgggggccatcgcggtcgaccggtacatctccatcttctacgccctgcgctaccacagcatcgtgaccctcccccgggcccgccaggccgtggccgcgatctgggtcgcctccgtggtgttcagcaccctgttcatcgcctactacgaccacgtcgccgtgctgctctgcctggtggtcttcttcctggccatgctcgtgctgatggcggtgctgtacgtccacatgctcgcccgggcctgccagcacgcccagggcatcgcccgcctgcacaagcggcagcgccccgtgcaccaggggttcggcctgaagggggcggtcaccctcaccatcctgctgggcatcttcttcctctgctggggcccgttcttcctgcacctgacgctcatcgtgctgtgccccgagcacccgacctgcgggtgcatcttcaagaacttcaacctgttcctcgccctgatcatctgcaacgccatcatcgaccccctgatctacgccttccactcccaggagctgcggcgcaccctcaaggaggtgctgacctgcagctggtga

SEQ ID NO: 1313 - RNA, 954 nt, synthetic construct
  misc_feature 1..954: note = BAE94313_variant
  source 1..954: mol_type = other RNA
atggccgtgcagggcagccagcgccggctgctcgggtccctgaacagcacccccaccgccatcccccagctgggcctcgcggccaaccagacgggggcccgctgcctggaggtctccatcagcgacggcctgttcctctccctggggctggtgagcctcgtggagaacgccctggtcgtggccaccatcgcgaagaaccggaacctgcactcccccatgtactgcttcatctgctgcctcgccctgagcgacctgctcgtgtccggcagcaacgtcctggagaccgccgtgatcctgctcctggaggccggcgcgctggtggcccgcgccgccgtcctccagcagctggacaacgtgaccgacgtgatcacgtgctccagcatgctgtccagcctctgcttcctgggggccatcgcggtcgaccggtacatctccatcttctacgccctgcgctaccacagcatcgtgaccctcccccgggcccgccgggccgtggccgcgatctgggtcgcctccgtggtgttcagcaccctgttcatcgcctactacgaccacgtcgccgtgctgctctgcctggtggtcttcttcctggccatgctcgtgctgatggcggtgctgtacgtccacatgctcgcccgcgcctgccagcacgcccagggcatcgcccggctgcacaagcgccagcggcccgtgcaccaggggttcggcctgaagggggcggtcaccctcacgatcctgctgggcatcttcttcctctgctggggcccgttcttcctgcacctgaccctcatcgtgctgtgccccgagcacccgacctgcgggtgcatcttcaagaacttcaacctgttcctcgccctgatcatctgcaacgccatcatcgaccccctgatctacgccttccactcccaggagctgcgccggaccctcaaggaggtgctgacgtgcagctggtga

SEQ ID NO: 1314 - RNA, 954 nt, synthetic construct
  misc_feature 1..954: note = AHC09531_variant
  source 1..954: mol_type = other RNA
atggccgtgcagggcagccagcgccggctgctcgggtccctgaacagcacccccaccgccatcccccagctgggcctcgcggccaaccagacgggggcccgctgcctggaggtctccatcagcgacggcctgttcctctccctggggctggtgagcctcgtggagaacgccctggtcgtggccaccatcgcgaagaaccggaacctgcactcccccatgtactgcttcatctgctgcctcgccctgagcgacctgctcgtgtccggcagcaacatgctggagaccgccgtcatcctgctcctggaggccggcgcgctggtggcccgcgccgccgtgctccagcagctggacaacgtcatcgacgtgatcacgtgctccagcatgctgtccagcctctgcttcctgggggccatcgcggtggaccggtacatctccatcttctacgccctgcgctaccacagcatcgtcaccctcccccgggcccgccgggccgtggccgcgatctgggtggcctccgtcgtgttcagcaccctgttcatcgcctactacgaccacgtggccgtcctgctctgcctggtggtgttcttcctggccatgctcgtcctgatggcggtgctgtacgtgcacatgctcgcccgcgcctgccagcacgcccagggcatcgcccggctgcacaagcgccagcggcccgtccaccaggggttcggcctgaagggggcggtgaccctcaccatcctgctgggcatcttcttcctctgctggggcccgttcttcctgcacctgacgctcatcgtcctgtgccccgagcacccgacctgcgggtgcatcttcaagaacttcaacctgttcctcgccctgatcatctgcaacgccatcatcgaccccctgatctacgccttccactcccaggagctgcgccggaccctcaaggaggtgctgacctgcagctggtga

SEQ ID NO: 1315 - RNA, 954 nt, synthetic construct
  misc_feature 1..954: note = BAE94311_variant
  source 1..954: mol_type = other RNA
atggccgtgcagggcagccagcgccggctgctcgggtccctgaacagcacccccaccgccatcccccagctgggcctcgcggccaaccagacgggggcccgctgcctggaggtctccatcagcgacggcctgttcctctccctggggctggtgagcctcgtggagaacgccctggtcgtggccaccatcgcgaagaaccagaacctgcactcccccatgtactgcttcatctgctgcctcgccctgagcgacctgctcgtgtccggcagcaacgtcctggagaccgccgtgatcctgctcctggaggccggcgcgctggtggcccgggccgccgtcctccagcagctggacaacgtgatcgacgtgatcacgtgctccagcatgctgtccagcctctgcttcctgggggccatcgcggtcgaccgctacatctccatcttctacgccctgcggtaccacagcatcgtgaccctcccccgcgcccggcaggccgtggccgcgatctgggtcgcctccgtggtgttcagcaccctgttcatcgcctactacgaccacgtcgccgtgctgctctgcctggtggtcttcttcctggccatgctcgtgctgatggcggtgctgtacgtccacatgctcgcccgcgcctgccagcacgcccagggcatcgcccggctgcacaagcgccagcggcccgtgcaccaggggttcggcctgaagggggcggtcaccctcaccatcctgctgggcatcttcttcctctgctggggcccgttcttcctgcacctgacgctcatcgtgctgtgccccgagcacccgacctgcgggtgcatcttcaagaacttcaacctgttcctcgccctgatcatctgcaacgccatcatcgaccccctgatctacgccttccactcccaggagctgcgccggaccctcaaggaggtgctgacctgcagctggtga

SEQ ID NO: 1316 - RNA, 954 nt, synthetic construct
  misc_feature 1..954: note = BAE94309_variant
  source 1..954: mol_type = other RNA
atggccgtgcagggcagccagcgccggctgctcgggtccctgaacagcacccccaccgccatcccccagctgggcctcgcggccaaccagacgggggcccgctgcctggaggtctccatcagcgacggcctgttcctctccctggggctggtgagcctcgtggagaacgccctggtcgtggccaccatcgcgaagaaccggaacctgcactcccccatgtactgcttcatctgctgcctcgccctgagcgacctgctcgtgtccggcagcaacgtcctggagaccgccgtgatcctgctcctggaggccggcgcgctggtggcccgcgccgccgtcctccagcagctggacaacgtgatcgacgtgatcacgtgctccagcatgctgtccagcctctgcttcctgggggccatcgcggtcgaccggtacatctccatcttctacgccctgcgctaccacagcatcgtgaccctcccccgggcccgccaggccgtgggcgccatctgggtcgcgtccgtggtgttcagcaccctgttcatcgcctactacgaccacgtcgccgtgctgctctgcctggtggtcttcttcctggccatgctcgtgctgatggccgtgctgtacgtccacatgctcgcgcgggcctgccagcacgcccaggggatcgcccgcctgcacaagcggcagcgccccgtgcaccagggcttcgggctgaagggcgccgtcaccctcaccatcctgctgggcatcttcttcctctgctgggggccgttcttcctgcacctgacgctcatcgtgctgtgccccgagcacccgacctgcggctgcatcttcaagaacttcaacctgttcctcgcgctgatcatctgcaacgccatcatcgaccccctgatctacgccttccactcccaggagctgcggcgcaccctcaaggaggtgctgacctgcagctggtga

SEQ ID NO: 1317 - RNA, 954 nt, synthetic construct
  misc_feature 1..954: note = BAE94308_variant
  source 1..954: mol_type = other RNA
atggccgtgcagggcagccagcgccggctgctcgggtccctgaacagcacccccaccgccatcccccagctgggcctcgcggccaaccagacgggggcccgctgcctggaggtctccatcagcgacggcctgttcctctccctggggctggtgagcctcgtggagaacgccctggtcgtggccaccatcgcgaagaaccggaacctgcactcccccatgtactgcttcatctgctgcctcgccctgagcgacctgctcgtgtccggcagcaacgtcctggagaccgccgtgatcctgctcctggaggccggcgcgctggtggcccgcgccgccgtcctccagcagctggacaacgtgaccgacgtgatcacgtgctccagcatgctgtccagcctctgcttcctgggggccatcgcggtcgaccggtacatctccatcttctacgccctgcgctaccacagcatcgtgaccctcacccgggcccgccgggccgtggccgcgatctgggtcgcctccgtggtgttcagcaccctgttcatcgcctactacgaccacgtcgccgtgctgctctgcctggtggtcttcttcctggccatgctcgtgctgatggcggtgctgtacgtccacatgctcgcccgcgcctgccagcacgcccagggcatcgcccggctgcacaagcgccagcggcccgtgcaccaggggttcggcctgaagggggcggtcacgctcaccatcctgctgggcatcttcttcctctgctggggccccttcttcctgcacctgaccctcatcgtgctgtgcccggagcacccgacctgcgggtgcatcttcaagaacttcaacctgttcctcgccctgatcatctgcaacgccatcatcgaccccctgatctacgccttccactcccaggagctgcgccggacgctcaaggaggtgctgacctgcagctggtga

SEQ ID NO: 1318 - RNA, 954 nt, synthetic construct
  misc_feature 1..954: note = BAE94307_variant
  source 1..954: mol_type = other RNA
atggccgtgcagggcagccagcgccggctgctcgggtccctgaacagcacccccaccgccatcccgcagctgggcctcgcggccaaccagacgggggcccgctgcctggaggtctccatcagcgacggcctgttcctctccctggggctggtgagcctcgtggagaacgccctggtcgtggccaccatcgcgaagaaccggaacctgcactcccccatgtactgcttcatctgctgcctcgccctgagcgacctgctcgtgtccggcagcaacatgctggagaccgccgtcatcctgctcctggaggccggcgcgctggtggcccgcgccgccgtgctccagcagctggacaacgtcatcgacgtgatcacgtgctccagcatgctgtccagcctctgcttcctgggggccatcgcggtggaccggtacatctccatcttctacgccctgcgctaccacagcatcgtcatcctcccccgggcccgccgggccgtggccgcgatctgggtggcctccgtcgtgttcagcaccctgttcatcgcctactacgaccacgtggccgtcctgctctgcctggtggtgttcttcctggccatgctcgtcctgatggcggtgctgtacgtgcacatgctcgcccgcgcctgccagcacgcccagggcatcgcccggctgcacaagcgccagcggcccgtccaccaggggttcggcctgaagggggcggtgaccctcaccatcctgctgggcatcttcttcctctgctggggcccgttcttcctgcacctgaccctcatcgtcctgtgccccgagcaccccacgtgcgggtgcatcttcaagaacttcaacctgttcctcgccctgatcatctgcaacgccatcatcgaccccctgatctacgccttccactcccaggagctgcgccggaccctcaaggaggtgctgacctgcagctggtga

SEQ ID NO: 1319 - RNA, 951 nt, synthetic construct
  misc_feature 1..951: note = BAE94306_variant
  source 1..951: mol_type = other RNA
atggccgtgcagggcagccagcgccggctgctcgggtccctgaacagcacccccaccgccatcccccagctgggcctcgcggccaaccagacgggggcccgctgcctggaggtctccatcagcgacggcctgttcctctccctggggctggtgagcctcgtggagaacgccctggtcgtggccaccatcgcgaagaaccggaacctgcactcccccatgtactgcttcatctgctgcctcgccctgagcgacctgctcgtgtccggcagcaacgtcctggagaccgccgtgatcctgctcctggaggccggcgcgctggtggcccgcgccgccgtcctccagcagctggacaacgtgatcgacgtgatcacgtgctccagcatgctgtccagcctctgcttcctgggggccatcgcggtcgaccggtacatctccatctacgccctgcgctaccacagcatcgtgaccctcccccgggcccgccaggccgtggccgcgatctgggtcgcctccgtggtgttcagcaccctgttcatcgcctactacgaccacgtcgccgtgctgctctgcctggtggtcttcttcctggccatgctcgtgctgatggcggtgctgtacgtccacatgctcgcccgggcctgccagcacgcccagggcatcgcccgcctgcacaagcggcagcgccccgtgcaccaggggttcggcctgaagggggcggtcaccctcaccatcctgctgggcatcttcttcctctgctggggcccgttcttcctgcacctgacgctcatcgtgctgtgccccgagcacccgacctgcgggtgcatcttcaagaacttcaacctgttcctcgccctgatcatctgcaacgccatcatcgaccccctgatctacgccttccactcccaggagctgcggcgcaccctcaaggaggtgctgacctgcagctggtga

SEQ ID NO: 1320 - RNA, 954 nt, synthetic construct
  misc_feature 1..954: note = AAQ62977_variant
  source 1..954: mol_type = other RNA
atggccgtgcagggcagccagcgccggctgctcgggtccctgaacagcacccccaccgccatcccccagctgggcctcgcggccaaccagacgggggcccgctgcctggaggtctccatcagcgacggcctgttcctctccctggggctggtgagcctcgtggagaacgccctggtcgtggccaccatcgcgaagaaccggaacctgcactcccccatgtactgcttcatctgctgcctcgccctgagcgacctgctcgtgtccggcagcaacgtcctggagaccgccgtgatcctgctcctggaggccggcgcgctggtggcccgcgccgccgtcctccagcagctggacaacgtgatcgacgtgatcacgtgctccagcatgctgtccagcctctgcttcctgggggccatcgcggtcgaccggtacatctccatcttctacgccctgcgctaccacagcatcgtgaccctcccccgggcccgccgggccgtggccgcgatctgggtcgcctccgtggtgttcagcaccctgttcatcgcctactacgaccacgtcgccgtgctgctctgcctggtggtcttcttcctggccatgctcgtgctgatggcggtgctgtacgtccacatgctcgcccgcgcctgccagcacgcccagggcatcgcccggctgcacaagcgccagcggcccgtgcaccaggggttcggcctgaagggggcggtcaccctcaccatcctgctgggcatcttcttcctctgctggggcccgttcttcctgcacctgacgctcatcatcctgtgccccgagcacccgacctgcgggtgcatcttcaagaacttcaacctgttcctcgccctgatcatctgcaacgccatcatcgaccccctgatctacgccttccactcccaggagctgcgccggaccctcaaggaggtgctgacctgcagctggtga

SEQ ID NO: 1321 - RNA, 954 nt, synthetic construct
  misc_feature 1..954: note = AAQ62975_variant
  source 1..954: mol_type = other RNA
atggccgtgcagggcagccagcgccggctgctcgggtccctgaacagcacccccaccgccatcccccagctgggcctcgcggccaaccagacgggggcccgctgcctggaggtctccatcagcgacggcctgttcctctccctggggctggtgagcctcgtggagaacgccctggtcgtggccaccatcgcgaagaaccggaacctgcactcccccatgtactgcttcatctgctgcctcgccctgagcgacctgctcgtgtccggcagcaacgtcctggagaccgccgtgatcctgctcctggaggccggcgcgctggtggcccgcgccgtcgtgctccagcagctggacaacgtgatcgacgtcatcacgtgctccagcatgctgtccagcctctgcttcctgggggccatcgccgtggaccggtacatctccatcttctacgcgctgcgctaccacagcatcgtgaccctcccccgggcccgccgggccgtcgccgccatctgggtggcgtccgtggtcttcagcaccctgttcatcgcctactacgaccacgtggccgtgctgctctgcctggtcgtgttcttcctggccatgctcgtgctgatggccgtcctgtacgtgcacatgctcgcgcgcgcctgccagcacgcccagggcatcgcccggctgcacaagcgccagcggcccgtccaccaggggttcggcctgaagggggccgtgaccctcaccatcctgctgggcatcttcttcctctgctggggcccgttcttcctgcacctgacgctcatcgtgctgtgccccgagcacccgacctgcgggtgcatcttcaagaacttcaacctgttcctcgcgctgatcatctgcaacgccatcatcgaccccctgatctacgccttccactcccaggagctgcgccggaccctcaaggaggtcctgacctgcagctggtga

SEQ ID NO: 1322 - RNA, 954 nt, synthetic construct
  misc_feature 1..954: note = AAQ62974_variant
  source 1..954: mol_type = other RNA
atggccgtgcagggcagccagcgccggctgctcgggtccctgaacagcacccccaccgccatcccccagctgggcctcgcggccaaccagacgggggcccgctgcctggaggtctccatcagcgacggcctgttcctctccctggggctggtgagcctcgtggagaacgccctggtcgtggccaccatcgcgaagaaccggaacctgcactcccccatgtactgcttcatctgctgcctcgccctgagcgacctgctcgtgtccggcagcaacgtcctggagaccgccgtgatcctgctcctggaggccggcgcgctggtggcccgcgccgccgtcctccagcagctggacaacgtgatcgacgtgatcacgtgctccagcatgctgtccagcctctgcttcctgggggccatcgcggtcgaccggtacatctccatcttctacgccctgcgctaccacagcatcgtgaccctcccccgggcccgccgggccgtggccgcgatctgggtcgcctccgtggtgttcagcaccctgttcatcgcctactacgaccacgtcgccgtgctgctctgcctggtggtcttcttcctggccatgctcgtgctgatggcggtgctgtacgtccacatgctcgcccgcgcctgccagcacgcccagggcatcgcccggctgcacaagcgccagcggcccgtgcaccaggggttcggcctgaagggggcggtcaccctcaccatcctgctgggcatcttcttcctctgctggggcccgttcttcctgcacctgacgctcatcgtgctgtgccccgagcacccgacctgcgggtgcatcttcaagaacttcaacctgttcctcgccctgatcatctgcaacgccatcatcgaccccctgatctacgccttccactcccaggagctgcgccggaccctcaaggaggtgctgacccgcagctggtga

SEQ ID NO: 1323 - RNA, 954 nt, synthetic construct
  misc_feature 1..954: note = AAQ62973_variant
  source 1..954: mol_type = other RNA
atggccgtgcagggcagccagcgccggctgctcgggtccctgaacagcacccccaccgccatcccccagctgggcctcgcggccaaccagacgggggcccgctgcctggaggtctccatcagcgacggcctgttcctctccctggggctggtgagcctcgtggagaacgccctggtcgtggccaccatcgcgaagaaccggaacctgcactcccccatgtactgcttcatctgctgcctcgccctgagcgacctgctcgtgtccggcagcaacgtcctggagaccgccgtgatcctgctcctggaggccggcgcgctggtggcccgcgccgccgtcctccagcagctggacaacgtgatcgacgtgatcacgtgctccagcatgctgtccagcctctgcttcctgggggccatcgcggtcgaccggtacatctccatcttctacgccctgcgctaccacagcatcgtgaccctcccccgggcccgccgggccgtggccgcgatctgggtcgcctccgtggtgttcagcaccctgttcatcgcctactacgaccacgtcgccgtgctgctctgcctggtggtcttcttcctggccatgctcgtgctgatggcggtgctgtacgtccacatgctcgcccgcgcctgccagcacgcccagggcatcgcccggctgcacaagcgccagcggcccgtgcaccaggggttcggcctgaagggggcggtcaccctcaccatcctgctgggcatcttcttcctctgctggggcccgttcttcctgcacctgacgctcatcgtgctgtgccccgagcacccgacctgcgggtgcatcttcaagaacttcaacctgttcctcgccctgatcatctgcaacgccatcatcgaccccctgatctacgccttccactcccaggagctgcgccggatgctcaaggaggtgctgacctgcagctggtga

SEQ ID NO: 1324 - RNA, 954 nt, synthetic construct
  misc_feature 1..954: note = AAQ62972_variant
  source 1..954: mol_type = other RNA
atggccgtgcagggcagccagcgccggctgctcgggtccctgaacagcacccccaccgccatcccccagctgggcctcgcggccaaccagacgggggcccgctgcctggaggtctccatcagcgacggcctgttcctctccctggggctggtgagcctcgtggagaacgccctggtcgtggccaccatcgcgaagaaccggaacctgcactcccccatgtactgcttcatctgctgcctcgccctgagcgacctgctcgtgtccggcagcaacgtcctggagaccgccgtgatcctgctcctggaggccggcgcgctggtggcccgcgccgccgtcctccagcagctggacaacgtgatcgacgtgatcacgtgctccagcatgctgtccagcctctgcttcctgggggccatcgcggtcgaccggtacatctccatcttctacgccctgcgctaccacagcatcgtgaccctcccccgggcccgccgggccgtggccgcgatctgggtcgcctccgtggtgttcagcaccctgttcatcgcctactacgaccacgtcgccgtgctgctctgcctggtggtcttcttcctggccatgctcgtgctgatggcggtgctgtacgtccacatgctcgcctgggcctgccagcacgcccagggcatcgcccgcctgcacaagcggcagcgccccgtgcaccaggggttcggcctgaagggggcggtcaccctcaccatcctgctgggcatcttcttcctctgctggggcccgttcttcctgcacctgacgctcatcgtgctgtgccccgagcacccgacctgcgggtgcatcttcaagaacttcaacctgttcctcgccctgatcatctgcaacgccatcatcgaccccctgatctacgccttccactcccaggagctgcggcgcaccctcaaggaggtgctgacctgcagctggtga

SEQ ID NO: 1325 - RNA, 954 nt, synthetic construct
  misc_feature 1..954: note = AAQ62971_variant
  source 1..954: mol_type = other RNA
atggccgtgcagggcagccagcgccggctgctcgggtccctgaacagcacccccaccgccatcccccagctgggcctcgcggccaaccagacgggggcccgctgcctggaggtctccatcagcgacggcctgttcctctccctggggctggtgagcctcgtggagaacgccctggtcgtggccaccatcgcgaagaaccggaacctgcactcccccatgtactgcttcatctgctgcctcgccctgagcgacctgctcgtgtccggcagcaacgtcctggagaccgccgtgatcctgctcctggaggccggcgcgctggtggcccgcgccgccgtcctccagcagctggacaacgtgatcgacgtgatcacgtgctccagcatgctgtccagcctctgcttcctgggggccatcgcggtcgaccggtacatctccatcttctacgccctgcgctaccacagcatcgtgaccctcccccaggcccggcgcgccgtggccgcgatctgggtcgcctccgtggtgttcagcaccctgttcatcgcctactacgaccacgtcgccgtgctgctctgcctggtggtcttcttcctggccatgctcgtgctgatggcggtgctgtacgtccacatgctcgcccgggcctgccagcacgcccagggcatcgcccgcctgcacaagcggcagcgccccgtgcaccaggggttcggcctgaagggggcggtcaccctcaccatcctgctgggcatcttcttcctctgctggggcccgttcttcctgcacctgacgctcatcgtgctgtgccccgagcacccgacctgcgggtgcatcttcaagaacttcaacctgttcctcgccctgatcatctgcaacgccatcatcgaccccctgatctacgccttccactcccaggagctgcggcgcaccctcaaggaggtgctgacctgcagctggtga

SEQ ID NO: 1326 - RNA, 954 nt, synthetic construct
  misc_feature 1..954: note = AAQ62970_variant
  source 1..954: mol_type = other RNA
atggccgtgcagggcagccagcgccggctgctcgggtccctgaacagcacccccaccgccatcccccagctgggcctcgcggccaaccagacgggggcccgctgcctggaggtctccatcagcgacggcctgttcctctccctggggctggtgagcctcgtggagaacgccctggtcgtggccaccatcgcgaagaaccggaacctgcactcccccatgtactgcttcatctgctgcctcgccctgctggacctcctggtgagcggctccaacgtcctggagaccgccgtgatcctcctgctggaggccggcgcgctcgtggcccgcgccgccgtcctgcagcagctggacaacgtgatcgacgtgatcacgtgcagctccatgctcagctccctgtgcttcctgggggccatcgcggtcgaccggtacatcagcatcttctacgccctccgctaccactccatcgtgaccctgccccgggcccgccgggccgtggccgcgatctgggtcgccagcgtggtgttctccaccctgttcatcgcctactacgaccacgtcgccgtgctcctgtgcctggtggtcttcttcctcgccatgctggtgctgatggcggtgctctacgtccacatgctggcccgcgcctgccagcacgcccagggcatcgcccggctgcacaagcgccagcggcccgtgcaccaggggttcggcctcaagggggcggtcaccctgaccatcctgctcggcatcttcttcctgtgctggggcccgttcttcctgcacctcacgctgatcgtgctgtgccccgagcacccgacctgcgggtgcatcttcaagaacttcaacctcttcctggccctgatcatctgcaacgccatcatcgaccccctgatctacgccttccacagccaggagctccgccggaccctgaaggaggtgctgacctgctcctggtga

SEQ ID NO: 1327 - RNA, 954 nt, synthetic construct
  misc_feature 1..954: note = AAQ62969_variant
  source 1..954: mol_type = other RNA
atggccgtgcagggcagccagcgccggctgctcgggtccctgaacagcacccccaccgccatcccccagctgggcctcgcggccaaccagacgggggcccgctgcctggaggtctccatcagcgacggcctgctcctgtccctggggctcgtgagcctggtggagaacgccctggtcgtggccaccatcgcgaagaaccggaacctccactcccccatgtactgcttcatctgctgcctggccctgagcgacctcctggtgtccggcagcaacgtcctggagaccgccgtgatcctcctgctggaggccggcgcgctcgtggcccgcgccgccgtcctgcagcagctggacaacgtgatcgacgtgatcacgtgctccagcatgctctccagcctgtgcttcctgggggccatcgcggtcgaccggtacatctccatcttctacgccctccgctaccacagcatcgtgaccctgccccgggcccgccgggccgtggccgcgatctgggtcgcctccgtggtgttcagcaccctgttcatcgcctactacgaccacgtcgccgtgctcctgtgcctggtggtcttcttcctcgccatgctggtgctgatggcggtgctctacgtccacatgctggcccgcgcctgccagcacgcccagggcatcgcccggctgcacaagcgccagcggcccgtgcaccaggggttcggcctcaagggggcggtcaccctgaccatcctgctcggcatcttcttcctgtgctggggcccgttcttcctgcacctcacgctgatcgtgctgtgccccgagcacccgacctgcgggtgcatcttcaagaacttcaacctcttcctggccctgatcatctgcaacgccatcatcgaccccctgatctacgccttccactcccaggagctccgccggaccctgaaggaggtgctgacctgcagctggtga

SEQ ID NO: 1328 - RNA, 954 nt, synthetic construct
  misc_feature 1..954: note = AAO21073_variant
  source 1..954: mol_type = other RNA
atggccgtgcagggcagccagcgccggctcctcgggtccctgaacagcacccccaccgccatcccccagctgggcctcgcggccaaccagacgggggcccgctgcctggaggtctccatcagcgacggcctgttcctctccctggggctggtgagcctcgtggagaacgccctggtcgtggccaccatcgcgaagaaccggaacctgcactcccccatgtactgcttcatctgctgcctcgccctgagcgacctgctcgtgtccggcagcaacgtccgcgagaccgccgtgatcctgctgctcgaggccggcgcgctggtggcccgggccgccgtcctgcagcagctcgacaacgtgatcgacgtgatcacgtgctccagcatgctgtccagcctgtgcttcctcggggccatcgcggtcgaccgctacatctccatcttctacgccctgcggtaccacagcatcgtgaccctgccccgcgcccggcgcgccgtggccgcgatctgggtcgcctccgtggtgttcagcaccctcttcatcgcctactacgaccacgtcgccgtgctgctgtgcctcgtggtcttcttcctggccatgctggtgctcatggcggtgctgtacgtccacatgctggcccgggcctgccagcacgcccagggcatcgcccgcctccacaagcggcagcgccccgtgcaccaggggttcggcctgaagggggcggtcaccctgaccatcctcctgggcatcttcttcctgtgctggggcccgttcttcctccacctgacgctgatcgtgctctgccccgagcacccgacctgcgggtgcatcttcaagaacttcaacctgttcctggccctcatcatctgcaacgccatcatcgaccccctgatctacgccttccactcccaggagctgcggcgcaccctgaaggaggtgctgacctgcagctggtga

SEQ ID NO: 1329 - RNA, 954 nt, synthetic construct
  misc_feature 1..954: note = AHC09567_variant
  source 1..954: mol_type = other RNA
atggccgtgcagggcagccagcgccggctgctcgggtccctgaacagcacccccaccgccatcccgcagctgggcctcgcggccaaccagacgggggcccgctgcctggaggtctccatcagcgacggcctgttcctctccctggggctggtgagcctcgtggagaacgccctggtcgtggccaccatcgcgaagaaccggaacctgcactcccccatgtactgcttcatctgctgcctcgccctgcccgacctgctcgtgagcggctccaacgtcctggagaccgccgtgatcctgctcctggaggccggcgcgctggtggcccgcgccgccgtcctccagcagctggacaacgtgatcgacgtgatcacgtgcagctccatgctgagctccctctgcttcctgggggccatcgcggtcgaccggtacatcagcatcttctacgccctgcgctaccactccatcgtgaccctcccccgggcccgccgggccgtggccgcgatctgggtcgccagcgtggtgttctccaccctgttcatcgcctactacgaccacgtcgccgtgctgctctgcctggtggtcttcttcctggccatgctcgtgctgatggcggtgctgtacgtccacatgctcgcccgcgcctgccagcacgcccagggcatcgcccggctgcacaagcgccagcggccggtgcaccaggggttcggcctgaagggggcggtcaccctcaccatcctgctgggcatcttcttcctctgctggggccccttcttcctgcacctgacgctcatcgtgctgtgccccgagcacccgacctgcgggtgcatcttcaagaacttcaacctgttcctcgccctgatcatctgcaacgccatcatcgaccccctgatctacgccttccacagccaggagctgcgccggaccctcaaggaggtgctgacctgctcctggtga

SEQ ID NO: 1330 - RNA, 954 nt, synthetic construct
  misc_feature 1..954: note = AHC09812_variant
  source 1..954: mol_type = other RNA
atggccgtgcagggcagccagcgccggctgctcgggtccctgaacagcacccccaccgccatcccccagctgggcctcgcggccaaccagacgggggcccgctgcctggaggtctccatcagcgacggcctgttcctctccctggggctggtgagcctcgtggagaacgccctggtcgtggccaccatcgcgaagaaccggaacctgcactcccccatgtactgcttcatctgctgcctcgccctgagcgacctgctcgtgtccggcagcaacgtcctggagaccgccgtgatcctgctcctggaggccggcgcgctggtggcccgcgccgccgtcctccagcagctggacaacgtgatcgacgtgatcacgtgctccagcatgctgtccagcctctgcttcctgggggccatcgcggtcgaccggtacatctccatcttctacgccctgcgctaccacagcatcgtgaccctcccccgggcccgccgggccgtggccgcgatctgggtcgcctccgtggtgttcagcaccctgttcatcgcctactacgaccacgtcgccgtgctgctctgcctgatggtgttcttcctggccatgctcgtcctgatggcggtgctgtacgtgcacatgctcgcccgcgcctgccagcacgcccagggcatcgcccggctgcacaagcgccagcggcccgtccaccaggggttcggcctgaagggggcggtgaccctcaccatcctgctgggcatcttcttcctctgctggggcccgttcttcctgcacctgacgctcatcgtcctgtgccccgagcacccgacctgcgggtgcatcttcaagaacttcaacctgttcctcgccctgatcatctgcaacgccatcatcgaccccctgatctacgccttccactcccaggagctgcgccggaccctcaaggaggtgctgacctgcagctggtga

SEQ ID NO: 1331 - RNA, 954 nt, synthetic construct
  misc_feature 1..954: note = AHC10192_variant
  source 1..954: mol_type = other RNA
atggccgtgcagggcagccagcgccggctgctcgggtccctgaacagcacccccaccgccatcccccagctgggcctcgcggccaaccagacgggggcccgctgcctggaggtctccatcagcgacggcctgttcctctccctggggctggtgagcctcgtggagaacgccctggtcgtggccaccatcgcgaagaaccggaacctgcactcccccatgtactgcttcatctgctgcctcgccctgagcgacctgctcgtgtccggcagcaacgtcctggagaccgccgtgatcctgctcctggaggccggcgcgctggtggcccgcgccgccgtcctccagcagctggacaacgtgatcgacgtgatcacgtgctccagcatgctgtccagcctctgcttcctgggggccatcgcggtcgaccggtacatctccatcttctacgccctgcgctaccacagcatcgtgaccctcccccgggcccgccgggccgtggccgcgatctgggtcgcctccgtggtgttcagcaccctgttcatcgcctactacgaccacgtcgccgtgctgctctgcctggtggtcttcttcctggccatgctcgtgctgatggcggtgctgtacgtccacatgctcgcccgcgcctgccagcacgcccagggcaccgcccggctgcacaagcgccagcggcccgtgcaccaggggttcggcctgaagggggcggtcaccctcacgatcctgctgggcatcttcttcctctgctggggcccgttcttcctgcacctgaccctcatcgtgctgtgccccgagcacccgacctgcgggtgcatcttcaagaacttcaacctgttcctcgccctgatcatctgcaacgccatcatcgaccccctgatctacgccttccactcccaggagctgcgccggaccctcaaggaggtgctgacgtgcagctggtga

SEQ ID NO: 1332 - RNA, 954 nt, synthetic construct
  misc_feature 1..954: note = AHC09641_variant
  source 1..954: mol_type = other RNA
atggccgtgcagggcagccagcgccggctgctcgggtccctgaacagcacccccaccgccatcccccagctgggcctcgcggccaaccagacgggggcccgctgcctggaggtctccatcagcgacggcctgttcctctccctggggctggtgagcctcgtggagaacgccctggtcgtggccaccatcgcgaagaaccggaacctgcactcccccatgtactgcttcatctgctgcctcgccctgagcgacctgctcgtgtccggcagcaacgtcctggagaccgccgtgatcctgctcctggaggccggcgcgctggtggcccgcgccgccgtcctccagcagctggacaacgtgatcgacgtgatcacgtgctccagcatgctgtccagcctctgcttcctgggggccatcgcggtcgaccggtacatctccatcttctacgccctgcgctaccacagcaccgtgaccctcccccgggcccgccgggccgtggccgcgatctgggtcgcctccgtggtgttcagcaccctgttcatcgcctactacgaccacgtcgccgtgctgctctgcctggtggtcttcttcctggccatgctcgtgctgatggcggtgctgtacgtccacatgctcgcccgcgcctgccagcacgcccagggcatcgcccggctgcacaagcgccagcggcccgtgcaccaggggttcggcctgaagggggcggtcaccctcacgatcctgctgggcatcttcttcctctgctggggcccgttcttcctgcacctgaccctcatcgtgctgtgccccgagcacccgacctgcgggtgcatcttcaagaacttcaacctgttcctcgccctgatcatctgcaacgccatcatcgaccccctgatctacgccttccactcccaggagctgcgccggaccctcaaggaggtgctgacgtgcagctggtga

SEQ ID NO: 1333 - RNA, 954 nt, synthetic construct
  misc_feature 1..954: note = AHC10044_variant
  source 1..954: mol_type = other RNA
atggccgtgcagggcagccagcgccggctgctcgggtccctgaacagcacccccaccgccatcccccagctgggcctcgcggccaaccagacgggggcccgctacctggaggtctccatcagcgacggcctgttcctctccctggggctggtgagcctcgtggagaacgccctggtcgtggccaccatcgcgaagaaccggaacctgcactcccccatgtactgcttcatctgctgcctcgccctgagcgacctgctcgtgtccggcagcaacgtcctggagaccgccgtgatcctgctcctggaggccggcgcgctggtggcccgcgccgccgtcctccagcagctggacaacgtgatcgacgtgatcacgtgctccagcatgctgtccagcctctgcttcctgggggccatcgcggtcgaccggtacatctccatcttctacgccctgcgctaccacagcatcgtgaccctcccccgggcccgccgggccgtggccgcgatctgggtcgcctccgtggtgttcagcaccctgttcatcgcctactacgaccacgtcgccgtgctgctctgcctggtggtcttcttcctggccatgctcgtgctgatggcggtgctgtacgtccacatgctcgcccgcgcctgccagcacgcccagggcatcgcccggctgcacaagcgccagcggcccgtgcaccaggggttcggcctgaagggggcggtcaccctcaccatcctgctgggcatcttcttcctctgctggggcccgttcttcctgcacctgacgctcatcgtgctgtgccccgagcacccgacctgcgggtgcatcttcaagaacttcaacctgttcctcgccctgatcatctgcaacgccatcatcgaccccctgatctacgccttccactcccaggagctgcgccggaccctcaaggaggtgctgacctgcagctggtga

SEQ ID NO: 1334 - RNA, 954 nt, synthetic construct
  misc_feature 1..954: note = AHC09532_variant
  source 1..954: mol_type = other RNA
atggccgtgcagggcagccagcgccggctgctcgggtccctgaacagcacccccaccgccatcccccagctgggcctcgcggccaaccagacgggggcccgctgcctggaggtctccatcagcgacggcctgttcctctccctggggctggtgagcctcgtggagaacgccctggtcctggccaccatcgcgaagaaccggaacctccactcccccatgtactgcttcatctgctgcctggccctgagcgacctcctggtgtccggcagcaacgtgctggagaccgccgtcatcctcctgctggaggccggcgcgctcgtggcccgcgccgccgtgctgcagcagctggacaacgtcatcgacgtgatcacgtgctccagcatgctctccagcctgtgcttcctgggggccatcgcggtggaccggtacatctccatcttctacgccctccgctaccacagcatcgtcaccctgccccgggcccgccgggccgtggccgcgatctgggtggcctccgtcgtgttcagcaccctgttcatcgcctactacgaccacgtggccgtcctcctgtgcctggtggtgttcttcctcgccatgctggtcctgatggcggtgctctacgtgcacatgctggcccgcgcctgccagcacgcccagggcatcgcccggctgcacaagcgccagcggcccgtccaccaggggttcggcctcaagggggcggtgaccctgaccatcctgctcggcatcttcttcctgtgctggggcccgttcttcctgcacctcacgctgatcgtcctgtgccccgagcacccgacctgcgggtgcatcttcaagaacttcaacctcttcctggccctgatcatctgcaacgccatcatcgaccccctgatctacgccttccactcccaggagctccgccggaccctgaaggaggtgctgacctgcagctggtga

SEQ ID NO: 1335 - RNA, 954 nt, synthetic construct
  misc_feature 1..954: note = AHC11042_variant
  source 1..954: mol_type = other RNA
atggccgtgcagggcagccagcgccggctgctcgggtccctgaacagcacccccaccgccatcccgcagctgggcctcgcggccaaccagacgggggcccgctgcctggaggtctccatcagcgacggcctgttcctctccctggggctggtgagcctcgtggagaacgccctggtcgtggccaccatcgcgaagaaccggaacctgcactcccccatgtactgcttcatctgctgcctccccctgagcgacctgctcgtgtccggcagcaacgtcctggagaccgccgtgatcctgctcctggaggccggcgccctggtggcgcgcgccgccgtcctccagcagctggacaacgtgatcgacgtgatcacgtgctccagcatgctgtccagcctctgcttcctgggggccatcgccgtcgaccggtacatctccatcttctacgcgctgcgctaccacagcatcgtgaccctcccccgggcccgccgggccgtggccgccatctgggtcgcgtccgtggtgttcagcaccctgttcatcgcctactacgaccacgtcgccgtgctgctctgcctggtggtcttcttcctggccatgctcgtgctgatggccgtgctgtacgtccacatgctcgcgcgcgcctgccagcacgcccagggcatcgcccggctgcacaagcgccagcggccggtgcaccaggggttcggcctgaagggggccgtcaccctcaccatcctgctgggcatcttcttcctctgctggggccccttcttcctgcacctgacgctcatcgtgctgtgccccgagcacccgacctgcgggtgcatcttcaagaacttcaacctgttcctcgcgctgatcatctgcaacgccatcatcgaccccctgatctacgccttccactcccaggagctgcgccggaccctcaaggaggtgctgacctgcagctggtga

SEQ ID NO: 1336 - RNA, 954 nt, synthetic construct
  misc_feature 1..954: note = AHC10733_variant
  source 1..954: mol_type = other RNA
atggccgtgcagggcagccagcgccggctgctcgggtccctgaacagcacccccaccgccatcccccagctgggcctcgcggccaaccagacgggggcccgctgcctggaggtctccatcagcgacggcctgttcctctccctggggctggtgagcctcgtggagaacgccctggtcgtggccaccatcgcgaagaaccggaacctgcactcccccatgtactgcttcatctgctgcctcgccctgagcgacctgctcgtgtccggcagcaacgtcctggagaccgccgtgatcctgctcctggaggccggcgcgctggtggcccgcgccgccgtcctccagcagctggacaacgtgatcgacgtgatcacgtgctccagcatgctgtccagcctctgcttcctgggggccatcgcggtcgaccggtacatctccatcttctacgccctgcgctaccacagcatcgtgaccctcccccgggcccgccgggccgtggccgcgatctgggtcgcctccgtggtgttcagcaccctgttcatcgcctactacgaccacgtcgccgtgctgctctgcctggtggtcttcttcctggccatgctcgtgctgatggcggtgctgtacgtccacatgctcgcccgcgcctgccagcacgcccagggcatcgcccggctgcacaagcgccagcggcccgtgcaccaggggttcggcctgaagggggcggtcaccctcaccatcctgctgggcatcttcttcctctgctggggcccgttcttcctgcacctgacgctcatcgtgctgtgccccgagcacccgacctgcgggtgcatcttcaagaacttctccctgttcctcgccctgatcatctgcaacgccatcatcgaccccctgatctacgccttccacagccaggagctgcgccggaccctcaaggaggtgctgacctgcagctggtga

SEQ ID NO: 1337 - RNA, 954 nt, synthetic construct
  misc_feature 1..954: note = AHC10696_variant
  source 1..954: mol_type = other RNA
atggccgtgcagggcagccagcgccggctgctcgggtccctgaacagcacccccaccgccatcccccagctgggcctcgcggccaaccagacgggggcccgctgcctggaggtctccatcagcgacggcctgttcctctccctggggctggtgagcctcgtggagaacgccctggtcgtggccaccatcgcgaagaaccggaacctgcactcccccatgtactgcttcatctgctgcctcgccctgagcgacctgctcgtgtccggcagcaacgtcctggagaccgccgtgatcctgctcctggaggccggcgcgctggtggcccgcgccgccgtcctccagcagctggacaacgtgatcgacgtgatcacgtgctccagcatgctgtccagcctctgcttcctgggggccatcgcggtcgaccggtacatctccatcttctacgccctgcgctaccacagcatcgtgaccctcccccgggcccgccgggccgtggccgcgatctgggtcgcctccgtggtgttcagcaccctgttcatcgcctactacgaccacgtcgccgtgctgctctgcctggtggtcttcttcctggccatgctcgtgctgatggcggtgctgtacgtccacatgctcgcccgcgcctgccagcacgcccagggcatcgcccggctgcacaagcgccagcggcccgtgcaccaggggttcggcctgaagggggcggtcaccctcaccatcctgctgggcatcttcttcctctgctggggcccgttcttcctgcacctgacgctcatcgtgctgtgccccgagcacccgacctgcgggtgcatcttcaagaacttcaacctgttcctcgccctgatcatctgcaacgccatcatcgaccccctgatccacgccttccactcccaggagctgcgccggaccctcaaggaggtgctgacctgcagctggtga

SEQ ID NO: 1338 - RNA, 954 nt, synthetic construct
  misc_feature 1..954: note = AHC09527_variant
  source 1..954: mol_type = other RNA
atggccgtgcagggcagccagcgccggctgctcgggtccctgaacagcacccccaccgccatcccccagctgggcctcgcggccaaccagacgggggcccgctgcctggaggtctccatcagcgacggcctgttcctctccctggggctggtgagcctcgtggagaacgccctggtcgtggccaccatcgcgaagaaccggaacctgcactcccccatgtactgcttcatctgctgcctcgccctgagcgacctgctcgtgtccggcagcaacgtcctggagaccgccgtgatcctgctcctggaggccggcgcgctggtggcccgcgccgccgtcctccagcagctggacaacgtgatcgacgtgatcacgtgctccagcatgctgtccagcctctgcttcctgggggccatcgcggtcgaccggtacatctccatcttctacgccctgcgctaccacagcatcgtgaccctcccccgggcccgccgggccgtggccgcgatctgggtcgcctccgtggtgttcagcaccctgttcatcgcctactacgaccacgtcgccgtgctgctctgcctggtggtcttcttcctggccatgctcgtgctgatggcggtgctgtacgtccacatgctcgcccgcgcctgccagcacgcccagggcatcgcccggctgcacaagcgccagcggcccgtgcaccaggggttcggcctgaagggggcggtcaccctcaccatcctgctgggcatcttcttcctctgctggggcccgttcttcctgcacctgacgctcatcgtgctgtgccccgagcacccgacctgcgggtgcatcttcaagaacttcaacctgttcctcgccctgatcatctgcaacgccatcatccaccccctgatctacgccttccactcccaggagctgcgccggaccctcaaggaggtgctgacctgcagctggtga

SEQ ID NO: 1339 - RNA, 954 nt, synthetic construct
  misc_feature 1..954: note = AHC10869_variant
  source 1..954: mol_type = other RNA
atggccgtgcagggcagccagcgccggctgctcgggtccctgaacagcacccccaccgccatcccccagctgggcctcgcggccaaccagacgggggcccgctgcctggaggtctccatcagcgacggcctgttcctctccctggggctggtgagcctcgtggagaacgccctggtcgtggccaccatcgcgaagaaccggaacctgcactcccccatgtactgcttcatctgctgcctcgccctgagcgacctgctcgtgtccggcagcaacgtcctggagaccgccgtgatcctgctcctggaggccggcgcgctggtggcccgcgccgccgtcctccagcagctggacaacgtgatcgacgtgatcacgtgctccagcatgctgtccagcctctgcttcctgggggccatcgcggtcgaccggtacatctccatcttctacgccctgcgctaccacagcatcgtgaccctcccccgggcccgccgggccgtggccgcgatctgggtcgcctccgtggtgttcagcaccctgttcatcgcctactacgaccacgtcgccgtgctgctctgcctggtggtcttcttcctggccatgctcgtgctgatggcggtgctgtacgtccacatgctcgcccgcgcctgccagcacgcccagggcatcgcccggctgcacaagcgccagcaccccgtgcaccaggggttcggcctgaagggggcggtcaccctcaccatcctgctgggcatcttcttcctctgctggggcccgttcttcctgcacctgacgctcatcgtgctgtgccccgagcacccgacctgcgggtgcatcttcaagaacttcaacctgttcctcgccctgatcatctgcaacgccatcatcgaccccctgatctacgccttccactcccaggagctgcggcgcaccctcaaggaggtgctgacctgcagctggtga

SEQ ID NO: 1340 - RNA, 954 nt, synthetic construct
  misc_feature 1..954: note = AHC11615_variant
  source 1..954: mol_type = other RNA
atggccgtgcagggcagccagcgccggctgctcgggtccctgaacagcacccccaccgccatcccccagctgggcctcgcggccaaccagacgggggcccgctgcctggaggtctccatcagcgacggcctgttcctctccctggggctggtgagcctcgtggagaacgccctggtcgtggccaccatcgcgaagaaccggaacctgcactcccccatgtactgcttcatctgctgcctcgccctgagcgacctgctcgtgtccggcagcaacgtcctggagaccgccgtgatcctgctcctggaggccggcgcgctggtggcccgcgccgccgtcctccagcagctggacaacgtgatcgacgtgatcacgtgctccagcatgctgtccagcctctgcttcctgggggccatcgcggtcgaccggtacatctccatcttctacgccctgcgctaccacagcatcgtgaccctcccccgggcccgccgggccgtggccgcgatctgggtcgcctccgtggtgttcagcaccctgttcatcgcctactacgaccacgtcgccgtgctgctctgcctggtggtcttcttcctggccatgctcgtgctgatggcggtgctgtacgtccacatgctcgcccgcgcctgccagcacgcccagggcatcgcccggctgcacaagcgccagcggcccgtgcaccaggggttcggcctgaagggggcggtcaccctcaccatcctgctgggcatcttcttcctctgctggggcccgttcttcctgcacctgacgctcatcgtgctgtgccccgagcacccgacctgcgggtgcatcttcaagaacttcaacctgttcctcaccctgatcatctgcaacgccatcatcgaccccctgatctacgccttccactcccaggagctgcgccggaccctcaaggaggtgctgacgtgcagctggtga

SEQ ID NO: 1341 - RNA, 954 nt, synthetic construct
  misc_feature 1..954: note = AHC09535_variant
  source 1..954: mol_type = other RNA
atggccgtgcagggcagccagcgccggctgctcgggtccctgaacagcacccccaccgccatcccccagctgggcctcgcggccaaccagacgggggcccgctgcctggaggtctccatcagcgacggcctgttcctctccctggggctggtgagcctcgtggagaacgccctggtcgtggccaccatcgcgaagaaccggaacctgcactcccccatgtactgcttcatctgctgcctcgccctgagcgacctgctcgtgtccggcagcaacgtcctggagaccgccgtgatcctgctcctggaggccggcgcgctggtggcccgcgccgccgtcctccagcagctggacaacgtgatcgacgtgatcacgtgctccagcatgctgtccagcctctgcttcctgggggccatcgcggtcgaccactacatctccatcttctacgccctgcggtaccacagcatcgtgaccctcccccgcgcccggcgcgccgtggccgcgatctgggtcgcctccgtggtgttcagcaccctgttcatcgcctactacgaccacgtcgccgtgctgctctgcctggtggtcttcttcctggccatgctcgtgctgatggcggtgctgtacgtccacatgctcgcccgggcctgccagcacgcccagggcatcgcccgcctgcacaagcggcagcgccccgtgcaccaggggttcggcctgaagggggcggtcaccctcaccatcctgctgggcatcttcttcctctgctggggcccgttcttcctgcacctgacgctcatcgtgctgtgccccgagcacccgacctgcgggtgcatcttcaagaacttcaacctgttcctcgccctgatcatctgcaacgccatcatcgaccccctgatctacgccttccactcccaggagctgcggcgcaccctcaaggaggtgctgacctgcagctggtga

SEQ ID NO: 1342 - RNA, 954 nt, synthetic construct
  misc_feature 1..954: note = AHC11840_variant
  source 1..954: mol_type = other RNA
atggccgtgcagggcagccagcgccggctgctcgggtccctgaacagcacccccaccgccatcccccagctgggcctcgcggccaaccagacgggggcccgctgcctggaggtctccatcagcgacggcctgttcctctccctggggctggtgagcctcgtggagaacgccctggtcgtggccaccatcgcgaagaaccggaacctgcactcccccatgtactgcttcatctgctgcctcgccctgagcgacctgctcgtgtccggcagcaacgtcctggagaccgccgtgatcctgctcctggaggccggcgcgctggtggcccgcgccgccgtcctccagcagctggacaacgtgatcgacgtgatcacgtgctccagcatgctgtccagcctctgcttcctgggggccatcgcggtcgaccggtacatctccatcttctacgccctgcgctaccacagcatcgtgaccctcccccgggcccgccgggccgtggccgcgatctgggtcgcctccgtggtgttcagcaccctgttcatcgcctactacgaccacgtcgccgtgctgctctgcctggtggtcttcttcctggccatgctcgtgctgatggcggtgctgtacgtccacatgctcgcccgcgcctgccagcacgcccagggcatcgcccggctgcacaagcgccagcggcccgtgcaccaggggttcggcctgaagggggcggtcaccctcaccatcctgctgggcatcttcttcctctgctggggcccgttcttcctgcacctgacgctcatcgtgctgtgccccgagcacccgacctgcgggtgcatcttcaagaacttcaacctgttcctcgccctgatcatctgcaacgccatcatcgaccccctgatctacgccttccacaaccaggagctgcgccggaccctcaaggaggtgctgacctgctcctggtga

SEQ ID NO: 1343 - RNA, 954 nt, synthetic construct
  misc_feature 1..954: note = AHC09665_variant
  source 1..954: mol_type = other RNA
atggccgtgcagggcagccagcgccggctgctcgggtccctgaacagcacccccaccgccatcccccagctgggcctcgcggccaaccagacgggggcccgctgcctggaggtctccatcagcgacggcctgttcctctccctggggctggtgagcctcgtggagaacgccctggtcgtggccaccatcgcgaagaaccggaacctgcactcccccatgtactgcttcatctgctgcctcgccctgagcgacctgctcgtgtccggcagcaacgtcctggagaccgccgtgatcctgctcctggaggccggcgcgctggtggcccgcgccgccgtcctccagcagctggacaacgtgatcgacatgatcacgtgctccagcatgctgtccagcctctgcttcctgggggccatcgcggtggaccggtacatctccatcttctacgccctgcgctaccacagcatcgtcaccctcccccgggcccgccgggccgtggccgcgatctgggtggcctccgtcgtgttcagcaccctgttcatcgcctactacgaccacgtggccgtcctgctctgcctggtggtgttcttcctggccatgctcgtcctgatggcggtgctgtacgtgcacatgctcgcccgcgcctgccagcacgcccagggcatcgcccggctgcacaagcgccagcggcccgtccaccaggggttcggcctgaagggggcggtgaccctcaccatcctgctgggcatcttcttcctctgctggggcccgttcttcctgcacctgacgctcatcgtcctgtgccccgagcacccgacctgcgggtgcatcttcaagaacttcaacctgttcctcgccctgatcatctgcaacgccatcatcgaccccctgatctacgccttccactcccaggagctgcgccggaccctcaaggaggtgctgacctgcagctggtga

SEQ ID NO: 1344 - RNA, 954 nt, synthetic construct
  misc_feature 1..954: note = AHC11324_variant
  source 1..954: mol_type = other RNA
atggccgtgcagggcagccagcgccggctgctcgggtccctgaacagcacccccaccgccatcccccagctgggcctcgcggccaaccagacgggggcccgctgcctggaggtctccatcagcgacggcctgttcctctccctggggctggtgagcctcgtggagaacgccctggtcgtggccaccatcgcgaagaaccggaacctgcactcccccatgtactgcttcatctgctgcctcgccctgagcgacctgctcgtgtccggcagcaacgtcctggagaccgccgtgatcctgctcctggaggccggcgcgctggtggcccgcgccgccgtcctccagcagctggacaacgtgatcgacgtgatcacgtgctccagcatgctgtccagcctctgcttcctgggggccatcgcggtcgaccggtacatctccatcttctacgccctgcgctaccacagcatcgtgaccctcccccgggcccgccgggccgtggccgcgatctgggtcgcctccgtggtgttcagcaccctgttcatcgcctactacgaccacgtcgccgtgctgctctgcctggtggtcttcttcctggccatgctcgtgctgatggcggtgctgtacgtccacatgctcgcccgcgcctgccagcacgcccagggcatcgcccggctgcacaagcgccagcggcccgtgcaccaggggttcggcctgaagggggcggtcaccctcaccatcctgctgggcatcttcttcctctgctggggcccgttcttcctgcacctgacgctcatcgtgctgtgccccgagcacccgacctgcgggtgcatcttcaagaacttcaacctgttcctcgccctgatcatccgcaacgccatcatcgaccccctgatctacgccttccactcccaggagctgcggcgcaccctcaaggaggtgctgacctgcagctggtga

SEQ ID NO: 1345 - RNA, 954 nt, synthetic construct
  misc_feature 1..954: note = AHC09521_variant
  source 1..954: mol_type = other RNA
atggccgtgcagggcagccagcgccggctgctcgggtccctgaacagcacccccaccgccatcccccagctgggcctcgcggccaaccagacgggggcccgctgcctggaggtctccatcagcgacggcctgttcctctccctggggctggtgagcctcgtggagaacgccctggtcgtggccaccatcgcgaagaaccggaacctgcactcccccatgtactgcttcatctgctgcctcgccctgagcgacctgctcgtgtccggcagcaacgtcctggagaccgccgtgatcctgctcctggaggccggcgcgctggtggcccgcgccgccgtcctccagcagctggacaacgtgatcgacgtgatcacgtgctccagcatgctgtccagcctctgcttcctgggggccatcgcggtcgaccggtacatctccatcttctacgccctgcgctaccacagcatcgtgaccctcccctgggcccggcgcgccgtggccgcgatctgggtcgcctccgtggtgttcagcaccctgttcatcgcctactacgaccacgtcgccgtgctgctctgcctggtggtcttcttcctggccatgctcgtgctgatggcggtgctgtacgtccacatgctcgcccgggcctgccagcacgcccagggcatcgcccgcctgcacaagcggcagcgccccgtgcaccaggggttcggcctgaagggggcggtcaccctcaccatcctgctgggcatcttcttcctctgctggggcccgttcttcctgcacctgacgctcatcgtgctgtgccccgagcacccgacctgcgggtgcatcttcaagaacttcaacctgttcctcgccctgatcatctgcaacgccatcatcgaccccctgatctacgccttccactcccaggagctgcggcgcaccctcaaggaggtgctgacctgcagctggtga

SEQ ID NO: 1346 - RNA, 954 nt, synthetic construct
  misc_feature 1..954: note = AHC11794_variant
  source 1..954: mol_type = other RNA
atggccgtgcagggcagccagcgccggctgctcgggtccctgaacagcacccccaccgccatcccgcagctgggcctcgcggccaaccagacgggggcccgctgcctggaggtctccatcagcgacggcctgttcctctccctggggctggtgagcctcgtggagaacgccctggtcgtggccaccatcgcgaagaaccggaacctgcactcccccatgtactgcttcatctgctgcctcgccctgagcgacctgctcgtgtccggcagcaacgtcctggagaccgccgtgatcctgctcctggaggccggcgcgctggtggcccgcgccgccgtcctccagcagctggacaacgtgatcgacgtgatcacgtgctccagcatgctgtccagcctctgcttcctgggggccatcgcggtcgaccggtacatctccatcttctacgccctgcgctaccacagcatcgtgaccctcccccgggcccgccgggccgtggccgcgatctgggtcgcctccgtggtgttcagcaccctgttcatcgcctactacgaccacgtcgccgtgctgctctgcctggtggtcttcttcctggccatgctcgtgctgatggcggtgctgtacgtccacatgctcgcccgcgcctgccagcacgcccagggcatcgcccggctgcacaagcgccagcggcccgtgcaccaggggttcggcctgaagggggcggtcaccctcaccatcctgctgggcatcttcttcctctgctggggcccgttcttcctgcacctgacgctcatcgtgctgtgccccgagcaccccgagtgcgggtgcatcttcaagaacttcaacctgttcctcgccctgatcatctgcaacgccatcatcgaccccctgatctacgccttccactcccaggagctgcgccggaccctcaaggaggtgctgacctgcagctggtga

SEQ ID NO: 1347 - RNA, 954 nt, synthetic construct
  misc_feature 1..954: note = AHC10874_variant
  source 1..954: mol_type = other RNA
atggccgtgcagggcagccagcgccggctgctcgggtccctgaacagcacccccaccgccatcccccagctgggcctcgcggccaaccagacgggggcccgctgcctggaggtctccatcagcgacggcctgttcctctccctggggctggtgagcctcgtggagaacgccctggtcgtggccaccatcgcgaagaaccggaacctgcactcccccatgtactgcttcatctgctgcctcgccctgagcgagctgctcgtgtccggcagcaacgtcctggagaccgccgtgatcctgctcctggaggccggcgcgctggtggcccgcgccgccgtcctccagcagctggacaacgtgatcgacgtgatcacgtgctccagcatgctgtccagcctctgcttcctgggggccatcgcggtcgaccggtacatctccatcttctacgccctgcgctaccacagcatcgtgaccctcccccgggcccgccgggccgtggccgcgatctgggtcgcctccgtggtgttcagcaccctgttcatcgcctactacgaccacgtcgccgtgctgctctgcctggtggtcttcttcctggccatgctcgtgctgatggcggtgctgtacgtccacatgctcgcccgcgcctgccagcacgcccagggcatcgcccggctgcacaagcgccagcggcccgtgcaccaggggttcggcctgaagggggcggtcaccctcaccatcctgctgggcatcttcttcctctgctggggcccgttcttcctgcacctgacgctcatcgtgctgtgccccgagcacccgacctgcgggtgcatcttcaagaacttcaacctgttcctcgccctgatcatctgcaacgccatcatcgaccccctgatctacgccttccactcccaggagctgcgccggaccctcaaggaggtgctgacctgcagctggtga

SEQ ID NO: 1348 - RNA, 954 nt, synthetic construct
  misc_feature 1..954: note = AHC09597_variant
  source 1..954: mol_type = other RNA
atggccgtgcagggcagccagcgccggctgctcgggtccctgaacagcacccccaccgccatcccccagctgggcctcgcggccaaccagacgggggcccgctgcctggaggtctccatcagcgacggcctgttcctctccctggggctggtgagcctcgtggagaacgccctggtcgtggccaccatcgcgaagaaccggaacctgcactcccccatgtactgcttcatctgctgcctcgccctgagcgacctgctcgtgtccggcagcaacgtcctggagaccgccgtgatcctgctcctggaggccggcgcgctggtggcccgcgccgccgtcctccagcagctggacaacgtgatcgacgtgatcacgtgctccagcatgctgtccagcctctgcttcctgggggccatcgcggtcgaccggtacatctccatcttctacgccctgtgctaccacagcatcgtgaccctcccccgcgcccggcgcgccgtggccgcgatctgggtcgcctccgtggtgttcagcaccctgttcatcgcctactacgaccacgtcgccgtgctgctctgcctggtggtcttcttcctggccatgctcgtgctgatggcggtgctgtacgtccacatgctcgcccgggcctgccagcacgcccagggcatcgcccgcctgcacaagcggcagcgccccgtgcaccaggggttcggcctgaagggggcggtcaccctcaccatcctgctgggcatcttcttcctctgctggggcccgttcttcctgcacctgacgctcatcgtgctgtgccccgagcacccgacctgcgggtgcatcttcaagaacttcaacctgttcctcgccctgatcatctgcaacgccatcatcgaccccctgatctacgccttccactcccaggagctgcggcgcaccctcaaggaggtgctgacctgcagctggtga

SEQ ID NO: 1349 - RNA, 1665 nt, synthetic construct
  misc_feature 1..1665: note = CCDS816.1_variant
  source 1..1665: mol_type = other RNA
atgaccgcccccggcgccgcggggcgctgcccgcccaccacgtggctgggcagcctcctgctgctcgtgtgcctgctggcctcccggagcatcaccgaggaggtctccgagtactgcagccacatgatcgggtccggccacctccagagcctgcagcgcctgatcgactcccagatggagaccagctgccagatcaccttcgagttcgtggaccaggagcagctcaaggaccccgtgtgctacctgaagaaggccttcctgctcgtccaggacatcatggaggacacgatgcggttccgcgacaacacccccaacgccatcgccatcgtgcagctgcaggagctgtccctccggctgaagtcctgcttcaccaaggactacgaggagcacgacaaggcgtgcgtgcgcaccttctacgagacgccgctgcagctcctggagaaggtcaagaacgtgttcaacgagaccaagaacctgctcgacaaggactggaacatcttctccaagaactgcaacaacagcttcgccgagtgctccagccaggacgtggtcaccaagcccgactgcaactgcctgtaccccaaggccatcccctccagcgacccggcctccgtgagcccccaccagcccctggcgccctccatggccccggtggccgggctcacctgggaggacagcgagggcacggagggcagctccctgctgcccggggagcagcccctccacaccgtcgaccccggcagcgccaagcagcggccgccccgctccacgtgccagagcttcgagccgcccgagacccccgtggtgaaggactccaccatcgggggcagcccccagccccggccctccgtcggggccttcaacccgggcatggaggacatcctggacagcgcgatgggcaccaactgggtgcccgaggaggcctccggggaggccagcgagatccccgtgccccagggcaccgagctgtccccgagccgccccgggggcggctccatgcagaccgagcccgcccggccgagcaacttcctctccgccagctccccgctgcccgcgagcgccaaggggcagcagcccgccgacgtcacgggcaccgccctgccccgcgtggggcccgtgcggcccaccggccaggactggaaccacacgccccagaagaccgaccacccgtccgccctcctgcgcgacccgcccgagcccgggagcccccggatcagctccctgcgcccccagggcctcagcaacccctccaccctgagcgcgcagccccagctgtcccggagccactccagcggctccgtcctcccgctgggggagctggagggccgccggagcacccgcgaccggcgctcccccgccgagcccgagggcgggcccgccagcgagggggccgcccgcccgctcccccggttcaactccgtgcccctgaccgacacgggccacgagcgccagagcgagggctccttcagcccccagctgcaggagtccgtgttccacctcctggtcccgagcgtgatcctggtcctcctggcggtcgggggcctgctgttctaccggtggcgccggcgcagccaccaggagccccagcgggccgacagccccctcgagcagccggaggggagccccctgacccaggacgaccgccaggtggagctgcccgtgtga

SEQ ID NO: 1350 - RNA, 1893 nt, synthetic construct
  misc_feature 1..1893: note = EAW85719_variant
  source 1..1893: mol_type = other RNA
atggccctgcccaccgcccgcccgctcctgggcagctgcgggacccccgcgctgggctccctcctgttcctcctgttcagcctggggtgggtgcagccctcccggacgctggccggcgagaccgggcaggaggccgcgcccctcgacggcgtcctggccaacccgcccaacatcagctccctgagcccccgccagctcctgggcttcccctgcgccgaggtgtccgggctgagcaccgagcgggtgcgcgagctcgccgtcgccctggcccagaagaacgtgaagctgtccaccgagcagctccggtgcctggcgcaccgcctgagcgagccgcccgaggacctcgacgccctgcccctggacctcctgctgttcctcaaccccgacgccttctccggcccgcaggcctgcacgcggttcttcagccgcatcaccaaggccaacgtggacctgctgccccgcggggcgcccgagcggcagcggctcctgcccgccgccctggcctgctggggcgtccgcgggtccctcctgagcgaggccgacgtgcgggcgctgggcggcctcgcctgcgacctgccggggcgcttcgtggccgagtccgccgaggtcctgctcccccggctggtgagctgccccggccccctggaccaggaccagcaggaggccgcgcgcgccgccctccagggcgggggcccgccctacgggccgccctccacctggagcgtgtccaccatggacgccctgcggggcctgctccccgtcctggggcagcccatcatccgcagcatcccccagggcatcgtggccgcgtggcggcagcgcagctcccgggaccccagctggcgccagccggagcgcacgatcctgcggccccgcttccggcgcgaggtggagaagaccgcctgcccctccgggaagaaggcccgggagatcgacgagagcctcatcttctacaagaagtgggagctggaggcctgcgtcgacgcggccctgctggccacccagatggaccgcgtgaacgccatcccgttcacctacgagcagctcgacgtgctgaagcacaagctggacgagctctacccccagggctaccccgagtccgtcatccagcacctgggctacctgttcctcaagatgagccccgaggacatccggaagtggaacgtgacgtccctggagaccctgaaggccctcctggaggtgaacaaggggcacgagatgagcccgcaggcgccccgccggcccctgccccaggtcgccaccctcatcgaccgcttcgtgaagggccgggggcagctggacaaggacaccctggacacgctcaccgccttctacccgggctacctgtgctccctgagccccgaggagctctccagcgtgccgccctccagcatctgggccgtccgcccccaggacctggacacgtgcgacccccggcagctggacgtgctctaccccaaggcccgcctggcgttccagaacatgaacgggtccgagtacttcgtcaagatccagagcttcctgggcggcgcccccaccgaggacctcaaggccctgtcccagcagaacgtgagcatggacctggccaccttcatgaagctccggaccgacgccgtgctgccgctgaccgtcgcggaggtgcagaagctcctggggccccacgtggagggcctgaaggccgaggagcgccaccggcccgtccgcgactggatcctccggcagcgccaggacgacctggacaccctggggctcggcctgcagggcgggatccccaacggctacctggtgctcgacctgtccatgcaggaggccctgagcgggacgccgtgcctcctgggccccgggcccgtgctgaccgtcctcgccctgctgctcgcgagcaccctggcctga

SEQ ID NO: 1351 - RNA, 1515 nt, synthetic construct
  misc_feature 1..1515: note = CCDS46865.1_variant
  source 1..1515: mol_type = other RNA
atggaggccctgcgcgtgcagatgttcatgccctgcagcttcgagtccctctacctgagctccgccgagcacccgggcgcgagcaagccgcccatctccagctccagcatgacctcccggatcctgctccgccagcagctgatgcgggagcagatgcaggagcaggagcgccgggagcagcagcagaagctgcaggccgcccagttcatgcagcagcgcgtccccgtgagccagacccccgccatcaacgtgtccgtccccaccaccctccccagcgccacccaggtgcccatggaggtgctgaaggtccagacccacctggagaacccgacgaagtaccacatccagcaggcgcagcggcagcaggtcaagcagtacctctccaccaccctggccaacaagcacgccaaccaggtgctgagcctcccctgccccaaccagcccggggaccacgtgatgccgcccgtgcccggctccagcgcccccaactccccgatggcgatgctgaccctgaacagcaactgcgagaaggaggggttctacaagttcgaggagcagaaccgcgccgagtccgagtgccccggcatgaacacgcacagccgggccagctgcatgcagatggacgacgtgatcgacgacatcatctccctcgagagctcctacaacgaggagatcctggggctgatggaccccgccctccagatggccaacaccctgcccgtcagcggcaacctgatcgacctctacggcaaccaggggctgccgccgcccggcctgaccatctccaacagctgccccgcgaacctccccaacatcaagcgcgagctgaccgagtccgaggcccgggccctggccaaggagcgccagaagaaggacaaccacaacctcatcgagcggcgccggcgcttcaacatcaacgaccggatcaaggagctggggacgctgatccccaagagcaacgaccccgacatgcgctggaacaagggcaccatcctcaaggcctccgtggactacatccggaagctgcagcgcgagcagcagcgggcgaaggagctggagaaccgccagaagaagctcgagcacgccaaccgccacctcctgctccggatccaggagctggagatgcaggcccgcgcccacgggctgagcctcatcccctccaccggcctgtgcagcccggacctggtgaaccggatcatcaagcaggagcccgtcctcgagaactgctcccaggacctgctgcagcaccacgccgacctgacctgcacgaccaccctggacctgaccgacggcacgatcaccttcaacaacaacctcgggaccggcaccgaggcgaaccaggcctacagcgtgcccacgaagatggggtccaagctggaggacatcctgatggacgacaccctgagcccggtgggcgtcaccgaccccctcctgtccagcgtgtcccccggcgccagcaagaccagctcccgccggagctccatgagcatggaggagacggagcacacgtgctga

SEQ ID NO: 1352 - RNA, 1260 nt, synthetic construct
  misc_feature 1..1260: note = CCDS2913.1_variant
  source 1..1260: mol_type = other RNA
atgctggagatgctcgagtacaaccactaccaggtgcagacccacctggagaaccccaccaagtaccacatccagcaggcccagcgccagcaggtcaagcagtacctgagcaccaccctcgccaacaagcacgcgaaccaggtgctgtccctgccgtgccccaaccagcccggcgaccacgtgatgcccccggtccccgggagctccgcccccaacagccccatggccatgctcaccctgaactccaactgcgagaaggagggcttctacaagttcgaggagcagaaccgggccgagagcgagtgcccggggatgaacacccactcccgcgccagctgcatgcagatggacgacgtgatcgacgacatcatctccctggagagctcctacaacgaggagatcctcggcctgatggaccccgcgctgcagatggccaacacgctccccgtgagcgggaacctgatcgacctgtacggcaaccagggcctgcccccgcccgggctcaccatctccaacagctgccccgccaacctgcccaacatcaagcgggagctcaccgcctgcatcttcccgaccgagtccgaggcgcgcgccctggccaaggagcggcagaagaaggacaaccacaacctgatcgagcgccggcgccggttcaacatcaacgaccgcatcaaggagctcggcacgctgatccccaagagcaacgaccccgacatgcggtggaacaaggggaccatcctgaaggcctccgtcgactacatccgcaagctccagcgggagcagcagcgcgccaaggagctggagaaccggcagaagaagctggagcacgcgaaccgccacctcctgctgcggatccaggagctcgagatgcaggcccgcgcccacggcctgagcctgatcccctccaccgggctctgcagcccggacctggtgaaccggatcatcaagcaggagcccgtgctggagaactgcagccaggacctcctgcagcaccacgccgacctgacctgcacgaccaccctcgacctgaccgacggcacgatcaccttcaacaacaacctgggcaccgggaccgaggccaaccaggcgtactccgtccccacgaagatgggcagcaagctcgaggacatcctgatggacgacaccctgtcccccgtgggggtgaccgacccgctcctgagctccgtcagccccggcgcctccaagaccagctcccgccggagctccatgagcatggaggagacggagcacacgtgctga

SEQ ID NO: 1353 - RNA, 1581 nt, synthetic construct
  misc_feature 1..1581: note = XM_005264754_variant
  source 1..1581: mol_type = other RNA
atgcagagcgagtccggcatcgtgcccgacttcgaggtcggggaggagttccacgaggagccgaagacctactacgagctcaagagccagcccctcaagtccagctccagcgccgagcaccccggcgcctccaagcccccgatcagctccagctccatgaccagccgcatcctgctgcggcagcagctcatgcgcgagcagatgcaggagcaggagcggcgcgagcagcagcagaagctgcaggcggcccagttcatgcagcagcgggtgcccgtgtcccagacccccgccatcaacgtcagcgtgcccaccaccctgccgtccgccacccaggtgcccatggaggtcctcaaggtgcagacgcacctggagaaccccaccaagtaccacatccagcaggcccagcgccagcaggtcaagcagtacctgagcaccaccctcgcgaacaagcacgccaaccaggtgctgtccctgccctgcccgaaccagcccggggaccacgtgatgccgcccgtgcccggcagctccgcccccaacagccccatggccatgctcacgctgaacagcaactgcgagaaggaggggttctacaagttcgaggagcagaaccgggcggagtccgagtgccccggcatgaacacccacagccgcgcctcctgcatgcagatggacgacgtcatcgacgacatcatcagcctggagtccagctacaacgaggagatcctcggcctgatggacccggccctgcagatggccaacaccctccccgtgtccgggaacctgatcgacctgtacggcaaccaggggctgcccccgcccggcctgaccatcagcaactcctgccccgccaacctgcccaacatcaagcgggagctcacggcgtgcatcttccccaccgagagcgaggcccgcgccctggccaaggagcggcagaagaaggacaaccacaacctgatcgagcgccggcgccggttcaacatcaacgaccgcatcaaggagctcgggaccctgatcccgaagtccaacgaccccgacatgcggtggaacaagggcaccatcctgaaggccagcgtggactacatccgcaagctccagcgggagcagcagcgcgcgaaggagctggagaaccggcagaagaagctggagcacgccaaccgccacctcctgctgcgcatccaggagctcgagatgcaggcccgggcccacggcctgtccctgatccccagcacggggctctgctccccggacctggtcaaccgcatcatcaagcaggagcccgtgctggagaactgcagccaggacctcctgcagcaccacgccgacctgacctgcaccaccacgctcgacctgaccgacggcaccatcaccttcaacaacaacctggggacgggcaccgaggcgaaccaggcctactccgtgcccaccaagatgggcagcaagctcgaggacatcctgatggacgacaccctgtcccccgtcggggtgacggacccgctgctcagcagcgtgtcccccggcgccagcaagacctccagccggcgctccagcatgtccatggaggagaccgagcacacgtgctga

SEQ ID NO: 1354 - RNA, 1065 nt, synthetic construct
  misc_feature 1..1065: note = BAG52140_variant
  source 1..1065: mol_type = other RNA
atggcccccgccgcgtggctgcgcagcgccgccgcccgggccctcctgccgcccatgctgctcctgctgctccagccccccccgctgctggcgcgcgccctcccccccgacgtgcaccacctgcacgccgagcggcgcggcccccagccgtggcacgccgcgctgccctccagccccgcccccgccccggccacccaggaggccccccggcccgcgtccagcctccgccccccgcggtgcggggtccccgacccctccgacggcctgagcgcccgcaaccggcagaagcgcatcctgcggttcccctggcagctcgtgcaggagcaggtgcgccagaccatggccgaggccctgaaggtctggtccgacgtgacgccgctgaccttcaccgaggtgcacgaggggcgggccgacatcatgatcgacttcgcgcgctactggcacggcgacgacctccccttcgacgggcccggcggcatcctggcccacgccttcttccccaagacccaccgggagggggacgtccacttcgactacgacgagacgtggaccatcggcgacgaccaggggaccgacctgctccaggtggccgcccacgagttcggccacgtgctggggctgcagcacaccacggcggccaaggccctcatgagcgccttctacaccttccgctacccgctgtccctgagccccgacgactgccggggcgtccagcacctctacggccagccctggcccaccgtgacctcccgcacgccggccctggggccccaggcgggcatcgacaccaacgagatcgcccccctggagccggacgccccccccgacgcctgcgaggcgagcttcgacgccgtgtccaccatccggggggagctcttcttcttcaaggccggcttcgtctggcgcctgcggggcgggcagctgcagcccggctacccggccctcgccagccgccactggcaggggctgccctcccccgtggacgcggccttcgaggacgcccagggccacatctggttcttccaggggaccacgggcgtgagcacccccgccccgggcgtctga

SEQ ID NO: 1355 - RNA, 804 nt, synthetic construct
  misc_feature 1..804: note = AAV40839_variant
  source 1..804: mol_type = other RNA
atgcgcctgaccgtgctctgcgccgtctgcctgctgcccggcagcctcgccctgccgctgccccaggaggccgggggcatgtccgagctccagtgggagcaggcgcaggactacctgaagcggttctacctgtacgacagcgagaccaagaacgccaactccctcgaggccaagctgaaggagatgcagaagttcttcgggctgcccatcacgggcatgctcaacagccgcgtgatcgagatcatgcagaagccccggtgcggggtgccggacgtcgccgagtactccctgttccccaacagccccaagtggacctccaaggtggtgacctaccgcatcgtcagctacacccgggacctgccccacatcacggtggaccgcctcgtgtccaaggcgctgaacatgtggggcaaggagatcccgctgcacttccggaaggtcgtgtggggcaccgccgacatcatgatcgggttcgcccgcggcgcccacggggacagctaccccttcgacggccccgggaacaccctcgcgcacgccttcgcccccggcaccggcctcgggggcgacgcccacttcgacgaggacgagcggtggacggacgggtccagcctgggcatcaacttcctgtacgccgcgacccacgagctgggccactccctggggatgggccacagctccgacccgaacgccgtgatgtaccccacctacgggaacggcgacccccagaacttcaagctcagccaggacgacatcaaggggatccagaagctgtacggcaagcgctccaacagccggaagaagtga

SEQ ID NO: 1356 - RNA, 3768 nt, synthetic construct
  misc_feature 1..3768: note = J05582.1_variant
  source 1..3768: mol_type = other RNA
atgacccccggcacccagagcccgttcttcctgctcctgctgctcacggtgctgaccgtcgtgaccgggtccggccacgccagctccacccccgggggcgagaaggagacgagcgccacccagcgctccagcgtgccctccagcaccgagaagaacgcggtctccatgaccagctccgtgctgagctcccacagccccgggtccggcagctccacgacccagggccaggacgtgaccctcgccccggccaccgagcccgccagcgggtccgccgcgacgtggggccaggacgtcaccagcgtgcccgtgacccggcccgccctggggagcaccacgccgcccgcccacgacgtcacctccgcccccgacaacaagcccgcgccgggcagcaccgccccgcccgcccacggggtgacctccgcccccgacacgcgccccgcccccggcagcaccgcgccgcccgcccacggcgtgacctccgcccccgacacccggcccgcccccgggagcacggcgcccccggcccacggcgtcacctccgcccccgacacccgccccgcccccgggagcaccgccccgcccgcccacggcgtgacgtccgcgcccgacacccggccggcccccggcagcaccgccccgcccgcccacggggtgacctccgcccccgacacgcgccccgcgcccggcagcaccgcgcccccggcccacggggtcacctccgcccccgacacccggcccgcccccggcagcacggccccgcccgcccacggggtgacctccgcccccgacacccgccccgccccgggcagcaccgcgccgcccgcccacggcgtgacctccgcccccgacacgcggcccgcccccgggagcaccgccccgcccgcgcacggcgtcacctccgcccccgacacccgccccgcccccgggagcacggccccgcccgcccacggcgtgaccagcgcgcccgacacccggcccgccccggggtccaccgccccgcccgcccacggcgtgacgagcgcgcccgacacccgccccgcccccggctccaccgccccgcccgcccacggggtcaccagcgcccccgacacgcggcccgcgcccggctccaccgcgcccccggcccacggggtgaccagcgcccccgacacccgccccgcccccggctccacggccccgcccgcccacggggtgaccagcgcccccgacacccggcccgccccgggctccaccgccccgcccgcgcacggcgtcacgagcgcccccgacacccgccccgcccccgggtccaccgcgcccccggcccacggcgtgaccagcgcccccgacacgcggcccgcccccgggtccaccgccccgcccgcccacggcgtcaccagcgcgcccgacacccgccccgccccgggctccacggccccgcccgcccacggggtgaccagcgcccccgacacccggcccgcgcccggctccaccgccccgcccgcccacggggtgacgagcgcccccgacacccgccccgcccccggcagcaccgcgcccccggcccacggggtcacctccgcccccgacacgcggcccgcccccggcagcaccgccccgcccgcgcacggcgtgacctccgcccccgacacccgccccgccccggggagcaccgccccgcccgcgcacggcgtgacgtccgcccccgacacccgccccgcccccgggagcaccgcgcccccggcccacggcgtcacctccgcccccgacacgcggcccgcccccgggagcaccgccccgcccgcccacggcgtgacctccgcccccgacacccgccccgcgccgggcagcacggccccgcccgcccacggggtgacctccgcccccgacacccggcccgcccccggcagcaccgcgccgcccgcccacggggtcacgtccgcccccgacacccgccccgcccccggcagcaccgcgcccccggcccacggggtgacctccgcccccgacacgcggcccgccccgggcagcaccgccccgcccgcgcacggcgtgacctccgcccccgacacccgccccgcccccgggagcacggccccgcccgcccacggcgtcacctccgcgcccgacacccggcccgcccccgggagcaccgcgcccccggcccacggcgtgacgagcgcccccgacacccgccccgcccccgggtccaccgccccgcccgcccacggcgtgaccagcgcccccgacacgcggcccgcgccgggctccaccgccccgcccgcccacggggtcaccagcgcccccgacacccgccccgcccccggctccacggcgccgcccgcccacggggtgaccagcgcccccgacacccggcccgcccccggctccaccgccccgcccgcgcacggcgtgacgagcgcccccgacacccgccccgccccggggtccaccgccccgcccgcccacggcgtcaccagcgcgcccgacacccggcccgcccccgggtccacggccccgcccgcccacggcgtgaccagcgcccccgacacccgccccgcgcccgggtccaccgcgcccccggcccacggcgtgacgagcgcccccgacacccggcccgcccccggctccaccgccccgcccgcccacggggtcaccagcgcccccgacacgcgccccgccccgggctccaccgcgccgcccgcccacggggtgaccagcgcccccgacacccggcccgcccccggctccacggcgcccccggcccacggggtgaccagcgcccccgacacccgccccgcccccggcagcaccgccccgcccgcccacggcgtcacgtccgcgcccgacaaccggcccgccctggggagcaccgccccgcccgtgcacaacgtgacctccgccagcggctccgcgagcgggtccgccagcaccctcgtccacaacggcacgtccgcccgcgccaccaccacccccgccagcaagtccacgcccttcagcatcccgtcccaccacagcgacacccccaccaccctggcgtcccacagcacgaagaccgacgcctccagcacccaccactccagcgtgccgcccctgaccagctccaaccacagcacgagcccccagctctccaccggggtgtccttcttcttcctgagcttccacatctccaacctgcagttcaacagctccctcgaggaccccagcaccgactactaccaggagctgcagcgcgacatctccgagatgttcctgcagatctacaagcagggcggcttcctcgggctgagcaacatcaagttccggcccggctccgtcgtggtgcagctgaccctcgccttccgcgaggggacgatcaacgtccacgacgtggagacccagttcaaccagtacaagaccgaggccgccagccggtacaacctgaccatctccgacgtgagcgtctccgacgtgcccttcccgttcagcgcgcagtccggcgccggcgtgcccgggtggggcatcgccctgctcgtcctggtgtgcgtgctggtcgccctcgccatcgtgtacctgatcgcgctggccgtgtgccagtgccgccggaagaactacgggcagctcgacatcttccccgcccgcgacacgtaccaccccatgagcgagtacccgacctaccacacccacggccggtacgtcccgcccagctccaccgaccgcagcccctacgagaaggtgtccgccgggaacggcggcagctccctgagctacaccaaccccgcggtggccgccgcctccgccaacctgtga

SEQ ID NO: 1357 - RNA, 2136 nt, synthetic construct
  misc_feature 1..2136: note = NM_032853_variant
  source 1..2136: mol_type = other RNA
atgatggccgacgccaagtacgtgctgtgccgctgggagaagcggctctggcccgcgaaggtcctggcccgcaccgccaccagcacgaagaacaagcggcgcaaggagtacttcctggccgtgcagatcctctccctggaggagaagatcaaggtcaagagcaccgaggtggagatcctggagaagtcccagatcgaggccatcgcgagctccctcgccagccagaacgaggtgccggccgcgcccctggaggagctggcctaccggcgctccctccgggtggccctggacgtcctgagcgagggctccatctggagccaggagtccagcgccgggaccggccgcgccgaccggtccctccgcgggaagcccatggagcacgtgagctccccctgcgacagcaactccagctccctgccgcggggcgacgtgctggggagcagccgcccccaccggcgccggccctgcgtccagcagtccctcagctccagcttcacgtgcgagaaggaccccgagtgcaaggtggaccacaagaagggcctgcgcaagtccgagaacccgcggggccccctggtgctccccgccgggggcggggcgcaggacgagagcggctcccgcatccaccacaagaactggaccctggccagcaagcggggcggcaactccgcccagaaggccagcctgtgcctcaacggctccagcctgtccgaggacgacaccgagcgcgacatggggagcaagggcgggtcctgggccgcgcccagcctgccgtccggcgtccgggaggacgacccctgcgccaacgccgagggccacgaccccgggctccccctgggcagcctgaccgccccgcccgcccccgagccctccgcgtgcagcgagccgggggagtgccccgccaagaagcgcccccgcctcgacggcagccagcggcccccggccgtgcagctggagcccatggccgccggggcggccccctcccccggcccgggccccgggccccgcgagagcgtgaccccgcggtccacggcccgcctggggcccccgcccagccacgcctccgcggacgccacccggtgcctcccctgccccgacagccagaagctggagaaggagtgccagtccagcgaggagtccatggggagcaactccatgcgcagcatcctggaggaggacgaggaggacgaggagccgccccgggtcctcctgtaccacgagccccgctccttcgaggtgggcatgctggtgtggcacaagcacaagaagtaccccttctggcccgccgtcgtcaagagcgtgcggcagcgcgacaagaaggcctccgtgctctacatcgaggggcacatgaaccccaagatgaagggcttcaccgtgagcctgaagtccctgaagcacttcgactgcaaggagaagcagaccctcctgaaccaggcccgggaggacttcaaccaggacatcggctggtgcgtgagcctgatcacggactaccgcgtccggctcgggtgcggcagcttcgcggggtccttcctggagtactacgccgccgacatcagctacccggtgcgcaagtccatccagcaggacgtcctgggcaccaagctcccccagctgagcaaggggtcccccgaggagcccgtggtgggctgcccgctgggccagcggcagccctgccgcaagatgctccccgaccggagccgcgccgcccgggaccgcgcgaaccagaagctggtcgagtacatcgtgaaggccaagggggccgagtcccacctccgcgccatcctcaagagccggaagccctcccgctggctgcagaccttcctgagctccagccagtacgtgacctgcgtcgagacgtacctggaggacgagggccagctggacctggtggtgaagtacctgcagggggtctaccaggaggtgggcgccaaggtgctccagcggaccaacggcgaccgcatccggttcatcctggacgtcctgctcccggaggcgatcatctgcgccatctccgccgtggacgaggtggactacaagaccgccgaggagaagtacatcaaggggcccagcctgtcctaccgcgagaaggagatcttcgacaaccagctgctcgaggagcggaaccgccggcgccggtga

SEQ ID NO: 1358 - RNA, 438 nt, synthetic construct
  misc_feature 1..438: note = AAD44697_variant
  source 1..438: mol_type = other RNA
atgaccgtgcacaacctgtacctcttcgaccgcaacggcgtctgcctgcactacagcgagtggcaccggaagaagcaggccgggatccccaaggaggaggagtacaagctgatgtacggcatgctgttctccatccgcagcttcgtgtccaagatgagcccgctcgacatgaaggacgggttcctggccttccagacctcccggtacaagctccactactacgagacgcccaccggcatcaaggtggtcatgaacaccgacctgggggtgggccccatccgcgacgtgctgcaccacatctacagcgcgctctacgtcgagctggtggtgaagaaccccctgtgcccgctcggccagaccgtccagtccgagctgttccggagccgcctggactcctacgtgcggagcctccccttcttctccgcccgcgccgggtga

SEQ ID NO: 1359 - RNA, 1395 nt, synthetic construct
  misc_feature 1..1395: note = AAH02712_variant
  source 1..1395: mol_type = other RNA
atgcccagctgctccaccagcaccatgccgggcatgatctgcaagaaccccgacctggagttcgactccctccagccctgcttctaccccgacgaggacgacttctacttcgggggcccggacagcacgccgcccggggaggacatctggaagaagttcgagctgctgcccaccccgcccctctcccccagccgcggcttcgccgagcactccagcgagcccccgtcctgggtgaccgagatgctgctggagaacgagctctgggggagccccgccgaggaggacgcgttcggcctgggcgggctgggcgggctcacccccaaccccgtcatcctgcaggactgcatgtggtccggcttcagcgcccgcgagaagctggagcgcgccgtgtccgagaagctccagcacgggcggggcccgcccacggccggcagcaccgcccagtcccccggggcgggcgccgccagccccgccgggcgcggccacggcggggcggccggcgccgggcgggccggcgccgcgctgccggccgagctggcccaccccgccgccgagtgcgtggaccccgcggtcgtgttccccttcccggtgaacaagcgcgagcccgcccccgtccccgccgccccggcctccgcgcccgccgccgggcccgccgtggccagcggcgcgggcatcgccgccccggccggggcgcccggcgtggccccgccccggcccgggggccgccagacctccgggggcgaccacaaggccctcagcaccagcggcgaggacacgctgtccgacagcgacgacgaggacgacgaggaggaggacgaggaggaggagatcgacgtcgtgaccgtggagaagcggcgctccagctccaacaccaaggccgtcaccacgttcaccatcaccgtgcggcccaagaacgccgcgctggggcccggccgcgcccagagctccgagctcatcctgaagcggtgcctgcccatccaccagcagcacaactacgccgcccccagcccctacgtggagtccgaggacgccccgccccagaagaagatcaagagcgaggcgagcccccgccccctcaagtccgtcatcccgcccaaggccaagtccctgagcccccggaactccgacagcgaggactccgagcgccggcgcaaccacaacatcctggagcggcagcgccggaacgacctccgcagctccttcctgaccctgcgcgaccacgtgcccgagctcgtgaagaacgagaaggccgccaaggtcgtgatcctgaagaaggccacggagtacgtgcacagcctgcaggcggaggagcaccagctcctgctggagaaggagaagctccaggcccggcagcagcagctgctgaagaagatcgagcacgcccggacctgctga

SEQ ID NO: 1360 - RNA, 3132 nt, synthetic construct
  misc_feature 1..3132: note = AAC78645_variant
  source 1..3132: mol_type = other RNA
atgcccctgctcgagggcagcgtgggggtcgaggacctggtgctgctcgagccgctggtggaggagtccctgctcaagaacctgcagctgcgctacgagaacaaggagatctacacctacatcggcaacgtcgtgatcagcgtgaacccctaccagcagctccccatctacgggcccgagttcatcgccaagtaccaggactacaccttctacgagctgaagccgcacatctacgccctggcgaacgtcgcctaccagtccctccgggaccgcgaccgggaccagtgcatcctgatcacgggcgagagcgggtccggcaagaccgaggccagcaagctggtgatgtcctacgtggccgccgtctgcggcaagggggagcaggtcaacagcgtgaaggagcagctcctgcagtccaaccccgtgctggaggcgttcggcaacgccaagaccatccgcaacaacaacagctcccggttcgggaagtacatggacatcgagttcgacttcaagggcagccccctcgggggcgtgatcaccaactacctgctggagaagtcccgcctcgtgaagcagctgaagggcgagcggaacttccacatcttctaccagctgctcgccggggccgacgagcagctgctgaaggcgctcaagctggagcgcgacacgaccggctacgcctacctgaaccacgaggtcagccgggtggacgggatggacgacgcctccagcttccgcgccgtgcagtccgccatggcggtcatcggcttcagcgaggaggagatccgccaggtgctcgaggtgacctccatggtcctgaagctgggcaacgtgctcgtggccgacgagttccaggccagcgggatccccgccagcggcatccgggacgggcggggcgtccgcgagatcggggagatggtgggcctgaactccgaggaggtcgagcgggccctgtgcagccgcaccatggagacggcgaaggagaaggtggtgaccgccctcaacgtcatgcaggcccagtacgcccgggacgccctggcgaagaacatctactcccgcctgttcgactggatcgtgaaccggatcaacgagagcatcaaggtgggcatcggggagaagaagaaggtcatgggcgtgctcgacatctacgggttcgagatcctggaggacaactccttcgagcagttcgtgatcaactactgcaacgagaagctgcagcaggtcttcatcgagatgaccctcaaggaggagcaggaggagtacaagcgcgagggcatcccgtggaccaaggtggactacttcgacaacgggatcatctgcaagctgatcgagcacaaccagcggggcatcctggccatgctcgacgaggagtgcctgcgccccggcgtggtcagcgactccacgttcctggccaagctcaaccagctgttcagcaagcacgggcactacgagtccaaggtgacccagaacgcccagcgccagtacgaccacaccatgggcctgagctgcttccggatctgccactacgccgggaaggtgacctacaacgtcacgtccttcatcgacaagaacaacgacctcctcttccgcgacctgctgcaggcgatgtggaaggcccagcaccccctcctgcggagcctgttccccgagggcaacccgaagcaggcctccctcaagcgcccgcccaccgccggggcgcagttcaagagctccgtggccatcctgatgaagaacctgtacagcaagtcccccaactacatccggtgcatcaagcccaacgagcaccagcagcgcggccagttcagctccgacctcgtggccacccaggcccggtacctgggcctgctcgagaacgtccgcgtgcggcgcgccgggtacgcgcaccggcagggctacgggcccttcctggagcgctaccggctgctcagccgcagcacctggccccactggaacggcggcgaccgggagggggtggagaaggtcctgggcgagctgtccatgagctccggggagctcgccttcggcaagacgaagatcttcatccgcagccccaagaccctgttctacctggaggagcagcggcgcctccggctgcagcagctggccaccctcatccagaagatctaccgcgggtggcgctgccggacccactaccagctgatgcgcaagtcccagatcctgatcagctcctggttccggggcaacatgcagaagaagtgctacggcaagatcaaggccagcgtgctcctgatccaggccttcgtgcgcgggtggaaggcgcggaagaactaccgcaagtacttccggtccgaggccgccctgacgctcgccgacttcatctacaagagcatggtccagaagttcctgctgggcctcaagaacaacctgccgtccaccaacgtgctggacaagacctggcccgccgcgccctacaagtgcctcagcaccgccaaccaggagctgcagcagctgttctaccagtggaagtgcaagcgcttccgggaccagctctcccccaagcaggtcgagatcctgcgcgagaagctgtgcgccagcgagctgttcaaggggaagaaggcctcctacccgcagagcgtgcccatccccttctgcggcgactacatcgggctgcagggcaaccccaagctgcagaagctcaagggcggggaggagggcccggtgctgatggcggaggccgtgaagaaggtcaaccgggggaacggcaagacgtccagccgcatcctgctcctgaccaaggggcacgtgatcctgaccgacaccaagaagtcccaggccaagatcgtgatcggcctcgacaacgtcgccggcgtgagcgtgacgagcctgaaggacgggctgttctccctccacctgagcgagatgtccagcgtcggctccaagggggacttcctgctcgtgagcgagcacgtgatcgagctgctgaccaagatgtaccgggccgtcctcgacgcgacccagcgccagctgaccgtgacggtgaccgagaagttctccgtccggttcaaggagaacagcgtggccgtgaaggtcgtgcagggccccgccgggggcgacaactccaagctgcgctacaagaagaagggcagccactgcctcgaggtgaccgtccagtga

SEQ ID NO: 1361 - RNA, 3411 nt, synthetic construct
  misc_feature 1..3411: note = AAH53558_variant
  source 1..3411: mol_type = other RNA
atggccaagatggaggtgaagaccagcctgctcgacaacatgatcggcgtcggggacatggtgctgctggagcccctcaacgaggagaccttcatcaacaacctgaagaagcgcttcgaccactccgagatctacacgtacatcggcagcgtggtcatctccgtgaacccctaccggagcctgcccatctactcccccgagaaggtggaggagtaccgcaaccggaacttctacgagctcagcccccacatcttcgccctgtccgacgaggcgtaccgcagcctgcgggaccaggacaaggaccagtgcatcctcatcaccggggagtccggcgccgggaagaccgaggccagcaagctggtcatgtcctacgtggccgccgtgtgcggcaagggcgcggaggtcaaccaggtgaaggagcagctgctccagagcaacccggtgctggaggccttcgggaacgccaagaccgtccgcaacgacaactccagccggttcggcaagtacatggacatcgagttcgacttcaagggggaccccctgggcggggtgatctccaactacctcctggagaagtcccgcgtggtcaagcagccccggggcgagcgcaacttccacgtgttctaccagctgctcagcggcgccagcgaggagctgctgaacaagctcaagctggagcgggacttctcccgctacaactacctgagcctcgacagcgcgaaggtgaacggggtcgacgacgccgccaacttccggacggtgcgcaacgccatgcagatcgtgggcttcatggaccacgaggccgagtccgtcctggcggtggtggccgccgtcctgaagctcgggaacatcgagttcaagcccgagagccgggtgaacggcctggacgagtccaagatcaaggacaagaacgagctgaaggagatctgcgagctcaccggcatcgaccagagcgtcctggagcgcgccttctccttccggaccgtggaggccaagcaggagaaggtgagcaccacgctgaacgtcgcgcaggcctactacgcccgcgacgccctcgccaagaacctgtactcccggctgttcagctggctcgtgaaccgcatcaacgagtccatcaaggcgcagaccaaggtgcggaagaaggtcatgggggtgctggacatctacggcttcgagatcttcgaggacaacagcttcgagcagttcatcatcaactactgcaacgagaagctgcagcagatcttcatcgagctcaccctgaaggaggagcaggaggagtacatccgcgaggacatcgagtggacccacatcgactacttcaacaacgccatcatctgcgacctgatcgagaacaacacgaacgggatcctcgccatgctggacgaggagtgcctgcgcccgggcaccgtgaccgacgagaccttcctcgagaagctgaaccaggtctgcgccacgcaccagcacttcgagtcccggatgagcaagtgctcccgcttcctgaacgacaccagcctcccccactcctgcttccggatccagcactacgccgggaaggtgctgtaccaggtggagggcttcgtcgacaagaacaacgacctgctgtaccgcgacctcagccaggcgatgtggaaggcctcccacgccctgatcaagagcctgttccccgagggcaaccccgccaagatcaacctcaagcggccgcccaccgcggggtcccagttcaaggccagcgtggccaccctgatgaagaacctgcagacgaagaaccccaactacatccgctgcatcaagcccaacgacaagaaggccgcccacatcttcaacgaggcgctcgtgtgccaccagatccggtacctgggcctgctcgagaacgtccgcgtgcggcgcgccgggtacgccttccggcaggcctacgagccgtgcctggagcgctacaagatgctgtgcaagcagacctggccccactggaagggccccgcccggagcggggtggaggtcctcttcaacgagctggagatccccgtggaggagtactccttcggccgcagcaagatcttcatccggaacccgcgcaccctgttcaagctcgaggacctgcggaagcagcgcctggaggacctcgcgaccctgatccagaagatctaccggggctggaagtgccgcacgcacttcctgctcatgaagaagtcccagatcgtgatcgccgcctggtaccgccggtacgcccagcagaagcgctaccagcagaccaagagctccgccctggtcatccagagctacatccgggggtggaaggcgcgcaagatcctgcgggagctcaagcaccagaagcgctgcaaggaggccgtgaccaccatcgccgcctactggcacggcacgcaggcgcggcgcgagctgcggcgcctgaaggaggaggcccggaacaagcacgccatcgccgtgatctgggcctactggctcgggtccaaggcgcgccgggagctgaagcgcctgaaggaggaggcccggcgcaagcacgccgtcgccgtgatctgggcctactggctcggcctgaaggtgcggcgcgagtaccggaagttcttccgcgcgaacgccgggaagaagatctacgagttcaccctgcagcggatcgtccagaagtacttcctcgagatgaagaacaagatgcccagcctgtcccccatcgacaagaactggcccagccgcccgtacctgttcctcgactccacccacaaggagctgaagcgcatcttccacctgtggcggtgcaagaagtaccgcgaccagttcaccgaccagcagaagctcatctacgaggagaagctggaggccagcgagctgttcaaggacaagaaggccctctacccctccagcgtgggccagcccttccagggcgcctacctggagatcaacaagaaccccaagtacaagaagctgaaggacgcgatcgaggagaagatcatcatcgccgaggtggtcaacaagatcaaccgggccaacgggaagtccacgagccgcatcttcctcctgaccaacaacaacctgctcctggccgaccagaagtccggccagatcaagagcgaggtgccgctggtggacgtcaccaaggtgagcatgtccagccagaacgacgggttcttcgcggtgcacctcaaggagggctccgaggccgccagcaagggcgacttcctgttctccagcgaccacctgatcgagatggccaccaagctctaccggacgaccctgtcccagaccaagcagaagctgaacatcgagatcagcgacgagttcctcgtccagttccgccaggacaaggtgtgcgtgaagttcatccaggggaaccagaagaacggctccgtcccgacctgcaagcggaagaacaaccgcctgctggaggtggccgtgccctga

SEQ ID NO: 1362 - RNA, 3192 nt, synthetic construct
  misc_feature 1..3192: note = CCDS42226.1_variant
  source 1..3192: mol_type = other RNA
atggccctccaggtggagctcgtccccaccggcgagatcatccgcgtggtgcacccgcaccggccctgcaagctggccctggggagcgacggcgtccgcgtgaccatggagtccgcgctcacggcccgggaccgcgtgggggtccaggacttcgtgctgctggagaacttcaccagcgaggccgccttcatcgagaacctccggcgccggttccgcgagaacctgatctacacctacatcggccccgtgctggtctccgtgaacccctaccgggacctccagatctacagccgccagcacatggagcggtaccgcggggtgtccttctacgaggtcccgccccacctgttcgccgtggcggacaccgtgtaccgggccctgcgcacggagcggcgcgaccaggccgtcatgatcagcggcgagtccggcgccgggaagaccgaggcgaccaagcggctcctgcagttctacgccgagacctgccccgcccccgagcgcggcggggccgtgcgggaccgcctgctccagagcaacccggtgctggaggccttcggcaacgcgaagacgctgcggaacgacaactccagccgcttcgggaagtacatggacgtccagttcgacttcaagggcgcccccgtgggcgggcacatcctctcctacctgctggagaagtcccgcgtggtccaccagaaccacggcgagcggaacttccacatcttctaccagctcctggagggcggggaggaggagaccctgcgccggctcggcctggagcgcaacccccagtcctacctgtacctcgtgaaggggcagtgcgccaaggtgagctccatcaacgacaagagcgactggaaggtcgtgcggaaggccctgaccgtcatcgacttcaccgaggacgaggtggaggacctgctctccatcgtggccagcgtcctgcacctgggcaacatccacttcgcggccaacgaggagtccaacgcccaggtgacgaccgagaaccagctcaagtacctgacccgcctgctcagcgtggaggggagcaccctgcgggaggccctgacgcaccgcaagatcatcgccaagggcgaggagctcctgagccccctgaacctcgagcaggcggcctacgcccgggacgccctggccaaggcggtctacagccgcaccttcacctggctggtggggaagatcaaccggtccctcgccagcaaggacgtggagtccccgagctggcgctccaccacggtcctgggcctgctcgacatctacggcttcgaggtgttccagcacaacagcttcgagcagttctgcatcaactactgcaacgagaagctgcagcagctgttcatcgagctgaccctcaagtccgagcaggaggagtacgaggccgaggggatcgcctgggagcccgtgcagtacttcaacaacaagatcatctgcgacctggtcgaggagaagttcaagggcatcatcagcatcctggacgaggagtgcctccggcccggggaggcgaccgacctgaccttcctggagaagctcgaggacacggtgaagcaccacccccacttcctgacccacaagctggccgaccagcgcacccggaagtccctcggccgcggggagttccggctgctgcactacgccggcgaggtgacctacagcgtcacgggcttcctcgacaagaacaacgacctgctgttccgcaacctcaaggagaccatgtgctccagcaagaacccgatcatgtcccagtgcttcgaccggagcgagctgtccgacaagaagcgccccgagaccgtggccacccagttcaagatgagcctgctccagctggtggagatcctgcagtccaaggagcccgcctacgtccgctgcatcaagcccaacgacgcgaagcagccggggcggttcgacgaggtgctcatccgccaccaggtgaagtacctgggcctgctcgagaacctgcgggtccgccgggccgggttcgcctaccgccggaagtacgaggccttcctgcagcgctacaagagcctctgccccgagacgtggcccacctgggccggccggccccaggacggggtggcggtgctggtccgccacctgggctacaagccggaggagtacaagatgggccggaccaagatcttcatccgcttccccaagaccctcttcgccacggaggacgccctggaggtgcggcgccagagcctggccaccaagatccaggccgcgtggcgggggttccactggcgccagaagttcctccgggtgaagcgctccgccatctgcatccagagctggtggcggggcaccctggggcgccggaaggccgccaagcgcaagtgggcggcccagaccatccgccggctgatccgcggcttcgtcctccggcacgcgccccgctgccccgagaacgccttcttcctggaccacgtgcggacctccttcctgctcaacctgcgccggcagctgccgcagaacgtgctcgacacgagctggcccacgcccccgcccgccctgcgcgaggcctccgagctgctccgggagctgtgcatcaagaacatggtctggaagtactgccgcagcatctcccccgagtggaagcagcagctgcagcagaaggccgtggccagcgagatcttcaagggcaagaaggacaactacccccagtccgtgccgcggctgttcatcagcacccgcctggggaccgacgagatcagcccccgggtcctgcaggccctcggctccgagcccatccagtacgccgtgcccgtggtcaagtacgaccgcaaggggtacaagccgcggtcccgccagctgctgctcacccccaacgcggtggtgatcgtcgaggacgccaaggtgaagcagcggatcgactacgccaacctgaccggcatcagcgtgtccagcctgtccgacagcctcttcgtcctgcacgtgcagcgcgccgacaacaagcagaagggggacgtggtcctgcagagcgaccacgtgatcgagaccctcaccaagacggccctgtccgcgaaccgggtgaacagcatcaacatcaaccagggctccatcaccttcgccggcgggcccggccgcgacgggaccatcgacttcacccccggcagcgagctgctcatcacgaaggccaagaacgggcacctggccgtcgtggcgccgcgcctgaactcccggtga

SEQ ID NO: 1363 - RNA, 3021 nt, synthetic construct
  misc_feature 1..3021: note = AAI46764_variant
  source 1..3021: mol_type = other RNA
atggccgagcaggagagcctggagttcggcaaggccgacttcgtgctcatggacaccgtctccatgcccgagttcatggcgaacctgcgcctgcggttcgagaaggggcgcatctacaccttcatcggcgaggtggtggtcagcgtgaacccgtacaagctcctgaacatctacgggcgggacacgatcgagcagtacaagggccgcgagctgtacgagcggccgccccacctcttcgccatcgccgacgccgcctacaaggcgatgaagcgccggtccaaggacacgtgcatcgtgatcagcggggagtccggcgccggcaagaccgaggccagcaagtacatcatgcagtacatcgccgcgatcaccaacccctcccagcgcgccgaggtcgagcgggtgaagaacatgctgctcaagagcaactgcgtgctggaggccttcgggaacgccaagaccaaccgcaacgacaactccagccggttcggcaagtacatggacatcaacttcgacttcaagggggaccccatcggcgggcacatcaacaactacctgctggagaagtcccgcgtcatcgtgcagcagcccggcgagcggagcttccactccttctaccagctcctgcagggcgggagcgagcagatgctgcgctccctccacctccagaagtccctgagcagctacaactacatccacgtgggcgcccagctgaagtccagcatcaacgacgcggccgagttccgggtcgtggccgacgccatgaaggtgatcgggttcaagcccgaggagatccagaccgtctacaagatcctggccgcgatcctgcacctcggcaacctgaagttcgtggtggacggcgacacgcccctgatcgagaacgggaaggtcgtgagcatcatcgccgagctcctgtccaccaagaccgacatggtggagaaggccctgctctaccgcaccgtcgccaccggccgggacatcatcgacaagcagcacaccgagcaggaggccagctacgggcgcgacgcgttcgccaaggccatctacgagcggctgttctgctggatcgtgacgcgcatcaacgacatcatcgaggtgaagaactacgacaccaccatccacggcaagaacaccgtcatcggggtgctggacatctacggcttcgagatcttcgacaacaactccttcgagcagttctgcatcaactactgcaacgagaagctccagcagctgttcatccagctggtcctcaagcaggagcaggaggagtaccagcgggagggcatcccgtggaagcacatcgactacttcaacaaccagatcatcgtggacctggtggagcagcagcacaaggggatcatcgccatcctggacgacgcctgcatgaacgtcggcaaggtgacggacgagatgttcctcgaggcgctgaacagcaagctggggaagcacgcccacttctccagccgcaagctctgcgcctccgacaagatcctggagttcgaccgcgacttccggatccgccactacgccggcgacgtggtctacagcgtgatcgggttcatcgacaagaacaaggacaccctgttccaggacttcaagcggctcatgtacaactccagcaaccccgtgctgaagaacatgtggcccgagggcaagctgtccatcaccgaggtcaccaagcgccccctcacggcggccaccctgttcaagaacagcatgatcgccctggtggacaacctcgcctccaaggagccgtactacgtgcggtgcatcaagcccaacgacaagaagtccccgcagatcttcgacgacgagcgctgccggcaccaggtcgagtacctgggcctgctggagaacgtgcgcgtgcggcgcgccgggttcgcgttccggcagacctacgagaagttcctccaccgctacaagatgatcagcgagttcacctggcccaaccacgacctgcccagcgacaaggaggccgtcaagaagctgatcgagcggtgcggcttccaggacgacgtggcctacgggaagacgaagatcttcatccgcacgccccggaccctcttcaccctggaggagctgcgcgcccagatgctcatccggatcgtgctgttcctgcagaaggtctggcgcggcaccctcgcccggatgcgctacaagcgcaccaaggcggccctgaccatcatccggtactaccgccggtacaaggtgaagtcctacatccacgaggtggcccgccggttccacggggtcaagaccatgcgcgactacggcaagcacgtgaagtggcccagcccgcccaaggtgctgcggcgcttcgaggaggccctccagacgatcttcaaccggtggcgcgcctcccagctgatcaagagcatccccgcgagcgacctgccccaggtccgggccaaggtggccgccgtggagatgctcaagggccagcgcgcggacctggggctgcagcgggcctgggagggcaactacctcgcctccaagcccgacaccccgcagaccagcgggaccttcgtccccgtggccaacgagctgaagcgcaaggacaagtacatgaacgtgctgttctcctgccacgtccggaaggtgaaccgcttcagcaaggtggaggaccgggccatcttcgtcacggaccgccacctctacaagatggaccccaccaagcagtacaaggtgatgaagaccatccccctgtacaacctgaccggcctctccgtgagcaacggcaaggaccagctggtcgtgttccacaccaaggacaacaaggacctgatcgtgtgcctcttctccaagcagccgacgcacgagagccggatcggggagctggtcggcgtgctggtgaaccacttcaagtccgagaagcgccacctccaggtcaacgtgaccaaccccgtgcagtgcagcctgcacgggaagaagtgcaccgtctccgtggagacccggctgaaccagccccagccggacttcacgaagaaccgcagcggcttcatcctctccgtgcccgggaactga

SEQ ID NO: 1364 - RNA, 3327 nt, synthetic construct
  misc_feature 1..3327: note = CCDS32254.1_variant
  source 1..3327: mol_type = other RNA
atgggcagcaagggggtgtaccagtaccactggcagtcccacaacgtcaagcacagcggcgtggacgacatggtgctgctctccaagatcaccgagaacagcatcgtcgagaacctgaagaagcgctacatggacgactacatcttcacctacatcgggtccgtgctgatcagcgtgaaccccttcaagcagatgccgtacttcggcgagaaggagatcgagatgtaccagggggccgcccagtacgagaaccccccccacatctacgcgctcgccgacaacatgtaccggaacatgatcatcgaccgcgagaaccagtgcgtcatcatctccggcgagagcggcgccgggaagacggtggccgccaagtacatcatgtcctacatcagccgggtgtccggcgggggcaccaaggtccagcacgtgaaggacatcatcctgcagagcaaccccctgctcgaggcgttcgggaacgccaagaccgtgcgcaacaacaactccagccggttcggcaagtacttcgagatccagttctccccgggcggggagcccgacggcgggaagatcagcaacttcctgctggagaagtcccgcgtcgtgatgcggaaccccggcgagcgcagcttccacatcttctaccagctcatcgagggcgcctccgccgagcagaagcacagcctggggatcaccagcatggactactactactacctgtccctcagcggctcctacaaggtggacgacatcgacgaccggcgcgagttccaggagacgctgcacgcgatgaacgtcatcgggatcttcgccgaggagcagaccctggtgctccagatcgtggccggcatcctgcacctggggaacatcagcttcaaggaggtcggcaactacgccgccgtggagtccgaggagttcctcgcgttccccgcctacctgctgggcatcaaccaggaccggctcaaggagaagctgaccagccgccagatggactccaagtgggggggcaagagcgagtccatccacgtgaccctgaacgtcgagcaggcctgctacacgcgggacgccctcgccaaggcgctgcacgcccgcgtgttcgacttcctggtggacagcatcaacaaggccatggagaaggaccacgaggagtacaacatcggggtcctcgacatctacggcttcgagatcttccagaagaacgggttcgagcagttctgcatcaacttcgtgaacgagaagctgcagcagatcttcatcgagctgaccctcaaggccgagcaggaggagtacgtccaggagggcatccggtggaccccgatcgagtacttcaacaacaagatcgtgtgcgacctgatcgagaacaaggtgaacccccccggcatcatgtccatcctggacgacgtctgcgccaccatgcacgcggtgggggagggcgccgaccagacgctcctgcagaagctgcagatgcagatcgggagccacgagcacttcaactcctggaaccagggcttcatcatccaccactacgccgggaaggtgagctacgacatggacggcttctgcgagcgcaaccgggacgtcctcttcatggacctgatcgagctgatgcagtccagcgagctccccttcatcaagtccctgttcccggagaacctgcaggccgacaagaagggccgccccaccaccgccgggagcaagatcaagaagcaggcgaacgacctcgtgtccaccctgatgaagtgcacgccccactacatccggtgcatcaagcccaacgagaccaagaagccgcgcgactgggaggagagccgggtgaagcaccaggtcgagtacctgggcctcaaggagaacatccgcgtgcgccgggccgggtacgcctaccgccggatcttccagaagttcctgcagcgctacgccatcctgaccaaggcgacctggcccagctggcagggcgaggagaagcagggcgtgctccacctgctgcagtccgtcaacatggacagcgaccagttccagctggggcggtccaaggtgttcatcaaggcccccgagagcctcttcctgctggaggagatgcgcgagcggaagtacgacggctacgcccgcgtgatccagaagtcctggcggaagttcgtcgcccgcaagaagtacgtgcagatgcgggaggaggccagcgacctcctgctgaacaagaaggagcgccggcgcaactccatcaaccggaacttcatcggggactacatcggcatggaggagcaccccgagctccagcagttcgtggggaagcgcgagaagatcgacttcgcggacacggtcaccaagtacgaccggcgcttcaagggcgtgaagcgggacctgctgctcaccccgaagtgcctgtacctgatcggccgcgagaaggtgaagcaggggcccgacaagggcctcgtcaaggaggtgctgaagcgcaagatcgagatcgagcggatcctgagcgtgtccctcagcaccatgcaggacgacatcttcatcctgcacgagcaggagtacgactccctgctcgagagcgtcttcaagacggagttcctgtccctgctcgccaagcgctacgaggagaagacccagaagcagctgcccctgaagttcagcaacaccctcgagctgaagctgaagaaggagaactgggggccctggtccgccggcgggagccggcaggtgcagttccaccagggcttcggcgacctcgccgtgctgaagccgtccaacaaggtcctgcaggtgagcatcgggcccggcctccccaagaacagccgccccacccggcgcaacacgacccagaacaccgggtactccagcggcacccagaacgccaactacccggtgcgggcggccccccccccgcccgggtaccaccagaacggcgtcatccgcaaccagtacgtgccctacccccacgccccgggctcccagcggagcaaccagaagtccctgtacacgagcatggcccgcccccccctgccccggcagcagtccaccagctccgaccgcgtgagccagaccccggagtccctcgacttcctgaaggtccccgaccagggggccgcgggcgtgcggcgccagaccacgagccggccccccccggccgggggccgccccaagccccagcccaagccgaagccccaggtgccccagtgcaaggccctgtacgcctacgacgcgcaggacaccgacgagctctccttcaacgccaacgacatcatcgacatcatcaaggaggaccccagcgggtggtggaccggccggctgcgcggcaagcaggggctgttcccgaacaactacgtcaccaagatctga

SEQ ID NO: 1365 - RNA, 3297 nt, synthetic construct
  misc_feature 1..3297: note = AAH28071_variant
  source 1..3297: mol_type = other RNA
atgggcagcaaggagcgcttccactggcagtcccacaacgtgaagcagagcggggtcgacgacatggtgctgctcccccagatcaccgaggacgccatcgccgcgaacctgcggaagcgcttcatggacgactacatcttcacctacatcggctccgtgctgatcagcgtcaacccgttcaagcagatgccctacttcacggaccgggagatcgacctctaccagggggccgcccagtacgagaacccgccccacatctacgccctgaccgacaacatgtaccgcaacatgctgatcgactgcgagaaccagtgcgtgatcatctccggcgagagcggggccggcaagaccgtggcggccaagtacatcatgggctacatctccaaggtcagcgggggcggggagaaggtgcagcacgtgaaggacatcatcctccagtccaaccccctgctggaggccttcggcaacgccaagaccgtccggaacaacaacagctcccgcttcgggaagtacttcgagatccagttcagccggggcggcgagcccgacgggggcaagatctccaacttcctcctggagaagtcccgcgtggtgatgcagaacgagaacgagcggaacttccacatctactaccagctgctcgagggggcgtcccaggagcagcgccagaacctgggcctgatgacgcccgactactactactacctcaaccagagcgacacctaccaggtcgacggcaccgacgaccggtccgacttcggggagaccctgagcgccatgcaggtcatcggcatcccgccctccatccagcagctggtgctccagctggtcgccgggatcctgcacctcggcaacatcagcttctgcgaggacgggaactacgcccgcgtggagagcgtggacctgctggccttccccgcgtacctcctgggcatcgactccggccggctgcaggagaagctcacgagccgcaagatggactcccggtggggcgggcgcagcgagtccatcaacgtcaccctgaacgtggagcaggccgcctacacccgggacgccctggccaaggggctctacgcgcgcctgttcgacttcctggtggaggccatcaaccgggccatgcagaagccccaggaggagtacagcatcggcgtgctcgacatctacgggttcgagatcttccagaagaacggcttcgagcagttctgcatcaacttcgtgaacgagaagctgcagcagatcttcatcgagctgaccctcaaggccgagcaggaggagtacgtgcaggagggcatccgctggacgcccatccagtacttcaacaacaaggtcgtgtgcgacctgatcgagaacaagctgagcccgcccgggatcatgagcgtcctcgacgacgtgtgcgccaccatgcacgcgaccggcgggggcgccgaccagaccctgctgcagaagctccaggccgccgtggggacgcacgagcacttcaactcctggagcgccggcttcgtcatccaccactacgcgggcaaggtgtcctacgacgtgagcgggttctgcgagcggaaccgcgacgtcctgttctccgacctgatcgagctcatgcagaccagcgagcaggccttcctgcgcatgctgttccccgagaagctcgacggcgacaagaaggggcggccctccaccgccggcagcaagatcaagaagcaggccaacgacctggtggcgaccctgatgcgctgcacgccgcactacatccggtgcatcaagcccaacgagaccaagcgcccccgggactgggaggagaaccgcgtgaagcaccaggtcgagtacctgggcctcaaggagaacatccgggtgcgccgggccgggttcgcctaccgccggcagttcgccaagttcctgcagcgctacgccatcctgacccccgagacctggccgcggtggcgcggcgacgagcggcagggggtgcagcacctcctgcgcgcggtcaacatggagcccgaccagtaccagatgggctccacgaaggtgttcgtgaagaaccccgagagcctgttcctcctggaggaggtccgggagcgcaagttcgacgggttcgcccggaccatccagaaggcctggcgccgccacgtggccgtgcggaagtacgaggagatgcgcgaggaggcctccaacatcctgctcaacaagaaggagcggcgccggaacagcatcaaccgcaacttcgtcggcgactacctgggcctggaggagcggcccgagctccgccagttcctggggaagcgggagcgcgtggacttcgcggacagcgtgaccaagtacgaccggcgcttcaagccgatcaagcgggacctgatcctcacccccaagtgcgtctacgtgatcggccgcgagaaggtgaagaaggggcccgagaagggccaggtctgcgaggtgctgaagaagaaggtggacatccaggccctgcgcggggtctccctcagcacgcggcaggacgacttcttcatcctgcaggaggacgccgccgactccttcctggagagcgtgttcaagaccgagttcgtgtccctcctgtgcaagcggttcgaggaggccacccgccggcccctgccgctcaccttcagcgacacgctgcagttccgcgtcaagaaggagggctggggcgggggcgggacccggtccgtgaccttcagccgcggcttcggggacctggcggtgctcaaggtcggcggccgcaccctgacggtgtccgtgggggacggcctgcccaagagctccaagcccacccggaaggggatggccaagggcaagccgcgccggagctcccaggcccccacccgcgccgcgcccgcgcccccgcgggggatggaccgcaacggcgtcccgcccagcgcccggggcgggcccctccccctggagatcatgtccggcgggggcacccaccgcccgccccggggcccgcccagcacctccctgggggccagccgccggccccgcgcccggccgcccagcgagcacaacacggagttcctcaacgtgcccgaccagggcatggccgggatgcagcgcaagcggtccgtgggccagcgccccgtccccggggtgggccggcccaagccccagccccgcacccacggcccccggtgccgcgccctgtaccagtacgtggggcaggacgtcgacgagctgagcttcaacgtgaacgaggtgatcgagatcctcatggaggacccctccggctggtggaaggggcgcctgcacggccaggaggggctgttcccgggcaactacgtcgagaagatctga

SEQ ID NO: 1366 - RNA, 3057 nt, synthetic construct
  misc_feature 1..3057: note = CCDS34629.1_variant
  source 1..3057: mol_type = other RNA
atggaggacgaggagggccccgagtacgggaagccggacttcgtgctgctcgaccaggtcaccatggaggacttcatgcgcaacctgcagctgcggttcgagaagggccgcatctacacctacatcggggaggtgctcgtgagcgtcaacccctaccaggagctgcccctgtacggccccgaggccatcgcccggtaccaggggcgcgagctctacgagcggccgccccacctgtacgcggtggccaacgccgcctacaaggccatgaagcaccgctcccgggacacgtgcatcgtgatcagcggcgagtccggcgcggggaagaccgaggccagcaagcacatcatgcagtacatcgccgccgtcaccaacccctcccagcgcgcggaggtggagcgggtgaaggacgtcctgctcaagagcacctgcgtgctggaggccttcggcaacgcccgcacgaaccggaaccacaactccagccgcttcgggaagtacatggacatcaacttcgacttcaagggcgaccccatcgggggccacatccactcctacctgctcgagaagagccgggtgctgaagcagcacgtcggcgagcgcaacttccacgccttctaccagctgctccgggggtccgaggacaagcagctgcacgagctgcacctcgagcgcaacccggccgtgtacaacttcacccaccagggcgcggggctgaacatgaccgtgcacagcgccctggactccgacgagcagagccaccaggccgtcaccgaggccatgcgggtgatcggcttctcccccgaggaggtggagagcgtccaccgcatcctcgccgcgatcctgcacctgggcaacatcgagttcgtggagacggaggaggggggcctccagaaggaggggctggccgtggccgaggaggccctggtcgaccacgtggccgagctcaccgcgaccccccgggacctggtgctgcgctccctcctggcccggaccgtcgccagcggcgggcgcgagctgatcgagaagggccacacggccgccgaggcgtcctacgcccgcgacgcctgcgccaaggcggtgtaccagcggctcttcgagtgggtcgtgaaccgcatcaacagcgtgatggagccccggggccgcgacccgcggcgcgacgggaaggacaccgtcatcggcgtgctggacatctacgggttcgaggtgttccccgtcaacagcttcgagcagttctgcatcaactactgcaacgagaagctgcagcagctcttcatccagctgatcctgaagcaggagcaggaggagtacgagcgggagggcatcacctggcagtccgtggagtacttcaacaacgccaccatcgtggacctcgtcgagcgcccccaccgggggatcctggccgtgctggacgaggcctgcagctccgccggcacgatcaccgaccgcatcttcctccagaccctggacatgcaccaccggcaccacctgcactacaccagccgccagctctgccccacggacaagaccatggagttcggccgggacttccgcatcaagcactacgcgggggacgtgacctactccgtcgagggcttcatcgacaagaaccgggacttcctgttccaggacttcaagcgcctgctctacaacagcaccgacccgacgctgcgggccatgtggcccgacgggcagcaggacatcaccgaggtgaccaagcgccccctgaccgccggcacgctgttcaagaactccatggtggccctcgtcgagaacctggccagcaaggagcccttctacgtgcggtgcatcaagccgaacgaggacaaggtggcggggaagctggacgagaaccactgccgccaccaggtcgcctacctcggcctgctggagaacgtgcgcgtgcggcgcgccggcttcgcctcccggcagccctacagccgcttcctcctgcggtacaagatgacctgcgagtacacctggcccaaccacctgctcgggtccgacaaggccgcggtcagcgccctgctggagcagcacggcctccagggggacgtggccttcggccactccaagctgttcatccgcagcccccggaccctggtgacgctcgagcagtcccgcgcccggctgatcccgatcatcgtcctgctcctgcagaaggcgtggcgcggcaccctggcccggtggcgctgccggcgcctccgggccatctacaccatcatgcgctggttccggcgccacaaggtgcgggcccacctggccgagctgcagcgccggttccaggcggcccgccagccccccctctacgggcgcgacctggtgtggcccctgccgcccgccgtcctccagcccttccaggacacctgccacgccctgttctgccggtggcgcgcccggcagctggtgaagaacatcccgcccagcgacatgccccagatcaaggcgaaggtggccgccatgggcgccctccaggggctgcgccaggactggggctgccggcgcgcctgggcgcgggactacctgtccagcgccacggacaaccccaccgcctccagcctcttcgcccagcgcctgaagaccctgcaggacaaggacgggttcggcgcggtcctcttcagctcccacgtgcggaaggtgaaccgcttccacaagatccggaaccgcgccctgctgctcaccgaccagcacctgtacaagctggacccggaccggcagtaccgcgtcatgcgggccgtgcccctcgaggccgtgaccggcctgagcgtcacgtccgggggcgaccagctggtggtgctccacgcccgcgggcaggacgacctggtcgtgtgcctgcaccggagccgcccccccctcgacaaccgggtgggcgagctggtcggggtgctggcggcccactgccagggcgagggccgcaccctcgaggtgcgcgtctccgactgcatcccgctgagccaccggggggtgcgccggctgatctccgtggagccccgccccgagcagcccgagccggacttccggtgcgcccgcggcagcttcaccctcctgtggccctcccggtga

SEQ ID NO: 1367 - RNA, 3069 nt, synthetic construct
  misc_feature 1..3069: note = CCDS53826.1_variant
  source 1..3069: mol_type = other RNA
atggagggcgccctgaccgcccgcgacaaggtgggggtccaggacttcgtgctcctggacgcgtacaccagcgagtccgccttcgtggacaacctgcggaagcgcttcagcgagaacctcatctacacgtacatcggcaccctgctggtctccgtgaacccctaccaggagctcgggatctacaccgtgagccagatggagctgtaccagggcgtcaacttcttcgagctgccgccccacgtgtacgccatcgccgacaacgcctaccggatgatgtgcgcggagctcaacaaccacttcatcctgatctccggggagagcggcgccggcaagaccgaggcctccaagaagatcctggagtacttcgccgtgacgtgccccatgacccagagcctccagatcgcgcgcgaccggctgctgttctccaaccccgtcctcgaggccttcgggaacgcccgcaccctgcggaacgacaacagctcccgcttcggcaagtacatggacatccagttcgacttccaggggatcccggtgggcgggcacatcatcagctacctgatcgagaagtcccgggtggtctaccagaacgagggcgagcgcaacttccacatcttctaccagctcctggccggcggggaggaggagcggctgagctacctcggcctggagcgcgacccccagctgtacaagtacctctcccaggggcactgcgccaaggagagctccatcagcgacaagaacgactggaagaccgtgtccaacgcgttcagcgtgatcgacttcacggaggccgacctggagaacctgttcggcatcatcgccagcgtcctccacctgggcaacatcgggttcgaggaggacgaccagggctgcgccaccatccccgacacccacgagatcaagtggatcgccaagctgctcggggtgcacccctccgtgctgctggaggcgctcacccaccggaagatcgaggccaagacggaggaggtcatctgcccgctgaccctggagctcagcgtgtacgcccgcgacgccatggccaaggcggtgtacggccggaccttcacctggctggtcaacaagatcaactccagcctggtgaacaaggacttcacgcgcaagaccgtgatcgggctcctggacatctacggcttcgaggtcttcgacaagaacggcttcgagcagttctgcatcaactactgcaacgagaagctgcagcagctcctgatcgagcggaccctgaaggccgagcaggccgagtacgagatggaggggatcgagtgggagcccatcaagtacttcaacaacaagatcatctgcgacctcgtggaggagcgccacaagggcatcatctccatcctggacgaggagtgcatccggcccgggcccgccaccgacctgagcttcctcgagaagctggaggagaaggtcggcaagcacgcccacttcgagacgcgcaagctggcggggccgaagggccggaagcgcatcggctggatggagttccgcctgctccactacgccggggaggtgacctactgcaccaagggcttcctggagaagaacaacgacctgctctaccggcacctgaaggaggtgctgtgcaagtccaagaacatcatcctccgcgagtgcttcctgctggccgagctcgagaaccggcgccggccgcccaccgtcgggacgcagttcaagaacagcctgtccagcctgctcgagaccctgatctccaaggagcccagctacatccgctgcatcaagcccaacgaccggaaggagccctccaagttcgacgacttcctgatccgccaccagatcaagtacctcggcctgatggagcacctccgggtgcgccgggccgggttcgcgtaccgccggaagtacgagcacttcctgcagcgctacaagagcctgtgccccgacacctggccccactggcacggcccgcccgccgagggcgtggagcggctgatcaagtacatcgggtacaagcccgaggagtacaagctcggcaagaccaagatcttcatccgcttcccccggacgctgttcgccaccgaggacgccttcgagttctccaagcaccagctggtcgcccgcatccaggcgacctacaagcggtgcctcgggcgccgcgagtacgtgaagaagcggcaggccgccatcaagctggaggcccactggcgcggcgccctggcgcggaaggccatccagcgccggaagtgggccgtgcgcatcatccggaagttcatcaagggcttcatcagccgcaacaagccgctctgccccgacaacgaggagttcatcgtcttcgtgcggaagaactacatcctgaacctgcgctaccacctccccaagaccgtgctggacaagtcctggctgcggcccccggggatcctcgagaacgccagcgacctgctgcgcaagatgtgcgtccggaacctcgtgcagaagtactgccgcggcatcacggccgagcggaaggcgatgatgcagcagaaggtggtcacctccgagatcttccgcgggcggaaggacggctacaccgagagcctgaaccagcccttcgtgaacagccgcatcgacgagggggacatcaaccccaaggtgctgcagctcatctcccacgagaagatccagtacggcgtcccggtgatcaagtacgaccggaagggcttcaaggcccgccagcggcagctgatcctgacccagaaggccgcctacgtggtcgagctcgcgaagatcaagcagaagatcgagtacagcgccctgaagggggtgtccacgagcaacctgtccgacggcatcctcgtgatccacgtcagccccgaggactccaagcagaagggggacgccgtgctgcagtgcggccacgtgttcgaggccgtcaccaagctggtgatgctcgtgaagaaggagaacatcgtcaacgtggtgcaggggagcctgcagttcttcatctcccccggcaaggagggcaccatcgtcttcgacaccgggctggaggagcaggtctacaagaacaagaacggccagctcaccgtggtgagcgtgcgccgcaagtcctga

SEQ ID NO: 1368 - RNA, 2379 nt, synthetic construct
  misc_feature 1..2379: note = BAC84969_variant
  source 1..2379: mol_type = other RNA
atgatcaccgtgaaccccgacggcaagatcatggtccgccggtgcctggtgaccctccgcccgttccggctgttcgtgctggggatcggcttcttcacgctctgcttcctgatgaccagcctcgggggccagttctccgcccgccggctgggggacagccccttcaccatccgcaccgaggtcatgggcggccccgagtcccgcggggtgctgcgcaagatgagcgacctgctcgagctgatggtgaagcggatggacgccctggcgcgcctcgagaactccagcgagctgcaccgggccggcggggacctgcacttccccgccgaccgcatgccgcccggcgccgggctcatggagcggatccaggccatcgcgcagaacgtctccgacatcgccgtgaaggtggaccagatcctgcgccacagcctgctcctgcactccaaggtcagcgagggccggcgcgaccagtgcgaggccccctccgaccccaagttcccggactgcagcggcaaggtggagtggatgcgggcccgctggacgtccgacccctgctacgcgttcttcggggtggacggcaccgagtgcagcttcctgatctacctctccgaggtcgagtggttctgcccgcccctgccctggcggaaccagaccgccgcccagcgcgcccccaagcccctgcccaaggtgcaggccgtgttccggagcaacctctcccacctcctggacctgatggggagcggcaaggagtccctgatcttcatgaagaagcgcaccaagcgcctgacggcgcagtgggccctcgccgcccagcggctggcccagaagctgggcgcgacccagcgcgaccagaagcagatcctcgtccacatcgggttcctgaccgaggagagcggcgacgtgttcagcccgcgggtgctgaagggcgggcccctcggggagatggtccagtgggccgacatcctgaccgccctgtacgtgctcggccacggcctgcgcgtgacggtctccctgaaggagctccagagcaacctgggggtgccgcccggccgggggtcctgccccctgaccatgcccctccccttcgacctgatctacaccgactaccacggcctgcagcagatgaagcgccacatggggctcagcttcaagaagtaccggtgccgcatccgggtgatcgacaccttcggcacggagcccgcctacaaccacgaggagtacgccaccctgcacggctaccgcaccaactgggggtactggaacctgaacccgaagcagttcatgaccatgttcccccacacgcccgacaactccttcatgggcttcgtcagcgaggagctgaacgagaccgagaagcggctcatcaagggcgggaaggcgtccaacatggccgtggtctacgggaaggaggccagcatctggaagctgcagggcaaggagaagttcctgggcatcctcaacaagtacatggagatccacgggaccgtgtactacgagtcccagcggcccccggaggtgcccgccttcgtcaagaaccacggcctgctgccccagccggagttccagcagctcctgcggaaggccaagctgttcatcgggttcggcttcccctacgagggccccgcgcccctcgaggccatcgccaacgggtgcatcttcctgcagagccgcttctccccgccccacagctccctgaaccacgagttcttccggggcaagcccaccagccgcgaggtgttctcccagcacccctacgccgagaacttcatcgggaagccgcacgtgtggacggtcgactacaacaacagcgaggagttcgaggcggccatcaaggccatcatgcggacccaggtggacccctacctcccctacgagtacacgtgcgagggcatgctggagcgcatccacgcctacatccagcaccaggacttctgccgggcccccgacccggcgctgcccgaggcccacgcgccccagtcccccttcgtgctcgccccgaacgccacccacctggagtgggcccgcaacaccagcctggcccccggggcctggccgcccgcccacgccctccgcgcgtggctggccgtccccggccgggcctgcaccgacacgtgcctggaccacggcctcatctgcgagccctccttcttccccttcctgaacagccaggacgccttcctgaagctccaggtgccctgcgacagcaccgagtccgagatgaaccacctgtacccggcgttcgcccagcccgggcaggagtgctacctgcagaaggagcccctcctgttcagctgcgccggctccaacaccaagtaccgccggctgtgcccgtgccgcgacttccggaagggccaggtggccctctgccaggggtgcctgtga

SEQ ID NO: 1369 - RNA, 36 nt, synthetic construct
  misc_feature 1..36: note = AF164963.1_variant
  source 1..36: mol_type = other RNA
atgacccagggccagcacttcctgcagaaggtgtga

SEQ ID NO: 1370 - RNA, 2211 nt, synthetic construct
  misc_feature 1..2211: note = AAI11702_variant
  source 1..2211: mol_type = other RNA
atgaaggagatgagcgccaacaccgtgctggactcccagcgccagcagaagcactacggcatcaccagccccatctccctcgccagcccgaaggagatcgaccacatctacacgcagaagctgatcgacgcgatgaagcccttcggggtcttcgaggacgaggaggagctgaaccaccggctcgtggtgctgggcaagctgaacaacctcgtcaaggagtggatctccgacgtgagcgagtccaagaacctgccgcccagcgtggtcgccaccgtcgggggcaagatcttcaccttcgggtcctaccgcctgggcgtgcacaccaagggcgccgacatcgacgccctctgcgtcgccccgcggcacgtggagcgcagcgacttcttccagtccttcttcgagaagctgaagcaccaggacgggatccggaacctgcgcgcggtggaggacgccttcgtccccgtgatcaagttcgagttcgacggcatcgagatcgacctcgtgttcgcccggctggccatccagacgatcagcgacaacctggacctccgcgacgactcccggctgcgcagcctggacatccggtgcatccgctccctcaacgggtgccgggtcaccgacgagatcctgcacctggtgcccaacaaggagaccttccgcctcaccctgcgggcggtgaagctgtgggccaagcgccggggcatctacagcaacatgctcgggttcctgggcggcgtctcctgggccatgctggtggcccgcacgtgccagctctaccccaacgccgcggccagcaccctggtgcacaagttcttcctggtcttctccaagtgggagtggccgaaccccgtgctcctgaagcagcccgaggagagcaacctgaacctccccgtgtgggacccgcgggtcaaccccagcgaccgctaccacctgatgcccatcatcacccccgcctacccgcagcagaactccacctacaacgtgagcacgtccacccggaccgtcatggtggaggagttcaagcaggggctggccgtgaccgacgagatcctccagggcaagagcgactggtccaagctgctggagccgcccaacttcttccagaagtaccgccactacatcgtcctcacggccagcgcgtccaccgaggagaaccacctggagtgggtggggctggtggagagcaagatccgcgtcctcgtgggcaacctggagcggaacgagttcatcaccctggcccacgtgaacccccagtccttccccggcaacaaggagcaccacaaggacaacaactacgtcagcatgtggttcctcgggatcatcttccgccgggtggagaacgccgagtccgtgaacatcgacctgacctacgacatccagagcttcacggacaccgtctaccgccaggccaacaacatcaacatgctgaaggagggcatgaagatcgaggccacccacgtgaagaagaagcagctccaccactacctgcccgcggagatcctgcagaagaagaagaagcagtccctgagcgacgtgaaccggtccagcgggggcctccagtccaagcgcctgagcctggactccagctgcctcgacagctcccgggacaccgacaacgggacgcccttcaacagccccgcctccaagagcgactccccgagcgtcggcgagaccgagcgcaactccgccgagcccgccgccgtgatcgtggagaagcccctgagcgtgcccccggcgcagggcctgtccatccccgtgatcggggccaaggtggacagcaccgtcaagaccgtgtccccgcccacggtgtgcaccatccccaccgtcgtgggccggaacgtgatcccccgcatcaccacgccccacaaccccgcccaggggcagccccacctcaacggcatgagcaacatcaccaagaccgtcacccccaagcggtcccacagcccctccatcgacgggacgccgaagcgcctgaaggacgtggagaagttcatccggctggagagcaccttcaaggacccccgcaccgccgaggagcggaagcgcaagtccgtggacgcgatcggcggcgagagcatgcccatccccaccatcgacaccagccggaagaagcgcctcccgtccaaggagctgcccgacagctccagccccgtccccgccaacaacatccgggtgatcaagaactccatccgcctgacgctcaaccgctga

SEQ ID NO: 1371 - RNA, 1377 nt, synthetic construct
  misc_feature 1..1377: note = AAG28389_variant
  source 1..1377: mol_type = other RNA
atgagcaccgagggcgggttcggcgggacctccagctccgacgcccagcagagcctgcagtccttctggccccgcgtgatggaggagatccggaacctcacggtcaaggacttccgcgtgcaggagctgccgctggcccggatcaagaagatcatgaagctcgacgaggacgtgaagatgatcagcgccgaggcccccgtcctgttcgccaaggccgcccagatcttcatcaccgagctgaccctccgcgcgtggatccacaccgaggacaacaagcggcgcacgctgcagcggaacgacatcgccatggccatcaccaagttcgaccagttcgacttcctgatcgacatcgtgccccgcgacgagctcaagcccccgaagcggcaggaggaggtgcgccagtccgtcacccccgccgagcccgtgcagtactacttcaccctggcgcagcagcccacggccgtgcaggtccagggccagcagcaggggcagcagaccaccagctccaccacgaccatccagccgggccagatcatcatcgcccagccccagcagggccagaccacccccgtgacgatgcaggtcggggagggccagcaggtccagatcgtgcaggcccagccccaggggcaggcccagcaggcgcagagcggcaccgggcagaccatgcaggtcatgcagcagatcatcaccaacacgggcgagatccagcagatcccggtgcagctgaacgccggccagctccagtacatccggctggcccagcccgtgtccgggacccaggtggtgcagggccagatccagaccctggccaccaacgcccagcaggggcagcgcaacgcgagccagggcaagccccggcgctgcctcaaggagacgctgcagatcacccagaccgaggtgcagcagggccagcagcagttctcccagttcaccgacgggcagcggaacagcgtgcagcaggcccgcgtctccgagctgacgggcgaggccgagccccgggaggtgaaggccaccgggaacagcaccccgtgcacctccagcctccccacgacccacccgccctcccaccgcgccggcgcgagctgcgtgtgctgcagccagccccagcagtccagcacctccccgccgcccagcgacgccctgcagtgggtcgtggtcgaggtgtccgggacccccaaccagctggagacgcaccgggagctccacgcgcccctgcccggcatgaccagcctgagccccctccacccctcccagcagctgtaccagatccagcaggtcaccatgcccgccggccaggacctggcccagcccatgttcatccagtccgccaaccagccgagcgacgggcaggcgccccaggtgaccggcgactga

SEQ ID NO: 1372 - RNA, 2802 nt, synthetic construct
  misc_feature 1..2802: note = CCDS33423.1_variant
  source 1..2802: mol_type = other RNA
atgcgcatggccgccaccgcgtgggccggcctgcaggggcccccgctccccaccctgtgccccgccgtgcggacgggcctgtactgccgcgaccaggcccacgccgagcggtgggcgatgaccagcgagacctccagcgggtcccactgcgcccgcagccggatgctccgccggcgcgcccaggaggaggactccaccgtcctgatcgacgtgagcccgcccgaggccgagaagcggggctcctacgggagcacggcgcacgcctccgagcccggcggccagcaggccgccgcctgccgcgcggggagccccgccaagccccggatcgccgacttcgtgctggtctgggaggaggacctcaagctggaccgccagcaggactccgccgcccgggaccgcaccgacatgcaccggacctggcgcgagaccttcctggacaacctccgggcggccggcctgtgcgtggaccagcaggacgtgcaggacgggaacacgaccgtccactacgccctgctcagcgcctcctgggccgtgctgtgctactacgcggaggacctgcgcctcaagctgccgctgcaggagctccccaaccaggccagcaactggtccgccggcctgctggcctggctcgggatccccaacgtgctgctggaggtcgtgcccgacgtgccgcccgagtactacagctgccggttccgcgtcaacaagctcccccggttcctgggctccgacaaccaggacaccttcttcaccagcacgaagcgccaccagatcctgttcgagatcctcgccaagaccccctacggccacgagaagaagaacctgctggggatccaccagctcctggcggagggcgtgctgtccgccgccttcccgctccacgacgggcccttcaagaccccgcccgagggcccccaggcgccccgcctgaaccagcgccaggtgctgttccagcactgggcccggtggggcaagtggaacaagtaccagcccctcgaccacgtccggcgctacttcggggagaaggtggccctgtacttcgcctggctgggcttctacaccgggtggctcctgcccgccgccgtggtcggcacgctggtgttcctcgtggggtgcttcctggtcttcagcgacatcccgacccaggagctgtgcggcagcaaggactccttcgagatgtgccccctctgcctggactgccccttctggctgctcagctccgcgtgcgccctggcccaggccggccggctgttcgaccacgggggcaccgtgttcttcagcctgttcatggccctctgggcggtgctgctgctcgagtactggaagcgcaagtccgccaccctggcctaccggtgggactgcagcgactacgaggacacggaggagcgcccccggccgcagttcgccgcctccgcgcccatgaccgcccccaacccgatcaccggggaggacgagccctacttccccgagcgcagccgggcccgccggatgctggccggctccgtcgtgatcgtcgtgatggtggcggtcgtggtgatgtgcctcgtcagcatcatcctgtaccgcgccatcatggccatcgtggtgtcccggagcgggaacaccctgctcgccgcctgggcgtcccgcatcgccagcctgacgggctccgtcgtgaacctggtgttcatcctcatcctgagcaagatctacgtctccctggcccacgtgctcacccggtgggagatgcaccgcacccagaccaagttcgaggacgccttcacgctgaaggtgttcatcttccagttcgtcaacttctacagctcccccgtgtacatcgccttcttcaagggccggttcgtggggtacccgggcaactaccacaccctgttcggggtccgcaacgaggagtgcgcggccggcgggtgcctcatcgagctggcccaggagctgctcgtgatcatggtgggcaagcaggtcatcaacaacatgcaggaggtgctgatccccaagctgaagggctggtggcagaagttccgcctccggagcaagaagcgcaaggccggggccagcgcgggcgcctcccaggggccctgggaggacgactacgagctggtgccctgcgagggcctgttcgacgagtacctcgagatggtcctgcagttcggcttcgtgaccatcttcgtggccgcctgcccgctggcgcccctcttcgccctgctgaacaactgggtcgagatccggctcgacgcccgcaagttcgtgtgcgagtaccggcgccccgtggccgagcgggcccaggacatcgggatctggttccacatcctggcgggcctgacccacctcgccgtcatcagcaacgccttcctgctggccttctccagcgacttcctcccccgcgcctactaccggtggacgcgcgcgcacgacctgcgggggttcctgaacttcaccctcgcccgcgccccgtccagcttcgccgccgcgcacaaccggacctgccgctaccgggccttccgcgacgacgacggccactactcccagacctactggaacctgctggccatccggctcgccttcgtgatcgtgttcgagcacgtcgtgttcagcgtggggcgcctgctggacctcctggtccccgacatccccgagtccgtggagatcaaggtgaagcgggagtactacctggccaagcaggcgctcgccgagaacgaggtcctgttcggcacgaacggcaccaaggacgagcagcccgaggggagcgagctgtccagccactggaccccgttcaccgtgcccaaggcctcccagctccagcagtga

SEQ ID NO: 1373 - RNA, 885 nt, synthetic construct
  misc_feature 1..885: note = AAA36380_variant
  source 1..885: mol_type = other RNA
atggaggacagcatggacatggacatgagccccctgcggccgcagaactacctcttcggctgcgagctgaaggccgacaaggactaccacttcaaggtggacaacgacgagaacgagcaccagctgagcctccggaccgtctccctgggggccggcgcgaaggacgagctgcacatcgtggaggccgaggccatgaactacgaggggagccccatcaaggtgaccctcgccacgctgaagatgtccgtccagcccaccgtgagcctgggcgggttcgagatcaccccgcccgtggtcctccgcctgaagtgcggctccggccccgtgcacatcagcgggcagcacctggtggccgtcgaggaggacgcggagtccgaggacgaggaggaggaggacgtgaagctcctgagcatctccggcaagcggagcgcccccgggggcgggtccaaggtgccccagaagaaggtcaagctggccgccgacgaggacgacgacgacgacgacgaggaggacgacgacgaggacgacgacgacgacgacttcgacgacgaggaggcggaggagaaggccccggtgaagaagtccatccgcgacacccccgccaagaacgcccagaagtccaaccagaacggcaaggacagcaagccctccagcacgccccggtccaagggccaggagagcttcaagaagcaggagaagaccccgaagacccccaaggggcccagctccgtggaggacatcaaggccaagatgcaggcgagcatcgagaagggcgggtccctccccaaggtcgaggccaagttcatcaactacgtgaagaactgcttccgcatgaccgaccaggaggccatccaggacctgtggcagtggcgcaagagcctgtga

SEQ ID NO: 1374 - RNA, 3915 nt, synthetic construct
  misc_feature 1..3915: note = CCDS47686.1_variant
  source 1..3915: mol_type = other RNA
atgcagctgaagatcatgcccaagaagaagcgcctcagcgccggccgggtgccgctgatcctgttcctctgccagatgatctccgccctggaggtccccctggaccccaagctcctggaggacctggtgcagcccccgaccatcacccagcagagccccaaggactacatcatcgacccccgcgagaacatcgtgatccagtgcgaggcgaaggggaagcccccgccctccttcagctggacgcggaacggcacccacttcgacatcgacaaggaccccctcgtcaccatgaagcccgggaccggcacgctgatcatcaacatcatgtccgaggggaaggccgagacctacgagggcgtgtaccagtgcaccgcccgcaacgagcggggcgccgccgtgagcaacaacatcgtcgtgcgcccgtcccggagccccctgtggaccaaggagaagctcgagcccatcacgctgcagtccgggcagagcctggtgctcccctgccgcccgcccatcggcctgcccccgcccatcatcttctggatggacaactccttccagcggctgccccagagcgagcgcgtctcccaggggctcaacggcgacctgtacttcagcaacgtgctgcccgaggacacccgggaggactacatctgctacgcgcgcttcaaccacacccagaccatccagcagaagcagcccatctccgtgaaggtcatcagcgtggacgagctcaacgacacgatcgccgccaacctgtccgacaccgagttctacggggccaagagctcccgggagcgcccgcccaccttcctgacccccgagggcaacgcgagcaacaaggaggagctccggggcaacgtgctgagcctggagtgcatcgccgaggggctccccacgccgatcatctactgggccaaggaggacggcatgctgcccaagaaccgcaccgtctacaagaacttcgagaagaccctgcagatcatccacgtgtccgaggccgacagcgggaactaccagtgcatcgccaagaacgcgctcggcgccatccaccacaccatctccgtgcgggtcaaggccgccccctactggatcacggccccgcagaacctggtgctgagccccggcgaggacgggaccctcatctgccgcgcgaacggcaaccccaagccccggatctcctggctgaccaacggggtgccgatcgagatcgcccccgacgaccccagccgcaagatcgacggcgacaccatcatcttctccaacgtccaggagcggagctccgccgtgtaccagtgcaacgccagcaacgagtacgggtacctgctcgccaacgcgttcgtgaacgtcctggccgagcccccgcgcatcctgacgcccgccaacaccctctaccaggtgatcgccaaccgccccgccctgctggactgcgcgttcttcggcagccccctcccgaccatcgagtggttcaagggcgccaaggggagcgccctgcacgaggacatctacgtcctgcacgagaacggcaccctcgagatccccgtggcccagaaggactccacggggacctacacgtgcgtggcgcggaacaagctgggcatggccaagaacgaggtccacctggagatcaaggaccccacctggatcgtgaagcagcccgagtacgccgtggtccagcgcgggagcatggtgtccttcgagtgcaaggtgaagcacgaccacaccctcagcctgaccgtcctgtggctgaaggacaaccgggagctcccgtccgacgagcgcttcaccgtggacaaggaccacctggtggtcgccgacgtgagcgacgacgactccggcacctacacgtgcgtggccaacaccaccctggacagcgtcagcgcgtccgccgtgctcagcgtggtcgcccccacccccacccccgccccggtgtacgacgtgcccaacccgcccttcgacctggagctgacggaccagctcgacaagtccgtccagctgagctggacccccggcgacgacaacaactcccccatcaccaagttcatcatcgagtacgaggacgccatgcacaagcccgggctgtggcaccaccagaccgaggtgagcggcacgcagaccaccgcgcagctcaagctgtccccgtacgtgaactacagcttccgggtcatggccgtgaactccatcgggaagtccctgccctccgaggccagcgagcagtacctcaccaaggcctccgagcccgacaagaaccccacggccgtggagggcctggggagcgagccggacaacctggtcatcacctggaagcccctcaacggcttcgagtccaacggccccgggctgcagtacaaggtgagctggcgccagaaggacggcgacgacgagtggacctccgtggtcgtggcgaacgtgagcaagtacatcgtcagcgggacccccacgttcgtgccgtacctgatcaaggtgcaggccctcaacgacatgggcttcgcccccgagcccgccgtcgtgatgggccactccggggaggacctgcccatggtggcgccgggcaacgtccgggtgaacgtggtcaacagcaccctggccgaggtgcactgggaccccgtgcccctcaagtccatccgcgggcacctccagggctaccggatctactactggaagacccagagctccagcaagcgcaaccggcgccacatcgagaagaagatcctgaccttccaggggtccaagacgcacggcatgctgcccggcctggagccgttcagccactacaccctgaacgtccgggtggtgaacgggaagggcgaggggcccgcctcccccgaccgcgtcttcaacacccccgagggcgtgccgagcgccccctccagcctcaagatcgtgaaccccaccctggactccctgacgctcgagtgggacccgcccagccaccccaacgggatcctgaccgagtacaccctgaagtaccagcccatcaactccacccacgagctcggccccctggtcgacctgaagatcccggccaacaagacgcggtggaccctcaagaacctgaacttcagcacccgctacaagttctacttctacgcgcagacctccgccggcagcgggtcccagatcacggaggaggccgtgaccaccgtcgacgaggccggcatcctgccgcccgacgtgggggccggcaaggtgcaggcggtcaacccccggatcagcaacctcaccgccgccgccgccgagacgtacgcgaacatcagctgggagtacgaggggcccgagcacgtgaacttctacgtggagtacggcgtcgccggctccaaggaggagtggcgcaaggagatcgtgaacgggagccggtccttcttcggcctgaaggggctgatgcccggcaccgcctacaaggtgcgcgtcggggccgtgggcgacagcggcttcgtgtccagcgaggacgtcttcgagaccgggcccgcgatggcctcccgccaggtggacatcgccacccagggctggttcatcgggctcatgtgcgccgtggccctgctgatcctcatcctgctgatcgtctgcttcatccggcgcaacaagggcggcaagtacccggtgaaggagaaggaggacgcgcacgccgaccccgagatccagcccatgaaggaggacgacgggacgttcggcgagtacagcgacgccgaggaccacaagcccctcaagaaggggtcccggaccccgagcgaccgcaccgtgaagaaggaggactccgacgacagcctggtcgactacggcgagggggtgaacggccagttcaacgaggacggctccttcatcgggcagtacagcggcaagaaggagaaggagcccgccgaggggaacgagtccagcgaggccccctcccccgtgaacgcgatgaacagcttcgtctga

SEQ ID NO: 1375 - RNA, 1305 nt, synthetic construct
  misc_feature 1..1305: note = AAB51320_variant
  source 1..1305: mol_type = other RNA
atgagcatcgagaagatctgggcccgcgagatcctggactcccggggcaaccccaccgtggaggtcgacctctacaccgccaaggggctgttccgcgcggccgtgccgagcggcgcctccacggggatctacgaggccctggagctccgggacggcgacaagcagcgctacctggggaagggcgtgctgaaggccgtcgaccacatcaacagcaccatcgcgcccgccctcatctccagcggcctgtccgtggtggagcaggagaagctggacaacctcatgctggagctggacgggaccgagaacaagagcaagttcggcgccaacgccatcctcggggtctccctggcggtgtgcaaggccggcgccgccgagcgggagctgcccctctaccgccacatcgcccagctggcggggaacagcgacctgatcctccccgtgccggccttcaacgtcatcaacggcggctcccacgccgggaacaagctggccatgcaggagttcatgatcctgcccgtgggcgccgagagcttccgggacgcgatgcgcctcggggccgaggtgtaccacaccctgaagggcgtcatcaaggacaagtacggcaaggacgccacgaacgtgggggacgagggcgggttcgcccccaacatcctggagaactccgaggccctcgagctggtgaaggaggcgatcgacaaggccggctacaccgagaagatcgtcatcgggatggacgtggccgccagcgagttctaccgggacggcaagtacgacctggacttcaagtcccccaccgacccgagccgctacatcaccggcgaccagctcggggccctgtaccaggacttcgtgcgggactaccccgtcgtgtccatcgaggaccccttcgaccaggacgactgggcggcctggagcaagttcacggccaacgtgggcatccagatcgtcggggacgacctgaccgtgaccaaccccaagcgcatcgagcgggccgtggaggagaaggcgtgcaactgcctcctgctgaaggtcaaccagatcggctccgtgaccgaggccatccaggcctgcaagctcgcccaggagaacgggtggggcgtcatggtgagccaccgcagcggcgagacggaggacaccttcatcgccgacctggtggtcgggctgtgcaccggccagatcaagaccggggcgccgtgccggtccgagcgcctcgccaagtacaaccagctgatgcggatcgaggaggagctgggcgacgaggcccgcttcgccgggcacaacttccggaaccccagcgtgctctga

SEQ ID NO: 1376 - RNA, 1395 nt, synthetic construct
  misc_feature 1..1395: note = AAH08489_variant
  source 1..1395: mol_type = other RNA
atggagaccctgagcttcccccgctacaacgtggccgagatcgtcatccacatccggaacaagatcctcaccggcgccgacgggaagaacctgacgaagaacgacctgtacccgaaccccaagcccgaggtgctccacatgatctacatgcgcgcgctgcagatcgtgtacggcatccggctggagcacttctacatgatgcccgtcaactccgaggtgatgtacccgcacctcatggaggggttcctgcccttcagcaacctggtgacccacctcgactccttcctgcccatctgccgcgtcaacgacttcgagaccgccgacatcctgtgccccaaggccaagcggaccagccgcttcctctccggcatcatcaacttcatccacttccgggaggcctgccgcgagacgtacatggagttcctgtggcagtacaagagctccgccgacaagatgcagcagctgaacgcggcccaccaggaggccctcatgaagctggagcggctggacagcgtgccggtggaggagcaggaggagttcaagcagctctccgacgggatccaggagctgcagcagagcctgaaccaggacttccaccagaagaccatcgtcctccaggagggcaactcccagaagaagtccaacatcagcgagaagaccaagcgcctgaacgagctgaagctcagcgtggtgtccctgaaggagatccaggagagcctgaagaccaagatcgtcgactcccccgagaagctcaagaactacaaggagaagatgaaggacacggtgcagaagctgaagaacgcccggcaggaggtggtcgagaagtacgagatctacggcgacagcgtggactgcctgccctcctgccagctcgaggtgcagctgtaccagaagaagatccaggacctgagcgacaaccgcgagaagctcgcgagcatcctgaaggagtccctgaacctcgaggaccagatcgagagcgacgagtccgagctgaagaagctgaagaccgaggagaacagcttcaagcggctcatgatcgtcaagaaggagaagctggccaccgcccagttcaagatcaacaagaagcacgaggacgtgaagcagtacaagcgcaccgtgatcgaggactgcaacaaggtccaggagaagcgcggggccgtgtacgagcgggtgacgaccatcaaccaggagatccagaagatcaagctgggcatccagcagctcaaggacgccgcggagcgggagaagctgaagtcccaggagatcttcctgaacctcaagaccgccctggagaagtaccacgacgggatcgagaaggccgccgaggacagctacgccaagatcgacgagaagaccgcggagctgaagcgcaagatgttcaagatgtccacgtga

SEQ ID NO: 1377 - RNA, 543 nt, synthetic construct
  misc_feature 1..543: note = AAB49693_variant
  source 1..543: mol_type = other RNA
atgcaggccgagggccgcgggaccggcgggagcaccggcgacgccgacgggcccggcggcccggggatccccgacggccccgggggcaacgccgggggccccggcgaggccggggccacgggcgggcggggcccgcgcggcgccggggccgcgcgggcctccggccccgggggcggggcgccccgcggcccccacggcggggccgcgagcggcctgaacgggtgctgccggtgcggcgcccgcgggccggagtcccggctcctggagttctacctggccatgcccttcgccacccccatggaggccgagctcgcgcgccggagcctggcccaggacgcgcccccgctgcccgtgcccggcgtcctcctgaaggagttcaccgtgtccggcaacatcctgaccatccgcctcacggccgccgaccaccggcagctgcagctgagcatctccagctgcctccagcagctgtccctgctcatgtggatcacccagtgcttcctgcccgtgttcctggcccagccgcccagcgggcagcgccggtga

SEQ ID NO: 1378 - RNA, 1215 nt, synthetic construct
  misc_feature 1..1215: note = CCDS14134.2_variant
  source 1..1215: mol_type = other RNA
atggccagcccccgcctgggcaccttctgctgcccgacccgggacgccgcgacgcagctcgtgctgtccttccagccccgcgccttccacgccctgtgcctcgggagcggcgggctgcggctggccctcggcctgctgcagctcctgcccgggcgccggcccgccggcccgggctcccccgcgaccagcccgcccgcctccgtccgcatcctgcgggccgccgcggcctgcgacctcctggggtgcctgggcatggtgatccgcagcaccgtgtggctcgggttccccaacttcgtcgactccgtgagcgacatgaaccacaccgagatctggcccgccgccttctgcgtgggctccgccatgtggatccagctgctgtacagcgcgtgcttctggtggctgttctgctacgccgtcgacgcctacctcgtgatccggcgctccgccgggctgagcacgatcctcctgtaccacatcatggcctggggcctggcgaccctcctgtgcgtggagggcgccgccatgctgtactacccctccgtcagccggtgcgagcgcgggctcgaccacgccatcccccactacgtgaccatgtacctgccgctgctcctggtgctggtcgccaaccccatcctcttccagaagaccgtgacggcggtggcctccctgctgaagggccggcaggggatctacaccgagaacgagcgccggatgggcgccgtcatcaagatccgcttcttcaagatcatgctcgtgctgatcatctgctggctgagcaacatcatcaacgagtccctcctgttctacctggagatgcagaccgacatcaacggcgggagcctcaagcccgtgcggaccgccgccaagacgacctggttcatcatgggcatcctgaaccccgcgcaggggttcctgctctccctggccttctacggctggaccgggtgcagcctgggcttccagagcccgcgcaaggagatccagtgggagtccctcaccacgagcgccgccgagggcgcgcaccccagccccctgatgccccacgagaacccggcctccgggaaggtctcccaggtgggcgggcagaccagcgacgaggccctgtccatgctgagcgagggctccgacgccagcaccatcgagatccacaccgcctccgagagctgcaacaagaacgagggggaccccgcgctccccacgcacggcgacctgtga

SEQ ID NO: 1379 - RNA, 3141 nt, synthetic construct
  misc_feature 1..3141: note = AAH38180_variant
  source 1..3141: mol_type = other RNA
atggccagctccgtgggcaacgtcgccgacagcaccgagcccaccaagcgcatgctgtccttccaggggctcgcggagctggcccaccgggagtaccaggccggcgacttcgaggccgccgagcgccactgcatgcagctgtggcggcaggagccggacaacacgggggtgctcctgctgctcagctccatccacttccagtgccgccggctggaccgcagcgcgcacttctccaccctggccatcaagcagaaccccctcctggccgaggcctacagcaacctgggcaacgtgtacaaggagcgggggcagctccaggaggcgatcgagcactaccgccacgccctgcggctgaagcccgacttcatcgacggctacatcaacctcgccgccgccctggtcgcggccggcgacatggagggggccgtgcaggcctacgtgtccgccctgcagtacaaccccgacctctactgcgtccgcagcgacctgggcaacctgctcaaggcgctggggcggctggaggaggccaaggcctgctacctcaaggccatcgagacccagccgaacttcgccgtggcgtggtccaacctgggctgcgtgttcaacgcccagggggagatctggctggccatccaccacttcgagaaggccgtcaccctcgaccccaacttcctggacgcctacatcaacctgggcaacgtgctcaaggaggcgcgcatcttcgaccgggccgtggccgcctacctgcgcgcgctgagcctctcccccaaccacgccgtcgtgcacggcaacctggcctgcgtgtactacgagcaggggctgatcgacctcgccatcgacacgtaccggcgcgccatcgagctgcagccccacttcccggacgcgtactgcaacctggccaacgccctcaaggagaagggcagcgtcgccgaggccgaggactgctacaacaccgcgctgcggctgtgccccacccacgccgactccctcaacaacctggccaacatcaagcgcgagcaggggaacatcgaggaggccgtgcggctgtaccgcaaggccctcgaggtgttccccgagttcgcggccgcccacagcaacctggcctccgtcctgcagcagcagggcaagctccaggaggcgctgatgcactacaaggaggccatccggatcagccccaccttcgccgacgcctactccaacatgggcaacacgctgaaggagatgcaggacgtgcagggggccctgcagtgctacacccgcgcgatccagatcaacccggccttcgccgacgcccacagcaacctcgccagcatccacaaggactccggcaacatccccgaggcgatcgccagctaccgcaccgccctgaagctgaagcccgacttccccgacgcctactgcaacctcgcccactgcctgcagatcgtgtgcgactggaccgactacgacgagcggatgaagaagctggtctccatcgtggcggaccagctcgagaagaaccgcctgccgagcgtgcacccccaccactccatgctgtaccccctcagccacgggttccggaaggccatcgccgagcgccacggcaacctgtgcctggacaagatcaacgtcctccacaagcccccgtacgagcaccccaaggacctgaagctgtccgacgggcggctccgcgtgggctacgtcagctccgacttcggcaaccaccccacgagccacctgatgcagtccatccccgggatgcacaacccggacaagttcgaggtgttctgctacgccctgagccccgacgacggcaccaacttccgggtgaaggtcatggcggaggccaaccacttcatcgacctctcccagatcccctgcaacgggaaggccgccgaccgcatccaccaggacggcatccacatcctggtgaacatgaacgggtacaccaagggcgcccggaacgagctgttcgcgctccgccccgccccgatccaggccatgtggctgggctaccccgggaccagcggcgccctgttcatggactacatcatcacggaccaggagacctcccccgccgaggtggcggagcagtacagcgagaagctcgcctacatgccgcacaccttcttcatcggggaccacgccaacatgttcccccacctgaagaagaaggccgtcatcgacttcaagtccaacggccacatctacgacaaccggatcgtgctgaacgggatcgacctcaaggccttcctggacagcctgcccgacgtgaagatcgtcaagatgaagtgccccgacggcggcgacaacgcggactccagcaacaccgccctcaacatgccggtgatccccatgaacacgatcgccgaggccgtgatcgagatgatcaaccgcgggcagatccagatcaccatcaacggcttcagcatctccaacgggctggccaccacccagatcaacaacaaggcggccacgggcgaggaggtcccccggaccatcatcgtgaccacccgcagccagtacggcctgcccgaggacgccatcgtgtactgcaacttcaaccagctctacaagatcgacccgtccacgctgcagatgtgggccaacatcctgaagcgggtccccaacagcgtgctctggctgctgcgcttccccgcggtgggggagcccaacatccagcagtacgcccagaacatgggcctcccgcagaaccggatcatcttctcccccgtcgcccccaaggaggagcacgtgcgccgggggcagctggccgacgtgtgcctggacacgcccctctgcaacggccacaccaccgggatggacgtcctgtgggccggcaccccgatggtgaccatgcccggcgagaccctggcgagccgcgtggccgcctcccagctgacctgcctcgggtgcctggagctcatcgccaagaaccgccaggagtacgaggacatcgccgtcaagctgggcacggacctggagtacctcaagaaggtgcgggggaaggtgtggaagcagcgcatcagcagccccctgttcaacaccaagcagtacaccatggagctggagcggctctacctgcagatgtgggagcactacgcggccggcaacaagcccgaccacatgatcaagccggtcgaggtgaccgagtccgcctga

SEQ ID NO: 1380 - RNA, 441 nt, synthetic construct
  misc_feature 1..441: note = BAG57972_variant
  source 1..441: mol_type = other RNA
atggccgccgagaccctgctcagctccctgctgggcctcctgctgctcgggctgctgctccccgcgagcctgaccggcggggtgggctccctgaacctcgaggagctgagcgagatgcgctacgggatcgagatcctgccgctccccgtcatgggcggccagtcccagagctccgacgtggtgatcgtcagctccaagtacaagcagcggtacgagtgccgcctgcccgtgggggccatccacttccagcgggagcgcgaggaggagacgcccgcctaccagggcccggggatccccgagctgctcagccccatgcgggacgccccctgcctgctgaagaccaaggactggtggacctacgagttctgctacggccgccacatccagcagtaccacatggaggactccgagatcaaggggctccaggccgcgagctcctga

SEQ ID NO: 1381 - RNA, 1221 nt, synthetic construct
  misc_feature 1..1221: note = BAG65333_variant
  source 1..1221: mol_type = other RNA
atggccgccgagaccctgctcagctccctgctgggcctcctgctgctcgggctgctgctccccgcgagcctgaccggcggggtgggctccctgaacctcgaggagctgagcgagatgcgctacgggatcgagatcctgccgctccccgtcatgggcggccagtcccagagctccgacgtggtgatcgtcagctccaagtacaagcagcggtacgagtgccgcctgcccgccggggccatccacttccagcgggagcgcgaggaggagacgcccgcctaccagggcccggggatccccgagctgctcagccccatgcgggacgccccctgcctgctgaagaccaaggactggtggacctacgagttctgctacggccgccacatccagcagtaccacatggaggactccgcgagcggggccccgaacgacttccagaacaacgtccaggtgaaggtgatccggtcccccgccgacctcatccgcttcatcgaggagctgaagggcggcaccaagaaggggaagcccaacatcggccaggagcagcccgtggacgacgccgcggaggtgccgcagcgggagcccgagaaggagcgcggggaccccgagcggcagcgcgagatggaggaggaggaggacgaggacgaggacgaggacgaggacgaggacgagcggcagctgctcggcgagttcgagaaggagctggagggcatcctgctccccagcgaccgcgaccggctgcgctccgaggtcaaggccgggatggagcgggagctggagaacatcatccaggagacggagaaggagctcgacccggacggcctgaagaaggagagcgagcgcgaccgggccatgctggccctcacctccaccctgaacaagctgatcaagcgcctcgaggagaagcagagccccgagctggtgaagaagcacaagaagaagcgggtggtccccaagaagcccccgcccagcccccagcccaccgggaagatcgagatcaagatcgtgcgcccgtgggccgagggcacggaggagggggcgcgctggctgaccgacgaggacacccggaacctcaaggagatcttcttcaacatcctggtgcccggcgccgaggaggcccagaaggagcgccagcggcagaaggagctggagtccaactaccgccgggtctggggcagccccgggggcgaggggaccggcgacctcgacgagttcgacttctga

SEQ ID NO: 1382 - RNA, 2223 nt, synthetic construct
  misc_feature 1..2223: note = BAH13933_variant
  source 1..2223: mol_type = other RNA
atggccgtggagaccctgctcagctccctgctgggcctcctgctgctcgggctgctgctccccgccagcctgaccggcggggtcggctccctgaacctcgaggagctgagcgagatgcgctacgggatcgagatcctgccgctccccgtgatgggcggccagtcccagagctccgacgtggtcatcgtgagctccaagtacaagcagcggtacgagtgccgcctgcccgcgggggccatccacttccagcgggagcgcgaggaggagacgcccgcctaccagggcccggggatccccgagctgctcagccccatgcgggacgccccctgcctgctgaagaccaaggactggtggacctacgagttctgctacggccgccacatccagcagtaccacatggaggactccgagatcaagggggaggtgctctacctgggctactaccagagcgccttcgactgggacgacgagaccgcgaaggcctccaagcagcaccggctgaagcgctaccacagccagacgtacggcaacgggtccaagtgcgacctcaacggccggccgcgcgaggccgaggtccggttcctgtgcgacgagggggccggcatcagcggcgactacatcgaccgcgtggacgagcccctgtcctgcagctacgtgctcaccatccggacgccccgcctgtgcccccacccgctgctccggcccccgccctccgcggccccgcaggccatcctgtgccaccccagcctgcagcccgaggagtacatggcctacgtccagcgccaggccgacagcaagcagtacggggacaagatcatcgaggagctccaggacctgggcccccaggtgtggtccgagaccaagagcggggtggcgccgcagaagatggccggccggaccctgttccacctcttccgcgagatccacttccacttcttcccctcccccgacctgaccgtcctgaccgactggtggggcgggggcggggtggagaagtaccacggccccagctccctcggggaccggggcggggagggcaccccgagctacctgctgccctccgtgagccccctcctgtccgaccagagcctgcccgtcctctgcacgctgggcgcctccccgaccaaggacgacagcaaggactccgacttctggaagatgctgaacgagcccgaggaccaggcccccgggggcgaggaggtgccggccgaggagcaggaccccagccccgaggcggccgactccgccagcggggcccccaacgacttccagaacaacgtgcaggtcaaggtgatccgctccccggccgacctcatccggttcatcgaggagctgaagggcgggaccaagaagggcaagcccaacatcggccaggagcagcccgtggacgacgcggccgaggtcccccagcgcgagccggagaaggagcgcggggaccccgagcggcagcgcgagatggaggaggaggaggacgaggacgaggacgaggacgaggacgaggacgagcggcagctgctgggcgagttcgagaaggagctcgaggggatcctgctgcccagcgaccgcgaccggctccgctccgaggtgaaggccggcatggagcgggagctggagaacatcatccaggagaccgagaaggagctggaccccgacggcctcaagaaggagagcgagcgcgaccgggccatgctggccctgacgagcaccctcaacaagctgatcaagcgcctggaggagaagcagtccccggagctcgtgaagaagcacaagaagaagcgggtcgtgcccaagaagcccccgcccagcccccagcccaccgaggaggaccccgagcaccgcgtccgggtgcgcgtgaccaagctgcggctcgggggcccgaaccaggacctgacggtcctggagatgaagcgcgagaacccccagctgaagcagatcgaggggctcgtgaaggagctgctggagcgggagggcctcaccgcggccgggaagatcgagatcaagatcgtgcgcccctgggccgagggcaccgaggagggcgcccggtggctgaccgacgaggacacgcgcaacctgaaggagatcttcttcaacatcctcgtccccggggcggaggaggcccagaaggagcgccagcggcagaaggagctggagtccaactaccgccgggtgtggggcagccccgggggcgaggggaccggcgacctggacgagttcgacttctga

SEQ ID NO: 1383 - RNA, 2004 nt, synthetic construct
  misc_feature 1..2004: note = AAB06495_variant
  source 1..2004: mol_type = other RNA
atggccgccgagaccctgctcagctccctgctgggcctcctgctgctcgggctgctgctccccgcgagcctgaccggcggggtgggctccctgaacctcgaggagctgagcgagatgcgctacgggatcgagatcctgccgctccccgtcatgggcggccagtcccagagctccgacgtggtgatcgtcagctccaagtacaagcagcggtacgagtgccgcctgcccgccggggccatccacttccagcgggagcgcgaggaggagacgcccgcctaccagggcccggggatccccgagctgctcagccccatgcgggacgccccctgcctgctgaagaccaaggactggtggacctacgagttctgctacggccgccacatccagcagtaccacatggaggactccgagatcaagggggaggtgctctacctgggctactaccagagcgcgttcgactgggacgacgagaccgccaaggcctccaagcagcaccggctgaagcgctaccacagccagacgtacggcaacgggtccaagtgcgacctcaacggccggccgcgcgaggccgaggtgcggttcctgtgcgacgagggggcgggcatcagcggcgactacatcgaccgcgtcgacgagcccctgtcctgcagctacgtgctcaccatccggacgccccgcctgtgcccccacccgctgctccggcccccgccctccgccgcgccccaggccatcctgtgccaccccagcctgcagcccgaggagtacatggcctacgtgcagcgccaggccgacagcaagcagtacggggacaagatcatcgaggagctccaggacctgggcccccaggtctggtccgagaccaagagcggggtggccccgcagaagatggccggcgcctcccccaccaaggacgacagcaaggactccgacttctggaagatgctgaacgagcccgaggaccaggcccccgggggcgaggaggtgccggcggaggagcaggaccccagccccgaggccgccgactccgccagcggcgcccccaacgacttccagaacaacgtccaggtgaaggtgatccggtccccggcggacctcatccgcttcatcgaggagctgaagggcgggaccaagaaggggaagcccaacatcggccaggagcagcccgtcgacgacgccgccgaggtgccgcagcgggagcccgagaaggagcgcggggaccccgagcggcagcgcgagatggaggaggaggaggacgaggacgaggacgaggacgaggacgaggacgagcgccagctgctcggcgagttcgagaaggagctggagggcatcctgctccccagcgaccgggaccgcctgcggtccgaggtgaaggccgggatggagcgcgagctggagaacatcatccaggagaccgagaaggagctcgacccggacggcctgaagaaggagagcgagcgggaccgcgccatgctggcgctcacctccacgctgaacaagctgatcaagcggctggaggagaagcagagccccgagctcgtcaagaagcacaagaagaagcgcgtggtgcccaagaagcccccgcccagcccccagcccaccgaggaggacccggagcaccgggtccgcgtgcgggtgaccaagctgcgcctcgggggccccaaccaggacctgaccgtcctggagatgaagcgggagaacccccagctgaagcagatcgaggggctcgtgaaggagctgctggagcgcgagggcctcacggccgccggcaagatcgagatcaagatcgtccggccctgggccgaggggaccgaggagggcgcgcgctggctgaccgacgaggacacccggaacctgaaggagatcttcttcaacatcctcgtgccgggggccgaggaggcccagaaggagcgccagcggcagaaggagctggagtccaactaccgccgcgtgtggggctcccccggcggggagggcacgggggacctggacgagttcgacttctga

SEQ ID NO: 1384 - RNA, 303 nt, synthetic construct
  misc_feature 1..303: note = AAI13433_variant
  source 1..303: mol_type = other RNA
atgcgcgccctgaccctcctggccctgctcgcgctggccgccctgtgcatcgccggccaggccggggcgaagcccagcggcgccgagtccagcaagggggccgccttcgtgtccaagcaggagggcagcgaggtcgtgaagcggccgcgccggtacctctaccagtggctgggggcgcccgtgccctaccccgacccgctggagccccgccgggaggtctgcgagctcaaccccgactgcgacgagctggccgaccacatcggcttccaggaggcctaccgccggttctacggccccgtgtga

SEQ ID NO: 1385 - RNA, 945 nt, synthetic construct
  misc_feature 1..945: note = EAX06008_variant
  source 1..945: mol_type = other RNA
atgcgcatcgccgtgatctgcttctgcctgctcggcatcacgtgcgccatccccgtcaagcaggcggacagcgggtccagcgaggagaagcagctgtacaacaagtacccggacgccgtggccacctggctgaaccccgacccctcccagaagcagaacctcctggcgccccagaacgccgtgagctccgaggagaccaacgacttcaagcaggagaccctgccgagcaagtccaacgagagccacgaccacatggacgacatggacgacgaggacgacgacgaccacgtcgactcccaggacagcatcgactccaacgacagcgacgacgtggacgacaccgacgactcccaccagagcgacgagtcccaccacagcgacgagtccgacgagctcgtgaccgacttccccacggacctgcccgccaccgaggtcttcacccccgtggtgccgaccgtcgacacgtacgacggccgcggggacagcgtggtgtacggcctgcggtccaagagcaagaagttccggcgccccgacatccagtaccccgacgccaccgacgaggacatcaccagccacatggagtccgaggagctcaacggggcctacaaggccatccccgtcgcgcaggacctgaacgccccgagcgactgggactcccggggcaaggacagctacgagacctcccagctggacgaccagagcgccgagacgcactcccacaagcagagccgcctctacaagcggaaggccaacgacgagtccaacgagcacagcgacgtgatcgactcccaggagctgagcaaggtgtcccgcgagttccacagccacgagttccactcccacgaggacatgctggtcgtggaccccaagagcaaggaggaggacaagcacctcaagttccggatctcccacgagctggacagcgcctccagcgaggtgaactga

SEQ ID NO: 1386 - RNA, 903 nt, synthetic construct
  misc_feature 1..903: note = EAX06009_variant
  source 1..903: mol_type = other RNA
atgcgcatcgccgtgatctgcttctgcctgctcggcatcacgtgcgccatccccgtcaagcaggcggacagcgggtccagcgaggagaagcagctgtacaacaagtacccggacgccgtggccacctggctgaaccccgacccctcccagaagcagaacctcctggcgccccagaccctgccgagcaagtccaacgagagccacgaccacatggacgacatggacgacgaggacgacgacgaccacgtggactcccaggacagcatcgactccaacgacagcgacgacgtcgacgacaccgacgactcccaccagagcgacgagtcccaccacagcgacgagtccgacgagctcgtgaccgacttccccaccgacctgcccgccacggaggtgttcacccccgtcgtgccgaccgtggacacctacgacggccgcggggacagcgtcgtgtacggcctgcggtccaagagcaagaagttccggcgccccgacatccagtaccccgacgccacggacgaggacatcacctcccacatggagagcgaggagctcaacggggcctacaaggccatccccgtggcccaggacctgaacgcgccgagcgactgggactcccggggcaaggacagctacgagacctcccagctggacgaccagagcgccgagacccactcccacaagcagagccgcctctacaagcggaaggccaacgacgagtccaacgagcacagcgacgtcatcgactcccaggagctgagcaaggtgtcccgcgagttccacagccacgagttccactcccacgaggacatgctggtggtcgaccccaagagcaaggaggaggacaagcacctcaagttccggatctcccacgagctggacagcgcctccagcgaggtgaactga

SEQ ID NO: 1387 - RNA, 864 nt, synthetic construct
  misc_feature 1..864: note = EAX06010_variant
  source 1..864: mol_type = other RNA
atgcgcatcgccgtgatctgcttctgcctgctcggcatcacgtgcgccatccccgtcaagcaggcggacagcgggtccagcgaggagaagcagaacgccgtgtccagcgaggagaccaacgacttcaagcaggagaccctgccgtccaagagcaacgagtcccacgaccacatggacgacatggacgacgaggacgacgacgaccacgtggacagccaggactccatcgacagcaacgactccgacgacgtcgacgacaccgacgacagccaccagtccgacgagagccaccactccgacgagagcgacgagctggtgaccgacttccccaccgacctccccgccacggaggtgttcacccccgtcgtgccgaccgtggacacctacgacggccgcggggactccgtcgtgtacggcctgcggagcaagtccaagaagttccggcgccccgacatccagtaccccgacgccacggacgaggacatcaccagccacatggagagcgaggagctgaacggggcctacaaggcgatccccgtggcccaggacctcaacgccccgtccgactgggacagccggggcaaggactcctacgagaccagccagctggacgaccagtccgccgagacccacagccacaagcagtcccgcctgtacaagcggaaggcgaacgacgagagcaacgagcactccgacgtcatcgacagccaggagctctccaaggtgagccgcgagttccactcccacgagttccacagccacgaggacatgctggtggtcgaccccaagtccaaggaggaggacaagcacctgaagttccggatcagccacgagctcgactccgccagctccgaggtgaactga

SEQ ID NO: 1388 - RNA, 984 nt, synthetic construct
  misc_feature 1..984: note = BAH12087_variant
  source 1..984: mol_type = other RNA
atgggcatcgtgccccgcagcctggacaagaaggcccaccgggtccagttccagctcaaccgcatcaaggccaagatcgagctgccgtgggggtccctgcagctcgactgcctgatgaagaccctgaaggagctctacaacaagtaccccgacgcggtggccacctggctgaaccccgaccccagccagaagcagaacctgctcgccccgcagaacgccgtgtccagcgaggagacgaacgacttcaagcaggagaccctgccctccaagagcaacgagtcccacgaccacatggacgacatggacgacgaggacgacgacgaccacgtcgacagccaggactccatcgacagcaacgactccgacgacgtggacgacaccgacgacagccaccagtccgacgagagccaccactccgacgagagcgacgagctggtgaccgacttccccacggacctccccgccaccgaggtcttcaccccggtggtgcccaccgtcgacacgtacgacggccgcggggactccgtggtgtacggcctgcggagcaagtccaagaagttccggcgccccgacatccagtaccccgacgcgaccgacgaggacatcaccagccacatggagagcgaggagctgaacggggcctacaaggccatcccggtcgcccaggacctcaacgcgccctccgactgggacagccggggcaaggactcctacgagaccagccagctggacgaccagtccgccgagacgcacagccacaagcagtcccgcctgtacaagcggaaggccaacgacgagagcaacgagcactccgacgtgatcgacagccaggagctctccaaggtgagccgcgagttccactcccacgagttccacagccacgaggacatgctggtcgtggaccccaagtccaaggaggaggacaagcacctgaagttccggatcagccacgagctcgactccgccagctccgaggtgaactga

SEQ ID NO: 1389 - RNA, 879 nt, synthetic construct
  misc_feature 1..879: note = AEA49030_variant
  source 1..879: mol_type = other RNA
atgcgcatcgccgtgatctgcttctgcctgctcggcatcacgtgcgccatccccgtcaagcaggcggacagcgggtccagcgaggagaagcagctgtacaacaagtacccggacgccgtggccacctggctgaaccccgacccctcccagaagcagaacctcctggcgccccagaacgccgtgagctccgaggagaccaacgacttcaagcaggagaccctgccgagcaagtccaacgagagccacgaccacatggacgacatggacgacgaggacgacgactcccaccagagcgacgagtcccaccacagcgacgagtccgacgagctcgtcaccgacttccccaccgacctgcccgccacggaggtgttcacccccgtggtcccgaccgtggacacctacgacggccgcggggacagcgtggtctacggcctgcggtccaagagcaagaagttccggcgccccgacatccagtaccccgacgccacggacgaggacatcacctcccacatggagagcgaggagctcaacggggcctacaaggccatccccgtggcgcaggacctgaacgccccgtccgactgggacagccggggcaaggacagctacgagacctcccagctggacgaccagagcgccgagacccactcccacaagcagagccgcctctacaagcggaaggccaacgacgagtccaacgagcacagcgacgtgatcgactcccaggagctgagcaaggtctcccgcgagttccacagccacgagttccactcccacgaggacatgctggtggtggaccccaagagcaaggaggaggacaagcacctcaagttccggatctcccacgagctggacagcgcctccagcgaggtcaactga

SEQ ID NO: 1390 - RNA, 945 nt, synthetic construct; identical to SEQ ID NO: 1385
  misc_feature 1..945: note = AAA86886_variant
  source 1..945: mol_type = other RNA

SEQ ID NO: 1391 - RNA, 1182 nt, synthetic construct
  misc_feature 1..1182: note = AAA59988_variant
  source 1..1182: mol_type = other RNA
atggaggagccccagagcgacccgtccgtggagccgcccctgagccaggagaccttctccgacctctggaagctgctgcccgagaacaacgtcctcagccccctgccctcccaggccatggacgacctgatgctcagccccgacgacatcgagcagtggttcaccgaggaccccggcccggacgaggcgccccgcatgcccgaggccgcgcccccggtggcccccgcccccgccgcccccacgccggccgcccccgcccccgcgccctcctggccgctgagctccagcgtgccctcccagaagacctaccaggggagctacggcttccggctggggttcctccactccggcaccgccaagagcgtgacctgcacgtactcccccgccctgaacaagatgttctgccagctggccaagacctgccccgtccagctctgggtggacagcaccccgccgcccgggacccgcgtccgggccatggcgatctacaagcagtcccagcacatgacggaggtggtgcgccggtgcccccaccacgagcgctgcagcgactccgacggcctggccccgccccagcacctgatccgggtcgagggcaacctccgcgtggagtacctggacgaccggaacaccttccgccacagcgtggtcgtgccctacgagccgcccgaggtggggagcgactgcaccaccatccactacaactacatgtgcaactccagctgcatgggcgggatgaaccggcgccccatcctgacgatcatcaccctcgaggactccagcggcaacctgctggggcggaactccttcgaggtccgcgtgtgcgcctgccccggccgggaccgccggaccgaggaggagaacctccgcaagaagggcgagccccaccacgagctgccgcccgggagcaccaagcgggccctgcccaacaacacgtccagcagcccccagcccaagaagaagcccctcgacggcgagtacttcaccctgcagatccgcgggcgggagcgcttcgagatgttccgcgagctgaacgaggccctcgagctgaaggacgcgcaggccggcaaggagcccggcgggtcccgggcccactccagccacctgaagtccaagaagggccagagcacctcccgccacaagaagctcatgttcaagaccgaggggccggacagcgactga

SEQ ID NO: 1392 - RNA, 309 nt, synthetic construct
  misc_feature 1..309: note = AAF88037_variant
  source 1..309: mol_type = other RNA
atgagcgcccgcgtgcggtcccgcagccggggccgcggggacggccaggaggcccccgacgtcgtggcgttcgtggcccccggggagtcccagcaggaggagccgcccaccgacaaccaggacatcgagcccggccaggagcgggaggggaccccgcccatcgaggagcgcaaggtcgagggcgactgccaggagatggacctggagaagacgcggagcgagcgcggcgacgggtccgacgtgaaggagaagaccccgcccaaccccaagcacgccaagaccaaggaggccggcgacgggcagccctga

SEQ ID NO: 1393 - RNA, 1209 nt, synthetic construct
  misc_feature 1..1209: note = AAA60003_variant
  source 1..1209: mol_type = other RNA
atgcagatgagccccgccctgacctgcctcgtgctggggctggccctcgtcttcggggagggctccgcggtgcaccacccgcccagctacgtggcccacctggcctccgacttcggggtccgcgtgttccagcaggtcgcccaggccagcaaggaccggaacgtggtgttctccccctacggcgtggcgagcgtcctggccatgctccagctgaccaccgggggcgagacgcagcagcagatccaggccgccatgggcttcaagatcgacgacaaggggatggcgcccgccctgcgccacctctacaaggagctgatgggcccgtggaacaaggacgagatctccaccaccgacgccatcttcgtgcagcgggacctgaagctcgtgcaggggttcatgccccacttcttccgcctgttccggagcacggtcaagcaggtcgacttctccgaggtggagcgcgcccggttcatcatcaacgactgggtgaagacccacaccaagggcatgatcagcaacctgctcgggaagggcgccgtggaccagctgacccgcctggtgctcgtcaacgcgctgtacttcaacggccagtggaagacgcccttccccgactccagcacccaccggcgcctgttccacaagtccgacgggagcaccgtgtccgtgccgatgatggcccagaccaacaagttcaactacacggagttcaccacccccgacggccactactacgacatcctcgagctgccctaccacggggacaccctgagcatgttcatcgccgccccctacgagaaggaggtcccgctctccgccctgacgaacatcctgagcgcgcagctcatctcccactggaagggcaacatgacccggctgccccgcctgctcgtgctgcccaagttcagcctggagaccgaggtggacctccggaagcccctggagaacctgggcatgaccgacatgttccgccagttccaggccgacttcacgagcctctccgaccaggagccgctgcacgtcgcccaggccctgcagaaggtgaagatcgaggtcaacgagagcgggaccgtggcctccagctccaccgcggtgatcgtcagcgcccggatggcccccgaggagatcatcatggaccgccccttcctcttcgtggtgcggcacaaccccaccggcacggtcctgttcatgggccaggtgatggagccgtga

SEQ ID NO: 1394 - RNA, 1248 nt, synthetic construct
  misc_feature 1..1248: note = AAA36797_variant
  source 1..1248: mol_type = other RNA
atggaggacctgtgcgtggccaacaccctcttcgccctgaacctgttcaagcacctcgcgaaggccagccccacccagaacctgttcctgtccccgtggagcatctccagcacgatggccatggtctacatgggctcccgcgggagcaccgaggaccagatggccaaggtgctccagttcaacgaggtgggcgccaacgcggtcacccccatgacccccgagaacttcacgtcctgcgggttcatgcagcagatccagaagggcagctaccccgacgccatcctgcaggcccaggccgcggacaagatccactccagcttccggtccctgagctccgccatcaacgccagcaccgggaactacctcctggagtccgtgaacaagctgttcggcgagaagtccgccagcttccgcgaggagtacatccggctctgccagaagtactacagctccgagccgcaggccgtggacttcctggagtgcgcggaggaggcccgcaagaagatcaacagctgggtcaagacccagaccaagggcaagatccccaacctgctccccgaggggagcgtggacggcgacacgcggatggtgctggtcaacgccgtgtacttcaaggggaagtggaagacccccttcgagaagaagctgaacggcctctacccgttccgcgtgaactccgcccagcggacccccgtccagatgatgtacctgcgcgagaagctgaacatcgggtacatcgaggacctcaaggcccagatcctggagctgccctacgcgggcgacgtgagcatgttcctcctgctgcccgacgagatcgccgacgtgtccaccggcctcgagctgctggagagcgagatcacgtacgacaagctcaacaagtggacctccaaggacaagatggccgaggacgaggtcgaggtgtacatcccgcagttcaagctggaggagcactacgagctgcggagcatcctccgctccatggggatggaggacgccttcaacaagggccgggccaacttcagcgggatgtccgagcgcaacgacctgttcctgagcgaggtgttccaccaggcgatggtcgacgtgaacgaggagggcaccgaggccgccgccggcaccgggggcgtgatgacggggcggaccggccacgggggcccccagttcgtcgccgaccaccccttcctcttcctgatcatgcacaagatcaccaactgcatcctgttcttcggccgcttctccagcccctga

SEQ ID NO: 1395 - RNA, 528 nt, synthetic construct
  misc_feature 1..528: note = AAA60020_variant
  source 1..528: mol_type = other RNA
atgctgcccccgatggccctccccagcgtgtcctggatgctgctgagctgcctcatgctgctgtcccaggtccagggcgaggagccccagcgcgagctccccagcgcccggatccgctgcccgaaggggtccaaggcgtacggcagccactgctacgccctgttcctgtcccccaagagctggaccgacgccgacctcgcctgccagaagcggccctccgggaacctggtgagcgtgctgtccggcgccgaggggagcttcgtctccagcctcgtgaagtccatcggcaacagctactcctacgtgtggatcggcctgcacgaccccacccaggggacggagccgaacggcgaggggtgggagtggagctccagcgacgtcatgaactacttcgcgtgggagcgcaaccccagcaccatctccagccccggccactgcgcctccctgagccggtccaccgccttcctccgctggaaggactacaactgcaacgtgcggctgccctacgtgtgcaagttcaccgactga

SEQ ID NO: 1396 - RNA, 528 nt, synthetic construct; identical to SEQ ID NO: 1395
  misc_feature 1..528: note = AAT11159_variant
  source 1..528: mol_type = other RNA

SEQ ID NO: 1397 - RNA, 381 nt, synthetic construct
  misc_feature 1..381: note = AAH39863_variant
  source 1..381: mol_type = other RNA
atggacaagagcctgctcctggagctgcccatcctcctgtgctgcttccgcgccctgtccggcagcctctccatgcggaacgacgccgtgaacgagatcgtcgcggtgaagaacaacttcccggtgatcgagatcgtccagtgccgcatgtgccacctccagttccccggggagaagtgcagccggggccgcgggatctgcaccgccaccacggaggaggcctgcatggtgggccggatgttcaagcgcgacgggaacccctggctgaccttcatgggctgcctgaagaactgcgccgacgtgaagggcatccggtggtccgtctacctggtgaacttccgctgctgccggagccacgacctgtgcaacgaggacctctga

SEQ ID NO: 1398 - RNA, 1440 nt, synthetic construct
  misc_feature 1..1440: note = CCDS42826.1_variant
  source 1..1440: mol_type = other RNA
atgaccaccctggccggcgccgtgccccgcatgatgcggccggggcccggccagaactacccccgcagcgggttccccctcgaggtctccacgccgctgggccaggggcgggtgaaccagctgggcggcgtgttcatcaacgggcgccccctccccaaccacatccggcacaagatcgtcgagatggcgcaccacggcatccgcccctgcgtgatcagccggcagctgcgcgtgtcccacgggtgcgtcagcaagatcctgtgccggtaccaggagaccggctccatccgcccgggggccatcggcggcagcaagcccaagcaggtcaccacccccgacgtggagaagaagatcgaggagtacaagcgggagaaccccgggatgttctcctgggagatccgcgacaagctcctgaaggacgccgtgtgcgaccggaacacggtgccgagcgtgtccagcatctcccgcatcctgcggagcaagttcggcaagggggaggaggaggaggccgacctcgagcgcaaggaggccgaggagtccgagaagaaggcgaagcacagcatcgacggcatcctgtccgagcgggccagcgcgccccagtccgacgagggcagcgacatcgactccgagcccgacctgcccctcaagcgcaagcagcggcgcagccggaccaccttcaccgccgagcagctggaggagctggagcgcgccttcgagcgcacgcactacccggacatctacacccgggaggagctcgcccagcgcgccaagctgaccgaggcccgggtccaggtgtggttcagcaaccgccgggcccgctggcggaagcaggcgggggccaaccagctgatggccttcaaccacctcatccccggcgggttcccgcccaccgccatgcccacgctgcccacctaccagctgtccgagaccagctaccagcccacctccatcccccaggccgtgagcgacccgtccagcacggtccaccgcccccagcccctgcccccgtccaccgtgcaccagagcaccatcccctccaaccccgacagctccagcgcgtactgcctcccgtccacccggcacggcttcagctcctacacggacagcttcgtgccgccctccgggcccagcaaccccatgaaccccaccatcggcaacggcctgtccccgcaggtcatggggctcctgaccaaccacggcggggtgccccaccagccccagaccgactacgccctgagccccctcacgggcgggctggagcccaccaccaccgtgagcgcctcctgcagccagcgcctggaccacatgaagtccctcgacagcctgcccacgtcccagagctactgcccgcccacctactccaccaccggctacagcatggaccccgtcacgggctaccagtacgggcagtacggccagtccaagccctggaccttctga

SEQ ID NO: 1399 - RNA, 1176 nt, synthetic construct
  misc_feature 1..1176: note = AAA58397_variant
  source 1..1176: mol_type = other RNA
atggacctggagaagaactaccccacgccccgcaccagccggaccggccacgggggcgtgaaccagctcgggggcgtcttcgtgaacgggcgccccctgcccgacgtggtccggcagcgcatcgtggagctggcccaccagggcgtgcggccctgcgacatctcccgccagctccgggtcagccacggctgcgtgtccaagatcctggggcgctactacgagaccggcagcatcaagccgggggtgatcggcgggtccaagcccaaggtcgccacccccaaggtggtggagaagatcgcggagtacaagcggcagaaccccaccatgttcgcctgggagatccgcgaccggctgctcgccgagcgcgtctgcgacaacgacacggtgccgagcgtgtccagcatcaaccggatcatccgcaccaaggtccagcagccgcccaaccagcccgtgcccgcctccagccactccatcgtgagcaccggctccgtcacccaggtgagctccgtgagcacggactccgccggcagctcctacagcatcagcgggatcctgggcatcacctcccccagcgcggacaccaacaagcggaagcgcgacgaggggatccaggagtcccccgtccccaacggccacagcctgccgggccgggacttcctccgcaagcagatgcgcggggacctgttcacccagcagcagctggaggtgctcgaccgggtgttcgagcggcagcactactccgacatcttcacgaccaccgagcccatcaagcccgagcagaccacggagtacagcgccatggcctccctggccggcgggctggacgacatgaaggcgaacctcgccagccccaccccggccgacatcggctccagcgtccccgggccccagtcctaccccatcgtgaccggccgcgacctggccagcaccacgctgccgggctacccgccccacgtcccgcccgccgggcagggctcctacagcgcgcccaccctcaccgggatggtgcccggctccgagttcagcgggtccccctacagccacccccagtactccagctacaacgacagctggcgcttccccaaccccggcctgctgggctccccgtactactacagcgccgccgcccgcggggccgcgccgcccgccgccgccaccgcctacgaccggcactga

SEQ ID NO: 1400 - RNA, 873 nt, synthetic construct
  misc_feature 1..873: note = AAF25807_variant
  source 1..873: mol_type = other RNA
atgcgcatcttcgccgtgttcatcttcatgacctactggcacctcctcaacgccttcaccgtcacggtgcccaaggacctgtacgtggtcgagtacggcagcaacatgaccatcgagtgcaagttcccggtggagaagcagctggacctcgcggccctgatcgtgtactgggagatggaggacaagaacatcatccagttcgtccacggggaggaggacctgaaggtgcagcactccagctaccggcagcgcgcccggctcctgaaggaccagctgtccctcggcaacgccgccctgcagatcaccgacgtgaagctgcaggacgcgggggtctaccgctgcatgatcagctacggcggggccgactacaagcggatcaccgtgaaggtgaacgccccctacaacaagatcaaccagcgcatcctcgtcgtggaccccgtgacgtccgagcacgagctgacctgccaggccgagggctaccccaaggcggaggtcatctggaccagctccgaccaccaggtgctgagcggcaagaccacgaccaccaactccaagcgggaggagaagctgttcaacgtgaccagcacgctgcgcatcaacaccaccaccaacgagatcttctactgcacgttccggcgcctggacccggaggagaaccacaccgccgagctcgtcatccccgagctgcccctggcccacccgcccaacgagcggacccacctcgtgatcctgggggccatcctgctctgcctgggcgtggccctgaccttcatcttccgcctccggaaggggcgcatgatggacgtcaagaagtgcggcatccaggacacgaactccaagaagcagagcgacacccacctggaggagacctga

SEQ ID NO: 1401 - RNA, 867 nt, synthetic construct
  misc_feature 1..867: note = AAH74740_variant
  source 1..867: mol_type = other RNA
atgcagatcccccaggccccgtggcccgtggtctgggccgtgctgcagctcggctggcgccccgggtggttcctggacagccccgaccggccgtggaacccgcccaccttctcccccgcgctgctcgtggtcaccgagggcgacaacgccacgttcacgtgcagcttctccaacaccagcgagtccttcgtgctgaactggtaccgcatgagcccctccaaccagaccgacaagctggccgccttccccgaggaccggagccagcccgggcaggactgccgcttccgggtgacccagctccccaacggccgcgacttccacatgtccgtcgtgcgggcccgccggaacgacagcgggacctacctgtgcggcgcgatctccctggccccgaaggcccagatcaaggagagcctccgcgccgagctgcgggtgaccgagcgccgggcggaggtccccaccgcccacccctcccccagcccgcgccccgccggccagttccagacgctggtggtgggggtcgtgggcgggctcctgggctccctggtgctcctggtctgggtgctggccgtgatctgcagccgggccgcgcgcgggaccatcggcgcccggcgcaccggccagcccctcaaggaggacccctccgccgtcccggtgttcagcgtggactacggggagctggacttccagtggcgggagaagacccccgagccgcccgtcccctgcgtgcccgagcagacggagtacgccaccatcgtgttcccctccggcatggggaccagcagccccgcccgccggggctccgcggacggcccgcgcagcgcccagcccctgcgccccgaggacgggcactgctcctggccgctctga

SEQ ID NO: 1402 - RNA, 1008 nt, synthetic construct
  misc_feature 1..1008: note = AAC95296_variant
  source 1..1008: mol_type = other RNA
atgggcagcgcctcccccgggctgagctccgtgagcccgtcccacctcctgctgccgcccgacaccgtcagccgcaccggcctcgagaaggccgcggccggggccgtgggcctggagcggcgcgactggtcccccagcccgcccgccacgcccgagcaggggctgtccgccttctacctcagctacttcgacatgctgtaccccgaggactccagctgggcggccaaggcccccggcgcctccagccgggaggagccgcccgaggagcccgagcagtgccccgtgatcgactcccaggcgcccgccggcagcctggacctcgtccccgggggcctgaccctggaggagcactccctcgagcaggtccagagcatggtggtgggggaggtgctgaaggacatcgagaccgcctgcaagctgctcaacatcaccgccgaccccatggactggtccccgagcaacgtgcagaagtggctgctgtggacggagcaccagtaccgcctcccgcccatgggcaaggccttccaggagctggcggggaaggagctgtgcgccatgagcgaggagcagttccggcagcgcagccccctcggcggcgacgtcctgcacgcccacctggacatctggaagtccgccgcctggatgaaggagcggacctcccccggggcgatccactactgcgccagcacctccgaggagagctggaccgactccgaggtggacagctcctgcagcggccagcccatccacctctggcagttcctgaaggagctgctcctgaagccccactcctacgggcgcttcatccggtggctgaacaaggagaagggcatcttcaagatcgaggacagcgcccaggtggcccgcctctggggcatccggaagaaccgccccgccatgaactacgacaagctgtcccggagcatccgccagtactacaagaaggggatcatccggaagccggacatctcccagcgcctggtctaccagttcgtgcaccccatctga

SEQ ID NO: 1403 - RNA, 2217 nt, synthetic construct
  misc_feature 1..2217: note = AAA36429_variant
  source 1..2217: mol_type = other RNA
atgcagccccgctgggcccagggcgccaccatgtggctgggggtgctcctgaccctgctcctgtgcagctccctggagggccaggagaacagcttcacgatcaactccgtcgacatgaagtccctcccggactggaccgtgcagaacgggaagaacctgaccctgcagtgcttcgcggacgtgagcaccacgagccacgtcaagccccagcaccagatgctgttctacaaggacgacgtcctcttctacaacatctccagcatgaagtccaccgagagctacttcatccccgaggtgcggatctacgactccggcacctacaagtgcaccgtgatcgtgaacaacaaggagaagacgaccgccgagtaccagctgctcgtggagggggtccccagcccgcgcgtgaccctggacaagaaggaggccatccagggcggcatcgtgcgggtcaactgctccgtgcccgaggagaaggcccccatccacttcaccatcgagaagctggagctcaacgagaagatggtgaagctgaagcgcgagaagaacagccgggaccagaacttcgtcatcctggagttccccgtggaggagcaggaccgcgtgctctccttccggtgccaggcccgcatcatcagcgggatccacatgcagacgtccgagagcaccaagtccgagctggtcaccgtgaccgagagcttcagcacgccgaagttccacatctcccccaccggcatgatcatggagggggcgcagctgcacatcaagtgcaccatccaggtgacccacctcgcccaggagttccccgagatcatcatccagaaggacaaggccatcgtcgcccacaaccggcacggcaacaaggcggtgtacagcgtgatggccatggtcgagcactccgggaactacacgtgcaaggtggagagctcccgcatcagcaaggtctccagcatcgtggtgaacatcaccgagctgttctccaagcccgagctggagagctccttcacccacctcgaccagggcgagcggctgaacctgagctgctccatcccgggcgccccgcccgccaacttcaccatccagaaggaggacacgatcgtcagccagacccaggacttcaccaagatcgcctccaagagcgactccgggacctacatctgcacggcgggcatcgacaaggtggtgaagaagtccaacaccgtccagatcgtggtgtgcgagatgctcagccagccccgcatcagctacgacgcccagttcgaggtcatcaaggggcagaccatcgaggtgcggtgcgagagcatctccggcaccctgcccatcagctaccagctgctcaagacgtccaaggtgctggagaacagcaccaagaactccaacgaccccgccgtcttcaaggacaaccccaccgaggacgtggagtaccagtgcgtggccgacaactgccacagccacgccaagatgctgtccgaggtcctccgcgtgaaggtgatcgcgcccgtcgacgaggtgcagatcagcatcctgtccagcaaggtggtcgagtccggcgaggacatcgtgctgcagtgcgccgtgaacgaggggagcggcccgatcacctacaagttctaccgggagaaggaggggaagcccttctaccagatgacgtccaacgccacccaggccttctggaccaagcagaaggccagcaaggagcaggagggcgagtactactgcaccgcgttcaaccgcgccaaccacgcctccagcgtcccccggtccaagatcctcaccgtgcgcgtgatcctggccccctggaagaaggggctgatcgccgtcgtgatcatcggcgtgatcatcgcgctcctgatcatcgccgccaagtgctacttcctgcggaaggccaaggcgaagcagatgccggtcgagatgagccgccccgccgtgcccctcctgaacagcaacaacgagaagatgtccgaccccaacatggaggccaacagccactacggccacaacgacgacgtgcggaaccacgccatgaagccgatcaacgacaacaaggagcccctgaactccgacgtccagtacacggaggtccaggtgagctccgccgagagccacaaggacctcgggaagaaggacaccgagaccgtgtactccgaggtgcgcaaggcggtgcccgacgccgtcgagagccgctactcccggaccgagggcagcctggacgggacgtga

SEQ ID NO: 1404 - RNA, 2736 nt, synthetic construct
  misc_feature 1..2736: note = AAG23134_variant
  source 1..2736: mol_type = other RNA
atggcccagctgttcctccccctgctggccgcgctcgtgctggcccaggccccggccgccctggcggacgtcctcgagggcgacagctccgaggaccgcgccttccgggtgcgcatcgccggggacgcgcccctgcagggcgtgctcgggggcgccctgaccatcccctgccacgtccactacctgcggcccccgcccagccgccgggccgtgctggggagcccccgcgtgaagtggaccttcctctcccggggccgcgaggccgaggtcctggtggcccggggcgtgcgcgtcaaggtgaacgaggcctaccggttccgcgtggcgctgcccgcctacccggcctccctcacggacgtcagcctggccctgtccgagctccggcccaacgacagcgggatctaccgctgcgaggtgcagcacggcatcgacgactccagcgacgccgtggaggtcaaggtgaagggggtggtcttcctgtaccgggagggctccgcgcgctacgccttcagcttctccggggcccaggaggcctgcgcccggatcggcgcgcacatcgccacccccgagcagctgtacgccgcctacctcggcgggtacgagcagtgcgacgccggctggctgagcgaccagaccgtgcgctaccccatccagaccccgcgggaggcgtgctacggggacatggacggcttccccggcgtgcgcaactacggggtcgtggaccccgacgacctgtacgacgtgtactgctacgccgaggacctcaacggcgagctgttcctgggggacccgcccgagaagctcacgctggaggaggcccgggcctactgccaggagcgcggcgcggagatcgccaccaccgggcagctgtacgccgcctgggacggcggcctcgaccactgctcccccgggtggctggccgacggcagcgtccgctaccccatcgtgaccccctcccagcggtgcgggggcgggctgccgggcgtcaagaccctcttcctgttccccaaccagaccggcttccccaacaagcacagccgcttcaacgtgtactgcttccgggactccgcgcagcccagcgccatcccggaggccagcaaccccgcctccaaccccgccagcgacgggctggaggcgatcgtgaccgtcaccgagacgctcgaggagctgcagctgccccaggaggccaccgagtccgagagccgcggcgccatctactccatcccgatcatggaggacgggggcgggggcagctccacccccgaggaccccgccgaggccccgcggaccctcctggagttcgagacgcagagcatggtgccgcccaccggcttctccgaggaggaggggaaggcgctggaggaggaggagaagtacgaggacgaggaggagaaggaggaggaggaggaggaggaggaggtggaggacgaggccctctgggcctggcccagcgagctgtccagccccggccccgaggcctccctgcccaccgagcccgcggcccaggaggagagcctctcccaggccccggcccgcgccgtcctgcagcccggggcgagccccctgcccgacggcgagtccgaggccagccggccgccccgcgtgcacggcccgcccaccgagacgctccccacgccccgggagcgcaacctggcctcccccagccccagcaccctggtggaggcccgggaggtcggggaggccaccggcgggccggagctgtccggcgtgccccgcggggagagcgaggagacgggctccagcgagggcgcgccctccctcctgcccgccacccgggccccggaggggacccgcgagctggaggcccccagcgaggacaactccggccggaccgcccccgcggggacgagcgtgcaggcccagccggtcctccccaccgactccgccagccgcggcggggtggccgtggtccccgcgtccggcgactgcgtgcccagcccgtgccacaacggcgggacctgcctggaggaggaggagggcgtgcggtgcctgtgcctccccgggtacggcggggacctgtgcgacgtcggcctgcgcttctgcaaccccggctgggacgccttccagggggcctgctacaagcacttctccacccggcgcagctgggaggaggccgagacgcagtgccgcatgtacggcgcccacctcgcgtccatcagcacccccgaggagcaggacttcatcaacaaccggtaccgcgagtaccagtggatcgggctgaacgaccggaccatcgagggcgacttcctgtggtccgacggggtgccgctcctgtacgagaactggaaccccggccagcccgacagctacttcctgagcggcgagaactgcgtggtcatggtgtggcacgaccaggggcagtggtccgacgtgccctgcaactaccacctcagctacacgtgcaagatgggcctggtctcctgcgggccgccgcccgagctgcccctcgcccaggtgttcggccgcccccggctgcgctacgaggtggacaccgtcctgcggtaccgctgccgggagggcctcgcccagcgcaacctgcccctgatccggtgccaggagaacgggcgctgggaggcgccccagatcagctgcgtgccccggcgcccggcccgggccctccaccccgaggaggaccccgagggccgccaggggcggctgctgggccgctggaaggccctcctgatcccgccctccagccccatgcccgggccctga

SEQ ID NO: 1405 - RNA, 3321 nt, synthetic construct
  misc_feature 1..3321: note = AAA60049_variant
  source 1..3321: mol_type = other RNA
atgcgcctgcccggcgccatgccggccctcgcgctgaagggggagctgctcctgctgagcctcctgctgctcctggagccccagatctcccagggcctggtggtcaccccgcccgggcccgagctcgtgctgaacgtgagctccaccttcgtcctgacgtgcagcggctccgcccccgtggtgtgggagcggatgagccaggagccgccccaggagatggccaaggcccaggacgggaccttctccagcgtcctcaccctgaccaacctgacgggcctcgacaccggcgagtacttctgcacccacaacgactcccgcgggctggagaccgacgagcggaagcgcctgtacatcttcgtgcccgaccccacggtgggcttcctccccaacgacgccgaggagctgttcatcttcctgaccgagatcaccgagatcaccatcccctgccgggtcacggacccgcagctcgtggtgaccctgcacgagaagaagggggacgtcgcgctgcccgtgccctacgaccaccagcgcggcttcagcgggatcttcgaggaccggtcctacatctgcaagaccaccatcggcgaccgcgaggtggacagcgacgcctactacgtctaccggctccaggtgtccagcatcaacgtgtccgtcaacgccgtgcagacggtggtccgccagggcgagaacatcaccctgatgtgcatcgtgatcgggaacgaggtggtcaacttcgagtggacctacccccggaaggagagcggccgcctggtggagccggtcaccgacttcctcctggacatgccctaccacatccggtccatcctgcacatccccagcgccgagctcgaggactccgggacgtacacgtgcaacgtgaccgagagcgtgaacgaccaccaggacgagaaggcgatcaacatcaccgtcgtggagagcggctacgtgcgcctgctgggcgaggtcgggaccctccagttcgccgagctgcaccggtcccgcaccctccaggtggtgttcgaggcctacccgccgcccaccgtcctgtggttcaaggacaaccggaccctgggcgacagctccgccggggagatcgccctgagcacgcgcaacgtgtccgagacccggtacgtgagcgagctcaccctggtccgcgtgaaggtggcggaggccggccactacaccatgcgggccttccacgaggacgccgaggtccagctgtccttccagctccagatcaacgtgcccgtgcgcgtcctggagctgagcgagtcccaccccgacagcggggagcagacggtgcgctgccggggccgcggcatgccccagcccaacatcatctggtccgcctgccgggacctcaagcgctgcccccgggagctgcccccgaccctgctggggaacagctccgaggaggagagccagctcgagaccaacgtgacctactgggaggaggagcaggagttcgaggtcgtgtccacgctgcgcctgcagcacgtggaccggcccctcagcgtccgctgcaccctgcggaacgcggtgggccaggacacccaggaggtgatcgtcgtgccccactccctgccgttcaaggtggtcgtgatcagcgccatcctcgccctggtggtcctgaccatcatctccctcatcatcctgatcatgctgtggcagaagaagccccgctacgagatccggtggaaggtgatcgagagcgtgagctccgacgggcacgagtacatctacgtcgaccccatgcagctcccctacgacagcacctgggagctgccgcgcgaccagctggtgctcggccggacgctggggtccggcgccttcggccaggtggtcgaggccaccgcgcacgggctgagccactcccaggccaccatgaaggtggccgtgaagatgctcaagagcaccgcccgctccagcgagaagcaggccctgatgtccgagctgaagatcatgagccacctcggcccccacctgaacgtcgtgaacctgctcggggcgtgcacgaagggcgggcccatctacatcatcaccgagtactgccggtacggcgacctggtggactacctgcaccgcaacaagcacaccttcctccagcaccactccgacaagcggcggcccccgagcgccgagctgtactccaacgccctgcccgtcggcctccccctgcccagccacgtgtccctgaccggggagagcgacggcgggtacatggacatgtccaaggacgagagcgtggactacgtcccgatgctcgacatgaagggcgacgtgaagtacgccgacatcgagagctccaactacatggcgccctacgacaactacgtgcccagcgcccccgagcgcacgtgccgcgccaccctgatcaacgagtccccggtcctgagctacatggacctcgtgggcttctcctaccaggtcgccaacgggatggagttcctggccagcaagaactgcgtgcaccgcgacctggcggcccggaacgtgctcatctgcgagggcaagctggtcaagatctgcgacttcgggctggcccgcgacatcatgcgggactccaactacatcagcaagggctccaccttcctccccctgaagtggatggcccccgagagcatcttcaactccctgtacaccacgctcagcgacgtgtggtccttcgggatcctgctgtgggagatcttcaccctcggcggcaccccctacccggagctgcccatgaacgagcagttctacaacgccatcaagcgcgggtaccggatggcgcagcccgcccacgccagcgacgagatctacgagatcatgcagaagtgctgggaggagaagttcgagatccggcccccgttctcccagctggtgctcctgctggagcgcctcctgggcgaggggtacaagaagaagtaccagcaggtcgacgaggagttcctgcgcagcgaccaccccgccatcctccggtcccaggcccgcctgcccggcttccacgggctgcggagcccgctcgacacctccagcgtgctgtacacggcggtgcagcccaacgagggcgacaacgactacatcatccccctgcccgacccgaagcccgaggtcgccgacgagggccccctcgaggggagcccctccctggccagctccaccctgaacgaggtgaacaccagctccaccatcagctgcgactccccgctcgagccccaggacgagcccgagcccgagccgcagctggagctccaggtggagcccgagcccgagctggagcagctgcccgacagcggctgcccggcgccccgcgccgaggccgaggactccttcctgtga

SEQ ID NO: 1406 - RNA, 942 nt, synthetic construct
  misc_feature 1..942: note = EAX03935_variant
  source 1..942: mol_type = other RNA
atgctgctcagcaagatcaactccctggcccacctccgcgccgcgccctgcaacgacctgcacgccaccaagctggccccgggcaaggagaaggagcccctggagagccagtaccaggtggggcccctcctgggctccgggggcttcgggagcgtctactccggcatccgggtgagcgacaacctgcccgtggccatcaagcacgtcgagaaggaccgcatctccgactggggcgagctcccgaacgggacccgggtgcccatggaggtggtcctgctgaagaaggtgagctccggcttcagcggggtgatccgcctcctggactggttcgagcggcccgactccttcgtcctgatcctcgagcgccccgagccggtgcaggacctgttcgacttcatcacggagcggggcgccctgcaggaggagctcgcgcgcagcttcttctggcaggtcctggaggccgtgcggcactgccacaactgcggggtgctgcaccgcgacatcaaggacgagaacatcctcatcgacctgaaccggggcgagctgaagctcatcgacttcggctccggggccctgctgaaggacaccgtgtacaccgacttcgacggcacccgcgtctacagcccgcccgagtggatccggtaccaccgctaccacgggcggtccgccgcggtgtggagcctcggcatcctgctgtacgacatggtgtgcggcgacatccccttcgagcacgacgaggagatcatccgcgggcaggtcttcttccggcagcgcgtgtccagcgagtgccagcacctcatccggtggtgcctggccctgcgcccctccgaccggcccacgttcgaggagatccagaaccacccctggatgcaggacgtgctcctgccccaggagaccgccgagatccacctccacagcctgagcccgggcccctccaagtga

SEQ ID NO: 1407 - RNA, 303 nt, synthetic construct
  misc_feature 1..303: note = AAB81333_variant
  source 1..303: mol_type = other RNA
atggccgacgaggagaagctgcccccgggctgggagaagcgcatgagccggccctccgggcgcggctactacttcaaccacatcaccaaccccagccagtgggagcggccctccgggaacagctccagcggcgggaagatctggcagggcgagccggcccgcgtgcggcgctcccacctcctggtcaagcccgtgaaggcggccctggacctcgccgccggcaaccaccccgaccagggcggcgggcccggggccgaccagcggctgcacccggaggaccaggggcgccgggagggcctgtga

SEQ ID NO: 1408 - RNA, 492 nt, synthetic construct
  misc_feature 1..492: note = AAC50492_variant
  source 1..492: mol_type = other RNA
atggccgacgaggagaagctgcccccgggctgggagaagcgcatgagccggtccagcgggcgcgtgtactacttcaaccacatcaccaacgcctcccagtgggagcggcccagcggcaactccagctccgggggcaagaacgggcagggcgagcccgcgcgcgtccggtgcagccacctcctggtgaagcactcccagagccgccggccctccagctggcgccaggagaagatcacccggacgaaggaggaggccctggagctcatcaacggctacatccagaagatcaagtccggggaggaggacttcgagagcctggcctcccagttcagcgactgctccagcgccaaggcccgcggcgacctgggggcgttctcccggggccagatgcagaagccgttcgaggacgccagcttcgccctccgcaccggggagatgagcggccccgtgttcaccgactccggcatccacatcatcctgcggaccgagtga

SEQ ID NO: 1409 - RNA, 138 nt, synthetic construct
  misc_feature 1..138: note = AAH31971_variant
  source 1..138: mol_type = other RNA
atgcagaagcccttcgaggacgccagcttcgccctgcgcaccggcgagatgtccgggccggtgttcaccgacagcggcatccacatcatcctccggacggagtgctggcgccagacccgggggcccaactgcttctga

SEQ ID NO: 1410 - RNA, 639 nt, synthetic construct
  misc_feature 1..639: note = AAG22596_variant
  source 1..639: mol_type = other RNA
atgaaggtgttcaagttcatcggcctgatgatcctcctgaccagcgccttctccgccgggagcggccagtcccccatgaccgtcctgtgcagcatcgactggttcatggtgacggtgcacccgttcatgctcaacaacgacgtctgcgtgcacttccacgagctgcacctggggctcggctgcccgcccaaccacgtgcagccccacgcgtaccagttcacctaccgcgtcaccgagtgcgggatccgggccaaggccgtgtcccaggacatggtgatctacagcaccgagatccactactccagcaagggcacgccctccaagttcgtcatccccgtgagctgcgccgcgccccagaagtccccctggctgaccaagccgtgcagcatgcgcgtggcctccaagagccgggccaccgcccagaaggacgagaagtgctacgaggtcttctccctgagccagtccagccagcgccccaactgcgactgcccgccctgcgtgttctccgaggaggagcacacccaggtgccctgccaccaggccggcgcgcaggaggcccagcccctccagcccagccacttcctggacatcagcgaggactggtccctgcacacggacgacatgatcgggagcatgtga

SEQ ID NO: 1411 - RNA, 1986 nt, synthetic construct
  misc_feature 1..1986: note = AAB00386_variant
  source 1..1986: mol_type = other RNA
atggacctggtgctcaagcgctgcctgctgcacctcgccgtgatcggcgccctgctggcggtgggggccaccaaggtgccccggaaccaggactggctcggcgtcagccgccagctgcggaccaaggcctggaaccgccagctgtacccggagtggacggaggcccagcggctcgactgctggcgcgggggccaggtgtccctgaaggtgagcaacgacgggcccaccctgatcggcgccaacgcgtccttcagcatcgccctcaacttccccggctcccagaaggtcctgcccgacggccaggtgatctgggtgaacaacaccatcatcaacgggagccaggtctggggcgggcagccggtgtacccccaggagaccgacgacgcctgcatcttccccgacgggggcccctgcccgtccggcagctggtcccagaagcggagcttcgtgtacgtctggaagacgtgggggcagtactggcaggtcctgggcgggcccgtgtccggcctcagcatcggcaccgggcgcgccatgctgggcacccacaccatggaggtgacggtgtaccaccggcgcgggtcccggagctacgtgcccctggcgcactccagctccgccttcaccatcaccgaccaggtccccttcagcgtgtccgtgagccagctccgcgccctggacggcgggaacaagcacttcctgcggaaccagccgctcaccttcgccctgcagctgcacgaccccagcggctacctcgccgaggcggacctgtcctacacgtgggacttcggcgacagctccgggaccctgatcagccgcgccctcgtcgtgacccacacctacctggagcccggccccgtgacggcccaggtcgtgctgcaggccgccatcccgctcacctcctgcgggagctcccccgtccccggcaccaccgacgggcaccggcccacggcggaggccccgaacaccaccgccggccaggtgcccaccacggaggtggtcggcaccacccccgggcaggcccccaccgccgagccgagcggcacgacctccgtccaggtgcccaccaccgaggtgatcagcacggcgcccgtgcagatgcccaccgccgagtccaccgggatgaccccggagaaggtgcccgtcagcgaggtgatgggcacgaccctggccgagatgtccacccccgaggccaccgggatgaccccggccgaggtgagcatcgtcgtgctgtccggcacgaccgcggcccaggtgaccaccacggagtgggtcgagaccaccgcccgcgagctccccatccccgagcccgagggcccggacgccagctccatcatgagcaccgagtccatcacggggagcctgggccccctgctcgacgggaccgcgaccctgcggctggtgaagcgccaggtgcccctcgactgcgtcctgtaccggtacggcagcttctccgtgaccctggacatcgtgcagggcatcgagagcgccgagatcctccaggccgtcccctccggggagggcgacgccttcgagctgacggtgagctgccagggcgggctgccgaaggaggcctgcatggagatctccagccccgggtgccagccgcccgcgcagcgcctctgccagcccgtgctgccctcccccgcctgccagctggtcctccaccagatcctgaagggcggcagcgggacctactgcctgaacgtgtccctggccgacaccaacagcctcgccgtggtctccacccagctgatcatgcccggccaggaggccgggctgggccaggtgccgctcatcgtggggatcctgctggtcctcatggcggtggtgctggccagcctgatctaccggcgccgcctcatgaagcaggacttctccgtcccccagctgccccacagctccagccactggctgcggctcccccgcatcttctgctcctgcccgatcggcgagaacagccccctgctgagcggccagcaggtctga

SEQ ID NO: 1412 - RNA, 2649 nt, synthetic construct
  misc_feature 1..2649: note = CCDS10255.1_variant
  source 1..2649: mol_type = other RNA
atggagcccgccccggcccgcagcccccggccccagcaggaccccgcgcgcccgcaggagcccaccatgcccccgcccgagaccccctccgagggccggcagcccagcccctccccgagccccaccgagcgcgcccccgcctccgaggaggagttccagttcctgcggtgccagcagtgccaggccgaggccaagtgccccaagctcctgccgtgcctgcacaccctctgcagcgggtgcctggaggcgtccggcatgcagtgccccatctgccaggccccctggcccctgggggccgacaccccggccctcgacaacgtgttcttcgagagcctgcagcgccggctgtccgtctaccgccagatcgtggacgcgcaggccgtgtgcacccggtgcaaggagagcgccgacttctggtgcttcgagtgcgagcagctcctgtgcgccaagtgcttcgaggcccaccagtggttcctgaagcacgaggcgcgccccctcgccgagctgcggaaccagtccgtccgcgagttcctggacggcacgcggaagaccaacaacatcttctgcagcaaccccaaccaccgcacccccaccctcacgtccatctactgccgggggtgcagcaagccgctgtgctgctcctgcgccctgctcgacagctcccacagcgagctgaagtgcgacatctccgccgagatccagcagcgccaggaggagctggacgccatgacccaggcgctccaggagcaggacagcgccttcggcgccgtgcacgcccagatgcacgccgcggtgggccagctggggcgggcccgcgccgagaccgaggagctgatccgggagcgcgtccgccaggtggtggcccacgtccgggcccaggagcgcgagctcctggaggcggtggacgcccggtaccagcgcgactacgaggagatggccagccggctgggccgcctcgacgccgtgctgcagcggatccgcaccgggtccgcgctggtccagcggatgaagtgctacgccagcgaccaggaggtgctcgacatgcacggcttcctgcgccaggccctgtgccggctccgccaggaggagccccagtccctgcaggccgccgtgcggacggacgggttcgacgagttcaaggtccgcctgcaggacctcagctcctgcatcacccagggcaaggacgcggccgtgagcaagaaggcctcccccgaggccgccagcacgccccgggacccgatcgacgtggacctgcccgaggaggcggagcgcgtcaaggcccaggtgcaggccctgggcctcgccgaggcccagcccatggcggtggtccagtccgtgccgggggcccaccccgtgcccgtctacgccttcagcatcaagggcccctcctacggggaggacgtgagcaacaccaccaccgcccagaagcggaagtgctcccagacccagtgcccgcgcaaggtcatcaagatggagagcgaggagggcaaggaggcgcggctggcccgctccagccccgagcagccccggccctccaccagcaaggccgtgtccccgccccacctggacggcccgcccagcccccgcagccccgtgatcgggtccgaggtcttcctccccaacagcaaccacgtggcctccggcgccggggaggcggaggagcgcgtggtcgtgatcagctccagcgaggactccgacgccgagaacagctccagccgggagctggacgactccagctccgagagctccgacctgcagctcgagggccccagcacgctgcgcgtgctggacgagaacctcgccgacccgcaggccgaggaccggcccctggtcttcttcgacctgaagatcgacaacgagacccagaagatctcccagctggccgcggtgaaccgcgagagcaagttccgggtggtcatccagcccgaggccttcttcagcatctactccaaggccgtgagcctcgaggtggggctgcagcacttcctgtccttcctcagctccatgcgccggcccatcctggcctgctacaagctgtggggcccgggcctccccaacttcttccgcgccctggaggacatcaaccggctgtgggagttccaggaggcgatcagcgggttcctcgccgccctgcccctgatccgcgagcgggtccccggcgcctccagcttcaagctcaagaacctggcgcagacctacctggcccgcaacatgtccgagcggagcgccatggccgccgtgctcgcgatgcgcgacctgtgccggctgctcgaggtgtccccggggccccagctggcccagcacgtctaccccttcagctccctgcagtgcttcgccagcctccagccgctggtgcaggccgccgtgctgccccgcgcggaggcccggctcctggccctgcacaacgtctccttcatggagctcctgagcgcccaccgccgggaccgccagggcgggctgaagaagtactcccggtacctcagcctgcagaccacgaccctgccgcccgcccagcccgcgttcaacctccaggccctgggcacctacttcgagggcctgctcgaggggcccgccctggcccgcgccgagggcgtgtccacgcccctggcggggcgcggcctcgccgagcgggccagccagcagagctga

SEQ ID NO: 1413 - RNA, 3228 nt, synthetic construct
  misc_feature 1..3228: note = CCDS46409.1_variant
  source 1..3228: mol_type = other RNA
atggtggtcgaggtggacagcatgcccgccgcctccagcgtgaagaagcccttcggcctgcgctccaagatggggaagtggtgctgccggtgcttcccctgctgccgcgagagcggcaagtccaacgtcgggaccagcggcgaccacgacgactccgcgatgaagaccctccggagcaagatggggaagtggtgccgccactgcttcccctgctgccggggctccggcaagagcaacgtgggggcctccggcgaccacgacgacagcgccatgaagacgctgcgcaacaagatggggaagtggtgctgccactgcttcccctgctgccggggctccagcaagtccaaggtgggggcctggggcgactacgacgacagcgccttcatggagccgcgctaccacgtccggggcgaggacctggacaagctccaccgcgcggcctggtgggggaaggtgccccggaaggacctgatcgtgatgctgcgcgacaccgacgtcaacaagcaggacaagcagaagcggaccgccctccacctggcctccgcgaacggcaacagcgaggtggtgaagctgctcctggaccgccggtgccagctgaacgtcctcgacaacaagaagcgcaccgccctgatcaaggccgtgcagtgccaggaggacgagtgcgccctgatgctcctggagcacgggacggaccccaacatccccgacgagtacggcaacaccaccctgcactacgccatctacaacgaggacaagctcatggcgaaggccctgctgctctacggcgccgacatcgagtccaagaacaagcacgggctgaccccgctgctcctgggcgtgcacgagcagaagcagcaggtcgtgaagttcctgatcaagaagaaggccaacctcaacgccctggaccggtacgggcgcacggcgctgatcctcgccgtgtgctgcggcagcgccagcatcgtctccctgctgctcgagcagaacatcgacgtgagctcccaggacctgagcgggcagaccgcccgggagtacgccgtgtccagccaccaccacgtcatctgccagctgctctccgactacaaggagaagcagatgctgaagatcagctccgagaacagcaaccccgagcaggacctgaagctcacctccgaggaggagagccagcgcttcaagggctccgagaacagccagcccgagaagatgtcccaggagcccgagatcaacaaggacggcgaccgggaggtggaggaggagatgaagaagcacgagagcaacaacgtggggctgctggagaacctcaccaacggcgtcacggcggggaacggcgacaacgggctgatcccgcagcgcaagtcccgcacccccgagaaccagcagttccccgacaacgagagcgaggagtaccaccggatctgcgagctgctctccgactacaaggagaagcagatgcccaagtacagcagcgagaactccaacccggagcaggacctgaagctgaccagcgaggaggagtcccagcgcctcaagggcagcgagaacggccagcccgagaagcggtcccaggagcccgagatcaacaaggacggggaccgcgagctggagaacttcatggccatcgaggagatgaagaagcaccggagcacccacgtgggcttccccgagaacctgacgaacggggccaccgccggcaacggggacgacggcctgatcccgccccgcaagtcccggacccccgagagccagcagttccccgacaccgagaacgaggagtaccactccgacgagcagaacgacacgcagaagcagttctgcgaggagcagaacaccggcatcctccacgacgagatcctgatccacgaggagaagcagatcgaggtcgtggagaagatgaacagcgagctgtccctcagctgcaagaaggagaaggacatcctgcacgagaactccaccctgcgcgaggagatcgccatgctccggctggagctggacaccatgaagcaccagagccagctccgcgagaagaagtacctggaggacatcgagtccgtgaagaagcggaacgacaacctgctcaaggcgctgcagctgaacgagctcacgatggacgacgacaccgccgtcctggtgatcgacaacgggagcggcatgtgcaaggccgggttcgccggcgacgacgcgccgcgcgccgtgttcccctccatcgtcggccggccccgccagcaggggatgatgggcgggatgcaccagaaggagagctacgtgggcaaggaggcccagagcaagcgggggatcctgaccctcaagtaccccatggagcacggcatcatcaccaactgggacgacatggagaagatctggcaccacacgttctacaacgagctgcgcgtggccccggaggagcaccccgtcctgctcaccgaggccaccctgaaccccaaggcgaaccgggagaagatgacccagatcatgttcgagacgttcaacaccccggccatgtacgtggccatccaggccgtgctgtccctctacaccagcggccgcaccacggggatcgtcatggactccggcgacggggtgacccacaccgtgcccatctacgagggcaacgccctgccccacgcgaccctgcggctcgacctggccgggcgcgagctgcccgactacctcatgaagatcctgaccgagcacggctaccgcttcacgaccatggccgagcgggagatcgtccgcgacatcaaggagaagctgtgctacgtggccctcgacttcgagcaggagatggccaccgtggcgagctccagctccctggagaagtcctacgagctgccggacggccaggtcatcaccatcgggaacgagcggttccgctgccccgaggccctcttccagccctgcttcctgggcatggagagctgcgggatccacgagacgaccttcaacagcatcatgaagtccgacgtggacatccggaaggacctgtacaccaacaccgtgctcagcggcgggacgaccatgtaccccggcatggcccaccgcatgcagaaggagatcgccgcgctggccccgtccatgatgaagatccggatcatcgccccgcccaagcgcaagtacagcgtctgggtgggcgggtccatcctggccagcctctccaccttccagcagatgtggatcagcaagcaggagtacgacgagtccggccccagcatcgtgcaccggaagtgcctgtga

SEQ ID NO: 1414 - RNA, 1755 nt, synthetic construct
  misc_feature 1..1755: note = CCDS13562.1_variant
  source 1..1755: mol_type = other RNA
atggtggccgaggtctgcagcatgcccaccgcctccaccgtgaagaagccgttcgacctgcgcagcaagatgggcaagtggtgccaccaccggttcccctgctgccgcgggtccggcaagagcaacatggggacgtccggcgaccacgacgacagcttcatgaagatgctccggtccaagatggggaagtgctgccgccactgcttcccctgctgccggggcagcggcacctccaacgtggggaccagcggcgaccacgagaactccttcatgaagatgctgcgcagcaagatggggaagtggtgctgccactgcttcccctgctgccggggctccggcaagagcaacgtcggggcgtggggcgactacgaccactccgccttcatggagccgcgctaccacatccggcgcgaggacctggacaagctccaccgggccgcctggtgggggaaggtgccccgcaaggacctgatcgtgatgctgcgggacaccgacatgaacaagcgcgacaaggagaagcggacggccctccacctggcgagcgccaacggcaactccgaggtcgtgcagctgctcctggaccgccggtgccagctgaacgtgctcgacaacaagaagcgcaccgccctgatcaaggccatccagtgccaggaggacgagtgcgtcctgatgctcctggagcacggggcggaccggaacatccccgacgagtacggcaacaccgccctgcactacgccatctacaacgaggacaagctcatggccaaggccctgctgctctacggcgcggacatcgagagcaagaacaagtgcgggctgacgcccctgctcctgggcgtgcacgagcagaagcagcaggtcgtgaagttcctgatcaagaagaaggccaacctcaacgtgctggaccgctacgggcggaccgccctgatcctcgccgtgtgctgcggctccgccagcatcgtcaacctgctgctcgagcagaacgtggacgtgagctcccaggacctgagcgggcagaccgcgcgcgagtacgccgtctccagccaccaccacgtgatctgcgagctgctctccgactacaaggagaagcagatgctgaagatcagctccgagaacagcaacccggagcaggacctgaagctcacctccgaggaggagagccagcgcctgaaggtgtccgagaacagccagcccgagaagatgtcccaggagcccgagatcaacaaggactgcgaccgggaggtcgaggaggagatcaagaagcacggcagcaaccccgtgggcctgccggagaacctcaccaacggggcctccgccggcaacggggacgacggcctgatcccccagcgccggagccgcaagcccgagaaccagcagttccccgacacggagaacgaggagtaccactccgacgagcagaacgacacccggaagcagctgagcgaggagcagaacaccgggatctcccaggacgagatcctcaccaacaagcagaagcagatcgaggtggccgagcagaagatgaacagcgagctgagcctgtcccacaagaaggaggaggacctcctgcgcgagaacagcgtcctgcaggaggagatcgcgatgctgcggctcgagctggacgagacgaagcaccagaaccagctgcgcgagaacaagatcctcgaggagatcgagtccgtgaaggagaagaccgacaagctgctgcgggccatgcagctcaacgaggaggccctgaccaagaccaacatctga

SEQ ID NO: 1415 - RNA, 1530 nt, synthetic construct
  misc_feature 1..1530: note = EAW59519_variant
  source 1..1530: mol_type = other RNA
atggagcgccggcgcctgtggggcagcatccagtcccggtacatcagcatgtccgtgtggaccagcccccgccggctcgtcgagctggccgggcagtccctgctcaaggacgaggccctggcgatcgccgccctggagctcctgccgcgcgagctgttcccgcccctcttcatggccgccttcgacggccggcacagccagaccctgaaggcgatggtgcaggcctggcccttcacgtgcctgcccctcggggtgctgatgaagggccagcacctccacctggagaccttcaaggccgtcctggacgggctggacgtgctcctggcccaggaggtgcgcccccggcgctggaagctgcaggtcctcgacctgcggaagaactcccaccaggacttctggaccgtgtggagcggcaaccgcgcgtccctgtacagcttccccgagcccgaggccgcccagccgatgaccaagaagcggaaggtggacggcctctccacggaggccgagcagcccttcatccccgtcgaggtgctggtggacctgttcctcaaggagggggcctgcgacgagctgttcagctacctgatcgagaaggtcaagcgcaagaagaacgtgctccggctgtgctgcaagaagctgaagatcttcgcgatgcccatgcaggacatcaagatgatcctcaagatggtgcagctggactccatcgaggacctggaggtgacctgcacctggaagctcccgaccctggccaagttcagcccctacctgggccagatgatcaacctccgccggctgctgctctcccacatccacgccagctcctacatcagccccgagaaggaggagcagtacatcgcccagttcacgtcccagttcctgagcctgcagtgcctccaggccctgtacgtcgacagcctgttcttcctccgcgggcggctggaccagctgctgcgccacgtgatgaaccccctcgagaccctgtccatcaccaactgccggctgagcgagggcgacgtcatgcacctctcccagagcccgtccgtgagccagctgtccgtgctgagcctctccggggtcatgctgaccgacgtgagccccgagcccctgcaggcgctcctggagcgcgcctccgccacgctgcaggacctcgtgttcgacgagtgcggcatcaccgacgaccagctgctggccctcctgcccagcctgtcccactgcagccagctcaccaccctgtccttctacggcaacagcatctccatcagcgccctgcagtccctcctgcagcacctgatcgggctcagcaacctgacgcacgtcctgtacccggtgcccctcgagagctacgaggacatccacggcaccctgcacctggagcgcctcgcgtacctgcacgcccggctgcgcgagctcctgtgcgagctggggcggccctccatggtctggctcagcgccaacccctgcccgcactgcggcgaccgcaccttctacgaccccgagcccatcctgtgcccctgcttcatgccgaactga

SEQ ID NO: 1416 - RNA, 1530 nt, synthetic construct; identical to SEQ ID NO: 1415
  misc_feature 1..1530: note = AAC51160_variant
  source 1..1530: mol_type = other RNA

SEQ ID NO: 1417 - RNA, 645 nt, synthetic construct
  misc_feature 1..645: note = CCDS8069.1_variant
  source 1..645: mol_type = other RNA
atgggcctggccggggtgtgcgccctccgccggagcgcgggctacatcctggtcgggggcgccgggggccagtccgccgccgccgcggcccgccggtacagcgagggcgagtgggcctccgggggcgtgcgcagcttctcccgggccgcggccgccatggcccccatcaaggtgggggacgccatcccggcggtcgaggtgttcgagggcgagcccgggaacaaggtgaacctggccgagctgttcaagggcaagaagggcgtcctgttcggggtgcccggcgccttcacccccgggtgcagcaagacccacctcccgggcttcgtggagcaggccgaggccctcaaggcgaagggcgtccaggtggtggcctgcctgtccgtcaacgacgccttcgtgacgggggagtggggccgcgcccacaaggccgaggggaaggtgcggctgctcgcggaccccaccggcgccttcgggaaggagaccgacctgctgctcgacgacagcctggtctccatcttcggcaaccgccggctgaagcgcttcagcatggtggtgcaggacggcatcgtcaaggccctcaacgtggagcccgacgggaccggcctgacgtgctccctggcccccaacatcatcagccagctctga

SEQ ID NO: 1418 - RNA, 309 nt, synthetic construct
  misc_feature 1..309: note = AAA63250_variant
  source 1..309: mol_type = other RNA
atggtgcgctaccgggtccgcagcctgtccgagcggagccacgaggtgtaccgccagcagctccacggccaggagcaggggcaccacggccaggaggagcaggggctgtcccccgagcacgtggaggtctacgagcggacccacggccagagccactaccgccggcgccactgctcccggcgccggctgcaccgcatccaccggcgccagcaccggagctgccgccggcgcaagcggcgctcctgccggcaccgccgccggcaccgccgggggtgccgcacccggaagcgcacgtgccggcgccactga

SEQ ID NO: 1419 - RNA, 1662 nt, synthetic construct
  misc_feature 1..1662: note = AAH50416_variant
  source 1..1662: mol_type = other RNA
atggtgcagcgcctgtgggtcagccggctcctgcgccaccggaaggcccagctgctcctggtgaacctgctcaccttcggcctggaggtgtgcctggccgcggggatcacctacgtgcccccgctcctgctggaggtgggcgtggaggagaagttcatgacgatggtcctcgggatcggccccgtgctggggctggtgtgcgtccccctcctgggctccgccagcgaccactggcgcggccggtacgggcgccggcgccccttcatctgggccctgtccctcggcatcctgctgagcctcttcctgatcccgcgggccgggtggctggccggcctcctgtgccccgacccccgccccctggagctcgcgctgctgatcctcggggtgggcctgctggacttctgcggccaggtgtgcttcaccccgctcgaggccctgctgtccgacctcttccgggaccccgaccactgccgccaggcctacagcgtctacgccttcatgatctccctcgggggctgcctggggtacctgctgcccgcgatcgactgggacaccagcgccctggccccctacctcggcacccaggaggagtgcctgttcggcctgctcacgctgatcttcctgacctgcgtggccgccaccctcctggtggcggaggaggccgccctggggcccaccgagcccgccgagggcctgtccgcccccagcctcagcccccactgctgcccgtgccgggcgcgcctggccttccggaacctgggggccctcctgccccgcctgcaccagctctgctgccggatgccccgcacgctgcggcgcctgttcgtcgccgagctctgctcctggatggccctgatgaccttcaccctgttctacaccgacttcgtgggcgaggggctctaccagggcgtgccccgggcggagccgggcacggaggcccgccgccactacgacgagggggtccggatgggctccctggggctgttcctccagtgcgccatcagcctggtgttctccctggtgatggaccgcctcgtccagcggttcggcacccgcgccgtgtacctggccagcgtggcggccttccccgtcgccgccggggcgacctgcctgtcccacagcgtggccgtcgtgaccgcctccgccgccctcacgggcttcaccttcagcgcgctgcagatcctgccctacaccctcgccagcctgtaccaccgggagaagcaggtcttcctgcccaagtaccgcggcgacaccgggggcgcctccagcgaggactccctcatgacgagcttcctgccggggcccaagcccggcgcccccttcccgaacgggcacgtcggcgccggcgggtccggcctgctcccgccgccgcccgcgctgtgcggggccagcgcctgcgacgtgtccgtgcgggtcgtggtgggcgagcccaccgaggcccgcgtcgtgcccggccgggggatctgcctggacctcgccatcctggacagcgcgttcctgctctcccaggtggcccccagcctgttcatgggctccatcgtccagctgagccagtccgtgaccgcctacatggtgagcgccgcggggctcggcctggtcgccatctacttcgccacccaggtggtgttcgacaagtccgacctggccaagtacagcgcctga

SEQ ID NO: 1420 - RNA, 648 nt, synthetic construct
  misc_feature 1..648: note = CBI83574_variant
  source 1..648: mol_type = other RNA
atggccagcctgcagatgcgcggcaaccccgggtcccacttctgcggcgggaccctcatccacccgagcttcgtgctgaccgccgcgcactgcctgcgggacatcccccagcgcctcgtcaacgtggtgctgggcgcccacaacgtccggacgcaggagcccacccagcagcacttctccgtggcccaggtgttcctgaacaactacgacgccgagaacaagctcaacgacatcctgctgatccagctcagctcccccgccaacctgagcgcgtccgtcgccaccgtgcagctgccgcagcaggaccagcccgtgccccacgggacccagtgcctcgccatgggctggggccgcgtcggggcccacgacccgcccgcccaggtgctgcaggagctgaacgtgacggtcgtgaccttcttctgccggccccacaacatctgcaccttcgtgccccgccggaaggcgggcatctgcttcggggacagcggcgggcccctcatctgcgacggcatcatccagggcatcgactccttcgtcatctgggggtgcgccacccgcctgttcccggacttcttcacgcgggtggccctgtacgtggactggatccgcagcaccctccggcgcgtcgaggccaagggccggccctga

SEQ ID NO: 1421 - RNA, 771 nt, synthetic construct
  misc_feature 1..771: note = AAH96183_variant
  source 1..771: mol_type = other RNA
atggcccaccggcccccgagccccgccctggcgtccgtgctcctggccctgctcctgagcggcgccgcccgcgccgcggagatcgtcgggggccacgaggcccagccccactcccgcccctacatggccagcctgcagatgcgggggaacccgggctcccacttctgcgggggcaccctcatccaccccagcttcgtgctgaccgccgcgcactgcctgcgcgacatcccccagcggctcgtgaacgtcgtgctgggcgcccacaacgtgcgcacgcaggagcccacccagcagcacttctccgtcgcccaggtgttcctgaacaactacgacgccgagaacaagctcaacgacgtgctgctgatccagctcagctccccggccaacctgagcgcgtccgtcgccaccgtgcagctgccccagcaggaccagcccgtgccccacgggacccagtgcctcgccatgggctgggggcgggtcggcgcccacgacccgcccgcccaggtgctgcaggagctgaacgtgacggtcgtgaccttcttctgccgcccccacaacatctgcaccttcgtgccccggcgcaaggcggggatctgcttcggcgacagcggcgggccgctcatctgcgacggcatcatccaggggatcgactccttcgtcatctggggctgcgccacccggctgttccccgacttcttcacgcgcgtggccctgtacgtggactggatccggagcaccctccgccgggtcgaggccaagggccgcccctga

SEQ ID NO: 1422 - RNA, 2760 nt, synthetic construct
  misc_feature 1..2760: note = CCDS45721.1_variant
  source 1..2760: mol_type = other RNA
atgtggctggccgccgcggcccccagcctcgcccgccggctgctgttcctcggcccgcccccgccgcccctgctgctcctggtgttctcccgcagctcccggcgccggctgcacagcctcgggctggccgccatgcccgagaagcgccccttcgagcggctgcccgcggacgtctcccccatcaactacagcctctgcctgaagcccgacctgctcgacttcaccttcgagggcaagctggaggccgccgcccaggtgcgccaggcgaccaaccagatcgtgatgaactgcgccgacatcgacatcatcacggcctcctacgcccccgagggggacgaggagatccacgccaccggcttcaactaccagaacgaggacgagaaggtcaccctgagcttcccctccaccctccagacggggaccggcaccctgaagatcgacttcgtgggcgagctgaacgacaagatgaaggggttctaccggagcaagtacaccacgccgtccggcgaggtgcgctacgcggccgtcacccagttcgaggccaccgacgcccggcgcgccttcccctgctgggacgagcccgcgatcaaggccaccttcgacatcagcctcgtggtgcccaaggaccgggtcgccctgtccaacatgaacgtgatcgaccgcaagccgtaccccgacgacgagaacctggtggaggtcaagttcgcccggacgcccgtgatgagcacctacctcgtggccttcgtcgtgggggagtacgacttcgtggagacccgctccaaggacggcgtctgcgtgcgggtgtacacccccgtcgggaaggcggagcagggcaagttcgccctggaggtggccgccaagacgctgccgttctacaaggactacttcaacgtgccctaccccctccccaagatcgacctgatcgccatcgcggacttcgccgccggcgccatggagaactgggggctggtcacctaccgcgagaccgcgctcctgatcgacccgaagaacagctgctccagctcccggcagtgggtggccctggtcgtgggccacgagctcgcccaccagtggttcgggaacctggtgaccatggagtggtggacgcacctgtggctcaacgagggcttcgccagctggatcgagtacctgtgcgtcgaccactgcttccccgagtacgacatctggacccagttcgtgagcgccgactacacccgcgcgcaggagctggacgccctcgacaactcccaccccatcgaggtgagcgtcggccacccctccgaggtggacgagatcttcgacgccatcagctactccaagggggccagcgtgatccggatgctgcacgactacatcggcgacaaggacttcaagaaggggatgaacatgtacctgaccaagttccagcagaagaacgccgcgacggaggacctctgggagtccctggagaacgccagcggcaagccgatcgccgccgtcatgaacacctggaccaagcagatggggttccccctgatctacgtggaggccgagcaggtcgaggacgaccgcctcctgcgcctgtcccagaagaagttctgcgcgggcggcagctacgtgggggaggactgcccccagtggatggtgccgatcaccatctccacgagcgaggaccccaaccaggccaagctcaagatcctgatggacaagcccgagatgaacgtggtcctgaagaacgtgaagcccgaccagtgggtgaagctgaacctcggcaccgtcgggttctaccggacccagtactccagcgccatgctggagtccctgctcccgggcatccgcgacctgagcctgccgcccgtggaccggctcgggctgcagaacgacctgttctccctcgcccgcgcgggcatcatcagcaccgtggaggtcctgaaggtgatggaggccttcgtgaacgagcccaactacacggtctggtccgacctgagctgcaacctcggcatcctgagcaccctgctctcccacaccgacttctacgaggagatccaggagttcgtgaaggacgtgttcagccccatcggggagcggctgggctgggaccccaagcccggggagggccacctggacgccctcctgcgcgggctggtcctcggcaagctgggcaaggccgggcacaaggccaccctggaggaggcgcggcgccggttcaaggaccacgtggagggcaagcagatcctctccgccgacctgcgcagccccgtgtacctgacggtcctcaagcacggggacggcaccaccctggacatcatgctgaagctccacaagcaggccgacatgcaggaggagaagaaccggatcgagcgcgtgctgggcgccaccctgctcccggacctgatccagaaggtgctgaccttcgccctctccgaggaggtccggccccaggacacggtgagcgtgatcgggggcgtcgccgggggctccaagcacgggcgcaaggcggcctggaagttcatcaaggacaactgggaggagctgtacaaccggtaccagggcggcttcctgatcagccgcctcatcaagctgtccgtggaggggttcgccgtggacaagatggccggcgaggtcaaggcgttcttcgagagccaccccgccccctccgccgagcggaccatccagcagtgctgcgagaacatcctgctcaacgccgcgtggctgaagcgcgacgccgagagcatccaccagtacctgctccagcggaaggcctccccgcccaccgtgtga

SEQ ID NO: 1423 - RNA, 660 nt, synthetic construct
  misc_feature 1..660: note = AAH65513_variant
  source 1..660: mol_type = other RNA
atgctgcgcgccggcgcccccaccggggacctcccgcgggcgggcgaggtgcacaccgggacgaccatcatggccgtcgagttcgacggcggggtggtgatgggcagcgactcccgcgtcagcgccggcgaggccgtggtgaaccgggtcttcgacaagctgagccccctgcacgagcgcatctactgcgccctctccgggtccgcggccgacgcccaggccgtggcggacatggccgcctaccagctggagctgcacggcatcgagctcgaggagccgcccctggtgctggccgccgcgaacgtcgtgcggaacatcagctacaagtaccgcgaggacctctccgcccacctgatggtggccgggtgggaccagcgggagggcgggcaggtctacggcaccctgggcgggatgctcacccgccagcccttcgccatcggcgggagcggctccacgttcatctacggctacgtggacgccgcgtacaagcccgggatgagccccgaggagtgccggcgcttcaccaccgacgccatcgccctggccatgtcccgggacggcagctccgggggcgtgatctacctggtcaccatcacggccgcgggggtggaccaccgcgtgatcctcggcaacgagctgcccaagttctacgacgagtga

SEQ ID NO: 1424 - RNA, 345 nt, synthetic construct
  misc_feature 1..345: note = EAW82312_variant
  source 1..345: mol_type = other RNA
atggccggcctggccctccagcccgggaccgcgctgctgtgctacagctgcaaggcccaggtgtccaacgaggactgcctccaggtcgagaactgcacccagctgggcgagcagtgctggaccgcccgcatccgggccgtggggctgctcaccgtgatcagcaagggctgctccctgaactgcgtcgacgacagccaggactactacgtggggaagaagaacatcacgtgctgcgacaccgacctgtgcaacgcctccggcgcgcacgccctccagccggccgccgcgatcctggccctgctccccgccctgggcctgctcctgtgggggcccggccagctgtga

SEQ ID NO: 1425 - RNA, 372 nt, synthetic construct
  misc_feature 1..372: note = AAC39607_variant
  source 1..372: mol_type = other RNA
atgaaggccgtgctgctcgccctgctgatggcgggcctcgccctgcagcccgggaccgccctgctctgctacagctgcaaggcccaggtctccaacgaggactgcctccaggtggagaactgcacccagctgggcgagcagtgctggaccgcccgcatccgggcggtggggctgctgaccgtcatcagcaagggctgctccctgaactgcgtggacgacagccaggactactacgtggggaagaagaacatcacgtgctgcgacaccgacctctgcaacgcctccggcgcccacgccctgcagccggcggccgccatcctggccctcctgcccgccctgggcctcctgctgtgggggcccggccagctctga

SEQ ID NO: 1426 - RNA, 963 nt, synthetic construct
  misc_feature 1..963: note = AAG40776_variant
  source 1..963: mol_type = other RNA
atgagctcctgcaacttcacccacgccaccttcgtgctgatcggcatccccgggctcgagaaggcccacttctgggtcggcttcccgctgctgagcatgtacgtggtggcgatgttcgggaactgcatcgtcgtgttcatcgtgcgcacggagcggtccctccacgcccccatgtacctgttcctgtgcatgctcgccgccatcgacctggccctgagcacctccaccatgcccaagatcctcgcgctgttctggttcgacagccgcgagatctccttcgaggcctgcctgacccagatgttcttcatccacgccctcagcgccatcgagtccacgatcctgctggcgatggccttcgaccggtacgtcgccatctgccaccccctccgccacgccgccgtgctgaacaacaccgtgaccgcgcagatcggcatcgtcgccgtggtgcgggggagcctgttcttcttcccgctccccctgctgatcaagcgcctcgccttctgccactccaacgtcctgagccactcctactgcgtgcaccaggacgtgatgaagctggcctacgccgacaccctccccaacgtcgtgtacggcctgacggcgatcctgctcgtgatgggcgtcgacgtgatgttcatcagcctgtcctacttcctgatcatccggaccgtgctccagctgcccagcaagtccgagcgcgccaaggccttcgggacctgcgtcagccacatcggcgtggtgctggccttctacgtcccgctcatcgggctgtccgtggtccaccggttcggcaacagcctgcaccccatcgtgcgcgtggtcatgggggacatctacctcctgctgccgcccgtgatcaaccccatcatctacggcgccaagaccaagcagatccggacgcgcgtgctcgcgatgttcaagatcagctgcgacaaggacctgcaggccgtcggcgggaagtga

SEQ ID NO: 1427 - RNA, 2253 nt, synthetic construct
  misc_feature 1..2253: note = AAA60209_variant
  source 1..2253: mol_type = other RNA
atgtggaacctgctccacgagaccgacagcgccgtggccaccgcgcgccggccccgctggctgtgcgccggggccctggtcctcgccgggggcttcttcctgctggggttcctcttcggctggttcatcaagtccagcaacgaggccacgaacatcaccccgaagcacaacatgaaggcgttcctggacgagctgaaggccgagaacatcaagaagttcctctacaacttcacccagatcccccacctggccgggaccgagcagaacttccagctggccaagcagatccagtcccagtggaaggagttcggcctcgacagcgtggagctggcgcactacgacgtgctgctctcctaccccaacaagacgcaccccaactacatcagcatcatcaacgaggacggcaacgagatcttcaacacctccctgttcgagccgcccccgcccgggtacgagaacgtcagcgacatcgtgccgcccttctccgccttcagcccccagggcatgcccgagggggacctggtgtacgtcaactacgcccggaccgaggacttcttcaagctcgagcgcgacatgaagatcaactgctccggcaagatcgtgatcgcccggtacgggaaggtgttccgcggcaacaaggtcaagaacgcccagctggcgggcgccaagggggtgatcctgtacagcgaccccgccgactacttcgcccccggcgtgaagtcctaccccgacgggtggaacctccccggcggcggggtccagcggggcaacatcctgaacctgaacggggccggcgacccgctcacccccgggtaccccgcgaacgagtacgcctaccgccggggcatcgccgaggccgtgggcctgcccagcatcccggtgcaccccatcgggtactacgacgcccagaagctgctcgagaagatgggcgggtccgcgccgcccgacagctcctggcgcggcagcctgaaggtcccctacaacgtggggcccggcttcacgggcaacttctccacccagaaggtgaagatgcacatccacagcaccaacgaggtcacccggatctacaacgtgatcgggacgctgcgcggcgccgtggagcccgaccggtacgtcatcctcgggggccaccgcgacagctgggtgttcgggggcatcgacccccagtccggcgccgccgtggtccacgagatcgtgcggagcttcgggaccctgaagaaggagggctggcgcccgcggcgcaccatcctgttcgcctcctgggacgcggaggagttcgggctcctgggcagcaccgagtgggccgaggagaactcccggctgctccaggagcgcggcgtcgcctacatcaacgccgacagctccatcgaggggaactacacgctgcgggtggactgcacgcccctgatgtacagcctcgtgcacaacctgaccaaggagctgaagtcccccgacgagggcttcgagggcaagagcctctacgagtcctggaccaagaagtccccgagccccgagttcagcgggatgccccgcatctccaagctggggagcggcaacgacttcgaggtcttcttccagcgcctgggcatcgcgtccgggcgggcccgctacaccaagaactgggagaccaacaagttcagcggctaccccctctaccactccgtgtacgagacctacgagctggtggagaagttctacgacccgatgttcaagtaccacctgaccgtcgcccaggtgcgcgggggcatggtgttcgagctcgccaacagcatcgtcctgcccttcgactgccgggactacgccgtggtgctgcggaagtacgcggacaagatctacagcatctccatgaagcacccccaggagatgaagacgtacagcgtctccttcgacagcctgttctccgccgtgaagaacttcaccgagatcgccagcaagttctccgagcgcctccaggacttcgacaagagcaaccccatcgtgctgcggatgatgaacgaccagctgatgttcctcgagcgcgccttcatcgacccgctggggctgcccgaccggcccttctaccgccacgtcatctacgccccctccagccacaacaagtacgcgggcgagtccttcccgggcatctacgacgccctcttcgacatcgagagcaaggtggacccctccaaggcctggggcgaggtgaagcggcagatctacgtcgccgccttcaccgtgcaggcggccgccgagaccctgagcgaggtggcctga

SEQ ID NO: 1428 - RNA, 3921 nt, synthetic construct
  misc_feature 1..3921: note = CCDS1397.2_variant
  source 1..3921: mol_type = other RNA
atgaccatgtacctgtggctcaagctgctggccttcggcttcgccttcctcgacaccgaggtgttcgtcacggggcagagccccaccccgtcccccaccggcctgaccacggcgaagatgcccagcgtgcccctgtccagcgacccgctccccacccacaccaccgccttctcccccgccagcacgttcgagcgcgagaacgacttctccgagaccaccaccagcctgtcccccgacaacacgagcacccaggtgtccccggacagcctggacaacgcctccgccttcaacaccaccggggtcagctccgtgcagacgccccacctccccacccacgcggacagccagaccccctccgccggcaccgacacgcagaccttcagcgggtccgccgccaacgcgaagctgaacccgacccccggcagcaacgccatcagcgacgtgcccggcgagcggtccaccgccagcacgttccccaccgacccggtcagccccctgaccaccacgctctccctggcccaccactccagcgccgcgctgcccgcccgcacctccaacaccaccatcacggccaacaccagcgacgcctacctcaacgcctccgagaccaccacgctgagcccctccgggagcgcggtgatctccaccaccaccatcgccaccacgccgagcaagcccacgtgcgacgagaagtacgccaacatcaccgtggactacctgtacaacaaggagaccaagctgttcaccgccaagctgaacgtcaacgagaacgtggagtgcggcaacaacacgtgcaccaacaacgaggtgcacaacctgaccgagtgcaagaacgcctccgtcagcatctcccacaacagctgcaccgcgcccgacaagaccctcatcctggacgtgcccccgggggtggagaagttccagctgcacgactgcacccaggtcgagaaggccgacaccacgatctgcctcaagtggaagaacatcgagaccttcacgtgcgacacccagaacatcacctaccggttccagtgcggcaacatgatcttcgacaacaaggagatcaagctggagaacctggagcccgagcacgagtacaagtgcgactccgagatcctctacaacaaccacaagttcaccaacgccagcaagatcatcaagaccgacttcgggagccccggcgagccccagatcatcttctgccgctccgaggccgcccaccagggcgtgatcacctggaacccgccccagcggagcttccacaacttcacgctgtgctacatcaaggagaccgagaaggactgcctgaacctcgacaagaacctgatcaagtacgacctgcagaacctcaagccctacaccaagtacgtgctgtccctgcacgcgtacatcatcgccaaggtccagcgcaacgggagcgccgccatgtgccacttcaccacgaagtccgcgccgcccagccaggtgtggaacatgaccgtgtccatgaccagcgacaactccatgcacgtcaagtgccggccgccccgcgaccggaacggcccccacgagcgctaccacctcgaggtggaggccgggaacaccctggtgcggaacgagagccacaagaactgcgacttccgcgtcaaggacctgcagtactccacggactacaccttcaaggcctacttccacaacggcgactaccccggcgagcccttcatcctccaccacagcacctcctacaacagcaaggccctgatcgccttcctggcgttcctcatcatcgtgacctccatcgccctgctggtcgtgctctacaagatctacgacctgcacaagaagcggagctgcaacctggacgagcagcaggagctcgtggagcgcgacgacgagaagcagctgatgaacgtcgagcccatccacgccgacatcctgctggagacgtacaagcggaagatcgccgacgaggggcgcctcttcctggccgagttccagtccatcccgcgggtgttcagcaagttccccatcaaggaggcgcgcaagcccttcaaccagaacaagaaccggtacgtggacatcctgccctacgactacaaccgcgtcgagctcagcgagatcaacggcgacgccgggtccaactacatcaacgccagctacatcgacggcttcaaggagccgcggaagtacatcgccgcccaggggccccgcgacgagaccgtggacgacttctggcgcatgatctgggagcagaaggcgaccgtgatcgtcatggtgacccggtgcgaggagggcaaccgcaacaagtgcgccgagtactggccctccatggaggagggcacgcgggccttcggggacgtggtcgtgaagatcaaccagcacaagcgctgccccgactacatcatccagaagctgaacatcgtgaacaagaaggagaaggccaccggccgggaggtcacccacatccagttcaccagctggccggaccacggggtgcccgaggacccccacctcctcctgaagctgcgccggcgcgtgaacgcgttctccaacttcttcagcggccccatcgtcgtgcactgctccgccggggtgggccggaccggcacgtacatcgggatcgacgccatgctcgagggcctggaggccgagaacaaggtcgacgtgtacgggtacgtggtcaagctgcgccggcagcgctgcctcatggtccaggtggaggcccagtacatcctgatccaccaggcgctggtggagtacaaccagttcggcgagaccgaggtgaacctcagcgagctgcacccgtacctgcacaacatgaagaagcgggacccgccctccgagcccagccccctcgaggccgagttccagcgcctgccctcctaccggagctggcgcacccagcacatcgggaaccaggaggagaacaagtccaagaaccggaacagcaacgtgatcccctacgactacaaccgcgtcccgctgaagcacgagctcgagatgtccaaggagagcgagcacgactccgacgagagctccgacgacgacagcgacagcgaggagccctccaagtacatcaacgccagcttcatcatgtcctactggaagcccgaggtgatgatcgccgcccagggccccctgaaggagaccatcggcgacttctggcagatgatcttccagcggaaggtgaaggtcatcgtgatgctgacggagctcaagcacggggaccaggagatctgcgcgcagtactggggcgaggggaagcagacctacggcgacatcgaggtggacctgaaggacaccgacaagagctccacctacacgctgcgcgtcttcgagctccgccacagcaagcggaaggactcccgcaccgtgtaccagtaccagtacaccaactggagcgtggagcagctgccggccgagcccaaggagctgatctccatgatccaggtcgtgaagcagaagctcccccagaagaacagctccgagggcaacaagcaccacaagagcacgcccctgctgatccactgccgggacgggtcccagcagaccggcatcttctgcgccctcctgaacctgctcgagagcgccgagaccgaggaggtggtcgacatcttccaggtggtgaaggccctgcgcaaggcgcggccggggatggtctccaccttcgagcagtaccagttcctgtacgacgtgatcgccagcacctaccccgcccagaacggccaggtgaagaagaacaaccaccaggaggacaagatcgagttcgacaacgaggtcgacaaggtgaagcaggacgccaactgcgtgaaccccctcggggcgcccgagaagctgccggaggccaaggagcaggccgagggctccgagcccacgagcggcaccgaggggcccgagcactccgtcaacggccccgccagcccggccctgaaccaggggagctga

SEQ ID NO: 1429 - RNA, 624 nt, synthetic construct
  misc_feature 1..624: note = AAH02977_variant
  source 1..624: mol_type = other RNA
atggccaagacctacgactacctgttcaagctcctgctgatcggcgacagcggggtgggcaagacctgcgtcctcttccgcttctccgaggacgccttcaacagcacgttcatctccaccatcgggatcgacttcaagatccggaccatcgagctggacggcaagcgcatcaagctgcagatctgggacaccgcggggcaggagcggttccgcacgatcaccaccgcctactaccggggcgccatgggcatcatgctcgtgtacgacatcaccaacgagaagtccttcgacaacatccgcaactggatccggaacatcgaggagcacgccagcgccgacgtggagaagatgatcctggggaacaagtgcgacgtcaacgacaagcgccaggtgagcaaggagcggggcgagaagctggcgctcgactacgggatcaagttcatggagacgtccgccaaggccaacatcaacgtggagaacgccttcttcaccctggcgcgcgacatcaaggccaagatggacaagaagctggagggcaacagcccccaggggtccaaccagggcgtcaagatcaccccggaccagcagaagcggagctccttcttccgctgcgtgctcctgtga

SEQ ID NO: 1430 - RNA, 1260 nt, synthetic construct
  misc_feature 1..1260: note = BAA81688_variant
  source 1..1260: mol_type = other RNA
atgaagaactacaaggccatcggcaagatcggggagggcaccttcagcgaggtgatgaagatgcagtccctgcgcgacgggaactactacgcctgcaagcagatgaagcagcggttcgagagcatcgagcaggtcaacaacctccgcgagatccaggccctgcggcgcctgaacccccacccgaacatcctcatgctgcacgaggtggtgttcgaccggaagtccggcagcctggccctcatctgcgagctgatggacatgaacatctacgagctgatccgcgggcggcgctaccccctctccgagaagaagatcatgcactacatgtaccagctgtgcaagagcctggaccacatccaccggaacggcatcttccaccgcgacgtcaagcccgagaacatcctcatcaagcaggacgtgctgaagctgggcgacttcgggtcctgccggagcgtgtactccaagcagccctacaccgagtacatcagcacgcgctggtaccgggccccggagtgcctcctgaccgacggcttctacacctacaagatggacctgtggtccgccgggtgcgtcttctacgagatcgccagcctccagcccctgttccccggcgtgaacgagctggaccagatctccaagatccacgacgtgatcgggacccccgcgcagaagatcctcacgaagttcaagcagagccgcgccatgaacttcgacttcccgttcaagaagggctccggcatccccctgctgaccaccaacctcagcccccagtgcctgtccctgctccacgccatggtcgcctacgaccccgacgagcggatcgcggcccaccaggccctgcagcacccgtacttccaggagcagcgcaagaccgagaagcgggccctggggagccaccgcaaggccggcttccccgagcaccccgtggcgcccgagccgctctccaacagctgccagatcagcaaggaggggcggaagcagaagcagtccctgaagcaggaggaggaccgccccaagcggcgcggccccgcctacgtgatggagctgcccaagctcaagctgagcggcgtcgtgcgcctgtccagctactccagcccgacgctccagtccgtgctggggagcggcaccaacgggcgggtccccgtgctgcgccccctcaagtgcatccccgcctccaagaagaccgacccgcagaaggacctgaagcccgcgccccagcagtgccggctgcccaccatcgtgcgcaagggcgggcggtga

SEQ ID NO: 1431 - RNA, 1389 nt, synthetic construct
  misc_feature 1..1389: note = AAH08727_variant
  source 1..1389: mol_type = other RNA
atggccagcaactccagctcctgccccacccccggcgggggccacctgaacgggtaccccgtgccgccctacgccttcttcttcccgcccatgctcggcgggctgagcccgcccggcgcgctgaccacgctccagcaccagctgcccgtctccggctacagcaccccctcccccgccaccatcgagacccagagctccagctccgaggagatcgtgcccagcccgccctccccgccgcccctgccccgcatctacaagccctgcttcgtgtgccaggacaagagctccgggtaccactacggcgtcagcgcctgcgaggggtgcaagggcttcttccggcgctccatccagaagaacatggtgtacacgtgccaccgggacaagaactgcatcatcaacaaggtgacccgcaaccggtgccagtactgccgcctccagaagtgcttcgaggtcgggatgagcaaggagtccgtgcggaacgaccgcaacaagaagaagaaggaggtgcccaagcccgagtgcagcgagagctacaccctgacccccgaggtcggcgagctgatcgagaaggtgcggaaggcccaccaggagacgttccccgccctctgccagctgggcaagtacaccaccaacaactccagcgagcagcgcgtgtccctggacatcgacctctgggacaagttcagcgagctgtccaccaagtgcatcatcaagacggtcgagttcgcgaagcagctgcccgggttcaccaccctcaccatcgccgaccagatcacgctgctgaaggccgcctgcctcgacatcctgatcctgcggatctgcacccgctacacccccgagcaggacaccatgacgttcagcgacggcctcaccctgaaccggacccagatgcacaacgcggggttcggccccctgaccgacctcgtgttcgccttcgccaaccagctgctgcccctcgagatggacgacgccgagacgggcctgctgtccgccatctgcctcatctgcggggaccgccaggacctggagcagcccgaccgggtggacatgctgcaggagccgctcctggaggcgctgaaggtctacgtgcgcaagcggcgccccagccggccccacatgttcccgaagatgctcatgaagatcaccgacctgcgctccatcagcgccaagggcgccgagcgggtgatcaccctgaagatggagatccccgggtccatgccgcccctcatccaggagatgctggagaacagcgagggcctggacaccctctccgggcagcccggcggcgggggccgcgacgggggcgggctggccccgccgcccggcagctgctcccccagcctgtcccccagctccaaccgcagcagccccgccacgcactccccctga

SEQ ID NO: 1432 - RNA, 570 nt, synthetic construct
  misc_feature 1..570: note = AAB02605_variant
  source 1..570: mol_type = other RNA
atgaccgagtacaagctggtggtcgtgggcgccgggggcgtgggcaagagcgccctcaccatccagctgatccagaaccacttcgtcgacgagtacgaccccacgatcgaggactcctaccgcaagcaggtcgtgatcgacggggagacctgcctgctcgacatcctggacaccgcggggcaggaggagtacagcgccatgcgggaccagtacatgcgcaccggcgagggcttcctgtgcgtgttcgccatcaacaacacgaagtccttcgaggacatccaccagtaccgggagcagatcaagcgcgtgaaggacagcgacgacgtgccgatggtcctcgtggggaacaagtgcgacctggccgcccggaccgtggagtcccgccaggcgcaggacctggcccggagctacggcatcccctacatcgagacctccgccaagacccgccagggggtcgaggacgccttctacacgctcgtgcgggagatccgccagcacaagctgcggaagctgaacccgcccgacgagagcggccccgggtgcatgtcctgcaagtgcgtgctcagctga

SEQ ID NO: 1433 - RNA, 570 nt, synthetic construct
  misc_feature 1..570: note = AAB59445_variant
  source 1..570: mol_type = other RNA
atgaccgagtacaagctggtggtcgtgggcgccgggggcgtgggcaagagcgccctcaccatccagctgatccagaaccacttcgtcgacgagtacgaccccacgatcgaggactcctaccgcaagcaggtcgtgatcgacggggagacctgcctgctcgacatcctggacaccgcggggcaggaggagtacagcgccatgcgggaccagtacatgcgcaccggcgagggcttcctgtgcgtgttcgccatcaacaacacgaagtccttcgaggacatccaccactaccgggagcagatcaagcgcgtgaaggacagcgaggacgtgccgatggtcctcgtggggaacaagtgcgacctgccctcccggaccgtggacaccaagcaggcccaggacctggcccgcagctacggcatccccttcatcgagacctccgcgaagacgcggcagcgcgtcgaggacgccttctacaccctcgtgcgggagatccgccagtaccggctgaagaagatcagcaaggaggagaagacccccgggtgcgtgaagatcaagaagtgcatcatcatgtga

SEQ ID NO: 1434 - RNA, 570 nt, synthetic construct
  misc_feature 1..570: note = AAA60255_variant
  source 1..570: mol_type = other RNA
atgaccgagtacaagctggtggtcgtgggcgccgggggcgtgggcaagagcgccctcaccatccagctgatccagaaccacttcgtcgacgagtacgaccccacgatcgaggactcctaccgcaagcaggtcgtgatcgacggggagacctgcctgctcgacatcctggacaccgcggggcaggaggagtacagcgccatgcgggaccagtacatgcgcaccggcgagggcttcctgtgcgtgttcgccatcaacaactccaagagcttcgccgacatcaacctctaccgggagcagatcaagcgcgtgaaggactccgacgacgtgccgatggtcctggtggggaacaagtgcgacctgcccacgcggaccgtggacaccaagcaggcccacgagctcgccaagagctacggcatccccttcatcgagacctccgcgaagacgcgccagggggtcgaggacgccttctacaccctggtgcgggagatccgccagtaccggatgaagaagctgaacagctccgacgacggcacccaggggtgcatgggcctcccctgcgtggtcatgtga

SEQ ID NO: 1435 - RNA, 546 nt, synthetic construct
  misc_feature 1..546: note = AAB84001_variant
  source 1..546: mol_type = other RNA
atgtgcaagggcctggccgccctcccccacagctgcctggagcgcgcgaaggagatcaagatcaagctggggatcctcctgcagaagccggactccgtgggcgacctggtcatcccctacaacgagaagcccgagaagcccgccaagacccagaagaccagcctcgacgaggccctgcagtggcgggactccctggacaagctcctgcagaacaactacgggctggccagcttcaagtccttcctcaagagcgagttctccgaggagaacctggagttctggatcgcctgcgaggactacaagaagatcaagagcccggcgaagatggccgagaaggccaagcagatctacgaggagttcatccagacggaggcccccaaggaggtgaacatcgaccacttcaccaaggacatcaccatgaagaacctggtggagccctccctcagctccttcgacatggcgcagaagcgcatccacgccctgatggagaaggacagcctgccccggttcgtccgctccgagttctaccaggagctcatcaagtga

SEQ ID NO: 1436 - RNA, 2175 nt, synthetic construct
  misc_feature 1..2175: note = CCDS4362.1_variant
  source 1..2175: mol_type = other RNA
atgagcttccccaaggccccgctgaagcgcttcaacgacccctccggctgcgcccccagccccggggcgtacgacgtgaagaccctcgaggtcctgaagggcccggtgtccttccagaagtcccagcggttcaagcagcagaaggagagcaagcagaacctgaacgtggacaaggacaccacgctccccgccagcgcccgcaaggtcaagtccagcgagtccaaggagagccagaagaacgacaaggacctgaagatcctggagaaggagatccgggtgctcctgcaggagcgcggggcccaggaccggcgcatccaggacctggagaccgagctcgagaagatggaggcccggctgaacgcggccctgcgcgagaagacctccctcagcgccaacaacgccaccctggagaagcagctgatcgagctcacgcggaccaacgagctgctgaagtccaagttcagcgagaacggcaaccagaagaacctccgcatcctgtccctggagctcatgaagctgcggaacaagcgcgagaccaagatgcgggggatgatggcgaagcaggagggcatggagatgaagctccaggtgacccagcgcagcctggaggagtcccagggcaagatcgcccagctggaggggaagctggtcagcatcgagaaggagaagatcgacgagaagtccgagacggagaagctcctggagtacatcgaggagatcagctgcgccagcgaccaggtggagaagtacaagctggacatcgcccagctcgaggagaacctgaaggagaagaacgacgagatcctgtccctcaagcagagcctggaggagaacatcgtgatcctgtccaagcaggtcgaggacctcaacgtgaagtgccagctgctggagaaggagaaggaggaccacgtgaaccggaaccgcgagcacaacgagaacctcaacgccgagatgcagaacctgaagcagaagttcatcctggagcagcaggagcgggagaagctccagcagaaggagctgcagatcgacagcctgctccagcaggagaaggagctgtccagctccctgcaccagaagctctgcagcttccaggaggagatggtcaaggagaagaacctgttcgaggaggagctgaagcagaccctggacgagctcgacaagctgcagcagaaggaggagcaggcggagcgcctggtgaagcagctcgaggaggaggccaagtcccgggccgaggagctgaagctgctcgaggagaagctgaagggcaaggaggccgagctggagaagtccagcgccgcgcacacccaggccaccctcctgctgcaggagaagtacgacagcatggtgcagtccctcgaggacgtcacggcccagttcgagagctacaaggccctgaccgcctccgagatcgaggacctgaagctcgagaacagctccctgcaggagaaggcggccaaggccgggaagaacgccgaggacgtgcagcaccagatcctggccaccgagagctccaaccaggagtacgtgcgcatgctcctggacctgcagaccaagagcgcgctcaaggagacggagatcaaggagatcaccgtcagcttcctgcagaagatcaccgacctgcagaaccagctcaagcagcaggaggaggacttccggaagcagctggaggacgaggagggccgcaaggccgagaaggagaacaccacggccgagctgaccgaggagatcaacaagtggcgcctcctgtacgaggagctgtacaacaagaccaagcccttccagctccagctggacgccttcgaggtggagaagcaggcgctgctcaacgagcacggggccgcccaggagcagctgaacaagatccgggactcctacgccaagctgctcggccaccagaacctgaagcagaagatcaagcacgtggtcaagctgaaggacgagaacagccagctcaagtccgaggtgagcaagctgcgctgccagctggccaagaagaagcagtccgagaccaagctccaggaggagctgaacaaggtgctgggcatcaagcacttcgaccccagcaaggcgttccaccacgagtccaaggagaacttcgccctcaagacgccgctgaaggaggggaacaccaactgctaccgggcccccatggagtgccaggagagctggaagtga

SEQ ID NO: 1437 - RNA, 582 nt, synthetic construct
  misc_feature 1..582: note = AAC33179_variant
  source 1..582: mol_type = other RNA
atggccgccatccgcaagaagctggtgatcgtcggcgacggggcgtgcggcaagacctgcctcctgatcgtgttcagcaaggaccagttccccgaggtgtacgtcccgaccgtgttcgagaactacatcgccgacatcgaggtggacgggaagcaggtcgagctggccctctgggacacggccggccaggaggactacgaccggctgcgccccctgtcctaccccgacaccgacgtgatcctcatgtgcttcagcatcgactcccccgacagcctggagaacatcccggagaagtggacccccgaggtgaagcacttctgccccaacgtccccatcatcctggtggggaacaagaaggacctccggcaggacgagcacacccgccgggagctggccaagatgaagcaggagccggtgcgctccgaggagggccgggacatggcgaaccgcatcagcgccttcggctacctggagtgctccgccaagacgaaggagggggtccgggaggtgttcgagatggccacccgcgcgggcctccaggtgcggaagaacaagcgccggcgcgggtgccccatcctgtga

SEQ ID NO: 1438 - RNA, 888 nt, synthetic construct
  misc_feature 1..888: note = AAA36161_variant
  source 1..888: mol_type = other RNA
atgagcggcgccctggacgtgctccagatgaaggaggaggacgtcctgaagttcctggccgcggggacccacctcggcgggaccaacctggacttccagatggagcagtacatctacaagcgcaagtccgacggcatctacatcatcaacctgaagcggacgtgggagaagctcctgctggccgcccgcgccatcgtggccatcgagaaccccgcggacgtgagcgtcatctccagccggaacaccgggcagcgcgccgtgctcaagttcgccgccgcgaccggcgccaccccgatcgccggccggttcacgcccgggaccttcaccaaccagatccaggccgccttccgcgagccccggctgctggtggtcaccgacccccgcgcggaccaccagccgctcacggaggcctcctacgtgaacctgcccaccatcgccctgtgcaacaccgacagccccctccggtacgtggacatcgccatcccctgcaacaacaagggcgcccactccgtcgggctgatgtggtggatgctggcgcgcgaggtgctccggatgcgcggcaccatcagccgggagcacccgtgggaggtgatgcccgacctgtacttctaccgcgaccccgaggagatcgagaaggaggagcaggccgccgccgagaaggccgtcacgaaggaggagttccagggggagtggaccgcgcccgccccggagttcaccgccacccagcccgaggtggccgactggtccgagggcgtgcaggtccccagcgtgcccatccagcagttcccgacggaggactggtccgcccagcccgcgaccgaggactggagcgccgcccccaccgcccaggcgaccgagtgggtgggcgccacgaccgactggtcctga

SEQ ID NO: 1439 - RNA, 2601 nt, synthetic construct
  misc_feature 1..2601: note = AAH14614_variant
  source 1..2601: mol_type = other RNA
atgaacggcgagcagcagctggacgccgacgccgggagcggcatggaggaggtggagctctcctgggaggactacctggaggagaccgggagcaccgcggtcccctacggctccttcaagcacgtggacacgcgcctgcagaacgggttcgccccgggcatgaagctcgaggtggccgtccggaccgaccccgagacctactgggtggccaccgtgatcacgacctgcgagcagctgctgctcctgcgctacgacggctacggggaggaccggcgcgccgacttctggtgcgacatccggaaggcggacctgtaccccatcggctggtgcgagcagaacaagaagaccctcgaggcccccgaggggatccgcgacaaggtcagcgactgggacgagttcctgcggcagaccctgatcggcgcctgctccccgcccgtgcccctcctggaggggctgcgcaacggccggaaccccctcgacctgatcgccccgggcagccgcctggagtgccaggcgttccaggactccctcagcacgtggatcgtgaccgtcgtggagaacatcgggggccggctgaagctgcgctacgaggggctcgagtccagcgacaactacgagcactggctgtactacctggaccccttcctccaccacgtgggctgggccgcccagcagggctacgagctgcagccgccctccgccatccggcacctgaagaacgaggccgagtggcaggagatcctcgcgaaggtcaaggaggaggaggaggagcccctgcccagctacctgttcaaggacaagcaggtcatcgggatccacaccttctccgtgaacatgaagctcgaggccgtggacccctggagccccttcggcatctccccggccaccgtggtgaaggtcttcgacgagaagtacttcctggtggagatggacgacctgcgccccgagaaccacgcccggcgcagcttcgtgtgccacgccgactcccccgggatcttccccgtccagtggagcctcaagaacggcctgcacatctccccgccgcccgggtaccccagccaggacttcgactgggcggactacctgaagcagtgcggcgccgaggccgcgccccagcggtgcttcccgcccctcatcagcgagcacgagttcaaggagaacatgaagctggaggccgtgaaccccatcctgcccgaggaggtgtgcgtcgccacgatcaccgccgtgcgcggctcctacctctggctgcagctggaggggagcaagaagcccatccccgagtgcatcgtctccgtggagagcatggacatcttcccgctcggctggtgcgagaccaacgggcaccccctgtccacgccccggcgcgcccgggtgtacaagcagcgcaagatcgccgtcgtgcagcccgagaagcaggtcccgagctcccgcaccgtgcacgagggcctgcggaaccaggagctcaacagcaccgagtccgtgatgatcaacgggaagtactgctgccccaagatctacttcaaccaccgctgcttcagcggcccctacctgaacaagggccggatcgccgagctgccccagtgcgtggggccgggcaactgcgtcctcgtgctgcgcgaggtgctgaccctgctcatcaacgcggcctacaagccctcccgggtcctgcgcgagctgcagctcgacaaggacagcgtgtggcacgggtgcggcgaggtgctgaaggccaagtacaaggggaagtcctaccgggccaccgtcgagatcgtgaagacggcggaccgcgtgaccgagttctgccggcagacctgcatcaagctggagtgctgccccaacctcttcggcccccgcatggtcctggacaagtgcagcgagaactgctccgtgctgaccaagacgaagtacacccactactacggcaagaagaagaacaagcggatcgggcgcccgcccggcgggcacagcaacctcgcctgcgccctgaagaaggcctccaagcggcgcaagcggcgcaagaacgtgttcgtccacaagaagaagcggagctccgccagcgtggacaacacccccgcgggcagcccccagggctccgggggcgaggacgaggacgacccggacgagggggacgacgacagcctgtccgagggcagcacctccgagcagcaggacgagctccaggaggagagcgagatgtccgagaagaagtcctgcagcagctcccccacgcagagcgagatctccaccagcctgccgcccgaccgccagcggcgcaagcgcgagctgcggaccttctccttcagcgacgacgagaacaagccgccctcccccaaggagatccgcatcgaggtggccgagcggctccacctggacagcaaccccctgaagtggagcgtcgccgacgtggtgcgcttcatccggtccaccgactgcgcgcccctcgcccgcatcttcctggaccaggagatcgacgggcaggccctgctcctgctgacgctccccaccgtccaggagtgcatggacctgaagctgggccccgccatcaagctctgccaccacatcgagcggatcaagttcgccttctacgagcagttcgccaactga

SEQ ID NO: 1440 - RNA, 1431 nt, synthetic construct
  misc_feature 1..1431: note = CCDS4550.1_variant
  source 1..1431: mol_type = other RNA
atgagcggctccagcgcccgctccagccacctgtcccagcccgtggtcaagagcgtgctcgtgtaccggaacggggacccgttctacgccggccgccgggtcgtgatccacgagaagaaggtgtccagcttcgaggtcttcctgaaggaggtgaccgggggcgtgcaggcgcccttcggggccgtccgcaacatctacacgccccggacgggccaccgcatccggaagctggaccagatccagtccggcgggaactacgtggccggcgggcaggaggccttcaagaagctcaactacctggacatcggcgagatcaagaagcgccccatggaggtggtcaacaccgaggtgaagccggtgatccacagccggatcaacgtctccgcccgcttccggaagcccctgcaggagccctgcaccatcttcctcatcgcgaacggggacctgatcaaccccgccagccgcctgctcatcccgcggaagaccctgaaccagtgggaccacgtgctgcagatggtgacggagaagatcaccctccgctccggcgccgtccaccggctgtacaccctggagggcaagctcgtggagagcggggccgagctggagaacggccagttctacgtggcggtcgggcgcgacaagttcaagaagctgccctactccgagctcctgttcgacaagagcaccatgcggcgccccttcggccagaaggcctccagcctgcccccgatcgtgggctcccgcaagagcaaggggagcggcaacgaccggcactccaagagcacggtggggtccagcgacaactccagcccccagcccctcaagcggaagggcaagaaggaggacgtcaactccgagaagctgaccaagctgaagcagaacgtgaagctcaagaacagccaggagaccatccccaactccgacgaggggatcttcaaggccggcgccgagcgcagcgagacccgcggcgccgcggaggtccaggaggacgaggacacccaggtggaggtgccggtcgaccagcggcccgccgagatcgtggacgaggaggaggacggggagaaggccaacaaggacgccgagcagaaggaggacttctccggcatgaacggggacctggaggaggagggcgggcgcgaggccaccgacgcgcccgagcaggtcgaggagatcctggaccacagcgagcagcaggcccggcccgcccgcgtgaacggcggcaccgacgaggagaacggggaggagctccagcaggtcaacaacgagctgcagctggtgctcgacaaggagcggaagtcccagggcgccgggagcggccaggacgaggccgacgtggacccgcagcgcccgccccggcccgaggtgaagatcacctcccccgaggagaacgagaacaaccagcagaacaaggactacgcggccgtggcctga

SEQ ID NO: 1441 - RNA, 1362 nt, synthetic construct
  misc_feature 1..1362: note = BAA07903_variant
  source 1..1362: mol_type = other RNA
atgcgcatccccgtggacgccagcacctcccggcgcttcaccccgcccagcacggccctgtcccccggcaagatgagcgaggcgctccccctgggggccccggacgccggcgccgccctggcggggaagctccggtccggcgaccgcagcatggtcgaggtgctggccgaccaccccggggagctggtgcggaccgactcccccaacttcctctgcagcgtcctgcccacccactggcgctgcaacaagaccctgccgatcgccttcaaggtggtggccctcggcgacgtccccgacggcacgctggtgaccgtgatggcggggaacgacgagaactactccgccgagctgcggaacgccaccgccgccatgaagaaccaggtcgcgcgcttcaacgacctccggttcgtgggccgcagcgggcggggcaagtccttcaccctgacgatcaccgtgttcaccaacccgccccaggtcgccacctaccaccgcgccatcaagatcacggtggacgggccccgggagccccgccggcaccgccagaagctggacgaccagaccaagcccggcagcctctccttcagcgagcggctgtccgagctggagcagctccgccggaccgccatgcgcgtgagcccccaccacccggcccccacccccaacccccgggcgtccctgaaccacagcacggccttcaacccgcagccccagtcccagatgcaggacacccgccagatccagcccagcccgccctggagctacgaccagtcctaccagtacctgggcagcatcgcctcccccagcgtccaccccgccacccccatctccccggggcgcgccagcggcatgaccacgctctccgcggagctgagctcccggctgagcaccgcccccgacctcaccgccttctccgacccccgccagttcccggccctgcccagcatctccgacccccggatgcactaccccggggccttcacctacagcccgacgcccgtgacctccggcatcggcatcgggatgagcgcgatgggctccgccacccgctaccacacctacctgcccccgccctaccccgggagctcccaggcccagggcgggcccttccaggccagcagcccctcctaccacctctactacggcgcgagcgccggctcctaccagttcagcatggtcgggggcgagcggtccccgccccgcatcctgccgccctgcacgaacgccagcaccgggtccgccctgctcaaccccagcctgcccaaccagtccgacgtggtggaggccgagggcagccactccaacagccccaccaacatggcgccctccgcccggctggaggaggccgtgtggcgcccgtactga

SEQ ID NO: 1442 - RNA, 1080 nt, synthetic construct
  misc_feature 1..1080: note = ACI46041_variant
  source 1..1080: mol_type = other RNA
atgcccctggagctcgagctgtgccccggccgctgggtcgggggccagcacccctgcttcatcatcgccgagatcgggcagaaccaccagggcgacctggacgtggccaagcggatgatccgcatggcgaaggagtgcggggccgactgcgccaagttccagaagtccgagctcgagttcaagttcaaccggaaggccctggagcgcccctacaccagcaagcacagctggggcaagacctacggcgagcacaagcggcacctggagttctcccacgaccagtaccgcgagctccagcggtacgccgaggaggtggggatcttcttcacggcgagcggcatggacgagatggccgtggagttcctgcacgagctgaacgtccccttcttcaaggtggggtccggcgacaccaacaacttcccgtacctcgagaagaccgccaagaaggggcgccccatggtgatcagctccggcatgcagagcatggacaccatgaagcaggtctaccagatcgtgaagcccctgaaccccaacttctgcttcctgcagtgcacgtccgcctacccgctccagcccgaggacgtgaacctgcgggtcatcagcgagtaccagaagctgttccccgacatccccatcggctactccgggcacgagaccggcatcgcgatcagcgtggccgccgtggccctcggggccaaggtcctggagcgccacatcaccctggacaagacctggaagggctccgaccacagcgcgtccctcgagccgggcgagctggccgagctggtgcggagcgtgcgcctcgtcgagcgggccctggggtcccccacgaagcagctgctcccctgcgagatggcctgcaacgagaagctgggcaagagcgtggtggccaaggtcaagatccccgaggggaccatcctgaccatggacatgctcaccgtgaaggtgggcgagccgaaggcgtacccgcccgaggacatcttcaacctggtcgggaagaaggtgctggtgacggtcgaggaggacgacaccatcatggaggagctcgtggacaaccacggcaagaagatcaagtcctga

SEQ ID NO: 1443 - RNA, 2715 nt, synthetic construct
  misc_feature 1..2715: note = CCDS14652.1_variant
  source 1..2715: mol_type = other RNA
atgcaggccagccccctgcagacctcccagcccaccccgcccgaggagctgcacgccgcggcctacgtgttcaccaacgacggccagcagatgcgcagcgacgaggtcaacctggtggccaccgggcaccagtccaagaagaagcacagccggaagtccaagcgccacagctccagcaagcggcgcaagtccatgagctcctggctggacaagcaggaggacgccgccgtgacccacagcatctgcgaggagcggatcaacaacggccagcccgtcgcggacaacgtgctctccaccgccccgccctggcccgacgccacgatcgcccacaacatccgcgaggagcggatggagaacgggcagagccgcaccgacaaggtgctgtccaccgcgcccccgcagctggtccacatggccgccgccggcatccccagcatgtccacccgggacctccacagcacggtgacccacaacatccgcgaggagcggatggagaacgggcagccccagcccgacaacgtgctgtccaccggcccgaccggcctgatcaacatggccgcgacgcccatccccgccatgagcgcccgcgacctctacgccaccgtcacccacaacgtgtgcgagcagaagatggagaacgtgcagcccgccccggacaacgtcctgctgaccctccggccccgccggatcaacatgacggacaccgggatcagccccatgtccacccgcgacccctacgcgaccatcacgtacaacgtgccggaggagaagatggagaagggccagccccagcccgacaacatcctgagcaccgcctccaccgggctgatcaacgtggccggcgccgggacccccgccatcagcacgaacggcctctactccaccgtcccgcacaacgtgtgcgaggagaagatggagaacgaccagccccagcccaacaacgtgctgagcaccgtccagcccgtgatcatctacctgaccgcgacgggcatccccgggatgaacacccgggaccagtacgccaccatcacccacaacgtgtgcgaggagcgcgtcgtgaacaaccagcccctcccctccaacgccctgagcacggtgctgccgggcctcgcctacctggccaccgcggacatgcccgccatgtccacccgggaccagcacgccaccatcatccacaacctgcgcgaggagaagaaggacaacagccagcccacgcccgacaacgtcctctccgccgtgaccccggagctgatcaacctggcgggggccggcatcccgcccatgagcacccgggaccagtacgccaccgtcaaccaccacgtgcacgaggcccgcatggagaacggccagcgcaagcaggacaacgtgctctccaacgtcctgagcgggctgatcaacatggccggcgcgtccatccccgccatgagctcccgggacctctacgccaccatcacgcacagcgtgcgcgaggagaagatggagtccgggaagccccagaccgacaaggtgatcagcaacgacgcgccccagctgggccacatggccgccgggggcatccccagcatgtccaccaaggacctgtacgccaccgtcacgcagaacgtgcacgaggagcggatggagaacaaccagccccagccgagctacgacctctccaccgtgctgcccggcctgacctacctcaccgtcgccgggatccccgccatgagcacgcgcgaccagtacgccaccgtgacccacaacgtgcacgaggagaagatcaagaacggccaggcggcctccgacaacgtcttcagcaccgtgcccccggccttcatcaacatggccgcgacgggggtgtccagcatgtccacccgggaccagtacgccgccgtcacccacaacatccgcgaggagaagatcaacaacagccagcccgcccccggcaacatcctgtccaccgcgccgccctggctgcggcacatggccgccgccgggatcagctccacgatcacccgcgacctctacgtgaccgccacccacagcgtgcacgaggagaagatgacgaacggccagcaggcccccgacaactccctgagcaccgtcccgcccggctgcatcaacctgtccggggcgggcatcagctgccggagcacccgcgacctctacgccaccgtgatccacgacatccaggaggaggagatggagaacgaccagacgccgcccgacgggttcctgtccaacagcgactcccccgagctgatcaacatgaccggccactgcatgccgcccaacgccctcgacagcttctcccacgacttcaccagcctgtccaaggacgagctgctctacaagcccgacagcaacgagttcgccgtggggaccaagaactactccgtcagcgccggcgacccgcccgtgacggtgatgtccctggtcgagaccgtgcccaacacgccccagatcagccccgcgatggccaagaagatcaacgacgacatcaagtaccagctgatgaaggaggtgcggcgcttcggccagaactacgagcggatcttcatcctgctcgaggaggtccaggggtccatgaaggtgaagcgccagttcgtggagttcaccatcaaggaggccgcccggttcaagaaggtcgtgctgatccagcagctggagaaggcgctcaaggagatcgacagccactgccacctccgcaaggtgaagcacatgcggaagcgctga

SEQ ID NO: 1444 - RNA, 2403 nt, synthetic construct
  misc_feature 1..2403: note = AAH01058_variant
  source 1..2403: mol_type = other RNA
atgggcagctccaagaagcaccgcggggagaaggaggccgccggcaccaccgcggccgccgggacgggcggggccaccgagcagcccccgcggcaccgcgagcacaagaagcacaagcaccggagcggcggctccgggggcagcgggggcgagcgccggaagcgctcccgggagcgcgggggcgagcggggcagcgggcgccggggcgccgaggcggaggcccgctccagcacccacgggcgggagcgctcccaggccgagcccagcgagcggcgcgtgaagcgggagaagcgcgacgacggctacgaggccgcggcctccagcaagacctccagcggcgacgcctccagcctgtccatcgaggagacgaacaagctccgggccaagctggggctgaagcccctcgaggtcaacgccatcaagaaggaggcgggcaccaaggaggagcccgtgaccgccgacgtgatcaacccgatggccctgcgccagcgggaggagctgcgcgagaagctcgccgccgcgaaggagaagcgcctgctgaaccagaagctcgggaagatcaagaccctgggcgaggacgacccctggctggacgacacggccgcctggatcgagcggagccgccagctccagaaggagaaggacctggccgagaagcgggccaagctgctcgaggagatggaccaggagttcggggtctccaccctggtggaggaggagttcggccagcgccggcaggacctgtacagcgcgcgcgacctccagggcctgaccgtggagcacgccatcgacagcttccgggagggggagaccatgatcctgacgctcaaggacaagggcgtcctgcaggaggaggaggacgtgctggtgaacgtcaacctcgtggacaaggagcgcgccgagaagaacgtggagctgcggaagaagaagcccgactacctgccctacgccgaggacgagtccgtcgacgacctcgcccagcagaagccgcgcagcatcctgtccaagtacgacgaggagctggagggggagcggccccacagcttccgcctcgagcagggcgggaccgcggacggcctgcgggagcgcgagctggaggagatccgggccaagctccgcctgcaggcccagtccctgagcaccgtgggcccccggctcgcctccgagtacctgacccccgaggagatggtgacgttcaagaagaccaagcgccgggtcaagaagatccgcaagaaggagaaggaggtggtggtccgcgcggacgacctgctcccgctgggggaccagacccaggacggcgacttcgggagccggctgcgcggccgggggcgccggcgcgtgtccgaggtggaggaggagaaggagcccgtcccccagcccctcccgagcgacgacacccgggtggagaacatggacatctccgacgaggaggagggcggcgccccgccgcccgggagcccccaggtgctggaggaggacgaggccgagctggagctccagaagcagctggagaagggccgccggctgcgccagctccagcagctgcagcagctgcgggactccggggagaaggtcgtggagatcgtcaagaagctggagagccgccagcggggctgggaggaggacgaggaccccgagcgcaagggcgccatcgtgttcaacgccacgtccgagttctgccggaccctcggggagatccccacctacggcctggcggggaaccgcgaggagcaggaggagctgatggacttcgagcgggacgaggagcgcagcgccaacggcgggtccgagagcgacggcgaggagaacatcggctggtccaccgtgaacctcgacgaggagaagcagcagcaggacttcagcgccagctccacgaccatcctggacgaggagcccatcgtcaaccgggggctggccgccgcgctcctgctgtgccagaacaagggcctcctggagaccaccgtgcagaaggtggcccgcgtcaaggcccccaacaagagcctgccctccgccgtgtactgcatcgaggacaagatggccatcgacgacaagtacagccggcgcgaggagtaccgcgggttcacgcaggacttcaaggagaaggacggctacaagcccgacgtgaagatcgagtacgtcgacgagaccgggcggaagctcacccccaaggaggcgttccgccagctgtcccaccggttccacggcaagggcagcgggaagatgaagaccgagcgccggatgaagaagctggacgaggaggccctcctgaagaagatgtccagctccgacacgccgctgggcaccgtggccctcctgcaggagaagcagaaggcccagaagaccccctacatcgtgctgagcgggtccggcaagagcatgaacgcgaacaccatcacgaagtga

SEQ ID NO: 1445 - RNA, 2877 nt, synthetic construct
  misc_feature 1..2877: note = AAF00087_variant
  source 1..2877: mol_type = other RNA
atgcgcacccacacccggggcgcccccagcgtgttcttcatctacctgctctgcttcgtctccgcctacatcacggacgagaacccggaggtgatgatccccttcaccaacgcgaactacgacagccaccccatgctgtacttctcccgcgccgaggtggccgagctgcagctccgggccgccagctcccacgagcacatcgcggcccgcctgaccgaggccgtccacaccatgctgagcagccccctcgagtacctgccgccctgggaccccaaggactactccgcccggtggaacgagatcttcgggaacaacctgggcgcgctcgccatgttctgcgtgctgtaccccgagaacatcgaggcccgcgacatggccaaggactacatggagcggatggccgcgcagccgtcctggctggtgaaggacgccccctgggacgaggtccccctcgcccacagcctggtggggttcgccacggcctacgacttcctgtacaactacctctccaagacccagcaggagaagttcctggaggtgatcgcgaacgccagcggctacatgtacgagacctcctaccgccgggggtggggcttccagtacctgcacaaccaccagcccaccaactgcatggccctcctgacgggcagcctggtcctcatgaaccaggggtacctgcaggaggcctacctgtggaccaagcaggtcctcaccatcatggagaagtccctggtgctgctccgcgaggtgaccgacggcagcctgtacgagggggtggcctacggctcctacacgacccggagcctgttccagtacatgttcctcgtgcagcgccacttcaacatcaaccacttcgggcacccgtggctgaagcagcacttcgcgttcatgtaccggaccatcctgcccggcttccagcgcaccgtcgccatcgccgactccaactacaactggttctacggccccgagagccagctcgtgttcctggacaagttcgtgatgcggaacgggagcggcaactggctggccgaccagatccgccggaaccgcgtcgtggaggggcccggcacgccgtccaagggccagcggtggtgcaccctccacaccgagttcctgtggtacgacgggagcctgaagtccgtgcccccgcccgacttcggcacccccacgctccactacttcgaggactggggcgtcgtgacctacgggagcgccctgcccgcggagatcaaccgctccttcctgagcttcaagtccgggaagctcggcggccgggccatctacgacatcgtgcaccgcaacaagtacaaggactggatcaaggggtggcgcaacttcaacgccggccacgagcaccccgaccagaacagcttcaccttcgcccccaacggggtcccgttcatcaccgaggcgctgtacggccccaagtacacgttcttcaacaacgtgctgatgttctcccccgccgtcagcaagtcctgcttcagcccctgggtgggccaggtgaccgaggactgctccagcaagtggtccaagtacaagcacgacctcgccgccagctgccaggggcgggtcgtggccgcggaggagaagaacggcgtggtcttcatccgcggggagggcgtgggggcctacaacccgcagctgaacctgaagaacgtgcagcggaacctcatcctgctgcacccccagctgctcctgctggtcgaccagatccacctcggcgaggagagccccctggagaccgccgcctccttcttccacaacgtggacgtgccgttcgaggagaccgtcgtggacggggtgcacggcgccttcatccgccagcgggacggcctgtacaagatgtactggatggacgacacggggtactccgagaaggcgaccttcgccagcgtcacctacccccgcggctacccctacaacgggaccaactacgtgaacgtgacgatgcacctccggagccccatcacccgcgccgcctacctgttcatcggcccgtccatcgacgtccagagcttcaccgtgcacggcgactcccagcagctggacgtgttcatcgccaccagcaagcacgcgtacgccacgtacctctggaccggggaggccaccggccagtccgccttcgcgcaggtcatcgccgaccggcacaagatcctgttcgaccgcaacagcgccatcaagtccagcatcgtgcccgaggtgaaggactacgccgccatcgtcgagcagaacctgcagcacttcaagcccgtgttccagctcctggagaagcagatcctgtcccgggtgcgcaacaccgcgagcttccggaagaccgccgagcgcctcctgcggttctccgacaagcgccagacggaggaggccatcgaccggatcttcgccatcagccagcagcagcagcagcagtccaagagcaagaagaaccgccgggccgggaagcgctacaagttcgtcgacgcggtgcccgacatcttcgcccagatcgaggtgaacgagaagaagatccgccagaaggcccagatcctggcccagaaggagctcccgatcgacgaggacgaggagatgaaggacctgctggacttcgccgacgtcacctacgagaagcacaagaacggcgggctcatcaagggccggttcggccaggcgcgcatggtgaccaccacgcactcccgggcccccagcctgtccgccagctacacccgcctgttcctcatcctgaacatcgccatcttcttcgtgatgctggcgatgcagctcacctacttccagcgggcccagagcctgcacgggcagcgctgcctgtacgccgtcctcctgatcgactcctgcatcctgctctggctgtacagctcctgcagccagtcccagtgctga

SEQ ID NO: 1446 - RNA, 2892 nt, synthetic construct
  misc_feature 1..2892: note = AAH93784_variant
  source 1..2892: mol_type = other RNA
atggccaccgccgcggagaccagcgcctccgagcccgaggccgagagcaaggccggcccgaaggccgacggggaggaggacgaggtgaaggcggcccgcacgcggcgcaaggtcctgtcccgggccgtggccgcggccacctacaagaccatgggccccgcctgggaccagcaggaggagggggtgagcgagtccgacggcgacgagtacgccatggccagctccgcggagagctcccccggggagtacgagtgggagtacgacgaggaggaggagaagaaccagctcgagatcgagcgcctggaggagcagctgagcatcaacgtctacgactacaactgccacgtggacctcatccggctgctgcgcctcgagggcgagctgaccaaggtgcggatggcccgccagaagatgtccgagatcttccccctgacggaggagctctggctggagtggctgcacgacgagatcagcatggcccaggacggcctcgaccgggagcacgtctacgacctgttcgagaaggccgtgaaggactacatctgcccgaacatctggctggagtacgggcagtactccgtgggcgggatcggccagaagggcgggctcgagaaggtccgcagcgtgttcgagcgggccctgtccagcgtgggcctgcacatgaccaaggggctcgcgctgtgggaggcctaccgcgagttcgagtccgccatcgtcgaggccgcccggctggagaaggtgcacagcctcttccgccggcagctggcgatccccctgtacgacatggaggccaccttcgccgagtacgaggagtggtccgaggaccccatccccgagagcgtgatccagaactacaacaaggccctccagcagctggagaagtacaagccgtacgaggaggccctgctccaggcggaggcgccccgcctggccgagtaccaggcctacatcgacttcgagatgaagatcggcgaccccgcccggatccagctgatcttcgagcgcgccctcgtcgagaactgcctggtgcccgacctgtggatccggtacagccagtacctcgaccgccagctgaaggtgaaggacctggtcctctccgtgcacaaccgggccatccgcaactgcccgtggaccgtggccctgtggagccgctacctgctcgccatggagcggcacggggtcgaccaccaggtgatctccgtgacgttcgagaaggcgctgaacgccggcttcatccaggccaccgactacgtcgagatctggcaggcctacctggactacctccgccggcgcgtggacttcaagcaggacagctccaaggagctggaggagctgcgggccgcgttcacccgcgccctcgagtacctgaagcaggaggtcgaggagcggttcaacgagagcggcgacccctcctgcgtgatcatgcagaactgggcccgcatcgaggcccggctgtgcaacaacatgcagaaggcccgcgagctctgggacagcatcatgacccgggggaacgcgaagtacgccaacatgtggctggagtactacaacctggagcgcgcccacggcgacacgcagcactgccggaaggccctgcaccgcgcggtgcagtgcacctccgactaccccgagcacgtctgcgaggtgctcctgaccatggagcggaccgaggggagcctggaggactgggacatcgccgtgcagaagacggagacccgcctcgcccgggtcaacgagcagcgcatgaaggccgccgagaaggaggcggccctggtgcagcaggaggaggagaaggccgagcagcggaagcgcgcccgcgccgagaagaaggcgctgaagaagaagaagaagatccggggccccgagaagcgcggggccgacgaggacgacgagaaggagtggggcgacgacgaggaggagcagccgtccaagcggcgccgggtggagaacagcatccccgccgccggcgagacccagaacgtcgaggtggccgcggggcccgccggcaagtgcgccgccgtggacgtcgagcccccgtccaagcagaaggagaaggcggccagcctcaagcgcgacatgcccaaggtgctgcacgactccagcaaggactccatcaccgtgttcgtcagcaacctgccctactccatgcaggagcccgacacgaagctccggccgctgttcgaggcctgcggggaggtggtgcagatccgccccatcttcagcaaccggggcgacttccgcgggtactgctacgtcgagttcaaggaggagaagtccgccctgcaggccctcgagatggaccgcaagagcgtggagggccggcccatgttcgtgagcccctgcgtcgacaagtccaagaacccggacttcaaggtgttccggtacagcacctccctggagaagcacaagctgttcatcagcggcctccccttctcctgcaccaaggaggagctggaggagatctgcaaggcgcacgggaccgtgaaggacctgcgcctcgtcacgaaccgggccggcaagcccaaggggctggcctacgtggagtacgagaacgagagccaggcctcccaggccgtgatgaagatggacggcatgaccatcaaggagaacatcatcaaggtcgcgatcagcaacccgccccagcgcaaggtgcccgagaagcccgagacccggaaggcccccgggggcccgatgctgctcccccagacctacggcgcccgcgggaagggccggacgcagctgtccctgctcccccgcgccctgcagcggccgagcgccgcggcgccccaggccgagaacgggcccgccgccgcccccgccgtggccgccccggcggccaccgaggcccccaagatgtccaacgccgacttcgccaagctgttcctccgcaagtga

SEQ ID NO: 1447 - RNA, 2283 nt, synthetic construct
  misc_feature 1..2283: note = AAC51668_variant
  source 1..2283: mol_type = other RNA
atgaagacctgggtgaagatcgtcttcggcgtggccaccagcgccgtgctggcgctcctggtcatgtgcatcgtgctgcgcccctcccgggtgcacaacagcgaggagaacacgatgcgcgccctcaccctgaaggacatcctgaacgggaccttctcctacaagaccttcttcccgaactggatcagcggccaggagtacctccaccagtccgccgacaacaacatcgtcctgtacaacatcgagacggggcagagctacaccatcctgtccaaccggaccatgaagtccgtgaacgccagcaactacggcctcagccccgaccgccagttcgtgtacctggagtccgactacagcaagctgtggcggtactcctacaccgccacgtactacatctacgacctcagcaacggggagttcgtccgcggcaacgagctgccccggcccatccagtacctgtgctggtccccggtgggcagcaagctcgcgtacgtgtaccagaacaacatctacctgaagcagcgccccggggacccgcccttccagatcaccttcaacggccgggagaacaagatcttcaacgggatccccgactgggtctacgaggaggagatgctggccaccaagtacgccctctggtggtcccccaacggcaagttcctggcctacgcggagttcaacgacaccgacatccccgtgatcgcctacagctactacggggacgagcagtacccccgcacgatcaacatcccgtaccccaaggccggcgccaagaaccccgtggtccggatcttcatcatcgacaccacctaccccgcctacgtgggcccgcaggaggtgcccgtccccgcgatgatcgcctccagcgactactacttcagctggctgacctgggtgacggacgagcgcgtgtgcctccagtggctgaagcgggtccagaacgtgtccgtgctgagcatctgcgacttccgcgaggactggcagacctgggactgccccaagacccaggagcacatcgaggagtcccggaccgggtgggccggcgggttcttcgtcagcacgccggtgttctcctacgacgccatcagctactacaagatcttctccgacaaggacggctacaagcacatccactacatcaaggacaccgtcgagaacgccatccagatcaccagcggcaagtgggaggcgatcaacatcttccgcgtgacccaggactccctcttctacagctccaacgagttcgaggagtaccccgggcggcgcaacatctaccggatcagcatcggctcctacccgcccagcaagaagtgcgtgacgtgccacctccgcaaggagcggtgccagtactacaccgcctccttcagcgactacgccaagtactacgccctggtctgctacgggcccggcatccccatctccaccctgcacgacgggcgcaccgaccaggagatcaagatcctggaggagaacaaggagctggagaacgccctcaagaacatccagctgcccaaggaggagatcaagaagctggaggtggacgagatcacgctctggtacaagatgatcctgcccccgcagttcgaccgcagcaagaagtaccccctgctcatccaggtgtacggcggcccctgctcccagagcgtccggagcgtgttcgcggtgaactggatctcctacctggccagcaaggaggggatggtcatcgccctggtggacggccgcgggaccgccttccagggcgacaagctcctgtacgccgtgtaccggaagctgggggtctacgaggtggaggaccagatcaccgcggtgcgcaagttcatcgagatgggcttcatcgacgagaagcggatcgccatctggggctggtcctacgggggctacgtcagctccctcgccctggccagcgggaccggcctgttcaagtgcgggatcgcggtggccccggtgtccagctgggagtactacgcctccgtctacacggagcgcttcatgggcctccccaccaaggacgacaacctggagcactacaagaacagcaccgtgatggcccgggccgagtacttccgcaacgtggactacctgctcatccacggcaccgcggacgacaacgtccacttccagaactccgcccagatcgccaaggccctggtgaacgcccaggtggacttccaggcgatgtggtacagcgaccagaaccacgggctgtccggcctgagcacgaaccacctctacacccacatgacccacttcctgaagcagtgcttctccctgagcgactga

SEQ ID NO: 1448 - RNA, 1128 nt, synthetic construct
  misc_feature 1..1128: note = CCDS32839.1_variant
  source 1..1128: mol_type = other RNA
atggacgccctgcagctcgccaacagcgcgttcgccgtggacctgttcaagcagctgtgcgagaaggagcccctcggcaacgtcctgttctccccgatctgcctgagcacctccctcagcctggcccaggtgggggccaagggcgacaccgccaacgagatcggccaggtgctgcacttcgagaacgtcaaggacgtgcccttcgggttccagacggtgacctccgacgtcaacaagctcagctccttctacagcctgaagctgatcaagcgcctctacgtggacaagtccctgaacctgagcaccgagttcatctccagcaccaagcggccctacgcgaaggagctcgagacggtggacttcaaggacaagctggaggagaccaaggggcagatcaacaactccatcaaggacctgaccgacggccacttcgagaacatcctcgccgacaacagcgtcaacgaccagaccaagatcctggtggtgaacgccgcctacttcgtcggcaagtggatgaagaagttctccgagagcgagacgaaggagtgccccttccgcgtgaacaagaccgacaccaagccggtgcagatgatgaacatggaggcgaccttctgcatggggaacatcgactccatcaactgcaagatcatcgagctgcccttccagaacaagcacctcagcatgttcatcctgctgcccaaggacgtcgaggacgagtccacgggcctcgagaagatcgagaagcagctgaacagcgagagcctgtcccagtggaccaaccccagcaccatggccaacgccaaggtgaagctctccatcccgaagttcaaggtggagaagatgatcgaccccaaggcctgcctggagaacctggggctcaagcacatcttcagcgaggacacctccgacttcagcggcatgtccgagacgaagggggtcgccctgagcaacgtgatccacaaggtgtgcctggagatcaccgaggacggcggcgactccatcgaggtccccggggcgcggatcctccagcacaaggacgagctgaacgccgaccaccccttcatctacatcatccgccacaacaagacccggaacatcatcttcttcggcaagttctgcagcccgtga

SEQ ID NO: 1449 - RNA, 1002 nt, synthetic construct
  misc_feature 1..1002: note = AAH06564_variant
  source 1..1002: mol_type = other RNA
atggcctgcagccggcccccgtcccagtgcgagcccaccagcctgccgcccggcccgcccgccgggcgccgccacctccccctgtcccggcgccggcgcgagatgagctccaacaaggagcagcggagcgcggtgttcgtcatcctgttcgccctcatcaccatcctgatcctgtactccagcaactccgccaacgaggtgttccactacggcagcctccgcgggcggtcccgccggcccgtgaacctgaagaagtggagcatcacggacggctacgtccccatcctggggaacaagaccctcccctcccgctgccaccagtgcgtgatcgtgagctccagctcccacctcctgggcaccaagctgggccccgagatcgagcgggccgagtgcaccatccgcatgaacgacgcccccacgaccgggtacagcgcggacgtcggcaacaagaccacctaccgggtggtggcccactccagcgtcttccgcgtgctgcggcgcccgcaggagttcgtgaaccggacgcccgagaccgtcttcatcttctgggggccgcccagcaagatgcagaagccccagggctccctggtgcgcgtgatccagcgggccgggctcgtcttccccaacatggaggcctacgcggtgagccccggccgcatgcgccagttcgacgacctgttccggggcgagaccgggaaggaccgcgagaagtcccacagctggctgtccaccggctggttcacgatggtgatcgccgtcgagctctgcgaccacgtgcacgtgtacgggatggtgcccccgaactactgcagccagcggccccgcctgcagcggatgccctaccactactacgagcccaagggcccggacgagtgcgtcacctacatccagaacgagcactcccgcaagggcaaccaccaccggttcatcaccgagaagcgcgtgttcagctcctgggcccagctgtacgggatcaccttcagccacccctcctggacgtga

SEQ ID NO: 1450 - RNA, 1071 nt, synthetic construct
  misc_feature 1..1071: note = AAC37586_variant
  source 1..1071: mol_type = other RNA
atgagcccctgcggccgcgcccggcgccagacctcccgcggggccatggcggtgctggcctggaagttcccgcggacccggctccccatgggcgccagcgccctgtgcgtcgtggtgctgtgctggctctacatcttccccgtctaccgcctgcccaacgagaaggagatcgtgcagggggtgctgcagcagggcacggcctggcggcgcaaccagaccgcggcccgggccttccgcaagcagatggaggactgctgcgacccggcccacctcttcgcgatgaccaagatgaactcccccatgggcaagagcatgtggtacgacggggagttcctgtactccttcaccatcgacaacagcacgtactccctgttcccccaggccacccccttccagctcccgctgaagaagtgcgccgtcgtgggcaacgggggcatcctgaagaagtccgggtgcggccggcagatcgacgaggccaacttcgtgatgcgctgcaacctcccgcccctgagcagcgagtacaccaaggacgtcgggtccaagagccagctggtgaccgccaacccctccatcatccggcagcgcttccagaacctcctgtggagccggaagacgttcgtggacaacatgaagatctacaaccactcctacatctacatgcccgcgttcagcatgaagaccggcaccgagccctccctgcgcgtctactacaccctcagcgacgtgggcgccaaccagacggtgctgttcgccaaccccaacttcctgcggtccatcgggaagttctggaagtcccgcggcatccacgccaagcggctcagcaccgggctgttcctggtcagcgccgcgctcggcctgtgcgaggaggtggccatctacggcttctggcccttcagcgtgaacatgcacgagcagccgatctcccaccactactacgacaacgtcctgcccttcagcgggttccacgccatgcccgaggagttcctccagctgtggtacctgcacaagatcggcgccctccgcatgcagctggacccctgcgaggacacctccctgcagccgaccagctga

SEQ ID NO: 1451 - RNA, 1257 nt, synthetic construct
  misc_feature 1..1257: note = BAG50894_variant
  source 1..1257: mol_type = other RNA
atgcgcaccaaggccgccggctgcgcggagcggcgccccctgcagccgcggaccgaggccgccgccgcccccgcggggcgcgccatgcccagcgagtacacgtacgtgaagctccggtccgactgcagccgcccctccctgcagtggtacacccgggcccagagcaagatgcgccggccgtccctgctcctgaaggacatcctgaagtgcaccctcctggtcttcggcgtgtggatcctgtacatcctcaagctgaactacaccacggaggagtgcgacatgaagaagatgcactacgtggaccccgaccacgtcaagcgcgcccagaagtacgcgcagcaggtcctgcagaaggagtgccggcccaagttcgccaagaccagcatggccctcctgttcgagcaccgctactccgtggacctgctccccttcgtgcagaaggccccgaaggacagcgaggccgagtccaagtacgacccgcccttcgggttccggaagttcagctccaaggtgcagaccctgctggagctcctgcccgagcacgacctgcccgagcacctcaaggcgaagacctgccgccggtgcgtggtcatcggcagcgggggcatcctgcacggcctggagctcgggcacacgctgaaccagttcgacgtggtgatccgcctgaactccgcccccgtcgagggctacagcgagcacgtggggaacaagaccaccatccggatgacctaccccgagggcgcgcccctctccgacctggagtactacagcaacgacctgttcgtggccgtcctcttcaagtccgtggacttcaactggctgcaggccatggtgaagaaggagacgctgccgttctgggtccgcctcttcttctggaagcaggtcgccgagaagatccccctgcagcccaagcacttccggatcctgaaccccgtgatcatcaaggagaccgccttcgacatcctccagtacagcgagccgcagtcccgcttctgggggcgggacaagaacgtgcccaccatcggcgtgatcgccgtggtcctggccacccacctgtgcgacgaggtgagcctcgccggcttcgggtacgacctgaaccagccccgcacgcccctgcactacttcgacagccagtgcatggcggccatgaacttccagaccatgcacaacgtcaccaccgagacgaagttcctcctgaagctggtgaaggagggcgtggtcaaggacctctccgggggcatcgaccgcgagttctga

SEQ ID NO: 1452 - RNA, 1059 nt, synthetic construct
  misc_feature 1..1059: note = EAW56837_variant
  source 1..1059: mol_type = other RNA
atggacttcctgcgcaacctcttcagccagaccctgagcctgggcagccagaaggagcggctcctggacgagctgaccctcgagggggtggcccgctacatgcagtccgagcggtgccgccgggtcatctgcctggtgggcgccgggatcagcacgtccgcgggcatccccgacttccgcagcccctccaccgggctgtacgacaacctcgagaagtaccacctcccctaccccgaggccatcttcgagatcagctacttcaagaagcaccccgagccgttcttcgccctggccaaggagctgtaccccggccagttcaagcccaccatctgccactacttcatgcggctgctgaaggacaagggcctcctgctgcgctgctacacccagaacatcgacacgctcgagcggatcgccgggctggagcaggaggacctggtggaggcgcacggcaccttctacacctcccactgcgtcagcgcctcctgccgccacgagtaccccctcagctggatgaaggagaagatcttctccgaggtgaccccgaagtgcgaggactgccagagcctggtgaagcccgacatcgtcttcttcggggagtccctgcccgcccggttcttcagctgcatgcagtccgacttcctcaaggtggacctgctgctcgtgatgggcacgagcctgcaggtccagcccttcgcctccctgatcagcaaggcgccgctcagcacgccccgcctgctgatcaacaaggagaaggccgggcagtccgaccccttcctcggcatgatcatgggcctcgggggcgggatggacttcgacagcaagaaggcctaccgggacgtggcctggctgggcgagtgcgaccagggctgcctggccctggcggagctgctcgggtggaagaaggagctggaggacctggtgcgccgggagcacgcctccatcgacgcccagagcggcgccggggtccccaacccgtccaccagcgcctcccccaagaagtccccgccgcccgcgaaggacgaggcccgcaccaccgagcgggagaagccccagtga

SEQ ID NO: 1453 - RNA, 1170 nt, synthetic construct
  misc_feature 1..1170: note = AAD40850_variant
  source 1..1170: mol_type = other RNA
atggccgagcccgaccccagccaccccctggagacccaggccggcaaggtgcaggaggcgcaggacagcgacagcgactccgagggcggggccgccgggggcgaggccgacatggacttcctccgcaacctgttcagccagaccctgtccctcgggagccagaaggagcggctgctggacgagctcacgctggagggcgtcgcccgctacatgcagtccgagcggtgccgccgggtgatctgcctggtgggcgcggggatcagcacctccgccggcatccccgacttccgcagcccctccaccgggctctacgacaacctggagaagtaccacctcccgtaccccgaggccatcttcgagatcagctacttcaagaagcaccccgagcccttcttcgccctggcgaaggagctgtacccgggccagttcaagcccaccatctgccactacttcatgcggctgctcaaggacaaggggctgctgctccgctgctacacgcagaacatcgacaccctggagcggatcgccggcctggagcaggaggacctcgtcgaggcccacggcaccttctacacctcccactgcgtgagcgcctcctgccgccacgagtaccccctgagctggatgaaggagaagatcttctccgaggtgacgcccaagtgcgaggactgccagagcctggtcaagccggacatcgtgttcttcggggagtccctccccgcccggttcttcagctgcatgcagagcgacttcctgaaggtggacctgctcctggtcatgggcacctccctccaggtgcagcccttcgcgagcctgatctccaaggcgcccctgagcaccccgcgcctgctcatcaacaaggagaaggccgggcagtccgaccccttcctgggcatgatcatgggcctcgggggcgggatggacttcgacagcaagaaggcctaccgggacgtggcctggctgggcgagtgcgaccaggggtgcctggccctggccgagctcctgggctggaagaaggagctggaggacctcgtccgccgggagcacgcctccatcgacgcccagagcggcgccggggtgcccaacccctccaccagcgcgtccccgaagaagtccccgccgcccgccaaggacgaggcccgcacgaccgagcgggagaagccccagtga

SEQ ID NO: 1454 - RNA, 1401 nt, synthetic construct
  misc_feature 1..1401: note = AAH02824_variant
  source 1..1401: mol_type = other RNA
atggccgaggagcaggacctgagcgaggtggagctctcccccgtcggcagcgaggagccgcgctgcctgtcccccgggagcgccccctccctgggccccgacgggggcgggggcggcagcgggctccgggcgtccccgggccccggggagctgggcaaggtgaagaaggagcagcaggacggggaggccgacgacgacaagttccccgtgtgcatccgcgaggccgtcagccaggtgctgtccggctacgactggaccctcgtgcccatgccggtccgggtgaacggcgccagcaagtccaagccccacgtgaagcgccccatgaacgccttcatggtctgggcgcaggccgcccggcgcaagctggccgaccagtacccccacctccacaacgcggagctcagcaagaccctggggaagctgtggcggctcctgaacgagtccgacaagcgcccgttcatcgaggaggccgagcggctgcgcatgcagcacaagaaggaccaccccgactacaagtaccagccccggcgccggaagaacggcaaggccgcccagggggaggccgagtgccccggcggcgaggcggagcagggcgggacggccgccatccaggcccactacaagagcgcccacctcgaccaccgccacccgggggagggctcccccatgagcgacgggaaccccgagcacccctccggccagagccacggcccgcccaccccgcccaccacccccaagacggagctgcagtccgggaaggcggaccccaagcgggacggccgcagcatgggggagggcgggaagccccacatcgacttcggcaacgtggacatcggcgagatcagccacgaggtgatgtccaacatggagaccttcgacgtcgccgagctggaccagtacctgcccccgaacgggcaccccggccacgtgagctcctacagcgccgccgggtacggcctggggtccgccctggcggtggccagcggccactccgcctggatcagcaagcccccgggcgtcgccctccccaccgtgtccccgcccggggtggacgccaaggcgcaggtcaagaccgagacggccggcccccaggggccgccccactacaccgaccagcccagcacctcccagatcgcctacaccagcctgtccctgccccactacggcagcgccttcccctccatcagccggccccagttcgactactccgaccaccagcccagcggcccgtactacgggcactccggccaggcgagcgggctctacagcgccttctcctacatgggccccagccagcgccccctgtacacggccatctccgaccccagcccgtccgggccccagagccactcccccacccactgggagcagcccgtgtacaccaccctgagccggccgtga

SEQ ID NO: 1455 - RNA, 456 nt, synthetic construct
  misc_feature 1..456: note = AAH32457_variant
  source 1..456: mol_type = other RNA
atgagcatccccttctccaacacccactaccgcatcccgcagggcttcgggaacctgctcgagggcctgacccgggagatcctgcgcgagcagcccgacaacatccccgccttcgccgcggcctacttcgagagcctcctggagaagcgggagaagacgaacttcgaccccgccgagtgggggtccaaggtggaggaccgcttctacaacaaccacgccttcgaggagcaggagccgcccgagaagtccgaccccaagcaggaggagagccagatcagcggcaaggaggaggagacctccgtcaccatcctggacagctccgaggaggacaaggagaaggaggaggtggccgcggtgaagatccaggccgccttccgggggcacatcgcccgcgaggaggcgaagaagatgaagaccaacagcctccagaacgaggagaaggaggagaacaagtga

SEQ ID NO: 1456 - RNA, 294 nt, synthetic construct
  misc_feature 1..294: note = AAF28420_variant
  source 1..294: mol_type = other RNA
atggacaagcagagctccgccggcggggtgaagcgcagcgtcccctgcgactccaacgaggccaacgagatgatgccggagacccccaccggcgacagcgacccccagcccgcgccgaagaagatgaagacgtccgagagctccaccatcctggtggtgcggtaccgccggaacttcaagcgcaccagccccgaggagctcctgaacgaccacgcccgggagaaccgcatcaaccccctgcagatggaggaggaggagttcatggagatcatggtcgagatccccgccaagtga

SEQ ID NO: 1457 - RNA, 426 nt, synthetic construct
  misc_feature 1..426: note = AAH62750_variant
  source 1..426: mol_type = other RNA
atggagcagcccaccagctccaccaacggcgagaagaccaagagcccgtgcgagtccaacaacaagaagaacgacgagatgcaggaggtgcccaaccgcgtcctggcccccgagcagagcctcaagaagacgaagacctccgagtaccccatcatcttcgtgtactacctgcggaaggggaagaagatcaacagcaaccagctggagaacgagcagtcccaggagaacagcatcaacccgatccagaaggaggaggacgagggcgtggacctctccgaggggagctccaacgaggacgaggacctgggcccctgcgaggggcccagcaaggaggacaaggacctggactccagcgagggctccagccaggaggacgaggacctcggcctgtccgaggggagctcccaggacagcggcgaggactga

SEQ ID NO: 1458 - RNA, 567 nt, synthetic construct
  misc_feature 1..567: note = AAH01003_variant
  source 1..567: mol_type = other RNA
atgaacggcgacgacaccttcgccaagcgcccccgggacgacgccaaggcgagcgagaagcgctccaaggccttcgacgacatcgccacctacttcagcaagaaggagtggaagaagatgaagtactccgagaagatcagctacgtgtacatgaagcggaactacaaggccatgacgaagctggggttcaaggtcaccctcccgcccttcatgtgcaacaagcaggccaccgacttccagggcaacgacttcgacaacgaccacaaccgccggatccaggtggagcacccccagatgaccttcgggcgcctgcaccggatcatccccaagatcatgccgaagaagcccgcggaggacgagaacgactccaagggcgtgagcgaggcctccgggccccagaacgacggcaagcagctgcacccgcccggcaaggccaacatcagcgagaagatcaacaagcgctccgggcccaagcggggcaagcacgcctggacgcaccgcctccgggagcgcaagcagctggtcatctacgaggagatcagcgaccccgaggaggacgacgagtga

SEQ ID NO: 1459 - RNA, 567 nt, synthetic construct
  misc_feature 1..567: note = AAH16957_variant
  source 1..567: mol_type = other RNA
atgaacggcgacgacgccttcgcccgccggcccaccgtgggggcgcagatcccggagaagatccagaaggccttcgacgacatcgccaagtacttcagcaaggaggagtgggagaagatgaaggcctccgagaagatcttctacgtctacatgaagcgcaagtacgaggccatgaccaagctgggcttcaaggcgacgctcccgcccttcatgtgcaacaagcgggccgaggacttccaggggaacgacctggacaacgaccccaaccgcggcaaccaggtggagcggccccagatgaccttcgggcgcctgcagggcatcagccccaagatcatgcccaagaagcccgccgaggagggcaacgactccgaggaggtgccggaggccagcgggccccagaacgacggcaaggagctctgcccgcccgggaagcccaccacctccgagaagatccacgagcggagcggccccaagcgcggggagcacgcgtggacgcaccggctgcgcgagcggaagcagctggtcatctacgaggagatctccgaccccgaggaggacgacgagtga

SEQ ID NO: 1460 - RNA, 567 nt, synthetic construct
  misc_feature 1..567: note = AAC05819_variant
  source 1..567: mol_type = other RNA
atgaacggcgacgacaccttcgcccgccggcccaccgtgggggcccagatcccggagaagatccagaaggcgttcgacgacatcgccaagtacttcagcaaggaggagtgggagaagatgaaggtctccgagaagatcgtgtacgtgtacatgaagcgcaagtacgaggccatgacgaagctgggcttcaaggccatcctccccagcttcatgcggaacaagcgcgtcaccgacttccaggggaacgacttcgacaacgaccccaaccggggcaaccaggtgcagcgcccccagatgaccttcgggcggctgcagggcatcttcccgaagatcatgcccaagaagcccgccgaggagggcaacgtgtccaaggaggtccccgaggcgagcgggccgcagaacgacggcaagcagctgtgcccgcccgggaagcccaccacgtccgagaagatcaacatgatcagcggccccaagcgcggggagcacgcctggacccaccggctccgcgagcggaagcagctggtgatctacgaggagatctccgaccccgaggaggacgacgagtga

SEQ ID NO: 1461 - RNA, 567 nt, synthetic construct
  misc_feature 1..567: note = AAC05820_variant
  source 1..567: mol_type = other RNA
atgaacggcgacgacgccttcgcccgccggccccgcgacgacgcgcagatcagcgagaagctgcggaaggccttcgacgacatcgccaagtacttctccaagaaggagtgggagaagatgaagtccagcgagaagatcgtgtacgtctacatgaagctcaactacgaggtgatgaccaagctggggttcaaggtgaccctgccgcccttcatgcgcagcaagcgggccgccgacttccacggcaacgacttcgggaacgaccgcaaccaccggaaccaggtcgagcgcccccagatgacgttcggctccctccagcggatcttccccaagatcatgccgaagaagcccgcggaggaggagaacgggctgaaggaggtgcccgaggccagcggcccccagaacgacggcaagcagctgtgcccgcccgggaacccctccaccctcgagaagatcaacaagaccagcggccccaagcgcgggaagcacgcctggacccaccggctgcgcgagcggaagcagctggtggtctacgaggagatctccgacccggaggaggacgacgagtga

SEQ ID NO: 1462 - RNA, 888 nt, synthetic construct
  misc_feature 1..888: note = CCDS32420.1_variant
  source 1..888: mol_type = other RNA
atggagctgatccaggacaccagccggcccccgctcgagtacgtgaagggcgtccccctgatcaagtacttcgccgaggccctggggcccctccagtccttccaggcgcgccccgacgacctgctgatcagcacctacccgaagtccggcacgacctgggtgagccagatcctcgacatgatctaccagggcggggacctggagaagtgccaccgcgcccccatcttcatgcgggtgcccttcctggagttcaaggcccccgggatcccgtccggcatggagaccctcaaggacacccccgcgccccgcctgctgaagacgcacctccccctggccctgctcccgcagaccctgctggaccagaaggtcaaggtggtgtacgtcgcccggaacgccaaggacgtggccgtgagctactaccacttctaccacatggccaaggtccaccccgagcccggcacctgggactccttcctcgagaagttcatggtgggggaggtgagctacggctcctggtaccagcacgtccaggagtggtgggagctgagccgcacccaccccgtgctgtacctcttctacgaggacatgaaggagaacccgaagcgggagatccagaagatcctggagttcgtggggcgctccctgcccgaggagacggtcgacttcgtggtgcagcacaccagcttcaaggagatgaagaagaaccccatgaccaactacaccacggtcccccaggagttcatggaccactccatcagcccgttcatgcggaagggcatggcgggggactggaagaccaccttcaccgtggcccagaacgagcgcttcgacgccgactacgccgagaagatggccggctgctccctcagcttccggtccgagctgtga

SEQ ID NO: 1463 - RNA, 3807 nt, synthetic construct
  misc_feature 1..3807: note = CCDS43990.1_variant
  source 1..3807: mol_type = other RNA
atgatcgccgcccccgagatcccgaccgacttcaacctgctccaggagagcgagacccacttctccagcgacacggacttcgaggacatcgagggcaagaaccagaagcaggggaagggcaagacctgcaagaaggggaagaagggccccgcggagaaggggaagggcggcaacgggggcgggaagccgccctccggccccaaccgcatgaacgggcaccaccagcagaacggcgtggagaacatgatgctgttcgaggtcgtgaagatgggcaagagcgccatgcagtccgtggtcgacgactggatcgagagctacaagcacgaccgggacatcgccctgctcgacctgatcaacttcttcatccagtgctccgggtgcaagggcgtggtgaccgccgagatgttccgccacatgcagaacagcgagatcatccggaagatgaccgaggagttcgacgaggactccggggactaccccctgacgatggccggcccccagtggaagaagttcaagagctccttctgcgagttcatcggcgtcctcgtgcgccagtgccagtacagcatcatctacgacgagtacatgatggacaccgtgatctccctgctgaccgggctcagcgactcccaggtccgggcgttccgccacaccagcacgctggccgccatgaagctgatgaccgccctcgtgaacgtggcgctgaacctgtccatcaacatggacaacacccagcggcagtacgaggccgagcgcaacaagatgatcggcaagcgggccaacgagcgcctcgagctgctgctccagaagcggaaggagctgcaggagaaccaggacgagatcgagaacatgatgaacgccatcttcaagggggtcttcgtgcaccgctaccgggacgccatcgcggagatccgcgccatctgcatcgaggagatcggcatctggatgaagatgtacagcgacgccttcctgaacgactcctacctcaagtacgtggggtggaccatgcacgacaagcagggcgaggtccggctgaagtgcctgacggccctccagggcctgtactacaacaaggagctgaacagcaagctcgagctgttcaccagccgcttcaaggaccggatcgtgtccatgaccctggacaaggagtacgacgtggccgtccaggcgatcaagctcctgaccctggtgctccagagctccgaggaggtgctgacggccgaggactgcgagaacgtctaccacctggtgtacagcgcccaccgccccgtggccgtcgccgcgggggagttcctctacaagaagctgttctcccggcgcgacccggaggaggacggcatgatgaagcggcgcgggcgccagggccccaacgccaacctggtgaagaccctcgtcttcttcttcctggagagcgagctgcacgagcacgccgcctacctcgtggactccatgtgggactgcgccaccgagctgctgaaggactgggagtgcatgaacagcctcctgctggaggagcccctctccggggaggaggcgctgaccgaccggcaggagagcgccctgatcgagatcatgctgtgcacgatccgccaggccgccgagtgccacccgcccgtgggccggggcaccgggaagcgcgtcctcaccgcgaaggagaagaagacccagctggacgaccggacgaagatcaccgagctgttcgccgtggccctcccccagctgctggccaagtactccgtggacgccgagaaggtcaccaacctcctgcagctgccccagtacttcgacctcgagatctacaccacgggccgcctggagaagcacctggacgcgctcctgcggcagatccgcaacatcgtggagaagcacaccgacaccgacgtgctggaggcctgcagcaagacctaccacgccctctgcaacgaggagttcacgatcttcaaccgggtcgacatctcccgcagccagctgatcgacgagctggccgacaagttcaaccggctcctggaggacttcctgcaggagggggaggagcccgacgaggacgacgcctaccaggtgctctccaccctgaagcgcatcaccgcgttccacaacgcccacgacctgagcaagtgggacctcttcgcctgcaactacaagctgctgaagaccggcatcgagaacggggacatgccggagcagatcgtgatccacgccctccagtgcacgcactacgtcatcctgtggcagctggccaagatcaccgagtccagctccaccaaggaggacctcctgcggctgaagaagcagatgcgcgtgttctgccagatctgccagcactacctcaccaacgtgaacaccacggtcaaggagcaggcgttcaccatcctgtgcgacatcctgatgatcttcagccaccagatcatgagcggcggccgggacatgctcgagcccctggtgtacacccccgactccagcctgcagtccgagctcctgagcttcatcctggaccacgtgttcatcgagcaggacgacgacaacaactccgccgacgggcagcaggaggacgaggccagcaagatcgaggccctccacaagcgccggaacctgctggcggccttctgcaagctcatcgtctacaccgtggtggagatgaacacggccgccgacatcttcaagcagtacatgaagtactacaacgactacggcgacatcatcaaggagaccatgtccaagacccgccagatcgacaagatccagtgcgccaagaccctgatcctgagcctccagcagctgttcaacgagatgatccaggagaacgggtacaacttcgaccggtccagctccacgttcagcggcatcaaggagctggcgcgccgcttcgccctcaccttcggcctggaccagctgaagacccgggaggccatcgccatgctccacaaggacgggatcgagttcgccttcaaggagcccaacccgcagggcgagtcccacccgcccctgaacctggcgttcctcgacatcctgagcgagttctccagcaagctgctccgccaggacaagcggaccgtctacgtgtacctggagaagttcatgacgttccagatgtccctgcgccgggaggacgtgtggctccccctgatgagctaccgcaacagcctgctcgccgggggcgacgacgacaccatgtccgtcatcagcgggatctccagccggggctccaccgtgcgcagcaagaagtccaagcccagcaccggcaagcggaaggtggtcgaggggatgcagctgtccctgacggaggagagctccagctccgacagcatgtggctctcccgcgagcagaccctgcacacccccgtgatgatgcagacgccccagctgaccagcaccatcatgcgggagcccaagcgcctccggccggaggactccttcatgagcgtgtaccccatgcagaccgagcaccaccagacgcccctggactacaacacccaggtcacctggatgctggcccagcgccagcaggaggaggcccggcagcagcaggagcgcgccgcgatgtcctacgtgaagctccggaccaacctgcagcacgccatccgccggggcaccagcctgatggaggacgacgaggagccgatcgtggaggacgtcatgatgagctccgaggggcgcatcgaggacctcaacgagggcatggacttcgacacgatggacatcgacctgccgcccagcaagaaccggcgcgagcgcaccgagctgaagcccgacttcttcgaccccgcctccatcatggacgagagcgtgctcggggtgtccatgttctga

SEQ ID NO: 1464 - RNA, 1473 nt, synthetic construct
  misc_feature 1..1473: note = CCDS5615.1_variant
  source 1..1473: mol_type = other RNA
atggagagcatctccatgatgggcagccccaagtccctgagcgagaccttcctcccgaacgggatcaacggcatcaaggacgcccgcaaggtgaccgtcggggtgatcggctccggggacttcgccaagagcctgacgatccggctgatccgctgcggctaccacgtggtcatcggctcccggaaccccaagttcgcgagcgagttcttcccccacgtggtggacgtcacccaccacgaggacgccctcaccaagaccaacatcatcttcgtggccatccaccgcgagcactacacgtccctgtgggacctgcggcacctcctggtggggaagatcctgatcgacgtcagcaacaacatgcgcatcaaccagtaccccgagtccaacgccgagtacctcgccagcctgttcccggactccctgatcgtgaagggcttcaacgtggtcagcgcgtgggccctccagctggggcccaaggacgcctcccgccaggtgtacatctgcagcaacaacatccaggcccggcagcaggtcatcgagctggcgcggcagctcaacttcatccccatcgacctgggctccctgagctccgcccgcgagatcgagaacctccccctgcggctgttcaccctctggcgcgggccggtggtggtggccatcagcctggccaccttcttcttcctgtacagcttcgtccgggacgtgatccacccctacgcccgcaaccagcagtccgacttctacaagatccccatcgagatcgtgaacaagaccctccccatcgtcgcgatcacgctgctgagcctcgtgtacctggccggcctgctcgccgccgcctaccagctgtactacggcaccaagtaccggcgcttcccgccctggctggagacctggctccagtgccggaagcagctggggctgctctccttcttcttcgcgatggtgcacgtcgcctacagcctgtgcctgcccatgcgccggtccgagcgctacctcttcctgaacatggcctaccagcaggtccacgccaacatcgagaacagctggaacgaggaggaggtgtggcggatcgagatgtacatctccttcggcatcatgagcctggggctcctgtccctgctcgccgtgaccagcatcccctccgtgagcaacgcgctgaactggcgcgagttctccttcatccagagcacgctgggctacgtcgccctcctgatctccaccttccacgtgctgatctacggctggaagcgcgccttcgaggaggagtactaccggttctacaccccgcccaacttcgtgctggccctcgtcctgcccagcatcgtgatcctggggaagatcatcctcttcctgccctgcatctcccgcaagctgaagcggatcaagaagggctgggagaagtcccagttcctcgaggaggggatgggcgggaccatcccgcacgtgagccccgagcgcgtcacggtgatgtga

SEQ ID NO: 1465 - RNA, 777 nt, synthetic construct
  misc_feature 1..777: note = EAW93749_variant
  source 1..777: mol_type = other RNA
atggagagccgcaaggacatcaccaaccaggaggagatctggaagatgaagccccggcgcaacctggaggacaacgactacctccacaaggacaccggcgagacgtccatgctgaagcggccggtgctgctccacctccagcagaccgcccacgccgacgagttcgactgccccagcgagctgcagcacgcgcaggagctgttcccccagtggcacctccccatcaagatcgccgccgtcatggcctccctgaccttcctgtacaccctgctgcgcgaggtgatccacccgctcgccacgagccaccagcagtacttctacaagatccccatcctggtgatcaacaaggtcctgcccatggtgtccatcaccctcctggcgctggtgtacctccccggggtcatcgccgccatcgtccaggtgcacaacggcaccaagtacaagaagttcccgcactggctggacaagtggatgctgacccggaagcagttcgggctcctgagcctgttcttcgccgtgctccacgcgatctacacgctgtcctacgccatgcgccggagctaccgctacaagctgctcaactgggcctaccagcaggtccagcagaacaaggaggacgcctggatcgagcacgacgtgtggcggatggagatctacgtgtccctgggcatcgtggggctggccatcctcgcgctgctggccgtgaccagcatcccctccgtcagcgactccctcacctggcgcgagttccactacatccaggtgaacaacatctga

SEQ ID NO: 1466 - RNA, 1020 nt, synthetic construct
  misc_feature 1..1020: note = AAD15620_variant
  source 1..1020: mol_type = other RNA
atggagagccgcaaggacatcaccaaccaggaggagctgtggaagatgaagccccggcgcaacctcgaggaggacgactacctgcacaaggacaccggcgagacgtccatgctgaagcggccggtgctcctgcacctccaccagaccgcccacgccgacgagttcgactgccccagcgagctgcagcacacccaggagctgttcccccagtggcacctccccatcaagatcgcggccatcatcgcctccctgaccttcctgtacacgctgctccgcgaggtcatccacccgctggccaccagccaccagcagtacttctacaagatccccatcctggtgatcaacaaggtgctccccatggtctccatcaccctgctggccctcgtgtacctgcccggggtgatcgcggccatcgtccagctgcacaacggcaccaagtacaagaagttcccgcactggctcgacaagtggatgctgacgcggaagcagttcgggctgctcagcttcttcttcgccgtgctgcacgccatctactccctgagctaccccatgcgccggtcctaccgctacaagctcctgaactgggcgtaccagcaggtccagcagaacaaggaggacgcctggatcgagcacgacgtgtggcggatggagatctacgtgagcctgggcatcgtggggctcgccatcctggccctgctcgccgtcacctccatccccagcgtgtccgacagcctgacctggcgcgagttccactacatccagtccaagctgggcatcgtgagcctcctgctgggcaccatccacgcgctcatcttcgcctggaacaagtggatcgacatcaagcagttcgtctggtacacgcccccgaccttcatgatcgccgtgttcctgcccatcgtggtcctgatcttcaagtccatcctcttcctgccctgcctgcggaagaagatcctcaagatccgccacgggtgggaggacgtgaccaagatcaacaagaccgagatctgcagccagctgtga

SEQ ID NO: 1467 - RNA, 498 nt, synthetic construct
  misc_feature 1..498: note = CCDS32752.1_variant
  source 1..498: mol_type = other RNA
atgggcgcccccaccctgccgcccgcctggcagcccttcctcaaggaccaccgcatcagcaccttcaagaactggcccttcctggaggggtgcgcgtgcacgccggagcggatggccgaggccggcttcatccactgccccaccgagaacgagcccgacctggcccagtgcttcttctgcttcaaggagctcgaggggtgggagcccgacgacgacccgatcggccccgggaccgtggcctacgcgtgcaacacctccacgctgggcggccgcgggggccggatcacccgcgaggagcacaagaagcacagctccgggtgcgccttcctgagcgtcaagaagcagttcgaggagctcaccctgggcgagttcctgaagctcgaccgggagcgcgccaagaacaagatcgccaaggagaccaacaacaagaagaaggagttcgaggagacggcggagaaggtgcggcgcgccatcgagcagctggccgccatggactga

SEQ ID NO: 1468 - RNA, 429 nt, synthetic construct
  misc_feature 1..429: note = AAC51660_variant
  source 1..429: mol_type = other RNA
atgggcgcccccaccctgccgcccgcctggcagcccttcctcaaggaccaccgcatcagcaccttcaagaactggcccttcctggaggggtgcgcgtgcacgccggagcggatggccgaggccggcttcatccactgccccaccgagaacgagcccgacctggcccagtgcttcttctgcttcaaggagctcgaggggtgggagcccgacgacgacccgatcgaggagcacaagaagcactccagcggctgcgccttcctgtccgtgaagaagcagttcgaggagctgaccctcggggagttcctgaagctggaccgcgagcgggcgaagaacaagatcgccaaggagaccaacaacaagaagaaggagttcgaggagacggccaagaaggtccgccgggccatcgagcagctcgcggccatggactga

SEQ ID NO: 1469 - RNA, 2931 nt, synthetic construct
  misc_feature 1..2931: note = EAW56623_variant
  source 1..2931: mol_type = other RNA
atggagaagcagaagcccttcgccctgttcgtgccgccccgcagctccagctcccaggtcagcgccgtgaagccccagaccctcggcggggactccaccttcttcaagagcttcaacaagtgcacggaggacgacttcgagttccccttcgcgaagaccaacctgtccaagaacggcgagaacatcgacagcgacccggccctgcagaaggtgaacttcctccccgtcctggagcaggtcgggaactccgactgccactaccaggagggcctgaaggacagcgacctcgagaactccgaggggctgagccgggtgtactccaagctgtacaaggaggccgagaagatcaagaagtggaaggtgagcaccgaggccgagctccgccagaaggagtccaagctgcaggagaaccggaagatcatcgaggcccagcgcaaggcgatccaggagctgcagttcggcaacgagaaggtgagcctcaagctggaggagggcatccaggagaacaaggacctgatcaaggagaacaacgccacccggcacctctgcaacctgctgaaggagacgtgcgcccgctccgccgagaagaccaagaagtacgagtacgagcgggaggagacccgccaggtgtacatggacctcaacaacaacatcgagaagatgatcaccgcgttcgaggagctgcgggtccaggccgagaacagccgcctggagatgcacttcaagctcaaggaggactacgagaagatccagcacctggagcaggagtacaagaaggagatcaacgacaaggagaagcaggtctccctgctcctgatccagatcacggagaaggagaacaagatgaaggacctgaccttcctcctggaggagagccgggacaaggtgaaccagctggaggagaagaccaagctccagagcgagaacctgaagcagtccatcgagaagcagcaccacctgaccaaggagctcgaggacatcaaggtgagcctgcagcgctccgtgagcacgcagaaggccctggaggaggacctccagatcgccaccaagaccatctgccagctgaccgaggagaaggagacgcagatggaggagtccaacaaggcccgggcggcccacagcttcgtggtcaccgagttcgagaccaccgtgtgctccctggaggagctcctgcgcacggagcagcagcggctggagaagaacgaggaccagctcaagatcctgaccatggagctgcagaagaagtccagcgagctcgaggagatgaccaagctgaccaacaacaaggaggtggagctggaggagctcaagaaggtcctgggggagaaggagacgctgctgtacgagaacaagcagttcgagaagatcgccgaggagctcaagggcaccgagcaggagctgatcgggctgctccaggcccgcgagaaggaggtgcacgacctggagatccagctgaccgccatcaccacgagcgagcagtactactccaaggaggtgaaggacctcaagaccgagctggagaacgagaagctgaagaacaccgagctcaccagccactgcaacaagctgtccctggagaacaaggagctcacgcaggagaccagcgacatgaccctggagctgaagaaccagcaggaggacatcaacaacaacaagaagcaggaggagcggatgctcaagcagatcgagaacctgcaggagaccgagacgcagctgcgcaacgagctcgagtacgtccgggaggagctgaagcagaagcgcgacgaggtgaagtgcaagctggacaagtccgaggagaactgcaacaacctccggaagcaggtcgagaacaagaacaagtacatcgaggagctgcagcaggagaacaaggcgctgaagaagaagggcaccgccgagagcaagcagctcaacgtgtacgagatcaaggtgaacaagctggagctggagctcgagtccgccaagcagaagttcggggagatcaccgacacctaccagaaggagatcgaggacaagaagatcagcgaggagaacctgctggaggaggtcgagaaggccaaggtgatcgccgacgaggcggtgaagctccagaaggagatcgacaagcgctgccagcacaagatcgccgagatggtcgccctgatggagaagcacaagcaccagtacgacaagatcatcgaggagcgcgactccgagctgggcctctacaagagcaaggagcaggagcagagctccctgcgggccagcctggagatcgagctctccaacctgaaggccgagctgctcagcgtgaagaagcagctggagatcgagcgcgaggagaaggagaagctgaagcgggaggcgaaggagaacaccgccacgctcaaggagaagaaggacaagaagacccagaccttcctgctggagacccccgagatctactggaagctcgactccaaggccgtgcccagccagacggtctcccgcaacttcaccagcgtggaccacggcatctccaaggacaagcgggactacctgtggaccagcgccaagaacaccctgtccacgccgctccccaaggcgtacaccgtgaagacccccaccaagcccaagctgcagcagcgcgagaacctgaacatcccgatcgaggagagcaagaagaagcggaagatggccttcgagttcgacatcaactccgacagctccgagacgaccgacctcctgagcatggtctccgaggaggagaccctgaagaccctctaccgcaacaacaacccgcccgccagccacctgtgcgtgaagacgcccaagaaggcccccagctccctgaccacccccgggagcaccctcaagttcggcgccatccggaagatgcgcgaggaccggtgggcggtgatcgccaagatggaccgcaagaagaagctgaaggaggccgagaagctgttcgtctga

SEQ ID NO: 1470 - RNA, 2931 nt, synthetic construct
  misc_feature 1..2931: note = AAI44020_variant
  source 1..2931: mol_type = other RNA
atggagaagcagaagcccttcgccctgttcgtgccgccccgcagctccagctcccaggtcagcgccgtgaagccccagaccctcggcggggactccaccttcttcaagagcttcaacaagtgcacggaggacgacttcgagttccccttcgcgaagaccaacctgtccaagaacggcgagaacatcgacagcgacccggccctgcagaaggtgaacttcctccccgtcttcgagcaggtcgggaactccgactgccactaccaggagggcctgaaggacagcgacctggagaactccgaggggctcagccgggtgtactccaagctgtacaaggaggccgagaagatcaagaagtggaaggtgagcaccgaggccgagctgcgccagaaggagtccaagctccaggagaaccggaagatcatcgaggcccagcgcaaggcgatccaggagctgcagttcggcaacgagaaggtgagcctgaagctcgaggagggcatccaggagaacaaggacctgatcaaggagaacaacgccacccggcacctgtgcaacctcctgaaggagacgtgcgcccgctccgccgagaagaccaagaagtacgagtacgagcgggaggagacccgccaggtgtacatggacctgaacagcaacatcgagaagatgatcaccgcgttcgaggagctccgggtccaggccgagaactcccgcctggagatgcacttcaagctgaaggaggactacgagaagatccagcacctcgagcaggagtacaagaaggagatcaacgacaaggagaagcaggtcagcctgctgctcatccagatcacggagaaggagaacaagatgaaggacctgaccttcctgctcgaggagagccgggacaaggtgaaccagctggaggagaagaccaagctgcagtccgagaacctcaagcagagcatcgagaagcagcaccacctgaccaaggagctggaggacatcaaggtgtccctccagcgcagcgtgtccacgcagaaggccctggaggaggacctgcagatcgccaccaagaccatctgccagctcaccgaggagaaggagacgcagatggaggagagcaacaaggcccgggcggcccactccttcgtggtcaccgagttcgagaccaccgtgtgcagcctggaggagctgctccgcacggagcagcagcggctggagaagaacgaggaccagctgaagatcctcaccatggagctgcagaagaagtccagcgagctggaggagatgaccaagctcaccaacaacaaggaggtggagctggaggagctgaagaaggtcctcggggagaaggagacgctgctgtacgagaacaagcagttcgagaagatcgccgaggagctgaagggcaccgagcaggagctcatcgggctgctgcaggcccgcgagaaggaggtgcacgacctcgagatccagctgaccgccatcaccacgtccgagcagtactacagcaaggaggtgaaggacctgaagaccgagctcgagaacgagaagctgaagaacaccgagctgacctcccactgcaacaagctcagcctggagaacaaggagctgacgcaggagacctccgacatgaccctcgagctgaagaaccagcaggaggacatcaacaacaacaagaagcaggaggagcggatgctgaagcagatcgagaacctccaggagaccgagacgcagctgcgcaacgagctggagtacgtccgggaggagctcaagcagaagcgcgacgaggtgaagtgcaagctggacaagagcgaggagaactgcaacaacctgcggaagcaggtcgagaacaagaacaagtacatcgaggagctccagcaggagaacaaggcgctgaagaagaagggcaccgccgagtccaagcagctgaacgtgtacgagatcaaggtgaacaagctcgagctggagctggagagcgccaagcagaagttcggggagatcaccgacacctaccagaaggagatcgaggacaagaagatctccgaggagaacctcctggaggaggtcgagaaggccaaggtgatcgccgacgaggcggtgaagctgcagaaggagatcgacaagcgctgccagcacaagatcgccgagatggtcgccctcatggagaagcacaagcaccagtacgacaagatcatcgaggagcgcgacagcgagctgggcctgtacaagagcaaggagcaggagcagtccagcctccgggcctccctggagatcgagctgagcaacctcaaggccgagctgctgtccgtgaagaagcagctcgagatcgagcgcgaggagaaggagaagctgaagcgggaggcgaaggagaacaccgccacgctgaaggagaagaaggacaagaagacccagaccttcctcctggagacccccgagatctactggaagctggacagcaaggccgtgccctcccagacggtcagccgcaacttcacctccgtggaccacggcatcagcaaggacaagcgggactacctctggacctccgccaagaacaccctgagcacgccgctgcccaaggcgtacaccgtgaagacccccaccaagcccaagctccagcagcgcgagaacctgaacatcccgatcgaggagtccaagaagaagcggaagatggccttcgagttcgacatcaacagcgactccagcgagacgaccgacctgctctccatggtcagcgaggaggagaccctgaagaccctgtaccgcaacaacaacccgcccgccagccacctctgcgtgaagacgcccaagaaggccccctccagcctgaccacccccgggtccaccctgaagttcggcgccatccggaagatgcgcgaggaccggtgggcggtgatcgccaagatggaccgcaagaagaagctcaaggaggccgagaagctgttcgtctga

SEQ ID NO: 1471 - RNA, 2931 nt, synthetic construct; identical to SEQ ID NO: 1469
  misc_feature 1..2931: note = AAI26267_variant
  source 1..2931: mol_type = other RNA

SEQ ID NO: 1472 - RNA, 330 nt, synthetic construct
  misc_feature 1..330: note = AAI05300_variant
  source 1..330: mol_type = other RNA
atggagaagcagaagcccttcgccctgttcgtgccgccccgcagctccagctcccaggtgagcgccgtgaagccccagaccctcggcggggactccaccttcttcaagagcttcaacaagtgcacggaggacgacttcgagttccccttcgcgaagaccaacctgtccaagaacggcgagaacatcgacagcgacccggccctgcagaacgtgaacttcctccccgtcctggagcaggtcgggaactccgactgccactaccaggagggcctgaaggacagcgacctcgagaactccgaggggctgagccgggtgtactccaagctgtga

SEQ ID NO: 1473 - RNA, 1467 nt, synthetic construct
  misc_feature 1..1467: note = BAF56181_variant
  source 1..1467: mol_type = other RNA
atgagcgtggccttcgccgcgccccgccagcggggcaagggggagatcaccccggccgccatccagaagatgctggacgacaacaaccacctcatccagtgcatcatggactcccagaacaagggcaagaccagcgagtgctcccagtaccagcagatgctgcacacgaacctggtctacctcgccaccatcgccgacagcaaccagaacatgcagtccctgctgcccgcgccccccacccagaacatgccgatggggcccggcgggatgaaccagagcggcccccccccgcccccccgctcccacaacatgcccagcgacggcatggtggggggcgggccgcccgccccccacatgcagaaccagatgaacggccagatgcccgggccgaaccacatgcccatgcagggccccggccccaaccagctcaacatgaccaactccagcatgaacatgccgtccagctcccacgggagcatgggcgggtacaaccactccgtgcccagctcccagagcatgcccgtccagaaccagatgacgatgtcccagggccagcccatgggcaactacgggccgcggcccaacatgagcatgcagcccaaccagggccccatgatgcaccagcagccgcccagccagcagtacaacatgccccaggggggcgggcagcactaccagggccagcagccgcccatgggcatgatggggcaggtgaaccagggcaaccacatgatggggcagcgccagatccccccctaccggccgccccagcagggccccccccagcagtactccgggcaggaggactactacggcgaccagtacagccacggcgggcagggcccgcccgaggggatgaaccagcagtactaccccgacggccacaacgactacgggtaccagcagccctcctacccggagcagggctacgaccgcccctacgaggacagctcccagcactactacgagggcgggaacagccagtacggccagcagcaggacgcctaccaggggccccccccgcagcagggctaccccccccagcagcagcagtaccccggccagcaggggtacccgggccagcagcaggggtacggcccctcccaggggggccccggcccccagtacccgaactacccccaggggcagggccagcagtacgggggctaccggcccacccagccggggcccccccagcccccgcagcagcgcccctacggctacgaccagatcatgcccaagaagcccgccgaggacgagaacgacagcaagggcgtgtccgaggcgagcgggccgcagaacgacggcaagcagctgcacccccccgggaaggccaacatctccgagaagatcaacaagcggagcggccccaagcgcgggaagcacgcctggacccaccggctgcgcgagcggaagcagctcgtcatctacgaggagatctccgacccggaggaggacgacgagtga

SEQ ID NO: 1474 - RNA, 1374 nt, synthetic construct
  misc_feature 1..1374: note = BAF56182_variant
  source 1..1374: mol_type = other RNA
atgagcgtggccttcgccgcgccccgccagcggggcaagggggagatcaccccggccgccatccagaagatgctggacgacaacaaccacctcatccagtgcatcatggactcccagaacaagggcaagaccagcgagtgctcccagtaccagcagatgctgcacacgaacctggtctacctcgccaccatcgccgacagcaaccagaacatgcagtccctgctgcccgcgccccccacccagaacatgccgatggggcccggcgggatgaaccagagcggcccccccccgcccccccgctcccacaacatgcccagcgacggcatggtggggggcgggccgcccgccccccacatgcagaaccagatgaacggccagatgcccgggccgaaccacatgcccatgcagggccccggccccaaccagctcaacatgaccaactccagcatgaacatgccgtccagctcccacgggagcatgggcgggtacaaccactccgtgcccagctcccagagcatgcccgtccagaaccagatgacgatgtcccagggccagcccatgggcaactacgggccgcggcccaacatgagcatgcagcccaaccagggccccatgatgcaccagcagccgcccagccagcagtacaacatgccccaggggggcgggcagcactaccagggccagcagccgcccatgggcatgatggggcaggtgaaccagggcaaccacatgatggggcagcgccagatccccccctaccggccgccccagcagggccccccccagcagtactccgggcaggaggactactacggcgaccagtacagccacggcgggcagggcccgcccgaggggatgaaccagcagtactaccccgacggcaactcccagtacgggcagcagcaggacgcctaccagggccccccgccccagcagggctaccccccccagcagcagcagtacccggggcagcagggctaccccgggcagcagcagggctacggccccagccaggggggccccgggccgcagtaccccaactacccccagggccaggggcagcagtacggcggctaccgccccacccagccggggcccccccagccgccccagcagcggccctacggctacgaccagatcatgcccaagaagccggccgaggacgagaacgactccaagggggtgagcgaggcgtccggcccccagaacgacgggaagcagctgcacccccccggcaaggccaacatcagcgagaagatcaacaagcgctccggcccgaagcgggggaagcacgcctggacccaccgcctgcgggagcgcaagcagctcgtcatctacgaggagatcagcgaccccgaggaggacgacgagtga

SEQ ID NO: 1475 - RNA, 1467 nt, synthetic construct
  misc_feature 1..1467: note = BAF56183_variant
  source 1..1467: mol_type = other RNA
atgagcgtggccttcgccgcgccccgccagcggggcaagggggagatcaccccggccgccatccagaagatgctggacgacaacaaccacctcatccagtgcatcatggactcccagaacaagggcaagaccagcgagtgctcccagtaccagcagatgctgcacacgaacctggtctacctcgccaccatcgccgacagcaaccagaacatgcagtccctgctgcccgcgccccccacccagaacatgccgatggggcccggcgggatgaaccagagcggcccccccccgcccccccgctcccacaacatgcccagcgacggcatggtggggggcgggccgcccgccccccacatgcagaaccagatgaacggccagatgcccgggccgaaccacatgcccatgcagggccccggccccaaccagctcaacatgaccaactccagcatgaacatgccgtccagctcccacgggagcatgggcgggtacaaccactccgtgcccagctcccagagcatgcccgtccagaaccagatgacgatgtcccagggccagcccatgggcaactacgggccgcggcccaacatgagcatgcagcccaaccagggccccatgatgcaccagcagccgcccagccagcagtacaacatgccccaggggggcgggcagcactaccagggccagcagccgcccatgggcatgatggggcaggtgaaccagggcaaccacatgatggggcagcgccagatccccccctaccggccgccccagcagggccccccccagcagtactccgggcaggaggactactacggcgaccagtacagccacggcgggcagggcccgcccgaggggatgaaccagcagtactaccccgacggccacaacgactacgggtaccagcagccctcctacccggagcagggctacgaccgcccctacgaggacagctcccagcactactacgagggcgggaacagccagtacggccagcagcaggacgcctaccaggggccccccccgcagcagggctaccccccccagcagcagcagtaccccggccagcaggggtacccgggccagcagcaggggtacggcccctcccaggggggccccggcccccagtacccgaactacccccaggggcagggccagcagtacgggggctaccggcccacccagccggggcccccccagcccccgcagcagcgcccctacggctacgaccagatcatgcccaagaagcccgccgaggagggcaacgacagcgaggaggtgccggaggcgtccgggccccagaacgacggcaaggagctgtgcccccccgggaagccgaccaccagcgagaagatccacgagcggtccggccccaagcgcggggagcacgcctggacgcaccggctgcgcgagcggaagcagctcgtcatctacgaggagatcagcgaccccgaggaggacgacgagtga

SEQ ID NO: 1476 - RNA, 1374 nt, synthetic construct
  misc_feature 1..1374: note = BAF56184_variant
  source 1..1374: mol_type = other RNA
atgagcgtggccttcgccgcgccccgccagcggggcaagggggagatcaccccggccgccatccagaagatgctggacgacaacaaccacctcatccagtgcatcatggactcccagaacaagggcaagaccagcgagtgctcccagtaccagcagatgctgcacacgaacctggtctacctcgccaccatcgccgacagcaaccagaacatgcagtccctgctgcccgcgccccccacccagaacatgccgatggggcccggcgggatgaaccagagcggcccccccccgcccccccgctcccacaacatgcccagcgacggcatggtggggggcgggccgcccgccccccacatgcagaaccagatgaacggccagatgcccgggccgaaccacatgcccatgcagggccccggccccaaccagctcaacatgaccaactccagcatgaacatgccgtccagctcccacgggagcatgggcgggtacaaccactccgtgcccagctcccagagcatgcccgtccagaaccagatgacgatgtcccagggccagcccatgggcaactacgggccgcggcccaacatgagcatgcagcccaaccagggccccatgatgcaccagcagccgcccagccagcagtacaacatgccccaggggggcgggcagcactaccagggccagcagccgcccatgggcatgatggggcaggtgaaccagggcaaccacatgatggggcagcgccagatccccccctaccggccgccccagcagggccccccccagcagtactccgggcaggaggactactacggcgaccagtacagccacggcgggcagggcccgcccgaggggatgaaccagcagtactaccccgacggcaactcccagtacgggcagcagcaggacgcctaccagggccccccgccccagcagggctaccccccccagcagcagcagtacccggggcagcagggctaccccgggcagcagcagggctacggccccagccaggggggccccgggccgcagtaccccaactacccccagggccaggggcagcagtacggcggctaccgccccacccagccggggcccccccagccgccccagcagcggccctacggctacgaccagatcatgcccaagaagccggccgaggaggggaacgactccgaggaggtgcccgaggcgagcggcccccagaacgacgggaaggagctgtgccccccgggcaagcccaccacctccgagaagatccacgagcgcagcggccccaagcggggggagcacgcctggacgcaccgcctgcgggagcgcaagcagctcgtcatctacgaggagatctccgaccccgaggaggacgacgagtga

SEQ ID NO: 1477 - RNA, 336 nt, synthetic construct
  misc_feature 1..336: note = AAI05590_variant
  source 1..336: mol_type = other RNA
atgaagaccaacgacacctacatgaagttcagctggctgaccgtgcccgagaagtccctcgacaaggagcaccgctgcatcgtccggcacgagaacaacaagaacggcgtggaccaggagatcatcttcccgcccatcaagaccgacgtgatcaccatggaccccaaggacaactgcagcaaggacgccaacgacaccctgctgctccagctgacgaacacctccgcctactacatgtacctgctcctgctgctcaagagcgtcgtgtacttcgcgatcatcacgtgctgcctgctgcgccggaccgccttctgctgcaacggggagaagtcctga

SEQ ID NO: 1478 - RNA, 177 nt, synthetic construct
  misc_feature 1..177: note = AAG29337_variant
  source 1..177: mol_type = other RNA
atgcagatgttcccgcccagccccctgttcttcttcctccagctgctgaagcagtccagccgccggctcgagcacaccttcgtgttcctgcgcaacttctccctgatgctcctgcggtacatcggcaagaagcgccgggccacccgcttctgggacccccggcgcgggacgccctga

SEQ ID NO: 1479 - RNA, 1131 nt, synthetic construct
  misc_feature 1..1131: note = AAF26776_variant
  source 1..1131: mol_type = other RNA
atggccaacagcgccaacaccaacaccgtgcccaagctgtaccgctccgtcatcgaggacgtgatcaacgacgtgcgggacatcttcctcgacgacggcgtcgacgagcaggtcctgatggagctgaagacgctctgggagaacaagctgatgcagagccgcgcggtggacgggttccactccgaggagcagcagctgctcctccaggtgcagcagcagcaccagccgcagcagcagcagcaccaccaccaccaccaccaccagcaggcccagccccagcagaccgtgccccagcaggcccagacccagcaggtcctgatccccgccagccagcaggccaccgcgccccaggtgatcgtgccggactccaagctgatccagcacatgaacgccagcaacatgtccgccgccgcgacggccgccaccctggccctgcccgccggcgtgacccccgtccagcagatcctcaccaacagcgggcagctgctccaggtggtgcgggcggccaacggcgcccagtacatcttccagccgcagcagtccgtcgtgctgcagcagcaggtcatcccccagatgcagcccgggggcgtgcaggcccccgtgatccagcaggtcctggccccgctgcccggcgggatcagcccccagacgggcgtgatcatccagccccagcagatcctcttcaccgggaacaagacccaggtgatcccgaccacggtggcggcccccacccccgcccaggcccagatcaccgccaccggccagcagcagccccaggcgcagccggcccagacgcaggcgcccctggtcctccaggtggacgggaccggcgacacctccagcgaggaggacgaggacgaggaggaggactacgacgacgacgaggaggaggacaaggagaaggacggcgccgaggacgggcaggtcgaggaggagcccctgaactccgaggacgacgtgagcgacgaggagggccaggagctgttcgacaccgagaacgtggtcgtgtgccagtacgacaagatccaccgctccaagaacaagtggaagttccacctgaaggacgggatcatgaacctcaacggccgggactacatcttcagcaaggccatcggcgacgccgagtggtga

SEQ ID NO: 1480 - RNA, 1173 nt, synthetic construct
  misc_feature 1..1173: note = AAH00125_variant
  source 1..1173: mol_type = other RNA
atgcccccgagcggcctgcgcctcctgctgctcctgctgcccctcctgtggctgctcgtgctgacccccgggcggcccgccgccggcctgtccacgtgcaagaccatcgacatggagctcgtcaagcgcaagcggatcgaggcgatccgcgggcagatcctgagcaagctgcggctcgcctccccgcccagccagggcgaggtgccgcccgggcccctgcccgaggccgtgctggccctctacaactccacccgcgaccgggtcgccggcgagagcgcggagcccgagcccgagccggaggccgactactacgccaaggaggtgacccgcgtgctgatggtcgagacccacaacgagatctacgacaagttcaagcagtccacgcacagcatctacatgttcttcaacacctccgagctgcgggaggccgtgcccgagcccgtgctcctgagccgcgcggagctgcggctcctgcgcctgaagctcaaggtcgagcagcacgtggagctgtaccagaagtactccaacaacagctggcggtacctgtccaaccgcctcctggcccccagcgactccccggagtggctgagcttcgacgtgaccggcgtcgtgcggcagtggctctcccgcgggggcgagatcgaggggttccggctgagcgcccactgctcctgcgacagccgcgacaacaccctccaggtggacatcaacggcttcacgaccgggcggcgcggcgacctggccaccatccacggcatgaaccggcccttcctgctgctcatggccacgcccctggagcgcgcgcagcacctccagagctcccgccaccggcgcgccctggacaccaactactgcttcagctccaccgagaagaactgctgcgtccggcagctgtacatcgacttccgcaaggacctggggtggaagtggatccacgagcccaagggctaccacgccaacttctgcctcgggccgtgcccctacatctggagcctggacacccagtactccaaggtgctggccctctacaaccagcacaaccccggcgccagcgcggccccctgctgcgtgccgcaggccctggagcccctgcccatcgtctactacgtgggccggaagcccaaggtggagcagctgtccaacatgatcgtccgcagctgcaagtgctcctga

SEQ ID NO: 1481 - RNA, 1704 nt, synthetic construct
  misc_feature 1..1704: note = AAT70724_variant
  source 1..1704: mol_type = other RNA
atgggccgcgggctgctccggggcctgtggcccctgcacatcgtgctctggacccgcatcgccagcaccatcccgccccacgtccagaagtccgtgaacaacgacatgatcgtgacggacaacaacggggccgtcaagttcccccagctgtgcaagttctgcgacgtgcggttcagcacgtgcgacaaccagaagtcctgcatgagcaactgctccatcaccagcatctgcgagaagccccaggaggtgtgcgtcgcggtgtggcgcaagaacgacgagaacatcaccctggagaccgtgtgccacgacccgaagctcccctaccacgacttcatcctggaggacgccgcctcccccaagtgcatcatgaaggagaagaagaagcccggcgagaccttcttcatgtgcagctgctccagcgacgagtgcaacgacaacatcatcttctccgaggagtacaacaccagcaacccggacctgctcctggtcatcttccaggtgaccgggatctccctgctcccgcccctgggcgtggccatcagcgtcatcatcatcttctactgctaccgggtgaaccgccagcagaagctgtccagcacgtgggagaccggcaagacccggaagctcatggagttctccgagcactgcgccatcatcctggaggacgaccgcagcgacatctccagcacgtgcgcgaacaacatcaaccacaacaccgagctgctccccatcgagctggacaccctggtggggaagggccggttcgccgaggtctacaaggccaagctcaagcagaacaccagcgagcagttcgagaccgtggccgtgaagatcttcccctacgaggagtacgcgtcctggaagacggagaaggacatcttcagcgacatcaacctgaagcacgagaacatcctgcagttcctcaccgccgaggagcgcaagaccgagctggggaagcagtactggctgatcaccgccttccacgccaagggcaacctccaggagtacctgacgcggcacgtcatctcctgggaggacctgcgcaagctcgggagctccctggcccggggcatcgcgcacctccacagcgaccacaccccctgcggccgccccaagatgcccatcgtgcaccgggacctgaagtccagcaacatcctggtgaagaacgacctgacctgctgcctctgcgacttcgggctgtccctgcgcctcgacccgaccctgagcgtcgacgacctggccaactccggccaggtggggacggcccggtacatggcccccgaggtgctcgagagccgcatgaacctggagaacgtcgagtccttcaagcagaccgacgtgtacagcatggccctggtcctctgggagatgacctcccggtgcaacgcggtgggcgaggtgaaggactacgagccgcccttcggcagcaaggtccgcgagcacccctgcgtggagtccatgaaggacaacgtgctgcgggaccgcgggcgccccgagatccccagcttctggctgaaccaccagggcatccagatggtctgcgagaccctcacggagtgctgggaccacgaccccgaggcccggctgaccgcccagtgcgtggccgagcgcttctccgagctggagcacctggaccggctcagcgggcgcagctgctccgaggagaagatcccggaggacggcagcctgaacaccaccaagtga

SEQ ID NO: 1482 - RNA, 2055 nt, synthetic construct
  misc_feature 1..2055: note = BAG35778_variant
  source 1..2055: mol_type = other RNA
atgatggacgccagcaaggagctccaggtgctccacatcgacttcctgaaccaggacaacgccgtctcccaccacacctgggagttccagaccagctcccccgtgttccgccggggccaggtgttccacctccgcctggtcctgaaccagccgccccagagctaccaccagctgaagctcgagttctccacggggcccaaccccagcatcgcgaagcacaccctggtggtgctggacccgcggaccccctccgaccactacaactggcaggccaccctccagaacgagagcggcaaggaggtcacggtggccgtgacctccagccccaacgccatcctggggaagtaccagctgaacgtcaagaccggcaaccacatcctcaagtccgaggagaacatcctgtacctgctgttcaacccctggtgcaaggaggacatggtgttcatgccggacgaggacgagcgcaaggagtacatcctgaacgacaccgggtgccactacgtgggcgccgcgcggagcatcaagtgcaagccctggaacttcggccagttcgagaagaacgtcctggactgctgcatctccctcctgacggagagctccctgaagcccaccgaccgccgggaccccgtgctcgtgtgccgcgccatgtgcgccatgatgagcttcgagaaggggcagggcgtcctgatcgggaactggaccggcgactacgagggcgggaccgccccgtacaagtggacgggctccgcgcccatcctgcagcagtactacaacaccaagcaggccgtgtgcttcgggcagtgctgggtgttcgccggcatcctcaccaccgtcctgcgggccctggggatccccgcccgcagcgtgacgggcttcgactccgcgcacgacaccgagcggaacctcaccgtggacacctacgtcaacgagaacggcgagaagatcacgagcatgacccacgacagcgtgtggaacttccacgtgtggaccgacgcctggatgaagcgccccgacctgccgaaggggtacgacggctggcaggccgtcgacgccacgccccaggagcggtcccagggggtgttctgctgcggccccagccccctgaccgccatccgcaagggggacatcttcatcgtctacgacacccggttcgtgttctccgaggtgaacggcgaccgcctcatctggctggtcaagatggtgaacggccaggaggagctgcacgtgatcagcatggagaccacctccatcgggaagaacatcagcacgaaggcggtcggccaggaccggcgccgggacatcacctacgagtacaagtacccggaggggtccagcgaggagcgccaggtgatggaccacgccttcctcctgctgtccagcgagcgggagcaccgccgccccgtgaaggagaacttcctccacatgtccgtccagagcgacgacgtgctgctgggcaactccgtgaacttcaccgtcatcctcaagcggaagaccgccgccctgcagaacgtgaacatcctggggagcttcgagctccagctgtacacgggcaagaagatggccaagctgtgcgacctcaacaagacctcccagatccagggccaggtgagcgaggtcaccctgaccctggactccaagacgtacatcaacagcctcgcgatcctggacgacgagcccgtgatccgcgggttcatcatcgccgagatcgtggagtccaaggagatcatggccagcgaggtcttcaccagcttccagtaccccgagttctccatcgagctgccgaacaccggccggatcgggcagctgctcgtgtgcaactgcatcttcaagaacaccctggccatccccctgaccgacgtgaagttcagcctcgagtccctgggcatcagctccctgcagacgagcgaccacgggaccgtccagcccggcgagaccatccagtcccagatcaagtgcacccccatcaagacgggcccgaagaagttcatcgtgaagctcagctccaagcaggtcaaggagatcaacgcccagaagatcgtgctgatcaccaagtga

SEQ ID NO: 1483 - RNA, 3375 nt, synthetic construct
  misc_feature 1..3375: note = CCDS6519.1_variant
  source 1..3375: mol_type = other RNA
atggacagcctggcctccctcgtgctgtgcggcgtcagcctgctcctgtccgggaccgtggagggcgccatggacctgatcctcatcaacagcctgcccctggtgtccgacgcggagaccagcctcacgtgcatcgcctccgggtggcgcccgcacgagcccatcaccatcggccgggacttcgaggccctgatgaaccagcaccaggaccccctggaggtcacccaggacgtgacccgcgagtgggccaagaaggtggtctggaagcgggagaaggccagcaagatcaacggggcgtacttctgcgagggccgcgtgcggggcgaggccatccgcatccggacgatgaagatgcgccagcaggcctccttcctccccgccaccctgaccatgaccgtggacaagggggacaacgtcaacatcagcttcaagaaggtgctgatcaaggaggaggacgcggtgatctacaagaacggctccttcatccacagcgtcccgcggcacgaggtgcccgacatcctcgaggtgcacctcccccacgcccagccccaggacgccggggtctactccgcccgctacatcggcgggaacctgttcacgagcgccttcacccggctcatcgtgcgccggtgcgaggcgcagaagtggggcccggagtgcaaccacctgtgcaccgcctgcatgaacaacggcgtgtgccacgaggacaccggggagtgcatctgcccgcccggcttcatggggcgcacgtgcgagaaggcctgcgagctgcacaccttcggccggacctgcaaggagcgctgctccggccaggaggggtgcaagagctacgtcttctgcctccccgacccctacggctgctcctgcgccaccgggtggaagggcctgcagtgcaacgaggcctgccaccccgggttctacggccccgactgcaagctgcggtgcagctgcaacaacggcgagatgtgcgaccgcttccaggggtgcctctgctcccccggctggcaggggctgcagtgcgagcgggagggcatccagcgcatgacgccgaagatcgtggacctgcccgaccacatcgaggtgaacagcgggaagttcaaccccatctgcaaggcgagcggctggcccctcccgaccaacgaggagatgaccctggtcaagcccgacggcaccgtgctgcaccccaaggacttcaaccacacggaccacttctccgtggccatcttcaccatccaccggatcctgcccccggacagcggggtctgggtgtgctccgtcaacaccgtggccggcatggtggagaagcccttcaacatcagcgtcaaggtgctgcccaagcccctgaacgccccgaacgtgatcgacaccgggcacaacttcgccgtcatcaacatctccagcgagccctacttcggcgacgggcccatcaagtccaagaagctcctgtacaagccggtgaaccactacgaggcgtggcagcacatccaggtgacgaacgagatcgtcaccctgaactacctcgagccccgcaccgagtacgagctgtgcgtgcagctggtgcgccggggcgagggcggggagggccaccccgggcccgtccgccggttcaccacggccagcatcggcctcccgccgccccgcggcctgaacctgctccccaagtcccagaccaccctgaacctgacctggcagcccatcttccccagctccgaggacgacttctacgtggaggtggagcggcgcagcgtccagaagtccgaccagcagaacatcaaggtgcccgggaacctcacgagcgtgctgctgaacaacctccacccccgggagcagtacgtcgtgcgcgcccgggtgaacaccaaggcccagggcgagtggtccgaggacctgaccgcctggaccctgagcgacatcctgccgccccagcccgagaacatcaagatctccaacatcacgcacagctccgcggtcatcagctggaccatcctcgacgggtacagcatctccagcatcaccatccgctacaaggtgcagggcaagaacgaggaccagcacgtggacgtcaagatcaagaacgccaccatcacccagtaccagctgaaggggctggagcccgagacggcctaccaggtggacatcttcgccgagaacaacatcggctccagcaacccggcgttctcccacgagctcgtgaccctgcccgagagccaggcccccgccgacctgggcgggggcaagatgctcctgatcgccatcctggggtccgccggcatgacctgcctcaccgtcctgctggcgttcctcatcatcctgcagctgaagcgggccaacgtgcagcgccggatggcccaggccttccagaacgtgcgcgaggagcccgccgtccagttcaacagcgggacgctcgcgctgaaccggaaggtgaagaacaacccggaccccaccatctaccccgtgctggactggaacgacatcaagttccaggacgtcatcggcgagggcaacttcggccaggtgctcaaggcccgcatcaagaaggacgggctgcggatggacgccgccatcaagcgcatgaaggagtacgcctccaaggacgaccaccgggacttcgcgggggagctggaggtgctctgcaagctgggccaccaccccaacatcatcaacctgctcggggcctgcgagcaccgcggctacctgtacctggccatcgagtacgccccgcacggcaacctcctggacttcctgcgcaagagccgggtcctcgagaccgaccccgcgttcgccatcgccaactccaccgccagcacgctgtccagccagcagctgctccacttcgccgcggacgtggcccgcgggatggactacctgtcccagaagcagttcatccaccgggacctggccgcccgcaacatcctcgtgggcgagaactacgtcgccaagatcgcggacttcgggctgagccggggccaggaggtgtacgtgaagaagaccatggggcgcctgcccgtccggtggatggccatcgagtccctcaactacagcgtgtacaccaccaacagcgacgtgtggtcctacggcgtcctgctgtgggagatcgtgagcctcggcgggacgccgtactgcggcatgacctgcgccgagctgtacgagaagctgccccaggggtaccgcctcgagaagcccctgaactgcgacgacgaggtgtacgacctgatgcggcagtgctggcgcgagaagccctacgagcggccgtccttcgcccagatcctcgtcagcctgaaccgcatgctggaggagcggaagacctacgtgaacaccacgctctacgagaagttcacctacgccggcatcgactgctccgcggaggaggccgcctga

SEQ ID NO: 1484 - RNA, 1791 nt, synthetic construct
  misc_feature 1..1791: note = BAF84950_variant
  source 1..1791: mol_type = other RNA
atggccgacgccgaggcgcgcgccgagttccccgaggaggcccggccggaccgcggcaccctccaggtgctgcaggacatggccagccggctgcgcatccactccatccgggcgacctgcagcacgtccagcgggcaccccacctcctgcagctccagctccgagatcatgagcgtcctgttcttctacatcatgcgctacaagcagtccgaccccgagaaccccgacaacgaccggttcgtgctcgccaagcgcctgagcttcgtggacgtcgccaccggctggctggggcagggcctcggggtggcctgcggcatggcctacaccggcaagtacttcgaccgggcgtcctaccgcgtgttctgcctgatgagcgacggggagtccagcgagggctccgtctgggaggccatggccttcgccagctactactccctggacaacctcgtggccatcttcgacgtgaaccggctggggcacagcggcgcgctgccggccgagcactgcatcaacatctaccagcgccggtgcgaggccttcgggtggaacacgtacgtcgtggacggccgcgacgtggaggccctctgccaggtcttctggcaggccagccaggtgaagcacaagcccaccgcggtggtcgccaagaccttcaagggccgggggaccccctccatcgaggacgccgagagctggcacgccaagcccatgccgcgcgagcgggccgacgcgatcatcaagctgatcgagtcccagatccagacgagccgcaacctggacccccagccgcccatcgaggactcccccgaggtgaacatcaccgacgtgcggatgaccagcccgcccgactaccgcgtcggcgacaagatcgccacccggaaggcctgcgggctcgccctggccaagctgggctacgcgaacaaccgcgtggtggtcctcgacggcgacacgcgctactccaccttcagcgagatcttcaacaaggagtaccccgagcggttcatcgagtgcttcatggccgagcagaacatggtgtccgtggccctggggtgcgccagccgcggccggaccatcgcgttcgcctccaccttcgccgccttcctgacgcgcgccttcgaccacatccggatcgggggcctcgcggagagcaacatcaacatcatcgggtcccactgcggcgtcagcgtgggcgacgacggggcctcccagatggccctggaggacatcgccatgttccgcaccatccccaagtgcaccatcttctaccccaccgacgccgtcagcacggagcacgcggtggccctggccgccaacgccaagggcatgtgcttcatccggaccacccgccccgagaccatggtgatctacacgccccaggagcggttcgagatcgggcaggcgaaggtcctccgccactgcgtgtccgacaaggtgaccgtcatcggcgccgggatcaccgtgtacgaggccctggccgcggccgacgagctgagcaagcaggacatcttcatccgggtgatcgacctcttcaccatcaagccgctggacgtcgccacgatcgtgtccagcgccaaggccaccgagggccgcatcatcaccgtggaggaccactacccccagggcgggatcggcgaggcggtctgcgccgccgtgagcatggaccccgacatccaggtgcactccctggccgtcagcggggtgccccagtccggcaagagcgaggagctcctggacatgtacgggatctccgcccggcacatcatcgtggcggtcaagtgcatgctgctcaactga

SEQ ID NO: 1485 - RNA, 861 nt, synthetic construct
  misc_feature 1..861: note = EAW88722_variant
  source 1..861: mol_type = other RNA
atggccgaggacggcgaggaggccgagttccacttcgcggccctgtacatcagcgggcagtggccccgcctccgggccgacaccgacctgcagcgcctgggctccagcgccatggccccgtcccggaagttcttcgtcgggggcaactggaagatgaacgggcgcaagcagagcctcggcgagctgatcggcaccctgaacgcggccaaggtgcccgccgacacggaggtggtgtgcgccccgcccaccgcgtacatcgacttcgcccggcagaagctcgaccccaagatcgccgtcgccgcccagaactgctacaaggtgaccaacggggcgttcaccggcgagatctcccccgggatgatcaaggactgcggcgccacgtgggtggtcctggggcacagcgagcgccggcacgtgttcggcgagtccgacgagctgatcggccagaaggtggcccacgccctcgccgaggggctgggcgtcatcgcgtgcatcggggagaagctggacgagcgcgaggccggcatcaccgagaaggtggtgttcgagcagaccaaggtcatcgccgacaacgtgaaggactggagcaaggtggtcctcgcctacgagcccgtgtgggccatcggcaccgggaagacggcgaccccgcagcaggcccaggaggtgcacgagaagctgcggggctggctgaagtccaacgtcagcgacgccgtggcccagtccacccgcatcatctacgggggcagcgtgaccggggccacgtgcaaggagctcgcgtcccagcccgacgtcgacggcttcctggtgggcggggccagcctgaagcccgagttcgtggacatcatcaacgccaagcagtga

SEQ ID NO: 1486 - RNA, 357 nt, synthetic construct
  misc_feature 1..357: note = CAA72108_variant
  source 1..357: mol_type = other RNA
atgcccctggtggtcgccgtgatcttcttcagcctctgggtgttcgccctgggccagctggagcagccggagatctccatcagccgccccgcgaacaagtccgcccacatcagctggaaggcctccatccaggggttcagctccaagatcatccactggtactggcagaagcccaacaagggcctcgagtacctgctgcacgtcttcctcaccatcagcgcccaggactgctccgggggcaagaccaagaagctggaggtgagcaagaacgcccacacgtccaccagcaccctgaagatcaagttcctcgagaaggaggacgaggtggtctaccactgcgcgtgctggatccggcac

SEQ ID NO: 1487 - RNA, 414 nt, synthetic construct
  misc_feature 1..414: note = EAL23985_variant
  source 1..414: mol_type = other RNA
atgctgagcctcctgcacacctccaccctggccgtgctcggcgccctgtgcgtctacggggcgggccacctggagcagccccagatcagctccacgaagaccctcagcaagaccgcccgcctggagtgcgtggtgtccgggatcaccatcagcgccacgtccgtctactggtaccgggagcgcccgggcgaggtgatccagttcctggtgagcatctcctacgacgggaccgtccggaaggagagcggcatcccctccggcaagttcgaggtggaccgcatccccgagaccagcacctccacgctcaccatccacaacgtggagaagcaggacatcgccacctactactgcgccctgtgggaggtccacagctcccggcagttcgagcccagccactccatcaacgtgtactga

SEQ ID NO: 1488 - RNA, 366 nt, synthetic construct
  misc_feature 1..366: note = CAA30181_variant
  source 1..366: mol_type = other RNA
atgctgagcctcctgcacacctccaccctggccgtgctcggcgccctgtgcgtctacggggcgggccacctggagcagccccagatcagctccacgaagaccctcagcaagaccgcccgcctggagtgcgtggtgtccgggatcaccatcagcgccacgtccgtctactggtaccgggagcgcccgggcgaggtgatccagttcctggtgagcatctcctacgacgggaccgtccggaaggagagcggcatcccctccggcaagttcgaggtggaccgcatccccgagaccagcacctccacgctcaccatccacaacgtggagaagcaggacatcgccacctactactgcgccctgtgggaggtc

SEQ ID NO: 1489 - RNA, 366 nt, synthetic construct
  misc_feature 1..366: note = CAA33345_variant
  source 1..366: mol_type = other RNA
atgctgagcctcctgcacacctccaccctggccgtgctcggcgccctgtgcgtctacggggcgggccacctggagcagccccagatcagctccacgaagaccctcagcaagaccgcccgcctggagtgcgtggtgtccgggatcaagatcagcgccacctccgtctactggtaccgggagcgcccgggcgaggtgatccagttcctggtgagcatctcctacgacgggacggtccggaaggagagcggcatcccctccggcaagttcgaggtggaccgcatccccgagaccagcacctccaccctcacgatccacaacgtggagaagcaggacatcgccacctactactgcgccctgtgggaggtc

SEQ ID NO: 1490 - RNA, 2382 nt, synthetic construct
  misc_feature 1..2382: note = AAA93251_variant
  source 1..2382: mol_type = other RNA
atgatggccgccctgtaccccagcaccgacctctccggcgcgagctccagctccctgccgagctcccccagctccagctcccccaacgaggtgatggccctgaaggacgtccgcgaggtgaaggaggagaacaccctcaacgagaagctgttcctgctcgcctgcgacaagggggactactacatggtgaagaagatcctggaggagaacagctccggcgacctgaacatcaactgcgtcgacgtgctcgggcggaacgccgtgacgatcaccatcgagaacgagaacctggacatcctgcagctcctgctggactacggctgccagagcgccgacgcgctcctggtcgccatcgactccgaggtggtgggggccgtcgacatcctgctcaaccaccgccccaagcggagctcccgcccgaccatcgtgaagctgatggagcggatccagaaccccgagtacagcaccacgatggacgtggcccccgtcatcctggcggcccaccgcaacaactacgagatcctcaccatgctgctgaagcaggacgtgtccctccccaagccgcacgccgtgggctgcgagtgcaccctgtgcagcgccaagaacaagaaggacagcctgcggcactcccgcttccggctcgacatctaccgctgcctggccagccccgcgctgatcatgctcaccgaggaggaccccatcctgcgggccttcgagctgtccgccgacctcaaggagctgagcctggtcgaggtggagttccgcaacgactacgaggagctcgcccggcagtgcaagatgttcgccaaggacctgctggcgcaggcccgcaactcccgggagctcgaggtgatcctgaaccacacgagctccgacgagcccctggacaagcgcggcctcctggaggagcggatgaacctgagccgcctcaagctggccatcaagtacaaccagaaggagttcgtctcccagagcaactgccagcagttcctgaacaccgtgtggttcgggcagatgtccggctaccggcgcaagccgacctgcaagaagatcatgaccgtgctcacggtcgggatcttctggcccgtgctgagcctgtgctacctgatcgcccccaagtcccagttcggccggatcatccacacccccttcatgaagttcatcatccacggggccagctacttcaccttcctcctgctgctcaacctgtactccctggtgtacaacgaggacaagaagaacaccatgggcccggcgctcgagcgcatcgactacctgctgatcctctggatcatcggcatgatctggagcgacatcaagcgcctgtggtacgaggggctggaggacttcctcgaggagtcccggaaccagctgagcttcgtcatgaactccctgtacctcgccacgttcgccctgaaggtggtcgcccacaacaagttccacgacttcgccgaccgcaaggactgggacgcgttccaccccaccctggtggccgagggcctcttcgccttcgccaacgtgctgagctacctgcgcctcttcttcatgtacaccaccagctccatcctggggcccctgcagatcagcatgggccagatgctccaggacttcggcaagttcctggggatgttcctgctcgtcctgttctccttcacgatcggcctgacccagctctacgacaaggggtacaccagcaaggagcagaaggactgcgtgggcatcttctgcgagcagcagtccaacgacaccttccacagcttcatcgggacgtgcttcgcgctgttctggtacatcttctccctggcccacgtggccatcttcgtcacccggttcagctacggcgaggagctccagtccttcgtgggcgccgtgatcgtcgggacctacaacgtggtggtcgtgatcgtgctgaccaagctgctcgtcgccatgctgcacaagagcttccagctgatcgcgaaccacgaggacaaggagtggaagttcgcccgggccaagctctggctgtcctacttcgacgacaagtgcacgctgcccccgcccttcaacatcatccccagccccaagaccatctgctacatgatctccagcctctccaagtggatctgcagccacacctccaagggcaaggtgaagcgccagaacagcctgaaggagtggcggaacctgaagcagaagcgcgacgagaactaccagaaggtgatgtgctgcctcgtccaccggtacctgaccagcatgcgccagaagatgcagtccacggaccaggccaccgtggagaacctgaacgagctccggcaggacctgagcaagttccgcaacgagatccgggacctgctcgggttccgcacctccaagtacgccatgttctacccgcggaactga

SEQ ID NO: 1491 - RNA, 3315 nt, synthetic construct
  misc_feature 1..3315: note = AAZ73614_variant
  source 1..3315: mol_type = other RNA
atgagcttccgcgccgcccggctgtccatgcgcaaccggcgcaacgacaccctcgacagcacccggacgctgtactccagcgcgtcccgcagcaccgacctgtcctacagcgagtccgacctcgtgaacttcatccaggccaacttcaagaagcgggagtgcgtcttcttcaccaaggacagcaaggccaccgagaacgtgtgcaagtgcggctacgcccagtcccagcacatggaggggacgcagatcaaccagagcgagaagtggaactacaagaagcacaccaaggagttccccaccgacgccttcggcgacatccagttcgagaccctggggaagaagggcaagtacatccgcctgtcctgcgacacggacgcggagatcctctacgagctgctgacccagcactggcacctcaagaccccgaacctggtgatcagcgtcaccgggggcgccaagaacttcgccctgaagccccggatgcgcaagatcttctcccggctcatctacatcgcccagagcaagggcgcgtggatcctgaccgggggcacgcactacgggctgatgaagtacatcggcgaggtggtgcgcgacaacaccatctcccggagctccgaggagaacatcgtcgccatcgggatcgccgcctggggcatggtgagcaaccgcgacaccctcatccggaactgcgacgccgagggctacttcctggcgcagtacctgatggacgacttcacgcgcgaccccctctacatcctggacaacaaccacacccacctcctcctggtggacaacgggtgccacggccaccccaccgtcgaggccaagctgcggaaccagctcgagaagtacatcagcgagcgcaccatccaggactccaactacgggggcaagatcccgatcgtgtgcttcgcccagggcgggggcaaggagacgctgaaggccatcaacaccagcatcaagaacaagatcccctgcgtggtcgtggaggggtccggccagatcgccgacgtgatcgcgagcctggtcgaggtggaggacgccctcacctccagcgccgtgaaggagaagctggtccggttcctgccccgcaccgtgtcccggctccccgaggaggagacggagagctggatcaagtggctgaaggagatcctggagtgctcccacctcctgaccgtgatcaagatggaggaggccggggacgagatcgtcagcaacgccatctcctacgcgctgtacaaggccttcagcacctccgagcaggacaaggacaactggaacggccagctcaagctgctgctcgagtggaaccagctggacctggccaacgacgagatcttcaccaacgaccgccgctgggagagcgccgacctccaggaggtgatgttcacggccctgatcaaggaccggccgaagttcgtgcgcctgttcctcgagaacggcctgaacctgcggaagttcctcacccacgacgtcctgaccgagctgttctccaaccacttcagcaccctggtgtaccgcaacctccagatcgcgaagaactcctacaacgacgccctgctgacgttcgtctggaagctcgtggccaacttccggcgcgggttccggaaggaggaccgcaacggccgggacgagatggacatcgagctgcacgacgtgagccccatcacccgccaccccctgcaggccctcttcatctgggcgatcctgcagaacaagaaggagctgtccaaggtcatctgggagcagacccgggggtgcaccctcgccgccctgggcgccagcaagctgctcaagacgctggccaaggtgaagaacgacatcaacgcggccggggagagcgaggagctggccaacgagtacgagacccgcgccgtggagctgttcaccgagtgctactccagcgacgaggacctggccgagcagctgctcgtctactcctgcgaggcgtggggcggcagcaactgcctggagctggccgtggaggccaccgaccagcacttcatcgcccagcccggggtgcagaacttcctctccaagcagtggtacggcgagatcagccgggacaccaagaactggaagatcatcctgtgcctgttcatcatcccgctcgtcgggtgcggcttcgtgtccttccgcaagaagcccgtggacaagcacaagaagctgctgtggtactacgtcgccttcttcacgagccccttcgtggtgttctcctggaacgtcgtgttctacatcgcgttcctcctgctgttcgcctacgtgctcctgatggacttccacagcgtcccccacccgcccgagctggtgctctactccctggtgttcgtcctgttctgcgacgaggtgcggcagtggtacgtgaacggggtcaactacttcaccgacctctggaacgtgatggacaccctgggcctgttctacttcatcgccggcatcgtgttccgcctccacagctccaacaagagctccctgtacagcgggcgggtcatcttctgcctggactacatcatcttcaccctccgcctgatccacatcttcacggtgtcccggaacctgggccccaagatcatcatgctccagcgcatgctgatcgacgtgttcttcttcctgttcctcttcgccgtctggatggtggcgttcggggtggcccgccagggcatcctgcggcagaacgagcagcgctggcggtggatcttccgcagcgtcatctacgagccctacctggccatgttcggccaggtgccgagcgacgtggacgggaccacctacgacttcgcccactgcaccttcacgggcaacgagtccaagcccctctgcgtcgagctggacgagcacaacctgccccggttccccgagtggatcaccatcccgctcgtgtgcatctacatgctgagcaccaacatcctgctcgtgaacctgctggtcgccatgttcgggtacaccgtgggcacggtgcaggagaacaacgaccaggtctggaagttccagcgctacttcctcgtgcaggagtactgctcccggctgaacatccccttccccttcatcgtgttcgcgtacttctacatggtcgtgaagaagtgcttcaagtgctgctgcaaggagaagaacatggagagctccgtgtgctgcttcaagaacgaggacaacgagaccctggcctgggagggggtcatgaaggagaactacctcgtgaagatcaacaccaaggccaacgacaccagcgaggagatgcgccaccggttccgccagctggacacgaagctgaacgacctcaagggcctgctgaaggagatcgccaacaagatcaagtga

SEQ ID NO: 1492 - RNA, 2097 nt, synthetic construct
  misc_feature 1..2097: note = AAK13079_variant
  source 1..2097: mol_type = other RNA
atgatgcgcagccggtccaagagcccccgccggccgtcccccaccgcccgcggcgccaactgcgacgtggagctgctcaagaccacgacccgggaccgcgaggagctgaagtgcatgctggagaagtacgagcggcacctcgcggagatccaggggaacgtcaaggtgctcaagagcgagcgcgacaagatcttcctgctgtacgagcaggcccaggaggagatcacccggctgcgccgggagatgatgaagtcctgcaagagccccaagtccaccacggcccacgccatcctgcgccgggtggagaccgagcgcgacgtcgccttcaccgacctccggcgcatgaccacggagcgggacagcctgcgcgagcggctgaagatcgcgcaggagaccgccttcaacgagaaggcccacctcgagcagcgcatcgaggagctggagtgcaccgtgcacaacctggacgacgagcggatggagcagatgtccaacatgaccctcatgaaggagacgatcagcaccgtggagaaggagatgaagtccctggcccgcaaggcgatggacaccgagagcgagctgggccgccagaaggccgagaacaactccctccggctgctgtacgagaacaccgagaaggacctcagcgacacgcagcgccacctggccaagaagaagtacgagctgcagctcacccaggagaagatcatgtgcctggacgagaagatcgacaacttcacccggcagaacatcgcccagcgcgaggagatctccatcctcgggggcaccctgaacgacctggccaaggagaaggagtgcctgcaggcgtgcctcgacaagaagtccgagaacatcgccagcctgggggagagcctggccatgaaggagaagacgatctccggcatgaagaacatcatcgccgagatggagcaggccagccggcagtgcaccgaggcgctcatcgtctgcgagcaggacgtgagccgcatgcggcgccagctggacgagaccaacgacgagctggcccagatcgcccgggagcgcgacatcctcgcccacgacaacgacaacctgcaggagcagttcgccaaggcgaagcaggagaaccaggccctgtccaagaagctcaacgacacccacaacgagctgaacgacatcaagcagaaggtgcaggacacgaacctggaggtcaacaagctcaagaacatcctcaagagcgaggagtccgagaaccggcagatgatggagcagctgcgcaaggccaacgaggacgccgagaactgggagaacaaggcccggcagagcgaggcggacaacaacaccctgaagctggagctgatcaccgccgaggccgagggcaaccgcctcaaggagaaggtggactccctgaaccgggaggtggagcagcacctgaacgccgagcgcagctacaagtcccagatcagcaccctgcacaagtccgtcgtgaagatggaggaggagctccagaaggtgcagttcgagaaggtcagcgcgctggccgacctgtccagcacgcgggagctctgcatcaagctggactccagcaaggagctgctcaaccgccagctggtggccaaggaccaggagatcgagatgcgggagaacgagctggactccgcccacagcgagatcgagctcctgcgctcccagatggccaacgagcgcatcagcatgcagaacctggaggcgctcctggtggccaaccgggacaaggagtaccagtcccagatcgccctgcaggagaaggagagcgagatccagctcctgaaggagcacctgtgcctcgccgagaacaagatggccatccagagccgcgacgtcgcgcagttccggaacgtggtgacccagctggaggccgacctggacatcaccaagcgccagctcgggaccgagcggttcgagcgcgagcgggccgtccaggagctgcgccggcagaactactccagcaacgcctaccacatgtccagcacgatgaagcccaacaccaagtgccactccccggagcgcgcccaccaccggagccccgaccgcggcctggaccggtccctcgaggagaacctgtgctaccgcgacttctga

SEQ ID NO: 1493 - RNA, 927 nt, synthetic construct
  misc_feature 1..927: note = CCDS48205.1_variant
  source 1..927: mol_type = other RNA
atgcgccccgagggcagcctgacctaccgggtgccggagcgcctccggcaggggttctgcggcgtcgggcgcgccgcccaggcgctggtgtgcgcctccgccaaggagggcaccgccttccggatggaggccgtgcaggagggggcggccggcgtcgagagcgagcaggccgccctgggcgaggaggcggtgctcctgctggacgacatcatggccgaggtggaggtcgtggccgaggaggaggggctcgtggagcgccgggaggaggcccagcgcgcccagcaggcggtccccggccccgggcccatgacgccggagtccgcccccgaggagctgctggccgtccaggtggagctcgagcccgtgaacgcccaggcccggaaggcgttcagccgccagcgggagaagatggagcgccggcgcaagccccacctggaccggcgcggcgccgtgatccagtccgtgccggggttctgggccaacgtcatcgccaaccacccccagatgagcgccctgatcaccgacgaggacgaggacatgctctcctacatggtgagcctggaggtgggcgaggagaagcaccccgtccacctgtgcaagatcatgctgttcttccggtccaacccctacttccagaacaaggtgatcaccaaggagtacctcgtgaacatcaccgagtaccgcgcgagccactccacgccgatcgagtggtaccccgactacgaggtcgaggcctaccggcgccggcaccacaacagctccctgaacttcttcaactggttcagcgaccacaacttcgccggctccaacaagatcgccgagatcctctgcaaggacctgtggcgcaaccccctgcagtactacaagcgcatgaagcccccggaggaggggaccgagaccagcggcgactcccagctcctgagctga

SEQ ID NO: 1494 - RNA, 369 nt, synthetic construct
  misc_feature 1..369: note = M13231.1_variant
  source 1..369: mol_type = other RNA
atgcgctgggccctgctcgtgctgctggccttcctcagccccgcgtcccagaagtccagcaacctggagggccggaccaagagcgtcacccgccagacggggtccagcgccgagatcacgtgcgacctgaccgtgaccaacaccttctacatccactggtacctccaccaggagggcaaggccccgcagcggctgctgtactacgacgtgtccaccgcccgcgacgtcctcgagagcgggctgtcccccggcaagtactacacccacacgccccggcgctggagctggatcctgcggctccagaacctgatcgagaacgactccggggtgtactactgcgccacctgggaccgccagaagctgctctga

SEQ ID NO: 1495 - RNA, 804 nt, synthetic construct
  misc_feature 1..804: note = CCDS12619.1_variant
  source 1..804: mol_type = other RNA
atgggcgcccgccagatccagaccagctccagccagacctcccccgaggaggccatggggacgccgcggatccagcacctcctgatcctgctggtgctcggcgcgagcctgctgacctccgggctcgagctgtactgccagaagggcctgagcatgaccgtcgaggccgaccccgccaacatgttcaactggaccacggaggaggtggagacctgcgacaagggggccctctgccaggagaccatcctgatcatcaaggccggcaccgagacggcgatcctggccaccaagggctgcatccccgagggggaggaggccatcaccatcgtgcagcactccagcccgcccggcctcatcgtcacctcctacagcaactactgcgaggactccttctgcaacgacaaggacagcctgtcccagttctgggagttcagcgagacgaccgcctccaccgtgagcaccacgctgcactgcccgacctgcgtggcgctcgggacctgcttctccgcccccagcctgccctgccccaacggcaccacgcgctgctaccaggggaagctggagatcaccggcggcgggatcgagtccagcgtcgaggtgaagggctgcaccgccatgatcgggtgccggctcatgagcggcatcctggccgtgggccccatgttcgtccgcgaggcctgcccccaccagctgctcacccagccccggaagacggagaacggggcgacctgcctgccgatccccgtgtggggcctgcagctcctgctgcccctcctgctgccctccttcatccacttcagctga

SEQ ID NO: 1496 - RNA, 1590 nt, synthetic construct
  misc_feature 1..1590: note = AHZ44440_variant
  source 1..1590: mol_type = other RNA
atgctgctcgccgtgctgtactgcctgctctggagcttccagacctccgccggccacttcccccgcgcgtgcgtcagctccaagaacctgatggagaaggagtgctgcccgccctggagcggggaccggtccccctgcggccagctgagcgggcgcggctcctgccagaacatcctcctgagcaacgcgcccctggggccgcagttccccttcaccggcgtggacgaccgggagtcctggcccagcgtgttctacaaccgcacgtgccagtgctccggcaacttcatggggttcaactgcggcaactgcaagttcgggttctggggccccaactgcaccgagcggcgcctcctggtccggcgcaacatcttcgacctgagcgccccggagaaggacaagttcttcgcctacctcaccctggccaagcacaccatctccagcgactacgtgatccccatcgggacgtacggccagatgaagaacggctccacccccatgttcaacgacatcaacatctacgacctgttcgtgtggatgcactactacgtcagcatggacgccctcctcgggggctccgagatctggcgggacatcgacttcgcccacgaggcccccgccttcctgccgtggcaccgcctgttcctgctgcggtgggagcaggagatccagaagctcaccggggacgagaacttcaccatcccctactgggactggcgcgacgcggagaagtgcgacatctgcacggacgagtacatgggcggccagcaccccaccaaccccaacctgctgagcccggcctccttcttcagcagctggcagatcgtgtgctcccggctcgaggagtacaacagccaccagtccctgtgcaacgggacccccgagggccccctgcgccggaaccccgggaaccacgacaagagccgcaccccgcggctcccctccagcgccgacgtggagttctgcctgtccctgacgcagtacgagagcggctccatggacaaggccgccaacttcagcttccgcaacaccctcgaggggttcgcgagccccctgaccggcatcgccgacgcctcccagtccagcatgcacaacgccctgcacatctacatgaacggcaccatgtcccaggtccaggggagcgccaacgaccccatcttcctcctgcaccacgcgttcgtggactccatcttcgagcagtggctgcggcgccaccggccgctccaggaggtgtaccccgaggccaacgcccccatccgccacaaccgcgagagctacatggtccccttcatcccgctgtaccggaacggcgacttcttcatctccagcaaggacctggggtacgactacagctacctccaggactccgaccccgacagcttccaggactacatcaagtcctacctggagcaggccagccgcatctggtcctggctgctcggcgccgcgatggtgggggccgtgctgacggccctgctcgccggcctggtcagcctgctctgccggcacaagcgcaagcagctgcccgaggagaagcagccgctgctgatggagaaggaggactaccactccctctaccagagccacctgtga

SEQ ID NO: 1497 - RNA, 1590 nt, synthetic construct
  misc_feature 1..1590: note = AGV39051_variant
  source 1..1590: mol_type = other RNA
atgctgctcgccgtgctgtactgcctgctctggagcttccagacctccgccggccacttcccccgcgcgtgcgtcagctccaagaacctgatggagaaggagtgctgcccgccctggagcggggaccggtccccctgcggccagctgagcgggcgcggctcctgccagaacatcctcctgagcaacgcgcccctggggccgcagttccccttcaccggcgtggacgaccgggagtcctggcccagcgtgttctacaaccgcacgtgccagtgctccggcaacttcatggggttcaactgcggcaactgcaagttcgggttctggggccccaactgcaccgagcggcgcctcctggtccggcgcaacatcttcgacctgagcgccccggagaaggacaagttcttcgcctacctcaccctggccaagcacaccatctccagcgactacgtgatccccatcgggacgtacggccagatgaagaacggctccacccccatgttcaacgacatcaacatctacgacctgttcgtgtggatgcactactacgtcagcatggacgccctcctcgggggctccgagatctggcgggacatcgacttcgcccacgaggcccccgccttcctgccgtggcaccgcctgttcctgctgcggtgggagcaggagatccagaagctcaccggggacgagaacttcaccatcccctactgggactggcgcgacgcggagaagtgcgacatctgcacggacgagtacatgggcggccagcaccccaccaaccccaacctgctgagcccggcctccttcttcagcagctggcagatcgtgtgctcccggctcgaggagtacaacagccaccagtccctgtgcaacgggacccccgagggccccctgcgccggaaccccgggaaccacgacaagagccgcaccccgcggctcccctccagcgccgacgtggagttctgcctgtccctgacgcagtacgagagcggctccatggacaaggccgccaacttcagcttccgcaacaccctcgaggggttcgcgagccccctgaccggcatcgccgacgcctcccagtccagcatgcacaacgccctgcacatctacatgaacggcaccatgtcccaggtccaggggagcgccaacgaccccatcttcctcctgcaccacgcgttcgtggactccatcttcgagcagtggctgcggcgccaccggccgctccaggaggtgtaccccgaggccaacgcccccatcggccacaaccgcgagagctacatggtccccttcatcccgctgtaccgcaacggggacttcttcatctccagcaaggacctgggctacgactacagctacctccaggactccgaccccgacagcttccaggactacatcaagtcctacctggagcaggccagccggatctggtcctggctgctcggggccgcgatggtgggcgccgtgctgacggccctgctcgccggcctggtcagcctgctctgccgccacaagcggaagcagctgcccgaggagaagcagccgctgctgatggagaaggaggactaccactccctctaccagagccacctgtga

SEQ ID NO: 1498 - RNA, 1590 nt, synthetic construct
  misc_feature 1..1590: note = AGV39049_variant
  source 1..1590: mol_type = other RNA
atgctgctcgccgtgctgtactgcctgctctggagcttccagacctccgccggccacttcccccgcgcgtgcgtcagctccaagaacctgatggagaaggagtgctgcccgccctggagcggggaccggtccccctgcggccagctgagcgggcgcggctcctgccagaacatcctcctgagcaacgcgcccctggggccgcagttccccttcaccggcgtggacgaccgggagtcctggcccagcgtgttctacaaccgcacgtgccagtgctccggcaacttcatggggttcaactgcggcaactgcaagttcgggttctggggccccaactgcaccgagcggcgcctcctggtccggcgcaacatcttcgacctgagcgccccggagaaggacaagttcttcgcctacctcaccctggccaagcacaccatctccagcgactacgtgatccccatcgggacgtacggccagatgaagaacggctccacccccatgttcaacgacatcaacatctacgacctgttcgtgtggatgcactactacgtcagcatggacgccctcctcgggggctccgagatctggcgggacatcgacttcgcccacgaggcccccgccttcctgccgtggcaccgcctgttcctgctgcggtgggagcaggagatccagaagctcaccggggacgagaacttcaccatcccctactgggactggcgcgacgcggagaagtgcgacatctgcacggacgagtacatgggcggccagcaccccaccaaccccaacctgctgagcccggcctccttcttcagcagctggcagatcgtgtgctcccggctcgaggagtacaacagccaccagtccctgtgcaacgggacccccgagggccccctgcgccggaaccccgggaaccacgacaagagccgcaccccgcggctcccctccagcgccgacgtggagttctgcctgtccctgacgcagtacgagagcggctccatggacaaggccgccaacttcagcttccgcaacaccctcgaggggttcgcgagccccctgaccggcatcgccgacgcctcccagtccagcatgcacaacgccctgcacatctacatgaacggcaccatgtcccaggtccaggggagcgccaacgaccccatcttcctcctgcaccacgcgttcgtggactccatcttcgagcagtggctgcagcggcaccgcccgctccaggaggtgtaccccgaggccaacgcccccatcggccacaaccgggagagctacatggtccccttcatcccgctgtaccgcaacggggacttcttcatctccagcaaggacctgggctacgactacagctacctccaggactccgaccccgacagcttccaggactacatcaagtcctacctggagcaggccagccgcatctggtcctggctgctcggggccgcgatggtgggcgccgtgctgacggccctgctcgccggcctggtcagcctgctctgccggcacaagcgcaagcagctgcccgaggagaagcagccgctgctgatggagaaggaggactaccactccctctaccagagccacctgtga

SEQ ID NO: 1499 - RNA, 1590 nt, synthetic construct
  misc_feature 1..1590: note = AGV39050_variant
  source 1..1590: mol_type = other RNA
atgctgctcgccgtgctgtactgcctgctctggagcttccagacctccgccggccacttcccccgcgcgtgcgtcagctccaagaacctgatggagaaggagtgctgcccgccctggagcggggaccggtccccctgcggccagctgagcgggcgcggctcctgccagaacatcctcctgagcaacgcgcccctggggccgcagttccccttcaccggcgtggacgaccgggagtcctggcccagcgtgttctacaaccgcacgtgccagtgctccggcaacttcatggggttcaactgcggcaactgcaagttcgggttctggggccccaactgcaccgagcggcgcctcctggtccggcgcaacatcttcgacctgagcgccccggagaaggacaagttcttcgcctacctcaccctggccaagcacaccatctccagcgactacgtgatccccatcgggacgtacggccagatgaagaacggctccacccccatgttcaacgacatcaacatctacgacctgttcgtgtggatgcactactacgtcagcatggacgccctcctcgggggctacgagatctggcgggacatcgacttcgcccacgaggcccccgccttcctgccgtggcaccgcctgttcctgctgcggtgggagcaggagatccagaagctcaccggggacgagaacttcaccatcccctactgggactggcgcgacgcggagaagtgcgacatctgcacggacgagtacatgggcggccagcaccccaccaaccccaacctgctgtccccggccagcttcttctccagctggcagatcgtgtgcagccggctcgaggagtacaactcccaccagagcctgtgcaacgggacccccgagggccccctgcgccggaaccccgggaaccacgacaagtcccgcaccccgcggctccccagctccgccgacgtggagttctgcctgagcctgacgcagtacgagtccggcagcatggacaaggccgccaacttctccttccgcaacaccctcgaggggttcgcgagccccctgaccggcatcgccgacgcctcccagagctccatgcacaacgccctgcacatctacatgaacggcaccatgagccaggtccaggggtccgccaacgaccccatcttcctcctgcaccacgcgttcgtggacagcatcttcgagcagtggctgcggcgccaccggccgctccaggaggtgtaccccgaggccaacgcccccatcggccacaaccgcgagtcctacatggtccccttcatcccgctgtaccgcaacggggacttcttcatcagctccaaggacctgggctacgactacagctacctccaggacagcgaccccgactccttccaggactacatcaagagctacctggagcaggcctcccggatctggagctggctgctcggggccgcgatggtgggcgccgtgctgacggccctgctcgccggcctggtctccctgctctgccgccacaagcggaagcagctgcccgaggagaagcagccgctgctgatggagaaggaggactaccacagcctctaccagtcccacctgtga

SEQ ID NO: 1500 - RNA, 714 nt, synthetic construct
  misc_feature 1..714: note = CAA04137_variant
  source 1..714: mol_type = other RNA
atgagccccctgtggtggggcttcctcctgtcctgcctggggtgcaagatcctcccgggcgcccaggggcagttcccccgcgtgtgcatgaccgtcgacagcctggtgaacaaggagtgctgcccccggctgggcgccgagtccgcgaacgtgtgcgggagccagcagggccgcggccagtgcaccgaggtccgggccgacacgcgcccctggtccgggccgtacatcctccggaaccaggacgaccgcgagctgtggccccggaagttcttccaccggacctgcaagtgcaccggcaacttcgccgggtacaactgcggcgactgcaagttcgggtggaccggccccaactgcgagcgcaagaagcccccggtgatccgccagaacatccacagcctgagcccccaggagcgggagcagttcctcggcgccctggacctggccaagaagcgcgtgcaccccgactacgtcatcacgacccagcactgggtggggctcctgggccccaacgggacccagccgcagttcgcgaactgctccgtgtacgacttcttcgtctggctgcactactactccgtgcgggacaccctcctgggcggcttcttcccctggctgaaggtgtactactaccgcttcgtcatcgggctccgggtgtggcagtgggaggtgatcagctgcaagctgatcaagcgcgccacgacccggcagccctga

SEQ ID NO: 1501 - RNA, 1590 nt, synthetic construct; identical to SEQ ID NO: 1497
  misc_feature 1..1590: note = AAA61242_variant
  source 1..1590: mol_type = other RNA

SEQ ID NO: 1502 - RNA, 1590 nt, synthetic construct
  misc_feature 1..1590: note = AGV39054_variant
  source 1..1590: mol_type = other RNA
atgctgctcgccgtgctgtactgcctgctctggagcttccagacctccgccggccacttcccccgcgcgtgcgtcagctccaagaacctgatggagaaggagtgctgcccgccctggagcggggaccggtccccctgcggccagctgagcgggcgcggctcctgccagaacatcctcctgagcaacgcgcccctggggccgcagttccccttcaccggcgtggacgaccgggagtcctggcccagcgtgttctacaaccgcacgtgccagtgctccggcaacttcatggggttcaactgcggcaactgcaagttcgggttctggggccccaactgcaccgagcggcgcctcctggtccggcgcaacatcttcgacctgagcgccccggagaaggacaagttcttcgcctacctcaccctggccaagcacaccatctccagcgactacgtgatccccatcgggacgtacggccagatgaagaacggctccacccccatgttcaacgacatcaacatctacgacctgttcgtgtggatgcactactacgtcagcatggacgccctcctcgggggctccgagatctggcgggacatcgacttcgcccacgaggcccccgccttcctgccgtggcaccgcctgttcctgctgcggtgggagcaggagatccagaagctcaccggggacgagaacttcaccatcccctactgggactggcgcgacgcggagaagtgcgacatctgcacggacgagtacgtgggcggccagcaccccaccaaccccaacctgctgagcccggcctccttcttcagcagctggcagatcgtgtgctcccggctcgaggagtacaacagccaccagtccctgtgcaacgggacccccgagggccccctgcgccggaaccccgggaaccacgacaagagccgcaccccgcggctcccctccagcgccgacgtcgagttctgcctgtccctgacgcagtacgagagcggctccatggacaaggccgccaacttcagcttccgcaacaccctcgaggggttcgcgagccccctgaccggcatcgccgacgcctcccagtccagcatgcacaacgccctgcacatctacatgaacggcaccatgtcccaggtgcaggggagcgccaacgaccccatcttcctcctgcaccacgcgttcgtggactccatcttcgagcagtggctgcggcgccaccggccgctccaggaggtctaccccgaggccaacgcccccatcggccacaaccgcgagagctacatggtgcccttcatcccgctgtaccgcaacggggacttcttcatctccagcaaggacctgggctacgactacagctacctccaggactccgaccccgacagcttccaggactacatcaagtcctacctggagcaggccagccggatctggtcctggctgctcggggccgcgatggtgggcgccgtcctgacggccctgctcgccggcctggtgagcctgctctgccgccacaagcggaagcagctgcccgaggagaagcagccgctgctgatggagaaggaggactaccactccctctaccagagccacctgtga

SEQ ID NO: 1503 - RNA, 1590 nt, synthetic construct
  misc_feature 1..1590: note = AGV39162_variant
  source 1..1590: mol_type = other RNA
atgctgctcgccgtgctgtactgcctgctctggagcttccagacctccgccggccacttcccccgcgcgtgcgtcagctccaagaacctgatggagaaggagtgctgcccgccctggagcggggaccggtccccctgcggccagctgagcgggcgcggctcctgccagaacatcctcctgagcaacgcgcccctggggccgcagttccccttcaccggcgtggacgaccgggagtcctggcccagcgtgttctacaaccgcacgtgccagtgctccggcaacttcatggggttcaactgcggcaactgcaagttcgggttctggggccccaactgcaccgagcggcgcctcctggtccggcgcaacatcttcgacctgagcgccccggagaaggacaagttcttcgcctacctcaccctggccaagcacaccatctccagcgactacgtgatccccatcgggacgtacggccagatgaagaacggctccacccccatgttcaacgacatcaacatctacgacctgttcgtgtggatgcactactacgtcagcatggacgccctcctcgggggctccgagatctggcgggacatcgacttcgcccacgaggcccccgccttcctgccgtggcaccgcctgttcctgctgcggtgggagcaggagatccagaagctcaccggggacgagaacttcaccatcccctactgggactggcgcgacgcggagaagtgcgacatctgcacggacgagtacatgggcggccagcaccccaccaaccccaacctgctgagcccggcctccttcttcagcagctggcagatcgtgtgctcccggctcgaggagtacaacagccaccagtccctgtgcaacgggacccccgagggccccctgcgccggaaccccgggaaccacgacaagagccgcaccccgcggctcccctccagcgccgacgtggagttctgcctgtccctgacgcagtacgagagcggctccatggacaaggccgccaacttcagcttccgcaacaccctcgaggggttcgcgagccccctgaccggcatcgccgacgcctcccagtccagcatgcacaacgccctgcacatctacatgaacggcaccatgtcccaggtccaggggagcgccaacgaccccatcttcctcctgcaccacgcgttcgtggactccatcttcgagcagtggctgcggcgccaccggctcctgcaggaggtgtacccggaggccaacgcccccatcggccacaaccgcgagagctacatggtccccttcatccccctgtaccgcaacggggacttcttcatctccagcaaggacctcggctacgactacagctacctgcaggactccgacccggacagcttccaggactacatcaagtcctacctggagcaggccagccggatctggtcctggctcctgggggccgcgatggtgggcgccgtgctgacggccctcctggccggcctggtcagcctcctgtgccgccacaagcggaagcagctgcccgaggagaagcagcccctgctcatggagaaggaggactaccactccctgtaccagagccacctgtga

SEQ ID NO: 1504 - RNA, 1590 nt, synthetic construct
  misc_feature 1..1590: note = AGV39086_variant
  source 1..1590: mol_type = other RNA
atgctgctcgccgtgctgtactgcctgctctggagcttccagacctccgccggccacttcccccgcgcgtgcgtcagctccaagaacctgatggagaaggagtgctgcccgccctggagcggggaccggtccccctgcggccagctgagcgggcgcggctcctgccagaacatcctcctgagcaacgcgcccctggggccgcagttccccttcaccggcgtggacgaccgggagtcctggcccagcgtgttctacaaccgcacgtgccagtgctccggcaacttcatggggttcaactgcggcaactgcaagttcgggttctggggccccaactgcaccgagcggcgcctcctggtccggcgcaacatcttcgacctgagcgccccggagaaggacaagttcttcgcctacctcaccctggccaagcacaccatctccagcgactacgtgatccccatcgggacgtacggccagatgaagaacggctccacccccatgttcaacgacatcaacatctacgacctgttcgtgtggatgcactactacgtcagcatggacgccctcctcgggggctccgagatctggcgggacatcgacttcgcccacgaggcccccgccttcctgccgtggcaccgcctgttcctgctgcggtgggagcaggagatccagaagctcaccggggacgagaacttcaccatcccctactgggactggcgcgacgcggagaagtgcgacatctgcacggacgagtacatgggcggccagcaccccaccaaccccaacctgctgagcccggcctccttcttcagcagctggcagatcgtgtgctcccggctcgaggagtacaacagccaccagtccctgtgcaacgggacccccgagggccccctgcgccggaaccccgggaaccacgacaagagccgcaccccgcggctcccctccagcgccgacgtggagttctgcctgtccctgacgcagtacgagagcggctccatggacaaggccgccaacttcagcttccgcaacaccctcgaggggttcgcgagccccctgaccggcatcgccgacgcctcccagtccagcatgcacaacgccctgcacatctacatgaacggcaccatgtcccaggtccaggggagcgccaacgaccccatcttcctcctgcaccacgcgttcgtggactccatgttcgagcagtggctgcggcgccaccggccgctccaggaggtgtaccccgaggccaacgcccccatcggccacaaccgcgagagctacatggtccccttcatcccgctgtaccgcaacggggacttcttcatctccagcaaggacctgggctacgactacagctacctccaggactccgaccccgacagcttccaggactacatcaagtcctacctggagcaggccagccggatctggtcctggctgctcggggccgcgatggtgggcgccgtgctgacggccctgctcgccggcctggtcagcctgctctgccgccacaagcggaagcagctgcccgaggagaagcagccgctgctgatggagaaggaggactaccactccctctaccagagccacctgtga

SEQ ID NO: 1505 - RNA, 1614 nt, synthetic construct
  misc_feature 1..1614: note = AAC15468_variant
  source 1..1614: mol_type = other RNA
atgagcgcccccaagctgctctccctgggctgcatcttcttcccgctgctcctgttccagcaggcccgcgcgcagttcccccggcagtgcgccaccgtggaggccctgcgcagcgggatgtgctgccccgacctctcccccgtcagcggcccggggaccgaccggtgcggctccagctccgggcgcggccggtgcgaggccgtgacggccgacagccgcccccacagcccccagtacccccacgacggccgggacgaccgcgaggtgtggccgctgcggttcttcaaccggacctgccactgcaacgggaacttctccggccacaactgcgggacctgccgccccggctggcgcggggcggcctgcgaccagcgggtcctgatcgtgcgccggaacctcctggacctgtccaaggaggagaagaaccacttcgtgcgcgccctcgacatggccaagcggaccacgcaccccctgttcgtcatcgcgacccgccggagcgaggagatcctgggccccgacggcaacaccccgcagttcgagaacatctccatctacaactacttcgtgtggacccactactacagcgtgaagaagacgttcctcggggtcggccaggagtccttcggggaggtggacttcagccacgagggccccgccttcctgacctggcaccgctaccacctcctgcggctggagaaggacatgcaggagatgctgcaggagccctccttcagcctcccctactggaacttcgccaccggcaagaacgtgtgcgacatctgcaccgacgacctgatggggtcccgcagcaacttcgacagcacgctgatctccccgaacagcgtcttctcccagtggcgcgtggtgtgcgacagcctcgaggactacgacaccctgggcaccctgtgcaactccaccgaggacgggcccatccggcgcaaccccgccggcaacgtcgcccggcccatggtgcagcgcctcccggagccccaggacgtggcgcagtgcctggaggtcgggctgttcgacacgccgcccttctacagcaactccaccaacagcttccggaacaccgtggagggctactccgaccccaccggcaagtacgaccccgccgtgcgcagcctccacaacctggcccacctgttcctcaacgggacgggcgggcagacccacctgtcccccaacgaccccatcttcgtcctgctccacaccttcaccgacgccgtgttcgacgagtggctgcggcgctacaacgccgacatcagcacgttcccgctggagaacgcgcccatcggccacaaccggcagtacaacatggtgcccttctggccgcccgtcaccaacaccgagatgttcgtgaccgcccccgacaacctcgggtacacgtacgagatccagtggccctcccgcgagttcagcgtcccggagatcatcgccatcgccgtggtgggcgccctgctgctcgtcgcgctgatcttcggcaccgcctcctacctgatccgggcccgccggagcatggacgaggccaaccagcccctcctgaccgaccagtaccagtgctacgccgaggagtacgagaagctgcagaaccccaaccagtccgtggtgtga

SEQ ID NO: 1506 - RNA, 1560 nt, synthetic construct
  misc_feature 1..1560: note = AAA20870_variant
  source 1..1560: mol_type = other RNA
atgagccccctgtggtggggcttcctcctgtcctgcctggggtgcaagatcctcccgggcgcccaggggcagttcccccgcgtgtgcatgaccgtcgacagcctggtgaacaaggagtgctgcccccggctgggcgccgagtccgcgaacgtgtgcgggagccagcagggccgcggccagtgcaccgaggtccgggccgacacgcgcccctggtccgggccgtacatcctccggaaccaggacgaccgcgagctgtggccccggaagttcttccaccggacctgcaagtgcaccggcaacttcgccgggtacaactgcggcgactgcaagttcgggtggaccggccccaactgcgagcgcaagaagcccccggtgatccgccagaacatccacagcctgagcccccaggagcgggagcagttcctcggcgccctggacctggccaagaagcgcgtgcaccccgactacgtcatcacgacccagcactggctcgggctgctgggccccaacgggacccagccgcagttcgcgaactgctccgtgtacgacttcttcgtgtggctccactactactccgtccgggacaccctgctgggccccggccgcccctaccgggccatcgacttcagccaccaggggcccgccttcgtgacgtggcaccgctaccacctcctgtgcctggagcgggacctccagcgcctgatcggcaacgagtccttcgccctgccgtactggaacttcgcgaccgggcggaacgagtgcgacgtgtgcaccgaccagctgttcggcgccgcccgccccgacgaccccaccctcatcagccggaactcccgcttcagctcctgggagacggtctgcgacagcctggacgactacaaccacctcgtgaccctgtgcaacgggacctacgagggcctgctccgccggaaccagatgggccgcaactccatgaagctgcccaccctgaaggacatccgggactgcctcagcctgcagaagttcgacaacccgcccttcttccagaactccacgttcagcttccgcaacgccctggaggggttcgacaaggccgacggcaccctcgacagccaggtgatgtccctgcacaacctggtccacagcttcctcaacgggaccaacgcgctgccccactccgccgccaacgaccccatcttcgtggtgctgcacagcttcaccgacgccatcttcgacgagtggatgaagcggttcaacccgcccgccgacgcgtggccccaggagctcgcccccatcggccacaaccgcatgtacaacatggtcccgttcttcccgcccgtgacgaacgaggagctgttcctgacctccgaccagctcgggtacagctacgccatcgacctgcccgtgtccgtcgaggagacccccggctggcccaccacgctgctcgtggtgatgggcaccctggtcgccctggtggggctgttcgtcctcctggccttcctgcagtaccggcgcctccggaagggctacacgcccctgatggagacccacctgagctccaagcgctacaccgaggaggcgtga

SEQ ID NO: 1507 - RNA, 456 nt, synthetic construct
  misc_feature 1..456: note = CCDS7679.1_variant
  source 1..456: mol_type = other RNA
atgcgccggctgctcctggtgaccagcctggtcgtggtgctcctgtgggaggccggcgccgtccccgcgcccaaggtgcccatcaagatgcaggtcaagcactggccctccgagcaggaccccgagaaggcctggggcgcccgcgtggtggagccgcccgagaaggacgaccagctggtggtcctcttccccgtgcagaagcccaagctgctgaccacggaggagaagccgcgggggcaggggcgcggccccatcctccccgggaccaaggcctggatggagaccgaggacaccctgggccacgtgctgagccccgagccggaccacgactccctctaccacccgccgcccgaggaggaccagggcgaggagcggccccgcctgtgggtcatgcccaaccaccaggtgctgctcgggcccgaggaggaccaggaccacatctaccacccccagtga

SEQ ID NO: 1508 - RNA, 525 nt, synthetic construct
  misc_feature 1..525: note = ACF47598_variant
  source 1..525: mol_type = other RNA
atggtgagctactgggacaccggcgtcctgctctgcgccctgctgtcctgcctcctgctgaccgggagctccagcggctccaagctcaaggaccccgagctgagcctgaaggggacgcagcacatcatgcaggccggccagaccctccacctccagtgccgcggggaggcggcccacaagtggtccctgccggagatggtgagcaaggagtccgagcggctgagcatcaccaagtccgcctgcggccgcaacggcaagcagttctgcagcaccctgacgctgaacaccgcccaggccaaccacaccgggttctactcctgcaagtacctcgcggtgcccaccagcaagaagaaggagacggagtccgccatctacatcttcatcagcgacaccggccggcccttcgtcgagatgtactccgagatccccgagatcatccacatgaccgaggggcgcgagctggtgatcccgtgccgggtgaccagccccaacatcacggtcaccctgaagaagaagaaggcctga

SEQ ID NO: 1509 - RNA, 750 nt, synthetic construct
  misc_feature 1..750: note = BAR92607_variant
  source 1..750: mol_type = other RNA
atgggcagcgacgtgcgcgacctgaacgccctcctgcccgccgtcccctccctcgggggcgggggcgggtgcgcgctgcccgtgagcggcgccgcccagtgggcccccgtgctggacttcgcgccgcccggcgcctccgcctacgggagcctgggcgggcccgcgcccccgcccgcgcccccgcccccgcccccgcccccgccccactccttcatcaagcaggagcccagctggggcggggccgagccccacgaggagcagtgcctctccgccttcaccgtccacttcagcggccagttcaccggcacggccggggcctgccggtacggccccttcgggccgccgccgccctcccaggccagctccggccaggcccgcatgttccccaacgccccctacctgcccagctgcctggagtcccagcccgccatccggaaccagggctacagcaccgtgaccttcgacgggaccccctcctacggccacacgcccagccaccacgccgcccagttccccaaccactccttcaagcacgaggaccccatggggcagcagggcagcctcggggagcagcagtactccgtgcccccgcccgtctacggctgccacacccccaccgacagctgcaccggcagccaggcgctgctgctccgcacgccctactccagcgacaacctgtaccagatgacctcccagctggagtgcatgacctggaaccagatgaacctcggggccaccctgaagggctga

SEQ ID NO: 1510 - RNA, 1350 nt, synthetic construct
  misc_feature 1..1350: note = AAA61299_variant
  source 1..1350: mol_type = other RNA
atgggcagcgacgtgcgcgacctgaacgccctcctgcccgccgtcccgtccctcgggggcgggggcgggtgcgcgctgcccgtgagcggcgccgcccagtgggcccccgtgctggacttcgcgccgcccggcgcctccgcctacgggagcctgggcgggcccgcgcccccgcccgcgcccccgcccccgcccccgcccccgccccactccttcatcaagcaggagcccagctggggcggggccgagccccacgaggagcagtgcctctccgccttcaccgtccacttcagcggccagttcaccggcacggccggggcctgccggtacggccccttcgggcccccgccgccctcccaggccagctccggccaggcccgcatgttccccaacgccccctacctgcccagctgcctggagtcccagcccgccatccggaaccagggctacagcaccgtgaccttcgacgggaccccctcctacggccacacgcccagccaccacgccgcccagttccccaaccactccttcaagcacgaggaccccatggggcagcagggcagcctcggggagcagcagtactccgtgccgccgcccgtctacggctgccacacccccaccgacagctgcaccggcagccaggcgctgctgctccgcacgccctactccagcgacaacctgtaccagatgacctcccagctggagtgcatgacctggaaccagatgaacctcggggccaccctgaagggcgtggccgccgggagctccagctccgtgaagtggacggagggccagagcaaccactccaccgggtacgagagcgacaaccacaccacccccatcctgtgcggcgcccagtaccggatccacacgcacggcgtcttccgcgggatccaggacgtgcggcgcgtgcccggcgtcgcgcccaccctcgtgcggtccgccagcgagacctccgagaagcgccccttcatgtgcgcctaccccgggtgcaacaagcggtacttcaagctgagccacctccagatgcactcccgcaagcacaccggcgagaagccgtaccagtgcgacttcaaggactgcgagcggcgcttcagccggtccgaccagctgaagcgccaccagcggcgccacacgggggtgaagcccttccagtgcaagacctgccagcggaagttcagccgctccgaccacctgaagacccacacccggacgcacaccggcaagaccagcgagaagcccttcagctgccgctggccctcctgccagaagaagttcgcccgcagcgacgagctggtccggcaccacaacatgcaccagcgcaacatgaccaagctccagctggccctgtga

SEQ ID NO: 1511 - RNA, 279 nt, synthetic construct
  misc_feature 1..279: note = AAA63269_variant
  source 1..279: mol_type = other RNA
atgcagcgccggggccagcccctggagaaccacgtggccctcatccactggcagagcgccgggatcccggcgtccaaggtccacaactactgcaacatgaagaagtcccgcctgggccggtcccgcgccgtgcggatcagccagcccctgctcagcccccgccggtgccccctgcacctgaccgagcgcggggccggcctcctgcagccgcagccccaggggcccgtgcggacccccggcccgcccagcggctcccaccccgccgccgcggacaactga

SEQ ID NO: 1512 - RNA, 246 nt, synthetic construct
  misc_feature 1..246: note = AAP35763_variant
  source 1..246: mol_type = other RNA
atggagagccccaagaagaagaaccagcagctgaaggtgggcatcctccacctggggtcccgccagaagaagatccggatccagctgcgcagccagtgcgccacctggaaggtcatctgcaagtcctgcatcagccagaccccgggcatcaacctcgacctggggtccggcgtgaaggtgaagatcatccccaaggaggagcactgcaagatgcccgaggccggggaggagcagccccaggtctga

SEQ ID NO: 1513 - RNA, 1098 nt, synthetic construct
  misc_feature 1..1098: note = AAA59652 variant
  source 1..1098: mol_type = other RNA
atggccgtcatggccccccgcaccctcctcctcctcctctccggcgccctcgccctcacccagacctgggccggctcccactccatgcgctacttcttcacctccgtctcccgccccggccgcggcgagccccgcttcatcgccgtcggctacgtcgacgacacccagttcgtccgcttcgactccgacgccgcctcccagaagatggagccccgcgccccctggatcgagcaggagggccccgagtactgggaccaggagacccgcaacatgaaggcccactcccagaccgaccgcgccaacctcggcaccctccgcggctactacaaccagtccgaggacggctcccacaccatccagatcatgtacggctgcgacgtcggccccgacggccgcttcctccgcggctaccgccaggacgcctacgacggcaaggactacatcgccctcaacgaggacctccgctcctggaccgccgccgacatggccgcccagatcaccaagcgcaagtgggaggccgtccacgccgccgagcagcgccgcgtctacctcgagggccgctgcgtcgacggcctccgccgctacctcgagaacggcaaggagaccctccagcgcaccgacccccccaagacccacatgacccaccaccccatctccgaccacgaggccaccctccgctgctgggccctcggcttctaccccgccgagatcaccctcacctggcagcgcgacggcgaggaccagacccaggacaccgagctcgtcgagacccgccccgccggcgacggcaccttccagaagtgggccgccgtcgtcgtcccctccggcgaggagcagcgctacacctgccacgtccagcacgagggcctccccaagcccctcaccctccgctgggagctctcctcccagcccaccatccccatcgtcggcatcatcgccggcctcgtcctcctcggcgccgtcatcaccggcgccgtcgtcgccgccgtcatgtggcgccgcaagtcctccgaccgcaagggcggctcctacacccaggccgcctcctccgactccgcccagggctccgacgtctccctcaccgcctgcaaggtctga

SEQ ID NO: 1514 - RNA, 1098 nt, synthetic construct
  misc_feature 1..1098: note = AAA59606 variant
  source 1..1098: mol_type = other RNA
atggccgtcatggccccccgcaccctcgtcctcctcctctccggcgccctcgccctcacccagacctgggccggctcccactccatgcgctacttcttcacctccgtctcccgccccggccgcggcgagccccgcttcatcgccgtcggctacgtcgacgacacccagttcgtccgcttcgactccgacgccgcctcccagcgcatggagccccgcgccccctggatcgagcaggagggccccgagtactgggacggcgagacccgcaaggtcaaggcccactcccagacccaccgcgtcgacctcggcaccctccgcggctactacaaccagtccgaggccggctcccacaccgtccagcgcatgtacggctgcgacgtcggctccgactggcgcttcctccgcggctaccaccagtacgcctacgacggcaaggactacatcgccctcaaggaggacctccgctcctggaccgccgccgacatggccgcccagaccaccaagcacaagtgggaggccgcccacgtcgccgagcagctccgcgcctacctcgagggcacctgcgtcgagtggctccgccgctacctcgagaacggcaaggagaccctccagcgcaccgacgcccccaagacccacatgacccaccacgccgtctccgaccacgaggccaccctccgctgctgggccctctccttctaccccgccgagatcaccctcacctggcagcgcgacggcgaggaccagacccaggacaccgagctcgtcgagacccgccccgccggcgacggcaccttccagaagtgggccgccgtcgtcgtcccctccggccaggagcagcgctacacctgccacgtccagcacgagggcctccccaagcccctcaccctccgctgggagccctcctcccagcccaccatccccatcgtcggcatcatcgccggcctcgtcctcttcggcgccgtcatcaccggcgccgtcgtcgccgccgtcatgtggcgccgcaagtcctccgaccgcaagggcggctcctactcccaggccgcctcctccgactccgcccagggctccgacgtctccctcaccgcctgcaaggtctga

SEQ ID NO: 1515 - RNA, 1263 nt, synthetic construct
  misc_feature 1..1263: note = AAH37161 variant
  source 1..1263: mol_type = other RNA
atgcccggcggctgctcccgcggccccgccgccggcgacggccgcctccgcctcgcccgcctcgccctcgtcctcctcggctgggtctcctcctcctcccccacctcctccgcctcctccttctcctcctccgcccccttcctcgcctccgccgtctccgcccagccccccctccccgaccagtgccccgccctctgcgagtgctccgaggccgcccgcaccgtcaagtgcgtcaaccgcaacctcaccgaggtccccaccgacctccccgcctacgtccgcaacctcttcctcaccggcaaccagctcgccgtcctccccgccggcgccttcgcccgccgcccccccctcgccgagctcgccgccctcaacctctccggctcccgcctcgacgaggtccgcgccggcgccttcgagcacctcccctccctccgccagctcgacctctcccacaaccccctcgccgacctctcccccttcgccttctccggctccaacgcctccgtctccgccccctcccccctcgtcgagctcatcctcaaccacatcgtcccccccgaggacgagcgccagaaccgctccttcgagggcatggtcgtcgccgccctcctcgccggccgcgccctccagggcctccgccgcctcgagctcgcctccaaccacttcctctacctcccccgcgacgtcctcgcccagctcccctccctccgccacctcgacctctccaacaactccctcgtctccctcacctacgtctccttccgcaacctcacccacctcgagtccctccacctcgaggacaacgccctcaaggtcctccacaacggcaccctcgccgagctccagggcctcccccacatccgcgtcttcctcgacaacaacccctgggtctgcgactgccacatggccgacatggtcacctggctcaaggagaccgaggtcgtccagggcaaggaccgcctcacctgcgcctaccccgagaagatgcgcaaccgcgtcctcctcgagctcaactccgccgacctcgactgcgaccccatcctccccccctccctccagacctcctacgtcttcctcggcatcgtcctcgccctcatcggcgccatcttcctcctcgtcctctacctcaaccgcaagggcatcaagaagtggatgcacaacatccgcgacgcctgccgcgaccacatggagggctaccactaccgctacgagatcaacgccgacccccgcctcaccaacctctcctccaactccgacgtctga

SEQ ID NO: 1516 - RNA, 1632 nt, synthetic construct
  misc_feature 1..1632: note = AAH33010 variant
  source 1..1632: mol_type = other RNA
atgcgcaagcccgccgccggcttcctcccctccctcctcaaggtcctcctcctccccctcgcccccgccgccgcccaggactccacccaggcctccacccccggctcccccctctcccccaccgagtacgagcgcttcttcgccctcctcacccccacctggaaggccgagaccacctgccgcctccgcgccacccacggctgccgcaaccccaccctcgtccagctcgaccagtacgagaaccacggcctcgtccccgacggcgccgtctgctccaacctcccctacgcctcctggttcgagtccttctgccagttcacccactaccgctgctccaaccacgtctactacgccaagcgcgtcctctgctcccagcccgtctccatcctctcccccaacaccctcaaggagatcgaggcctccgccgaggtctcccccaccaccatgacctcccccatctccccccacttcaccgtcaccgagcgccagaccttccagccctggcccgagcgcctctccaacaacgtcgaggagctcctccagtcctccctctccctcggcggccaggagcaggcccccgagcacaagcaggagcagggcgtcgagcaccgccaggagcccacccaggagcacaagcaggaggagggccagaagcaggaggagcaggaggaggagcaggaggaggagggcaagcaggaggagggccagggcaccaaggagggccgcgaggccgtctcccagctccagaccgactccgagcccaagttccactccgagtccctctcctccaacccctcctccttcgccccccgcgtccgcgaggtcgagtccacccccatgatcatggagaacatccaggagctcatccgctccgcccaggagatcgacgagatgaacgagatctacgacgagaactcctactggcgcaaccagaaccccggctccctcctccagctcccccacaccgaggccctcctcgtcctctgctactccatcgtcgagaacacctgcatcatcacccccaccgccaaggcctggaagtacatggaggaggagatcctcggcttcggcaagtccgtctgcgactccctcggccgccgccacatgtccacctgcgccctctgcgacttctgctccctcaagctcgagcagtgccactccgaggcctccctccagcgccagcagtgcgacacctcccacaagacccccttcgtctcccccctcctcgcctcccagtccctctccatcggcaaccaggtcggctcccccgagtccggccgcttctacggcctcgacctctacggcggcctccacatggacttctggtgcgcccgcctcgccaccaagggctgcgaggacgtccgcgtctccggctggctccagaccgagttcctctccttccaggacggcgacttccccaccaagatctgcgacaccgactacatccagtaccccaactactgctccttcaagtcccagcagtgcctcatgcgcaaccgcaaccgcaaggtctcccgcatgcgctgcctccagaacgagacctactccgccctctcccccggcaagtccgaggacgtcgtcctccgctggtcccaggagttctccaccctcaccctcggccagttcggctga

SEQ ID NO: 1517 - RNA, 1830 nt, synthetic construct
  misc_feature 1..1830: note = AAB58754 variant
  source 1..1830: mol_type = other RNA
atgaagtgggtcgagtccatcttcctcatcttcctcctcaacttcaccgagtcccgcaccctccaccgcaacgagtacggcatcgcctccatcctcgactcctaccagtgcaccgccgagatctccctcgccgacctcgccaccatcttcttcgcccagttcgtccaggaggccacctacaaggaggtctccaagatggtcaaggacgccctcaccgccatcgagaagcccaccggcgacgagcagtcctccggctgcctcgagaaccagctccccgccttcctcgaggagctctgccacgagaaggagatcctcgagaagtacggccactccgactgctgctcccagtccgaggagggccgccacaactgcttcctcgcccacaagaagcccacccccgcctccatccccctcttccaggtccccgagcccgtcacctcctgcgaggcctacgaggaggaccgcgagaccttcatgaacaagttcatctacgagatcgcccgccgccaccccttcctctacgcccccaccatcctcctctgggccgcccgctacgacaagatcatcccctcctgctgcaaggccgagaacgccgtcgagtgcttccagaccaaggccgccaccgtcaccaaggagctccgcgagtcctccctcctcaaccagcacgcctgcgccgtcatgaagaacttcggcacccgcaccttccaggccatcaccgtcaccaagctctcccagaagttcaccaaggtcaacttcaccgagatccagaagctcgtcctcgacgtcgcccacgtccacgagcactgctgccgcggcgacgtcctcgactgcctccaggacggcgagaagatcatgtcctacatctgctcccagcaggacaccctctccaacaagatcaccgagtgctgcaagctcaccaccctcgagcgcggccagtgcatcatccacgccgagaacgacgagaagcccgagggcctctcccccaacctcaaccgcttcctcggcgaccgcgacttcaaccagttctcctccggcgagaagaacatcttcctcgcctccttcgtccacgagtactcccgccgccacccccagctcgccgtctccgtcatcctccgcgtcgccaagggctaccaggagctcctcgagaagtgcttccagaccgagaaccccctcgagtgccaggacaagggcgaggaggagctccagaagtacatccaggagtcccaggccctcgccaagcgctcctgcggcctcttccagaagctcggcgagtactacctccagaacgccttcctcgtcgcctacaccaagaaggccccccagctcacctcctccgagctcatggccatcacccgcaagatggccgccaccgccgccacctgctgccagctctccgaggacaagctcctcgcctgcggcgagggcgccgccgacatcatcatcggccacctctgcatccgccacgagatgacccccgtcaaccccggcgtcggccagtgctgcacctcctcctacgccaaccgccgcccctgcttctcctccctcgtcgtcgacgagacctacgtcccccccgccttctccgacgacaagttcatcttccacaaggacctctgccaggcccagggcgtcgccctccagaccatgaagcaggagttcctcatcaacctcgtcaagcagaagccccagatcaccgaggagcagctcgaggccgtcatcgccgacttctccggcctcctcgagaagtgctgccagggccaggagcaggaggtctgcttcgccgaggagggccagaagctcatctccaagacccgcgccgccctcggcgtctga

SEQ ID NO: 1518 - RNA, 2565 nt, synthetic construct
  misc_feature 1..2565: note = AAI26251 variant
  source 1..2565: mol_type = other RNA
atgatggcctactccgacaccaccatgatgtccgacgacatcgactggctccgctcccaccgcggcgtctgcaaggtcgacctctacaaccccgagggccagcaggaccaggaccgcaaggtcatctgcttcgtcgacgtctccaccctcaacgtcgaggacaaggactacaaggacgccgcctcctcctcctccgagggcaacctcaacctcggctccctcgaggagaaggagatcatcgtcatcaaggacaccgagaagaaggaccagtccaagaccgagggctccgtctgcctcttcaagcaggccccctccgaccccgtctccgtcctcaactggctcctctccgacctccagaagtacgccctcggcttccagcacgccctctccccctccacctccacctgcaagcacaaggtcggcgacaccgagggcgagtaccaccgcgcctcctccgagaactgctactccgtctacgccgaccaggtcaacatcgactacctcatgaaccgcccccagaacctccgcctcgagatgaccgccgccaagaacaccaacaacaaccagtccccctccgccccccccgccaagcccccctccacccagcgcgccgtcatctcccccgacggcgagtgctccatcgacgacctctccttctacgtcaaccgcctctcctccctcgtcatccagatggcccacaaggagatcaaggagaagctcgagggcaagtccaagtgcctccaccactccatctgcccctcccccggcaacaaggagcgcatctccccccgcacccccgcctccaagatcgcctccgagatggcctacgaggccgtcgagctcaccgccgccgagatgcgcggcaccggcgaggagtcccgcgagggcggccagaagtccttcctctactccgagctctccaacaagtccaagtccggcgacaagcagatgtcccagcgcgagtccaaggagttcgccgactccatctccaagggcctcatggtctacgccaaccaggtcgcctccgacatgatggtctccctcatgaagaccctcaaggtccactcctccggcaagcccatccccgcctccgtcgtcctcaagcgcgtcctcctccgccacaccaaggagatcgtctccgacctcatcgactcctgcatgaagaacctccacaacatcaccggcgtcctcatgaccgactccgacttcgtctccgccgtcaagcgcaacctcttcaaccagtggaagcagaacgccaccgacatcatggaggccatgctcaagcgcctcgtctccgccctcatcggcgaggagaaggagaccaagtcccagtccctctcctacgcctccctcaaggccggctcccacgaccccaagtgccgcaaccagtccctcgagttctccaccatgaaggccgagatgaaggagcgcgacaagggcaagatgaagtccgacccctgcaagtccctcacctccgccgagaaggtcggcgagcacatcctcaaggagggcctcaccatctggaaccagaagcagggcaactcctgcaaggtcgccaccaaggcctgctccaacaaggacgagaagggcgagaagatcaacgcctccaccgactccctcgccaaggacctcatcgtctccgccctcaagctcatccagtaccacctcacccagcagaccaagggcaaggacacctgcgaggaggactgccccggctccaccatgggctacatggcccagtccacccagtacgagaagtgcggcggcggccagtccgccaaggccctctccgtcaagcagctcgagtcccaccgcgcccccggcccctccacctgccagaaggagaaccagcacctcgactcccagaagatggacatgtccaacatcgtcctcatgctcatccagaagctcctcaacgagaaccccttcaagtgcgaggacccctgcgagggcgagaacaagtgctccgagccccgcgcctccaaggccgcctccatgtccaaccgctccgacaaggccgaggagcagtgccaggagcaccaggagctcgactgcacctccggcatgaagcaggccaacggccagttcatcgacaagctcgtcgagtccgtcatgaagctctgcctcatcatggccaagtactccaacgacggcgccgccctcgccgagctcgaggagcaggccgcctccgccaacaagcccaacttccgcggcacccgctgcatccactccggcgccatgccccagaactaccaggactccctcggccacgaggtcatcgtcaacaaccagtgctccaccaactccctccagaagcagctccaggccgtcctccagtggatcgccgcctcccagttcaacgtccccatgctctacttcatgggcgacaaggacggccagctcgagaagctcccccaggtctccgccaaggccgccgagaagggctactccgtcggcggcctcctccaggaggtcatgaagttcgccaaggagcgccagcccgacgaggccgtcggcaaggtcgcccgcaagcagctcctcgactggctcctcgccaacctctga

SEQ ID NO: 1519 - RNA, 1251 nt, synthetic construct
  misc_feature 1..1251: note = BAG61782 variant
  source 1..1251: mol_type = other RNA
atggtcgactaccacgccgccaaccagtcctaccagtacggcccctcctccgccggcaacggcgccggcggcggcggctccatgggcgactacatggcccaggaggacgactgggaccgcgacctcctcctcgaccccgcctgggagaagcagcagcgcaagaccttcaccgcctggtgcaactcccacctccgcaaggccggcacccagatcgagaacatcgacgaggacttccgcgacggcctcaagctcatgctcctcctcgaggtcatctccggcgagcgcctccccaagcccgagcgcggcaagatgcgcgtccacaagatcaacaacgtcaacaaggccctcgacttcatcgcctccaagggcgtcaagctcgtctccatcggcgccgaggagatcgtcgacggcaacgccaagatgaccctcggcatgatctggaccatcatcctccgcttcgccatccaggacatctccgtcgaggagacctccgccaaggagggcctcctcctctggtgccagcgcaagaccgccccctacaagaacgtcaacgtccagaacttccacatctcctggaaggacggcctcgccttcaacgccctcatccaccgccaccgccccgagctcatcgagtacgacaagctccgcaaggacgaccccgtcaccaacctcaacaacgccttcgaggtcgccgagaagtacctcgacatccccaagatgctcgacgccgaggacatcgtcaacaccgcccgccccgacgagaaggccatcatgacctacgtctcctccttctaccacgccttctccggcgcccagaaggccgagaccgccgccaaccgcatctgcaaggtcctcgccgtcaaccaggagaacgagcacctcatggaggactacgagaagctcgcctccgacctcctcgagtggatccgccgcaccatcccctggctcgaggaccgcgtcccccagaagaccatccaggagatgcagcagaagctcgaggacttccgcgactaccgccgcgtccacaagccccccaaggtccaggagaagtgccagctcgagatcaacttcaacaccctccagaccaagctccgcctctccaaccgccccgccttcatgccctcctggcgctcccgcgcctcctcctcccccacctccacctgcgccgcctcctcccccgcccgccccatgctctggggccccggctcccgcccccgctggcgccgctccggcgcctcccccctccgctga

SEQ ID NO: 1520 - RNA, 1689 nt, synthetic construct
  misc_feature 1..1689: note = BAG65349 variant
  source 1..1689: mol_type = other RNA
atggtcgactaccacgccgccaaccagtcctaccagtacggcccctcctccgccggcaacggcgccggcggcggcggctccatgggcgactacatggcccaggaggacgactgggaccgcgacctcctcctcgaccccgcctgggagaagcagcagcgcaagaccttcaccgcctggtgcaactcccacctccgcaaggccggcacccagatcgagaacatcgacgaggacttccgcgacggcctcaagctcatgctcctcctcgaggtcatctccggcgagcgcctccccaagcccgagcgcggcaagatgcgcgtccacaagatcaacaacgtcaacaaggccctcgacttcatcgcctccaagggcgtcaagctcgtctccatcggcgccgaggagatcgtcgacggcaacgccaagatgaccctcggcatgatctggaccatcatcctccgcttcgccatccaggacatctccgtcgaggagacctccgccaaggagggcctcctcctctggtgccagcgcaagaccgccccctacaagaacgtcaacgtccagaacttccacatctcctggaaggacggcctcgccttcaacgccctcatccaccgccaccgccccgagctcatcgagtacgacaagctccgcaaggacgaccccgtcaccaacctcaacaacgccttcgaggtcgccgagaagtacctcgacatccccaagatgctcgacgccgaggacatcgtcaacaccgcccgccccgacgagaaggccatcatgacctacgtctcctccttctaccacgccttctccggcgcccagaaggccgagaccgccgccaaccgcatctgcaaggtcctcgccgtcaaccaggagaacgagcacctcatggaggactacgagaagctcgcctccgacctcctcgagtggatccagcgcaccatcccctggctcgaggaccgcgtcccccagaaggccatccaggagatgcagcagaagctcgaggacttccgcgactaccgccgcgtccacaagccccccaaggtccaggagaagtgccagctcgagatcaacttcaacaccctccagaccaagctccgcctctccaaccgccccgccttcatgccctccgagggcaagatggtctccgacatcaacaacggctggcagcacctcgagcaggccgagaagggctacgaggagtggctcctcaacgagatccgccgcctcgagcgcctcgaccacctcgccgagaagttccgccagaaggcctccatccacgaggcctggaccgacggcaaggaggccatgctcaagcaccgcgactacgagaccgccaccctctccgacatcaaggccctcatccgcaagcacgaggccttcgagtccgacctcgccgcccaccaggaccgcgtcgagcagatcgccgccatcgcccaggagctcaacgagctcgactactacgactcccacaacgtcaacacccccgacggcctccaggagggccccggccagccccactcccccatcccccccctctgcatctacgccaagcactccctccagtcctccggcgtcggcggctgggccggccgcggctggggccgcctctcccccctctccctctgcggcctcgcccgccgcttcccccgccccggctggggcgacctcggccccgccctcctcgtctggtga

SEQ ID NO: 1521 - RNA, 2736 nt, synthetic construct
  misc_feature 1..2736: note = AAH05033 variant
  source 1..2736: mol_type = other RNA
atggtcgactaccacgccgccaaccagtcctaccagtacggcccctcctccgccggcaacggcgccggcggcggcggctccatgggcgactacatggcccaggaggacgactgggaccgcgacctcctcctcgaccccgcctgggagaagcagcagcgcaagaccttcaccgcctggtgcaactcccacctccgcaaggccggcacccagatcgagaacatcgacgaggacttccgcgacggcctcaagctcatgctcctcctcgaggtcatctccggcgagcgcctccccaagcccgagcgcggcaagatgcgcgtccacaagatcaacaacgtcaacaaggccctcgacttcatcgcctccaagggcgtcaagctcgtctccatcggcgccgaggagatcgtcgacggcaacgccaagatgaccctcggcatgatctggaccatcatcctccgcttcgccatccaggacatctccgtcgaggagacctccgccaaggagggcctcctcctctggtgccagcgcaagaccgccccctacaagaacgtcaacgtccagaacttccacatctcctggaaggacggcctcgccttcaacgccctcatccaccgccaccgccccgagctcatcgagtacgacaagctccgcaaggacgaccccgtcaccaacctcaacaacgccttcgaggtcgccgagaagtacctcgacatccccaagatgctcgacgccgaggacatcgtcaacaccgcccgccccgacgagaaggccatcatgacctacgtctcctccttctaccacgccttctccggcgcccagaaggccgagaccgccgccaaccgcatctgcaaggtcctcgccgtcaaccaggagaacgagcacctcatggaggactacgagaagctcgcctccgacctcctcgagtggatccgccgcaccatcccctggctcgaggaccgcgtcccccagaagaccatccaggagatgcagcagaagctcgaggacttccgcgactaccgccgcgtccacaagccccccaaggtccaggagaagtgccagctcgagatcaacttcaacaccctccagaccaagctccgcctctccaaccgccccgccttcatgccctccgagggcaagatggtctccgacatcaacaacggctggcagcacctcgagcaggccgagaagggctacgaggagtggctcctcaacgagatccgccgcctcgagcgcctcgaccacctcgccgagaagttccgccagaaggcctccatccacgaggcctggaccgacggcaaggaggccatgctcaagcaccgcgactacgagaccgccaccctctccgacatcaaggccctcatccgcaagcacgaggccttcgagtccgacctcgccgcccaccaggaccgcgtcgagcagatcgccgccatcgcccaggagctcaacgagctcgactactacgactcccacaacgtcaacacccgctgccagaagatctgcgaccagtgggacgccctcggctccctcacccactcccgccgcgaggccctcgagaagaccgagaagcagctcgaggccatcgaccagctccacctcgagtacgccaagcgcgccgcccccttcaacaactggatggagtccgccatggaggacctccaggacatgttcatcgtccacaccatcgaggagatcgagggcctcatctccgcccacgaccagttcaagtccaccctccccgacgccgaccgcgagcgcgaggccatcctcgccatccacaaggaggcccagcgcatcgccgagtccaaccacatcaagctctccggctccaacccctacaccaccgtcaccccccagatcatcaactccaagtgggagaaggtccagcagctcgtccccaagcgcgaccacgccctcctcgaggagcagtccaagcagcagtccaacgagcacctccgccgccagttcgcctcccaggccaacgtcgtcggcccctggatccagaccaagatggaggagatcggccgcatctccatcgagatgaacggcaccctcgaggaccagctctcccacctcaagcagtacgagcgctccatcgtcgactacaagcccaacctcgacctcctcgagcagcagcaccagctcatccaggaggccctcatcttcgacaacaagcacaccaactacaccatggagcacatccgcgtcggctgggagcagctcctcaccaccatcgcccgcaccatcaacgaggtcgagaaccagatcctcacccgcgacgccaagggcatctcccaggagcagatgcaggagttccgcgcctccttcaaccacttcgacaaggaccacggcggcgccctcggccccgaggagttcaaggcctgcctcatctccctcggctacgacgtcgagaacgaccgccagggcgaggccgagttcaaccgcatcatgtccctcgtcgaccccaaccactccggcctcgtcaccttccaggccttcatcgacttcatgtcccgcgagaccaccgacaccgacaccgccgaccaggtcatcgcctccttcaaggtcctcgccggcgacaagaacttcatcaccgccgaggagctccgccgcgagctcccccccgaccaggccgagtactgcatcgcccgcatggccccctaccagggccccgacgccgtccccggcgccctcgactacaagtccttctccaccgccctctacggcgagtccgacctctga

SEQ ID NO: 1522 - RNA, 597 nt, synthetic construct
  misc_feature 1..597: note = EAX10817 variant
  source 1..597: mol_type = other RNA
atggccctccagggcatctccgtcatggagctctccggcctcgcccccggccccttctgcgccatggtcctcgccgacttcggcgcccgcgtcgtccgcgtcgaccgccccggctcccgctacgacgtctcccgcctcggccgcggcaagcgctccctcgtcctcgacctcaagcagccccgcggcgccgccgtcctccgccgcctctgcaagcgctccgacgtcctcctcgagcccttccgccgcggcgtcatggagaagctccagctcggccccgagatcctccagcgcgagaacccccgcctcatctacgcccgcctctccggcttcggccagtccggctccttctgccgcctcgccggccacgacatcaactacctcgccctctccggcggccgcaactccatcttcaagttcttctccgtcgagaactccgagatcgagtccgtcggctccacctcccgcaccgagcacgtcggctggtggtccaccttcctctacgacctccaggactcccgctggggcatccacggctgctggtccaaccgcacccccgtcctccgcgccgccgaccagcgcacctggaccaaggtctga

SEQ ID NO: 1523 - RNA, 597 nt, synthetic construct
  misc_feature 1..597: note = BAF85677 variant
  source 1..597: mol_type = other RNA
atggccctccagggcatctccgtcgtcgagctctccggcctcgcccccggccccttctgcgccatggtcctcgccgacttcggcgcccgcgtcgtccgcgtcgaccgccccggctcccgctacgacgtctcccgcctcggccgcggcaagcgctccctcgtcctcgacctcaagcagccccgcggcgccgccgtcctccgccgcctctgcaagcgctccgacgtcctcctcgagcccttccgccgcggcgtcatggagaagctccagctcggccccgagatcctccagcgcgagaacccccgcctcatctacgcccgcctctccggcttcggccagtccggctccttctgccgcctcgccggccacgacatcaactacctcgccctctccggcggccgcaactccatcttcaagttcttctccgtcgagaactccgagatcgagtccgtcggctccacctcccgcaccgagcacgtcggctggtggtccaccttcctctacgacctccaggactcccgctggggcatccacggctgctggtccaaccgcacccccttcctccgcgccgccgaccagcgcacctggaccaaggtctga

SEQ ID NO: 1524 - RNA, 2763 nt, synthetic construct
  misc_feature 1..2763: note = EAX05380 variant
  source 1..2763: mol_type = other RNA
atggaggtccagctcggcctcggccgcgtctacccccgccccccctccaagacctaccgcggcgccttccagaacctcttccagtccgtccgcgaggtcatccagaaccccggcccccgccaccccgaggccgcctccgccgccccccccggcgcctccctcctcctcctccagcagcagcagcagcagcagcagcagcagcagcagcagcagcagcagcagcagcagcagcagcagcaggagacctccccccgccagcagcagcagcagcagggcgaggacggctccccccaggcccaccgccgcggccccaccggctacctcgtcctcgacgaggagcagcagccctcccagccccagtccgccctcgagtgccaccccgagcgcggctgcgtccccgagcccggcgccgccgtcgccgcctccaagggcctcccccagcagctccccgccccccccgacgaggacgactccgccgccccctccaccctctccctcctcggccccaccttccccggcctctcctcctgctccgccgacctcaaggacatcctctccgaggcctccaccatgcagctcctccagcagcagcagcaggaggccgtctccgagggctcctcctccggccgcgcccgcgaggcctccggcgcccccacctcctccaaggacaactacctcggcggcacctccaccatctccgacaacgccaaggagctctgcaaggccgtctccgtctccatgggcctcggcgtcgaggccctcgagcacctctcccccggcgagcagctccgcggcgactgcatgtacgcccccctcctcggcgtcccccccgccgtccgccccaccccctgcgcccccctcgccgagtgcaagggctccctcctcgacgactccgccggcaagtccaccgaggacaccgccgagtactcccccttcaagggcggctacaccaagggcctcgagggcgagtccctcggctgctccggctccgccgccgccggctcctccggcaccctcgagctcccctccaccctctccctctacaagtccggcgccctcgacgaggccgccgcctaccagtcccgcgactactacaacttccccctcgccctcgccggccccccccccccccccccccccccccacccccacgcccgcatcaagctcgagaaccccctcgactacggctccgcctgggccgccgccgccgcccagtgccgctacggcgacctcgcctccctccacggcgccggcgccgccggccccggctccggctccccctccgccgccgcctcctcctcctggcacaccctcttcaccgccgaggagggccagctctacggcccctgcggcggcggcggcggcggcggcggcggcggcggcggcggcggcggcggcggcggcggcggcggcggcggcgaggccggcgccgtcgccccctacggctacacccgccccccccagggcctcgccggccaggagtccgacttcaccgcccccgacgtctggtaccccggcggcatggtctcccgcgtcccctacccctcccccacctgcgtcaagtccgagatgggcccctggatggactcctactccggcccctacggcgacatgcgcctcgagaccgcccgcgaccacgtcctccccatcgactactacttccccccccagaagacctgcctcatctgcggcgacgaggcctccggctgccactacggcgccctcacctgcggctcctgcaaggtcttcttcaagcgcgccgccgagggcaagcagaagtacctctgcgcctcccgcaacgactgcaccatcgacaagttccgccgcaagaactgcccctcctgccgcctccgcaagtgctacgaggccggcatgaccctcggcgcccgcaagctcaagaagctcggcaacctcaagctccaggaggagggcgaggcctcctccaccacctcccccaccgaggagaccacccagaagctcaccgtctcccacatcgagggctacgagtgccagcccatcttcctcaacgtcctcgaggccatcgagcccggcgtcgtctgcgccggccacgacaacaaccagcccgactccttcgccgccctcctctcctccctcaacgagctcggcgagcgccagctcgtccacgtcgtcaagtgggccaaggccctccccggcttccgcaacctccacgtcgacgaccagatggccgtcatccagtactcctggatgggcctcatggtcttcgccatgggctggcgctccttcaccaacgtcaactcccgcatgctctacttcgcccccgacctcgtcttcaacgagtaccgcatgcacaagtcccgcatgtactcccagtgcgtccgcatgcgccacctctcccaggagttcggctggctccagatcaccccccaggagttcctctgcatgaaggccctcctcctcttctccatcatccccgtcgacggcctcaagaaccagaagttcttcgacgagctccgcatgaactacatcaaggagctcgaccgcatcatcgcctgcaagcgcaagaaccccacctcctgctcccgccgcttctaccagctcaccaagctcctcgactccgtccagcccatcgcccgcgagctccaccagttcaccttcgacctcctcatcaagtcccacatggtctccgtcgacttccccgagatgatggccgagatcatctccgtccaggtccccaagatcctctccggcaaggtcaagcccatctacttccacacccagtga

SEQ ID NO: 1525 - RNA, 1239 nt, synthetic construct
  misc_feature 1..1239: note = AAH64630 variant
  source 1..1239: mol_type = other RNA
atggcccccgtcgagcacgtcgtcgccgacgccggcgccttcctccgccacgccgccctccaggacatcggcaagaacatctacaccatccgcgaggtcgtcaccgagatccgcgacaaggccacccgccgccgcctcgccgtcctcccctacgagctccgcttcaaggagcccctccccgagtacgtccgcctcgtcaccgagttctccaagaagaccggcgactacccctccctctccgccaccgacatccaggtcctcgccctcacctaccagctcgaggccgagttcgtcggcgtctcccacctcaagcaggagccccagaaggtcaaggtctcctcctccatccagcaccccgagacccccctccacatctccggcttccacctcccctacaagcccaagcccccccaggagaccgagaagggccactccgcctgcgagcccgagaacctcgagttctcctccttcatgttctggcgcaaccccctccccaacatcgaccacgagctccaggagctcctcatcgaccgcggcgaggacgtcccctccgaggaggaggaggaggaggagaacggcttcgaggaccgcaaggacgactccgacgacgacggcggcggctggatcaccccctccaacatcaagcagatccagcaggagctcgagcagtgcgacgtccccgaggacgtccgcgtcggctgcctcaccaccgacttcgccatgcagaacgtcctcctccagatgggcctccacgtcctcgccgtcaacggcatgctcatccgcgaggcccgctcctacatcctccgctgccacggctgcttcaagaccacctccgacatgtcccgcgtcttctgctcccactgcggcaacaagaccctcaagaaggtctccgtcaccgtctccgacgacggcaccctccacatgcacttctcccgcaaccccaaggtcctcaacccccgcggcctccgctactccctccccacccccaagggcggcaagtacgccatcaacccccacctcaccgaggaccagcgcttcccccagctccgcctctcccagaaggcccgccagaagaccaacgtcttcgcccccgactacatcgccggcgtctcccccttcgtcgagaacgacatctcctcccgctccgccaccctccaggtccgcgactccaccctcggcgccggccgccgccgcctcaaccccaacgcctcccgcaagaagttcgtcaagaagcgctga

SEQ ID NO: 1526 - RNA, 984 nt, synthetic construct
  misc_feature 1..984: note = AAH69102 variant
  source 1..984: mol_type = other RNA
atgcagatgcccgccatgatgtccctcctcctcgtctccgtcggcctcatggaggccctccaggcccagtcccaccccatcacccgccgcgacctcttctcccaggagatccagctcgacatggccctcgcctccttcgacgaccagtacgccggctgcgccgccgccatgaccgccgccctccccgacctcaaccacaccgagttccaggccaaccaggtctacgccgactcctggaccctcgcctcctcccagtggcaggagcgccaggcccgctggcccgagtggtccctctcccccacccgcccctcccccccccccctcggcttccgcgacgagcacggcgtcgccctcctcgcctacaccgccaactcccccctccacaaggagttcaacgccgccgtccgcgaggccggccgctcccgcgcccactacctccaccacttctccttcaagaccctccacttcctcctcaccgaggccctccagctcctcggctccggccagcgccccccccgctgccaccaggtcttccgcggcgtccacggcctccgcttccgccccgccggcccccgcgccaccgtccgcctcggcggcttcgcctccgcctccctcaagcacgtcgccgcccagcagttcggcgaggacaccttcttcggcatctggacctgcctcggcgcccccatcaagggctactccttcttccccggcgaggaggaggtcctcatcccccccttcgagaccttccaggtcatcaacgcctcccgcctcgcccagggccccgcccgcatctacctccgcgccctcggcaagcactccacctacaactgcgagtacatcaaggacaagaagtgcaagtccggcccctgccacctcgacaactccgccatgggccagtcccccctctccgccgtctggtccctcctcctcctcctctggttcctcgtcgtccgcgccttccccgacggccccggcctcctctga

SEQ ID NO: 1527 - RNA, 1035 nt, synthetic construct
  misc_feature 1..1035: note = AAH09751 variant
  source 1..1035: mol_type = other RNA
atggcccagaaggagaactcctacccctggccctacggccgccagaccgccccctccggcctctccaccctcccccagcgcgtcctccgcaaggagcccgtcaccccctccgccctcgtcctcatgtcccgctccaacgtccagcccaccgccgcccccggccagaaggtcatggagaactcctccggcacccccgacatcctcacccgccacttcaccatcgacgacttcgagatcggccgccccctcggcaagggcaagttcggcaacgtctacctcgcccgcgagaagaagtcccacttcatcgtcgccctcaaggtcctcttcaagtcccagatcgagaaggagggcgtcgagcaccagctccgccgcgagatcgagatccaggcccacctccaccaccccaacatcctccgcctctacaactacttctacgaccgccgccgcatctacctcatcctcgagtacgccccccgcggcgagctctacaaggagctccagaagtcctgcaccttcgacgagcagcgcaccgccaccatcatggaggagctcgccgacgccctcatgtactgccacggcaagaaggtcatccaccgcgacatcaagcccgagaacctcctcctcggcctcaagggcgagctcaagatcgccgacttcggctggtccgtccacgccccctccctccgccgcaagaccatgtgcggcaccctcgactacctcccccccgagatgatcgagggccgcatgcacaacgagaaggtcgacctctggtgcatcggcgtcctctgctacgagctcctcgtcggcaacccccccttcgagtccgcctcccacaacgagacctaccgccgcatcgtcaaggtcgacctcaagttccccgcctccgtccccatgggcgcccaggacctcatctccaagctcctccgccacaacccctccgagcgcctccccctcgcccaggtctccgcccacccctgggtccgcgccaactcccgccgcgtcctccccccctccgccctccagtccgtcgcctga

SEQ ID NO: 1528 - RNA, 360 nt, synthetic construct
  misc_feature 1..360: note = AAD48083 variant
  source 1..360: mol_type = other RNA
atgtcccgctccgtcgccctcgccgtcctcgccctcctctccctctccggcctcgaggccatccagcgcacccccaagatccaggtctactcccgccaccccgccgagaacggcaagtccaacttcctcaactgctacgtctccggcttccacccctccgacatcgaggtcgacctcctcaagaacggcgagcgcatcgagaaggtcgagcactccgacctctccttctccaaggactggtccttctacctcctctactacaccgagttcacccccaccgagaaggacgagtacgcctgccgcgtcaaccacgtcaccctctcccagcccaagatcgtcaagtgggaccgcgacatgtga

SEQ ID NO: 1529 - RNA, 1137 nt, synthetic construct
  misc_feature 1..1137: note = AAH28058 variant
  source 1..1137: mol_type = other RNA
atgcgcatgctcgtctccggccgccgcgtcaagaagtggcagctcatcatccagctcttcgccacctgcttcctcgcctccctcatgttcttctgggagcccatcgacaaccacatcgtctcccacatgaagtcctactcctaccgctacctcatcaactcctacgacttcgtcaacgacaccctctccctcaagcacacctccgccggcccccgctaccagtacctcatcaaccacaaggagaagtgccaggcccaggacgtcctcctcctcctcttcgtcaagaccgcccccgagaactacgaccgccgctccggcatccgccgcacctggggcaacgagaactacgtccgctcccagctcaacgccaacatcaagaccctcttcgccctcggcacccccaaccccctcgagggcgaggagctccagcgcaagctcgcctgggaggaccagcgctacaacgacatcatccagcaggacttcgtcgactccttctacaacctcaccctcaagctcctcatgcagttctcctgggccaacacctactgcccccacgccaagttcctcatgaccgccgacgacgacatcttcatccacatgcccaacctcatcgagtacctccagtccctcgagcagatcggcgtccaggacttctggatcggccgcgtccaccgcggcgccccccccatccgcgacaagtcctccaagtactacgtctcctacgagatgtaccagtggcccgcctaccccgactacaccgccggcgccgcctacgtcatctccggcgacgtcgccgccaaggtctacgaggcctcccagaccctcaactcctccctctacatcgacgacgtcttcatgggcctctgcgccaacaagatcggcatcgtcccccaggaccacgtcttcttctccggcgagggcaagaccccctaccacccctgcatctacgagaagatgatgacctcccacggccacctcgaggacctccaggacctctggaagaacgccaccgaccccaaggtcaagaccatctccaagggcttcttcggccagatctactgccgcctcatgaagatcatcctcctctgcaagatctcctacgtcgacacctacccctgccgcgccgccttcatctga

SEQ ID NO: 1530 - RNA, 1602 nt, synthetic construct
  misc_feature 1..1602: note = AAA35516 variant
  source 1..1602: mol_type = other RNA
atgtggctcggccgccgcgccctctgcgccctcgtcctcctcctcgcctgcgcctccctcggcctcctctacgcctccacccgcgacgcccccggcctccgcctccccctcgccccctgggcccccccccagtccccccgccgccccgagctccccgacctcgcccccgagccccgctacgcccacatccccgtccgcatcaaggagcaggtcgtcggcctcctcgcctggaacaactgctcctgcgagtcctccggcggcggcctccccctccccttccagaagcaggtccgcgccatcgacctcaccaaggccttcgaccccgccgagctccgcgccgcctccgccacccgcgagcaggagttccaggccttcctctcccgctcccagtcccccgccgaccagctcctcatcgcccccgccaactcccccctccagtaccccctccagggcgtcgaggtccagcccctccgctccatcctcgtccccggcctctccctccaggccgcctccggccaggaggtctaccaggtcaacctcaccgcctccctcggcacctgggacgtcgccggcgaggtcaccggcgtcaccctcaccggcgagggccaggccgacctcaccctcgtctcccccggcctcgaccagctcaaccgccagctccagctcgtcacctactcctcccgctcctaccagaccaacaccgccgacaccgtccgcttctccaccgagggccacgaggccgccttcaccatccgcatccgccacccccccaacccccgcctctacccccccggctccctcccccagggcgcccagtacaacatctccgccctcgtcaccatcgccaccaagaccttcctccgctacgaccgcctccgcgccctcatcacctccatccgccgcttctaccccaccgtcaccgtcgtcatcgccgacgactccgacaagcccgagcgcgtctccggcccctacgtcgagcactacctcatgcccttcggcaagggctggttcgccggccgcaacctcgccgtctcccaggtcaccaccaagtacgtcctctgggtcgacgacgacttcgtcttcaccgcccgcacccgcctcgagcgcctcgtcgacgtcctcgagcgcacccccctcgacctcgtcggcggcgccgtccgcgagatctccggcttcgccaccacctaccgccagctcctctccgtcgagcccggcgcccccggcctcggcaactgcctccgccagcgccgcggcttccaccacgagctcgtcggcttccccggctgcgtcgtcaccgacggcgtcgtcaacttcttcctcgcccgcaccgacaaggtccgcgaggtcggcttcgacccccgcctctcccgcgtcgcccacctcgagttcttcctcgacggcctcggctccctccgcgtcggctcctgctccgacgtcgtcgtcgaccacgcctccaagctcaagctcccctggacctcccgcgacgccggcgccgagacctacgcccgctaccgctaccccggctccctcgacgagtcccagatggccaagcaccgcctcctcttcttcaagcaccgcctccagtgcatgacctcccagtga

SEQ ID NO: 1531 - RNA, 849 nt, synthetic construct
  misc_feature 1..849: note = AAH74729 variant
  source 1..849: mol_type = other RNA
atggcctccctcggccagatcctcttctggtccatcatctccatcatcatcatcctcgccggcgccatcgccctcatcatcggcttcggcatctccggccgccactccatcaccgtcaccaccgtcgcctccgccggcaacatcggcgaggacggcatcctctcctgcaccttcgagcccgacatcaagctctccgacatcgtcatccagtggctcaaggagggcgtcctcggcctcgtccacgagttcaaggagggcaaggacgagctctccgagcaggacgagatgttccgcggccgcaccgccgtcttcgccgaccaggtcatcgtcggcaacgcctccctccgcctcaagaacgtccagctcaccgacgccggcacctacaagtgctacatcatcacctccaagggcaagggcaacgccaacctcgagtacaagaccggcgccttctccatgcccgaggtcaacgtcgactacaacgcctcctccgagaccctccgctgcgaggccccccgctggttcccccagcccaccgtcgtctgggcctcccaggtcgaccagggcgccaacttctccgaggtctccaacacctccttcgagctcaactccgagaacgtcaccatgaaggtcgtctccgtcctctacaacgtcaccatcaacaacacctactcctgcatgatcgagaacgacatcgccaaggccaccggcgacatcaaggtcaccgagtccgagatcaagcgccgctcccacctccagctcctcaactccaaggcctccctctgcgtctcctccttcttcgccatctcctgggccctcctccccctctccccctacctcatgctcaagtga

SEQ ID NO: 1532 - RNA, 132 nt, synthetic construct
  misc_feature 1..132: note = AAC50123 variant
  source 1..132: mol_type = other RNA
atggccgcccgcgccgtcttcctcgccctctccgcccagctcctccaggcccgcctcatgaaggaggagtcccccgtcgtctcctggcgcctcgagcccgaggacggcaccgccctctgcttcatcttctga

SEQ ID NO: 1533 - RNA, 1158 nt, synthetic construct
  misc_feature 1..1158: note = AAN40694 variant
  source 1..1158: mol_type = other RNA
atggccgccgccctcttcgtcctcctcggcttcgccctcctcggcacccacggcgcctccggcgccgccggcttcgtccaggcccccctctcccagcagcgctgggtcggcggctccgtcgagctccactgcgaggccgtcggctcccccgtccccgagatccagtggtggttcgagggccagggccccaacgacacctgctcccagctctgggacggcgcccgcctcgaccgcgtccacatccacgccacctaccaccagcacgccgcctccaccatctccatcgacaccctcgtcgaggaggacaccggcacctacgagtgccgcgcctccaacgaccccgaccgcaaccacctcacccgcgccccccgcgtcaagtgggtccgcgcccaggccgtcgtcctcgtcctcgagcccggcaccgtcttcaccaccgtcgaggacctcggctccaagatcctcctcacctgctccctcaacgactccgccaccgaggtcaccggccaccgctggctcaagggcggcgtcgtcctcaaggaggacgccctccccggccagaagaccgagttcaaggtcgactccgacgaccagtggggcgagtactcctgcgtcttcctccccgagcccatgggcaccgccaacatccagctccacggccccccccgcgtcaaggccgtcaagtcctccgagcacatcaacgagggcgagaccgccatgctcgtctgcaagtccgagtccgtcccccccgtcaccgactgggcctggtacaagatcaccgactccgaggacaaggccctcatgaacggctccgagtcccgcttcttcgtctcctcctcccagggccgctccgagctccacatcgagaacctcaacatggaggccgaccccggccagtaccgctgcaacggcacctcctccaagggctccgaccaggccatcatcaccctccgcgtccgctcccacctcgccgccctctggcccttcctcggcatcgtcgccgaggtcctcgtcctcgtcaccatcatcttcatctacgagaagcgccgcaagcccgaggacgtcctcgacgacgacgacgccggctccgcccccctcaagtcctccggccagcaccagaacgacaagggcaagaacgtccgccagcgcaactcctcctga

SEQ ID NO: 1534 - RNA, 720 nt, synthetic construct
  misc_feature 1..720: note = ABX60202 variant
  source 1..720: mol_type = other RNA
atggcccacgccggccgcaccggctacgacaaccgcgagatcgtcatgaagtacatccactacaagctctcccagcgcggctacgagtgggacgccggcgacgtcggcgccgccccccccggcgccgcccccgcccccggcatcttctcctcccagcccggccacaccccccaccccgccgcctcccgcgaccccgtcgcccgcacctcccccctccagacccccgccgcccccggcgccgccgccggccccgccctctcccccgtcccccccgtcgtccacctcaccctccgccaggccggcgacgacttctcccgccgctaccgccgcgacttcgccgagatgtcctcccagctccacctcacccccttcaccgcccgcggccgcttcgccaccgtcgtcgaggagctcttccgcgacggcgtcaactggggccgcatcgtcgccttcttcgagttcggcggcgtcatgtgcgtcgagtccgtcaaccgcgagatgtcccccctcgtcgacaacatcgccctctggatgaccgagtacctcaaccgccacctccacacctggatccaggacaacggcggctgggacgccttcgtcgagctctacggcccctccatgcgccccctcttcgacttctcctggctctccctcaagaccctcctctccctcgccctcgtcggcgcctgcatcaccctcggcgcctacctctcccacaagtga

SEQ ID NO: 1535 - RNA, 1290 nt, synthetic construct
  misc_feature 1..1290: note = ABX82700 variant
  source 1..1290: mol_type = other RNA
atggtcgaccccgtcggcttcgccgaggcctggaaggcccagttccccgactccgagcccccccgcatggagctccgctccgtcggcgacatcgagcaggagctcgagcgctgcaaggcctccatccgccgcctcgagcaggaggtcaaccaggagcgcttccgcatgatctacctccagaccctcctcgccaaggagaagaagtcctacgaccgccagcgctggggcttccgccgcgccgcccaggcccccgacggcgcctccgagccccgcgcctccgcctcccgcccccagcccgcccccgccgacggcgccgaccccccccccgccgaggagcccgaggcccgccccgacggcgagggctcccccggcaaggcccgccccggcaccgcccgccgccccggcgccgccgcctccggcgagcgcgacgaccgcggcccccccgcctccgtcgccgccctccgctccaacttcgagcgcatccgcaagggccacggccagcccggcgccgacgccgagaagcccttctacgtcaacgtcgagttccaccacgagcgcggcctcgtcaaggtcaacgacaaggaggtctccgaccgcatctcctccctcggctcccaggccatgcagatggagcgcaagaagtcccagcacggcgccggctcctccgtcggcgacgcctcccgccccccctaccgcggccgctcctccgagtcctcctgcggcgtcgacggcgactacgaggacgccgagctcaacccccgcttcctcaaggacaacctcatcgacgccaacggcggctcccgccccccctggccccccctcgagtaccagccctaccagtccatctacgtcggcggcatgatggagggcgagggcaagggccccctcctccgctcccagtccacctccgagcaggagaagcgcctcacctggccccgccgctcctactccccccgctccttcgaggactgcggcggcggctacacccccgactgctcctccaacgagaacctcacctcctccgaggaggacttctcctccggccagtcctcccgcgtctccccctcccccaccacctaccgcatgttccgcgacaagtcccgctccccctcccagaactcccagcagtccttcgactcctcctccccccccaccccccagtgccacaagcgccaccgccactgccccgtcgtcgtctccgaggccaccatcgtcggcgtccgcaagaccggccagatctggcccaacgacggcgagggcgccttccacggcgacgccgacggcggctga

SEQ ID NO: 1536 - RNA, 1665 nt, synthetic construct
  misc_feature 1..1665: note = ABX82703 variant
  source 1..1665: mol_type = other RNA
atggtcgaccccgtcggcttcgccgaggcctggaaggcccagttccccgactccgagcccccccgcatggagctccgctccgtcggcgacatcgagcaggagctcgagcgctgcaaggcctccatccgccgcctcgagcaggaggtcaaccaggagcgcttccgcatgatctacctccagaccctcctcgccaaggagaagaagtcctacgaccgccagcgctggggcttccgccgcgccgcccaggcccccgacggcgcctccgagccccgcgcctccgcctcccgcccccagcccgcccccgccgacggcgccgaccccccccccgccgaggagcccgaggcccgccccgacggcgagggctcccccggcaaggcccgccccggcaccgcccgccgccccggcgccgccgcctccggcgagcgcgacgaccgcggcccccccgcctccgtcgccgccctccgctccaacttcgagcgcatccgcaagggccacggccagcccggcgccgacgccgagaagcccttctacgtcaacgtcgagttccaccacgagcgcggcctcgtcaaggtcaacgacaaggaggtctccgaccgcatctcctccctcggctcccaggccatgcagatggagcgcaagaagtcccagcacggcgccggctcctccgtcggcgacgcctcccgccccccctaccgcggccgctcctccgagtcctcctgcggcgtcgacggcgactacgaggacgccgagctcaacccccgcttcctcaaggacaacctcatcgacgccaacggcggctcccgccccccctggccccccctcgagtaccagccctaccagtccatctacgtcggcggcatgatggagggcgagggcaagggccccctcctccgctcccagtccacctccgagcaggagaagcgcctcacctggccccgccgctcctactccccccgctccttcgaggactgcggcggcggctacacccccgactgctcctccaacgagaacctcacctcctccgaggaggacttctcctccggccagtcctcccgcgtctccccctcccccaccacctaccgcatgttccgcgacaagtcccgctccccctcccagaactcccagcagtccttcgactcctcctccccccccaccccccagtgccacaagcgccaccgccactgccccgtcgtcgtctccgaggccaccatcgtcggcgtccgcaagaccggccagatctggcccaacgacggcgagggcgccttccacggcgacgccgacggctccttcggcaccccccccggctacggctgcgccgccgaccgcgccgaggagcagcgccgccaccaggacggcctcccctacatcgacgactccccctcctcctccccccacctctcctccaagggccgcggctcccgcgacgccctcgtctccggcgccctcgagtccaccaaggcctccgagctcgacctcgagaagggcctcgagatgcgcaagtgggtcctctccggcatcctcgcctccgaggagacctacctctcccacctcgaggccctcctcctccccatgaagcccctcaaggccgccgccaccacctcccagcccgtcctcacctcccagcagatcgagaccatcttcttcaaggtccccgacctcctctga

SEQ ID NO: 1537 - RNA, 1545 nt, synthetic construct
  misc_feature 1..1545: note = ABX82704 variant
  source 1..1545: mol_type = other RNA
atggtcgaccccgtcggcttcgccgaggcctggaaggcccagttccccgactccgagcccccccgcatggagctccgctccgtcggcgacatcgagcaggagctcgagcgctgcaaggcctccatccgccgcctcgagcaggaggtcaaccaggagcgcttccgcatgatctacctccagaccctcctcgccaaggagaagaagtcctacgaccgccagcgctggggcttccgccgcgccgcccaggcccccgacggcgcctccgagccccgcgcctccgcctcccgcccccagcccgcccccgccgacggcgccgaccccccccccgccgaggagcccgaggcccgccccgacggcgagggctcccccggcaaggcccgccccggcaccgcccgccgccccggcgccgccgcctccggcgagcgcgacgaccgcggcccccccgcctccgtcgccgccctccgctccaacttcgagcgcatccgcaagggccacggccagcccggcgccgacgccgagaagcccttctacgtcaacgtcgagttccaccacgagcgcggcctcgtcaaggtcaacgacaaggaggtctccgaccgcatctcctccctcggctcccaggccatgcagatggagcgcaagaagtcccagcacggcgccggctcctccgtcggcgacgcctcccgccccccctaccgcggccgctcctccgagtcctcctgcggcgtcgacggcgactacgaggacgccgagctcaacccccgcttcctcaaggacaacctcatcgacgccaacggcggctcccgccccccctggccccccctcgagtaccagccctaccagtccatctacgtcggcggcatgatggagggcgagggcaagggccccctcctccgctcccagtccacctccgagcaggagaagcgcctcacctggccccgccgctcctactccccccgctccttcgaggactgcggcggcggctacacccccgactgctcctccaacgagaacctcacctcctccgaggaggacttctcctccggccagtcctcccgcgtctccccctcccccaccacctaccgcatgttccgcgacaagtcccgctccccctcccagaactcccagcagtccttcgactcctcctccccccccaccccccagtgccacaagcgccaccgccactgccccgtcgtcgtctccgaggccaccatcgtcggcgtccgcaagaccggccagatctggcccaacgacggcgagggcgccttccacggcgacgccgacggctccttcggcaccccccccggctacggctgcgccgccgaccgcgccgaggagcagcgccgccaccaggacggcctcccctacatcgacgactccccctcctcctccccccacctctcctccaagggccgcggctcccgcgacgccctcgtctccggcgccctcgagtccaccaaggcctccgagctcgacctcgagaagggcctcgagatgcgcaagtgggtcctctccggcatcctcgcctccgaggagatcaccctctga

SEQ ID NO: 1538 - RNA, 1326 nt, synthetic construct
  misc_feature 1..1326: note = ABX82705 variant
  source 1..1326: mol_type = other RNA
atggtcgaccccgtcggcttcgccgaggcctggaaggcccagttccccgactccgagcccccccgcatggagctccgctccgtcggcgacatcgagcaggagctcgagcgctgcaaggcctccatccgccgcctcgagcaggaggtcaaccaggagcgcttccgcatgatctacctccagaccctcctcgccaaggagaagaagtcctacgaccgccagcgctggggcttccgccgcgccgcccaggcccccgacggcgcctccgagccccgcgcctccgcctcccgcccccagcccgcccccgccgacggcgccgaccccccccccgccgaggagcccgaggcccgccccgacggcgagggctcccccggcaaggcccgccccggcaccgcccgccgccccggcgccgccgcctccggcgagcgcgacgaccgcggcccccccgcctccgtcgccgccctccgctccaacttcgagcgcatccgcaagggccacggccagcccggcgccgacgccgagaagcccttctacgtcaacgtcgagttccaccacgagcgcggcctcgtcaaggtcaacgacaaggaggtctccgaccgcatctcctccctcggctcccaggccatgcagatggagcgcaagaagtcccagcacggcgccggctcctccgtcggcgacgcctcccgccccccctaccgcggccgctcctccgagtcctcctgcggcgtcgacggcgactacgaggacgccgagctcaacccccgcttcctcaaggacaacctcatcgacgccaacggcggctcccgccccccctggccccccctcgagtaccagccctaccagtccatctacgtcggcggcatgatggagggcgagggcaagggccccctcctccgctcccagtccacctccgagcaggagaagcgcctcacctggccccgccgctcctactccccccgctccttcgaggactgcggcggcggctacacccccgactgctcctccaacgagaacctcacctcctccgaggaggacttctcctccggccagtcctcccgcgtctccccctcccccaccacctaccgcatgttccgcgacaagtcccgctccccctcccagaactcccagcagtccttcgactcctcctccccccccaccccccagtgccacaagcgccaccgccactgccccgtcgtcgtctccgaggccaccatcgtcggcgtccgcaagaccggccagatctggcccaacgacggcgagggcgccttccacggcgacgccgacggctccctcgagctccagggcaagccctcccgctggacccagtga

SEQ ID NO: 1539 - RNA, 1575 nt, synthetic construct
  misc_feature 1..1575: note = ABX82706 variant
  source 1..1575: mol_type = other RNA
atggtcgaccccgtcggcttcgccgaggcctggaaggcccagttccccgactccgagcccccccgcatggagctccgctccgtcggcgacatcgagcaggagctcgagcgctgcaaggcctccatccgccgcctcgagcaggaggtcaaccaggagcgcttccgcatgatctacctccagaccctcctcgccaaggagaagaagtcctacgaccgccagcgctggggcttccgccgcgccgcccaggcccccgacggcgcctccgagccccgcgcctccgcctcccgcccccagcccgcccccgccgacggcgccgaccccccccccgccgaggagcccgaggcccgccccgacggcgagggctcccccggcaaggcccgccccggcaccgcccgccgccccggcgccgccgcctccggcgagcgcgacgaccgcggcccccccgcctccgtcgccgccctccgctccaacttcgagcgcatccgcaagggccacggccagcccggcgccgacgccgagaagcccttctacgtcaacgtcgagttccaccacgagcgcggcctcgtcaaggtcaacgacaaggaggtctccgaccgcatctcctccctcggctcccaggccatgcagatggagcgcaagaagtcccagcacggcgccggctcctccgtcggcgacgcctcccgccccccctaccgcggccgctcctccgagtcctcctgcggcgtcgacggcgactacgaggacgccgagctcaacccccgcttcctcaaggacaacctcatcgacgccaacggcggctcccgccccccctggccccccctcgagtaccagccctaccagtccatctacgtcggcggcatgatggagggcgagggcaagggccccctcctccgctcccagtccacctccgagcaggagaagcgcctcacctggccccgccgctcctactccccccgctccttcgaggactgcggcggcggctacacccccgactgctcctccaacgagaacctcacctcctccgaggaggacttctcctccggccagtcctcccgcgtctccccctcccccaccacctaccgcatgttccgcgacaagtcccgctccccctcccagaactcccagcagtccttcgactcctcctccccccccaccccccagtgccacaagcgccaccgccactgccccgtcgtcgtctccgaggccaccatcgtcggcgtccgcaagaccggccagatctggcccaacgacggcgagggcgccttccacggcgacgccgacggctccttcggcaccccccccggctacggctgcgccgccgaccgcgccgaggagcagcgccgccaccaggacggcctcccctacatcgacgactccccctcctcctccccccacctctcctccaagggccgcggctcccgcgacgccctcgtctccggcgccctcgagtccaccaaggcctccgagctcgacctcgagaagggcctcgagatgcgcaagtgggaccccgtcaagatgacccccaccttctccctccactgcatgatcctctggcccgtcgagatcaccctctga

SEQ ID NO: 1540 - RNA, 1398 nt, synthetic construct
  misc_feature 1..1398: note = ABX82707 variant
  source 1..1398: mol_type = other RNA
atggtcgaccccgtcggcttcgccgaggcctggaaggcccagttccccgactccgagcccccccgcatggagctccgctccgtcggcgacatcgagcaggagctcgagcgctgcaaggcctccatccgccgcctcgagcaggaggtcaaccaggagcgcttccgcatgatctacctccagaccctcctcgccaaggagaagaagtcctacgaccgccagcgctggggcttccgccgcgccgcccaggcccccgacggcgcctccgagccccgcgcctccgcctcccgcccccagcccgcccccgccgacggcgccgaccccccccccgccgaggagcccgaggcccgccccgacggcgagggctcccccggcaaggcccgccccggcaccgcccgccgccccggcgccgccgcctccggcgagcgcgacgaccgcggcccccccgcctccgtcgccgccctccgctccaacttcgagcgcatccgcaagggccacggccagcccggcgccgacgccgagaagcccttctacgtcaacgtcgagttccaccacgagcgcggcctcgtcaaggtcaacgacaaggaggtctccgaccgcatctcctccctcggctcccaggccatgcagatggagcgcaagaagtcccagcacggcgccggctcctccgtcggcgacgcctcccgccccccctaccgcggccgctcctccgagtcctcctgcggcgtcgacggcgactacgaggacgccgagctcaacccccgcttcctcaaggacaacctcatcgacgccaacggcggctcccgccccccctggccccccctcgagtaccagccctaccagtccatctacgtcggcggcatgatggagggcgagggcaagggccccctcctccgctcccagtccacctccgagcaggagaagcgcctcacctggccccgccgctcctactccccccgctccttcgaggactgcggcggcggctacacccccgactgctcctccaacgagaacctcacctcctccgaggaggacttctcctccggccagtcctcccgcgtctccccctcccccaccacctaccgcatgttccgcgacaagtcccgctccccctcccagaactcccagcagtccttcgactcctcctccccccccaccccccagtgccacaagcgccaccgccactgccccgtcgtcgtctccgaggccaccatcgtcggcgtccgcaagaccggccagatctggcccaacgacggcgagggcgccttccacggcgagcaccccggcgccgccgaggaggtcttccagaagctcctccccgacatccgcggcgccgccgacgccgaccagctcgtctgcgagacccccgactgcccccagcactccgccgaccaccagtga

SEQ ID NO: 1541 - RNA, 1377 nt, synthetic construct
  misc_feature 1..1377: note = ABX82709 variant
  source 1..1377: mol_type = other RNA
atggtcgaccccgtcggcttcgccgaggcctggaaggcccagttccccgactccgagcccccccgcatggagctccgctccgtcggcgacatcgagcaggagctcgagcgctgcaaggcctccatccgccgcctcgagcaggaggtcaaccaggagcgcttccgcatgatctacctccagaccctcctcgccaaggagaagaagtcctacgaccgccagcgctggggcttccgccgcgccgcccaggcccccgacggcgcctccgagccccgcgcctccgcctcccgcccccagcccgcccccgccgacggcgccgaccccccccccgccgaggagcccgaggcccgccccgacggcgagggctcccccggcaaggcccgccccggcaccgcccgccgccccggcgccgccgcctccggcgagcgcgacgaccgcggcccccccgcctccgtcgccgccctccgctccaacttcgagcgcatccgcaagggccacggccagcccggcgccgacgccgagaagcccttctacgtcaacgtcgagttccaccacgagcgcggcctcgtcaaggtcaacgacaaggaggtctccgaccgcatctcctccctcggctcccaggccatgcagatggagcgcaagaagtcccagcacggcgccggctcctccgtcggcgacgcctcccgccccccctaccgcggccgctcctccgagtcctcctgcggcgtcgacggcgactacgaggacgccgagctcaacccccgcttcctcaaggacaacctcatcgacgccaacggcggctcccgccccccctggccccccctcgagtaccagccctaccagtccatctacgtcggcggcatgatggagggcgagggcaagggccccctcctccgctcccagtccacctccgagcaggagaagcgcctcacctggccccgccgctcctactccccccgctccttcgaggactgcggcggcggctacacccccgactgctcctccaacgagaacctcacctcctccgaggaggacttctcctccggccagtcctcccgcgtctccccctcccccaccacctaccgcatgttccgcgacaagtcccgctccccctcccagaactcccagcagtccttcgactcctcctccccccccaccccccagtgccacaagcgccaccgccactgccccgtcgtcgtctccgaggccaccatcgtcggcgtccgcaagaccggccagatctggcccaacgacggcgagggcgccttccacggcgacgccgacggctccttcggcaccccccccggctactgctgcctctgcctccccgcctggccctccggctgcaccgccgccaccgcccgcgtcacccgctcctga

SEQ ID NO: 1542 - RNA, 1365 nt, synthetic construct
  misc_feature 1..1365: note = ABX82710 variant
  source 1..1365: mol_type = other RNA
atggtcgaccccgtcggcttcgccgaggcctggaaggcccagttccccgactccgagcccccccgcatggagctccgctccgtcggcgacatcgagcaggagctcgagcgctgcaaggcctccatccgccgcctcgagcaggaggtcaaccaggagcgcttccgcatgatctacctccagaccctcctcgccaaggagaagaagtcctacgaccgccagcgctggggcttccgccgcgccgcccaggcccccgacggcgcctccgagccccgcgcctccgcctcccgcccccagcccgcccccgccgacggcgccgaccccccccccgccgaggagcccgaggcccgccccgacggcgagggctcccccggcaaggcccgccccggcaccgcccgccgccccggcgccgccgcctccggcgagcgcgacgaccgcggcccccccgcctccgtcgccgccctccgctccaacttcgagcgcatccgcaagggccacggccagcccggcgccgacgccgagaagcccttctacgtcaacgtcgagttccaccacgagcgcggcctcgtcaaggtcaacgacaaggaggtctccgaccgcatctcctccctcggctcccaggccatgcagatggagcgcaagaagtcccagcacggcgccggctcctccgtcggcgacgcctcccgccccccctaccgcggccgctcctccgagtcctcctgcggcgtcgacggcgactacgaggacgccgagctcaacccccgcttcctcaaggacaacctcatcgacgccaacggcggctcccgccccccctggccccccctcgagtaccagccctaccagtccatctacgtcggcggcatgatggagggcgagggcaagggccccctcctccgctcccagtccacctccgagcaggagaagcgcctcacctggccccgccgctcctactccccccgctccttcgaggactgcggcggcggctacacccccgactgctcctccaacgagaacctcacctcctccgaggaggacttctcctccggccagtcctcccgcgtctccccctcccccaccacctaccgcatgttccgcgacaagtcccgctccccctcccagaactcccagcagtccttcgactcctcctccccccccaccccccagtgccacaagcgccaccgccactgccccgtcgtcgtctccgaggccaccatcgtcggcgtccgcaagaccggccagatctggcccaacgacggcgagggcgccttccacggcgacgccgacggctccttcggcaccccccccggctacggctgcgccgccggccgccccccccacctcaccgagctccccgtccagcaccagtga

SEQ ID NO: 1543 - RNA, 1404 nt, synthetic construct
  misc_feature 1..1404: note = ABX82711 variant
  source 1..1404: mol_type = other RNA
atggtcgaccccgtcggcttcgccgaggcctggaaggcccagttccccgactccgagcccccccgcatggagctccgctccgtcggcgacatcgagcaggagctcgagcgctgcaaggcctccatccgccgcctcgagcaggaggtcaaccaggagcgcttccgcatgatctacctccagaccctcctcgccaaggagaagaagtcctacgaccgccagcgctggggcttccgccgcgccgcccaggcccccgacggcgcctccgagccccgcgcctccgcctcccgcccccagcccgcccccgccgacggcgccgaccccccccccgccgaggagcccgaggcccgccccgacggcgagggctcccccggcaaggcccgccccggcaccgcccgccgccccggcgccgccgcctccggcgagcgcgacgaccgcggcccccccgcctccgtcgccgccctccgctccaacttcgagcgcatccgcaagggccacggccagcccggcgccgacgccgagaagcccttctacgtcaacgtcgagttccaccacgagcgcggcctcgtcaaggtcaacgacaaggaggtctccgaccgcatctcctccctcggctcccaggccatgcagatggagcgcaagaagtcccagcacggcgccggctcctccgtcggcgacgcctcccgccccccctaccgcggccgctcctccgagtcctcctgcggcgtcgacggcgactacgaggacgccgagctcaacccccgcttcctcaaggacaacctcatcgacgccaacggcggctcccgccccccctggccccccctcgagtaccagccctaccagtccatctacgtcggcggcatgatggagggcgagggcaagggccccctcctccgctcccagtccacctccgagcaggagaagcgcctcacctggccccgccgctcctactccccccgctccttcgaggactgcggcggcggctacacccccgactgctcctccaacgagaacctcacctcctccgaggaggacttctcctccggccagtcctcccgcgtctccccctcccccaccacctaccgcatgttccgcgacaagtcccgctccccctcccagaactcccagcagtccttcgactcctcctccccccccaccccccagtgccacaagcgccaccgccactgccccgtcgtcgtctccgaggccaccatcgtcggcgtccgcaagaccggccagatctggcccaacgacggcgagggcgccttccacggcgacgccgtcctcaagaccgaggtcccccaccagggcgtccgccgcgcccgcctctccctcgaggccctcggcgaggacccctccttcctcttccccgcctccgacggcccccgccactcctccacctggtga

SEQ ID NO: 1544 - RNA, 1542 nt, synthetic construct
  misc_feature 1..1542: note = ABX82712 variant
  source 1..1542: mol_type = other RNA
atggtcgaccccgtcggcttcgccgaggcctggaaggcccagttccccgactccgagcccccccgcatggagctccgctccgtcggcgacatcgagcaggagctcgagcgctgcaaggcctccatccgccgcctcgagcaggaggtcaaccaggagcgcttccgcatgatctacctccagaccctcctcgccaaggagaagaagtcctacgaccgccagcgctggggcttccgccgcgccgcccaggcccccgacggcgcctccgagccccgcgcctccgcctcccgcccccagcccgcccccgccgacggcgccgaccccccccccgccgaggagcccgaggcccgccccgacggcgagggctcccccggcaaggcccgccccggcaccgcccgccgccccggcgccgccgcctccggcgagcgcgacgaccgcggcccccccgcctccgtcgccgccctccgctccaacttcgagcgcatccgcaagggccacggccagcccggcgccgacgccgagaagcccttctacgtcaacgtcgagttccaccacgagcgcggcctcgtcaaggtcaacgacaaggaggtctccgaccgcatctcctccctcggctcccaggccatgcagatggagcgcaagaagtcccagcacggcgccggctcctccgtcggcgacgcctcccgccccccctaccgcggccgctcctccgagtcctcctgcggcgtcgacggcgactacgaggacgccgagctcaacccccgcttcctcaaggacaacctcatcgacgccaacggcggctcccgccccccctggccccccctcgagtaccagccctaccagtccatctacgtcggcggcatgatggagggcgagggcaagggccccctcctccgctcccagtccacctccgagcaggagaagcgcctcacctggccccgccgctcctactccccccgctccttcgaggactgcggcggcggctacacccccgactgctcctccaacgagaacctcacctcctccgaggaggacttctcctccggccagtcctcccgcgtctccccctcccccaccacctaccgcatgttccgcgacaagtcccgctccccctcccagaactcccagcagtccttcgactcctcctccccccccaccccccagtgccacaagcgccaccgccactgccccgtcgtcgtctccgaggccaccatcgtcggcgtccgcaagaccggccagatctggcccaacgacggcgagggcgccttccacggcgacgccgacggctccttcggcaccccccccggctacggctgcgccgccgaccgcgccgaggagcagcgccgccaccaggacggcctcccctacatcgacgactccccctcctcctccccccacctctcctccaagggccgcggctcccgcgacgccctcgtctccggcgccctcgagtccaccaaggcctccgagctcgaccccgtcaagatgacccccaccttctccctccactgcatgatcctctggcccgtcgagatcaccctctga

SEQ ID NO: 1545 - RNA, 1221 nt, synthetic construct
  misc_feature 1..1221: note = ABX82714 variant
  source 1..1221: mol_type = other RNA
atggtcgaccccgtcggcttcgccgaggcctggaaggcccagttccccgactccgagcccccccgcatggagctccgctccgtcggcgacatcgagcaggagctcgagcgctgcaaggcctccatccgccgcctcgagcaggaggtcaaccaggagcgcttccgcatgatctacctccagaccctcctcgccaaggagaagaagtcctacgaccgccagcgctggggcttccgccgcgccgcccaggcccccgacggcgcctccgagccccgcgcctccgcctcccgcccccagcccgcccccgccgacggcgccgaccccccccccgccgaggagcccgaggcccgccccgacggcgagggctcccccggcaaggcccgccccggcaccgcccgccgccccggcgccgccgcctccggcgagcgcgacgaccgcggcccccccgcctccgtcgccgccctccgctccaacttcgagcgcatccgcaagggccacggccagcccggcgccgacgccgagaagcccttctacgtcaacgtcgagttccaccacgagcgcggcctcgtcaaggtcaacgacaaggaggtctccgaccgcatctcctccctcggctcccaggccatgcagatggagcgcaagaagtcccagcacggcgccggctcctccgtcggcgacgcctcccgccccccctaccgcggccgctcctccgagtcctcctgcggcgtcgacggcgactacgaggacgccgagctcaacccccgcttcctcaaggacaacctcatcgacgccaacggcggctcccgccccccctggccccccctcgagtaccagccctaccagtccatctacgtcggcggcatgatggagggcgagggcaagggccccctcctccgctcccagtccacctccgagcaggagaagcgcctcacctggccccgccgctcctactccccccgctccttcgaggactgcggcggcggctacacccccgactgctcctccaacgagaacctcacctcctccgaggaggacttctcctccggccagtcctcccgcgtctccccctcccccaccacctaccgcatgttccgcgacaagtcccgctccccctcccagaactcccagcagtccttcgactcctcctccccccccaccccccagtgccacaagcgccaccgccactgccccgtcgtcgtctccgaggccacctccggccagtga

SEQ ID NO: 1546 - RNA, 2346 nt, synthetic construct
  misc_feature 1..2346: note = AAH58926 variant
  source 1..2346: mol_type = other RNA
atggccacccaggccgacctcatggagctcgacatggccatggagcccgaccgcaaggccgccgtctcccactggcagcagcagtcctacctcgactccggcatccactccggcgccaccaccaccgccccctccctctccggcaagggcaaccccgaggaggaggacgtcgacacctcccaggtcctctacgagtgggagcagggcttctcccagtccttcacccaggagcaggtcgccgacatcgacggccagtacgccatgacccgcgcccagcgcgtccgcgccgccatgttccccgagaccctcgacgagggcatgcagatcccctccacccagttcgacgccgcccaccccaccaacgtccagcgcctcgccgagccctcccagatgctcaagcacgccgtcgtcaacctcatcaactaccaggacgacgccgagctcgccacccgcgccatccccgagctcaccaagctcctcaacgacgaggaccaggtcgtcgtcaacaaggccgccgtcatggtccaccagctctccaagaaggaggcctcccgccacgccatcatgcgctccccccagatggtctccgccatcgtccgcaccatgcagaacaccaacgacgtcgagaccgcccgctgcaccgccggcaccctccacaacctctcccaccaccgcgagggcctcctcgccatcttcaagtccggcggcatccccgccctcgtcaagatgctcggctcccccgtcgactccgtcctcttctacgccatcaccaccctccacaacctcctcctccaccaggagggcgccaagatggccgtccgcctcgccggcggcctccagaagatggtcgccctcctcaacaagaccaacgtcaagttcctcgccatcaccaccgactgcctccagatcctcgcctacggcaaccaggagtccaagctcatcatcctcgcctccggcggcccccaggccctcgtcaacatcatgcgcacctacacctacgagaagctcctctggaccacctcccgcgtcctcaaggtcctctccgtctgctcctccaacaagcccgccatcgtcgaggccggcggcatgcaggccctcggcctccacctcaccgacccctcccagcgcctcgtccagaactgcctctggaccctccgcaacctctccgacgccgccaccaagcaggagggcatggagggcctcctcggcaccctcgtccagctcctcggctccgacgacatcaacgtcgtcacctgcgccgccggcatcctctccaacctcacctgcaacaactacaagaacaagatgatggtctgccaggtcggcggcatcgaggccctcgtccgcaccgtcctccgcgccggcgaccgcgaggacatcaccgagcccgccatctgcgccctccgccacctcacctcccgccaccaggaggccgagatggcccagaacgccgtccgcctccactacggcctccccgtcgtcgtcaagctcctccaccccccctcccactggcccctcatcaaggccaccgtcggcctcatccgcaacctcgccctctgccccgccaaccacgcccccctccgcgagcagggcgccatcccccgcctcgtccagctcctcgtccgcgcccaccaggacacccagcgccgcacctccatgggcggcacccagcagcagttcgtcgagggcgtccgcatggaggagatcgtcgagggctgcaccggcgccctccacatcctcgcccgcgacgtccacaaccgcatcgtcatccgcggcctcaacaccatccccctcttcgtccagctcctctactcccccatcgagaacatccagcgcgtcgccgccggcgtcctctgcgagctcgcccaggacaaggaggccgccgaggccatcgaggccgagggcgccaccgcccccctcaccgagctcctccactcccgcaacgagggcgtcgccacctacgccgccgccgtcctcttccgcatgtccgaggacaagccccaggactacaagaagcgcctctccgtcgagctcacctcctccctcttccgcaccgagcccatggcctggaacgagaccgccgacctcggcctcgacatcggcgcccagggcgagcccctcggctaccgccaggacgacccctcctaccgctccttccactccggcggctacggccaggacgccctcggcatggaccccatgatggagcacgagatgggcggccaccaccccggcgccgactaccccgtcgacggcctccccgacctcggccacgcccaggacctcatggacggcctcccccccggcgactccaaccagctcgcctggttcgacaccgacctctga

SEQ ID NO: 1547 - RNA, 1692 nt, synthetic construct
  misc_feature 1..1692: note = AAI21007 variant
  source 1..1692: mol_type = other RNA
atggacgtcggcgagctcctctcctaccagcccaaccgcggcaccaagcgcccccgcgacgacgaggaggaggagcagaagatgcgccgcaagcagaccggcacccgcgagcgcggccgctaccgcgaggaggagatgaccgtcgtcgaggaggccgacgacgacaagaagcgcctcctccagatcatcgaccgcgacggcgaggaggaggaggaggaggaggagcccctcgacgagtcctccgtcaagaagatgatcctcaccttcgagaagcgctcctacaagaaccaggagctccgcatcaagttccccgacaaccccgagaagttcatggagtccgagctcgacctcaacgacatcatccaggagatgcacgtcgtcgccaccatgcccgacctctaccacctcctcgtcgagctcaacgccgtccagtccctcctcggcctcctcggccacgacaacaccgacgtctccatcgccgtcgtcgacctcctccaggagctcaccgacatcgacaccctccacgagtccgaggagggcgccgaggtcctcatcgacgccctcgtcgacggccaggtcgtcgccctcctcgtccagaacctcgagcgcctcgacgagtccgtcaaggaggaggccgacggcgtccacaacaccctcgccatcgtcgagaacatggccgagttccgccccgagatgtgcaccgagggcgcccagcagggcctcctccagtggctcctcaagcgcctcaaggccaagatgcccttcgacgccaacaagctctactgctccgaggtcctcgccatcctcctccaggacaacgacgagaaccgcgagctcctcggcgagctcgacggcatcgacgtcctcctccagcagctctccgtcttcaagcgccacaacccctccaccgccgaggagcaggagatgatggagaacctcttcgactccctctgctcctgcctcatgctctcctccaaccgcgagcgcttcctcaagggcgagggcctccagctcatgaacctcatgctccgcgagaagaagatctcccgctcctccgccctcaaggtcctcgaccacgccatgatcggccccgagggcaccgacaactgccacaagttcgtcgacatcctcggcctccgcaccatcttccccctcttcatgaagtccccccgcaagatcaagaaggtcggcaccaccgagaaggagcacgaggagcacgtctgctccatcctcgcctccctcctccgcaacctccgcggccagcagcgcacccgcctcctcaacaagttcaccgagaacgactccgagaaggtcgaccgcctcatggagctccacttcaagtacctcggcgccatgcaggtcgccgacaagaagatcgagggcgagaagcacgacatggtccgccgcggcgagatcatcgacaacgacaccgaggaggagttctacctccgccgcctcgacgccggcctcttcgtcctccagcacatctgctacatcatggccgagatctgcaacgccaacgtcccccagatccgccagcgcgtccaccagatcctcaacatgcgcggctcctccatcaagatcgtccgccacatcatcaaggagtacgccgagaacatcggcgacggccgctcccccgagttccgcgagaacgagcagaagcgcatcctcggcctcctcgagaacttctga

SEQ ID NO: 1548 - RNA, 1833 nt, synthetic construct
  misc_feature 1..1833: note = CCDS4772.1 variant
  source 1..1833: mol_type = other RNA
atggagaccgcccccaagcccggcaaggacgtcccccccaagaaggacaagctccagaccaagcgcaagaagccccgccgctactgggaggaggagaccgtccccaccaccgccggcgcctcccccggccccccccgcaacaagaagaaccgcgagctccgcccccagcgccccaagaacgcctacatcctcaagaagtcccgcatctccaagaagccccaggtccccaagaagccccgcgagtggaagaaccccgagtcccagcgcggcctctccggcacccaggaccccttccccggccccgcccccgtccccgtcgaggtcgtccagaagttctgccgcatcgacaagtcccgcaagctcccccactccaaggccaagacccgctcccgcctcgaggtcgccgaggccgaggaggaggagacctccatcaaggccgcccgctccgagctcctcctcgccgaggagcccggcttcctcgagggcgaggacggcgaggacaccgccaagatctgccaggccgacatcgtcgaggccgtcgacatcgcctccgccgccaagcacttcgacctcaacctccgccagttcggcccctaccgcctcaactactcccgcaccggccgccacctcgccttcggcggccgccgcggccacgtcgccgccctcgactgggtcaccaagaagctcatgtgcgagatcaacgtcatggaggccgtccgcgacatccgcttcctccactccgaggccctcctcgccgtcgcccagaaccgctggctccacatctacgacaaccagggcatcgagctccactgcatccgccgctgcgaccgcgtcacccgcctcgagttcctccccttccacttcctcctcgccaccgcctccgagaccggcttcctcacctacctcgacgtctccgtcggcaagatcgtcgccgccctcaacgcccgcgccggccgcctcgacgtcatgtcccagaacccctacaacgccgtcatccacctcggccactccaacggcaccgtctccctctggtcccccgccatgaaggagcccctcgccaagatcctctgccaccgcggcggcgtccgcgccgtcgccgtcgactccaccggcacctacatggccacctccggcctcgaccaccagctcaagatcttcgacctccgcggcacctaccagcccctctccacccgcaccctcccccacggcgccggccacctcgccttctcccagcgcggcctcctcgtcgccggcatgggcgacgtcgtcaacatctgggccggccagggcaaggcctcccccccctccctcgagcagccctacctcacccaccgcctctccggccccgtccacggcctccagttctgccccttcgaggacgtcctcggcgtcggccacaccggcggcatcacctccatgctcgtccccggcgccggcgagcccaacttcgacggcctcgagtccaacccctaccgctcccgcaagcagcgccaggagtgggaggtcaaggccctcctcgagaaggtccccgccgagctcatctgcctcgacccccgcgccctcgccgaggtcgacgtcatctccctcgagcagggcaagaaggagcagatcgagcgcctcggctacgacccccaggccaaggcccccttccagcccaagcccaagcagaagggccgctcctccaccgcctccctcgtcaagcgcaagcgcaaggtcatggacgaggagcaccgcgacaaggtccgccagtccctccagcagcagcaccacaaggaggccaaggccaagcccaccggcgcccgcccctccgccctcgaccgcttcgtccgctga

SEQ ID NO: 1549 - RNA, 897 nt, synthetic construct
  misc_feature 1..897: note = AAG37878 variant
  source 1..897: mol_type = other RNA
atgggccccaaggactccgccaagtgcctccaccgcggcccccagccctcccactgggccgccggcgacggccccacccaggagcgctgcggcccccgctccctcggctcccccgtcctcggcctcgacacctgccgcgcctgggaccacgtcgacggccagatcctcggccagctccgccccctcaccgaggaggaggaggaggagggcgccggcgccaccctctcccgcggccccgccttccccggcatgggctccgaggagctccgcctcgcctccttctacgactggcccctcaccgccgaggtcccccccgagctcctcgccgccgccggcttcttccacaccggccaccaggacaaggtccgctgcttcttctgctacggcggcctccagtcctggaagcgcggcgacgacccctggaccgagcacgccaagtggttcccctcctgccagttcctcctccgctccaagggccgcgacttcgtccactccgtccaggagacccactcccagctcctcggctcctgggacccctgggaggagcccgaggacgccgcccccgtcgccccctccgtccccgcctccggctaccccgagctccccaccccccgccgcgaggtccagtccgagtccgcccaggagcccggcggcgtctcccccgccgaggcccagcgcgcctggtgggtcctcgagccccccggcgcccgcgacgtcgaggcccagctccgccgcctccaggaggagcgcacctgcaaggtctgcctcgaccgcgccgtctccatcgtcttcgtcccctgcggccacctcgtctgcgccgagtgcgcccccggcctccagctctgccccatctgccgcgcccccgtccgctcccgcgtccgcaccttcctctcctga

SEQ ID NO: 1550 - RNA, 2280 nt, synthetic construct
  misc_feature 1..2280: note = EAW60925 variant
  source 1..2280: mol_type = other RNA
atggacctctccgccctccgcgtcgaggaggtccagaacgtcatcaacgccatgcagaagatcctcgagtgccccatctgcctcgagctcatcaaggagcccgtctccaccaagtgcgaccacatcttctgcaagttctgcatgctcaagctcctcaaccagaagaagggcccctcccagtgccccctctgcaagaacgacatcaccaagcgctccctccaggagtccacccgcttctcccagctcgtcgaggagctcctcaagatcatctgcgccttccagctcgacaccggcctcgagtacgccaactcctacaacttcgccaagaaggagaacaactcccccgagcacctcaaggacgaggtctccatcatccagtccatgggctaccgcaaccgcgccaagcgcctcctccagtccgagcccgagaacccctccctccaggagacctccctctccgtccagctctccaacctcggcaccgtccgcaccctccgcaccaagcagcgcatccagccccagaagacctccgtctacatcgagctcggctccgactcctccgaggacaccgtcaacaaggccacctactgctccgtcggcgaccaggagctcctccagatcaccccccagggcacccgcgacgagatctccctcgactccgccaagaaggccgcctgcgagttctccgagaccgacgtcaccaacaccgagcaccaccagccctccaacaacgacctcaacaccaccgagaagcgcgccgccgagcgccaccccgagaagtaccagggcgaggccgcctccggctgcgagtccgagacctccgtctccgaggactgctccggcctctcctcccagtccgacatcctcaccacccagcagcgcgacaccatgcagcacaacctcatcaagctccagcaggagatggccgagctcgaggccgtcctcgagcagcacggctcccagccctccaactcctacccctccatcatctccgactcctccgccctcgaggacctccgcaaccccgagcagtccacctccgagaaggtcctcacctcccagaagtcctccgagtaccccatctcccagaaccccgagggcctctccgccgacaagttcgaggtctccgccgactcctccacctccaagaacaaggagcccggcgtcgagcgctcctccccctccaagtgcccctccctcgacgaccgctggtacatgcactcctgctccggctccctccagaaccgcaactacccctcccaggaggagctcatcaaggtcgtcgacgtcgaggagcagcagctcgaggagtccggcccccacgacctcaccgagacctcctacctcccccgccaggacctcgagggcaccccctacctcgagtccggcatctccctcttctccgacgaccccgagtccgacccctccgaggaccgcgcccccgagtccgcccgcgtcggcaacatcccctcctccacctccgccctcaaggtcccccagctcaaggtcgccgagtccgcccagtcccccgccgccgcccacaccaccgacaccgccggctacaacgccatggaggagtccgtctcccgcgagaagcccgagctcaccgcctccaccgagcgcgtcaacaagcgcatgtccatggtcgtctccggcctcacccccgaggagttcatgctcgtctacaagttcgcccgcaagcaccacatcaccctcaccaacctcatcaccgaggagaccacccacgtcgtcatgaagaccgacgccgagttcgtctgcgagcgcaccctcaagtacttcctcggcatcgccggcggcaagtgggtcgtctcctacttctgggtcacccagtccatcaaggagcgcaagatgctcaacgagcacgacttcgaggtccgcggcgacgtcgtcaacggccgcaaccaccagggccccaagcgcgcccgcgagtcccaggaccgcaagatcttccgcggcctcgagatctgctgctacggccccttcaccaacatgcccaccgaccagctcgagtggatggtccagctctgcggcgcctccgtcgtcaaggagctctcctccttcaccctcggcaccggcgtccaccccatcgtcgtcgtccagcccgacgcctggaccgaggacaacggcttccacgccatcggccagatgtgcgaggcccccgtcgtcacccgcgagtgggtcctcgactccgtcgccctctaccagtgccaggagctcgacacctacctcatcccccagatcccccactcccactactga

SEQ ID NO: 1551 - RNA, 2160 nt, synthetic construct
  misc_feature 1..2160: note = EAW60922 variant
  source 1..2160: mol_type = other RNA
atggacctctccgccctccgcgtcgaggaggtccagaacgtcatcaacgccatgcagaagatcctcgagtgccccatctgcctcgagctcatcaaggagcccgtctccaccaagtgcgaccacatcttctgcaagttctgcatgctcaagctcctcaaccagaagaagggcccctcccagtgccccctctgcaagaacgacatcaccaagcgctccctccaggagtccacccgcttctcccagctcgtcgaggagctcctcaagatcatctgcgccttccagctcgacaccggcctcgagtacgccaactcctacaacttcgccaagaaggagaacaactcccccgagcacctcaaggacgaggtctccatcatccagtccatgggctaccgcaaccgcgccaagcgcctcctccagtccgagcccgagaacccctccctccaggagacctccctctccgtccagctctccaacctcggcaccgtccgcaccctccgcaccaagcagcgcatccagccccagaagacctccgtctacatcgagctcgccgcctgcgagttctccgagaccgacgtcaccaacaccgagcaccaccagccctccaacaacgacctcaacaccaccgagaagcgcgccgccgagcgccaccccgagaagtaccagggcgaggccgcctccggctgcgagtccgagacctccgtctccgaggactgctccggcctctcctcccagtccgacatcctcaccacccagcagcgcgacaccatgcagcacaacctcatcaagctccagcaggagatggccgagctcgaggccgtcctcgagcagcacggctcccagccctccaactcctacccctccatcatctccgactcctccgccctcgaggacctccgcaaccccgagcagtccacctccgagaaggccgtcctcacctcccagaagtcctccgagtaccccatctcccagaaccccgagggcctctccgccgacaagttcgaggtctccgccgactcctccacctccaagaacaaggagcccggcgtcgagcgctcctccccctccaagtgcccctccctcgacgaccgctggtacatgcactcctgctccggctccctccagaaccgcaactacccctcccaggaggagctcatcaaggtcgtcgacgtcgaggagcagcagctcgaggagtccggcccccacgacctcaccgagacctcctacctcccccgccaggacctcgagggcaccccctacctcgagtccggcatctccctcttctccgacgaccccgagtccgacccctccgaggaccgcgcccccgagtccgcccgcgtcggcaacatcccctcctccacctccgccctcaaggtcccccagctcaaggtcgccgagtccgcccagtcccccgccgccgcccacaccaccgacaccgccggctacaacgccatggaggagtccgtctcccgcgagaagcccgagctcaccgcctccaccgagcgcgtcaacaagcgcatgtccatggtcgtctccggcctcacccccgaggagttcatgctcgtctacaagttcgcccgcaagcaccacatcaccctcaccaacctcatcaccgaggagaccacccacgtcgtcatgaagaccgacgccgagttcgtctgcgagcgcaccctcaagtacttcctcggcatcgccggcggcaagtgggtcgtctcctacttctgggtcacccagtccatcaaggagcgcaagatgctcaacgagcacgacttcgaggtccgcggcgacgtcgtcaacggccgcaaccaccagggccccaagcgcgcccgcgagtcccaggaccgcaagatcttccgcggcctcgagatctgctgctacggccccttcaccaacatgcccaccgaccagctcgagtggatggtccagctctgcggcgcctccgtcgtcaaggagctctcctccttcaccctcggcaccggcgtccaccccatcgtcgtcgtccagcccgacgcctggaccgaggacaacggcttccacgccatcggccagatgtgcgaggcccccgtcgtcacccgcgagtgggtcctcgactccgtcgccctctaccagtgccaggagctcgacacctacctcatcccccagatcccccactcccactactga

SEQ ID NO: 1552 - RNA, 2166 nt, synthetic construct
  misc_feature 1..2166: note = EAW60923 variant
  source 1..2166: mol_type = other RNA
atggacctctccgccctccgcgtcgaggaggtccagaacgtcatcaacgccatgcagaagatcctcgagtgccccatctgcctcgagctcatcaaggagcccgtctccaccaagtgcgaccacatcttctgcaagttctgcatgctcaagctcctcaaccagaagaagggcccctcccagtgccccctctgcaagaacgacatcaccaagcgctccctccaggagtccacccgcttctcccagctcgtcgaggagctcctcaagatcatctgcgccttccagctcgacaccggcctcgagtacgccaactcctacaacttcgccaagaaggagaacaactcccccgagcacctcaaggacgaggtctccatcatccagtccatgggctaccgcaaccgcgccaagcgcctcctccagtccgagcccgagaacccctccctccaggagacctccctctccgtccagctctccaacctcggcaccgtccgcaccctccgcaccaagcagcgcatccagccccagaagacctccgtctacatcgagctcggctccgactcctccgaggacaccgtcaacaaggccacctactgctccgtcggcgaccaggagctcctccagatcaccccccagggcacccgcgacgagatctccctcgactccgccaagaagggcgaggccgcctccggctgcgagtccgagacctccgtctccgaggactgctccggcctctcctcccagtccgacatcctcaccacccagcagcgcgacaccatgcagcacaacctcatcaagctccagcaggagatggccgagctcgaggccgtcctcgagcagcacggctcccagccctccaactcctacccctccatcatctccgactcctccgccctcgaggacctccgcaaccccgagcagtccacctccgagaaggccgtcctcacctcccagaagtcctccgagtaccccatctcccagaaccccgagggcctctccgccgacaagttcgaggtctccgccgactcctccacctccaagaacaaggagcccggcgtcgagcgctcctccccctccaagtgcccctccctcgacgaccgctggtacatgcactcctgctccggctccctccagaaccgcaactacccctcccaggaggagctcatcaaggtcgtcgacgtcgaggagcagcagctcgaggagtccggcccccacgacctcaccgagacctcctacctcccccgccaggacctcgagggcaccccctacctcgagtccggcatctccctcttctccgacgaccccgagtccgacccctccgaggaccgcgcccccgagtccgcccgcgtcggcaacatcccctcctccacctccgccctcaaggtcccccagctcaaggtcgccgagtccgcccagtcccccgccgccgcccacaccaccgacaccgccggctacaacgccatggaggagtccgtctcccgcgagaagcccgagctcaccgcctccaccgagcgcgtcaacaagcgcatgtccatggtcgtctccggcctcacccccgaggagttcatgctcgtctacaagttcgcccgcaagcaccacatcaccctcaccaacctcatcaccgaggagaccacccacgtcgtcatgaagaccgacgccgagttcgtctgcgagcgcaccctcaagtacttcctcggcatcgccggcggcaagtgggtcgtctcctacttctgggtcacccagtccatcaaggagcgcaagatgctcaacgagcacgacttcgaggtccgcggcgacgtcgtcaacggccgcaaccaccagggccccaagcgcgcccgcgagtcccaggaccgcaagatcttccgcggcctcgagatctgctgctacggccccttcaccaacatgcccaccgaccagctcgagtggatggtccagctctgcggcgcctccgtcgtcaaggagctctcctccttcaccctcggcaccggcgtccaccccatcgtcgtcgtccagcccgacgcctggaccgaggacaacggcttccacgccatcggccagatgtgcgaggcccccgtcgtcacccgcgagtgggtcctcgactccgtcgccctctaccagtgccaggagctcgacacctacctcatcccccagatcccccactcccactactga

SEQ ID NO: 1553 - RNA, 36 nt, synthetic construct
  misc_feature 1..36: note = AIC83575 variant
  source 1..36: mol_type = other RNA
atggacctctccgccctccgcgtcgaggaggtctga

SEQ ID NO: 1554 - RNA, 522 nt, synthetic construct
  misc_feature 1..522: note = ABC59810 variant
  source 1..522: mol_type = other RNA
atggacgccgagttcgtctgcgagcgcaccctcaagtacttcctcggcatcgccggcggcaagtgggtcgtctcctacttctgggtcacccagtccatcaaggagcgcaagatgctcaacgagcacgacttcgaggtccgcggcgacgtcgtcaacggccgcaaccaccagggccccaagcgcgcccgcgagtcccaggaccgcaagatcttccgcggcctcgagatctgctgctacggccccttcaccaacatgcccaccgaccagctcgagtggatggtccagctctgcggcgcctccgtcgtcaaggagctctcctccttcaccctcggcaccggcgtccaccccatcgtcgtcgtccagcccgacgcctggaccgaggacaacggcttccacgccatcggccagatgtgcgaggcccccgtcgtcacccgcgagtgggtcctcgactccgtcgccctctaccagtgccaggagctcgacacctacctcatcccccagatcccccactcccactactga

SEQ ID NO: 1555 - RNA, 1065 nt, synthetic construct
  misc_feature 1..1065: note = ABC88652 variant
  source 1..1065: mol_type = other RNA
atgcactcctgctccggctccctccagaaccgcaactacccctcccaggaggagctcatcaaggtcgtcgacgtcgaggagcagcagctcgaggagtccggcccccacgacctcaccgagacctcctacctcccccgccaggacctcgagggcaccccctacctcgagtccggcatctccctcttctccgacgaccccgagtccgacccctccgaggaccgcgcccccgagtccgcccgcgtcggcaacatcccctcctccacctccgccctcaaggtcccccagctcaaggtcgccgagtccgcccagggccccgccgccgcccacaccaccgacaccgccggctacaacgccatggaggagtccgtctcccgcgagaagcccgagctcaccgcctccaccgagcgcgtcaacaagcgcatgtccatggtcgtctccggcctcacccccgaggagttcatgctcgtctacaagttcgcccgcaagcaccacatcaccctcaccaacctcatcaccgaggagaccacccacgtcgtcatgaagaccgacgccgagttcgtctgcgagcgcaccctcaagtacttcctcggcatcgccggcggcaagtgggtcgtctcctacttctgggtcacccagtccatcaaggagcgcaagatgctcaacgagcacgacttcgaggtccgcggcgacgtcgtcaacggccgcaaccaccagggccccaagcgcgcccgcgagtcccaggaccgcaagatcttccgcggcctcgagatctgctgctacggccccttcaccaacatgcccaccgaccagctcgagtggatggtccagctctgcggcgcctccgtcgtcaaggagctctcctccttcaccctcggcaccggcgtccaccccatcgtcgtcgtccagcccgacgcctggaccgaggacaacggcttccacgccatcggccagatgtgcgagacccccgtcgtcacccgcgagtgggtcctcgactccgtcgccctctaccagtgccaggagctcgacacctacctcatcccccagatcccccactcccactactga

SEQ ID NO: 1556 - RNA, 2043 nt, synthetic construct
  misc_feature 1..2043: note = EAW60939 variant
  source 1..2043: mol_type = other RNA
atggacctctccgccctccgcgtcgaggaggtccagaacgtcatcaacgccatgcagaagatcctcgagtgccccatctgcctcgagctcatcaaggagcccgtctccaccaagtgcgaccacatcttctgcaagttctgcatgctcaagctcctcaaccagaagaagggcccctcccagtgccccctctgcaagaacgacatcaccaagcgctccctccaggagtccacccgcttctcccagctcgtcgaggagctcctcaagatcatctgcgccttccagctcgacaccggcctcgagtacgccaactcctacaacttcgccaagaaggagaacaactcccccgagcacctcaaggacgaggtctccatcatccagtccatgggctaccgcaaccgcgccaagcgcctcctccagtccgagcccgagaacccctccctccaggagacctccctctccgtccagctctccaacctcggcaccgtccgcaccctccgcaccaagcagcgcatccagccccagaagacctccgtctacatcgagctcggcgaggccgcctccggctgcgagtccgagacctccgtctccgaggactgctccggcctctcctcccagtccgacatcctcaccacccagcagcgcgacaccatgcagcacaacctcatcaagctccagcaggagatggccgagctcgaggccgtcctcgagcagcacggctcccagccctccaactcctacccctccatcatctccgactcctccgccctcgaggacctccgcaaccccgagcagtccacctccgagaaggccgtcctcacctcccagaagtcctccgagtaccccatctcccagaaccccgagggcctctccgccgacaagttcgaggtctccgccgactcctccacctccaagaacaaggagcccggcgtcgagcgctcctccccctccaagtgcccctccctcgacgaccgctggtacatgcactcctgctccggctccctccagaaccgcaactacccctcccaggaggagctcatcaaggtcgtcgacgtcgaggagcagcagctcgaggagtccggcccccacgacctcaccgagacctcctacctcccccgccaggacctcgagggcaccccctacctcgagtccggcatctccctcttctccgacgaccccgagtccgacccctccgaggaccgcgcccccgagtccgcccgcgtcggcaacatcccctcctccacctccgccctcaaggtcccccagctcaaggtcgccgagtccgcccagtcccccgccgccgcccacaccaccgacaccgccggctacaacgccatggaggagtccgtctcccgcgagaagcccgagctcaccgcctccaccgagcgcgtcaacaagcgcatgtccatggtcgtctccggcctcacccccgaggagttcatgctcgtctacaagttcgcccgcaagcaccacatcaccctcaccaacctcatcaccgaggagaccacccacgtcgtcatgaagaccgacgccgagttcgtctgcgagcgcaccctcaagtacttcctcggcatcgccggcggcaagtgggtcgtctcctacttctgggtcacccagtccatcaaggagcgcaagatgctcaacgagcacgacttcgaggtccgcggcgacgtcgtcaacggccgcaaccaccagggccccaagcgcgcccgcgagtcccaggaccgcaagatcttccgcggcctcgagatctgctgctacggccccttcaccaacatgcccaccgaccagctcgagtggatggtccagctctgcggcgcctccgtcgtcaaggagctctcctccttcaccctcggcaccggcgtccaccccatcgtcgtcgtccagcccgacgcctggaccgaggacaacggcttccacgccatcggccagatgtgcgaggcccccgtcgtcacccgcgagtgggtcctcgactccgtcgccctctaccagtgccaggagctcgacacctacctcatcccccagatcccccactcccactactga

SEQ ID NO: 1557 - RNA, 546 nt, synthetic construct
  misc_feature 1..546: note = AAC72302 variant
  source 1..546: mol_type = other RNA
atgctcctcgagcccggccgcggctgctgcgccctcgccatcctcctcgccatcgtcgacatccagtccggcggctgcatcaacatcacctcctccgcctcccaggagggcacccgcctcaacctcatctgcaccgtctggcacaagaaggaggaggccgagggcttcgtcgtcttcctctgcaaggaccgctccggcgactgctcccccgagacctccctcaagcagctccgcctcaagcgcgaccccggcatcgacggcgtcggcgagatctcctcccagctcatgttcaccatctcccaggtcacccccctccactccggcacctaccagtgctgcgcccgctcccagaagtccggcatccgcctccagggccacttcttctccatcctcttcaccgagaccggcaactacaccgtcaccggcctcaagcagcgccagcacctcgagttctcccacaacgagggcaccctctcctccggcttcctccaggagaaggtctgggtcatgctcgtcacctccctcgtcgccctccaggccctctga

SEQ ID NO: 1558 - RNA, 639 nt, synthetic construct
  misc_feature 1..639: note = BAG58223 variant
  source 1..639: mol_type = other RNA
atgctcctctccgtctacttcaaggagcagttcctcgacggcgacggctggacctcccgctggatcgagtccaagcacaagtccgacttcggcaagttcgtcctctcctccggcaagttctacggcgacgaggagaaggacaagggcctccagacctcccaggacgcccgcttctacgccctctccgcctccttcgagcccttctccaacaagggccagaccctcgtcgtccagttcaccgtcaagcacgagcagaacatcgactgcggcggcggctacgtcaagctcttccccaactccctcgaccagaccgacatgcacggcgactccgagtacaacatcatgttcggccccgacatctgcggccccggcaccaagaaggtccacgtcatcttcaactacaagggcaagaacgtcctcatcaacaaggacatccgctgcaaggacgacgagttcacccacctctacaccctcatcgtccgccccgacaacacctacgaggtcaagatcgacaactcccaggtcgagtccggctccctcgaggacgactgggacttcctcccccccaagaagatcaaggaccccgacgcctccaagcccgaggactgggacgagcgcgccaagatcgacgacccctga

SEQ ID NO: 1559 - RNA, 891 nt, synthetic construct
  misc_feature 1..891: note = BAG65301 variant
  source 1..891: mol_type = other RNA
atgcacggcgactccgagtacaacatcatgttcggccccgacatctgcggccccggcaccaagaaggtccacgtcatcttcaactacaagggcaagaacgtcctcatcaacaaggacatccgctgcaaggacgacgagttcacccacctctacaccctcatcgtccgccccgacaacacctacgaggtcaagatcgacaactcccaggtcgagtccggctccctcgaggacgactgggacttcctcccccccaagaagatcaaggaccccgacgcctccaagcccgaggactgggacgagcgcgccaagatcgacgaccccaccgactccaagcccgaggactgggacaagcccgagcacatccccgaccccgacgccaagaagcccgaggactgggacgaggagatggacggcgagtgggagccccccgtcatccagaaccccgagtacaagggcgagtggaagccccgccagatcgacaaccccgactacaagggcacctggatccaccccgagatcgacaaccccgagtactcccccgacccctccatctacgcctacgacaacttcggcgtcctcggcctcgacctctggcaggtcaagtccggcaccatcttcgacaacttcctcatcaccaacgacgaggcctacgccgaggagttcggcaacgagacctggggcgtcaccaaggccgccgagaagcagatgaaggacaagcaggacgaggagcagcgcctcaaggaggaggaggaggacaagaagcgcaaggaggaggaggaggccgaggacaaggaggacgacgaggacaaggacgaggacgaggaggacgaggaggacaaggaggaggacgaggaggaggacgtccccggccaggccaaggacgagctctga

SEQ ID NO: 1560 - RNA, 1254 nt, synthetic construct
  misc_feature 1..1254: note = AAA36582 variant
  source 1..1254: mol_type = other RNA
atgctcctctccgtccccctcctcctcggcctcctcggcctcgccgtcgccgagcccgccgtctacttcaaggagcagttcctcgacggcgacggctggacctcccgctggatcgagtccaagcacaagtccgacttcggcaagttcgtcctctcctccggcaagttctacggcgacgaggagaaggacaagggcctccagacctcccaggacgcccgcttctacgccctctccgcctccttcgagcccttctccaacaagggccagaccctcgtcgtccagttcaccgtcaagcacgagcagaacatcgactgcggcggcggctacgtcaagctcttccccaactccctcgaccagaccgacatgcacggcgactccgagtacaacatcatgttcggccccgacatctgcggccccggcaccaagaaggtccacgtcatcttcaactacaagggcaagaacgtcctcatcaacaaggacatccgctgcaaggacgacgagttcacccacctctacaccctcatcgtccgccccgacaacacctacgaggtcaagatcgacaactcccaggtcgagtccggctccctcgaggacgactgggacttcctcccccccaagaagatcaaggaccccgacgcctccaagcccgaggactgggacgagcgcgccaagatcgacgaccccaccgactccaagcccgaggactgggacaagcccgagcacatccccgaccccgacgccaagaagcccgaggactgggacgaggagatggacggcgagtgggagccccccgtcatccagaaccccgagtacaagggcgagtggaagccccgccagatcgacaaccccgactacaagggcacctggatccaccccgagatcgacaaccccgagtactcccccgacccctccatctacgcctacgacaacttcggcgtcctcggcctcgacctctggcaggtcaagtccggcaccatcttcgacaacttcctcatcaccaacgacgaggcctacgccgaggagttcggcaacgagacctggggcgtcaccaaggccgccgagaagcagatgaaggacaagcaggacgaggagcagcgcctcaaggaggaggaggaggacaagaagcgcaaggaggaggaggaggccgaggacaaggaggacgacgaggacaaggacgaggacgaggaggacgaggaggacaaggaggaggacgaggaggaggacgtccccggccaggccaaggacgagctctga

SEQ ID NO: 1561 - RNA, 1155 nt, synthetic construct
  misc_feature 1..1155: note = BAB71655 variant
  source 1..1155: mol_type = other RNA
atggcccgcgccctcgtccagctctgggccatctgcatgctccgcgtcgccctcgccaccgtctacttccaggaggagttcctcgacggcgagcactggcgcaaccgctggctccagtccaccaacgactcccgcttcggccacttccgcctctcctccggcaagttctacggccacaaggagaaggacaagggcctccagaccacccagaacggccgcttctacgccatctccgcccgcttcaagcccttctccaacaagggcaagaccctcgtcatccagtacaccgtcaagcacgagcagaagatggactgcggcggcggctacatcaaggtcttccccgccgacatcgaccagaagaacctcaacggcaagtcccagtactacatcatgttcggccccgacatctgcggcttcgacatcaagaaggtccacgtcatcctccacttcaagaacaagtaccacgagaacaagaagctcatccgctgcaaggtcgacggcttcacccacctctacaccctcatcctccgccccgacctctcctacgacgtcaagatcgacggccagtccatcgagtccggctccatcgagtacgactggaacctcacctccctcaagaaggagacctcccccgccgagtccaaggactgggagcagaccaaggacaacaaggcccaggactgggagaagcacttcctcgacgcctccacctccaagcagtccgactggaacggcgacctcgacggcgactggcccgcccccatgctccagaagcccccctaccaggacggcctcaagcccgagggcatccacaaggacgtctggctccaccgcaagatgaagaacaccgactacctcacccagtacgacctctccgagttcgagaacatcggcgccatcggcctcgagctctggcaggtccgctccggcaccatcttcgacaacttcctcatcaccgacgacgaggagtacgccgacaacttcggcaaggccacctggggcgagaccaagggccccgagcgcgagatggacgccatccaggccaaggaggagatgaagaaggcccgcgaggaggaggaggaggagctcctctccggcaagatcaaccgccacgagcactacttcaaccagttccaccgccgcaacgagctctga

SEQ ID NO: 1562 - RNA, 330 nt, synthetic construct
  misc_feature 1..330: note = CAA10193 variant
  source 1..330: mol_type = other RNA
atgctcatggcccaggaggccctcgccttcctcatggcccagggcgccatgctcgccgcccaggagcgccgcgtcccccgcgccgccgaggtccccggcgcccagggccagcagggcccccgcggccgcgaggaggccccccgcggcgtccgcatggccgtccccctcctccgccgcatggagggcgcccccgccggccccggcggccgcaccgccgcctgcttctcctgcacctcccgctgcctctcccgccgcccctggaagcgctcctggtccgccggctcctgccccggcatgccccacctctcccccgaccagggccgcttctga

SEQ ID NO: 1563 - RNA, 1440 nt, synthetic construct
  misc_feature 1..1440: note = CAA66853 variant
  source 1..1440: mol_type = other RNA
atggacttctcccgcaacctctacgacatcggcgagcagctcgactccgaggacctcgcctccctcaagttcctctccctcgactacatcccccagcgcaagcaggagcccatcaaggacgccctcatgctcttccagcgcctccaggagaagcgcatgctcgaggagtccaacctctccttcctcaaggagctcctcttccgcatcaaccgcctcgacctcctcatcacctacctcaacacccgcaaggaggagatggagcgcgagctccagacccccggccgcgcccagatctccgcctaccgcgtcatgctctaccagatctccgaggaggtctcccgctccgagctccgctccttcaagttcctcctccaggaggagatctccaagtgcaagctcgacgacgacatgaacctcctcgacatcttcatcgagatggagaagcgcgtcatcctcggcgagggcaagctcgacatcctcaagcgcgtctgcgcccagatcaacaagtccctcctcaagatcatcaacgactacgaggagttctccaaggagcgctcctcctccctcgagggctcccccgacgagttctccaacggcgaggagctctgcggcgtcatgaccatctccgactccccccgcgagcaggactccgagtcccagaccctcgacaaggtctaccagatgaagtccaagccccgcggctactgcctcatcatcaacaaccacaacttcgccaaggcccgcgagaaggtccccaagctccactccatccgcgaccgcaacggcacccacctcgacgccggcgccctcaccaccaccttcgaggagctccacttcgagatcaagccccacgacgactgcaccgtcgagcagatctacgagatcctcaagatctaccagctcatggaccactccaacatggactgcttcatctgctgcatcctctcccacggcgacaagggcatcatctacggcaccgacggccaggaggcccccatctacgagctcacctcccagttcaccggcctcaagtgcccctccctcgccggcaagcccaaggtcttcttcatccaggcctgccagggcgacaactaccagaagggcatccccgtcgagaccgactccgaggagcagccctacctcgagatggacctctcctccccccagacccgctacatccccgacgaggccgacttcctcctcggcatggccaccgtcaacaactgcgtctcctaccgcaaccccgccgagggcacctggtacatccagtccctctgccagtccctccgcgagcgctgcccccgcggcgacgacatcctcaccatcctcaccgaggtcaactacgaggtctccaacaaggacgacaagaagaacatgggcaagcagatgccccagcccaccttcaccctccgcaagaagctcgtcttcccctccgactga

SEQ ID NO: 1564 - RNA, 1569 nt, synthetic construct
  misc_feature 1..1569: note = CCDS2340.1 variant
  source 1..1569: mol_type = other RNA
atgaagtcccagggccagcactggtactcctcctccgacaagaactgcaaggtctccttccgcgagaagctcctcatcatcgactccaacctcggcgtccaggacgtcgagaacctcaagttcctctgcatcggcctcgtccccaacaagaagctcgagaagtcctcctccgcctccgacgtcttcgagcacctcctcgccgaggacctcctctccgaggaggaccccttcttcctcgccgagctcctctacatcatccgccagaagaagctcctccagcacctcaactgcaccaaggaggaggtcgagcgcctcctccccacccgccagcgcgtctccctcttccgcaacctcctctacgagctctccgagggcatcgactccgagaacctcaaggacatgatcttcctcctcaaggactccctccccaagaccgagatgacctccctctccttcctcgccttcctcgagaagcagggcaagatcgacgaggacaacctcacctgcctcgaggacctctgcaagaccgtcgtccccaagctcctccgcaacatcgagaagtacaagcgcgagaaggccatccagatcgtcaccccccccgtcgacaaggaggccgagtcctaccagggcgaggaggagctcgtctcccagaccgacgtcaagaccttcctcgaggccctcccccaggagtcctggcagaacaagcacgccggctccaacggcaaccgcgccaccaacggcgccccctccctcgtctcccgcggcatgcagggcgcctccgccaacaccctcaactccgagacctccaccaagcgcgccgccgtctaccgcatgaaccgcaaccaccgcggcctctgcgtcatcgtcaacaaccactccttcacctccctcaaggaccgccagggcacccacaaggacgccgagatcctctcccacgtcttccagtggctcggcttcaccgtccacatccacaacaacgtcaccaaggtcgagatggagatggtcctccagaagcagaagtgcaaccccgcccacgccgacggcgactgcttcgtcttctgcatcctcacccacggccgcttcggcgccgtctactcctccgacgaggccctcatccccatccgcgagatcatgtcccacttcaccgccctccagtgcccccgcctcgccgagaagcccaagctcttcttcatccaggcctgccagggcgaggagatccagccctccgtctccatcgaggccgacgccctcaaccccgagcaggcccccacctccctccaggactccatccccgccgaggccgacttcctcctcggcctcgccaccgtccccggctacgtctccttccgccacgtcgaggagggctcctggtacatccagtccctctgcaaccacctcaagaagctcgtcccccgccacgaggacatcctctccatcctcaccgccgtcaacgacgacgtctcccgccgcgtcgacaagcagggcaccaagaagcagatgccccagcccgccttcaccctccgcaagaagctcgtcttccccgtccccctcgacgccctctccctctga

SEQ ID NO: 1565 - RNA, 1020 nt, synthetic construct
  misc_feature 1..1020: note = EAW65632 variant
  source 1..1020: mol_type = other RNA
atgtggcagctctgggcctccctctgctgcctcctcgtcctcgccaacgcccgctcccgcccctccttccaccccctctccgacgagctcgtcaactacgtcaacaagcgcaacaccacctggcaggccggccacaacttctacaacgtcgacatgtcctacctcaagcgcctctgcggcaccttcctcggcggccccaagcccccccagcgcgtcatgttcaccgaggacctcaagctccccgcctccttcgacgcccgcgagcagtggccccagtgccccaccatcaaggagatccgcgaccagggctcctgcggctcctgctgggccttcggcgccgtcgaggccatctccgaccgcatctgcatccacaccaacgcccacgtctccgtcgaggtctccgccgaggacctcctcacctgctgcggctccatgtgcggcgacggctgcaacggcggctaccccgccgaggcctggaacttctggacccgcaagggcctcgtctccggcggcctctacgagtcccacgtcggctgccgcccctactccatccccccctgcgagcaccacgtcaacggctcccgccccccctgcaccggcgagggcgacacccccaagtgctccaagatctgcgagcccggctactcccccacctacaagcaggacaagcactacggctacaactcctactccgtctccaactccgagaaggacatcatggccgagatctacaagaacggccccgtcgagggcgccttctccgtctactccgacttcctcctctacaagtccggcgtctaccagcacgtcaccggcgagatgatgggcggccacgccatccgcatcctcggctggggcgtcgagaacggcaccccctactggctcgtcgccaactcctggaacaccgactggggcgacaacggcttcttcaagatcctccgcggccaggaccactgcggcatcgagtccgaggtcgtcgccggcatcccccgcaccgaccagtactgggagaagatctga

SEQ ID NO: 1566 - RNA, 1020 nt, synthetic construct; identical to SEQ ID NO: 1565
  misc_feature 1..1020: note = AAC37547 variant
  source 1..1020: mol_type = other RNA

SEQ ID NO: 1567 - RNA, 1002 nt, synthetic construct
  misc_feature 1..1002: note = EAW62731 variant
  source 1..1002: mol_type = other RNA
atgaaccccaccctcatcctcgccgccttctgcctcggcatcgcctccgccaccctcaccttcgaccactccctcgaggcccagtggaccaagtggaaggccatgcacaaccgcctctacggcatgaacgaggagggctggcgccgcgccgtctgggagaagaacatgaagatgatcgagctccacaaccaggagtaccgcgagggcaagcactccttcaccatggccatgaacgccttcggcgacatgacctccgaggagttccgccaggtcatgaacggcttccagaaccgcaagccccgcaagggcaaggtcttccaggagcccctcttctacgaggccccccgctccgtcgactggcgcgagaagggctacgtcacccccgtcaagaaccagggccagtgcggctcctgctgggccttctccgccaccggcgccctcgagggccagatgttccgcaagaccggccgcctcatctccctctccgagcagaacctcgtcgactgctccggcccccagggcaacgagggctgcaacggcggcctcatggactacgccttccagtacgtccaggacaacggcggcctcgactccgaggagtcctacccctacgaggccaccgaggagtcctgcaagtacaaccccaagtactccgtcgccaacgacaccggcttcgtcgacatccccaagcaggagaaggccctcatgaaggccgtcgccaccgtcggccccatctccgtcgccatcgacgccggccacgagtccttcctcttctacaaggagggcatctacttcgagcccgactgctcctccgaggacatggaccacggcgtcctcgtcgtcggctacggcttcgagtccaccgagtccgacaacaacaagtactggctcgtcaagaactcctggggcgaggagtggggcatgggcggctacgtcaagatggccaaggaccgccgcaaccactgcggcatcgcctccgccgcctcctaccccaccgtctga

SEQ ID NO: 1568 - RNA, 1002 nt, synthetic construct; identical to SEQ ID NO: 1567
  misc_feature 1..1002: note = AAA66974 variant
  source 1..1002: mol_type = other RNA

SEQ ID NO: 1569 - RNA, 456 nt, synthetic construct
  misc_feature 1..456: note = AAG17239 variant
  source 1..456: mol_type = other RNA
atggactacgccttccagtacgtccaggacaacggcggcctcgactccgaggagtcctacccctacgaggccaccgaggagtcctgcaagtacaaccccaagtactccgtcgccaacgacaccggcttcgtcgacatccccaagcaggagaaggccctcatgaaggccgtcgccaccgtcggccccatctccgtcgccatcgacgccggccacgagtccttcctcttctacaaggagggcatctacttcgagcccgactgctcctccgaggacatggaccacggcgtcctcgtcgtcggctacggcttcgagtccaccgagtccgacaacaacaagtactggctcgtcaagaactcctggggcgaggagtggggcatgggcggctacgtcaagatggccaaggaccgccgcaaccactgcggcatcgcctccgccgcctcctaccccaccgtctga

SEQ ID NO: 1570 - RNA, 984 nt, synthetic construct
  misc_feature 1..984: note = AAA51932 variant
  source 1..984: mol_type = other RNA
atgctcttcctcctcctccccctcctcgccgtcctccccggcgacggcaacgccgacggcctcaaggagcccctctccttccacgtcacctggatcgcctccttctacaaccactcctggaagcagaacctcgtctccggctggctctccgacctccagacccacacctgggactccaactcctccaccatcgtcttcctctgcccctggtcccgcggcaacttctccaacgaggagtggaaggagctcgagaccctcttccgcatccgcaccatccgctccttcgagggcatccgccgctacgcccacgagctccagttcgagtaccccttcgagatccaggtcaccggcggctgcgagctccactccggcaaggtctccggctccttcctccagctcgcctaccagggctccgacttcgtctccttccagaacaactcctggctcccctaccccgtcgccggcaacatggccaagcacttctgcaaggtcctcaaccagaaccagcacgagaacgacatcacccacaacctcctctccgacacctgcccccgcttcatcctcggcctcctcgacgccggcaaggcccacctccagcgccaggtcaagcccgaggcctggctctcccacggcccctcccccggccccggccacctccagctcgtctgccacgtctccggcttctaccccaagcccgtctgggtcatgtggatgcgcggcgagcaggagcagcagggcacccagcgcggcgacatcctcccctccgccgacggcacctggtacctccgcgccaccctcgaggtcgccgccggcgaggccgccgacctctcctgccgcgtcaagcactcctccctcgagggccaggacatcgtcctctactgggagcaccactcctccgtcggcttcatcatcctcgccgtcatcgtccccctcctcctcctcatcggcctcgccctctggttccgcaagcgctgcttctgctga

SEQ ID NO: 1571 - RNA, 1002 nt, synthetic construct
  misc_feature 1..1002: note = AAA51939 variant
  source 1..1002: mol_type = other RNA
atgctcctcctccccttccagctcctcgccgtcctcttccccggcggcaactccgagcacgccttccagggccccacctccttccacgtcatccagacctcctccttcaccaactccacctgggcccagacccagggctccggctggctcgacgacctccagatccacggctgggactccgactccggcaccgccatcttcctcaagccctggtccaagggcaacttctccgacaaggaggtcgccgagctcgaggagatcttccgcgtctacatcttcggcttcgcccgcgaggtccaggacttcgccggcgacttccagatgaagtaccccttcgagatccagggcatcgccggctgcgagctccactccggcggcgccatcgtctccttcctccgcggcgccctcggcggcctcgacttcctctccgtcaagaacgcctcctgcgtcccctcccccgagggcggctcccgcgcccagaagttctgcgccctcatcatccagtaccagggcatcatggagaccgtccgcatcctcctctacgagacctgcccccgctacctcctcggcgtcctcaacgccggcaaggccgacctccagcgccaggtcaagcccgaggcctggctctcctccggcccctcccccggccccggccgcctccagctcgtctgccacgtctccggcttctaccccaagcccgtctgggtcatgtggatgcgcggcgagcaggagcagcagggcacccagctcggcgacatcctccccaacgccaactggacctggtacctccgcgccaccctcgacgtcgccgacggcgaggccgccggcctctcctgccgcgtcaagcactcctccctcgagggccaggacatcatcctctactggcgcaaccccacctccatcggctccatcgtcctcgccatcatcgtcccctccctcctcctcctcctctgcctcgccctctggtacatgcgccgccgctcctaccagaacatcccctga

SEQ ID NO: 1572 - RNA, 1002 nt, synthetic construct
  misc_feature 1..1002: note = AAI26466 variant
  source 1..1002: mol_type = other RNA
atgctcttcctccagttcctcctcctcgccctcctcctccccggcggcgacaacgccgacgcctcccaggagcacgtctccttccacgtcatccagatcttctccttcgtcaaccagtcctgggcccgcggccagggctccggctggctcgacgagctccagacccacggctgggactccgagtccggcaccatcatcttcctccacaactggtccaagggcaacttctccaacgaggagctctccgacctcgagctcctcttccgcttctacctcttcggcctcacccgcgagatccaggaccacgcctcccaggactactccaagtaccccttcgaggtccaggtcaaggccggctgcgagctccactccggcaagtcccccgagggcttcttccaggtcgccttcaacggcctcgacctcctctccttccagaacaccacctgggtcccctcccccggctgcggctccctcgcccagtccgtctgccacctcctcaaccaccagtacgagggcgtcaccgagaccgtctacaacctcatccgctccacctgcccccgcttcctcctcggcctcctcgacgccggcaagatgtacgtccaccgccaggtccgccccgaggcctggctctcctcccgcccctccctcggctccggccagctcctcctcgtctgccacgcctccggcttctaccccaagcccgtctgggtcacctggatgcgcaacgagcaggagcagctcggcaccaagcacggcgacatcctccccaacgccgacggcacctggtacctccaggtcatcctcgaggtcgcctccgaggagcccgccggcctctcctgccgcgtccgccactcctccctcggcggccaggacatcatcctctactggggccaccacttctccatgaactggatcgccctcgtcgtcatcgtccccctcgtcatcctcatcgtcctcgtcctctggttcaagaagcactgctcctaccaggacatcctctga

SEQ ID NO: 1573 - RNA, 1008 nt, synthetic construct
  misc_feature 1..1008: note = AAA59672 variant
  source 1..1008: mol_type = other RNA
atgggctgcctcctcttcctcctcctctgggccctcctccaggcctggggctccgccgaggtcccccagcgcctcttccccctccgctgcctccagatctcctccttcgccaactcctcctggacccgcaccgacggcctcgcctggctcggcgagctccagacccactcctggtccaacgactccgacaccgtccgctccctcaagccctggtcccagggcaccttctccgaccagcagtgggagaccctccagcacatcttccgcgtctaccgctcctccttcacccgcgacgtcaaggagttcgccaagatgctccgcctctcctaccccctcgagctccaggtctccgccggctgcgaggtccaccccggcaacgcctccaacaacttcttccacgtcgccttccagggcaaggacatcctctccttccagggcacctcctgggagcccacccaggaggcccccctctgggtcaacctcgccatccaggtcctcaaccaggacaagtggacccgcgagaccgtccagtggctcctcaacggcacctgcccccagttcgtctccggcctcctcgagtccggcaagtccgagctcaagaagcaggtcaagcccaaggcctggctctcccgcggcccctcccccggccccggccgcctcctcctcgtctgccacgtctccggcttctaccccaagcccgtctgggtcaagtggatgcgcggcgagcaggagcagcagggcacccagcccggcgacatcctccccaacgccgacgagacctggtacctccgcgccaccctcgacgtcgtcgccggcgaggccgccggcctctcctgccgcgtcaagcactcctccctcgagggccaggacatcgtcctctactggggcggctcctacacctccatgggcctcatcgccctcgccgtcctcgcctgcctcctcttcctcctcatcgtcggcttcacctcccgcttcaagcgccagacctcctaccagggcgtcctctga

SEQ ID NO: 1574 - RNA, 1167 nt, synthetic construct
  misc_feature 1..1167: note = EAW52830 variant
  source 1..1167: mol_type = other RNA
atgctcctcctcttcctcctcttcgagggcctctgctgccccggcgagaacaccgccgccccccaggccctccagtcctaccacctcgccgccgaggagcagctctccttccgcatgctccagacctcctccttcgccaaccactcctgggcccactccgagggctccggctggctcggcgacctccagacccacggctgggacaccgtcctcggcaccatccgcttcctcaagccctggtcccacggcaacttctccaagcaggagctcaagaacctccagtccctcttccagctctacttccactccttcatccagatcgtccaggcctccgccggccagttccagctcgagtaccccttcgagatccagatcctcgccggctgccgcatgaacgccccccagatcttcctcaacatggcctaccagggctccgacttcctctccttccagggcatctcctgggagccctcccccggcgccggcatccgcgcccagaacatctgcaaggtcctcaaccgctacctcgacatcaaggagatcctccagtccctcctcggccacacctgcccccgcttcctcgccggcctcatggaggccggcgagtccgagctcaagcgcaaggtcaagcccgaggcctggctctcctgcggcccctcccccggccccggccgcctccagctcgtctgccacgtctccggcttctaccccaagcccgtctgggtcatgtggatgcgcggcgagcaggagcagcgcggcacccagcgcggcgacgtcctccccaacgccgacgagacctggtacctccgcgccaccctcgacgtcgccgccggcgaggccgccggcctctcctgccgcgtcaagcactcctccctcggcggccacgacctcatcatccactggggcggctactccatcttcctcatcctcatctgcctcaccgtcatcgtcaccctcgtcatcctcgtcgtcgtcgactcccgcctcaagaagcagtcctccaacaagaacatcctctccccccacaccccctcccccgtcttcctcatgggcgccaacacccaggacaccaagaactcccgccaccagttctgcctcgcccaggtctcctggatcaagaaccgcgtcctcaagaagtggaagacccgcctcaaccagctctggtga

SEQ ID NO: 1575 - RNA, 894 nt, synthetic construct
  misc_feature 1..894: note = AAA35581 variant
  source 1..894: mol_type = other RNA
atgaccaccccccgcaactccgtcaacggcaccttccccgccgagcccatgaagggccccatcgccatgcagtccggccccaagcccctcttccgccgcatgtcctccctcgtcggccccacccagtccttcttcatgcgcgagtccaagaccctcggcgccgtccagatcatgaacggcctcttccacatcgccctcggcggcctcctcatgatccccgccggcatctacgcccccatctgcgtcaccgtctggtaccccctctggggcggcatcatgtacatcatctccggctccctcctcgccgccaccgagaagaactcccgcaagtgcctcgtcaagggcaagatgatcatgaactccctctccctcttcgccgccatctccggcatgatcctctccatcatggacatcctcaacatcaagatctcccacttcctcaagatggagtccctcaacttcatccgcgcccacaccccctacatcaacatctacaactgcgagcccgccaacccctccgagaagaactccccctccacccagtactgctactccatccagtccctcttcctcggcatcctctccgtcatgctcatcttcgccttcttccaggagctcgtcatcgccggcatcgtcgagaacgagtggaagcgcacctgctcccgccccaagtccaacatcgtcctcctctccgccgaggagaagaaggagcagaccatcgagatcaaggaggaggtcgtcggcctcaccgagacctcctcccagcccaagaacgaggaggacatcgagatcatccccatccaggaggaggaggaggaggagaccgagaccaacttccccgagcccccccaggaccaggagtcctcccccatcgagaacgactcctccccctga

SEQ ID NO: 1576 - RNA, 1989 nt, synthetic construct
  misc_feature 1..1989: note = AAC18956 variant
  source 1..1989: mol_type = other RNA
atggagtccaagaccgagaagtggatggagcgcatccacctcaacgtctccgagcgccccttccccccccacatccagctcccccccgagatccaggagtcccaggaggtcaccctcacctgcctcctcaacttctcctgctacggctaccccatccagctccagtggctcctcgagggcgtccccatgcgccaggccgccgtcacctccacctccctcaccatcaagtccgtcttcacccgctccgagctcaagttctccccccagtggtcccaccacggcaagatcgtcacctgccagctccaggacgccgacggcaagttcctctccaacgacaccgtccagctcaacgtcaagcacacccccaagctcgagatcaaggtcaccccctccgacgccatcgtccgcgagggcgactccgtcaccatgacctgcgaggtctcctccaccaaccccgagtacaccaccgtctcctggctcaaggacggcacctccctcaagaagcagaacaccttcaccctcaacctccgcgaggtcaccaaggaccagtccggcaagtactgctgccaggtctccaacgacgtcggccccggccgctccgaggaggtcttcctccaggtccagtacgcccccgagccctccaccgtccagatcctccactcccccgccgtcgagggctcccaggtcgagttcctctgcatgtccctcgccaaccccctccccaccaactacacctggtaccacaacggcaaggagatgcagggccgcaccgaggagaaggtccacatccccaagatcctcccctggcacgccggcacctactcctgcgtcgccgagaacatcctcggcaccggccagcgcggccccggcgccgagctcgacgtccagtacccccccaagaaggtcaccaccgtcatccagaaccccatgcccatccgcgagggcgacaccgtcaccctctcctgcaactacaactcctccaacccctccgtcacccgctacgagtggaagccccacggcgcctgggaggagccctccctcggcgtcctcaagatccagaaggtcggctgggacaacaccaccatcgcctgcgcccgctgcaactcctggtgctcctgggcctcccccgtcgccctcaacgtccagtacgccccccgcgacgtccgcgtccgcaagatcaagcccctctccgagatccactccggcaactccgtctccctccagtgcgacttctcctcctcccaccccaaggaggtccagttcttctgggagaagaacggccgcctcctcggcaaggagtcccagctcaacttcgactccatctcccccgaggacgccggctcctactcctgctgggtcaacaactccatcggccagaccgcctccaaggcctggaccctcgaggtcctctacgccccccgccgcctccgcgtctccatgtcccccggcgaccaggtcatggagggcaagtccgccaccctccgctgcgagtccgacgccaacccccccgtctcccactacacctggttcgactggaacaaccagtccctcccctaccactcccagaagctccgcctcgagcccgtcaaggtccagcactccggcgcctactggtgccagggcaccaactccgtcggcaagggccgctcccccctctccaccctcaccgtctactactcccccgagaccatcggccgccgcgtcgccgtcggcctcggctcctgcctcgccatcctcatcctcgccatctgcggcctcaagctccagcgccgcgacgccgagtcctccgagatgcagcgccccccccgcacctgcgacgacaccgtcacctactccgccctccacaagcgccaggtcggcgactacgagaacgtcatccccgacttccccgaggacgagggcatccactactccgagctcatccagttcggcgtcggcgagcgcccccaggcccaggagaacgtcgactacgtcatcctcaagcactga

SEQ ID NO: 1577 - RNA, 2544 nt, synthetic construct
  misc_feature 1..2544: note = AAB06448 variant
  source 1..2544: mol_type = other RNA
atgcacctcctcggcccctggctcctcctcctcgtcctcgagtacctcgccttctccgactcctccaagtgggtcttcgagcaccccgagaccctctacgcctgggagggcgcctgcgtctggatcccctgcacctaccgcgccctcgacggcgacctcgagtccttcatcctcttccacaaccccgagtacaacaagaacacctccaagttcgacggcacccgcctctacgagtccaccaaggacggcaaggtcccctccgagcagaagcgcgtccagttcctcggcgacaagaacaagaactgcaccctctccatccaccccgtccacctcaacgactccggccagctcggcctccgcatggagtccaagaccgagaagtggatggagcgcatccacctcaacgtctccgagcgccccttccccccccacatccagctcccccccgagatccaggagtcccaggaggtcaccctcacctgcctcctcaacttctcctgctacggctaccccatccagctccagtggctcctcgagggcgtccccatgcgccaggccgccgtcacctccacctccctcaccatcaagtccgtcttcacccgctccgagctcaagttctccccccagtggtcccaccacggcaagatcgtcacctgccagctccaggacgccgacggcaagttcctctccaacgacaccgtccagctcaacgtcaagcacacccccaagctcgagatcaaggtcaccccctccgacgccatcgtccgcgagggcgactccgtcaccatgacctgcgaggtctcctcctccaaccccgagtacaccaccgtctcctggctcaaggacggcacctccctcaagaagcagaacaccttcaccctcaacctccgcgaggtcaccaaggaccagtccggcaagtactgctgccaggtctccaacgacgtcggccccggccgctccgaggaggtcttcctccaggtccagtacgcccccgagccctccaccgtccagatcctccactcccccgccgtcgagggctcccaggtcgagttcctctgcatgtccctcgccaaccccctccccaccaactacacctggtaccacaacggcaaggagatgcagggccgcaccgaggagaaggtccacatccccaagatcctcccctggcacgccggcacctactcctgcgtcgccgagaacatcctcggcaccggccagcgcggccccggcgccgagctcgacgtccagtacccccccaagaaggtcaccaccgtcatccagaaccccatgcccatccgcgagggcgacaccgtcaccctctcctgcaactacaactcctccaacccctccgtcacccgctacgagtggaagccccacggcgcctgggaggagccctccctcggcgtcctcaagatccagaacgtcggctgggacaacaccaccatcgcctgcgccgcctgcaactcctggtgctcctgggcctcccccgtcgccctcaacgtccagtacgccccccgcgacgtccgcgtccgcaagatcaagcccctctccgagatccactccggcaactccgtctccctccagtgcgacttctcctcctcccaccccaaggaggtccagttcttctgggagaagaacggccgcctcctcggcaaggagtcccagctcaacttcgactccatctcccccgaggacgccggctcctactcctgctgggtcaacaactccatcggccagaccgcctccaaggcctggaccctcgaggtcctctacgccccccgccgcctccgcgtctccatgtcccccggcgaccaggtcatggagggcaagtccgccaccctcacctgcgagtccgacgccaacccccccgtctcccactacacctggttcgactggaacaaccagtccctcccctaccactcccagaagctccgcctcgagcccgtcaaggtccagcactccggcgcctactggtgccagggcaccaactccgtcggcaagggccgctcccccctctccaccctcaccgtctactactcccccgagaccatcggccgccgcgtcgccgtcggcctcggctcctgcctcgccatcctcatcctcgccatctgcggcctcaagctccagcgccgctggaagcgcacccagtcccagcagggcctccaggagaactcctccggccagtccttcttcgtccgcaacaagaaggtccgccgcgcccccctctccgagggcccccactccctcggctgctacaaccccatgatggaggacggcatctcctacaccaccctccgcttccccgagatgaacatcccccgcaccggcgacgccgagtcctccgagatgcagcgccccccccccgactgcgacgacaccgtcacctactccgccctccacaagcgccaggtcggcgactacgagaacgtcatccccgacttccccgaggacgagggcatccactactccgagctcatccagttcggcgtcggcgagcgcccccaggcccaggagaacgtcgactacgtcatcctcaagcactga

SEQ ID NO: 1578 - RNA, 2544 nt, synthetic construct; identical to SEQ ID NO: 1577
  misc_feature 1..2544: note = ABK41939 variant
  source 1..2544: mol_type = other RNA

SEQ ID NO: 1579 - RNA, 1605 nt, synthetic construct
  misc_feature 1..1605: note = CAE47548 variant
  source 1..1605: mol_type = other RNA
atgctccgccgccgcggctcccccggcatgggcgtccacgtcggcgccgccctcggcgccctctggttctgcctcaccggcgccctcgaggtccaggtccccgaggaccccgtcgtcgccctcgtcggcaccgacgccaccctctgctgctccttctcccccgagcccggcttctccctcgcccagctcaacctcatctggcagctcaccgacaccaagcagctcgtccactccttcgccgagggccaggaccagggctccgcctacgccaaccgcaccgccctcttccccgacctcctcgcccagggcaacgcctccctccgcctccagcgcgtccgcgtcgccgacgagggctccttcacctgcttcgtctccatccgcgacttcggctccgccgccgtctccctccaggtcgccgccccctactccaagccctccatgaccctcgagcccaacaaggacctccgccccggcgacaccgtcaccatcacctgctcctcctaccagggctaccccgaggccgaggtcttctggcaggacggccagggcgtccccctcaccggcaacgtcaccacctcccagatggccaacgagcagggcctcttcgacgtccactccatcctccgcgtcgtcctcggcgccaacggcacctactcctgcctcgtccgcaaccccgtcctccagcaggacgcccactcctccgtcaccatcaccccccagcgctcccccaccggcgccgtcgaggtccaggtccccgaggaccccgtcgtcgccctcgtcggcaccgacgccaccctccgctgctccttctcccccgagcccggcttctccctcgcccagctcaacctcatctggcagctcaccgacaccaagcagctcgtccactccttcaccgagggccgcgaccagggctccgcctacgccaaccgcaccgccctcttccccgacctcctcgcccagggcaacgcctccctccgcctccagcgcgtccgcgtcgccgacgagggctccttcacctgcttcgtctccatccgcgacttcggctccgccgccgtctccctccaggtcgccgccccctactccaagccctccatgaccctcgagcccaacaaggacctccgccccggcgacaccgtcaccatcacctgctcctcctaccgcggctaccccgaggccgaggtcttctggcaggacggccagggcgtccccctcaccggcaacgtcaccacctcccagatggccaacgagcagggcctcttcgacgtccactccgtcctccgcgtcgtcctcggcgccaacggcacctactcctgcctcgtccgcaaccccgtcctccagcaggacgcccacggctccgtcaccatcaccggccagcccatgaccttcccccccgaggccctctgggtcaccgtcggcctctccgtctgcctcatcgccctcctcgtcgccctcgccttcgtctgctggcgcaagatcaagcagtcctgcgaggaggagaacgccggcgccgaggaccaggacggcgagggcgagggctccaagaccgccctccagcccctcaagcactccgactccaaggaggacgacggccaggagatcgcctga

SEQ ID NO: 1580 - RNA, 639 nt, synthetic construct
  misc_feature 1..639: note = BAG57312 variant
  source 1..639: mol_type = other RNA
atgcccctcctcctcctcctccccctcctctgggccgacctcacccaccgccccaagatcctcatccccggcaccctcgagcccggccactccaagaacctcacctgctccgtctcctgggcctgcgagcagggcaccccccccatcttctcctggctctccgccgcccccacctccctcggcccccgcaccacccactcctccgtcctcatcatcaccccccgcccccaggaccacggcaccaacctcacctgccaggtcaagttcgccggcgccggcgtcaccaccgagcgcaccatccagctcaacgtcacctacgtcccccagaaccccaccaccggcatcttccccggcgacggctccggcaagcaggagacccgcgccggcgtcgtccacggcgccatcggcggcgccggcgtcaccgccctcctcgccctctgcctctgcctcatcttcttcatcgtcaagacccaccgccgcaaggccgcccgcaccgccgtcggccgcaacgacacccaccccaccaccggctccgcctcccccgtctccgacggcgcctcctggcaccccgtctgccccgccgacacctcctcccagtgcggccccccctcctgccccatccagcacttccagaactga

SEQ ID NO: 1581 - RNA, 1095 nt, synthetic construct
  misc_feature 1..1095: note = AAK83654 variant
  source 1..1095: mol_type = other RNA
atgcccctcctcctcctcctccccctcctctgggccggcgccctcgccatggaccccaacttctggctccaggtccaggagtccgtcaccgtccaggagggcctctgcgtcctcgtcccctgcaccttcttccaccccatcccctactacgacaagaactcccccgtccacggctactggttccgcgagggcgccatcatctcccgcgactcccccgtcgccaccaacaagctcgaccaggaggtccaggaggagacccagggccgcttccgcctcctcggcgacccctcccgcaacaactgctccctctccatcgtcgacgcccgccgccgcgacaacggctcctacttcttccgcatggagcgcggctccaccaagtactcctacaagtccccccagctctccgtccacgtcaccgacctcacccaccgccccaagatcctcatccccggcaccctcgagcccggccactccaagaacctcacctgctccgtctcctgggcctgcgagcagggcaccccccccatcttctcctggctctccgccgcccccacctccctcggcccccgcaccacccactcctccgtcctcatcatcaccccccgcccccaggaccacggcaccaacctcacctgccaggtcaagttcgccggcgccggcgtcaccaccgagcgcaccatccagctcaacgtcacctacgtcccccagaaccccaccaccggcatcttccccggcgacggctccggcaagcaggagacccgcgccggcgtcgtccacggcgccatcggcggcgccggcgtcaccgccctcctcgccctctgcctctgcctcatcttcttcatcgtcaagacccaccgccgcaaggccgcccgcaccgccgtcggccgcaacgacacccaccccaccaccggctccgcctcccccaagcaccagaagaagtccaagctccacggccccaccgagacctcctcctgctccggcgccgcccccaccgtcgagatggacgaggagctccactacgcctccctcaacttccacggcatgaacccctccaaggacacctccaccgagtactccgaggtccgcacccagtga

SEQ ID NO: 1582 - RNA, 1095 nt, synthetic construct; identical to SEQ ID NO: 1581
  misc_feature 1..1095: note = CAD36509 variant
  source 1..1095: mol_type = other RNA

SEQ ID NO: 1583 - RNA, 624 nt, synthetic construct
  misc_feature 1..624: note = AAA52295 variant
  source 1..624: mol_type = other RNA
atgcagtccggcacccactggcgcgtcctcggcctctgcctcctctccgtcggcgtctggggccaggacggcaacgaggagatgggcggcatcacccagaccccctacaaggtctccatctccggcaccaccgtcatcctcacctgcccccagtaccccggctccgagatcctctggcagcacaacgacaagaacatcggcggcgacgaggacgacaagaacatcggctccgacgaggaccacctctccctcaaggagttctccgagctcgagcagtccggctactacgtctgctacccccgcggctccaagcccgaggacgccaacttctacctctacctccgcgcccgcgtctgcgagaactgcatggagatggacgtcatgtccgtcgccaccatcgtcatcgtcgacatctgcatcaccggcggcctcctcctcctcgtctactactggtccaagaaccgcaaggccaaggccaagcccgtcacccgcggcgccggcgccggcggccgccagcgcggccagaacaaggagcgccccccccccgtccccaaccccgactacgagcccatccgcaagggccagcgcgacctctactccggcctcaaccagcgccgcatctga

SEQ ID NO: 1584 - RNA, 495 nt, synthetic construct
  misc_feature 1..495: note = AAH25703 variant
  source 1..495: mol_type = other RNA
atgaagtggaaggccctcttcaccgccgccatcctccaggcccagctccccatcaccgaggcccagtccttcggcctcctcgaccccaagctctgctacctcctcgacggcatcctcttcatctacggcgtcatcctcaccgccctcttcctccgcgtcaagttctcccgctccgccgacgcccccgcctaccagcagggccagaaccagctctacaacgagctcaacctcggccgccgcgaggagtacgacgtcctcgacaagcgccgcggccgcgaccccgagatgggcggcaagccccagcgccgcaagaacccccaggagggcctctacaacgagctccagaaggacaagatggccgaggcctactccgagatcggcatgaagggcgagcgccgccgcggcaagggccacgacggcctctaccagggcctctccaccgccaccaaggacacctacgacgccctccacatgcaggccctccccccccgctga

SEQ ID NO: 1585 - RNA, 2229 nt, synthetic construct
  misc_feature 1..2229: note = CCDS7897.1 variant
  source 1..2229: mol_type = other RNA
atggacaagttctggtggcacgccgcctggggcctctgcctcgtccccctctccctcgcccagatcgacctcaacatcacctgccgcttcgccggcgtcttccacgtcgagaagaacggccgctactccatctcccgcaccgaggccgccgacctctgcaaggccttcaactccaccctccccaccatggcccagatggagaaggccctctccatcggcttcgagacctgccgctacggcttcatcgagggccacgtcgtcatcccccgcatccaccccaactccatctgcgccgccaacaacaccggcgtctacatcctcacctccaacacctcccagtacgacacctactgcttcaacgcctccgccccccccgaggaggactgcacctccgtcaccgacctccccaacgccttcgacggccccatcaccatcaccatcgtcaaccgcgacggcacccgctacgtccagaagggcgagtaccgcaccaaccccgaggacatctacccctccaaccccaccgacgacgacgtctcctccggctcctcctccgagcgctcctccacctccggcggctacatcttctacaccttctccaccgtccaccccatccccgacgaggactccccctggatcaccgactccaccgaccgcatccccgccaccaccctcatgtccacctccgccaccgccaccgagaccgccaccaagcgccaggagacctgggactggttctcctggctcttcctcccctccgagtccaagaaccacctccacaccaccacccagatggccggcacctcctccaacaccatctccgccggctgggagcccaacgaggagaacgaggacgagcgcgaccgccacctctccttctccggctccggcatcgacgacgacgaggacttcatctcctccaccatctccaccaccccccgcgccttcgaccacaccaagcagaaccaggactggacccagtggaacccctcccactccaaccccgaggtcctcctccagaccaccacccgcatgaccgacgtcgaccgcaacggcaccaccgcctacgagggcaactggaaccccgaggcccacccccccctcatccaccacgagcaccacgaggaggaggagaccccccactccacctccaccatccaggccaccccctcctccaccaccgaggagaccgccacccagaaggagcagtggttcggcaaccgctggcacgagggctaccgccagacccccaaggaggactcccactccaccaccggcaccgccgccgcctccgcccacacctcccaccccatgcagggccgcaccaccccctcccccgaggactcctcctggaccgacttcttcaaccccatctcccaccccatgggccgcggccaccaggccggccgccgcatggacatggactcctcccactccatcaccctccagcccaccgccaaccccaacaccggcctcgtcgaggacctcgaccgcaccggccccctctccatgaccacccagcagtccaactcccagtccttctccacctcccacgagggcctcgaggaggacaaggaccaccccaccacctccaccctcacctcctccaaccgcaacgacgtcaccggcggccgccgcgaccccaaccactccgagggctccaccaccctcctcgagggctacacctcccactacccccacaccaaggagtcccgcaccttcatccccgtcacctccgccaagaccggctccttcggcgtcaccgccgtcaccgtcggcgactccaactccaacgtcaaccgctccctctccggcgaccaggacaccttccacccctccggcggctcccacaccacccacggctccgagtccgacggccactcccacggctcccaggagggcggcgccaacaccacctccggccccatccgcaccccccagatccccgagtggctcatcatcctcgcctccctcctcgccctcgccctcatcctcgccgtctgcatcgccgtcaactcccgccgccgctgcggccagaagaagaagctcgtcatcaactccggcaacggcgccgtcgaggaccgcaagccctccggcctcaacggcgaggcctccaagtcccaggagatggtccacctcgtcaacaaggagtcctccgagacccccgaccagttcatgaccgccgacgagacccgcaacctccagaacgtcgacatgaagatcggcgtctga

SEQ ID NO: 1586 - RNA, 2100 nt, synthetic construct
  misc_feature 1..2100: note = XM_006718388.1 variant
  source 1..2100: mol_type = other RNA
atggacaagttctggtggcacgccgcctggggcctctgcctcgtccccctctccctcgcccagatcgacctcaacatcacctgccgcttcgccggcgtcttccacgtcgagaagaacggccgctactccatctcccgcaccgaggccgccgacctctgcaaggccttcaactccaccctccccaccatggcccagatggagaaggccctctccatcggcttcgagacctgccgctacggcttcatcgagggccacgtcgtcatcccccgcatccaccccaactccatctgcgccgccaacaacaccggcgtctacatcctcacctccaacacctcccagtacgacacctactgcttcaacgcctccgccccccccgaggaggactgcacctccgtcaccgacctccccaacgccttcgacggccccatcaccatcaccatcgtcaaccgcgacggcacccgctacgtccagaagggcgagtaccgcaccaaccccgaggacatctacccctccaaccccaccgacgacgacgtctcctccggctcctcctccgagcgctcctccacctccggcggctacatcttctacaccttctccaccgtccaccccatccccgacgaggactccccctggatcaccgactccaccgaccgcatccccgccaccaccctcatgtccacctccgccaccgccaccgagaccgccaccaagcgccaggagacctgggactggttctcctggctcttcctcccctccgagtccaagaaccacctccacaccaccacccagatggccggcacctcctccaacaccatctccgccggctgggagcccaacgaggagaacgaggacgagcgcgaccgccacctctccttctccggctccggcatcgacgacgacgaggacttcatctcctccaccatctccaccaccccccgcgccttcgaccacaccaagcagaaccaggactggacccagtggaacccctcccactccaaccccgaggtcctcctccagaccaccacccgcatgaccgacgtcgaccgcaacggcaccaccgcctacgagggcaactggaaccccgaggcccacccccccctcatccaccacgagcaccacgaggaggaggagaccccccactccacctccaccaccgcctccgcccacacctcccaccccatgcagggccgcaccaccccctcccccgaggactcctcctggaccgacttcttcaaccccatctcccaccccatgggccgcggccaccaggccggccgccgcatggacatggactcctcccactccatcaccctccagcccaccgccaaccccaacaccggcctcgtcgaggacctcgaccgcaccggccccctctccatgaccacccagcagtccaactcccagtccttctccacctcccacgagggcctcgaggaggacaaggaccaccccaccacctccaccctcacctcctccaaccgcaacgacgtcaccggcggccgccgcgaccccaaccactccgagggctccaccaccctcctcgagggctacacctcccactacccccacaccaaggagtcccgcaccttcatccccgtcacctccgccaagaccggctccttcggcgtcaccgccgtcaccgtcggcgactccaactccaacgtcaaccgctccctctccggcgaccaggacaccttccacccctccggcggctcccacaccacccacggctccgagtccgacggccactcccacggctcccaggagggcggcgccaacaccacctccggccccatccgcaccccccagatccccgagtggctcatcatcctcgcctccctcctcgccctcgccctcatcctcgccgtctgcatcgccgtcaactcccgccgccgctgcggccagaagaagaagctcgtcatcaactccggcaacggcgccgtcgaggaccgcaagccctccggcctcaacggcgaggcctccaagtcccaggagatggtccacctcgtcaacaaggagtcctccgagacccccgaccagttcatgaccgccgacgagacccgcaacctccagaacgtcgacatgaagatcggcgtctga

SEQ ID NO: 1587 - RNA, 1377 nt, synthetic construct
  misc_feature 1..1377: note = AAA35572 variant
  source 1..1377: mol_type = other RNA
atgaaccgcggcgtccccttccgccacctcctcctcgtcctccagctcgccctcctccccgccgccacccagggcaagaaggtcgtcctcggcaagaagggcgacaccgtcgagctcacctgcaccgcctcccagaagaagtccatccagttccactggaagaactccaaccagatcaagatcctcggcaaccagggctccttcctcaccaagggcccctccaagctcaacgaccgcgccgactcccgccgctccctctgggaccagggcaacttccccctcatcatcaagaacctcaagatcgaggactccgacacctacatctgcgaggtcgaggaccagaaggaggaggtccagctcctcgtcttcggcctcaccgccaactccgacacccacctcctccagggccagtccctcaccctcaccctcgagtccccccccggctcctccccctccgtccagtgccgctccccccgcggcaagaacatccagggcggcaagaccctctccgtctcccagctcgagctccaggactccggcacctggacctgcaccgtcctccagaaccagaagaaggtcgagttcaagatcgacatcgtcgtcctcgccttccagaaggcctcctccatcgtctacaagaaggagggcgagcaggtcgagttctccttccccctcgccttcaccgtcgagaagctcaccggctccggcgagctctggtggcaggccgagcgcgcctcctcctccaagtcctggatcaccttcgacctcaagaacaaggaggtctccgtcaagcgcgtcacccaggaccccaagctccagatgggcaagaagctccccctccacctcaccctcccccaggccctcccccagtacgccggctccggcaacctcaccctcgccctcgaggccaagaccggcaagctccaccaggaggtcaacctcgtcgtcatgcgcgccacccagctccagaagaacctcacctgcgaggtctggggccccacctcccccaagctcatgctctccctcaagctcgagaacaaggaggccaaggtctccaagcgcgagaaggccgtctgggtcctcaaccccgaggccggcatgtggcagtgcctcctctccgactccggccaggtcctcctcgagtccaacatcaaggtcctccccacctggtccacccccgtccagcccatggccctcatcgtcctcggcggcgtcgccggcctcctcctcttcatcggcctcggcatcttcttctgcgtccgctgccgccaccgccgccgccaggccgagcgcatgtcccagatcaagcgcctcctctccgagaagaagacctgccagtgcccccaccgcttccagaagacctgctcccccatctga

SEQ ID NO: 1588 - RNA, 186 nt, synthetic construct
  misc_feature 1..186: note = CAA44323 variant
  source 1..186: mol_type = other RNA
atgaagcgcttcctcttcctcctcctcaccatctccctcctcgtcatggtccagatccagaccggcctctccggccagaacgacacctcccagacctcctccccctccgcctcctccaacatctccggcggcatcttcctcttcttcgtcgccaacgccatcatccacctcttctgcttctcctga

SEQ ID NO: 1589 - RNA, 186 nt, synthetic construct
  misc_feature 1..186: note = AAP35780 variant
  source 1..186: mol_type = other RNA
atgaagcgcttcctcttcctcctcctcaccatctccctcctcgtcatggtccagatccagaccggcctctccggccagaacgacacctcccagacctcctccccctccgcctcctcctccatgtccggcggcatcttcctcttcttcgtcgccaacgccatcatccacctcttctgcttctcctga

SEQ ID NO: 1590 - RNA, 186 nt, synthetic construct; identical to SEQ ID NO: 1588
  misc_feature 1..186: note = ACS44650 variant
  source 1..186: mol_type = other RNA

SEQ ID NO: 1591 - RNA, 954 nt, synthetic construct
  misc_feature 1..954: note = EAW93489 variant
  source 1..954: mol_type = other RNA
atgaccgtcgcccgcccctccgtccccgccgccctccccctcctcggcgagctcccccgcctcctcctcctcgtcctcctctgcctccccgccgtctggggcgactgcggcctcccccccgacgtccccaacgcccagcccgccctcgagggccgcacctccttccccgaggacaccgtcatcacctacaagtgcgaggagtccttcgtcaagatccccggcgagaaggactccgtcatctgcctcaagggctcccagtggtccgacatcgaggagttctgcaaccagaagtcctgccccaaccccggcgagatccgcaacggccagatcgacgtccccggcggcatcctcttcggcgccaccatctccttctcctgcaacaccggctacaagctcttcggctccacctcctccttctgcctcatctccggctcctccgtccagtggtccgaccccctccccgagtgccgcgagatctactgccccgcccccccccagatcgacaacggcatcatccagggcgagcgcgaccactacggctaccgccagtccgtcacctacgcctgcaacaagggcttcaccatgatcggcgagcactccatctactgcaccgtcaacaacgacgagggcgagtggtccggccccccccccgagtgccgcggcaagtccctcacctccaaggtcccccccaccgtccagaagcccaccaccgtcaacgtccccaccaccgaggtctcccccacctcccagaagaccaccaccaagaccaccacccccaacgcccaggccacccgctccacccccgtctcccgcaccaccaagcacttccacgagaccacccccaacaagggctccggcaccacctccggcaccacccgcctcctctccggccacacctgcttcaccctcaccggcctcctcggcaccctcgtcaccatgggcctcctcacctga

SEQ ID NO: 1592 - RNA, 882 nt, synthetic construct
  misc_feature 1..882: note = EAW93497 variant
  source 1..882: mol_type = other RNA
atgatcggcgagcactccatctactgcaccgtcaacaacgacgagggcgagtggtccggccccccccccgagtgccgcggcaagtccctcacctccaaggtcccccccaccgtccagaagcccaccaccgtcaacgtccccaccaccgaggtctcccccacctcccagaagaccaccaccaagaccaccacccccaacgcccagggcaccgagaccccctccgtcctccagaagcacaccaccgagaacgtctccgccacccgcaccccccccaccccccagaagcccaccaccgtcaacgtccccgccaccatcgtcacccccaccccccagaagcccaccaccatcaacgtccccgccaccggcgtctcctccaccccccagcgccacaccatcgtcaacgtctccgccaccggcaccctccccaccctccagaagcccacccgcgccaacgactccgccaccaagtcccccgccgccgcccagacctccttcatctccaagaccctctccaccaagaccccctccgccgcccagaaccccatgatgaccaacgcctccgccacccaggccaccctcaccgcccagaagttcaccaccgccaaggtcgccttcacccagtccccctccgccgcccgcaagtccaccaacgtccactcccccgtcaccaacggcctcaagtccacccagcgcttcccctccgcccacatcaccgccacccgctccacccccgtctcccgcaccaccaagcacttccacgagaccacccccaacaagggctccggcaccacctccggcaccacccgcctcctctccggccacacctgcttcaccctcaccggcctcctcggcaccctcgtcaccatgggcctcctcacctga

SEQ ID NO: 1593 - RNA, 804 nt, synthetic construct
  misc_feature 1..804: note = EAW93493 variant
  source 1..804: mol_type = other RNA
atgatcggcgagcactccatctactgcaccgtcaacaacgacgagggcgagtggtccggccccccccccgagtgccgcggcaagtccctcacctccaaggtcccccccaccgtccagaagcccaccaccgtcaacgtccccaccaccgaggtctcccccacctcccagaagaccaccaccaagaccaccacccccaacgcccagggcaccgagaccccctccgtcctccagaagcacaccaccgagaacgtctccgccacccgcaccccccccaccccccagaagcccaccaccgtcaacgtccccgccaccatcgtcacccccaccccccagaagcccaccaccatcaacgtccccgccaccggcgtctcctccaccccccagcgccacaccatcgtcaacgtctccgccaccggcaccctccccaccctccagaagcccacccgcgccaacgactccgccaccaagtcccccgccgccgcccagacctccttcatctccaagaccctctccaccaagaccccctccgccgcccagaaccccatgatgaccaacgcctccgccacccaggccaccctcaccgcccagaagttcaccaccgccaaggtcgccttcacccagtccccctccgccgcccccacccgctccacccccgtctcccgcaccaccaagcacttccacgagaccacccccaacaagggctccggcaccacctccggcaccacccgcctcctctccggccacacctgcttcaccctcaccggcctcctcggcaccctcgtcaccatgggcctcctcacctga

SEQ ID NO: 1594 - RNA, 1146 nt, synthetic construct
  misc_feature 1..1146: note = AAA52168 variant
  source 1..1146: mol_type = other RNA
atgaccgtcgcccgcccctccgtccccgccgccctccccctcctcggcgagctcccccgcctcctcctcctcgtcctcctctgcctccccgccgtctggggcgactgcggcctcccccccgacgtccccaacgcccagcccgccctcgagggccgcacctccttccccgaggacaccgtcatcacctacaagtgcgaggagtccttcgtcaagatccccggcgagaaggactccgtcatctgcctcaagggctcccagtggtccgacatcgaggagttctgcaaccgctcctgcgaggtccccacccgcctcaactccgcctccctcaagcagccctacatcacccagaactacttccccgtcggcaccgtcgtcgagtacgagtgccgccccggctaccgccgcgagccctccctctcccccaagctcacctgcctccagaacctcaagtggtccaccgccgtcgagttctgcaagaagaagtcctgccccaaccccggcgagatccgcaacggccagatcgacgtccccggcggcatcctcttcggcgccaccatctccttctcctgcaacaccggctacaagctcttcggctccacctcctccttctgcctcatctccggctcctccgtccagtggtccgaccccctccccgagtgccgcgagatctactgccccgcccccccccagatcgacaacggcatcatccagggcgagcgcgaccactacggctaccgccagtccgtcacctacgcctgcaacaagggcttcaccatgatcggcgagcactccatctactgcaccgtcaacaacgacgagggcgagtggtccggccccccccccgagtgccgcggcaagtccctcacctccaaggtcccccccaccgtccagaagcccaccaccgtcaacgtccccaccaccgaggtctcccccacctcccagaagaccaccaccaagaccaccacccccaacgcccaggccacccgctccacccccgtctcccgcaccaccaagcacttccacgagaccacccccaacaagggctccggcaccacctccggcaccacccgcctcctctccggccacacctgcttcaccctcaccggcctcctcggcaccctcgtcaccatgggcctcctcacctga

SEQ ID NO: 1595 - RNA, 2577 nt, synthetic construct
  misc_feature 1..2577: note = CCDS73385.1 variant
  source 1..2577: mol_type = other RNA
atgctccagaccaaggacctcatctggaccctcttcttcctcggcaccgccgtctccctccaggtcgacatcgtcccctcccagggcgagatctccgtcggcgagtccaagttcttcctctgccaggtcgccggcgacgccaaggacaaggacatctcctggttctcccccaacggcgagaagctcacccccaaccagcagcgcatctccgtcgtctggaacgacgactcctcctccaccctcaccatctacaacgccaacatcgacgacgccggcatctacaagtgcgtcgtcaccggcgaggacggctccgagtccgaggccaccgtcaacgtcaagatcttccagaagctcatgttcaagaacgcccccaccccccaggagttccgcgagggcgaggacgccgtcatcgtctgcgacgtcgtctcctccctcccccccaccatcatctggaagcacaagggccgcgacgtcatcctcaagaaggacgtccgcttcatcgtcctctccaacaactacctccagatccgcggcatcaagaagaccgacgagggcacctaccgctgcgagggccgcatcctcgcccgcggcgagatcaacttcaaggacatccaggtcatcgtcaacgtcccccccaccatccaggcccgccagaacatcgtcaacgccaccgccaacctcggccagtccgtcaccctcgtctgcgacgccgagggcttccccgagcccaccatgtcctggaccaaggacggcgagcagatcgagcaggaggaggacgacgagaagtacatcttctccgacgactcctcccagctcaccatcaagaaggtcgacaagaacgacgaggccgagtacatctgcatcgccgagaacaaggccggcgagcaggacgccaccatccacctcaaggtcttcgccaagcccaagatcacctacgtcgagaaccagaccgccatggagctcgaggagcaggtcaccctcacctgcgaggcctccggcgaccccatcccctccatcacctggcgcacctccacccgcaacatctcctccgaggagaaggcctcctggacccgccccgagaagcaggagaccctcgacggccacatggtcgtccgctcccacgcccgcgtctcctccctcaccctcaagtccatccagtacaccgacgccggcgagtacatctgcaccgcctccaacaccatcggccaggactcccagtccatgtacctcgaggtccagtacgcccccaagctccagggccccgtcgccgtctacacctgggagggcaaccaggtcaacatcacctgcgaggtcttcgcctacccctccgccaccatctcctggttccgcgacggccagctcctcccctcctccaactactccaacatcaagatctacaacaccccctccgcctcctacctcgaggtcacccccgactccgagaacgacttcggcaactacaactgcaccgccgtcaaccgcatcggccaggagtccctcgagttcatcctcgtccaggccgacaccccctcctccccctccatcgaccaggtcgagccctactcctccaccgcccaggtccagttcgacgagcccgaggccaccggcggcgtccccatcctcaagtacaaggccgagtggcgcgccgtcggcgaggaggtctggcactccaagtggtacgacgccaaggaggcctccatggagggcatcgtcaccatcgtcggcctcaagcccgagaccacctacgccgtccgcctcgccgccctcaacggcaagggcctcggcgagatctccgccgcctccgagttcaagacccagcccgtccagggcgagccctccgcccccaagctcgagggccagatgggcgaggacggcaactccatcaaggtcaacctcatcaagcaggacgacggcggctcccccatccgccactacctcgtccgctaccgcgccctctcctccgagtggaagcccgagatccgcctcccctccggctccgaccacgtcatgctcaagtccctcgactggaacgccgagtacgaggtctacgtcgtcgccgagaaccagcagggcaagtccaaggccgcccacttcgtcttccgcacctccgcccagcccaccgccatccccgccaacggctcccccacctccggcctctccaccggcgccatcgtcggcatcctcatcgtcatcttcgtcctcctcctcgtcgtcgtcgacatcacctgctacttcctcaacaagtgcggcctcttcatgtgcatcgccgtcaacctctgcggcaaggccggccccggcgccaagggcaaggacatggaggagggcaaggccgccttctccaaggacgagtccaaggagcccatcgtcgaggtccgcaccgaggaggagcgcacccccaaccacgacggcggcaagcacaccgagcccaacgagaccacccccctcaccgagcccgagaagggccccgtcgaggccaagcccgagtgccaggagaccgagaccaagcccgcccccgccgaggtcaagaccgtccccaacgacgccacccagaccaaggagaacgagtccaaggcctga

SEQ ID NO: 1596 - RNA, 867 nt, synthetic construct
  misc_feature 1..867: note = ABK41933 variant
  source 1..867: mol_type = other RNA
atgggccacacccgccgccagggcacctccccctccaagtgcccctacctcaacttcttccagctcctcgtcctcgccggcctctcccacttctgctccggcgtcatccacgtcaccaaggaggtcaaggaggtcgccaccctctcctgcggccacaacgtctccgtcgaggagctcgcccagacccgcatctactggcagaaggagaagaagatggtcctcaccatgatgtccggcgacatgaacatctggcccgagtacaagaaccgcaccatcttcgacatcaccaacaacctctccatcgtcatcctcgccctccgcccctccgacgagggcacctacgagtgcgtcgtcctcaagtacgagaaggacgccttcaagcgcgagcacctcgccgaggtcaccctctccgtcaaggccgacttccccaccccctccatctccgacttcgagatccccacctccaacatccgccgcatcatctgctccacctccggcggcttccccgagccccacctctcctggctcgagaacggcgaggagctcaacgccatcaacaccaccgtctcccaggaccccgagaccgagctctacgccgtctcctccaagctcgacttcaacatgaccaccaaccactccttcatgtgcctcatcaagtacggccacctccgcgtcaaccagaccttcaactggaacaccaccaagcaggagcacttccccgacaacctcctcccctcctgggccatcaccctcatctccgtcaacggcatcttcgtcatctgctgcctcacctactgcttcgccccccgctgccgcgagcgccgccgcaacgagcgcctccgccgcgagtccgtccgccccgtctga

SEQ ID NO: 1597 - RNA, 867 nt, synthetic construct; identical to SEQ ID NO: 1596
  misc_feature 1..867: note = AAA36045 variant
  source 1..867: mol_type = other RNA

SEQ ID NO: 1598 - RNA, 990 nt, synthetic construct
  misc_feature 1..990: note = CCDS3009.1 variant
  source 1..990: mol_type = other RNA
atggacccccagtgcaccatgggcctctccaacatcctcttcgtcatggccttcctcctctccggcgccgcccccctcaagatccaggcctacttcaacgagaccgccgacctcccctgccagttcgccaactcccagaaccagtccctctccgagctcgtcgtcttctggcaggaccaggagaacctcgtcctcaacgaggtctacctcggcaaggagaagttcgactccgtccactccaagtacatgggccgcacctccttcgactccgactcctggaccctccgcctccacaacctccagatcaaggacaagggcctctaccagtgcatcatccaccacaagaagcccaccggcatgatccgcatccaccagatgaactccgagctctccgtcctcgccaacttctcccagcccgagatcgtccccatctccaacatcaccgagaacgtctacatcaacctcacctgctcctccatccacggctaccccgagcccaagaagatgtccgtcctcctccgcaccaagaactccaccatcgagtacgacggcgtcatgcagaagtcccaggacaacgtcaccgagctctacgacgtctccatctccctctccgtctccttccccgacgtcacctccaacatgaccatcttctgcatcctcgagaccgacaagacccgcctcctctcctcccccttctccatcgagctcgaggacccccagcccccccccgaccacatcccctggatcaccgccgtcctccccaccgtcatcatctgcgtcatggtcttctgcctcatcctctggaagtggaagaagaagaagcgcccccgcaactcctacaagtgcggcaccaacaccatggagcgcgaggagtccgagcagaccaagaagcgcgagaagatccacatccccgagcgctccgacgaggcccagcgcgtcttcaagtcctccaagacctcctcctgcgacaagtccgacacctgcttctga

SEQ ID NO: 1599 - RNA, 708 nt, synthetic construct
  misc_feature 1..708: note = AAA59674 variant
  source 1..708: mol_type = other RNA
atggccctccccgtcaccgccctcctcctccccctcgccctcctcctccacgccgcccgcccctcccagttccgcgtctcccccctcgaccgcacctggaacctcggcgagaccgtcgagctcaagtgccaggtcctcctctccaaccccacctccggctgctcctggctcttccagccccgcggcgccgccgcctcccccaccttcctcctctacctctcccagaacaagcccaaggccgccgagggcctcgacacccagcgcttctccggcaagcgcctcggcgacaccttcgtcctcaccctctccgacttccgccgcgagaacgagggctactacttctgctccgccctctccaactccatcatgtacttctcccacttcgtccccgtcttcctccccgccaagcccaccaccacccccgccccccgcccccccacccccgcccccaccatcgcctcccagcccctctccctccgccccgaggcctgccgccccgccgccggcggcgccgtccacacccgcggcctcgacttcgcctgcgacatctacatctgggcccccctcgccggcacctgcggcgtcctcctcctctccctcgtcatcaccctctactgcaaccaccgcaaccgccgccgcgtctgcaagtgcccccgccccgtcgtcaagtccggcgacaagccctccctctccgcccgctacgtctga

SEQ ID NO: 1600 - RNA, 2472 nt, synthetic construct
  misc_feature 1..2472: note = EAW57688 variant
  source 1..2472: mol_type = other RNA
atgaccgtcctccaggagcccgtccaggccgccatctggcaggccctcaaccactacgcctaccgcgacgccgtcttcctcgccgagcgcctctacgccgaggtccactccgaggaggccctcttcctcctcgccacctgctactaccgctccggcaaggcctacaaggcctaccgcctcctcaagggccactcctgcaccaccccccagtgcaagtacctcctcgccaagtgctgcgtcgacctctccaagctcgccgagggcgagcagatcctctccggcggcgtcttcaacaagcagaagtcccacgacgacatcgtcaccgagttcggcgactccgcctgcttcaccctctccctcctcggccacgtctactgcaagaccgaccgcctcgccaagggctccgagtgctaccagaagtccctctccctcaaccccttcctctggtcccccttcgagtccctctgcgagatcggcgagaagcccgaccccgaccagaccttcaagttcacctccctccagaacttctccaactgcctccccaactcctgcaccacccaggtccccaaccactccctctcccaccgccagcccgagaccgtcctcaccgagaccccccaggacaccatcgagctcaaccgcctcaacctcgagtcctccaactccaagtactccctcaacaccgactcctccgtctcctacatcgactccgccgtcatctcccccgacaccgtccccctcggcaccggcacctccatcctctccaagcaggtccagaacaagcccaagaccggccgctccctcctcggcggccccgccgccctctcccccctcaccccctccttcggcatcctccccctcgagaccccctcccccggcgacggctcctacctccagaactacaccaacaccccccccgtcatcgacgtcccctccaccggcgccccctccaagaagtccgtcgcccgcatcggccagaccggcaccaagtccgtcttctcccagtccggcaactcccgcgaggtcacccccatcctcgcccagacccagtcctccggcccccagacctccaccaccccccaggtcctctcccccaccatcacctccccccccaacgccctcccccgccgctcctcccgcctcttcacctccgactcctccaccaccaaggagaactccaagaagctcaagatgaagttcccccccaagatccccaaccgcaagaccaagtccaagaccaacaagggcggcatcacccagcccaacatcaacgactccctcgagatcaccaagctcgactcctccatcatctccgagggcaagatctccaccatcaccccccagatccaggccttcaacctccagaaggccgccgccggcctcatgtccctcctccgcgagatgggcaagggctacctcgccctctgctcctacaactgcaaggaggccatcaacatcctctcccacctcccctcccaccactacaacaccggctgggtcctctgccagatcggccgcgcctacttcgagctctccgagtacatgcaggccgagcgcatcttctccgaggtccgccgcatcgagaactaccgcgtcgagggcatggagatctactccaccaccctctggcacctccagaaggacgtcgccctctccgtcctctccaaggacctcaccgacatggacaagaactcccccgaggcctggtgcgccgccggcaactgcttctccctccagcgcgagcacgacatcgccatcaagttcttccagcgcgccatccaggtcgaccccaactacgcctacgcctacaccctcctcggccacgagttcgtcctcaccgaggagctcgacaaggccctcgcctgcttccgcaacgccatccgcgtcaacccccgccactacaacgcctggtacggcctcggcatgatctactacaagcaggagaagttctccctcgccgagatgcacttccagaaggccctcgacatcaacccccagtcctccgtcctcctctgccacatcggcgtcgtccagcacgccctcaagaagtccgagaaggccctcgacaccctcaacaaggccatcgtcatcgaccccaagaaccccctctgcaagttccaccgcgcctccgtcctcttcgccaacgagaagtacaagtccgccctccaggagctcgaggagctcaagcagatcgtccccaaggagtccctcgtctacttcctcatcggcaaggtctacaagaagctcggccagacccacctcgccctcatgaacttctcctgggccatggacctcgaccccaagggcgccaacaaccagatcaaggaggccatcgacaagcgctacctccccgacgacgaggagcccatcacccaggaggagcagatcatgggcaccgacgagtcccaggagtcctccatgaccgacgccgacgacacccagctccacgccgccgagtccgacgagttctga

SEQ ID NO: 1601 - RNA, 2475 nt, synthetic construct
  misc_feature 1..2475: note = AAB34378 variant
  source 1..2475: mol_type = other RNA
atgaccgtcctccaggagcccgtccaggccgccatctggcaggccctcaaccactacgcctaccgcgacgccgtcttcctcgccgagcgcctctacgccgaggtccactccgaggaggccctcttcctcctcgccacctgctactaccgctccggcaaggcctacaaggcctaccgcctcctcaagggccactcctgcaccaccccccagtgcaagtacctcctcgccaagtgctgcgtcgacctctccaagctcgccgagggcgagcagatcctctccggcggcgtcttcaacaagcagaagtcccacgacgacatcgtcaccgagttcggcgactccgcctgcttcaccctctccctcctcggccacgtctactgcaagaccgaccgcctcgccaagggctccgagtgctaccagaagtccctctccctcaaccccttcctctggtcccccttcgagtccctctgcgagatcggcgagaagcccgaccccgaccagaccttcaagttcacctccctccagaacttctccaactgcctccccaactcctgcaccacccaggtccccaaccactccctctcccaccgccagcccgagaccgtcctcaccgagaccccccaggacaccatcgagctcaaccgcctcaacctcgagtcctccaactccaagtactccctcaacaccgactcctccgtctcctacatcgactccgccgtcatctcccccgacaccgtccccctcggcaccggcacctccatcctctccaagcaggtccagaacaagcccaagaccggccgctccctcctcggcggccccgccgccctctcccccctcaccccctccttcggcatcctccccctcgagaccccctcccccggcgacggctcctacctccagaactacaccaacaccccccccgtcatcgacgtcccctccaccggcgccccctccaagaagtccgtcgcccgcatcggccagaccggcaccaagtccgtcttctcccagtccggcaactcccgcgaggtcacccccatcctcgcccagacccagtcctccggcccccagacctccaccaccccccaggtcctctcccccaccatcacctccccccccaacgccctcccccgccgctcctcccgcctcttcacctccgactcctccaccaccaaggagaactccaagaagctcaagatgaagttcccccccaagatccccaaccgcaagaccaagtccaagaccaacaagggcggcatcacccagcccaacatcaacgactccctcgagatcaccaagctcgactcctccatcatctccgagggcaagatctccaccatcaccccccagatccaggccttcaacctccagaaggccgccgccgagggcctcatgtccctcctccgcgagatgggcaagggctacctcgccctctgctcctacaactgcaaggaggccatcaacatcctctcccacctcccctcccaccactacaacaccggctgggtcctctgccagatcggccgcgcctacttcgagctctccgagtacatgcaggccgagcgcatcttctccgaggtccgccgcatcgagaactaccgcgtcgagggcatggagatctactccaccaccctctggcacctccagaaggacgtcgccctctccgtcctctccaaggacctcaccgacatggacaagaactcccccgaggcctggtgcgccgccggcaactgcttctccctccagcgcgagcacgacatcgccatcaagttcttccagcgcgccatccaggtcgaccccaactacgcctacgcctacaccctcctcggccacgagttcgtcctcaccgaggagctcgacaaggccctcgcctgcttccgcaacgccatccgcgtcaacccccgccactacaacgcctggtacggcctcggcatgatctactacaagcaggagaagttctccctcgccgagatgcacttccagaaggccctcgacatcaacccccagtcctccgtcctcctctgccacatcggcgtcgtccagcacgccctcaagaagtccgagaaggccctcgacaccctcaacaaggccatcgtcatcgaccccaagaaccccctctgcaagttccaccgcgcctccgtcctcttcgccaacgagaagtacaagtccgccctccaggagctcgaggagctcaagcagatcgtccccaaggagtccctcgtctacttcctcatcggcaaggtctacaagaagctcggccagacccacctcgccctcatgaacttctcctgggccatggacctcgaccccaagggcgccaacaaccagatcaaggaggccatcgacaagcgctacctccccgacgacgaggagcccatcacccaggaggagcagatcatgggcaccgacgagtcccaggagtcctccatgaccgacgccgacgacacccagctccacgccgccgagtccgacgagttctga

SEQ ID NO: 1602 - RNA, 1788 nt, synthetic construct
  misc_feature 1..1788: note = AAA51947 variant
  source 1..1788: mol_type = other RNA
atgcgcgtcctcctcgccgccctcggcctcctcttcctcggcgccctccgcgccttcccccaggaccgccccttcgaggacacctgccacggcaacccctcccactactacgacaaggccgtccgccgctgctgctaccgctgccccatgggcctcttccccacccagcagtgcccccagcgccccaccgactgccgcaagcagtgcgagcccgactactacctcgacgaggccgaccgctgcaccgcctgcgtcacctgctcccgcgacgacctcgtcgagaagaccccctgcgcctggaactcctcccgcgtctgcgagtgccgccccggcatgttctgctccacctccgccgtcaactcctgcgcccgctgcttcttccactccgtctgccccgccggcatgatcgtcaagttccccggcaccgcccagaagaacaccgtctgcgagcccgcctcccccggcgtctcccccgcctgcgcctcccccgagaactgcaaggagccctcctccggcaccatcccccaggccaagcccacccccgtctcccccgccacctcctccgcctccaccatgcccgtccgcggcggcacccgcctcgcccaggaggccgcctccaagctcacccgcgcccccgactccccctcctccgtcggccgcccctcctccgaccccggcctctcccccacccagccctgccccgagggctccggcgactgccgcaagcagtgcgagcccgactactacctcgacgaggccggccgctgcaccgcctgcgtctcctgctcccgcgacgacctcgtcgagaagaccccctgcgcctggaactcctcccgcacctgcgagtgccgccccggcatgatctgcgccacctccgccaccaactcctgcgcccgctgcgtcccctaccccatctgcgccgccgagaccgtcaccaagccccaggacatggccgagaaggacaccaccttcgaggccccccccctcggcacccagcccgactgcaaccccacccccgagaacggcgaggcccccgcctccacctcccccacccagtccctcctcgtcgactcccaggcctccaagaccctccccatccccacctccgcccccgtcgccctctcctccaccggcaagcccgtcctcgacgccggccccgtcctcttctgggtcatcctcgtcctcgtcgtcgtcgtcggctcctccgccttcctcctctgccaccgccgcgcctgccgcaagcgcatccgccagaagctccacctctgctaccccgtccagacctcccagcccaagctcgagctcgtcgactcccgcccccgccgctcctccacccagctccgctccggcgcctccgtcaccgagcccgtcgccgaggagcgcggcctcatgtcccagcccctcatggagacctgccactccgtcggcgccgcctacctcgagtccctccccctccaggacgcctcccccgccggcggcccctcctccccccgcgacctccccgagccccgcgtctccaccgagcacaccaacaacaagatcgagaagatctacatcatgaaggccgacaccgtcatcgtcggcaccgtcaaggccgagctccccgagggccgcggcctcgccggccccgccgagcccgagctcgaggaggagctcgaggccgaccacaccccccactaccccgagcaggagaccgagccccccctcggctcctgctccgacgtcatgctctccgtcgaggaggagggcaaggaggaccccctccccaccgccgcctccggcaagtga

SEQ ID NO: 1603 - RNA, 912 nt, synthetic construct
  misc_feature 1..912: note = EAW97060 variant
  source 1..912: mol_type = other RNA
atggccacctcccgctacgagcccgtcgccgagatcggcgtcggcgcctacggcaccgtctacaaggcccgcgacccccactccggccacttcgtcgccctcaagtccgtccgcgtccccaacggcggcggcggcggcggcggcctccccatctccaccgtccgcgaggtcgccctcctccgccgcctcgaggccttcgagcaccccaacgtcgtccgcctcatggacgtctgcgccacctcccgcaccgaccgcgagatcaaggtcaccctcgtcttcgagcacgtcgaccaggacctccgcacctacctcgacaaggcccccccccccggcctccccgccgagaccatcaaggacctcatgcgccagttcctccgcggcctcgacttcctccacgccaactgcatcgtccaccgcgacctcaagcccgagaacatcctcgtcacctccggcggcaccgtcaagctcgccgacttcggcctcgcccgcatctactcctaccagatggccctcacccccgtcgtcgtcaccctctggtaccgcgcccccgaggtcctcctccagtccacctacgccacccccgtcgacatgtggtccgtcggctgcatcttcgccgagatgttccgccgcaagcccctcttctgcggcaactccgaggccgaccagctcggcaagatcttcgacctcatcggcctcccccccgaggacgactggccccgcgacgtctccctcccccgcggcgccttccccccccgcggcccccgccccgtccagtccgtcgtccccgagatggaggagtccggcgcccagctcctcctcgagatgctcaccttcaacccccacaagcgcatctccgccttccgcgccctccagcactcctacctccacaaggacgagggcaaccccgagtga

SEQ ID NO: 1604 - RNA, 912 nt, synthetic construct; identical to SEQ ID NO: 1603
  misc_feature 1..912: note = AAA35673 variant
  source 1..912: mol_type = other RNA

SEQ ID NO: 1605 - RNA, 690 nt, synthetic construct
  misc_feature 1..690: note = AAB50213 variant
  source 1..690: mol_type = other RNA
atggacgtctgcgccacctcccgcaccgaccgcgagatcaaggtcaccctcgtcttcgagcacgtcgaccaggacctccgcacctacctcgacaaggcccccccccccggcctccccgccgagaccatcaaggacctcatgcgccagttcctccgcggcctcgacttcctccacgccaactgcatcgtccaccgcgacctcaagcccgagaacatcctcgtcacctccggcggcaccgtcaagctcgccgacttcggcctcgcccgcatctactcctaccagatggccctcacccccgtcgtcgtcaccctctggtaccgcgcccccgaggtcctcctccagtccacctacgccacccccgtcgacatgtggtccgtcggctgcatcttcgccgagatgttccgccgcaagcccctcttctgcggcaactccgaggccgaccagctcggcaagatcttcgacctcatcggcctcccccccgaggacgactggccccgcgacgtctccctcccccgcggcgccttccccccccgcggcccccgccccgtccagtccgtcgtccccgagatggaggagtccggcgcccagctcctcctcgagatgctcaccttcaacccccacaagcgcatctccgccttccgcgccctccagcactcctacctccacaaggacgagggcaaccccgagtga

SEQ ID NO: 1606 - RNA, 336 nt, synthetic construct
  misc_feature 1..336: note = AAH15669 variant
  source 1..336: mol_type = other RNA
atggccacctcccgctacgagcccgtcgccgagatcggcgtcggcgcctacggcaccgtctacaaggcccgcgacccccactccggccacttcgtcgccctcaagtccgtccgcgtccccaacggcggcggcggcggcggcggcctccccatctccaccgtccgcgaggtcgccctcctccgccgcctcgaggccttcgagcaccccaacgtcgtccgcctcatggacgtctgcgccacctcccgcaccgaccgcgagatcaagcgctgcttcgtcgagtccctctcctccgtcgagaccctcaagcccacctcctgggccaagtccctcacctga

SEQ ID NO: 1607 - RNA, 429 nt, synthetic construct
  misc_feature 1..429: note = ACY78326 variant
  source 1..429: mol_type = other RNA
atggagcccgccgccggctcctccatggagccctccgccgactggctcgccaccgccgccgcccgcggccgcgtcgaggaggtccgcgccctcctcgaggccggcgccctccccaacgcccccaactcctacggccgccgccccatccaggtcatgatgatgggctccgcccgcgtcgccgagctcctcctcctccacggcgccgagcccaactgcgccgaccccgccaccctcacccgccccgtccacgacgccgcccgcgagggcttcctcgacaccctcgtcgtcctccaccgcgccggcgccccctgcgccatgcccggcgccgtctgcccctggacctggctccgctcctgggccatcgccatgtcccacggcacctgcgcccgcctccgcggcgcccccgaggccgtcaccatgcccgcctga

SEQ ID NO: 1608 - RNA, 351 nt, synthetic construct
  misc_feature 1..351: note = EAW58598 variant
  source 1..351: mol_type = other RNA
atggagcccgccgccggctcctccatggagccctccgccgactggctcgccaccgccgccgcccgcggccgcgtcgaggaggtccgcgccctcctcgaggccggcgccctccccaacgcccccaactcctacggccgccgccccatccaggtcggccgcggctccgccgccggcgccggcgacggcggccgcctctggcgcaccaagttcgccggcgagctcgagtccggctccgcctccatcctccgcaagaagggccgcctccccggcgagttctccgagggcgtctgcaaccaccgccccccccccggcgacgccctcggcgcctgggaggccaaggaggaggagtga

SEQ ID NO: 1609 - RNA, 471 nt, synthetic construct
  misc_feature 1..471: note = AFN61598 variant
  source 1..471: mol_type = other RNA
atggagcccgccgccggctcctccatggagccctccgccgactggctcgccaccgccgccgcccgcggccgcgtcgaggaggtccgcgccctcctcgaggccggcgccctccccaacgcccccaactcctacggccgccgccccatccaggtcatgatgatgggctccgcccgcgtcgccgagctcctcctcctccacggcgccgagcccaactgcgccgaccccgccaccctcacccgccccgtccacgacgccgcccgcgagggcttcctcgacaccctcgtcgtcctccaccgcgccggcgcccgcctcgacgtccgcgacgcctggggccgcctccccgtcgacctcgccgaggagctcggccaccgcgacgtcgcccgctacctccgcgccgccgccggcggcacccgcggctccaaccacgcccgcatcgacgccgccgagggcccctccgacatccccgactga

SEQ ID NO: 1610 - RNA, 327 nt, synthetic construct
  misc_feature 1..327: note = CCQ43815 variant
  source 1..327: mol_type = other RNA
atggaggtcatgatgatgggctccgcccgcgtcgccgagctcctcctcctccacggcgccgagcccaactgcgccgaccccgccaccctcacccgccccgtccacgacgccgcccgcgagggcttcctcgacaccctcgtcgtcctccaccgcgccggcgcccgcctcgacgtccgcgacgcctggggccgcctccccgtcgacctcgccgaggagctcggccaccgcgacgtcgcccgctacctccgcgccgccgccggcggcacccgcggctccaaccacgcccgcatcgacgccgccgagggcccctccgacatccccgactga

SEQ ID NO: 1611 - RNA, 399 nt, synthetic construct
  misc_feature 1..399: note = AAA82236 variant
  source 1..399: mol_type = other RNA
atggtccgccgcttcctcgtcaccctccgcatccgccgcgcctgcggccccccccgcgtccgcgtcttcgtcgtccacatcccccgcctcaccggcgagtgggccgcccccggcgcccccgccgccgtcgccctcgtcctcatgctcctccgctcccagcgcctcggccagcagcccctcccccgccgccccggccacgacgacggccagcgcccctccggcggcgccgccgccgccccccgccgcggcgcccagctccgccgcccccgccactcccaccccacccgcgcccgccgctgccccggcggcctccccggccacgccggcggcgccgcccccggccgcggcgccgccggccgcgcccgctgcctcggcccctccgcccgcggccccggctga

SEQ ID NO: 1612 - RNA, 2109 nt, synthetic construct
  misc_feature 1..2109: note = CCDS12584.1 variant
  source 1..2109: mol_type = other RNA
atggagtccccctccgcccccccccaccgctggtgcatcccctggcagcgcctcctcctcaccgcctccctcctcaccttctggaacccccccaccaccgccaagctcaccatcgagtccacccccttcaacgtcgccgagggcaaggaggtcctcctcctcgtccacaacctcccccagcacctcttcggctactcctggtacaagggcgagcgcgtcgacggcaaccgccagatcatcggctacgtcatcggcacccagcaggccacccccggccccgcctactccggccgcgagatcatctaccccaacgcctccctcctcatccagaacatcatccagaacgacaccggcttctacaccctccacgtcatcaagtccgacctcgtcaacgaggaggccaccggccagttccgcgtctaccccgagctccccaagccctccatctcctccaacaactccaagcccgtcgaggacaaggacgccgtcgccttcacctgcgagcccgagacccaggacgccacctacctctggtgggtcaacaaccagtccctccccgtctccccccgcctccagctctccaacggcaaccgcaccctcaccctcttcaacgtcacccgcaacgacaccgcctcctacaagtgcgagacccagaaccccgtctccgcccgccgctccgactccgtcatcctcaacgtcctctacggccccgacgcccccaccatctcccccctcaacacctcctaccgctccggcgagaacctcaacctctcctgccacgccgcctccaacccccccgcccagtactcctggttcgtcaacggcaccttccagcagtccacccaggagctcttcatccccaacatcaccgtcaacaactccggctcctacacctgccaggcccacaactccgacaccggcctcaaccgcaccaccgtcaccaccatcaccgtctacgccgagccccccaagcccttcatcacctccaacaactccaaccccgtcgaggacgaggacgccgtcgccctcacctgcgagcccgagatccagaacaccacctacctctggtgggtcaacaaccagtccctccccgtctccccccgcctccagctctccaacgacaaccgcaccctcaccctcctctccgtcacccgcaacgacgtcggcccctacgagtgcggcatccagaacgagctctccgtcgaccactccgaccccgtcatcctcaacgtcctctacggccccgacgaccccaccatctccccctcctacacctactaccgccccggcgtcaacctctccctctcctgccacgccgcctccaacccccccgcccagtactcctggctcatcgacggcaacatccagcagcacacccaggagctcttcatctccaacatcaccgagaagaactccggcctctacacctgccaggccaacaactccgcctccggccactcccgcaccaccgtcaagaccatcaccgtctccgccgagctccccaagccctccatctcctccaacaactccaagcccgtcgaggacaaggacgccgtcgccttcacctgcgagcccgaggcccagaacaccacctacctctggtgggtcaacggccagtccctccccgtctccccccgcctccagctctccaacggcaaccgcaccctcaccctcttcaacgtcacccgcaacgacgcccgcgcctacgtctgcggcatccagaactccgtctccgccaaccgctccgaccccgtcaccctcgacgtcctctacggccccgacacccccatcatctccccccccgactcctcctacctctccggcgccaacctcaacctctcctgccactccgcctccaacccctccccccagtactcctggcgcatcaacggcatcccccagcagcacacccaggtcctcttcatcgccaagatcacccccaacaacaacggcacctacgcctgcttcgtctccaacctcgccaccggccgcaacaactccatcgtcaagtccatcaccgtctccgcctccggcacctcccccggcctctccgccggcgccaccgtcggcatcatgatcggcgtcctcgtcggcgtcgccctcatctga

SEQ ID NO: 1613 - RNA, 1035 nt, synthetic construct
  misc_feature 1..1035: note = AAA51739 variant
  source 1..1035: mol_type = other RNA
atgggccccccctccgcccccccctgccgcctccacgtcccctggaaggaggtcctcctcaccgcctccctcctcaccttctggaacccccccaccaccgccaagctcaccatcgagtccacccccttcaacgtcgccgagggcaaggaggtcctcctcctcgcccacaacctcccccagaaccgcatcggctactcctggtacaagggcgagcgcgtcgacggcaactccctcatcgtcggctacgtcatcggcacccagcaggccacccccggccccgcctactccggccgcgagaccatctaccccaacgcctccctcctcatccagaacgtcacccagaacgacaccggcttctacaccctccaggtcatcaagtccgacctcgtcaacgaggaggccaccggccagttccacgtctaccccgagctccccaagccctccatctcctccaacaactccaaccccgtcgaggacaaggacgccgtcgccttcacctgcgagcccgaggtccagaacaccacctacctctggtgggtcaacggccagtccctccccgtctccccccgcctccagctctccaacggcaacatgaccctcaccctcctctccgtcaagcgcaacgacgccggctcctacgagtgcgagatccagaaccccgcctccgccaaccgctccgaccccgtcaccctcaacgtcctctacggccccgacggccccaccatctccccctccaaggccaactaccgccccggcgagaacctcaacctctcctgccacgccgcctccaacccccccgcccagtactcctggttcatcaacggcaccttccagcagtccacccaggagctcttcatccccaacatcaccgtcaacaactccggctcctacatgtgccaggcccacaactccgccaccggcctcaaccgcaccaccgtcaccatgatcaccgtctccggctccgcccccgtcctctccgccgtcgccaccgtcggcatcaccatcggcgtcctcgcccgcgtcgccctcatctga

SEQ ID NO: 1614 - RNA, 1173 nt, synthetic construct
  misc_feature 1..1173: note = AAB04533 variant
  source 1..1173: mol_type = other RNA
atgggcgccaccaccatggaccagaagtccctctgggccggcgtcgtcgtcctcctcctcctccagggcggctccgcctacaagctcgtctgctacttcaccaactggtcccaggaccgccaggagcccggcaagttcacccccgagaacatcgaccccttcctctgctcccacctcatctactccttcgcctccatcgagaacaacaaggtcatcatcaaggacaagtccgaggtcatgctctaccagaccatcaactccctcaagaccaagaaccccaagctcaagatcctcctctccatcggcggctacctcttcggctccaagggcttccaccccatggtcgactcctccacctcccgcctcgagttcatcaactccatcatcctcttcctccgcaaccacaacttcgacggcctcgacgtctcctggatctaccccgaccagaaggagaacacccacttcaccgtcctcatccacgagctcgccgaggccttccagaaggacttcaccaagtccaccaaggagcgcctcctcctcaccgccggcgtctccgccggccgccagatgatcgacaactcctaccaggtcgagaagctcgccaaggacctcgacttcatcaacctcctctccttcgacttccacggctcctgggagaagcccctcatcaccggccacaactcccccctctccaagggctggcaggaccgcggcccctcctcctactacaacgtcgagtacgccgtcggctactggatccacaagggcatgccctccgagaaggtcgtcatgggcatccccacctacggccactccttcaccctcgcctccgccgagaccaccgtcggcgcccccgcctccggccccggcgccgccggccccatcaccgagtcctccggcttcctcgcctactacgagatctgccagttcctcaagggcgccaagatcacccgcctccaggaccagcaggtcccctacgccgtcaagggcaaccagtgggtcggctacgacgacgtcaagtccatggagaccaaggtccagttcctcaagaacctcaacctcggcggcgccatgatctggtccatcgacatggacgacttcaccggcaagtcctgcaaccagggcccctaccccctcgtccaggccgtcaagcgctccctcggctccctctga

SEQ ID NO: 1615 - RNA, 2832 nt, synthetic construct
  misc_feature 1..2832: note = AAD40367 variant
  source 1..2832: mol_type = other RNA
atgacccagcgctccatcgccggccccatctgcaacctcaagttcgtcaccctcctcgtcgccctctcctccgagctccccttcctcggcgccggcgtccagctccaggacaacggctacaacggcctcctcatcgccatcaacccccaggtccccgagaaccagaacctcatctccaacatcaaggagatgatcaccgaggcctccttctacctcttcaacgccaccaagcgccgcgtcttcttccgcaacatcaagatcctcatccccgccacctggaaggccaacaacaactccaagatcaagcaggagtcctacgagaaggccaacgtcatcgtcaccgactggtacggcgcccacggcgacgacccctacaccctccagtaccgcggctgcggcaaggagggcaagtacatccacttcacccccaacttcctcctcaacgacaacctcaccgccggctacggctcccgcggccgcgtcttcgtccacgagtgggcccacctccgctggggcgtcttcgacgagtacaacaacgacaagcccttctacatcaacggccagaaccagatcaaggtcacccgctgctcctccgacatcaccggcatcttcgtctgcgagaagggcccctgcccccaggagaactgcatcatctccaagctcttcaaggagggctgcaccttcatctacaactccacccagaacgccaccgcctccatcatgttcatgcagtccctctcctccgtcgtcgagttctgcaacgcctccacccacaaccaggaggcccccaacctccagaaccagatgtgctccctccgctccgcctgggacgtcatcaccgactccgccgacttccaccactccttccccatgaacggcaccgagctcccccccccccccaccttctccctcgtccaggccggcgacaaggtcgtctgcctcgtcctcgacgtctcctccaagatggccgaggccgaccgcctcctccagctccagcaggccgccgagttctacctcatgcagatcgtcgagatccacaccttcgtcggcatcgcctccttcgactccaagggcgagatccgcgcccagctccaccagatcaactccaacgacgaccgcaagctcctcgtctcctacctccccaccaccgtctccgccaagaccgacatctccatctgctccggcctcaagaagggcttcgaggtcgtcgagaagctcaacggcaaggcctacggctccgtcatgatcctcgtcacctccggcgacgacaagctcctcggcaactgcctccccaccgtcctctcctccggctccaccatccactccatcgccctcggctcctccgccgcccccaacctcgaggagctctcccgcctcaccggcggcctcaagttcttcgtccccgacatctccaactccaactccatgatcgacgccttctcccgcatctcctccggcaccggcgacatcttccagcagcacatccagctcgagtccaccggcgagaacgtcaagccccaccaccagctcaagaacaccgtcaccgtcgacaacaccgtcggcaacgacaccatgttcctcgtcacctggcaggcctccggcccccccgagatcatcctcttcgaccccgacggccgcaagtactacaccaacaacttcatcaccaacctcaccttccgcaccgcctccctctggatccccggcaccgccaagcccggccactggacctacaccctcaacaacacccaccactccctccaggccctcaaggtcaccgtcacctcccgcgcctccaactccgccgtcccccccgccaccgtcgaggccttcgtcgagcgcgactccctccacttcccccaccccgtcatgatctacgccaacgtcaagcagggcttctaccccatcctcaacgccaccgtcaccgccaccgtcgagcccgagaccggcgaccccgtcaccctccgcctcctcgacgacggcgccggcgccgacgtcatcaagaacgacggcatctactcccgctacttcttctccttcgccgccaacggccgctactccctcaaggtccacgtcaaccactccccctccatctccacccccgcccactccatccccggctcccacgccatgtacgtccccggctacaccgccaacggcaacatccagatgaacgccccccgcaagtccgtcggccgcaacgaggaggagcgcaagtggggcttctcccgcgtctcctccggcggctccttctccgtcctcggcgtccccgccggcccccaccccgacgtcttccccccctgcaagatcatcgacctcgaggccgtcaaggtcgaggaggagctcaccctctcctggaccgcccccggcgaggacttcgaccagggccaggccacctcctacgagatccgcatgtccaagtccctccagaacatccaggacgacttcaacaacgccatcctcgtcaacacctccaagcgcaacccccagcaggccggcatccgcgagatcttcaccttctccccccagatctccaccaacggccccgagcaccagcccaacggcgagacccacgagtcccaccgcatctacgtcgccatccgcgccatggaccgcaactccctccagtccgccgtctccaacatcgcccaggcccccctcttcatcccccccaactccgaccccgtccccgcccgcgactacctcatcctcaagggcgtcctcaccgccatgggcctcatcggcatcatctgcctcatcatcgtcgtcacccaccacaccctctcccgcaagaagcgcgccgacaagaaggagaacggcaccaagctcctctga

SEQ ID NO: 1616 - RNA, 708 nt, synthetic construct
  misc_feature 1..708: note = AAF82135 variant
  source 1..708: mol_type = other RNA
atggaggaggagacccacaccgacgccaagatccgcgccgagaacggcaccggctcctccccccgcggccccggctgctccctccgccacttcgcctgcgagcagaacctcctctcccgccccgacggctccgcctccttcctccagggcgacacctccgtcctcgccggcgtctacggccccgccgaggtcaaggtctccaaggagatcttcaacaaggccaccctcgaggtcatcctccgccccaagatcggcctccccggcgtcgccgagaagtcccgcgagcgcctcatccgcaacacctgcgaggccgtcgtcctcggcaccctccacccccgcacctccatcaccgtcgtcctccaggtcgtctccgacgccggctccctcctcgcctgctgcctcaacgccgcctgcatggccctcgtcgacgccggcgtccccatgcgcgccctcttctgcggcgtcgcctgcgccctcgactccgacggcaccctcgtcctcgaccccacctccaagcaggagaaggaggcccgcgccgtcctcaccttcgccctcgactccgtcgagcgcaagctcctcatgtcctccaccaagggcctctactccgacaccgagctccagcagtgcctcgccgccgcccaggccgcctcccagcacgtcttccgcttctaccgcgagtccctccagcgccgctactccaagtcctga

SEQ ID NO: 1617 - RNA, 1752 nt, synthetic construct
  misc_feature 1..1752: note = CCDS6312.1 variant
  source 1..1752: mol_type = other RNA
atggaggtcgccgccaactgctccctccgcgtcaagcgccccctcctcgacccccgcttcgagggctacaagctctccctcgagcccctcccctgctaccagctcgagctcgacgccgccgtcgccgaggtcaagctccgcgacgaccagtacaccctcgagcacatgcacgccttcggcatgtacaactacctccactgcgactcctggtaccaggactccgtctactacatcgacaccctcggccgcatcatgaacctcaccgtcatgctcgacaccgccctcggcaagccccgcgaggtcttccgcctccccaccgacctcaccgcctgcgacaaccgcctctgcgcctccatccacttctcctcctccacctgggtcaccctctccgacggcaccggccgcctctacgtcatcggcaccggcgagcgcggcaactccgcctccgagaagtgggagatcatgttcaacgaggagctcggcgaccccttcatcatcatccactccatctccctcctcaacgccgaggagcactccatcgccaccctcctcctccgcatcgagaaggaggagctcgacatgaagggctccggcttctacgtctccctcgagtgggtcaccatctccaagaagaaccaggacaacaagaagtacgagatcatcaagcgcgacatcctccgcggcaagtccgtcccccactacgccgccatcgagcccgacggcaacggcctcatgatcgtctcctacaagtccctcaccttcgtccaggccggccaggacctcgaggagaacatggacgaggacatctccgagaagatcaaggagcccctctactactggcagcagaccgaggacgacctcaccgtcaccatccgcctccccgaggactccaccaaggaggacatccagatccagttcctccccgaccacatcaacatcgtcctcaaggaccaccagttcctcgagggcaagctctactcctccatcgaccacgagtcctccacctggatcatcaaggagtccaactccctcgagatctccctcatcaagaagaacgagggcctcacctggcccgagctcgtcatcggcgacaagcagggcgagctcatccgcgactccgcccagtgcgccgccatcgccgagcgcctcatgcacctcacctccgaggagctcaaccccaaccccgacaaggagaagcccccctgcaacgcccaggagctcgaggagtgcgacatcttcttcgaggagtcctcctccctctgccgcttcgacggcaacaccctcaagaccacccacgtcgtcaacctcggctccaaccagtacctcttctccgtcatcgtcgaccccaaggagatgccctgcttctgcctccgccacgacgtcgacgccctcctctggcagccccactcctccaagcaggacgacatgtgggagcacatcgccaccttcaacgccctcggctacgtccaggcctccaagcgcgacaagaagttcttcgcctgcgcccccaactactcctacgccgccctctgcgagtgcctccgccgcgtcttcatctaccgccagcccgcccccatgtccaccgtcctctacaaccgcaaggagggccgccaggtcggccaggtcgccaagcagcaggtcgcctccctcgagaccaacgaccccatcctcggcttccaggccaccaacgagcgcctcttcgtcctcaccaccaagaacctcttcctcatcaaggtcaacaccgagaactga

SEQ ID NO: 1618 - RNA, 1563 nt, synthetic construct
  misc_feature 1..1563: note = CCDS41288.1 variant
  source 1..1563: mol_type = other RNA
atgtcctcccccctcgcctccctctccaagacccgcaaggtccccctcccctccgagcccatgaaccccggccgccgcggcatccgcatctacggcgacgaggacgaggtcgacatgctctccgacggctgcggctccgaggagaagatctccgtcccctcctgctacggcggcatcggcgcccccgtctcccgccaggtccccgcctcccacgactccgagctcatggccttcatgacccgcaagctctgggacctcgagcagcaggtcaaggcccagaccgacgagatcctctccaaggaccagaagatcgccgccctcgaggacctcgtccagaccctccgcccccaccccgccgaggccaccctccagcgccaggaggagctcgagaccatgtgcgtccagctccagcgccaggtccgcgagatggagcgcttcctctccgactacggcctccagtgggtcggcgagcccatggaccaggaggactccgagtccaagaccgtctccgagcacggcgagcgcgactggatgaccgccaagaagttctggaagcccggcgactccctcgccccccccgaggtcgacttcgaccgcctcctcgcctccctccaggacctctccgagctcgtcgtcgagggcgacacccaggtcacccccgtccccggcggcgcccgcctccgcaccctcgagcccatccccctcaagctctaccgcaacggcatcatgatgttcgacggccccttccagcccttctacgacccctccacccagcgctgcctccgcgacatcctcgacggcttcttcccctccgagctccagcgcctctaccccaacggcgtccccttcaaggtctccgacctccgcaaccaggtctacctcgaggacggcctcgaccccttccccggcgagggccgcgtcgtcggccgccagctcatgcacaaggccctcgaccgcgtcgaggagcaccccggctcccgcatgaccgccgagaagttcctcaaccgcctccccaagttcgtcatccgccagggcgaggtcatcgacatccgcggccccatccgcgacaccctccagaactgctgccccctccccgcccgcatccaggagatcgtcgtcgagacccccaccctcgccgccgagcgcgagcgctcccaggagtcccccaacacccccgccccccccctctccatgctccgcatcaagtccgagaacggcgagcaggccttcctcctcatgatgcagcccgacaacaccatcggcgacgtccgcgccctcctcgcccaggcccgcgtcatggacgcctccgccttcgagatcttctccaccttcccccccaccctctaccaggacgacaccctcaccctccaggccgccggcctcgtccccaaggccgccctcctcctccgcgcccgccgcgcccccaagtcctccctcaagttctcccccggcccctgccccggccccggccccggcccctcccccggccccggccccggcccctcccccggccccggccccggcccctccccctgccccggcccctccccctccccccagtga

SEQ ID NO: 1619 - RNA, 429 nt, synthetic construct
  misc_feature 1..429: note = AAA88022 variant
  source 1..429: mol_type = other RNA
atggccaccaagatcgacaaggaggcctgccgcgccgcctacaacctcgtccgcgacgacggctccgccgtcatctgggtcaccttcaagtacgacggctccaccatcgtccccggcgagcagggcgccgagtaccagcacttcatccagcagtgcaccgacgacgtccgcctcttcgccttcgtccgcttcaccaccggcgacgccatgtccaagcgctccaagttcgccctcatcacctggatcggcgagaacgtctccggcctccagcgcgccaagaccggcaccgacaagaccctcgtcaaggaggtcgtccagaacttcgccaaggagttcgtcatctccgaccgcaaggagctcgaggaggacttcatcaagtccgagctcaagaaggccggcggcgccaactacgacgcccagaccgagtga

SEQ ID NO: 1620 - RNA, 495 nt, synthetic construct
  misc_feature 1..495: note = CCQ43891 variant
  source 1..495: mol_type = other RNA
atggccacccgcgacccctgggtctggatggcctcccccgacttccaggcccgcaagggcaagcgcgtccaccaggagaccctcgcccccggcgagaccaaggacaagatggagctcctcggcctccgcggccccctcgacctcctcggccccggcgccctcctcgccaccctcggcaagatggcccccggcgagcacaaggcccagcgcgcccccaaggagtcccccgacaagaccgcccgctgggcccagcgcgacccccagggcccccgcgtctccctcgagtacctcgagcgccgcgccaccatgggccaccaggcctccctcgaccaccagggcccccgcgcctcccagggcgcctggggcctcggcgagcgcaccgtctggaccgtcccccaggaccgccgcggctccctcgccaccgaggcccgcatggagctccagggccccggcgtcccccaggcctcccgcgcctcccgcgagacccagtggtga

SEQ ID NO: 1621 - RNA, 1623 nt, synthetic construct
  misc_feature 1..1623: note = AAO18361 variant
  source 1..1623: mol_type = other RNA
atgggccccggcgagcgcgccggcggcggcggcgacgccggcaagggcaacgccgccggcggcggcggcggcggccgctccgccaccaccgccggctcccgcgccgtctccgccctctgcctcctcctctccgtcggctccgccgccgcctgcctcctcctcggcgtccaggccgccgccctccagggccgcgtcgccgccctcgaggaggagcgcgagctcctccgccgcgccggcccccccggcgccctcgacgcctgggccgagccccacctcgagcgcctcctccgcgagaagctcgacggcctcgccaagatccgcaccgcccgcgaggccccctccgagtgcgtctgcccccccggcccccccggccgccgcggcaagcccggccgccgcggcgaccccggcccccccggccagtccggccgcgacggctaccccggccccctcggcctcgacggcaagcccggcctccccggccccaagggcgagaagggcgcccccggcgacttcggcccccgcggcgaccagggccaggacggcgccgccggcccccccggcccccccggcccccccggcgcccgcggcccccccggcgacaccggcaaggacggcccccgcggcgcccagggccccgccggccccaagggcgagcccggccaggacggcgagatgggccccaagggcccccccggccccaagggcgagcccggcgtccccggcaagaagggcgacgacggcaccccctcccagcccggcccccccggccccaagggcgagcccggctccatgggcccccgcggcgagaacggcgtcgacggcgcccccggccccaagggcgagcccggccaccgcggcaccgacggcgccgccggcccccgcggcgcccccggcctcaagggcgagcagggcgacaccgtcgtcatcgactacgacggccgcatcctcgacgccctcaagggcccccccggcccccagggcccccccggcccccccggcatccccggcgccaagggcgagctcggcctccccggcgcccccggcatcgacggcgagaagggccccaagggccagaagggcgaccccggcgagcccggccccgccggcctcaagggcgaggccggcgagatgggcctctccggcctccccggcgccgacggcctcaagggcgagaagggcgagtccgcctccgactccctccaggagtccctcgcccagctcatcgtcgagcccggcccccccggcccccccggcccccccggccccatgggcctccagggcatccagggccccaagggcctcgacggcgccaagggcgagaagggcgcctccggcgagcgcggcccctccggcctccccggccccgtcggcccccccggcctcatcggcctccccggcaccaagggcgagaagggccgccccggcgagcccggcctcgacggcttccccggcccccgcggcgagaagggcgaccgctccgagcgcggcgagaagggcgagcgcggcgtccccggccgcaagggcgtcaagggccagaagggcgagcccggcccccccggcctcgaccagccctgccccgtcggccccgacggcctccccgtccccggctgctggcacaagtga

SEQ ID NO: 1622 - RNA, 492 nt, synthetic construct
  misc_feature 1..492: note = CAG25548 variant
  source 1..492: mol_type = other RNA
atgctcgcccgcgccctcctcctctgcgccgtcctcgccctctcccacaccgccaacccctgctgctcccacccctgccagaaccgcggcgtctgcatgtccgtcggcttcgaccagtacaagtgcgactgcacccgcaccggcttctacggcgagaactgctccacccccgagttcctcacccgcatcaagctcttcctcaagcccacccccaacaccgtccactacatcctcacccacttcaagggcttctggaacgtcgtcaacaacatccccttcctccgcaacgccatcatgtcctacgtcctcacctcccgctcccacctcatcgactccccccccacctacaacgccgactacggctacaagtcctgggaggccttctccaacctctcctactacacccgcgccctcccccccgtccccgacgactgccccacccccctcggcgtcaaggccctccacgcctccgtcttccaggaccgctcctga

SEQ ID NO: 1623 - RNA, 1632 nt, synthetic construct
  misc_feature 1..1632: note = AAC50809 variant
  source 1..1632: mol_type = other RNA
atgggcacctccctctcccccaacgacccctggcccctcaaccccctctccatccagcagaccaccctcctcctcctcctctccgtcctcgccaccgtccacgtcggccagcgcctcctccgccagcgccgccgccagctccgctccgccccccccggccccttcgcctggcccctcatcggcaacgccgccgccgtcggccaggccgcccacctctccttcgcccgcctcgcccgccgctacggcgacgtcttccagatccgcctcggctcctgccccatcgtcgtcctcaacggcgagcgcgccatccaccaggccctcgtccagcagggctccgccttcgccgaccgccccgccttcgcctccttccgcgtcgtctccggcggccgctccatggccttcggccactactccgagcactggaaggtccagcgccgcgccgcccactccatgatgcgcaacttcttcacccgccagccccgctcccgccaggtcctcgagggccacgtcctctccgaggcccgcgagctcgtcgccctcctcgtccgcggctccgccgacggcgccttcctcgacccccgccccctcaccgtcgtcgccgtcgccaacgtcatgtccgccgtctgcttcggctgccgctactcccacgacgaccccgagttccgcgagctcctctcccacaacgaggagttcggccgcaccgtcggcgccggctccctcgtcgacgtcatgccctggctccagtacttccccaaccccgtccgcaccgtcttccgcgagttcgagcagctcaaccgcaacttctccaacttcatcctcgacaagttcctccgccactgcgagtccctccgccccggcgccgccccccgcgacatgatggacgccttcatcctctccgccgagaagaaggccgccggcgactcccacggcggcggcgcccgcctcgacctcgagaacgtccccgccaccatcaccgacatcttcggcgcctcccaggacaccctctccaccgccctccagtggctcctcctcctcttcacccgctaccccgacgtccagacccgcgtccaggccgagctcgaccaggtcgtcggccgcgaccgcctcccctgcatgggcgaccagcccaacctcccctacgtcctcgccttcctctacgaggccatgcgcttctcctccttcgtccccgtcaccatcccccacgccaccaccgccaacacctccgtcctcggctaccacatccccaaggacaccgtcgtcttcgtcaaccagtggtccgtcaaccacgaccccctcaagtggcccaaccccgagaacttcgaccccgcccgcttcctcgacaaggacggcctcatcaacaaggacctcacctcccgcgtcatgatcttctccgtcggcaagcgccgctgcatcggcgaggagctctccaagatgcagctcttcctcttcatctccatcctcgcccaccagtgcgacttccgcgccaaccccaacgagcccgccaagatgaacttctcctacggcctcaccatcaagcccaagtccttcaaggtcaacgtcaccctccgcgagtccatggagctcctcgactccgccgtccagaacctccaggccaaggagacctgccagtga

SEQ ID NO: 1624 - RNA, 333 nt, synthetic construct
  misc_feature 1..333: note = NM_001129828 variant
  source 1..333: mol_type = other RNA
atgtggatgggcctcatccagctcgtcgagggcgtcaagcgcaaggaccagggcttcctcgagaaggagttctaccacaagaccaacatcaagatgcgctgcgagttcctcgcctgctggcccgccttcaccgtcctcggcgaggcctggcgcgaccaggtcgactggtcccgcctcctccgcgacgccggcctcgtcaagatgtcccgcaagccccgcgcctcctcccccctctccaacaaccacccccccacccccaagcgcttcccccgccagcccggccgcgagaagggccccatcaaggaggtccccggcaccaagggctccccctga

SEQ ID NO: 1625 - RNA, 384 nt, synthetic construct
  misc_feature 1..384: note = NM_001129826 variant
  source 1..384: mol_type = other RNA
atgtggatgggcctcatccagctcgtcgagggcgtcaagcgcaaggaccagggcttcctcgagaaggagttctaccacaagaccaacatcaagatgcgctgcgagttcctcgcctgctggcccgccttcaccgtcctcggcgaggcctggcgcgaccaggtcgactggtcccgcctcctccgcgacgccggcctcgtcaagatgtcccgcaagccccgcgcctcctcccccctctccaacaaccacccccccacccccaagcgccgcggctccggccgccaccccctcaaccccggccccgaggccctctccaagttcccccgccagcccggccgcgagaagggccccatcaaggaggtccccggcaccaagggctccccctga

SEQ ID NO: 1626 - RNA, 570 nt, synthetic construct
  misc_feature 1..570: note = AAI40914 variant
  source 1..570: mol_type = other RNA
atgaccgacaagaccgagaaggtcgccgtcgaccccgagaccgtcttcaagcgcccccgcgagtgcgactccccctcctaccagaagcgccagcgcatggccctcctcgcccgcaagcagggcgccggcgactccctcatcgccggctccgccatgtccaaggccaagaagctcatgaccggccacgccatccccccctcccagctcgactcccagatcgacgacttcaccggcttctccaaggaccgcatgatgcagaagcccggctccaacgcccccgtcggcggcaacgtcacctcctccttctccggcgacgacctcgagtgccgcgagaccgcctcctcccccaagtcccagcgcgagatcaacgccgacatcaagcgcaagctcgtcaaggagctccgctgcgtcggccagaagtacgagaagatcttcgagatgctcgagggcgtccagggccccaccgccgtccgcaagcgcttcttcgagtccatcatcaaggaggccgcccgctgcatgcgccgcgacttcgtcaagcacctcaagaagaagctcaagcgcatgatctga

SEQ ID NO: 1627 - RNA, 795 nt, synthetic construct
  misc_feature 1..795: note = AAH20662 variant
  source 1..795: mol_type = other RNA
atgctccgcctcctccgcctcgccctcgccttctacggccgcaccgccgaccccgccgagcgccagggcccccagcagcagggcctcccccagggcgacacccagctcaccaccgtccagggcgtcgtcacctccttctgcggcgactacggcatgatcgacgagtccatctacttctcctccgacgtcgtcaccggcaacgtccccctcaaggtcggccagaaggtcaacgtcgtcgtcgaggaggacaagccccactacggcctccgcgccatcaaggtcgacgtcgtcccccgccacctctacggcgccggcccctccgactccggcacccgcgtcctcatcggctgcgtcacctccatcaacgaggacaacatctacatctccaactccatctacttctccatcgccatcgtctccgaggacttcgtcccctacaagggcgacctcctcgaggtcgagtactccaccgagcccggcatctccaacatcaaggccacctccgtcaagcccatccgctgcatccacaccgaggaggtctgcatcacctccgtccacggccgcaacggcgtcatcgactacaccatcttcttcaccctcgactccgtcaagctccccgacggctacgtcccccaggtcgacgacatcgtcaacgtcgtcatggtcgagtccatccagttctgcttcatctggcgcgccatctccatcacccccgtccacaagtcctcctccggcttccaggacgacggcggcctcggccgccccaagcgcgagcgccgctcccagtccatctga

SEQ ID NO: 1628 - RNA, 2844 nt, synthetic construct
  misc_feature 1..2844: note = CCDS735.1 variant
  source 1..2844: mol_type = other RNA
atgtccctcccctcccgccagaccgccatcatcgtcaacccccccccccccgagtacatcaacaccaagaagaacggccgcctcaccaaccagctccagtacctccagaaggtcgtcctcaaggacctctggaagcactccttctcctggcccttccagcgccccgtcgacgccgtcaagctccagctccccgactactacaccatcatcaagaaccccatggacctcaacaccatcaagaagcgcctcgagaacaagtactacgccaaggcctccgagtgcatcgaggacttcaacaccatgttctccaactgctacctctacaacaagcccggcgacgacatcgtcctcatggcccaggccctcgagaagctcttcatgcagaagctctcccagatgccccaggaggagcaggtcgtcggcgtcaaggagcgcatcaagaagggcacccagcagaacatcgccgtctcctccgccaaggagaagtcctccccctccgccaccgagaaggtcttcaagcagcaggagatcccctccgtcttccccaagacctccatctcccccctcaacgtcgtccagggcgcctccgtcaactcctcctcccagaccgccgcccaggtcaccaagggcgtcaagcgcaaggccgacaccaccacccccgccacctccgccgtcaaggcctcctccgagttctcccccaccttcaccgagaagtccgtcgccctcccccccatcaaggagaacatgcccaagaacgtcctccccgactcccagcagcagtacaacgtcgtcaagaccgtcaaggtcaccgagcagctccgccactgctccgagatcctcaaggagatgctcgccaagaagcacttctcctacgcctggcccttctacaaccccgtcgacgtcaacgccctcggcctccacaactactacgacgtcgtcaagaaccccatggacctcggcaccatcaaggagaagatggacaaccaggagtacaaggacgcctacaagttcgccgccgacgtccgcctcatgttcatgaactgctacaagtacaacccccccgaccacgaggtcgtcaccatggcccgcatgctccaggacgtcttcgagacccacttctccaagatccccatcgagcccgtcgagtccatgcccctctgctacatcaagaccgacatcaccgagaccaccggccgcgagaacaccaacgaggcctcctccgagggcaactcctccgacgactccgaggacgagcgcgtcaagcgcctcgccaagctccaggagcagctcaaggccgtccaccagcagctccaggtcctctcccaggtccccttccgcaagctcaacaagaagaaggagaagtccaagaaggagaagaagaaggagaaggtcaacaactccaacgagaacccccgcaagatgtgcgagcagatgcgcctcaaggagaagtccaagcgcaaccagcccaagaagcgcaagcagcagttcatcggcctcaagtccgaggacgaggacaacgccaagcccatgaactacgacgagaagcgccagctctccctcaacatcaacaagctccccggcgacaagctcggccgcgtcgtccacatcatccagtcccgcgagccctccctctccaactccaaccccgacgagatcgagatcgacttcgagaccctcaaggcctccaccctccgcgagctcgagaagtacgtctccgcctgcctccgcaagcgccccctcaagccccccgccaagaagatcatgatgtccaaggaggagctccactcccagaagaagcaggagctcgagaagcgcctcctcgacgtcaacaaccagctcaactcccgcaagcgccagaccaagtccgacaagacccagccctccaaggccgtcgagaacgtctcccgcctctccgagtcctcctcctcctcctcctcctcctccgagtccgagtcctcctcctccgacctctcctcctccgactcctccgactccgagtccgagatgttccccaagttcaccgaggtcaagcccaacgactccccctccaaggagaacgtcaagaagatgaagaacgagtgcatcccccccgagggccgcaccggcgtcacccagatcggctactgcgtccaggacaccacctccgccaacaccaccctcgtccaccagaccaccccctcccacgtcatgccccccaaccaccaccagctcgccttcaactaccaggagctcgagcacctccagaccgtcaagaacatctcccccctccagatcctccccccctccggcgactccgagcagctctccaacggcatcaccgtcatgcacccctccggcgactccgacaccaccatgctcgagtccgagtgccaggcccccgtccagaaggacatcaagatcaagaacgccgactcctggaagtccctcggcaagcccgtcaagccctccggcgtcatgaagtcctccgacgagctcttcaaccagttccgcaaggccgccatcgagaaggaggtcaaggcccgcacccaggagctcatccgcaagcacctcgagcagaacaccaaggagctcaaggcctcccaggagaaccagcgcgacctcggcaacggcctcaccgtcgagtccttctccaacaagatccagaacaagtgctccggcgaggagcagaaggagcaccagcagtcctccgaggcccaggacaagtccaagctctggctcctcaaggaccgcgacctcgcccgccagaaggagcaggagcgccgccgccgcgaggccatggtcggcaccatcgacatgaccctccagtccgacatcatgaccatgttcgagaacaacttcgactga

SEQ ID NO: 1629 - RNA, 543 nt, synthetic construct
  misc_feature 1..543: note = CCDS35455.1 variant
  source 1..543: mol_type = other RNA
atgcaggccgagggccgcggcaccggcggctccaccggcgacgccgacggccccggcggccccggcatccccgacggccccggcggcaacgccggcggccccggcgaggccggcgccaccggcggccgcggcccccgcggcgccggcgccgcccgcgcctccggcccccgcggcggcgccccccgcggcccccacggcggcgccgcctccgcccaggacggccgctgcccctgcggcgcccgccgccccgactcccgcctcctcgagctccacatcaccatgcccttctcctcccccatggaggccgagctcgtccgccgcatcctctcccgcgacgccgcccccctcccccgccccggcgccgtcctcaaggacttcaccgtctccggcaacctcctcttcatccgcctcaccgccgccgaccaccgccagctccagctctccatctcctcctgcctccagcagctctccctcctcatgtggatcacccagtgcttcctccccgtcttcctcgcccaggccccctccggccagcgccgctga

SEQ ID NO: 1630 - RNA, 633 nt, synthetic construct
  misc_feature 1..633: note = CAA10196 variant
  source 1..633: mol_type = other RNA
atgcaggccgagggccagggcaccggcggctccaccggcgacgccgacggccccggcggccccggcatccccgacggccccggcggcaacgccggcggccccggcgaggccggcgccaccggcggccgcggcccccgcggcgccggcgccgcccgcgcctccggcccccgcggcggcgccccccgcggcccccacggcggcgccgcctccgcccaggacggccgctgcccctgcggcgcccgccgccccgactcccgcctcctccagctccacatcaccatgcccttctcctcccccatggaggccgagctcgtccgccgcatcctctcccgcgacgccgcccccctcccccgccccggcgccgtcctcaaggacttcaccgtctccggcaacctcctcttcatgtccgtccgcgaccaggaccgcgagggcgccggccgcatgcgcgtcgtcggctggggcctcggctccgcctcccccgagggccagaaggcccgcgacctccgcacccccaagcacaaggtctccgagcagcgccccggcacccccggcccccccccccccgagggcgcccagggcgacggctgccgcggcgtcgccttcaacgtcatgttctccgccccccacatctga

SEQ ID NO: 1631 - RNA, 1992 nt, synthetic construct
  misc_feature 1..1992: note = CCDS13459.1 variant
  source 1..1992: mol_type = other RNA
atggccgccaccgagatctccgtcctctccgagcagttcaccaagatcaaggagctcgagctcatgcccgagaagggcctcaaggaggaggagaaggacggcgtctgccgcgagaaggaccaccgctccccctccgagctcgaggccgagcgcacctccggcgccttccaggactccgtcctcgaggaggaggtcgagctcgtcctcgccccctccgaggagtccgagaagtacatcctcaccctccagaccgtccacttcacctccgaggccgtcgagctccaggacatgtccctcctctccatccagcagcaggagggcgtccaggtcgtcgtccagcagcccggccccggcctcctctggctcgaggagggcccccgccagtccctccagcagtgcgtcgccatctccatccagcaggagctctactccccccaggagatggaggtcctccagttccacgccctcgaggagaacgtcatggtcgcctccgaggactccaagctcgccgtctccctcgccgagaccaccggcctcatcaagctcgaggaggagcaggagaagaaccagctcctcgccgagcgcaccaaggagcagctcttcttcgtcgagaccatgtccggcgacgagcgctccgacgagatcgtcctcaccgtctccaactccaacgtcgaggagcaggaggaccagcccaccgccggccaggccgacgccgagaaggccaagtccaccaagaaccagcgcaagaccaagggcgccaagggcaccttccactgcgacgtctgcatgttcacctcctcccgcatgtcctccttcaaccgccacatgaagacccacacctccgagaagccccacctctgccacctctgcctcaagaccttccgcaccgtcaccctcctccgcaaccacgtcaacacccacaccggcacccgcccctacaagtgcaacgactgcaacatggccttcgtcacctccggcgagctcgtccgccaccgccgctacaagcacacccacgagaagcccttcaagtgctccatgtgcaagtacgcctccgtcgaggcctccaagctcaagcgccacgtccgctcccacaccggcgagcgccccttccagtgctgccagtgctcctacgcctcccgcgacacctacaagctcaagcgccacatgcgcacccactccggcgagaagccctacgagtgccacatctgccacacccgcttcacccagtccggcaccatgaagatccacatcctccagaagcacggcgagaacgtccccaagtaccagtgcccccactgcgccaccatcatcgcccgcaagtccgacctccgcgtccacatgcgcaacctccacgcctactccgccgccgagctcaagtgccgctactgctccgccgtcttccacgagcgctacgccctcatccagcaccagaagacccacaagaacgagaagcgcttcaagtgcaagcactgctcctacgcctgcaagcaggagcgccacatgaccgcccacatccgcacccacaccggcgagaagcccttcacctgcctctcctgcaacaagtgcttccgccagaagcagctcctcaacgcccacttccgcaagtaccacgacgccaacttcatccccaccgtctacaagtgctccaagtgcggcaagggcttctcccgctggatcaacctccaccgccactccgagaagtgcggctccggcgaggccaagtccgccgcctccggcaagggccgccgcacccgcaagcgcaagcagaccatcctcaaggaggccaccaagggccagaaggaggccgccaagggctggaaggaggccgccaacggcgacgaggccgccgccgaggaggcctccaccaccaagggcgagcagttccccggcgagatgttccccgtcgcctgccgcgagaccaccgcccgcgtcaaggaggaggtcgacgagggcgtcacctgcgagatgctcctcaacaccatggacaagtga

SEQ ID NO: 1632 - RNA, 2148 nt, synthetic construct
  misc_feature 1..2148: note = CCDS11368.1 variant
  source 1..2148: mol_type = other RNA
atgtcccaggtcatgtcctcccccctcctcgccggcggccacgccgtctccctcgccccctgcgacgagccccgccgcaccctccaccccgccccctccccctccctccccccccagtgctcctactacaccaccgagggctggggcgcccaggccctcatggcccccgtcccctgcatgggcccccccggccgcctccagcaggccccccaggtcgaggccaaggccacctgcttcctcccctcccccggcgagaaggccctcggcacccccgaggacctcgactcctacatcgacttctccctcgagtccctcaaccagatgatcctcgagctcgaccccaccttccagctcctcccccccggcaccggcggctcccaggccgagctcgcccagtccaccatgtccatgcgcaagaaggaggagtccgaggccctcgacatcaagtacatcgaggtcacctccgcccgctcccgctgccacgacggcccccagcactgctcctccccctccgtcaccccccccttcggctccctccgctccggcggcctcctcctctcccgcgacgtcccccgcgagacccgctcctcctccgagtccctcatcttctccggcaaccagggccgcggccaccagcgccccctccccccctccgagggcctctccccccgcccccccaactccccctccatctccatcccctgcatgggctccaaggcctcctccccccacggcctcggctcccccctcgtcgcctccccccgcctcgagaagcgcctcggcggcctcgccccccagcgcggctcccgcatctccgtcctctccgcctcccccgtctccgacgtctcctacatgttcggctcctcccagtccctcctccactcctccaactcctcccaccagtcctcctcccgctccctcgagtcccccgccaactcctcctcctccctccactccctcggctccgtctccctctgcacccgcccctccgacttccaggccccccgcaaccccaccctcaccatgggccagccccgcaccccccactccccccccctcgccaaggagcacgcctcctcctgccccccctccatcaccaactccatggtcgacatccccatcgtcctcatcaacggctgccccgagcccggctcctcccccccccagcgcacccccggccaccagaactccgtccagcccggcgccgcctccccctccaacccctgccccgccacccgctccaactcccagaccctctccgacgcccccttcaccacctgccccgagggccccgcccgcgacatgcagcccaccatgaagttcgtcatggacacctccaagtactggttcaagcccaacatcacccgcgagcaggccatcgagctcctccgcaaggaggagcccggcgccttcgtcatccgcgactcctcctcctaccgcggctccttcggcctcgccctcaaggtccaggaggtccccgcctccgcccagtcccgccccggcgaggactccaacgacctcatccgccacttcctcatcgagtcctccgccaagggcgtccacctcaagggcgccgacgaggagccctacttcggctccctctccgccttcgtctgccagcactccatcatggccctcgccctcccctgcaagctcaccatcccccagcgcgagctcggcggcgccgacggcgcctccgactccaccgactcccccgcctcctgccagaagaagtccgccggctgccacaccctctacctctcctccgtctccgtcgagaccctcaccggcgccctcgccgtccagaaggccatctccaccaccttcgagcgcgacatcctccccacccccaccgtcgtccacttcaaggtcaccgagcagggcatcaccctcaccgacgtccagcgcaaggtcttcttccgccgccactaccccctcaccaccctccgcttctgcggcatggaccccgagcagcgcaagtggcagaagtactgcaagccctcctggatcttcggcttcgtcgccaagtcccagaccgagccccaggagaacgtctgccacctcttcgccgagtacgacatggtccagcccgcctcccaggtcatcggcctcgtcaccgccctcctccaggacgccgagcgcatgtga

SEQ ID NO: 1633 - RNA, 1302 nt, synthetic construct
  misc_feature 1..1302: note = AAH06510 variant
  source 1..1302: mol_type = other RNA
atggccctccgcgtcacccgcaactccaagatcaacgccgagaacaaggccaagatcaacatggccggcgccaagcgcgtccccaccgcccccgccgccacctccaagcccggcctccgcccccgcaccgccctcggcgacatcggcaacaaggtctccgagcagctccaggccaagatgcccatgaagaaggaggccaagccctccgccaccggcaaggtcatcgacaagaagctccccaagcccctcgagaaggtccccatgctcgtccccgtccccgtctccgagcccgtccccgagcccgagcccgagcccgagcccgagcccgtcaaggaggagaagctctcccccgagcccatcctcgtcgacaccgcctccccctcccccatggagacctccggctgcgcccccgccgaggaggacctctgccaggccttctccgacgtcatcctcgccgtcaacgacgtcgacgccgaggacggcgccgaccccaacctctgctccgagtacgtcaaggacatctacgcctacctccgccagctcgaggaggagcaggccgtccgccccaagtacctcctcggccgcgaggtcaccggcaacatgcgcgccatcctcatcgactggctcgtccaggtccagatgaagttccgcctcctccaggagaccatgtacatgaccgtctccatcatcgaccgcttcatgcagaacaactgcgtccccaagaagatgctccagctcgtcggcgtcaccgccatgttcatcgcctccaagtacgaggagatgtacccccccgagatcggcgacttcgccttcgtcaccgacaacacctacaccaagcaccagatccgccagatggagatgaagatcctccgcgccctcaacttcggcctcggccgccccctccccctccacttcctccgccgcgcctccaagatcggcgaggtcgacgtcgagcagcacaccctcgccaagtacctcatggagctcaccatgctcgactacgacatggtccacttccccccctcccagatcgccgccggcgccttctgcctcgccctcaagatcctcgacaacggcgagtggacccccaccctccagcactacctctcctacaccgaggagtccctcctccccgtcatgcagcacctcgccaagaacgtcgtcatggtcaaccagggcctcaccaagcacatgaccgtcaagaacaagtacgccacctccaagcacgccaagatctccaccctcccccagctcaactccgccctcgtccaggacctcgccaaggccgtcgccaaggtctga

SEQ ID NO: 1634 - RNA, 888 nt, synthetic construct
  misc_feature 1..888: note = AAA58392 variant
  source 1..888: mol_type = other RNA
atggagcaccagctcctctgctgcgaggtcgagaccatccgccgcgcctaccccgacgccaacctcctcaacgaccgcgtcctccgcgccatgctcaaggccgaggagacctgcgccccctccgtctcctacttcaagtgcgtccagaaggaggtcctcccctccatgcgcaagatcgtcgccacctggatgctcgaggtctgcgaggagcagaagtgcgaggaggaggtcttccccctcgccatgaactacctcgaccgcttcctctccctcgagcccgtcaagaagtcccgcctccagctcctcggcgccacctgcatgttcgtcgcctccaagatgaaggagaccatccccctcaccgccgagaagctctgcatctacaccgacaactccatccgccccgaggagctcctccagatggagctcctcctcgtcaacaagctcaagtggaacctcgccgccatgaccccccacgacttcatcgagcacttcctctccaagatgcccgaggccgaggagaacaagcagatcatccgcaagcacgcccagaccttcgtcgccctctgcgccaccgacgtcaagttcatctccaaccccccctccatggtcgccgccggctccgtcgtcgccgccgtccagggcctcaacctccgctcccccaacaacttcctctcctactaccgcctcacccgcttcctctcccgcgtcatcaagtgcgaccccgactgcctccgcgcctgccaggagcagatcgaggccctcctcgagtcctccctccgccaggcccagcagaacatggaccccaaggccgccgaggaggaggaggaggaggaggaggaggtcgacctcgcctgcacccccaccgacgtccgcgacgtcgacatctga

SEQ ID NO: 1635 - RNA, 651 nt, synthetic construct
  misc_feature 1..651: note = AAA36601 variant
  source 1..651: mol_type = other RNA
atgctccgcctctccgagcgcaacatgaaggtcctcctcgccgccgccctcatcgccggctccgtcttcttcctcctcctccccggcccctccgccgccgacgagaagaagaagggccccaaggtcaccgtcaaggtctacttcgacctccgcatcggcgacgaggacgtcggccgcgtcatcttcggcctcttcggcaagaccgtccccaagaccgtcgacaacttcgtcgccctcgccaccggcgagaagggcttcggctacaagaactccaagttccaccgcgtcatcaaggacttcatgatccagggcggcgacttcacccgcggcgacggcaccggcggcaagtccatctacggcgagcgcttccccgacgagaacttcaagctcaagcactacggccccggctgggtctccatggccaacgccggcaaggacaccaacggctcccagttcttcatcaccaccgtcaagaccgcctggctcgacggcaagcacgtcgtcttcggcaaggtcctcgagggcatggaggtcgtccgcaaggtcgagtccaccaagaccgactcccgcgacaagcccctcaaggacgtcatcatcgccgactgcggcaagatcgaggtcgagaagcccttcgccatcgccaaggagtga

SEQ ID NO: 1636 - RNA, 1044 nt, synthetic construct
  misc_feature 1..1044: note = AAD10634 variant
  source 1..1044: mol_type = other RNA
atgccccgcggccagaagtccaagctccgcgcccgcgagaagcgccgcaaggcccgcgaggagacccagggcctcaaggtcgcccacgccaccgccgccgagaaggaggagtgcccctcctcctcccccgtcctcggcgacacccccacctcctcccccgccgccggcatcccccagaagccccagggcgccccccccaccaccaccgccgccgccgccgtctcctgcaccgagtccgacgagggcgccaagtgccagggcgaggagaacgcctccttctcccaggccaccacctccaccgagtcctccgtcaaggaccccgtcgcctgggaggccggcatgctcatgcacttcatcctccgcaagtacaagatgcgcgagcccatcatgaaggccgacatgctcaaggtcgtcgacgagaagtacaaggaccacttcaccgagatcctcaacggcgcctcccgccgcctcgagctcgtcttcggcctcgacctcaaggaggacaacccctccggccacacctacaccctcgtctccaagctcaacctcaccaacgacggcaacctctccaacgactgggacttcccccgcaacggcctcctcatgcccctcctcggcgtcatcttcctcaagggcaactccgccaccgaggaggagatctggaagttcatgaacgtcctcggcgcctacgacggcgaggagcacctcatctacggcgagccccgcaagttcatcacccaggacctcgtccaggagaagtacctcaagtacgagcaggtccccaactccgaccccccccgctaccagttcctctggggcccccgcgcctacgccgagaccaccaagatgaaggtcctcgagttcctcgccaagatgaacggcgccaccccccgcgacttcccctcccactacgaggaggccctccgcgacgaggaggagcgcgcccaggtccgctcctccgtccgcgcccgccgccgcaccaccgccaccaccttccgcgcccgctcccgcgcccccttctcccgctcctcccaccccatgtga

SEQ ID NO: 1637 - RNA, 2436 nt, synthetic construct
  misc_feature 1..2436: note = BAF91373 variant
  source 1..2436: mol_type = other RNA
atggagtcccagggcgtcccccccggcccctaccgcgccaccaagctctggaacgaggtcaccacctccttccgcgccggcatgcccctccgcaagcaccgccagcacttcaagaagtacggcaactgcttcaccgccggcgaggccgtcgactggctctacgacctcctccgcaacaactccaacttcggccccgaggtcacccgccagcagaccatccagctcctccgcaagttcctcaagaaccacgtcatcgaggacatcaagggccgctggggctccgagaacgtcgacgacaacaaccagctcttccgcttccccgccacctcccccctcaagaccctcccccgccgctaccccgagctccgcaagaacaacatcgagaacttctccaaggacaaggactccatcttcaagctccgcaacctctcccgccgcacccccaagcgccacggcctccacctctcccaggagaacggcgagaagatcaagcacgagatcatcaacgaggaccaggagaacgccatcgacaaccgcgagctctcccaggaggacgtcgaggaggtctggcgctacgtcatcctcatctacctccagaccatcctcggcgtcccctccctcgaggaggtcatcaaccccaagcaggtcatcccccagtacatcatgtacaacatggccaacacctccaagcgcggcgtcgtcatcctccagaacaagtccgacgacctcccccactgggtcctctccgccatgaagtgcctcgccaactggccccgctccaacgacatgaacaaccccacctacgtcggcttcgagcgcgacgtcttccgcaccatcgccgactacttcctcgacctccccgagcccctcctcaccttcgagtactacgagctcttcgtcaacatcctcgtcgtctgcggctacatcaccgtctccgaccgctcctccggcatccacaagatccaggacgacccccagtcctccaagttcctccacctcaacaacctcaactccttcaagtccaccgagtgcctcctcctctccctcctccaccgcgagaagaacaaggaggagtccgactccaccgagcgcctccagatctccaaccccggcttccaggagcgctgcgccaagaagatgcagctcgtcaacctccgcaaccgccgcgtctccgccaacgacatcatgggcggctcctgccacaacctcatcggcctctccaacatgcacgacctctcctccaactccaagccccgctgctgctccctcgagggcatcgtcgacgtccccggcaactcctccaaggaggcctcctccgtcttccaccagtccttccccaacatcgagggccagaacaacaagctcttcctcgagtccaagcccaagcaggagttcctcctcaacctccactccgaggagaacatccagaagcccttctccgccggcttcaagcgcacctccaccctcaccgtccaggaccaggaggagctctgcaacggcaagtgcaagtccaagcagctctgccgctcccagtccctcctcctccgctcctccacccgccgcaactcctacatcaacacccccgtcgccgagatcatcatgaagcccaacgtcggccagggctccacctccgtccagaccgccatggagtccgagctcggcgagtcctccgccaccatcaacaagcgcctctgcaagtccaccatcgagctctccgagaactccctcctccccgcctcctccatgctcaccggcacccagtccctcctccagccccacctcgagcgcgtcgccatcgacgccctccagctctgctgcctcctcctccccccccccaaccgccgcaagctccagctcctcatgcgcatgatctcccgcatgtcccagaacgtcgacatgcccaagctccacgacgccatgggcacccgctccctcatgatccacaccttctcccgctgcgtcctctgctgcgccgaggaggtcgacctcgacgagctcctcgccggccgcctcgtctccttcctcatggaccaccaccaggagatcctccaggtcccctcctacctccagaccgccgtcgagaagcacctcgactacctcaagaagggccacatcgagaaccccggcgacggcctcttcgcccccctccccacctactcctactgcaagcagatctccgcccaggagttcgacgagcagaaggtctccacctcccaggccgccatcgccgagctcctcgagaacatcatcaagaaccgctccctccccctcaaggagaagcgcaagaagctcaagcagttccagaaggagtaccccctcatctaccagaagcgcttccccaccaccgagtccgaggccgccctcttcggcgacaagcccaccatcaagcagcccatgctcatcctccgcaagcccaagttccgctccctccgctga

SEQ ID NO: 1638 - RNA, 297 nt, synthetic construct
  misc_feature 1..297: note = AAA46940 variant
  source 1..297: mol_type = other RNA
atgcacggcgacacccccaccctccacgagtacatgctcgacctccagcccgagaccaccgacctctactgctacgagcagctcaacgactcctccgaggaggaggacgagatcgacggccccgccggccaggccgagcccgaccgcgcccactacaacatcgtcaccttctgctgcaagtgcgactccaccctccgcctctgcgtccagtccacccacgtcgacatccgcaccctcgaggacctcctcatgggcaccctcggcatcgtctgccccatctgctcccagaagccctga

SEQ ID NO: 1639 - RNA, 318 nt, synthetic construct
  misc_feature 1..318: note = AAA46947 variant
  source 1..318: mol_type = other RNA
atgcacggccccaaggccaccctccaggacatcgtcctccacctcgagccccagaacgagatccccgtcgacctcctctgccacgagcagctctccgactccgaggaggagaacgacgagatcgacggcgtcaaccaccagcacctccccgcccgccgcgccgagccccagcgccacaccatgctctgcatgtgctgcaagtgcgaggcccgcatcaagctcgtcgtcgagtcctccgccgacgacctccgcgccttccagcagctcttcctcaacaccctctccttcgtctgcccctggtgcgcctcccagcagtga

SEQ ID NO: 1640 - RNA, 297 nt, synthetic construct
  misc_feature 1..297: note = AAA46951 variant
  source 1..297: mol_type = other RNA
atgcgcggcgagacccccaccctccaggactacgtcctcgacctccagcccgaggccaccgacctccactgctacgagcagctccccgactcctccgacgaggaggacgtcatcgactcccccgccggccaggccgagcccgacacctccaactacaacatcgtcaccttctgctgccagtgcaagtccaccctccgcctctgcgtccagtccacccaggtcgacatccgcatcctccaggagctcctcatgggctccttcggcatcgtctgccccaactgctccacccgcctctga

SEQ ID NO: 1641 - RNA, 294 nt, synthetic construct
  misc_feature 1..294: note = AAA46959 variant
  source 1..294: mol_type = other RNA
atgcgcggccacaagcccaccctcaaggagtacgtcctcgacctctaccccgagcccaccgacctctactgctacgagcagctctccgactcctccgacgaggacgagggcctcgaccgccccgacggccaggcccagcccgccaccgccgactactacatcgtcacctgctgccacacctgcaacaccaccgtccgcctctgcgtcaactccaccgcctccgacctccgcaccatccagcagctcctcatgggcaccgtcaacatcgtctgccccacctgcgcccagcagtga

SEQ ID NO: 1642 - RNA, 300 nt, synthetic construct
  misc_feature 1..300: note = AAA46967 variant
  source 1..300: mol_type = other RNA
atgcacggcgagatcaccaccctccaggactacgtcctcgacctcgagcccgaggccaccgacctctactgctacgagcagctctgcgactcctccgaggaggaggaggacaccatcgacggccccgccggccaggccaagcccgacacctccaactacaacatcgtcacctcctgctgcaagtgcgaggccaccctccgcctctgcgtccagtccacccacatcgacatccgcaagctcgaggacctcctcatgggcaccttcggcatcgtctgccccggctgctcccagcgcgcctga

SEQ ID NO: 1643 - RNA, 330 nt, synthetic construct
  misc_feature 1..330: note = AAA47051 variant
  source 1..330: mol_type = other RNA
atgcgcggccccaagcccaccctccaggagatcgtcctcgacctctgcccctacaacgagatccagcccgtcgacctcgtctgccacgagcagctcggcgagtccgaggacgagatcgacgagcccgaccacgccgtcaaccaccagcaccagctcctcgcccgccgcgacgagccccagcgccacaccatccagtgctcctgctgcaagtgcaacaacaccctccagctcgtcgtcgaggcctcccgcgacaccctccgccagctccagcagctcttcatggactccctcggcttcgtctgcccctggtgcgccaccgccaaccagtga

SEQ ID NO: 1644 - RNA, 321 nt, synthetic construct
  misc_feature 1..321: note = CAA52574 variant
  source 1..321: mol_type = other RNA
atgcacggcccccgcgagaccctccaggagatcgtcctccacctcgagccccagaacgagctcgaccccgtcgacctcctctgctacgagcagctctccgagtccgaggaggagaacgacgaggccgacggcgtctcccacgcccagctccccgcccgccgcgccgagccccagcgccacaagatcctctgcgtctgctgcaagtgcgacggccgcatcgagctcaccgtcgagtcctccgccgaggacctccgcaccctccagcagctcttcctctccaccctctccttcgtctgcccctggtgcgccaccaaccagtga

SEQ ID NO: 1645 - RNA, 306 nt, synthetic construct
  misc_feature 1..306: note = M62877.1 variant
  source 1..306: mol_type = other RNA
atgcgcggcaacgtcccccagctcaaggacgtcgtcctccacctcaccccccagaccgagatcgacctccagtgctacgagcagttcgactcctccgaggaggaggacgaggtcgacaacatgcgcgaccagctccccgagcgccgcgccggccaggccacctgctaccgcatcgaggccccctgctgccgctgctcctccgtcgtccagctcgccgtcgagtcctccggcgacaccctccgcgtcgtccagcagatgctcatgggcgagctctccctcgtctgcccctgctgcgccaacaactga

SEQ ID NO: 1646 - RNA, 300 nt, synthetic construct
  misc_feature 1..300: note = CAA52586 variant
  source 1..300: mol_type = other RNA
atgcgcggcgacaaggccaccatcaaggactacatcctcgacctccagcccgagaccaccgacctccactgctacgagcagctcggcgactcctccgacgaggaggacaccgacggcgtcgaccgccccgacggccaggccgagcaggccacctccaactactacatcgtcacctactgccactcctgcgactccaccctccgcctctgcatccactccaccgccaccgacctccgcaccctccagcagatgctcctcggcaccctccaggtcgtctgccccggctgcgcccgcctctga

SEQ ID NO: 1647 - RNA, 318 nt, synthetic construct
  misc_feature 1..318: note = CAA52597 variant
  source 1..318: mol_type = other RNA
atgcacggcaaggtccccaccctccaggacgtcgtcctcgagctcaccccccagaccgagatcgacctccagtgcaacgagcagctcgactcctccgaggacgaggacgaggacgaggtcgaccacctccaggagcgcccccagcaggcccgccaggccaagcagcacacctgctacctcatccacgtcccctgctgcgagtgcaagttcgtcgtccagctcgacatccagtccaccaaggaggacctccgcgtcgtccagcagctcctcatgggcgccctcaccgtcacctgccccctctgcgcctcctccaactga

SEQ ID NO: 1648 - RNA, 297 nt, synthetic construct
  misc_feature 1..297: note = AAF13691 variant
  source 1..297: mol_type = other RNA
atgcgcggcaacaaccccaccctccgcgagtacatcctcgacctccaccccgagcccaccgacctcttctgctacgagcagctctgcgactcctccgacgaggacgagatcggcctcgaccgccccgacggccaggcccagcccgccaccgccaactactacatcgtcacctgctgctacacctgcgacaccaccgtccgcctctgcatcaactccaccaccaccgacgtccgcaccctccagcagctcctcatgggcacctgcaccatcgtctgcccctcctgcgcccagcagtga

SEQ ID NO: 1649 - RNA, 324 nt, synthetic construct
  misc_feature 1..324: note = ACL12335 variant
  source 1..324: mol_type = other RNA
atgcacggccccaaggccaccctctgcgacatcgtcctcgacctcgagccccagaactacgaggaggtcgacctcgtctgctacgagcagctccccgactccgactccgagaacgagaaggacgagcccgacggcgtcaaccaccccctcctcctcgcccgccgcgccgagccccagcgccacaacatcgtctgcgtctgctgcaagtgcaacaaccagctccagctcgtcgtcgagacctcccaggacggcctccgcgccctccagcagctcttcatggacaccctctccttcgtctgccccctctgcgccgccaaccagtga

SEQ ID NO: 1650 - RNA, 318 nt, synthetic construct
  misc_feature 1..318: note = AAA79500 variant
  source 1..318: mol_type = other RNA
atgcacggcaaggtccccaccctccaggaggtcatcctcgagctcgccccccagaccgagatcgacctccagtgcaacgagcagctcgactcctccgaggacgaggacgaggacgagatcgaccacctcctcgagcgcccccagcaggcccgccaggccgagcagcacaagtgctacctcatccacgtcccctgctgcaagtgcgagctcgtcgtccagctcgacatccagtccaccaaggaggagctccgcgtcgtccagcagctcctcatgggcgccctcaccgtcacctgccccctctgcgcctcctccaagtga

SEQ ID NO: 1651 - RNA, 1392 nt, synthetic construct
  misc_feature 1..1392: note = AAF80488 variant
  source 1..1392: mol_type = other RNA
atgggcaaggagaagacccacatcaacatcgtcgtcatcggccacgtcgactccggcaagtccaccaccaccggccacctcatctacaagtgcggcggcatcgacaagcgcaccatcgagaagttcgagaaggaggccgccgagatgggcaagggctccttcaagtacgcctgggtcctcgacaagctcaaggccgagcgcgagcgcggcatcaccatcgacatctccctctggaagttcgagaccaccaagtactacatcaccatcatcgacgcccccggccaccgcgacttcatcaagaacatgatcaccggcacctcccaggccgactgcgccgtcctcatcgtcgccgccggcgtcggcgagttcgaggccggcatctccaagaacggccagacccgcgagcacgccctcctcgcctacaccctcggcgtcaagcagctcatcgtcggcgtcaacaagatggactccaccgagcccgcctactccgagaagcgctacgacgagatcgtcaaggaggtctccgcctacatcaagaagatcggctacaaccccgccaccgtccccttcgtccccatctccggctggcacggcgacaacatgctcgagccctcccccaacatgccctggttcaagggctggaaggtcgagcgcaaggagggcaacgcctccggcgtctccctcctcgaggccctcgacaccatcctcccccccacccgccccaccgacaagcccctccgcctccccctccaggacgtctacaagatcggcggcatcggcaccgtccccgtcggccgcgtcgagaccggcatcctccgccccggcatggtcgtcaccttcgcccccgtcaacatcaccaccgaggtcaagtccgtcgagatgcaccacgaggccctctccgaggccctccccggcgacaacgtcggcttcaacgtcaagaacgtctccgtcaaggacatccgccgcggcaacgtctgcggcgactccaagtccgaccccccccaggaggccgcccagttcacctcccaggtcatcatcctcaaccaccccggccagatctccgccggctactcccccgtcatcgactgccacaccgcccacatcgcctgcaagttcgccgagctcaaggagaagatcgaccgccgctccggcaagaagctcgaggacaaccccaagtccctcaagtccggcgacgccgccatcgtcgagatggtccccggcaagcccatgtgcgtcgagtccttctcccagtacccccccctcggccgcttcgccgtccgcgacatgcgccagaccgtcgccgtcggcgtcatcaagaacgtcgagaagaagtccggcggcgccggcaaggtcaccaagtccgcccagaaggcccagaaggccggcaagtga

SEQ ID NO: 1652 - RNA, 2919 nt, synthetic construct
  misc_feature 1..2919: note = EAW51573 variant
  source 1..2919: mol_type = other RNA
atggacaccgacctctacgacgagttcggcaactacatcggccccgagctcgactccgacgaggacgacgacgagctcggccgcgagaccaaggacctcgacgagatggacgacgacgacgacgacgacgacgtcggcgaccacgacgacgaccaccccggcatggaggtcgtcctccacgaggacaagaagtactaccccaccgccgaggaggtctacggccccgaggtcgagaccatcgtccaggaggaggacacccagcccctcaccgagcccatcatcaagcccgtcaagaccaagaagttcaccctcatggagcagaccctccccgtcaccgtctacgagatggacttcctcgccgacctcatggacaactccgagctcatccgcaacgtcaccctctgcggccacctccaccacggcaagacctgcttcgtcgactgcctcatcgagcagacccaccccgagatccgcaagcgctacgaccaggacctctgctacaccgacatcctcttcaccgagcaggagcgcggcgtcggcatcaagtccacccccgtcaccgtcgtcctccccgacaccaagggcaagtcctacctcttcaacatcatggacacccccggccacgtcaacttctccgacgaggtcaccgccggcctccgcatctccgacggcgtcgtcctcttcatcgacgccgccgagggcgtcatgctcaacaccgagcgcctcatcaagcacgccgtccaggagcgcctcgccgtcaccgtctgcatcaacaagatcgaccgcctcatcctcgagctcaagctcccccccaccgacgcctactacaagctccgccacatcgtcgacgaggtcaacggcctcatctccatgtactccaccgacgagaacctcatcctctcccccctcctcggcaacgtctgcttctcctcctcccagtactccatctgcttcaccctcggctccttcgccaagatctacgccgacaccttcggcgacatcaactaccaggagttcgccaagcgcctctggggcgacatctacttcaaccccaagacccgcaagttcaccaagaaggcccccacctcctcctcccagcgctccttcgtcgagttcatcctcgagcccctctacaagatcctcgcccaggtcgtcggcgacgtcgacacctccctcccccgcaccctcgacgagctcggcatccacctcaccaaggaggagctcaagctcaacatccgccccctcctccgcctcgtctgcaagaagttcttcggcgagttcaccggcttcgtcgacatgtgcgtccagcacatcccctcccccaaggtcggcgccaagcccaagatcgagcacacctacaccggcggcgtcgactccgacctcggcgaggccatgtccgactgcgaccccgacggccccctcatgtgccacaccaccaagatgtactccaccgacgacggcgtccagttccacgccttcggccgcgtcctctccggcaccatccacgccggccagcccgtcaaggtcctcggcgagaactacaccctcgaggacgaggaggactcccagatctgcaccgtcggccgcctctggatctccgtcgcccgctaccacatcgaggtcaaccgcgtccccgccggcaactgggtcctcatcgagggcgtcgaccagcccatcgtcaagaccgccaccatcaccgagccccgcggcaacgaggaggcccagatcttccgccccctcaagttcaacaccacctccgtcatcaagatcgccgtcgagcccgtcaacccctccgagctccccaagatgctcgacggcctccgcaaggtcaacaagtcctacccctccctcaccaccaaggtcgaggagtccggcgagcacgtcatcctcggcaccggcgagctctacctcgactgcgtcatgcacgacctccgcaagatgtactccgagatcgacatcaaggtcgccgaccccgtcgtcaccttctgcgagaccgtcgtcgagacctcctccctcaagtgcttcgccgagacccccaacaagaagaacaagatcaccatgatcgccgagcccctcgagaagggcctcgccgaggacatcgagaacgaggtcgtccagatcacctggaaccgcaagaagctcggcgagttcttccagaccaagtacgactgggacctcctcgccgcccgctccatctgggccttcggccccgacgccaccggccccaacatcctcgtcgacgacaccctcccctccgaggtcgacaaggccctcctcggctccgtcaaggactccatcgtccagggcttccagtggggcacccgcgagggccccctctgcgacgagctcatccgcaacgtcaagttcaagatcctcgacgccgtcgtcgcccaggagcccctccaccgcggcggcggccagatcatccccaccgcccgccgcgtcgtctactccgccttcctcatggccaccccccgcctcatggagccctactacttcgtcgaggtccaggcccccgccgactgcgtctccgccgtctacaccgtcctcgcccgccgccgcggccacgtcacccaggacgcccccatccccggctcccccctctacaccatcaaggccttcatccccgccatcgactccttcggcttcgagaccgacctccgcacccacacccagggccaggccttctccctctccgtcttccaccactggcagatcgtccccggcgaccccctcgacaagtccatcgtcatccgccccctcgagccccagcccgccccccacctcgcccgcgagttcatgatcaagacccgccgccgcaagggcctctccgaggacgtctccatctccaagttcttcgacgaccccatgctcctcgagctcgccaagcaggacgtcgtcctcaactaccccatgtga

SEQ ID NO: 1653 - RNA, 1971 nt, synthetic construct
  misc_feature 1..1971: note = EAW50963 variant
  source 1..1971: mol_type = other RNA
atgcgcccctccggcaccgccggcgccgccctcctcgccctcctcgccgccctctgccccgcctcccgcgccctcgaggagaagaaggtctgccagggcacctccaacaagctcacccagctcggcaccttcgaggaccacttcctctccctccagcgcatgttcaacaactgcgaggtcgtcctcggcaacctcgagatcacctacgtccagcgcaactacgacctctccttcctcaagaccatccaggaggtcgccggctacgtcctcatcgccctcaacaccgtcgagcgcatccccctcgagaacctccagatcatccgcggcaacatgtactacgagaactcctacgccctcgccgtcctctccaactacgacgccaacaagaccggcctcaaggagctccccatgcgcaacctccaggagatcctccacggcgccgtccgcttctccaacaaccccgccctctgcaacgtcgagtccatccagtggcgcgacatcgtctcctccgacttcctctccaacatgtccatggacttccagaaccacctcggctcctgccagaagtgcgacccctcctgccccaacggctcctgctggggcgccggcgaggagaactgccagaagctcaccaagatcatctgcgcccagcagtgctccggccgctgccgcggcaagtccccctccgactgctgccacaaccagtgcgccgccggctgcaccggcccccgcgagtccgactgcctcgtctgccgcaagttccgcgacgaggccacctgcaaggacacctgcccccccctcatgctctacaaccccaccacctaccagatggacgtcaaccccgagggcaagtactccttcggcgccacctgcgtcaagaagtgcccccgcaactacgtcgtcaccgaccacggctcctgcgtccgcgcctgcggcgccgactcctacgagatggaggaggacggcgtccgcaagtgcaagaagtgcgagggcccctgccgcaaggtctgcaacggcatcggcatcggcgagttcaaggactccctctccatcaacgccaccaacatcaagcacttcaagaactgcacctccatctccggcgacctccacatcctccccgtcgccttccgcggcgactccttcacccacaccccccccctcgacccccaggagctcgacatcctcaagaccgtcaaggagatcaccggcttcctcctcatccaggcctggcccgagaaccgcaccgacctccacgccttcgagaacctcgagatcatccgcggccgcaccaagcagcacggccagttctccctcgccgtcgtctccctcaacatcacctccctcggcctccgctccctcaaggagatctccgacggcgacgtcatcatctccggcaacaagaacctctgctacgccaacaccatcaactggaagaagctcttcggcacctccggccagaagaccaagatcatctccaaccgcggcgagaactcctgcaaggccaccggccaggtctgccacgccctctgctcccccgagggctgctggggccccgagccccgcgactgcgtctcctgccgcaacgtctcccgcggccgcgagtgcgtcgacaagtgcaacctcctcgagggcgagccccgcgagttcgtcgagaactccgagtgcatccagtgccaccccgagtgcctcccccaggccatgaacatcacctgcaccggccgcggccccgacaactgcatccagtgcgcccactacatcgacggcccccactgcgtcaagacctgccccgccggcgtcatgggcgagaacaacaccctcgtctggaagtacgccgacgccggccacgtctgccacctctgccaccccaactgcacctacggctgcaccggccccggcctcgagggctgccccaccaacggctcctacatcgtctcccacttcccccgctccttctacaagatgtccgtccac

SEQ ID NO: 1654 - RNA, 3411 nt, synthetic construct
  misc_feature 1..3411: note = ADL28125 variant
  source 1..3411: mol_type = other RNA
atgcgcccctccggcaccgccggcgccgccctcctcgccctcctcgccgccctctgccccgcctcccgcgccctcgaggagaagaaggtctgccagggcacctccaacaagctcacccagctcggcaccttcgaggaccacttcctctccctccagcgcatgttcaacaactgcgaggtcgtcctcggcaacctcgagatcacctacgtccagcgcaactacgacctctccttcctcaagaccatccaggaggtcgccggctacgtcctcatcgccctcaacaccgtcgagcgcatccccctcgagaacctccagatcatccgcggcaacatgtactacgagaactcctacgccctcgccgtcctctccaactacgacgccaacaagaccggcctcaaggagctccccatgcgcaacctccaggagatcctccacggcgccgtccgcttctccaacaaccccgccctctgcaacgtcgagtccatccagtggcgcgacatcgtctcctccgacttcctctccaacatgtccatggacttccagaaccacctcggctcctgccagaagtgcgacccctcctgccccaacggctcctgctggggcgccggcgaggagaactgccagaagctcaccaagatcatctgcgcccagcagtgctccggccgctgccgcggcaagtccccctccgactgctgccacaaccagtgcgccgccggctgcaccggcccccgcgagtccgactgcctcgtctgccgcaagttccgcgacgaggccacctgcaaggacacctgcccccccctcatgctctacaaccccaccacctaccagatggacgtcaaccccgagggcaagtactccttcggcgccacctgcgtcaagaagtgcccccgcaactacgtcgtcaccgaccacggctcctgcgtccgcgcctgcggcgccgactcctacgagatggaggaggacggcgtccgcaagtgcaagaagtgcgagggcccctgccgcaaggtctgcaacggcatcggcatcggcgagttcaaggactccctctccatcaacgccaccaacatcaagcacttcaagaactgcacctccatctccggcgacctccacatcctccccgtcgccttccgcggcgactccttcacccacaccccccccctcgacccccaggagctcgacatcctcaagaccgtcaaggagatcaccggcttcctcctcatccaggcctggcccgagaaccgcaccgacctccacgccttcgagaacctcgagatcatccgcggccgcaccaagcagcacggccagttctccctcgccgtcgtctccctcaacatcacctccctcggcctccgctccctcaaggagatctccgacggcgacgtcatcatctccggcaacaagaacctctgctacgccaacaccatcaactggaagaagctcttcggcacctccggccagaagaccaagatcatctccaaccgcggcgagaactcctgcaaggccaccggccaggtctgccacgccctctgctcccccgagggctgctggggccccgagccccgcgactgcgtctcctgccgcaacgtctcccgcggccgcgagtgcgtcgacaagtgcaacctcctcgagggcgagccccgcgagttcgtcgagaactccgagtgcatccagtgccaccccgagtgcctcccccaggccatgaacatcacctgcaccggccgcggccccgacaactgcatccagtgcgcccactacatcgacggcccccactgcgtcaagacctgccccgccggcgtcatgggcgagaacaacaccctcgtctggaagtacgccgacgccggccacgtctgccacctctgccaccccaactgcacctacggctgcaccggccccggcctcgagggctgccccaccaacggccccaagatcccctccatcgccaccggcatggtcggcgccctcctcctcctcctcgtcgtcgccctcggcatcggcctcttcatgcgccgccgccacatcgtccgcaagcgcaccctccgccgcctcctccaggagcgcgagctcgtcgagcccctcaccccctccggcgaggcccccaaccaggccctcctccgcatcctcaaggagaccgagttcaagaagatcaaggtcctcggctccggcgccttcggcaccgtctacaagggcctctggatccccgagggcgagaaggtcaagatccccgtcgccatcaaggagctccgcgaggccacctcccccaaggccaacaaggagatcctcgacgaggcctacgtcatggcctccgtcgacaacccccacgtctgccgcctcctcggcatctgcctcacctccaccgtccagctcatcacccagctcatgcccttcggctgcctcctcgactacgtccgcgagcacaaggacaacatcggctcccagtacctcctcaactggtgcgtccagatcgccaagggcatgaactacctcgaggaccgccgcctcgtccaccgcgacctcgccgcccgcaacgtcctcgtcaagaccccccagcacgtcaagatcaccgacttcggcctcgccaagctcctcggcgccgaggagaaggagtaccacgccgagggcggcaaggtccccatcaagtggatggccctcgagtccatcctccaccgcatctacacccaccagtccgacgtctggtcctacggcgtcaccgtctgggagctcatgaccttcggctccaagccctacgacggcatccccgcctccgagatctcctccatcctcgagaagggcgagcgcctcccccagccccccatctgcaccatcgacgtctacatgatcatggtcaagtgctggatgatcgacgccgactcccgccccaagttccgcgagctcatcatcgagttctccaagatggcccgcgacccccagcgctacctcgtcatccagggcgacgagcgcatgcacctcccctcccccaccgactccaacttctaccgcgccctcatggacgaggaggacatggacgacgtcgtcgacgccgacgagtacctcatcccccagcagggcttcttctcctccccctccacctcccgcacccccctcctctcctccctctccgccacctccaacaactccaccgtcgcctgcatcgaccgcaacggcctccagtcctgccccatcaaggaggactccttcctccagcgctactcctccgaccccaccggcgccctcaccgaggactccatcgacgacaccttcctccccgtccccggcgagtggctcgtctggaagcagtcctgctcctccacctcctccacccactccgccgccgcctccctccagtgcccctcccaggtcctcccccccgcctcccccgagggcgagaccgtcgccgacctccagacccagtga

SEQ ID NO: 1655 - RNA, 150 nt, synthetic construct
  misc_feature 1..150: note = CCO13722 variant
  source 1..150: mol_type = other RNA
atgtgcgccacctgcgccatccagaccgcccccaccggccccaacaagtcctccctctccgacttctccctccccctcaagctccacttcctctccaccatctccatctcccccttcgcctccaacaaggtcctcaccctcttcatctga

SEQ ID NO: 1656 - RNA, 1218 nt, synthetic construct
  misc_feature 1..1218: note = CCDS47587.1 variant
  source 1..1218: mol_type = other RNA
atgcgcccctccggcaccgccggcgccgccctcctcgccctcctcgccgccctctgccccgcctcccgcgccctcgaggagaagaaggtctgccagggcacctccaacaagctcacccagctcggcaccttcgaggaccacttcctctccctccagcgcatgttcaacaactgcgaggtcgtcctcggcaacctcgagatcacctacgtccagcgcaactacgacctctccttcctcaagaccatccaggaggtcgccggctacgtcctcatcgccctcaacaccgtcgagcgcatccccctcgagaacctccagatcatccgcggcaacatgtactacgagaactcctacgccctcgccgtcctctccaactacgacgccaacaagaccggcctcaaggagctccccatgcgcaacctccaggagatcctccacggcgccgtccgcttctccaacaaccccgccctctgcaacgtcgagtccatccagtggcgcgacatcgtctcctccgacttcctctccaacatgtccatggacttccagaaccacctcggctcctgccagaagtgcgacccctcctgccccaacggctcctgctggggcgccggcgaggagaactgccagaagctcaccaagatcatctgcgcccagcagtgctccggccgctgccgcggcaagtccccctccgactgctgccacaaccagtgcgccgccggctgcaccggcccccgcgagtccgactgcctcgtctgccgcaagttccgcgacgaggccacctgcaaggacacctgcccccccctcatgctctacaaccccaccacctaccagatggacgtcaaccccgagggcaagtactccttcggcgccacctgcgtcaagaagtgcccccgcaactacgtcgtcaccgaccacggctcctgcgtccgcgcctgcggcgccgactcctacgagatggaggaggacggcgtccgcaagtgcaagaagtgcgagggcccctgccgcaaggtctgcaacggcatcggcatcggcgagttcaaggactccctctccatcaacgccaccaacatcaagcacttcaagaactgcacctccatctccggcgacctccacatcctccccgtcgccttccgcggcgactccttcacccacaccccccccctcgacccccaggagctcgacatcctcaagaccgtcaaggagatcaccggcctctcctga

SEQ ID NO: 1657 - RNA, 3633 nt, synthetic construct
  misc_feature 1..3633: note = AAG35789 variant
  source 1..3633: mol_type = other RNA
atgcgcccctccggcaccgccggcgccgccctcctcgccctcctcgccgccctctgccccgcctcccgcgccctcgaggagaagaaggtctgccagggcacctccaacaagctcacccagctcggcaccttcgaggaccacttcctctccctccagcgcatgttcaacaactgcgaggtcgtcctcggcaacctcgagatcacctacgtccagcgcaactacgacctctccttcctcaagaccatccaggaggtcgccggctacgtcctcatcgccctcaacaccgtcgagcgcatccccctcgagaacctccagatcatccgcggcaacatgtactacgagaactcctacgccctcgccgtcctctccaactacgacgccaacaagaccggcctcaaggagctccccatgcgcaacctccaggagatcctccacggcgccgtccgcttctccaacaaccccgccctctgcaacgtcgagtccatccagtggcgcgacatcgtctcctccgacttcctctccaacatgtccatggacttccagaaccacctcggctcctgccagaagtgcgacccctcctgccccaacggctcctgctggggcgccggcgaggagaactgccagaagctcaccaagatcatctgcgcccagcagtgctccggccgctgccgcggcaagtccccctccgactgctgccacaaccagtgcgccgccggctgcaccggcccccgcgagtccgactgcctcgtctgccgcaagttccgcgacgaggccacctgcaaggacacctgcccccccctcatgctctacaaccccaccacctaccagatggacgtcaaccccgagggcaagtactccttcggcgccacctgcgtcaagaagtgcccccgcaactacgtcgtcaccgaccacggctcctgcgtccgcgcctgcggcgccgactcctacgagatggaggaggacggcgtccgcaagtgcaagaagtgcgagggcccctgccgcaaggtctgcaacggcatcggcatcggcgagttcaaggactccctctccatcaacgccaccaacatcaagcacttcaagaactgcacctccatctccggcgacctccacatcctccccgtcgccttccgcggcgactccttcacccacaccccccccctcgacccccaggagctcgacatcctcaagaccgtcaaggagatcaccggcttcctcctcatccaggcctggcccgagaaccgcaccgacctccacgccttcgagaacctcgagatcatccgcggccgcaccaagcagcacggccagttctccctcgccgtcgtctccctcaacatcacctccctcggcctccgctccctcaaggagatctccgacggcgacgtcatcatctccggcaacaagaacctctgctacgccaacaccatcaactggaagaagctcttcggcacctccggccagaagaccaagatcatctccaaccgcggcgagaactcctgcaaggccaccggccaggtctgccacgccctctgctcccccgagggctgctggggccccgagccccgcgactgcgtctcctgccgcaacgtctcccgcggccgcgagtgcgtcgacaagtgcaacctcctcgagggcgagccccgcgagttcgtcgagaactccgagtgcatccagtgccaccccgagtgcctcccccaggccatgaacatcacctgcaccggccgcggccccgacaactgcatccagtgcgcccactacatcgacggcccccactgcgtcaagacctgccccgccggcgtcatgggcgagaacaacaccctcgtctggaagtacgccgacgccggccacgtctgccacctctgccaccccaactgcacctacggctgcaccggccccggcctcgagggctgccccaccaacggccccaagatcccctccatcgccaccggcatggtcggcgccctcctcctcctcctcgtcgtcgccctcggcatcggcctcttcatgcgccgccgccacatcgtccgcaagcgcaccctccgccgcctcctccaggagcgcgagctcgtcgagcccctcaccccctccggcgaggcccccaaccaggccctcctccgcatcctcaaggagaccgagttcaagaagatcaaggtcctcggctccggcgccttcggcaccgtctacaagggcctctggatccccgagggcgagaaggtcaagatccccgtcgccatcaaggagctccgcgaggccacctcccccaaggccaacaaggagatcctcgacgaggcctacgtcatggcctccgtcgacaacccccacgtctgccgcctcctcggcatctgcctcacctccaccgtccagctcatcacccagctcatgcccttcggctgcctcctcgactacgtccgcgagcacaaggacaacatcggctcccagtacctcctcaactggtgcgtccagatcgccaagggcatgaactacctcgaggaccgccgcctcgtccaccgcgacctcgccgcccgcaacgtcctcgtcaagaccccccagcacgtcaagatcaccgacttcggcctcgccaagctcctcggcgccgaggagaaggagtaccacgccgagggcggcaaggtccccatcaagtggatggccctcgagtccatcctccaccgcatctacacccaccagtccgacgtctggtcctacggcgtcaccgtctgggagctcatgaccttcggctccaagccctacgacggcatccccgcctccgagatctcctccatcctcgagaagggcgagcgcctcccccagccccccatctgcaccatcgacgtctacatgatcatggtcaagtgctggatgatcgacgccgactcccgccccaagttccgcgagctcatcatcgagttctccaagatggcccgcgacccccagcgctacctcgtcatccagggcgacgagcgcatgcacctcccctcccccaccgactccaacttctaccgcgccctcatggacgaggaggacatggacgacgtcgtcgacgccgacgagtacctcatcccccagcagggcttcttctcctccccctccacctcccgcacccccctcctctcctccctctccgccacctccaacaactccaccgtcgcctgcatcgaccgcaacggcctccagtcctgccccatcaaggaggactccttcctccagcgctactcctccgaccccaccggcgccctcaccgaggactccatcgacgacaccttcctccccgtccccgagtacatcaaccagtccgtccccaagcgccccgccggctccgtccagaaccccgtctaccacaaccagcccctcaaccccgccccctcccgcgacccccactaccaggacccccactccaccgccgtcggcaaccccgagtacctcaacaccgtccagcccacctgcgtcaactccaccttcgactcccccgcccactgggcccagaagggctcccaccagatctccctcgacaaccccgactaccagcaggacttcttccccaaggaggccaagcccaacggcatcttcaagggctccaccgccgagaacgccgagtacctccgcgtcgccccccagtcctccgagttcatcggcgcctga

SEQ ID NO: 1658 - RNA, 1395 nt, synthetic construct
  misc_feature 1..1395: note = AAI18666 variant
  source 1..1395: mol_type = other RNA
atggccgccgaggacgtcatcatctgcgcccagcagtgctccggccgctgccgcggcaagtccccctccgactgctgccacaaccagtgcgccgccggctgcaccggcccccgcgagtccgactgcctcgtctgccgcaagttccgcgacgaggccacctgcaaggacacctgcccccccctcatgctctacaaccccaccacctaccagatggacgtcaaccccgagggcaagtactccttcggcgccacctgcgtcaagaagtgcccccgcaactacgtcgtcaccgaccacggctcctgcgtccgcgcctgcggcgccgactcctacgagatggaggaggacggcgtccgcaagtgcaagaagtgcgagggcccctgccgcaaggtctgcaacggcatcggcatcggcgagttcaaggactccctctccatcaacgccaccaacatcaagcacttcaagaactgcacctccatctccggcgacctccacatcctccccgtcgccttccgcggcgactccttcacccacaccccccccctcgacccccaggagctcgacatcctcaagaccgtcaaggagatcaccggcttcctcctcatccaggcctggcccgagaaccgcaccgacctccacgccttcgagaacctcgagatcatccgcggccgcaccaagcagcacggccagttctccctcgccgtcgtctccctcaacatcacctccctcggcctccgctccctcaaggagatctccgacggcgacgtcatcatctccggcaacaagaacctctgctacgccaacaccatcaactggaagaagctcttcggcacctccggccagaagaccaagatcatctccaaccgcggcgagaactcctgcaaggccaccggccaggtctgccacgccctctgctcccccgagggctgctggggccccgagccccgcgactgcgtctcctgccgcaacgtctcccgcggccgcgagtgcgtcgacaagtgcaacctcctcgagggcgagccccgcgagttcgtcgagaactccgagtgcatccagtgccaccccgagtgcctcccccaggccatgaacatcacctgcaccggccgcggccccgacaactgcatccagtgcgcccactacatcgacggcccccactgcgtcaagacctgccccgccggcgtcatgggcgagaacaacaccctcgtctggaagtacgccgacgccggccacgtctgccacctctgccaccccaactgcacctacggctgcaccggccccggcctcgagggctgccccaccaacggccccaagatcccctccatcgccaccggcatggtcggcgccctcctcctcctcctcgtcgtcgccctcggcatcggccccctccacggccgctga

SEQ ID NO: 1659 - RNA, 3276 nt, synthetic construct
  misc_feature 1..3276: note = AAH94761 variant
  source 1..3276: mol_type = other RNA
atgcgcccctccggcaccgccggcgccgccctcctcgccctcctcgccgccctctgccccgcctcccgcgccctcgaggagaagaaggtctgccagggcacctccaacaagctcacccagctcggcaccttcgaggaccacttcctctccctccagcgcatgttcaacaactgcgaggtcgtcctcggcaacctcgagatcacctacgtccagcgcaactacgacctctccttcctcaagaccatccaggaggtcgccggctacgtcctcatcgccctcaacaccgtcgagcgcatccccctcgagaacctccagatcatccgcggcaacatgtactacgagaactcctacgccctcgccgtcctctccaactacgacgccaacaagaccggcctcaaggagctccccatgcgcaacctccagggccagaagtgcgacccctcctgccccaacggctcctgctggggcgccggcgaggagaactgccagaagctcaccaagatcatctgcgcccagcagtgctccggccgctgccgcggcaagtccccctccgactgctgccacaaccagtgcgccgccggctgcaccggcccccgcgagtccgactgcctcgtctgccgcaagttccgcgacgaggccacctgcaaggacacctgcccccccctcatgctctacaaccccaccacctaccagatggacgtcaaccccgagggcaagtactccttcggcgccacctgcgtcaagaagtgcccccgcaactacgtcgtcaccgaccacggctcctgcgtccgcgcctgcggcgccgactcctacgagatggaggaggacggcgtccgcaagtgcaagaagtgcgagggcccctgccgcaaggtctgcaacggcatcggcatcggcgagttcaaggactccctctccatcaacgccaccaacatcaagcacttcaagaactgcacctccatctccggcgacctccacatcctccccgtcgccttccgcggcgactccttcacccacaccccccccctcgacccccaggagctcgacatcctcaagaccgtcaaggagatcaccggcttcctcctcatccaggcctggcccgagaaccgcaccgacctccacgccttcgagaacctcgagatcatccgcggccgcaccaagcagcacggccagttctccctcgccgtcgtctccctcaacatcacctccctcggcctccgctccctcaaggagatctccgacggcgacgtcatcatctccggcaacaagaacctctgctacgccaacaccatcaactggaagaagctcttcggcacctccggccagaagaccaagatcatctccaaccgcggcgagaactcctgcaaggccaccggccaggtctgccacgccctctgctcccccgagggctgctggggccccgagccccgcgactgcgtctcctgccgcaacgtctcccgcggccgcgagtgcgtcgacaagtgcaacctcctcgagggcgagccccgcgagttcgtcgagaactccgagtgcatccagtgccaccccgagtgcctcccccaggccatgaacatcacctgcaccggccgcggccccgacaactgcatccagtgcgcccactacatcgacggcccccactgcgtcaagacctgccccgccggcgtcatgggcgagaacaacaccctcgtctggaagtacgccgacgccggccacgtctgccacctctgccaccccaactgcacctacggctgcaccggccccggcctcgagggctgccccaccaacggccccaagatcccctccatcgccaccggcatggtcggcgccctcctcctcctcctcgtcgtcgccctcggcatcggcctcttcatgcgccgccgccacatcgtccgcaagcgcaccctccgccgcctcctccaggagcgcgagctcgtcgagcccctcaccccctccggcgaggcccccaaccaggccctcctccgcatcctcaaggagaccgagttcaagaagatcaaggtcctcggctccggcgccttcggcaccgtctacaagggcctctggatccccgagggcgagaaggtcaagatccccgtcgccatcaaggagctccgcgaggccacctcccccaaggccaacaaggagatcctcgacgaggcctacgtcatggcctccgtcgacaacccccacgtctgccgcctcctcggcatctgcctcacctccaccgtccagctcatcacccagctcatgcccttcggctgcctcctcgactacgtccgcgagcacaaggacaacatcggctcccagtacctcctcaactggtgcgtccagatcgccaagggcatgaactacctcgaggaccgccgcctcgtccaccgcgacctcgccgcccgcaacgtcctcgtcaagaccccccagcacgtcaagatcaccgacttcggcctcgccaagctcctcggcgccgaggagaaggagtaccacgccgagggcggcaaggtccccatcaagtggatggccctcgagtccatcctccaccgcatctacacccaccagtccgacgtctggtcctacggcgtcaccgtctgggagctcatgaccttcggctccaagccctacgacggcatccccgcctccgagatctcctccatcctcgagaagggcgagcgcctcccccagccccccatctgcaccatcgacgtctacatgatcatggtcaagtgctggatgatcgacgccgactcccgccccaagttccgcgagctcatcatcgagttctccaagatggcccgcgacccccagcgctacctcgtcatccagggcgacgagcgcatgcacctcccctcccccaccgactccaacttctaccgcgccctcatggacgaggaggacatggacgacgtcgtcgacgccgacgagtacctcatcccccagcagggcttcttctcctccccctccacctcccgcacccccctcctctcctccctctccgccacctccaacaactccaccgtcgcctgcatcgaccgcaacggcctccagtcctgccccatcaaggaggactccttcctccagcgctactcctccgaccccaccggcgccctcaccgaggactccatcgacgacaccttcctccccgtccccggcgagtggctcgtctggaagcagtcctgctcctccacctcctccacccactccgccgccgcctccctccagtgcccctcccaggtcctcccccccgcctcccccgagggcgagaccgtcgccgacctccagacccagtga

SEQ ID NO: 1660 - RNA, 216 nt, synthetic construct
  misc_feature 1..216: note = CAA34902 variant
  source 1..216: mol_type = other RNA
atgcgcccctccggcaccgccggcgccgccctcctcgccctcctcgccgccctctgccccgcctcccgcgccctcgaggagaagaagggcaagggcgtctcccgccgcctcccccgccgcccccgcatcgccccccgcaccccccagcccgcccagccccgcaccggcgcccccgcccgcgcccgcgcccccgcccgccccttcctcttcccctga

SEQ ID NO: 1661 - RNA, 720 nt, synthetic construct
  misc_feature 1..720: note = AAH10992 variant
  source 1..720: mol_type = other RNA
atgcccctcggccacatcatgcgcctcgacctcgagaagatcgccctcgagtacatcgtcccctgcctccacgaggtcggcttctgctacctcgacaacttcctcggcgaggtcgtcggcgactgcgtcctcgagcgcgtcaagcagctccactgcaccggcgccctccgcgacggccagctcgccggcccccgcgccggcgtctccaagcgccacctccgcggcgaccagatcacctggatcggcggcaacgaggagggctgcgaggccatctccttcctcctctccctcatcgaccgcctcgtcctctactgcggctcccgcctcggcaagtactacgtcaaggagcgctccaaggccatggtcgcctgctaccccggcaacggcaccggctacgtccgccacgtcgacaaccccaacggcgacggccgctgcatcacctgcatctactacctcaacaagaactgggacgccaagctccacggcggcatcctccgcatcttccccgagggcaagtccttcatcgccgacgtcgagcccatcttcgaccgcctcctcttcttctggtccgaccgccgcaacccccacgaggtccagccctcctacgccacccgctacgccatgaccgtctggtacttcgacgccgaggagcgcgccgaggccaagaagaagttccgcaacctcacccgcaagaccgagtccgccctcaccgaggactga

SEQ ID NO: 1662 - RNA, 1566 nt, synthetic construct
  misc_feature 1..1566: note = BAH13456 variant
  source 1..1566: mol_type = other RNA
atggccacctccctccacgagggccccaccaaccagctcgacctcctcatccgcgccgtcgaggcctccgtccactcctccaacgcccactgcaccgacaagaccatcgaggccgccgaggccctcctccacatggagtcccccacctgcctccgcgactcccgctcccccgagttcatccacgccgccatgcgccccgacgtcatcaccgagaccgtcgtcgaggtctccaccgaggagtccgagcccatggacacctcccccatccccacctcccccgactcccacgagcccatgaagaagaagaaggtcggccgcaagcccaagacccagcagtcccccatctccaacggctcccccgagctcggcatcaagaagaagccccgcgagggcaagggcaacaccacctacctctgggagttcctcctcgacctcctccaggacaagaacacctgcccccgctacatcaagtggacccagcgcgagaagggcatcttcaagctcgtcgactccaaggccgtctccaagctctggggcaagcacaagaacaagcccgacatgaactacgagaccatgggccgcgccctccgctactactaccagcgcggcatcctcgccaaggtcgagggccagcgcctcgtctaccagttcaaggacatgcccaagaacatcgtcgtcatcgacgacgacaagtccgagacctgcaacgaggacctcgccggcaccaccgacgagaagtccctcgagcgcgtctccctctccgccgagtccctcctcaaggccgcctcctccgtccgctccggcaagaactcctcccccatcaactgctcccgcgccgagaagggcgtcgcccgcgtcgtcaacatcacctcccccggccacgacgcctcctcccgctcccccaccaccaccgcctccgtctccgccaccgccgccccccgcaccgtccgcgtcgccatgcaggtccccgtcgtcatgacctccctcggccagaagatctccaccgtcgccgtccagtccgtcaacgccggcgcccccctcatcacctccacctcccccaccaccgccacctcccccaaggtcgtcatccagaccatccccaccgtcatgcccgcctccaccgagaacggcgacaagatcaccatgcagcccgccaagatcatcaccatccccgccacccagctcgcccagtgccagctccagaccaagtccaacctcaccggctccggctccatcaacatcgtcggcacccccctcgccgtccgcgccctcacccccgtctccatcgcccacggcacccccgtcatgcgcctctccatgcccacccagcaggcctccggccagacccccccccgcgtcatctccgccgtcatcaagggccccgaggtcaagtccgaggccgtcgccaagaagcaggagcacgacgtcaagaccctccagctcgtcgaggagaagcccgccgacggcaacaagaccgtcacccacgtcgtcgtcgtctccgccccctccgccatcgccctccccgtcaccatgaagaccgagggcctcgtcacctgcgagaagtga

SEQ ID NO: 1663 - RNA, 810 nt, synthetic construct
  misc_feature 1..810: note = BAC67168 variant
  source 1..810: mol_type = other RNA
atggccgccgccctcttcgtcctcctcggcttcgccctcctcggcacccacggcgcctccggcgccgccggcaccgtcttcaccaccgtcgaggacctcggctccaagatcctcctcacctgctccctcaacgactccgccaccgaggtcaccggccaccgctggctcaagggcggcgtcgtcctcaaggaggacgccctccccggccagaagaccgagttcaaggtcgactccgacgaccagtggggcgagtactcctgcgtcttcctccccgagcccatgggcaccgccaacatccagctccacggccccccccgcgtcaaggccgtcaagtcctccgagcacatcaacgagggcgagaccgccatgctcgtctgcaagtccgagtccgtcccccccgtcaccgactgggcctggtacaagatcaccgactccgaggacaaggccctcatgaacggctccgagtcccgcttcttcgtctcctcctcccagggccgctccgagctccacatcgagaacctcaacatggaggccgaccccggccagtaccgctgcaacggcacctcctccaagggctccgaccaggccatcatcaccctccgcgtccgctcccacctcgccgccctctggcccttcctcggcatcgtcgccgaggtcctcgtcctcgtcaccatcatcttcatctacgagaagcgccgcaagcccgaggacgtcctcgacgacgacgacgccggctccgcccccctcaagtcctccggccagcaccagaacgacaagggcaagaacgtccgccagcgcaactcctcctga

SEQ ID NO: 1664 - RNA, 945 nt, synthetic construct
  misc_feature 1..945: note = AAA35723 variant
  source 1..945: mol_type = other RNA
atggcccccccccaggtcctcgccttcggcctcctcctcgccgccgccaccgccaccttcgccgccgcccaggaggagtgcgtctgcgagaactacaagctcgccgtcaactgcttcgtcaacaacaaccgccagtgccagtgcacctccgtcggcgcccagaacaccgtcatctgctccaagctcgccgccaagtgcctcgtcatgaaggccgagatgaacggctccaagctcggccgccgcgccaagcccgagggcgccctccagaacaacgacggcctctacgaccccgactgcgacgagtccggcctcttcaaggccaagcagtgcaacggcacctccatgtgctggtgcgtcaacaccgccggcgtccgccgcaccgacaaggacaccgagatcacctgctccgagcgcgtccgcacctactggatcatcatcgagctcaagcacaaggcccgcgagaagccctacgactccaagtccctccgcaccgccctccagaaggagatcaccacccgctaccagctcgaccccaagttcatcacctccatcctctacgagaacaacgtcatcaccatcgacctcgtccagaactcctcccagaagacccagaacgacgtcgacatcgccgacgtcgcctactacttcgagaaggacgtcaagggcgagtccctcttccactccaagaagatggacctcaccgtcaacggcgagcagctcgacctcgaccccggccagaccctcatctactacgtcgacgagaaggcccccgagttctccatgcagggcctcaaggccggcgtcatcgccgtcatcgtcgtcgtcgtcatcgccgtcgtcgccggcatcgtcgtcctcgtcatctcccgcaagaagcgcatggccaagtacgagaaggccgagatcaaggagatgggcgagatgcaccgcgagctcaacgcctga

SEQ ID NO: 1665 - RNA, 2931 nt, synthetic construct
  misc_feature 1..2931: note = CCDS169.1 variant
  source 1..2931: mol_type = other RNA
atggagctccaggccgcccgcgcctgcttcgccctcctctggggctgcgccctcgccgccgccgccgccgcccagggcaaggaggtcgtcctcctcgacttcgccgccgccggcggcgagctcggctggctcacccacccctacggcaagggctgggacctcatgcagaacatcatgaacgacatgcccatctacatgtactccgtctgcaacgtcatgtccggcgaccaggacaactggctccgcaccaactgggtctaccgcggcgaggccgagcgcatcttcatcgagctcaagttcaccgtccgcgactgcaactccttccccggcggcgcctcctcctgcaaggagaccttcaacctctactacgccgagtccgacctcgactacggcaccaacttccagaagcgcctcttcaccaagatcgacaccatcgcccccgacgagatcaccgtctcctccgacttcgaggcccgccacgtcaagctcaacgtcgaggagcgctccgtcggccccctcacccgcaagggcttctacctcgccttccaggacatcggcgcctgcgtcgccctcctctccgtccgcgtctactacaagaagtgccccgagctcctccagggcctcgcccacttccccgagaccatcgccggctccgacgccccctccctcgccaccgtcgccggcacctgcgtcgaccacgccgtcgtcccccccggcggcgaggagccccgcatgcactgcgccgtcgacggcgagtggctcgtccccatcggccagtgcctctgccaggccggctacgagaaggtcgaggacgcctgccaggcctgctcccccggcttcttcaagttcgaggcctccgagtccccctgcctcgagtgccccgagcacaccctcccctcccccgagggcgccacctcctgcgagtgcgaggagggcttcttccgcgccccccaggaccccgcctccatgccctgcacccgccccccctccgccccccactacctcaccgccgtcggcatgggcgccaaggtcgagctccgctggacccccccccaggactccggcggccgcgaggacatcgtctactccgtcacctgcgagcagtgctggcccgagtccggcgagtgcggcccctgcgaggcctccgtccgctactccgagcccccccacggcctcacccgcacctccgtcaccgtctccgacctcgagccccacatgaactacaccttcaccgtcgaggcccgcaacggcgtctccggcctcgtcacctcccgctccttccgcaccgcctccgtctccatcaaccagaccgagccccccaaggtccgcctcgagggccgctccaccacctccctctccgtctcctggtccatcccccccccccagcagtcccgcgtctggaagtacgaggtcacctaccgcaagaagggcgactccaactcctacaacgtccgccgcaccgagggcttctccgtcaccctcgacgacctcgcccccgacaccacctacctcgtccaggtccaggccctcacccaggagggccagggcgccggctccaaggtccacgagttccagaccctctcccccgagggctccggcaacctcgccgtcatcggcggcgtcgccgtcggcgtcgtcctcctcctcgtcctcgccggcgtcggcttcttcatccaccgccgccgcaagaaccagcgcgcccgccagtcccccgaggacgtctacttctccaagtccgagcagctcaagcccctcaagacctacgtcgacccccacacctacgaggaccccaaccaggccgtcctcaagttcaccaccgagatccacccctcctgcgtcacccgccagaaggtcatcggcgccggcgagttcggcgaggtctacaagggcatgctcaagacctcctccggcaagaaggaggtccccgtcgccatcaagaccctcaaggccggctacaccgagaagcagcgcgtcgacttcctcggcgaggccggcatcatgggccagttctcccaccacaacatcatccgcctcgagggcgtcatctccaagtacaagcccatgatgatcatcaccgagtacatggagaacggcgccctcgacaagttcctccgcgagaaggacggcgagttctccgtcctccagctcgtcggcatgctccgcggcatcgccgccggcatgaagtacctcgccaacatgaactacgtccaccgcgacctcgccgcccgcaacatcctcgtcaactccaacctcgtctgcaaggtctccgacttcggcctctcccgcgtcctcgaggacgaccccgaggccacctacaccacctccggcggcaagatccccatccgctggaccgcccccgaggccatctcctaccgcaagttcacctccgcctccgacgtctggtccttcggcatcgtcatgtgggaggtcatgacctacggcgagcgcccctactgggagctctccaaccacgaggtcatgaaggccatcaacgacggcttccgcctccccacccccatggactgcccctccgccatctaccagctcatgatgcagtgctggcagcaggagcgcgcccgccgccccaagttcgccgacatcgtctccatcctcgacaagctcatccgcgcccccgactccctcaagaccctcgccgacttcgacccccgcgtctccatccgcctcccctccacctccggctccgagggcgtccccttccgcaccgtctccgagtggctcgagtccatcaagatgcagcagtacaccgagcacttcatggccgccggctacaccgccatcgagaaggtcgtccagatgaccaacgacgacatcaagcgcatcggcgtccgcctccccggccaccagaagcgcatcgcctactccctcctcggcctcaaggaccaggtcaacaccgtcggcatccccatctga

SEQ ID NO: 1666 - RNA, 2952 nt, synthetic construct
  misc_feature 1..2952: note = AAG43576 variant
  source 1..2952: mol_type = other RNA
atggactgccagctctccatcctcctcctcctctcctgctccgtcctcgactccttcggcgagctcatcccccagccctccaacgaggtcaacctcctcgactccaagaccatccagggcgagctcggctggatctcctacccctcccacggctgggaggagatctccggcgtcgacgagcactacacccccatccgcacctaccaggtctgcaacgtcatggaccactcccagaacaactggctccgcaccaactgggtcccccgcaactccgcccagaagatctacgtcgagctcaagttcaccctccgcgactgcaactccatccccctcgtcctcggcacctgcaaggagaccttcaacctctactacatggagtccgacgacgaccacggcgtcaagttccgcgagcaccagttcaccaagatcgacaccatcgccgccgacgagtccttcacccagatggacctcggcgaccgcatcctcaagctcaacaccgagatccgcgaggtcggccccgtcaacaagaagggcttctacctcgccttccaggacgtcggcgcctgcgtcgccctcgtctccgtccgcgtctacttcaagaagtgccccttcaccgtcaagaacctcgccatgttccccgacaccgtccccatggactcccagtccctcgtcgaggtccgcggctcctgcgtcaacaactccaaggaggaggaccccccccgcatgtactgctccaccgagggcgagtggctcgtccccatcggcaagtgctcctgcaacgccggctacgaggagcgcggcttcatgtgccaggcctgccgccccggcttctacaaggccctcgacggcaacatgaagtgcgccaagtgccccccccactcctccacccaggaggacggctccatgaactgccgctgcgagaacaactacttccgcgccgacaaggaccccccctccatggcctgcacccgccccccctcctccccccgcaacgtcatctccaacatcaacgagacctccgtcatcctcgactggtcctggcccctcgacaccggcggccgcaaggacgtcaccttcaacatcatctgcaagaagtgcggctggaacatcaagcagtgcgagccctgctcccccaacgtccgcttcctcccccgccagttcggcctcaccaacaccaccgtcaccgtcaccgacctcctcgcccacaccaactacaccttcgagatcgacgccgtcaacggcgtctccgagctctcctcccccccccgccagttcgccgccgtctccatcaccaccaaccaggccgccccctcccccgtcctcaccatcaagaaggaccgcacctcccgcaactccatctccctctcctggcaggagcccgagcaccccaacggcatcatcctcgactacgaggtcaagtactacgagaagcaggagcaggagacctcctacaccatcctccgcgcccgcggcaccaacgtcaccatctcctccctcaagcccgacaccatctacgtcttccagatccgcgcccgcaccgccgccggctacggcaccaactcccgcaagttcgagttcgagacctcccccgactccttctccatctccggcgagtcctcccaggtcgtcatgatcgccatctccgccgccgtcgccatcatcctcctcaccgtcgtcatctacgtcctcatcggccgcttctgcggctacaagtccaagcacggcgccgacgagaagcgcctccacttcggcaacggccacctcaagctccccggcctccgcacctacgtcgacccccacacctacgaggaccccacccaggccgtccacgagttcgccaaggagctcgacgccaccaacatctccatcgacaaggtcgtcggcgccggcgagttcggcgaggtctgctccggccgcctcaagctcccctccaagaaggagatctccgtcgccatcaagaccctcaaggtcggctacaccgagaagcagcgccgcgacttcctcggcgaggcctccatcatgggccagttcgaccaccccaacatcatccgcctcgagggcgtcgtcaccaagtccaagcccgtcatgatcgtcaccgagtacatggagaacggctccctcgactccttcctccgcaagcacgacgcccagttcaccgtcatccagctcgtcggcatgctccgcggcatcgcctccggcatgaagtacctctccgacatgggctacgtccaccgcgacctcgccgcccgcaacatcctcatcaactccaacctcgtctgcaaggtctccgacttcggcctctcccgcgtcctcgaggacgaccccgaggccgcctacaccacccgcggcggcaagatccccatccgctggacctcccccgaggccatcgcctaccgcaagttcacctccgcctccgacgtctggtcctacggcatcgtcctctgggaggtcatgtcctacggcgagcgcccctactgggagatgtccaaccaggacgtcatcaaggccgtcgacgagggctaccgcctccccccccccatggactgccccgccgccctctaccagctcatgctcgactgctggcagaaggaccgcaacaaccgccccaagttcgagcagatcgtctccatcctcgacaagctcatccgcaaccccggctccctcaagatcatcacctccgccgccgcccgcccctccaacctcctcctcgaccagtccaacgtcgacatcaccaccttccgcaccaccggcgactggctcaacggcgtctggaccgcccactgcaaggagatcttcaccggcgtcgagtactcctcctgcgacaccatcgccaagatctccaccgacgacatgaagaaggtcggcgtcaccgtcgtcggcccccagaagaagatcatctcctccatcaaggccctcgagacccagtccaagaacggccccgtccccgtctga

SEQ ID NO: 1667 - RNA, 2952 nt, synthetic construct
  misc_feature 1..2952: note = AAH63282 variant
  source 1..2952: mol_type = other RNA
atggactgccagctctccatcctcctcctcctctcctgctccgtcctcgactccttcggcgagctcatcccccagccctccaacgaggtcaacctcctcgactccaagaccatccagggcgagctcggctggatctcctacccctcccacggctgggaggagatctccggcgtcgacgagcactacacccccatccgcacctaccaggtctgcaacgtcatggaccactcccagaacaactggctccgcaccaactgggtcccccgcaactccgcccagaagatctacgtcgagctcaagttcaccctccgcgactgcaactccatccccctcgtcctcggcacctgcaaggagaccttcaacctctactacatggagtccgacgacgaccacggcgtcaagttccgcgagcaccagttcaccaagatcgacaccatcgccgccgacgagtccttcacccagatggacctcggcgaccgcatcctcaagctcaacaccgagatccgcgaggtcggccccgtcaacaagaagggcttctacctcgccttccaggacgtcggcgcctgcgtcgccctcgtctccgtccgcgtctacttcaagaagtgccccttcaccgtcaagaacctcgccatgttccccgacaccgtccccatggactcccagtccctcgtcgaggtccgcggctcctgcgtcaacaactccaaggaggaggaccccccccgcatgtactgctccaccgagggcgagtggctcgtccccatcggcaagtgctcctgcaacgccggctacgaggagcgcggcttcatgtgccaggcctgccgccccggcttctacaaggccctcgacggcaacatgaagtgcgccaagtgccccccccactcctccacccaggaggacggctccatgaactgccgctgcgagaacaactacttccgcgccgacaaggaccccccctccatggcctgcacccgccccccctcctccccccgcaacgtcatctccaacatcaacgagacctccgtcatcctcgactggtcctggcccctcgacaccggcggccgcaaggacgtcaccttcaacatcatctgcaagaagtgcggctggaacatcaagcagtgcgagccctgctcccccaacgtccgcttcctcccccgccagttcggcctcaccaacaccaccgtcaccgtcaccgacctcctcgcccacaccaactacaccttcgagatcgacgccgtcaacggcgtctccgagctctcctcccccccccgccagttcgccgccgtctccatcaccaccaaccaggccgccccctcccccgtcctcaccatcaagaaggaccgcacctcccgcaactccatctccctctcctggcaggagcccgagcaccccaacggcatcatcctcgactacgaggtcaagtactacgagaagcaggagcaggagacctcctacaccatcctccgcgcccgcggcaccaacgtcaccatctcctccctcaagcccgacaccatctacgtcttccagatccgcgcccgcaccgccgccggctacggcaccaactcccgcaagttcgagttcgagacctcccccgactccttctccatctccggcgagtcctcccaggtcgtcatgatcgccatctccgccgccgtcgccatcatcctcctcaccgtcgtcatctacgtcctcatcggccgcttctgcggctacaagtccaagcacggcgccgacgagaagcgcctccacttcggcaacggccacctcaagctccccggcctccgcacctacgtcgacccccacacctacgaggaccccacccagaccgtccacgagttcgccaaggagctcgacgccaccaacatctccatcgacaaggtcgtcggcgccggcgagttcggcgaggtctgctccggccgcctcaagctcccctccaagaaggagatctccgtcgccatcaagaccctcaaggtcggctacaccgagaagcagcgccgcgacttcctcggcgaggcctccatcatgggccagttcgaccaccccaacatcatccgcctcgagggcgtcgtcaccaagtccaagcccgtcatgatcgtcaccgagtacatggagaacggctccctcgactccttcctccgcaagcacgacgcccagttcaccgtcatccagctcgtcggcatgctccgcggcatcgcctccggcatgaagtacctctccgacatgggctacgtccaccgcgacctcgccgcccgcaacatcctcatcaactccaacctcgtctgcaaggtctccgacttcggcctctcccgcgtcctcgaggacgaccccgaggccgcctacaccacccgcggcggcaagatccccatccgctggacctcccccgaggccatcgcctaccgcaagttcacctccgcctccgacgtctggtcctacggcatcgtcctctgggaggtcatgtcctacggcgagcgcccctactgggagatgtccaaccaggacgtcatcaaggccgtcgacgagggctaccgcctccccccccccatggactgccccgccgccctctaccagctcatgctcgactgctggcagaaggaccgcaacaaccgccccaagttcgagcagatcgtctccatcctcgacaagctcatccgcaaccccggctccctcaagatcatcacctccgccgccgcccgcccctccaacctcctcctcgaccagtccaacgtcgacatcaccaccttccgcaccaccggcgactggctcaacggcgtctggaccgcccactgcaaggagatcttcaccggcgtcgagtactcctcctgcgacaccatcgccaagatctccaccgacgacatgaagaaggtcggcgtcaccgtcgtcggcccccagaagaagatcatctcctccatcaaggccctcgagacccagtccaagaacggccccgtccccgtctga

SEQ ID NO: 1668 - RNA, 1389 nt, synthetic construct
  misc_feature 1..1389: note = BAG54127 variant
  source 1..1389: mol_type = other RNA
atgcccatgtccaccatcctccccgtcacctccccctgcctccccgccaccggcgtcaccgtctgggagctcatgaccttcggcgccgagccctacgccggcctccgcctcgccgaggtccccgacctcctcgagaagggcgagcgcctcgcccagccccagatctgcaccatcgacgtctacatggtcatggtcaagtgctggatgatcgacgagaacatccgccccaccttcaaggagctcgccaacgagttcacccgcatggcccgcgaccccccccgctacctcgtcatcaagcgcgagtccggccccggcatcgcccccggccccgagccccacggcctcaccaacaagaagctcgaggaggtcgagctcgagcccgagctcgacctcgacctcgacctcgaggccgaggaggacaacctcgccaccaccaccctcggctccgccctctccctccccgtcggcaccctcaaccgcccccgcggctcccagtccctcctctccccctcctccggctacatgcccatgaaccagggcaacctcggcgagtcctgccaggagtccgccgtctccggctcctccgagcgctgcccccgccccgtctccctccaccccatgccccgcggctgcctcgcctccgagtcctccgagggccacgtcaccggctccgaggccgagctccaggagaaggtctccatgtgccgctcccgctcccgctcccgctccccccgcccccgcggcgactccgcctaccactcccagcgccactccctcctcacccccgtcacccccctctccccccccggcctcgaggaggaggacgtcaacggctacgtcatgcccgacacccacctcaagggcaccccctcctcccgcgagggcaccctctcctccgtcggcctctcctccgtcctcggcaccgaggaggaggacgaggacgaggagtacgagtacatgaaccgccgccgccgccactcccccccccaccccccccgcccctcctccctcgaggagctcggctacgagtacatggacgtcggctccgacctctccgcctccctcggctccacccagtcctgccccctccaccccgtccccatcatgcccaccgccggcaccacccccgacgaggactacgagtacatgaaccgccagcgcgacggcggcggccccggcggcgactacgccgccatgggcgcctgccccgcctccgagcagggctacgaggagatgcgcgccttccagggccccggccaccaggccccccacgtccactacgcccgcctcaagaccctccgctccctcgaggccaccgactccgccttcgacaaccccgactactggcactcccgcctcttccccaaggccaacgcccagcgcacctga

SEQ ID NO: 1669 - RNA, 2766 nt, synthetic construct
  misc_feature 1..2766: note = BAG57868 variant
  source 1..2766: mol_type = other RNA
atgcgcgccaacgacgccctccaggtcctcggcctcctcttctccctcgcccgcggctccgaggtcggcaactcccaggccgtctgccccggcaccctcaacggcctctccgtcaccggcgacgccgagaaccagtaccagaccctctacaagctctacgagcgctgcgaggtcgtcatgggcaacctcgagatcgtcctcaccggccacaacgccgacctctccttcctccagtggatccgcgaggtcaccggctacgtcctcgtcgccatgaacgagttctccaccctccccctccccaacctccgcgtcgtccgcggcacccaggtctacgacggcaagttcgccatcttcgtcatgctcaactacaacaccaactcctcccacgccctccgccagctccgcctcacccagctcaccgagatcctctccggcggcgtctacatcgagaagaacgacaagctctgccacatggacaccatcgactggcgcgacatcgtccgcgaccgcgacgccgagatcgtcgtcaaggacaacggccgctcctgccccccctgccacgaggtctgcaagggccgctgctggggccccggctccgaggactgccagaccctcaccaagaccatctgcgccccccagtgcaacggccactgcttcggccccaaccccaaccagtgctgccacgacgagtgcgccggcggctgctccggcccccaggacaccgactgcttcgcctgccgccacttcaacgactccggcgcctgcgtcccccgctgcccccagcccctcgtctacaacaagctcaccttccagctcgagcccaacccccacaccaagtaccagtacggcggcgtctgcgtcgcctcctgcccccacaacttcgtcgtcgaccagacctcctgcgtccgcgcctgcccccccgacaagatggaggtcgacaagaacggcctcaagatgtgcgagccctgcggcggcctctgccccaaggcctgcgagggcaccggctccggctcccgcttccagaccgtcgactcctccaacatcgacggcttcgtcaactgcaccaagatcctcggcaacctcgacttcctcatcaccggcctcaacggcgacccctggcacaagatccccgccctcgaccccgagaagctcaacgtcttccgcaccgtccgcgagatcaccggctacctcaacatccagtcctggcccccccacatgcacaacttctccgtcttctccaacctcaccaccatcggcggccgctccctctacaaccgcggcttctccctcctcatcatgaagaacctcaacgtcacctccctcggcttccgctccctcaaggagatctccgccggccgcatctacatctccgccaaccgccagctctgctaccaccactccctcaactggaccaaggtcctccgcggccccaccgaggagcgcctcgacatcaagcacaaccgcccccgccgcgactgcgtcgccgagggcaaggtctgcgaccccctctgctcctccggcggctgctggggccccggccccggccagtgcctctcctgccgcaactactcccgcggcggcgtctgcgtcacccactgcaacttcctcaacggcgagccccgcgagttcgcccacgaggccgagtgcttctcctgccaccccgagtgccagcccatggagggcaccgccacctgcaacggctccggctccgacacctgcgcccagtgcgcccacttccgcgacggcccccactgcgtctcctcctgcccccacggcgtcctcggcgccaagggccccatctacaagtaccccgacgtccagaacgagtgccgcccctgccacgagaactgcacccagggctgcaagggccccgagctccaggactgcctcggccagaccctcgtcctcatcggcaagacccacctcaccatggccctcaccgtcatcgccggcctcgtcgtcatcttcatgatgctcggcggcaccttcctctactggcgcggccgccgcatccagaacaagcgcgccatgcgccgctacctcgagcgcggcgagtccatcgagcccctcgacccctccgagaaggccaacaaggtcctcgcccgcatcttcaaggagaccgagctccgcaagctcaaggtcctcggctccggcgtcttcggcaccgtccacaagggcgtctggatccccgagggcgagtccatcaagatccccgtctgcatcaaggtcatcgaggacaagtccggccgccagtccttccaggccgtcaccgaccacatgctcgccatcggctccctcgaccacgcccacatcgtccgcctcctcggcctctgccccggctcctccctccagctcgtcacccagtacctccccctcggctccctcctcgaccacgtccgccagcaccgcggcgccctcggcccccagctcctcctcaactggggcgtccagatcgccaagggcatgtactacctcgaggagcacggcatggtccaccgcaacctcgccgcccgcaacgtcctcctcaagtccccctcccaggtccaggtcgccgacttcggcgtcgccgacctcctcccccccgacgacaagcagctcctctactccgaggccaagacccccatcaagtggatggccctcgagtccatccacttcggcaagtacacccaccagtccgacgtctggtcctacggccagtgcatctggatgccctccctcccctccctcgcccccgtctccaacctccccttcgagaccccctcctga

SEQ ID NO: 1670 - RNA, 3927 nt, synthetic construct
  misc_feature 1..3927: note = AAB59446 variant
  source 1..3927: mol_type = other RNA
atgaagcccgccaccggcctctgggtctgggtctccctcctcgtcgccgccggcaccgtccagccctccgactcccagtccgtctgcgccggcaccgagaacaagctctcctccctctccgacctcgagcagcagtaccgcgccctccgcaagtactacgagaactgcgaggtcgtcatgggcaacctcgagatcacctccatcgagcacaaccgcgacctctccttcctccgctccgtccgcgaggtcaccggctacgtcctcgtcgccctcaaccagttccgctacctccccctcgagaacctccgcatcatccgcggcaccaagctctacgaggaccgctacgccctcgccatcttcctcaactaccgcaaggacggcaacttcggcctccaggagctcggcctcaagaacctcaccgagatcctcaacggcggcgtctacgtcgaccagaacaagttcctctgctacgccgacaccatccactggcaggacatcgtccgcaacccctggccctccaacctcaccctcgtctccaccaacggctcctccggctgcggccgctgccacaagtcctgcaccggccgctgctggggccccaccgagaaccactgccagaccctcacccgcaccgtctgcgccgagcagtgcgacggccgctgctacggcccctacgtctccgactgctgccaccgcgagtgcgccggcggctgctccggccccaaggacaccgactgcttcgcctgcatgaacttcaacgactccggcgcctgcgtcacccagtgcccccagaccttcgtctacaaccccaccaccttccagctcgagcacaacttcaacgccaagtacacctacggcgccttctgcgtcaagaagtgcccccacaacttcgtcgtcgactcctcctcctgcgtccgcgcctgcccctcctccaagatggaggtcgaggagaacggcatcaagatgtgcaagccctgcaccgacatctgccccaaggcctgcgacggcatcggcaccggctccctcatgtccgcccagaccgtcgactcctccaacatcgacaagttcatcaactgcaccaagatcaacggcaacctcatcttcctcgtcaccggcatccacggcgacccctacaacgccatcgaggccatcgaccccgagaagctcaacgtcttccgcaccgtccgcgagatcaccggcttcctcaacatccagtcctggccccccaacatgaccgacttctccgtcttctccaacctcgtcaccatcggcggccgcgtcctctactccggcctctccctcctcatcctcaagcagcagggcatcacctccctccagttccagtccctcaaggagatctccgccggcaacatctacatcaccgacaactccaacctctgctactaccacaccatcaactggaccaccctcttctccaccatcaaccagcgcatcgtcatccgcgacaaccgcaaggccgagaactgcaccgccgagggcatggtctgcaaccacctctgctcctccgacggctgctggggccccggccccgaccagtgcctctcctgccgccgcttctcccgcggccgcatctgcatcgagtcctgcaacctctacgacggcgagttccgcgagttcgagaacggctccatctgcgtcgagtgcgacccccagtgcgagaagatggaggacggcctcctcacctgccacggccccggccccgacaactgcaccaagtgctcccacttcaaggacggccccaactgcgtcgagaagtgccccgacggcctccagggcgccaactccttcatcttcaagtacgccgaccccgaccgcgagtgccacccctgccaccccaactgcacccagggctgcaacggccccacctcccacgactgcatctactacccctggaccggccactccaccctcccccagcacgcccgcacccccctcatcgccgccggcgtcatcggcggcctcttcatcctcgtcatcgtcggcctcaccttcgccgtctacgtccgccgcaagtccatcaagaagaagcgcgccctccgccgcttcctcgagaccgagctcgtcgagcccctcaccccctccggcaccgcccccaaccaggcccagctccgcatcctcaaggagaccgagctcaagcgcgtcaaggtcctcggctccggcgccttcggcaccgtctacaagggcatctgggtccccgagggcgagaccgtcaagatccccgtcgccatcaagatcctcaacgagaccaccggccccaaggccaacgtcgagttcatggacgaggccctcatcatggcctccatggaccacccccacctcgtccgcctcctcggcgtctgcctctcccccaccatccagctcgtcacccagctcatgccccacggctgcctcctcgagtacgtccacgagcacaaggacaacatcggctcccagctcctcctcaactggtgcgtccagatcgccaagggcatgatgtacctcgaggagcgccgcctcgtccaccgcgacctcgccgcccgcaacgtcctcgtcaagtcccccaaccacgtcaagatcaccgacttcggcctcgcccgcctcctcgagggcgacgagaaggagtacaacgccgacggcggcaagatgcccatcaagtggatggccctcgagtgcatccactaccgcaagttcacccaccagtccgacgtctggtcctacggcgtcaccatctgggagctcatgaccttcggcggcaagccctacgacggcatccccacccgcgagatccccgacctcctcgagaagggcgagcgcctcccccagccccccatctgcaccatcgacgtctacatggtcatggtcaagtgctggatgatcgacgccgactcccgccccaagttcaaggagctcgccgccgagttctcccgcatggcccgcgacccccagcgctacctcgtcatccagggcgacgaccgcatgaagctcccctcccccaacgactccaagttcttccagaacctcctcgacgaggaggacctcgaggacatgatggacgccgaggagtacctcgtcccccaggccttcaacatccccccccccatctacacctcccgcgcccgcatcgactccaaccgctccgagatcggccactcccccccccccgcctacacccccatgtccggcaaccagttcgtctaccgcgacggcggcttcgccgccgagcagggcgtctccgtcccctaccgcgcccccacctccaccatccccgaggcccccgtcgcccagggcgccaccgccgagatcttcgacgactcctgctgcaacggcaccctccgcaagcccgtcgccccccacgtccaggaggactcctccacccagcgctactccgccgaccccaccgtcttcgcccccgagcgctccccccgcggcgagctcgacgaggagggctacatgacccccatgcgcgacaagcccaagcaggagtacctcaaccccgtcgaggagaaccccttcgtctcccgccgcaagaacggcgacctccaggccctcgacaaccccgagtaccacaacgcctccaacggcccccccaaggccgaggacgagtacgtcaacgagcccctctacctcaacaccttcgccaacaccctcggcaaggccgagtacctcaagaacaacatcctctccatgcccgagaaggccaagaaggccttcgacaaccccgactactggaaccactccctccccccccgctccaccctccagcaccccgactacctccaggagtactccaccaagtacttctacaagcagaacggccgcatccgccccatcgtcgccgagaaccccgagtacctctccgagttctccctcaagcccggcaccgtcctccccccccccccctaccgccaccgcaacaccgtcgtctga

SEQ ID NO: 1671 - RNA, 1461 nt, synthetic construct
  misc_feature 1..1461: note = CCDS46648.1 variant
  source 1..1461: mol_type = other RNA
atgatccagaccgtccccgaccccgccgcccacatcaaggaggccctctccgtcgtctccgaggaccagtccctcttcgagtgcgcctacggcaccccccacctcgccaagaccgagatgaccgcctcctcctcctccgactacggccagacctccaagatgtccccccgcgtcccccagcaggactggctctcccagccccccgcccgcgtcaccatcaagatggagtgcaacccctcccaggtcaacggctcccgcaactcccccgacgagtgctccgtcgccaagggcggcaagatggtcggctcccccgacaccgtcggcatgaactacggctcctacatggaggagaagcacatgcccccccccaacatgaccaccaacgagcgccgcgtcatcgtccccgccgaccccaccctctggtccaccgaccacgtccgccagtggctcgagtgggccgtcaaggagtacggcctccccgacgtcaacatcctcctcttccagaacatcgacggcaaggagctctgcaagatgaccaaggacgacttccagcgcctcaccccctcctacaacgccgacatcctcctctcccacctccactacctccgcgagacccccctcccccacctcacctccgacgacgtcgacaaggccctccagaactccccccgcctcatgcacgcccgcaacaccggcggcgccgccttcatcttccccaacacctccgtctaccccgaggccacccagcgcatcaccacccgccccgacctcccctacgagcccccccgccgctccgcctggaccggccacggccaccccaccccccagtccaaggccgcccagccctccccctccaccgtccccaagaccgaggaccagcgcccccagctcgacccctaccagatcctcggccccacctcctcccgcctcgccaaccccggctccggccagatccagctctggcagttcctcctcgagctcctctccgactcctccaactcctcctgcatcacctgggagggcaccaacggcgagttcaagatgaccgaccccgacgaggtcgcccgccgctggggcgagcgcaagtccaagcccaacatgaactacgacaagctctcccgcgccctccgctactactacgacaagaacatcatgaccaaggtccacggcaagcgctacgcctacaagttcgacttccacggcatcgcccaggccctccagccccacccccccgagtcctccctctacaagtacccctccgacctcccctacatgggctcctaccacgcccacccccagaagatgaacttcgtcgccccccacccccccgccctccccgtcacctcctcctccttcttcgccgcccccaacccctactggaactcccccaccggcggcatctaccccaacacccgcctccccacctcccacatgccctcccacctcggcacctactactga

SEQ ID NO: 1672 - RNA, 1359 nt, synthetic construct
  misc_feature 1..1359: note = AAA19786 variant
  source 1..1359: mol_type = other RNA
atgtccgagacccccgcccagtgctccatcaagcaggagcgcatctcctacaccccccccgagtcccccgtcccctcctacgcctcctccacccccctccacgtccccgtcccccgcgccctccgcatggaggaggactccatccgcctccccgcccacctccgcctccagcccatctactggtcccgcgacgacgtcgcccagtggctcaagtgggccgagaacgagttctccctccgccccatcgactccaacaccttcgagatgaacggcaaggccctcctcctcctcaccaaggaggacttccgctaccgctccccccactccggcgacgtcctctacgagctcctccagcacatcctcaagcagcgcaagccccgcatcctcttctcccccttcttccaccccggcaactccatccacacccagcccgaggtcatcctccaccagaaccacgaggaggacaactgcgtccagcgcaccccccgcccctccgtcgacaacgtccaccacaacccccccaccatcgagctcctccaccgctcccgctcccccatcaccaccaaccaccgcccctcccccgaccccgagcagcgccccctccgctcccccctcgacaacatgatccgccgcctctcccccgccgagcgcgcccagggcccccgcccccaccaggagaacaaccaccaggagtcctaccccctctccgtctcccccatggagaacaaccactgccccgcctcctccgagtcccaccccaagccctcctccccccgccaggagtccacccgcgtcatccagctcatgccctcccccatcatgcaccccctcatcctcaacccccgccactccgtcgacttcaagcagtcccgcctctccgaggacggcctccaccgcgagggcaagcccatcaacctctcccaccgcgaggacctcgcctacatgaaccacatcatggtctccgtctccccccccgaggagcacgccatgcccatcggccgcatcgccgactgccgcctcctctgggactacgtctaccagctcctctccgactcccgctacgagaacttcatccgctgggaggacaaggagtccaagatcttccgcatcgtcgaccccaacggcctcgcccgcctctggggcaaccacaagaaccgcaccaacatgacctacgagaagatgtcccgcgccctccgccactactacaagctcaacatcatccgcaaggagcccggccagcgcctcctcttccgcttcatgaagacccccgacgagatcatgtccggccgcaccgaccgcctcgagcacctcgagtcccaggagctcgacgagcagatctaccaggaggacgagtgctga

SEQ ID NO: 1673 - RNA, 1971 nt, synthetic construct
  misc_feature 1..1971: note = AAH04817 variant
  source 1..1971: mol_type = other RNA
atggcctccaccgactactccacctactcccaggccgccgcccagcagggctactccgcctacaccgcccagcccacccagggctacgcccagaccacccaggcctacggccagcagtcctacggcacctacggccagcccaccgacgtctcctacacccaggcccagaccaccgccacctacggccagaccgcctacgccacctcctacggccagccccccaccggctacaccacccccaccgccccccaggcctactcccagcccgtccagggctacggcaccggcgcctacgacaccaccaccgccaccgtcaccaccacccaggcctcctacgccgcccagtccgcctacggcacccagcccgcctaccccgcctacggccagcagcccgccgccaccgcccccacccgcccccaggacggcaacaagcccaccgagacctcccagccccagtcctccaccggcggctacaaccagccctccctcggctacggccagtccaactactcctacccccaggtccccggctcctaccccatgcagcccgtcaccgcccccccctcctacccccccacctcctactcctccacccagcccacctcctacgaccagtcctcctactcccagcagaacacctacggccagccctcctcctacggccagcagtcctcctacggccagcagtcctcctacggccagcagccccccacctcctaccccccccagaccggctcctactcccaggccccctcccagtactcccagcagtcctcctcctacggccagcagtcctccttccgccaggaccacccctcctccatgggcgtctacggccaggagtccggcggcttctccggccccggcgagaaccgctccatgtccggccccgacaaccgcggccgcggccgcggcggcttcgaccgcggcggcatgtcccgcggcggccgcggcggcggccgcggcggcatgggctccgccggcgagcgcggcggcttcaacaagcccggcggccccatggacgagggccccgacctcgacctcggcccccccgtcgaccccgacgaggactccgacaactccgccatctacgtccagggcctcaacgactccgtcaccctcgacgacctcgccgacttcttcaagcagtgcggcgtcgtcaagatgaacaagcgcaccggccagcccatgatccacatctacctcgacaaggagaccggcaagcccaagggcgacgccaccgtctcctacgaggacccccccaccgccaaggccgccgtcgagtggttcgacggcaaggacttccagggctccaagctcaaggtctccctcgcccgcaagaagccccccatgaactccatgcgcggcggcctccccccccgcgagggccgcggcatgcccccccccctccgcggcggccccggcggccccggcggccccggcggccccatgggccgcatgggcggccgcggcggcgaccgcggcggcttccccccccgcggcccccgcggctcccgcggcaacccctccggcggcggcaacgtccagcaccgcgccggcgactggcagtgccccaaccccggctgcggcaaccagaacttcgcctggcgcaccgagtgcaaccagtgcaaggcccccaagcccgagggcttcctccccccccccttccccccccccggcggcgaccgcggccgcggcggccccggcggcatgcgcggcggccgcggcggcctcatggaccgcggcggccccggcggcatgttccgcggcggccgcggcggcgaccgcggcggcttccgcggcggccgcggcatggaccgcggcggcttcggcggcggccgccgcggcggccccggcggcccccccggccccctcatggagcagatgggcggccgccgcggcggccgcggcggccccggcaagatggacaagggcgagcaccgccaggagcgccgcgaccgcccctactga

SEQ ID NO: 1674 - RNA, 1998 nt, synthetic construct
  misc_feature 1..1998: note = AEA07595 variant
  source 1..1998: mol_type = other RNA
atgggccagaccggcaagaagtccgagaagggccccgtctgctggcgcaagcgcgtcaagtccgagtacatgcgcctccgccagctcaagcgcttccgccgcgccgacgaggtcaagtccatgttctcctccaaccgccagaagatcctcgagcgcaccgagatcctcaaccaggagtggaagcagcgccgcatccagcccgtccacatcctcacctccgtctcctccctccgcggcacccgcgaggtcgaggacgagaccgtcctccacaacatcccctacatgggcgacgaggtcctcgaccaggacggcaccttcatcgaggagctcatcaagaactacgacggcaaggtccacggcgaccgcgagtgcggcttcatcaacgacgagatcttcgtcgagctcgtcaacgccctcggccagtacaacgacgacgacgacgacgacgacggcgacgaccccgaggagcgcgaggagaagcagaaggacctcgaggaccaccgcgacgacaaggagtcccgccccccccgcaagttcccctccgacaagatcttcgaggccatctcctccatgttccccgacaagggcaccgccgaggagctcaaggagaagtacaaggagctcaccgagcagcagctccccggcgccctcccccccgagtgcacccccaacatcgacggccccaacgccaagtccgtccagcgcgagcagtccctccactccttccacaccctcttctgccgccgctgcttcaagtacgactgcttcctccaccccttccacgccacccccaacacctacaagcgcaagaacaccgagaccgccctcgacaacaagccctgcggcccccagtgctaccagcacctcgagggcgccaaggagttcgccgccgccctcaccgccgagcgcatcaagaccccccccaagcgccccggcggccgccgccgcggccgcctccccaacaactcctcccgcccctccacccccaccatcaacgtcctcgagtccaaggacaccgactccgaccgcgaggccggcaccgagaccggcggcgagaacaacgacaaggaggaggaggagaagaaggacgagacctcctcctcctccgaggccaactcccgctgccagacccccatcaagatgaagcccaacatcgagccccccgagaacgtcgagtggtccggcgccgaggcctccatgttccgcgtcctcatcggcacctactacgacaacttctgcgccatcgcccgcctcatcggcaccaagacctgccgccaggtctacgagttccgcgtcaaggagtcctccatcatcgcccccgcccccgccgaggacgtcgacacccccccccgcaagaagaagcgcaagcaccgcctctgggccgcccactgccgcaagatccagctcaagaagggccagaaccgcttccccggctgccgctgcaaggcccagtgcaacaccaagcagtgcccctgctacctcgccgtccgcgagtgcgaccccgacctctgcctcacctgcggcgccgccgaccactgggactccaagaacgtctcctgcaagaactgctccatccagcgcggctccaagaagcacctcctcctcgccccctccgacgtcgccggctggggcatcttcatcaaggaccccgtccagaagaacgagttcatctccgagtactgcggcgagatcatctcccaggacgaggccgaccgccgcggcaaggtctacgacaagtacatgtgctccttcctcttcaacctcaacaacgacttcgtcgtcgacgccacccgcaagggcaacaagatccgcttcgccaaccactccgtcaaccccaactgctacgccaaggtcatgatggtcaacggcgaccaccgcatcggcatcttcgccaagcgcgccatccagaccggcgaggagctcttcttcgactaccgctactcccaggccgacgccctcaagtacgtcggcatcgagcgcgagatggagatcccctga

SEQ ID NO: 1675 - RNA, 1005 nt, synthetic construct
  misc_feature 1..1005: note = EAW80068 variant
  source 1..1005: mol_type = other RNA
atgggccagaccggcaagaagtccgagaagggccccgtctgctggcgcaagcgcgtcaagtccgagtacatgcgcctccgccagctcaagcgcttccgccgcgccgacgaggtcaagtccatgttctcctccaaccgccagaagatcctcgagcgcaccgagatcctcaaccaggagtggaagcagcgccgcatccagcccgtccacatcctcacctccgtctcctccctccgcggcacccgcgagtgctccgtcacctccgacctcgacttccccacccaggtcatccccctcaagaccctcaacgccgtcgcctccgtccccatcatgtactcctggtcccccctccagcagaacttcatggtcgaggacgagaccgtcctccacaacatcccctacatgggcgacgaggtcctcgaccaggacggcaccttcatcgaggagctcatcaagaactacgacggcaaggtccacggcgaccgcgagtgcggcttcatcaacgacgagatcttcgtcgagctcgtcaacgccctcggccagtacaacgacgacgacgacgacgacgacggcgacgaccccgaggagcgcgaggagaagcagaaggacctcgaggaccaccgcgacgacaaggagtcccgccccccccgcaagttcccctccgacaagatcttcgaggccatctcctccatgttccccgacaagggcaccgccgaggagctcaaggagaagtacaaggagctcaccgagcagcagctccccggcgccctcccccccgagtgcacccccaacatcgacggccccaacgccaagtccgtccagcgcgagcagtccctccactccttccacaccctcttctgccgccgctgcttcaagtacgactgcttcctccaccccttccacgccacccccaacacctacaagcgcaagaacaccgagaccgccctcgacaacaagccctgcggcccccagtgctaccagcacctccccctcctcccccgcaactga

SEQ ID NO: 1676 - RNA, 195 nt, synthetic construct
  misc_feature 1..195: note = CCO13726 variant
  source 1..195: mol_type = other RNA
atgcccctcgtcaacatcatgatgatgaccatgatgatgatggagaccatcctcaagaaggagaagaagtcccgcaagatctggcgcatcaccgagatgatcaagaaggccgcccacctcggcaacttcctcctcatcaagttcctcaagcccttcccccagtgcttccagatccgcgcccagcagaagaactga

SEQ ID NO: 1677 - RNA, 2241 nt, synthetic construct
  misc_feature 1..2241: note = AAC51520 variant
  source 1..2241: mol_type = other RNA
atgggccagaccggcaagaagtccgagaagggccccgtctgctggcgcaagcgcgtcaagtccgagtacatgcgcctccgccagctcaagcgcttccgccgcgccgacgaggtcaagtccatgttctcctccaaccgccagaagatcctcgagcgcaccgagatcctcaaccaggagtggaagcagcgccgcatccagcccgtccacatcctcacctccgtctcctccctccgcggcacccgcgagtgctccgtcacctccgacctcgacttccccacccaggtcatccccctcaagaccctcaacgccgtcgcctccgtccccatcatgtactcctggtcccccctccagcagaacttcatggtcgaggacgagaccgtcctccacaacatcccctacatgggcgacgaggtcctcgaccaggacggcaccttcatcgaggagctcatcaagaactacgacggcaaggtccacggcgaccgcgagtgcggcttcatcaacgacgagatcttcgtcgagctcgtcaacgccctcggccagtacaacgacgacgacgacgacgacgacggcgacgaccccgaggagcgcgaggagaagcagaaggacctcgaggaccaccgcgacgacaaggagtcccgccccccccgcaagttcccctccgacaagatcttcgaggccatctcctccatgttccccgacaagggcaccgccgaggagctcaaggagaagtacaaggagctcaccgagcagcagctccccggcgccctcccccccgagtgcacccccaacatcgacggccccaacgccaagtccgtccagcgcgagcagtccctccactccttccacaccctcttctgccgccgctgcttcaagtacgactgcttcctccaccccttccacgccacccccaacacctacaagcgcaagaacaccgagaccgccctcgacaacaagccctgcggcccccagtgctaccagcacctcgagggcgccaaggagttcgccgccgccctcaccgccgagcgcatcaagaccccccccaagcgccccggcggccgccgccgcggccgcctccccaacaactcctcccgcccctccacccccaccatcaacgtcctcgagtccaaggacaccgactccgaccgcgaggccggcaccgagaccggcggcgagaacaacgacaaggaggaggaggagaagaaggacgagacctcctcctcctccgaggccaactcccgctgccagacccccatcaagatgaagcccaacatcgagccccccgagaacgtcgagtggtccggcgccgaggcctccatgttccgcgtcctcatcggcacctactacgacaacttctgcgccatcgcccgcctcatcggcaccaagacctgccgccaggtctacgagttccgcgtcaaggagtcctccatcatcgcccccgcccccgccgaggacgtcgacacccccccccgcaagaagaagcgcaagcaccgcctctgggccgcccactgccgcaagatccagctcaagaaggacggctcctccaaccacgtctacaactaccagccctgcgaccacccccgccagccctgcgactcctcctgcccctgcgtcatcgcccagaacttctgcgagaagttctgccagtgctcctccgagtgccagaaccgcttccccggctgccgctgcaaggcccagtgcaacaccaagcagtgcccctgctacctcgccgtccgcgagtgcgaccccgacctctgcctcacctgcggcgccgccgaccactgggactccaagaacgtctcctgcaagaactgctccatccagcgcggctccaagaagcacctcctcctcgccccctccgacgtcgccggctggggcatcttcatcaaggaccccgtccagaagaacgagttcatctccgagtactgcggcgagatcatctcccaggacgaggccgaccgccgcggcaaggtctacgacaagtacatgtgctccttcctcttcaacctcaacaacgacttcgtcgtcgacgccacccgcaagggcaacaagatccgcttcgccaaccactccgtcaaccccaactgctacgccaaggtcatgatggtcaacggcgaccaccgcatcggcatcttcgccaagcgcgccatccagaccggcgaggagctcttcttcgactaccgctactcccaggccgacgccctcaagtacgtcggcatcgagcgcgagatggagatcccctga

SEQ ID NO: 1678 - RNA, 2124 nt, synthetic construct
  misc_feature 1..2124: note = AEN79481 variant
  source 1..2124: mol_type = other RNA
atgggccagaccggcaagaagtccgagaagggccccgtctgctggcgcaagcgcgtcaagtccgagtacatgcgcctccgccagctcaagcgcttccgccgcgccgacgaggtcaagtccatgttctcctccaaccgccagaagatcctcgagcgcaccgagatcctcaaccaggagtggaagcagcgccgcatccagcccgtccacatcctcacctccgtctcctccctccgcggcacccgcgaggtcgaggacgagaccgtcctccacaacatcccctacatgggcgacgaggtcctcgaccaggacggcaccttcatcgaggagctcatcaagaactacgacggcaaggtccacggcgaccgcgagtgcggcttcatcaacgacgagatcttcgtcgagctcgtcaacgccctcggccagtacaacgacgacgacgacgacgacgacggcgacgaccccgaggagcgcgaggagaagcagaaggacctcgaggaccaccgcgacgacaaggagtcccgccccccccgcaagttcccctccgacaagatcttcgaggccatctcctccatgttccccgacaagggcaccgccgaggagctcaaggagaagtacaaggagctcaccgagcagcagctccccggcgccctcccccccgagtgcacccccaacatcgacggccccaacgccaagtccgtccagcgcgagcagtccctccactccttccacaccctcttctgccgccgctgcttcaagtacgactgcttcctccaccccttccacgccacccccaacacctacaagcgcaagaacaccgagaccgccctcgacaacaagccctgcggcccccagtgctaccagcacctcgagggcgccaaggagttcgccgccgccctcaccgccgagcgcatcaagaccccccccaagcgccccggcggccgccgccgcggccgcctccccaacaactcctcccgcccctccacccccaccatcaacgtcctcgagtccaaggacaccgactccgaccgcgaggccggcaccgagaccggcggcgagaacaacgacaaggaggaggaggagaagaaggacgagacctcctcctcctccgaggccaactcccgctgccagacccccatcaagatgaagcccaacatcgagccccccgagaacgtcgagtggtccggcgccgaggcctccatgttccgcgtcctcatcggcacctactacgacaacttctgcgccatcgcccgcctcatcggcaccaagacctgccgccaggtctacgagttccgcgtcaaggagtcctccatcatcgcccccgcccccgccgaggacgtcgacacccccccccgcaagaagaagcgcaagcaccgcctctgggccgcccactgccgcaagatccagctcaagaaggacggctcctccaaccacgtctacaactaccagccctgcgaccacccccgccagccctgcgactcctcctgcccctgcgtcatcgcccagaacttctgcgagaagttctgccagtgctcctccgagtgccagaaccgcttccccggctgccgctgcaaggcccagtgcaacaccaagcagtgcccctgctacctcgccgtccgcgagtgcgaccccgacctctgcctcacctgcggcgccgccgaccactgggactccaagaacgtctcctgcaagaactgctccatccagcgcggctccaagaagcacctcctcctcgccccctccgacgtcgccggctggggcatcttcatcaaggaccccgtccagaagaacgagttcatctccgagtactgcggcgagatcatctcccaggacgaggccgaccgccgcggcaaggtctacgacaagtacatgtgctccttcctcttcaacctcaacaacgacttcgtcgtcgacgccacccgcaagggcaacaagatccgcttcgccaaccactccgtcaaccccaactgctacgccaaggtcatgatggtcaacggcgaccaccgcatcggcatcttcgccaagcgcgccatccagaccggcgaggagctcttcttcgactaccgctactcccaggccgacgccctcaagtacgtcggcatcgagcgcgagatggagatcccctga

SEQ ID NO: 1679 - RNA, 399 nt, synthetic construct
  misc_feature 1..399: note = AAB87141 variant
  source 1..399: mol_type = other RNA
atggtcgaggccttctgcgccacctggaagctcaccaactcccagaacttcgacgagtacatgaaggccctcggcgtcggcttcgccacccgccaggtcggcaacgtcaccaagcccaccgtcatcatctcccaggagggcgacaaggtcgtcatccgcaccctctccaccttcaagaacaccgagatctccttccagctcggcgaggagttcgacgagaccaccgccgacgaccgcaactgcaagtccgtcgtctccctcgacggcgacaagctcgtccacatccagaagtgggacggcaaggagaccaacttcgtccgcgagatcaaggacggcaagatggtcatgaccctcaccttcggcgacgtcgtcgccgtccgccactacgagaaggcctga

SEQ ID NO: 1680 - RNA, 765 nt, synthetic construct
  misc_feature 1..765: note = CAA36870 variant
  source 1..765: mol_type = other RNA
atgtggcagctcctcctccccaccgccctcctcctcctcgtctccgccggcatgcgcaccgaggacctccccaaggccgtcgtcttcctcgagccccagtggtaccgcgtcctcgagaaggactccgtcaccctcaagtgccagggcgcctactcccccgaggacaactccacccagtggttccacaacgagtccctcatctcctcccaggcctcctcctacttcatcgacgccgccaccgtcgacgactccggcgagtaccgctgccagaccaacctctccaccctctccgaccccgtccagctcgaggtccacatcggctggctcctcctccaggccccccgctgggtcttcaaggaggaggaccccatccacctccgctgccactcctggaagaacaccgccctccacaaggtcacctacctccagaacggcaagggccgcaagtacttccaccacaactccgacttctacatccccaaggccaccctcaaggactccggctcctacttctgccgcggcctcttcggctccaagaacgtctcctccgagaccgtcaacatcaccatcacccagggcctcgccgtctccaccatctcctccttcttcccccccggctaccaggtctccttctgcctcgtcatggtcctcctcttcgccgtcgacaccggcctctacttctccgtcaagaccaacatccgctcctccacccgcgactggaaggaccacaagttcaagtggcgcaaggacccccaggacaagtga

SEQ ID NO: 1681 - RNA, 873 nt, synthetic construct
  misc_feature 1..873: note = CCDS1232.1 variant
  source 1..873: mol_type = other RNA
atgggcggcggcgccggcgagcgcctcttcacctcctcctgcctcgtcggcctcgtccccctcggcctccgcatctccctcgtcacctgccccctccagtgcggcatcatgtggcagctcctcctccccaccgccctcctcctcctcgtctccgccggcatgcgcaccgaggacctccccaaggccgtcgtcttcctcgagccccagtggtaccgcgtcctcgagaaggactccgtcaccctcaagtgccagggcgcctactcccccgaggacaactccacccagtggttccacaacgagtccctcatctcctcccaggcctcctcctacttcatcgacgccgccaccgtcgacgactccggcgagtaccgctgccagaccaacctctccaccctctccgaccccgtccagctcgaggtccacatcggctggctcctcctccaggccccccgctgggtcttcaaggaggaggaccccatccacctccgctgccactcctggaagaacaccgccctccacaaggtcacctacctccagaacggcaagggccgcaagtacttccaccacaactccgacttctacatccccaaggccaccctcaaggactccggctcctacttctgccgcggcctcttcggctccaagaacgtctcctccgagaccgtcaacatcaccatcacccagggcctcgccgtctccaccatctcctccttcttcccccccggctaccaggtctccttctgcctcgtcatggtcctcctcttcgccgtcgacaccggcctctacttctccgtcaagaccaacatccgctcctccacccgcgactggaaggaccacaagttcaagtggcgcaaggacccccaggacaagtga

SEQ ID NO: 1682 - RNA, 807 nt, synthetic construct
  misc_feature 1..807: note = AAH74858 variant
  source 1..807: mol_type = other RNA
atgtccctctccttcctcctcctcctcttcttctcccacctcatcctctccgcctgggcccacggcgagaagcgcctcgcccccaagggccagcccggccccgccgccaccgaccgcaacccccgcggctcctcctcccgccagtcctcctcctccgccatgtcctcctcctccgcctcctcctcccccgccgcctccctcggctcccagggctccggcctcgagcagtcctccttccagtggtccccctccggccgccgcaccggctccctctactgccgcgtcggcatcggcttccacctccagatctaccccgacggcaaggtcaacggctcccacgaggccaacatgctctccgtcctcgagatcttcgccgtctcccagggcatcgtcggcatccgcggcgtcttctccaacaagttcctcgccatgtccaagaagggcaagctccacgcctccgccaagttcaccgacgactgcaagttccgcgagcgcttccaggagaactcctacaacacctacgcctccgccatccaccgcaccgagaagaccggccgcgagtggtacgtcgccctcaacaagcgcggcaaggccaagcgcggctgctccccccgcgtcaagccccagcacatctccacccacttcctcccccgcttcaagcagtccgagcagcccgagctctccttcaccgtcaccgtccccgagaagaagaagcccccctcccccatcaagcccaagatccccctctccgccccccgcaagaacaccaactccgtcaagtaccgcctcaagttccgcttcggctga

SEQ ID NO: 1683 - RNA, 117 nt, synthetic construct
  misc_feature 1..117: note = AAB06462 variant
  source 1..117: mol_type = other RNA
atgtccacccgctgcggcgaggccggccgcgcccgcggcacccagccccaccgcggctaccgcgcccagaaccagccctacaagatgcacctcggccccccccgcctcgaggagtga

SEQ ID NO: 1684 - RNA, 2466 nt, synthetic construct
  misc_feature 1..2466: note = AAA59470 variant
  source 1..2466: mol_type = other RNA
atggtctcctggggccgcttcatctgcctcgtcgtcgtcaccatggccaccctctccctcgcccgcccctccttctccctcgtcgaggacaccaccctcgagcccgaggagccccccaccaagtaccagatctcccagcccgaggtctacgtcgccgcccccggcgagtccctcgaggtccgctgcctcctcaaggacgccgccgtcatctcctggaccaaggacggcgtccacctcggccccaacaaccgcaccgtcctcatcggcgagtacctccagatcaagggcgccaccccccgcgactccggcctctacgcctgcaccgcctcccgcaccgtcgactccgagacctggtacttcatggtcaacgtcaccgacgccatctcctccggcgacgacgaggacgacaccgacggcgccgaggacttcgtctccgagaactccaacaacaagcgcgccccctactggaccaacaccgagaagatggagaagcgcctccacgccgtccccgccgccaacaccgtcaagttccgctgccccgccggcggcaaccccatgcccaccatgcgctggctcaagaacggcaaggagttcaagcaggagcaccgcatcggcggctacaaggtccgcaaccagcactggtccctcatcatggagtccgtcgtcccctccgacaagggcaactacacctgcgtcgtcgagaacgagtacggctccatcaaccacacctaccacctcgacgtcgtcgagcgctccccccaccgccccatcctccaggccggcctccccgccaacgcctccaccgtcgtcggcggcgacgtcgagttcgtctgcaaggtctactccgacgcccagccccacatccagtggatcaagcacgtcgagaagaacggctccaagtacggccccgacggcctcccctacctcaaggtcctcaaggccgccggcgtcaacaccaccgacaaggagatcgaggtcctctacatccgcaacgtcaccttcgaggacgccggcgagtacacctgcctcgccggcaactccatcggcatctccttccactccgcctggctcaccgtcctccccgcccccggccgcgagaaggagatcaccgcctcccccgactacctcgagatcgccatctactgcatcggcgtcttcctcatcgcctgcatggtcgtcaccgtcatcctctgccgcatgaagaacaccaccaagaagcccgacttctcctcccagcccgccgtccacaagctcaccaagcgcatccccctccgccgccaggtcaccgtctccgccgagtcctcctcctccatgaactccaacacccccctcgtccgcatcaccacccgcctctcctccaccgccgacacccccatgctcgccggcgtctccgagtacgagctccccgaggaccccaagtgggagttcccccgcgacaagctcaccctcggcaagcccctcggcgagggctgcttcggccaggtcgtcatggccgaggccgtcggcatcgacaaggacaagcccaaggaggccgtcaccgtcgccgtcaagatgctcaaggacgacgccaccgagaaggacctctccgacctcgtctccgagatggagatgatgaagatgatcggcaagcacaagaacatcatcaacctcctcggcgcctgcacccaggacggccccctctacgtcatcgtcgagtacgcctccaagggcaacctccgcgagtacctccgcgcccgccgcccccccggcatggagtactcctacgacatcaaccgcgtccccgaggagcagatgaccttcaaggacctcgtctcctgcacctaccagctcgcccgcggcatggagtacctcgcctcccagaagtgcatccaccgcgacctcgccgcccgcaacgtcctcgtcaccgagaacaacgtcatgaagatcgccgacttcggcctcgcccgcgacatcaacaacatcgactactacaagaagaccaccaacggccgcctccccgtcaagtggatggcccccgaggccctcttcgaccgcgtctacacccaccagtccgacgtctggtccttcggcgtcctcatgtgggagatcttcaccctcggcggctccccctaccccggcatccccgtcgaggagctcttcaagctcctcaaggagggccaccgcatggacaagcccgccaactgcaccaacgagctctacatgatgatgcgcgactgctggcacgccgtcccctcccagcgccccaccttcaagcagctcgtcgaggacctcgaccgcatcctcaccctcaccaccaacgaggagtacctcgacctctcccagcccctcgagcagtactccccctcctaccccgacacccgctcctcctgctcctccggcgacgactccgtcttctcccccgaccccatgccctacgagccctgcctcccccagtacccccacatcaacggctccgtcaagacctga

SEQ ID NO: 1685 - RNA, 1908 nt, synthetic construct
  misc_feature 1..1908: note = EAW74574 variant
  source 1..1908: mol_type = other RNA
atggccccccccctcctcctcctcctcctcgcctccggcgccgccgcctgccccctcccctgcgtctgccagaacctctccgagtccctctccaccctctgcgcccaccgcggcctcctcttcgtcccccccaacgtcgaccgccgcaccgtcgagctccgcctcgccgacaacttcatccaggccctcggcccccccgacttccgcaacatgaccggcctcgtcgacctcaccctctcccgcaacgccatcacccgcatcggcgcccgcgccttcggcgacctcgagtccctccgctccctccacctcgacggcaaccgcctcgtcgagctcggcaccggctccctccgcggccccgtcaacctccagcacctcatcctctccggcaaccagctcggccgcatcgcccccggcgccttcgacgacttcctcgagtccctcgaggacctcgacctctcctacaacaacctccgccaggtcccctgggccggcatcggcgccatgcccgccctccacaccctcaacctcgaccacaacctcatcgacgccctcccccccggcgccttcgcccagctcggccagctctcccgcctcgacctcacctccaaccgcctcgccaccctcgcccccgaccccctcttctcccgcggccgcgacgccgaggcctcccccgcccccctcgtcctctccttctccggcaaccccctccactgcaactgcgagctcctctggctccgccgcctcgcccgccccgacgacctcgagacctgcgcctccccccccggcctcgccggccgctacttctgggccgtccccgagggcgagttctcctgcgagccccccctcatcgcccgccacacccagcgcctctgggtcctcgagggccagcgcgccaccctccgctgccgcgccctcggcgaccccgcccccaccatgcactgggtcggccccgacgaccgcctcgtcggcaactcctcccgcgcccgcgccttccccaacggcaccctcgagatcggcgtcaccggcgccggcgacgccggcggctacacctgcatcgccaccaaccccgccggcgaggccaccgcccgcgtcgagctccgcgtcctcgccctcccccacggcggcaactcctccgccgagggcggccgccccggcccctccgacatcgccgcctccgcccgcaccgccgccgagggcgagggcaccctcgagtccgagcccgccgtccaggtcaccgaggtcaccgccacctccggcctcgtctcctggggccccggccgccccgccgaccccgtctggatgttccagatccagtacaactcctccgaggacgagaccctcatctaccgcatcgtccccgcctcctcccaccacttcctcctcaagcacctcgtccccggcgccgactacgacctctgcctcctcgccctctcccccgccgccggcccctccgacctcaccgccacccgcctcctcggctgcgcccacttctccaccctccccgcctcccccctctgccacgccctccaggcccacgtcctcggcggcaccctcaccgtcgccgtcggcggcgtcctcgtcgccgccctcctcgtcttcaccgtcgccctcctcgtccgcggccgcggcgccggcaacggccgcctccccctcaagctctcccacgtccagtcccagaccaacggcggcccctcccccacccccaaggcccaccccccccgctccccccccccccgcccccagcgctcctgctccctcgacctcggcgacgccggctgctacggctacgcccgccgcctcggcggcgcctgggcccgccgctcccactccgtccacggcggcctcctcggcgccggctgccgcggcgtcggcggctccgccgagcgcctcgaggagtccgtcgtctga

SEQ ID NO: 1686 - RNA, 3297 nt, synthetic construct
  misc_feature 1..3297: note = EAW96782 variant
  source 1..3297: mol_type = other RNA
atgcccccccgccagcccccccgccaggccggcggcggcctctcccgcgagttcggcaagctcctccccgccctctcccactcccccctcggcggcctcggctccggctccggctccgtcgcccccggccagggccgcgccggcgccatgggctcccgcacccccgagtcccccctccacgccgtccagctccgctggggcccccgccgccgcccccccctcctccccctcctcctcctcctcctccccccccccccccgcgtcggcggcttcaacctcgacgccgaggcccccgccgtcctctccggcccccccggctccttcttcggcttctccgtcgagttctaccgccccggcaccgacggcgtctccgtcctcgtcggcgcccccaaggccaacacctcccagcccggcgtcctccagggcggcgccgtctacctctgcccctggggcgcctcccccacccagtgcacccccatcgagttcgactccaagggctcccgcctcctcgagtcctccctctcctcctccgagggcgaggagcccgtcgagtacaagtccctccagtggttcggcgccaccgtccgcgcccacggctcctccatcctcgcctgcgcccccctctactcctggcgcaccgagaaggagcccctctccgaccccgtcggcacctgctacctctccaccgacaacttcacccgcatcctcgagtacgccccctgccgctccgacttctcctgggccgccggccagggctactgccagggcggcttctccgccgagttcaccaagaccggccgcgtcgtcctcggcggccccggctcctacttctggcagggccagatcctctccgccacccaggagcagatcgccgagtcctactaccccgagtacctcatcaacctcgtccagggccagctccagacccgccaggcctcctccatctacgacgactcctacctcggctactccgtcgccgtcggcgagttctccggcgacgacaccgaggacttcgtcgccggcgtccccaagggcaacctcacctacggctacgtcaccatcctcaacggctccgacatccgctccctctacaacttctccggcgagcagatggcctcctacttcggctacgccgtcgccgccaccgacgtcaacggcgacggcctcgacgacctcctcgtcggcgcccccctcctcatggaccgcacccccgacggccgcccccaggaggtcggccgcgtctacgtctacctccagcaccccgccggcatcgagcccacccccaccctcaccctcaccggccacgacgagttcggccgcttcggctcctccctcacccccctcggcgacctcgaccaggacggctacaacgacgtcgccatcggcgcccccttcggcggcgagacccagcagggcgtcgtcttcgtcttccccggcggccccggcggcctcggctccaagccctcccaggtcctccagcccctctgggccgcctcccacacccccgacttcttcggctccgccctccgcggcggccgcgacctcgacggcaacggctaccccgacctcatcgtcggctccttcggcgtcgacaaggccgtcgtctaccgcggccgccccatcgtctccgcctccgcctccctcaccatcttccccgccatgttcaaccccgaggagcgctcctgctccctcgagggcaaccccgtcgcctgcatcaacctctccttctgcctcaacgcctccggcaagcacgtcgccgactccatcggcttcaccgtcgagctccagctcgactggcagaagcagaagggcggcgtccgccgcgccctcttcctcgcctcccgccaggccaccctcacccagaccctcctcatccagaacggcgcccgcgaggactgccgcgagatgaagatctacctccgcaacgagtccgagttccgcgacaagctctcccccatccacatcgccctcaacttctccctcgacccccaggcccccgtcgactcccacggcctccgccccgccctccactaccagtccaagtcccgcatcgaggacaaggcccagatcctcctcgactgcggcgaggacaacatctgcgtccccgacctccagctcgaggtcttcggcgagcagaaccacgtctacctcggcgacaagaacgccctcaacctcaccttccacgcccagaacgtcggcgagggcggcgcctacgaggccgagctccgcgtcaccgccccccccgaggccgagtactccggcctcgtccgccaccccggcaacttctcctccctctcctgcgactacttcgccgtcaaccagtcccgcctcctcgtctgcgacctcggcaaccccatgaaggccggcgcctccctctggggcggcctccgcttcaccgtcccccacctccgcgacaccaagaagaccatccagttcgacttccagatcctctccaagaacctcaacaactcccagtccgacgtcgtctccttccgcctctccgtcgaggcccaggcccaggtcaccctcaacggcgtctccaagcccgaggccgtcctcttccccgtctccgactggcacccccgcgaccagccccagaaggaggaggacctcggccccgccgtccaccacgtctacgagctcatcaaccagggcccctcctccatctcccagggcgtcctcgagctctcctgcccccaggccctcgagggccagcagctcctctacgtcacccgcgtcaccggcctcaactgcaccaccaaccaccccatcaaccccaagggcctcgagctcgaccccgagggctccctccaccaccagcagaagcgcgaggccccctcccgctcctccgcctcctccggcccccagatcctcaagtgccccgaggccgagtgcttccgcctccgctgcgagctcggccccctccaccagcaggagtcccagtccctccagctccacttccgcgtctgggccaagaccttcctccagcgcgagcaccagcccttctccctccagtgcgaggccgtctacaaggccctcaagatgccctaccgcatcctcccccgccagctcccccagaaggagcgccaggtcgccaccgccgtccagtggaccaaggccgagggctcctacggcgtccccctctggatcatcatcctcgccatcctcttcggcctcctcctcctcggcctcctcatctacatcctctacaagctcggcttcttcaagcgctccctcccctacggcaccgccatggagaaggcccagctcaagccccccgccacctccgacgcctga

SEQ ID NO: 1687 - RNA, 3597 nt, synthetic construct
  misc_feature 1..3597: note = EAX08808 variant
  source 1..3597: mol_type = other RNA
atggccgagcacccccccctcctcgacaccacccagatcctctcctccgacatctccctcctctccgcccccatcgtctccgccgacggcacccagcaggtcatcctcgtccaggtcaaccccggcgaggccttcaccatccgccgcgaggacggccagttccagtgcatcaccggccccgcccaggtccccatgatgtcccccaacggctccgtcccccccatctacgtcccccccggctacgccccccaggtcatcgaggacaacggcgtccgccgcgtcgtcgtcgtcccccaggcccccgagttccaccccggctcccacaccgtcctccaccgctccccccacccccccctccccggcttcatccccgtccccaccatgatgcccccccccccccgccacatgtactcccccgtcaccggcgccggcgacatgaccacccagtacatgccccagtaccagtcctcccaggtctacggcgacgtcgacgcccactccacccacggccgctccaacttccgcgacgagcgctcctccaagacctacgagcgcctccagaagaagctcaaggaccgccagggcacccagaaggacaagatgtcctcccccccctcctccccccagaagtgcccctcccccatcaacgagcacaacggcctcatcaagggccagatcgccggcggcatcaacaccggctccgccaagatcaagtccggcaagggcaagggcggcacccaggtcgacaccgagatcgaggagaaggacgaggagaccaaggccttcgaggccctcctctccaacatcgtcaagcccgtcgcctccgacatccaggcccgcaccgtcgtcctcacctggtcccccccctcctccctcatcaacggcgagaccgacgagtcctccgtccccgagctctacggctacgaggtcctcatctcctccaccggcaaggacggcaagtacaagtccgtctacgtcggcgaggagaccaacatcaccctcaacgacctcaagcccgccatggactaccacgccaaggtccaggccgagtacaactccatcaagggcaccccctccgaggccgagatcttcaccaccctctcctgcgagcccgacatccccaaccccccccgcatcgccaaccgcaccaagaactccctcaccctccagtggaaggccccctccgacaacggctccaagatccagaacttcgtcctcgagtgggacgagggcaagggcaacggcgagttctgccagtgctacatgggctcccagaagcagttcaagatcaccaagctctcccccgccatgggctgcaagttccgcctctccgcccgcaacgactacggcacctccggcttctccgaggaggtcctctactacacctccggctgcgccccctccatgcccgcctcccccgtcctcaccaaggccggcatcacctggctctccctccagtggtccaagccctccggcaccccctccgacgagggcatctcctacatcctcgagatggaggaggagacctccggctacggcttcaagcccaagtacgacggcgaggacctcgcctacaccgtcaagaacctccgccgctccaccaagtacaagttcaaggtcatcgcctacaactccgagggcaagtccaacccctccgaggtcgtcgagttcaccacctgccccgacaagcccggcatccccgtcaagccctccgtcaagggcaagatccactcccactccttcaagatcacctgggacccccccaaggacaacggcggcgccaccatcaacaagtacgtcgtcgagatggccgagggctccaacggcaacaagtgggagatgatctactccggcgccacccgcgagcacctctgcgaccgcctcaaccccggctgcttctaccgcctccgcgtctactgcatctccgacggcggccagtccgccgtctccgagtccctcctcgtccagacccccgccgtcccccccggcccctgcctccccccccgcctccagggccgccccaaggccaaggagatccagctccgctggggcccccccctcgtcgacggcggctcccccatctcctgctactccgtcgagatgtcccccatcgagaaggacgagccccgcgaggtctaccagggctccgaggtcgagtgcaccgtctcctccctcctccccggcaagacctactccttccgcctccgcgccgccaacaagatgggcttcggccccttctccgagaagtgcgacatcaccaccgcccccggcccccccgaccagtgcaagcccccccaggtcacctgccgctccgccacctgcgcccaggtcaactgggaggtccccctctccaacggcaccgacgtcaccgagtaccgcctcgagtggggcggcgtcgagggctccatgcagatctgctactgcggccccggcctctcctacgagatcaagggcctctcccccgccaccacctactactgccgcgtccaggccctctccgtcgtcggcgccggccccttctccgaggtcgtcgcctgcgtcacccccccctccgtccccggcatcgtcacctgcctccaggagatctccgacgacgagatcgagaacccccactactccccctccacctgcctcgccatctcctgggagaagccctgcgaccacggctccgagatcctcgcctactccatcgacttcggcgacaagcagtccctcaccgtcggcaaggtcacctcctacatcatcaacaacctccagcccgacaccacctaccgcatccgcatccaggccctcaactccctcggcgccggccccttctcccacatgatcaagctcaagaccaagcccctcccccccgaccccccccgcctcgagtgcgtcgccttctcccaccagaacctcaagctcaagtggggcgagggcacccccaagaccctctccaccgactccatccagtaccacctccagatggaggacaagaacggccgcttcgtctccctctaccgcggcccctgccacacctacaaggtccagcgcctcaacgagtccacctcctacaagttctgcatccaggcctgcaacgaggccggcgagggccccctctcccaggagtacatcttcaccacccccaagtccgtccccgccgccctcaaggcccccaagatcgagaaggtcaacgaccacatctgcgagatcacctgggagtgcctccagcccatgaagggcgaccccgtcatctactccctccaggtcatgctcggcaaggactccgagttcaagcagatctacaagggccccgactcctccttccgctactcctccctccagctcaactgcgagtaccgcttccgcgtctgcgccatccgccagtgccaggactccctcggccaccaggacctcgtcggcccctactccaccaccgtcctcttcatctcccagcgcaccgagccccccgcctccaccaaccgcgacaccgtcgagtccacccgcacccgccgcgccctctccgacgagcagtgcgccgccgtcatcctcgtcctcttcgccttcttctccatcctcatcgccttcatcatccagtacttcgtcatcaagtga

SEQ ID NO: 1688 - RNA, 3429 nt, synthetic construct
  misc_feature 1..3429: note = EAX08809 variant
  source 1..3429: mol_type = other RNA
atgtccggccccgcccaggtccccatgatgtcccccaacggctccgtcccccccatctacgtcccccccggctacgccccccaggtcatcgaggacaacggcgtccgccgcgtcgtcgtcgtcccccaggcccccgagttccaccccggctcccacaccgtcctccaccgctccccccacccccccctccccggcttcatccccgtccccaccatgatgcccccccccccccgccacatgtactcccccgtcaccggcgccggcgacatgaccacccagtacatgccccagtaccagtcctcccaggtctacggcgacgtcgacgcccactccacccacggccgctccaacttccgcgacgagcgctcctccaagacctacgagcgcctccagaagaagctcaaggaccgccagggcacccagaaggacaagatgtcctcccccccctcctccccccagaagtgcccctcccccatcaacgagcacaacggcctcatcaagggccagatcgccggcggcatcaacaccggctccgccaagatcaagtccggcaagggcaagggcggcacccaggtcgacaccgagatcgaggagaaggacgaggagaccaaggccttcgaggccctcctctccaacatcgtcaagcccgtcgcctccgacatccaggcccgcaccgtcgtcctcacctggtcccccccctcctccctcatcaacggcgagaccgacgagtcctccgtccccgagctctacggctacgaggtcctcatctcctccaccggcaaggacggcaagtacaagtccgtctacgtcggcgaggagaccaacatcaccctcaacgacctcaagcccgccatggactaccacgccaaggtccaggccgagtacaactccatcaagggcaccccctccgaggccgagatcttcaccaccctctcctgcgagcccgacatccccaaccccccccgcatcgccaaccgcaccaagaactccctcaccctccagtggaaggccccctccgacaacggctccaagatccagaacttcgtcctcgagtgggacgagggcaagggcaacggcgagttctgccagtgctacatgggctcccagaagcagttcaagatcaccaagctctcccccgccatgggctgcaagttccgcctctccgcccgcaacgactacggcacctccggcttctccgaggaggtcctctactacacctccggctgcgccccctccatgcccgcctcccccgtcctcaccaaggccggcatcacctggctctccctccagtggtccaagccctccggcaccccctccgacgagggcatctcctacatcctcgagatggaggaggagacctccggctacggcttcaagcccaagtacgacggcgaggacctcgcctacaccgtcaagaacctccgccgctccaccaagtacaagttcaaggtcatcgcctacaactccgagggcaagtccaacccctccgaggtcgtcgagttcaccacctgccccgacaagcccggcatccccgtcaagccctccgtcaagggcaagatccactcccactccttcaagatcacctgggacccccccaaggacaacggcggcgccaccatcaacaagtacgtcgtcgagatggccgagggctccaacggcaacaagtgggagatgatctactccggcgccacccgcgagcacctctgcgaccgcctcaaccccggctgcttctaccgcctccgcgtctactgcatctccgacggcggccagtccgccgtctccgagtccctcctcgtccagacccccgccgtcccccccggcccctgcctccccccccgcctccagggccgccccaaggccaaggagatccagctccgctggggcccccccctcgtcgacggcggctcccccatctcctgctactccgtcgagatgtcccccatcgagaaggacgagccccgcgaggtctaccagggctccgaggtcgagtgcaccgtctcctccctcctccccggcaagacctactccttccgcctccgcgccgccaacaagatgggcttcggccccttctccgagaagtgcgacatcaccaccgcccccggcccccccgaccagtgcaagcccccccaggtcacctgccgctccgccacctgcgcccaggtcaactgggaggtccccctctccaacggcaccgacgtcaccgagtaccgcctcgagtggggcggcgtcgagggctccatgcagatctgctactgcggccccggcctctcctacgagatcaagggcctctcccccgccaccacctactactgccgcgtccaggccctctccgtcgtcggcgccggccccttctccgaggtcgtcgcctgcgtcacccccccctccgtccccggcatcgtcacctgcctccaggagatctccgacgacgagatcgagaacccccactactccccctccacctgcctcgccatctcctgggagaagccctgcgaccacggctccgagatcctcgcctactccatcgacttcggcgacaagcagtccctcaccgtcggcaaggtcacctcctacatcatcaacaacctccagcccgacaccacctaccgcatccgcatccaggccctcaactccctcggcgccggccccttctcccacatgatcaagctcaagaccaagcccctcccccccgaccccccccgcctcgagtgcgtcgccttctcccaccagaacctcaagctcaagtggggcgagggcacccccaagaccctctccaccgactccatccagtaccacctccagatggaggacaagaacggccgcttcgtctccctctaccgcggcccctgccacacctacaaggtccagcgcctcaacgagtccacctcctacaagttctgcatccaggcctgcaacgaggccggcgagggccccctctcccaggagtacatcttcaccacccccaagtccgtccccgccgccctcaaggcccccaagatcgagaaggtcaacgaccacatctgcgagatcacctgggagtgcctccagcccatgaagggcgaccccgtcatctactccctccaggtcatgctcggcaaggactccgagttcaagcagatctacaagggccccgactcctccttccgctactcctccctccagctcaactgcgagtaccgcttccgcgtctgcgccatccgccagtgccaggactccctcggccaccaggacctcgtcggcccctactccaccaccgtcctcttcatctcccagcgcaccgagccccccgcctccaccaaccgcgacaccgtcgagtccacccgcacccgccgcgccctctccgacgagcagtgcgccgccgtcatcctcgtcctcttcgccttcttctccatcctcatcgccttcatcatccagtacttcgtcatcaagtga

SEQ ID NO: 1689 - RNA, 1020 nt, synthetic construct
  misc_feature 1..1020: note = EAW49214 variant
  source 1..1020: mol_type = other RNA
atgcccccctccaagccccacccccccgtcgtcggcaaggtcacccaccactccatcgagctctactgggacctcgagaagaaggccaagcgccagggcccccaggagcagtggttccgcttctccatcgaggaggaggaccccaagatgcacacctacggcatcatctacaccggctacgccaccaagcacgtcgtcgagggcctcgagccccgcaccctctaccgcttccgcctcaaggtcacctccccctccggcgagtgcgagtactcccccctcgtctccgtctccaccacccgcgagcccatctcctccgagcacctccaccgcgccgtctccgtcaacgacgaggacctcctcgtccgcatcctccagggcggccgcgtcaaggtcgacgtccccaacaagttcggcttcaccgccctcatggtcgccgcccagaagggctacacccgcctcgtcaagatcctcgtctccaacggcaccgacgtcaacctcaagaacggctccggcaaggactccctcatgctcgcctgctacgccggccacctcgacgtcgtcaagtacctccgccgccacggcgcctcctggcaggcccgcgacctcggcggctgcaccgccctccactgggccgccgacggcggccactgctccgtcatcgagtggatgatcaaggacggctgcgaggtcgacgtcgtcgacaccggctccggctggacccccctcatgcgcgtctccgccgtctccggcaaccagcgcgtcgcctccctcctcatcgacgccggcgccaacgtcaacgtcaaggaccgcaacggcaagacccccctcatggtcgccgtcctcaacaaccacgaggagctcgtccagctcctcctcgacaagggcgccgacgcctccgtcaagaacgagttcggcaagggcgtcctcgagatggcccgcgtcttcgaccgccagtccgtcgtctccctcctcgaggagcgcaagaagaagcagcgccccaagaagtcctgcgtctgctga

SEQ ID NO: 1690 - RNA, 3150 nt, synthetic construct
  misc_feature 1..3150: note = BAF84259 variant
  source 1..3150: mol_type = other RNA
atgggctcccgcacccccgagtcccccctccacgccgtccagctccgctggggcccccgccgccgcccccccctcctccccctcctcctcctcctcctccccccccccccccgcgtcggcggcttcaacctcgacgccgaggcccccgccgtcctctccggcccccccggctccttcttcggcttctccgtcgagttctaccgccccggcaccgacggcgtctccgtcctcgtcggcgcccccaaggccaacacctcccagcccggcgtcctccagggcggcgccgtctacctctgcccctggggcgcctcccccacccagtgcacccccatcgagttcgactccaagggctcccgcctcctcgagtcctccctctcctcctccgagggcgaggagcccgtcgagtacaagtccctccagtggttcggcgccaccgtccgcgcccacggctcctccatcctcgcctgcgcccccctctactcctggcgcaccgagaaggagcccctctccgaccccgtcggcacctgctacctctccaccgacaacttcacccgcatcctcgagtacgccccctgccgctccgacttctcctgggccgccggccagggctactgccagggcggcttctccgccgagttcaccaagaccggccgcgtcgtcctcggcggccccggctcctacttctggcagggccagatcctctccgccacccaggagcagatcgccgagtcctactaccccgagtacctcatcaacctcgtccagggccagctccagacccgccaggcctcctccatctacgacgactcctacctcggctactccgtcgccgtcggcgagttctccggcgacgacaccgaggacttcgtcgccggcgtccccaagggcaacctcacctacggctacgtcaccatcctcaacggctccgacatccgctccctctacaacttctccggcgagcagatggcctcctacttcgcctacgccgtcgccgccaccgacgtcaacggcgacggcctcgacgacctcctcgtcggcgcccccctcctcatggaccgcacccccgacggccgcccccaggaggtcggccgcgtctacgtctacctccagcaccccgccggcatcgagtccacccccaccctcaccctcaccggccacgacgagttcggccgcttcggctcctccctcacccccctcggcgacctcgaccaggacggctacaacgacgtcgccatcggcgcccccttcggcggcgagacccagcagggcgtcgtcttcgtcttccccggcggccccggcggcctcggctccaagccctcccaggtcctccagcccctctgggccgcctcccacacccccgacttcttcggctccgccctccgcggcggccgcgacctcgacggcaacggctaccccgacctcatcgtcggctccttcggcgtcgacaaggccgtcgtctaccgcggccgccccatcgtctccgcctccgcctccctcaccatcttccccgccatgttcaaccccgaggagcgctcctgctccctcgagggcaaccccgtcgcctgcatcaacctctccttctgcctcaacgcctccggcaagcacgtcgccgactccatcggcttcaccgtcgagctccagctcgactggcagaagcagaagggcggcgtccgccgcgccctcttcctcgcctcccgccaggccaccctcacccagaccctcctcatccagaacggcgcccgcgaggactgccgcgagatgaagatctacctccgcaacgagtccgagttccgcgacaagctctcccccatccacatcgccctcaacttctccctcgacccccaggcccccgtcgactcccacggcctccgccccgccctccactaccagtccaagtcccgcatcgaggacaaggcccagatcctcctcggctgcggcgaggacaacatctgcgtccccgacctccagctcgaggtcttcggcgagcagaaccacgtctacctcggcgacaagaacgccctcaacctcaccttccacgcccagaacgtcggcgagggcggcgcctacgaggccgagctccgcgtcaccgccccccccgaggccgagtactccggcctcgtccgccaccccggcaacttctcctccctctcctgcgactacttcgccgtcaaccagtcccgcctcctcgtctgcgacctcggcaaccccatgaaggccggcgcctccctctggggcggcctccgcttcaccgtcccccacctccgcgacaccaagaagaccatccagttcgacttccagatcctctccaagaacctcaacaactcccagtccgacgtcgtctccttccgcctctccgtcgaggcccaggcccaggtcaccctcaacggcgtctccaagcccgaggccgtcctcttccccgtctccgactggcacccccgcgaccagccccaggaggaggaggacctcggccccgccgtccaccacgtctacgagctcatcaaccagggcccctcctccatctcccagggcgtcctcgagctctcctgcccccaggccctcgagggccagcagctcctctacgtcacccgcgtcaccggcctcaactgcaccaccaaccaccccatcaaccccaagggcctcgagctcgaccccgagggctccctccaccaccagcagaagcgcgaggccccctcccgctcctccgcctcctccggcccccagatcctcaagtgccccgaggccgagtgcttccgcctccgctgcgagctcggccccctccaccagcaggagtcccagtccctccagctccacttccgcgtctgggccaagaccttcctccagcgcgagcaccagcccttctccctccagtgcgaggccgtctacaaggccctcaagatgccctaccgcatcctcccccgccagctcccccagaaggagcgccaggtcgccaccgccgtccagtggaccaaggccgagggctcctacggcgtccccctctggatcatcatcctcgccatcctcttcggcctcctcctcctcggcctcctcatctacatcctctacaagctcggcttcttcaagcgctccctcccctacggcaccgccatggagaaggcccagctcaagccccccgccacctccgacgcctga

SEQ ID NO: 1691 - RNA, 3150 nt, synthetic construct
  misc_feature 1..3150: note = BAG35324 variant
  source 1..3150: mol_type = other RNA
atgggctcccgcacccccgagtcccccctccacgccgtccagctccgctggggcccccgccgccgcccccccctcctccccctcctcctcctcctcctccccccccccccccgcgtcggcggcttcaacctcgacgccgaggcccccgccgtcctctccggcccccccggctccttcttcggcttctccgtcgagttctaccgccccggcaccgacggcgtctccgtcctcgtcggcgcccccaaggccaacacctcccagcccggcgtcctccagggcggcgccgtctacctctgcccctggggcgcctcccccacccagtgcacccccatcgagttcgactccaagggctcccgcctcctcgagtcctccctctcctcctccgagggcgaggagcccgtcgagtacaagtccctccagtggttcggcgccaccgtccgcgcccacggctcctccatcctcgcctgcgcccccctctactcctggcgcaccgagaaggagcccctctccgaccccgtcggcacctgctacctctccaccgacaacttcacccgcatcctcgagtacgccccctgccgctccgacttctcctgggccgccggccagggctactgccagggcggcttctccgccgagttcaccaagaccggccgcgtcgtcctcggcggccccggctcctacttctggcagggccagatcctctccgccacccaggagcagatcgccgagtcctactaccccgagtacctcatcaacctcgtccagggccagctccagacccgccaggcctcctccatctacgacgactcctacctcggctactccgtcgccgtcggcgagttctccggcgacgacaccgaggacttcgtcgccggcgtccccaagggcaacctcacctacggctacgtcaccatcctcaacggctccgacatccgctccctctacaacttctccggcgagcagatggcctcctacttcggctacgccgtcgccgccaccgacgtcaacggcgacggcctcgacgacctcctcgtcggcgcccccctcctcatggaccgcacccccgacggccgcccccagggcgtcggccgcgtctacgtctacctccagcaccccgccggcatcgagcccacccccaccctcaccctcaccggccacgacgagttcggccgcttcggctcctccctcacccccctcggcgacctcgaccaggacggctacaacgacgtcgccatcggcgcccccttcggcggcgagacccagcagggcgtcgtcttcgtcttccccggcggccccggcggcctcggctccaagctctcccaggtcctccagcccctctgggccgcctcccacacccccgacttcttcggctccgccctccgcggcggccgcgacctcgacggcaacggctaccccgacctcatcgtcggctccttcggcgtcgacaaggccgtcgtctaccgcggccgccccatcgtctccgcctccgcctccctcaccatcttccccgccatgttcaaccccgaggagcgctcctgctccctcgagggcaaccccgtcgcctgcatcaacctctccttctgcctcaacgcctccggcaagcacgtcgccgactccatcggcttcaccgtcgagctccagctcgactggcagaagcagaagggcggcgtccgccgcgccctcttcctcgcctcccgccaggccaccctcacccagaccctcctcatccagaacggcgcccgcgaggactgccgcgagatgaagatctacctccgcaacgagtccgagttccgcgacaagctctcccccatccacatcgccctcaacttctccctcgacccccaggcccccgtcgactcccacggcctccgccccgccctccactaccagtccaagtcccgcatcgaggacaaggcccagatcctcctcgactgcggcgaggacaacatctgcgtccccgacctccagctcgaggtcttcggcgagcagaaccacgtctacctcggcgacaagaacgccctcaacctcaccttccacgcccagaacgtcggcgagggcggcgcctacgaggccgagctccgcgtcaccgccccccccgaggccgagtactccggcctcgtccgccaccccggcaacttctcctccctctcctgcgactacttcgccgtcaaccagtcccgcctcctcgtctgcgacctcggcaaccccatgaaggccggcgcctccctctggggcggcctccgcttcaccgtcccccacctccgcgacaccaagaagaccatccagttcgacttccagatcctctccaagaacctcaacaactcccagtccgacgtcgtctccttccgcctctccgtcgaggcccaggcccaggtcaccctcaacggcgtctccaagcccgaggccgtcctcttccccgtctccgactggcacccccgcgaccagccccagaaggaggaggacctcggccccgccgtccaccacgtctacgagctcatcaaccagggcccctcctccatctcccagggcgtcctcgagctctcctgcccccaggccctcgagggccagcagctcctctacgtcacccgcgtcaccggcctcaactgcaccaccaaccaccccatcaaccccaagggcctcgagctcgaccccgagggctccctccaccaccagcagaagcgcgaggccccctcccgctcctccgcctcctccggcccccagatcctcaagtgccccgaggccgagtgcttccgcctccgctgcgagctcggccccctccaccagcaggagtcccagtccctccagctccacttccgcgtctgggccaagaccttcctccagcgcgagcaccagcccttctccctccagtgcgaggccgtctacaaggccctcaagatgccctaccgcatcctcccccgccagctcccccagaaggagcgccaggtcgccaccgccgtccagtggaccaaggccgagggctcctacggcgtccccctctggatcatcatcctcgccatcctcttcggcctcctcctcctcggcctcctcatctacatcctctacaagctcggcttcttcaagcgctccctcccctacggcaccgccatggagaaggcccagctcaagccccccgccacctccgacgcctga

SEQ ID NO: 1692 - RNA, 1401 nt, synthetic construct
  misc_feature 1..1401: note = BAG54537 variant
  source 1..1401: mol_type = other RNA
atgctctccctccgccagcgcatgatgcacgcccgcttccgcaaccccctctcccgccagcccgcccgcccctcctaccgccagggctacaacggccgccccaacgtcgagggcaaggtcctccccggctccaacggcaagcccaacggccagcgcatcatcaacggcccccagggcaccaagtgggtcgtcgacctcgaccgcggcctcgtcctcaacgccgagggccgctacctccaggactcccacggcaaccccctccgcatcaagctcggcggcgacggccgcaccatcgtcgacctcgagggcacccccgtcgtctcccccgacggcctccccctcttcggccagggccgccacggcacccccctcgccaacgcccaggacaagcccatcctctccctcggcggcaagcccctcgtcggcctcgaggtcatcaagaagaccacccacccccccaccaccaccatgcagcccaccaccaccaccacccccctccccaccaccaccaccccccgccccaccaccgccaccacccgccgcaccaccacccgccgccccaccaccaccgtccgcaccaccacccgcaccaccaccaccaccacccccaagcccaccacccccatccccacctgcccccccggcaccctcgagcgccacgacgacgacggcaacctcatcatgtcctccaacggcatccccgagtgctacgccgaggaggacgagttctccggcctcgagaccgacaccgccgtccccaccgaggaggcctacgtcatctacgacgaggactacgagttcgagacctcccgcccccccaccaccaccgagccctccaccaccgccaccaccccccgcgtcatccccgaggagggcgccatctcctccttccccgaggaggagttcgacctcgccggccgcaagcgcttcgtcgccccctacgtcacctacctcaacaaggacccctccgccccctgctccctcaccgacgccctcgaccacttccaggtcgactccctcgacgagatcatccccaacgacctcaagaagtccgacctccccccccagcacgccccccgcaacatcaccgtcgtcgccgtcgagggctgccactccttcgtcatcgtcgactgggacaaggccacccccggcgacgtcgtcaccggctacctcgtctactccgcctcctacgaggacttcatccgcaacaagtggtccacccaggcctcctccgtcacccacctccccatcgagaacctcaagcccaacacccgctactacttcaaggtccaggcccagaacccccacggctacggccccatctccccctccgtctccttcgtcaccgagtccgacaaccccctcctcgtcgtccgcccccccggcggcgagcccatctga

SEQ ID NO: 1693 - RNA, 471 nt, synthetic construct
  misc_feature 1..471: note = BAG58437 variant
  source 1..471: mol_type = other RNA
atggaggagcagcgcaacgaggagatccagtccttcatctactccctcaagcagatgctcctcaacgtcgaggccaactccgccaaggtccaggaggacctcgaggccgagttccagtccctcttctccctcctcgaggagctcaaggagggcatgctcatgaagatcaagcaggaccgcgcctcccgcacctacgagctccagaaccagctcgccgcctgcacccgcgccctcgagtcctccgaggagctcctcgagaccgccaaccagaccctccaggccatggactccgaggacttcccccaggccgccaagcagatcaaggacggcgtcaccatggcccccgccttccgcctctccctcaaggccaaggtctccgacaacatgtcccacctcatggtcgacttcgcccaggagcgccagatgctccaggccctcaagttcctccccggcgagcgcggcacccactga

SEQ ID NO: 1694 - RNA, 921 nt, synthetic construct
  misc_feature 1..921: note = BAH14721 variant
  source 1..921: mol_type = other RNA
atgatcttcgaggagcacggcttccgccgcaccaccccccccaccaccgccacccccatccgccaccgcccccgcccctacccccccaacgtcggccaggaggccctctcccagaccaccatctcctgggcccccttccaggacacctccgagtacatcatctcctgccaccccgtcggcaccgacgaggagcccctccagttccgcgtccccggcacctccacctccgccaccctcaccggcctcacccgcggcgccacctacaacatcatcgtcgaggccctcaaggaccagcagcgccacaaggtccgcgaggaggtcgtcaccgtcggcaactccgtcaacgagggcctcaaccagcccaccgacgactcctgcttcgacccctacaccgtctcccactacgccgtcggcgacgagtgggagcgcatgtccgagtccggcttcaagctcctctgccagtgcctcggcttcggctccggccacttccgctgcgactcctcccgctggtgccacgacaacggcgtcaactacaagatcggcgagaagtgggaccgccagggcgagaacggccagatgatgtcctgcacctgcctcggcaacggcaagggcgagttcaagtgcgacccccacgaggccacctgctacgacgacggcaagacctaccacgtcggcgagcagtggcagaaggagtacctcggcgccatctgctcctgcacctgcttcggcggccagcgcggctggcgctgcgacaactgccgccgccccggcggcgagccctcccccgagggcaccaccggccagtcctacaaccagtactcccagcgctaccaccagcgcaccaacaccaacgtcaactgccccatcgagtgcttcatgcccctcgacgtccaggccgaccgcgaggactcccgcgagtga

SEQ ID NO: 1695 - RNA, 1920 nt, synthetic construct
  misc_feature 1..1920: note = BAG61560 variant
  source 1..1920: mol_type = other RNA
atggagaagatcctcttctacctcttcctcatcggcatcgccgtcaaggcccagatctgccccaagcgctgcgtctgccagatcctctcccccaacctcgccaccctctgcgccaagaagggcctcctcttcgtcccccccaacatcgaccgccgcaccgtcgagctccgcctcgccgacaacttcgtcaccaacatcaagcgcaaggacttcgccaacatgacctccctcgtcgacctcaccctctcccgcaacaccatctccttcatcaccccccacgccttcgccgacctccgcaacctccgctccctccacctcaactccaaccgcctcaccaagatcaccaacgacatgttctccggcctctccaacctccaccacctcatcctcaacaacaaccagctcaccctcatctcctccaccgccttcgacgacgtcttcgccctcgaggagctcgacctctcctacaacaacctcgagaccatcccctgggacgccgtcgagaagatggtctccctccacaccctctccctcgaccacaacatgatcgacaacatccccaagggcaccttctcccacctccacaagatgacccgcctcgacgtcacctccaacaagctccagaagctcccccccgaccccctcttccagcgcgcccaggtcctcgccacctccggcatcatctccccctccaccttcgccctctccttcggcggcaaccccctccactgcaactgcgagctcctctggctccgccgcctctcccgcgagtacgacctcgagacctgcgcctccccccccctcctcaccggccgctacttctggtccatccccgaggaggagttcctctgcgagccccccctcatcacccgccacacccacgagatgcgcgtcctcgagggccagcgcgccaccctccgctgcaaggcccgcggcgaccccgagcccgccatccactggatctcccccgagggcaagctcatctccaacgccacccgctccctcgtctacgacaacggcaccctcgacatcctcatcaccaccgtcaaggacaccggcgccttcacctgcatcgcctccaaccccgccggcgaggccacccagatcgtcgacctccacatcatcaagctcccccacctcctcaactccaccaaccacatccacgagcccgaccccggctcctccgacatctccacctccaccaagtccggctccaacacctcctcctccaacgacggcatcacctccctcaccgccacccgcgtcgtcggctgcatccagttcaccaccgagcaggactacgtccgctgccacttcatgcagtcccagttcctcggcggcaccatgatcatcatcatcggcggcatcatcgtcgcctccgtcctcgtcttcatcatcatcctcatgatccgctacaaggtctgcaacaacaacggccagcacaaggtcaccaaggtctccaacgtctactcccagaccaacggcgcccagatccagggctgctccgtcaccctcccccagtccgtctccaagcaggccgtcggccacgaggagaacgcccagtgctgcaaggccacctccgacaacgtcatccagtcctccgagacctgctcctcccaggactccgccaccaccacctccgccctccccccctcctggacctcctccacctccgtctcccagaagcagaagcgcaagaccggcaccaagccctccaccgagccccagaacgaggccgtcaccaacgtcgagtcccagaacaccaaccgcaacaactccaccgccctccagctcgcctcccgcccccccgactccgtcaccgagggccccacctccaagcgcgcccacatcaagcccaacgccctcctcaccaacgtcgaccagatcgtccaggagacccagcgcctcgagctcatctga

SEQ ID NO: 1696 - RNA, 1014 nt, synthetic construct
  misc_feature 1..1014: note = BAG61984 variant
  source 1..1014: mol_type = other RNA
atgatcttcgaggagcacggcttccgccgcaccaccccccccaccaccgccacccccatccgccaccgcccccgcccctacccccccaacgtcggcgaggagatccagatcggccacatcccccgcgaggacgtcgactaccacctctacccccacggccccggcctcaaccccaacgcctccaccggccaggaggccctctcccagaccaccatctcctgggcccccttccaggacacctccgagtacatcatctcctgccaccccgtcggcaccgacgaggagcccctccagttccgcgtccccggcacctccacctccgccaccctcaccggcctcacccgcggcgccacctacaacatcatcgtcgaggccctcaaggaccagcagcgccacaaggtccgcgaggaggtcgtcaccgtcggcaactccgtcaacgagggcctcaaccagcccaccgacgactcctgcttcgacccctacaccgtctcccactacgccgtcggcgacgagtgggagcgcatgtccgagtccggcttcaagctcctctgccagtgcctcggcttcggctccggccacttccgctgcgactcctcccgctggtgccacgacaacggcgtcaactacaagatcggcgagaagtgggaccgccagggcgagaacggccagatgatgtcctgcacctgcctcggcaacggcaagggcgagttcaagtgcgacccccacgaggccacctgctacgacgacggcaagacctaccacgtcggcgagcagtggcagaaggagtacctcggcgccatctgctcctgcacctgcttcggcggccagcgcggctggcgctgcgacaactgccgccgccccggcggcgagccctcccccgagggcaccaccggccagtcctacaaccagtactcccagcgctaccaccagcgcaccaacaccaacgtcaactgccccatcgagtgcttcatgcccctcgacgtccaggccgaccgcgaggactcccgcgagtga

SEQ ID NO: 1697 - RNA, 3045 nt, synthetic construct
  misc_feature 1..3045: note = BAG62013 variant
  source 1..3045: mol_type = other RNA
atgcgcgtcacctgggccccccccccctccatcgacctcaccaacttcctcgtccgctactcccccgtcaagaacgaggaggacgtcgccgagctctccatctccccctccgacaacgccgtcgtcctcaccaacctcctccccggcaccgagtacgtcgtctccgtctcctccgtctacgagcagcacgagtccacccccctccgcggccgccagaagaccggcctcgactcccccaccggcatcgacttctccgacatcaccggcaactccttcaccgtccactggatcgccccccgcgccaccatcaccggctaccgcatccgccaccaccccgagcacttctccggccgcccccgcgaggaccgcgtcccccactcccgcaactccatcaccctcaccaacctcacccccggcaccgagtacgtcgtctccatcgtcgccctcaacggccgcgaggagtcccccctcctcatcggccagcagtccaccgtctccgacgtcccccgcgacctcgaggtcgtcgccgccacccccacctccctcctcatctcctgggacgcccccgccgtcaccgtccgctactaccgcatcacctacggcgagaccggcggcaactcccccgtccaggagttcaccgtccccggctccaagtccaccgccaccatctccggcctcaagcccggcgtcgactacaccatcaccgtctacgccgtcaccggccgcggcgactcccccgcctcctccaagcccatctccatcaactaccgcaccgagatcgacaagccctcccagatgcaggtcaccgacgtccaggacaactccatctccgtcaagtggctcccctcctcctcccccgtcaccggctaccgcgtcaccaccacccccaagaacggccccggccccaccaagaccaagaccgccggccccgaccagaccgagatgaccatcgagggcctccagcccaccgtcgagtacgtcgtctccgtctacgcccagaacccctccggcgagtcccagcccctcgtccagaccgccgtcaccaccatccccgcccccaccgacctcaagttcacccaggtcacccccacctccctctccgcccagtggaccccccccaacgtccagctcaccggctaccgcgtccgcgtcacccccaaggagaagaccggccccatgaaggagatcaacctcgcccccgactcctcctccgtcgtcgtctccggcctcatggtcgccaccaagtacgaggtctccgtctacgccctcaaggacaccctcacctcccgccccgcccagggcgtcgtcaccaccctcgagaacgtctcccccccccgccgcgcccgcgtcaccgacgccaccgagaccaccatcaccatctcctggcgcaccaagaccgagaccatcaccggcttccaggtcgacgccgtccccgccaacggccagacccccatccagcgcaccatcaagcccgacgtccgctcctacaccatcaccggcctccagcccggcaccgactacaagatctacctctacaccctcaacgacaacgcccgctcctcccccgtcgtcatcgacgcctccaccgccatcgacgccccctccaacctccgcttcctcgccaccacccccaactccctcctcgtctcctggcagcccccccgcgcccgcatcaccggctacatcatcaagtacgagaagcccggctcccccccccgcgaggtcgtcccccgcccccgccccggcgtcaccgaggccaccatcaccggcctcgagcccggcaccgagtacaccatctacgtcatcgccctcaagaacaaccagaagtccgagcccctcatcggccgcaagaagaccgacgagctcccccagctcgtcaccctcccccaccccaacctccacggccccgagatcctcgacgtcccctccaccgtccagaagacccccttcgtcacccaccccggctacgacaccggcaacggcatccagctccccggcacctccggccagcagccctccgtcggccagcagatgatcttcgaggagcacggcttccgccgcaccaccccccccaccaccgccacccccatccgccaccgcccccgcccctacccccccaacgtcggcgaggagatccagatcggccacatcccccgcgaggacgtcgactaccacctctacccccacggccccggcctcaaccccaacgcctccaccggccaggaggccctctcccagaccaccatctcctgggcccccttccaggacacctccgagtacatcatctcctgccaccccgtcggcaccgacgaggagcccctccagttccgcgtccccggcacctccacctccgccaccctcaccggcctcacccgcggcgccacctacaacatcatcgtcgaggccctcaaggaccagcagcgccacaaggtccgcgaggaggtcgtcaccgtcggcaactccgtcaacgagggcctcaaccagcccaccgacgactcctgcttcgacccctacaccgtctcccactacgccgtcggcgacgagtgggagcgcatgtccgagtccggcttcaagctcctctgccagtgcctcggcttcggctccggccacttccgctgcgactcctcccgctggtgccacgacaacggcgtcaactacaagatcggcgagaagtgggaccgccagggcgagaacggccagatgatgtcctgcacctgcctcggcaacggcaagggcgagttcaagtgcgacccccacgaggccacctgctacgacgacggcaagacctaccacgtcggcgagcagtggcagaaggagtacctcggcgccatctgctcctgcacctgcttcggcggccagcgcggctggcgctgcgacaactgccgccgccccggcggcgagccctcccccgagggcaccaccggccagtcctacaaccagtactcccagcgctaccaccagcgcaccaacaccaacgtcaactgccccatcgagtgcttcatgcccctcgacgtccaggccgaccgcgaggactcccgcgagtga

SEQ ID NO: 1698 - RNA, 2685 nt, synthetic construct
  misc_feature 1..2685: note = BAG62178 variant
  source 1..2685: mol_type = other RNA
atgcgcgtcacctgggccccccccccctccatcgacctcaccaacttcctcgtccgctactcccccgtcaagaacgaggaggacgtcgccgagctctccatctccccctccgacaacgccgtcgtcctcaccaacctcctccccggcaccgagtacgtcgtctccgtctcctccgtctacgagcagcacgagtccacccccctccgcggccgccagaagaccggcctcgactcccccaccggcatcgacttctccgacatcaccgccaactccttcaccgtccactggatcgccccccgcgccaccatcaccggctaccgcatccgccaccaccccgagcacttctccggccgcccccgcgaggaccgcgtcccccactcccgcaactccatcaccctcaccaacctcacccccggcaccgagtacgtcgtctccatcgtcgccctcaacggccgcgaggagtcccccctcctcatcggccagcagtccaccgtctccgacgtcccccgcgacctcgaggtcgtcgccgccacccccacctccctcctcatctcctgggacgcccccgccgtcaccgtccgctactaccgcatcacctacggcgagaccggcggcaactcccccgtccaggagttcaccgtccccggctccaagtccaccgccaccatctccggcctcaagcccggcgtcgactacaccatcaccgtctacgccgtcaccggccgcggcgactcccccgcctcctccaagcccatctccatcaactaccgcaccgagatcgacaagccctcccagatgcaggtcaccgacgtccaggacaactccatctccgtcaagtggctcccctcctcctcccccgtcaccggctaccgcgtcaccaccacccccaagaacggccccggccccaccaagaccaagaccgccggccccgaccagaccgagatgaccatcgagggcctccaccccaccgtcgagtacgtcgtctccgtctacgcccagaacccctccggcgagtcccagcccctcgtccagaccgccgtcaccaccatccccgcccccaccgacctcaagttcacccaggtcacccccacctccctctccgcccagtggaccccccccaacgtccagctcaccggctaccgcgtccgcgtcacccccaaggagaagaccggccccatgaaggagatcaacctcgcccccgactcctcctccgtcgtcgtctccggcctcatggtcgccaccaagtacgaggtctccgtctacgccctcaaggacaccctcacctcccgccccgcccagggcgtcgtcaccaccctcgagaacgtctcccccccccgccgcgcccgcgtcaccgacgccaccgagaccaccatcaccatctcctggcgcaccaagaccgagaccatcaccggcttccaggtcgacgccgtccccgccaacggccagacccccatccagcgcaccatcaagcccgacgtccgctcctacaccatcaccggcctccagcccggcaccgactacaagatctacctctacaccctcaacgacaacgcccgctcctcccccgtcgtcatcgacgcctccaccgccatcgacgccccctccaacctccgcttcctcgccaccacccccaactccctcctcgtctcctggcagcccccccgcgcccgcatcaccggctacatcatcaagtacgagaagcccggctcccccccccgcgaggtcgtcccccgcccccgccccggcgtcaccgaggccaccatcaccggcctcgagcccggcaccgagtacaccatctacgtcatcgccctcaagaacaaccagaagtccgagcccctcatcggccgcaagaagaccggccaggaggccctctcccagaccaccatctcctgggcccccttccaggacacctccgagtacatcatctcctgccaccccgtcggcaccgacgaggagcccctccagttccgcgtccccggcacctccacctccgccaccctcaccggcctcacccgcggcgccacctacaacatcatcgtcgaggccctcaaggaccagcagcgccacaaggtccgcgaggaggtcatcaccgtcggcaactccgtcaacgagggcctcaaccagcccaccgacgactcctgcttcgacccctacaccgtctcccactacgccgtcggcgacgagtgggagcgcatgtccgagtccggcttcaagctcctctgccagtgcctcggcttcggctccggccacttccgctgcgactcctcccgctggtgccacgacaacggcgtcaactacaagatcggcgagaagtgggaccgccagggcgagaacggccagatgatgtcctgcacctgcctcggcaacggcaagggcgagttcaagtgcgacccccacgaggccacctgctacgacgacggcaagacctaccacgtcggcgagcagtggcagaaggagtacctcggcgccatctgctcctgcacctgcttcggcggccagcgcggctggcgctgcgacaactgccgccgccccggcggcgagccctcccccgagggcaccaccggccagtcctacaaccagtactcccagcgctaccaccagcgcaccaacaccaacgtcaactgccccatcgagtgcttcatgcccctcgacgtccaggccgaccgcgaggactcccgcgagtga

SEQ ID NO: 1699 - RNA, 1152 nt, synthetic construct
  misc_feature 1..1152: note = BAH12351 variant
  source 1..1152: mol_type = other RNA
atggcctccgccttccgcctctccctcaagcccaaggtctccgacaacatgacccacctcatggtcgacttctcccaggagcgccagatgctccagaccctcaagttcctccccgtccccaaggcccccgagatcgaccccgtcgagtgcctcgtcgccgacaactccgtcaccgtcgcctggcgcatgcccgaggaggacaacaagatcgaccacttcatcctcgagcaccgcaagaccaacttcgacggcctcccccgcgtcaaggacgagcgctgctgggagatcatcgacaacatcaagggcaccgagtacaccctctccggcctcaagttcgactccaagtacatgaacttccgcgtccgcgcctgcaacaaggccgtcgccggcgagtactccgaccccgtcaccctcgagaccaaggccctcaacttcaacctcgacaactcctcctcccacctcaacctcaaggtcgaggacacctgcgtcgagtgggaccccaccggcggcaagggccaggagtccaagatcaagggcaaggagaacaagggctccgtccacgtcacctccctcaagaagcacacctccggcaccccctcccccaagcgcacctccgtcggctcccgcccccccgccgtccgcggctcccgcgaccgcttcaccggcgagtcctacaccgtcctcggcgacaccgccatcgagtccggccagcactactgggaggtcaaggcccagaaggactgcaagtcctactccgtcggcgtcgcctacaagaccctcggcaagttcgaccagctcggcaagaccaacacctcctggtgcatccacgtcaacaactggctccagaacaccttcgccgccaagcacaacaacaaggtcaaggccctcgacgtcaccgtccccgagaagatcggcgtcttctgcgacttcgacggcggccagctctccttctacgacgccaactccaagcagctcctctactccttcaagaccaagttcacccagcccgtcctccccggcttcatggtctggtgcggcggcctctccctctccaccggcatgcaggtcccctccgccgtccgcaccctccagaagtccgagaacggcatgaccggctccgcctcctccctcaacaacgtcgtcacccagtga

SEQ ID NO: 1700 - RNA, 441 nt, synthetic construct
  misc_feature 1..441: note = BAH14175 variant
  source 1..441: mol_type = other RNA
atgcccccctccaagccccacccccccgtcgtcggcaaggtcacccaccactccatcgagctctactgggacctcgagaagaaggccaagcgccagggcccccaggagcagtggttccgcttctccatcgaggaggaggaccccaagatgcacacctacggcatcatctacaccggctacgccaccaagcacgtcgtcgagggcctcgagccccgcaccctctaccgcttccgcctcaaggtcacctccccctccggcgagtgcgagtactcccccctcgtctccgtctccaccacctccgagtactccgaccgcccccactcccccctctcccgctccatggagatgacctccaacctcgagaagatcttctgcctctccttcggcctcacccgctcccgcaacgacaccatcttcaagcactgcaacaacatctgctga

SEQ ID NO: 1701 - RNA, 2055 nt, synthetic construct
  misc_feature 1..2055: note = EAX08810 variant
  source 1..2055: mol_type = other RNA
atggccgagcacccccccctcctcgacaccacccagatcctctcctccgacatctccctcctctccgcccccatcgtctccgccgacggcacccagcaggtcatcctcgtccaggtcaaccccggcgaggccttcaccatccgccgcgaggacggccagttccagtgcatcaccggccccgcccaggtccccatgatgtcccccaacggctccgtcccccccatctacgtcccccccggctacgccccccaggtcatcgaggacaacggcgtccgccgcgtcgtcgtcgtcccccaggcccccgagttccaccccggctcccacaccgtcctccaccgctccccccacccccccctccccggcttcatccccgtccccaccatgatgcccccccccccccgccacatgtactcccccgtcaccggcgccggcgacatgaccacccagtacatgccccagtaccagtcctcccaggtctacggcgacgtcgacgcccactccacccacggccgctccaacttccgcgacgagcgctcctccaagacctacgagcgcctccagaagaagctcaaggaccgccagggcacccagaaggacaagatgtcctcccccccctcctccccccagaagtgcccctcccccatcaacgagcacaacggcctcatcaagggccagatcgccggcggcatcaacaccggctccgccaagatcaagtccggcaagggcaagggcggcacccaggtcgacaccgagatcgaggagaaggacgaggagaccaaggccttcgaggccctcctctccaacatcgtcaagcccgtcgcctccgacatccaggcccgcaccgtcgtcctcacctggtcccccccctcctccctcatcaacggcgagaccgacgagtcctccgtccccgagctctacggctacgaggtcctcatctcctccaccggcaaggacggcaagtacaagtccgtctacgtcggcgaggagaccaacatcaccctcaacgacctcaagcccgccatggactaccacgccaaggtccaggccgagtacaactccatcaagggcaccccctccgaggccgagatcttcaccaccctctcctgcgagcccgacatccccaaccccccccgcatcgccaaccgcaccaagaactccctcaccctccagtggaaggccccctccgacaacggctccaagatccagaacttcgtcctcgagtgggacgagggcaagggcaacggcgagttctgccagtgctacatgggctcccagaagcagttcaagatcaccaagctctcccccgccatgggctgcaagttccgcctctccgcccgcaacgactacggcacctccggcttctccgaggaggtcctctactacacctccggctgcgccccctccatgcccgcctcccccgtcctcaccaaggccggcatcacctggctctccctccagtggtccaagccctccggcaccccctccgacgagggcatctcctacatcctcgagatggaggaggagacctccggctacggcttcaagcccaagtacgacggcgaggacctcgcctacaccgtcaagaacctccgccgctccaccaagtacaagttcaaggtcatcgcctacaactccgagggcaagtccaacccctccgaggtcgtcgagttcaccacctgccccgacaagcccggcatccccgtcaagccctccgtcaagggcaagatccactcccactccttcaagatcacctgggacccccccaaggacaacggcggcgccaccatcaacaagtacgtcgtcgagatggccgagggctccaacggcaacaagtgggagatgatctactccggcgccacccgcgagcacctctgcgaccgcctcaaccccggctgcttctaccgcctccgcgtctactgcatctccgacggcggccagtccgccgtctccgagtccctcctcgtccagacccccgccgtcccccccggcccctgcctccccccccgcctccagggccgccccaaggccaaggagatccagaccccctccggctga

SEQ ID NO: 1702 - RNA, 492 nt, synthetic construct
  misc_feature 1..492: note = AAG35520 variant
  source 1..492: mol_type = other RNA
atgtccgagtccggcttcaagctcctctgccagtgcctcggcttcggctccggccacttccgctgcgactcctcccgctggtgccacgacaacggcgtcaactacaagatcggcgagaagtgggaccgccagggcgagaacggccagatgatgtcctgcacctgcctcggcaacggcaagggcgagttcaagtgcgacccccacgaggccacctgctacgacgacggcaagacctaccacgtcggcgagcagtggcagaaggagtacctcggcgccatctgctcctgcacctgcttcggcggccagcgcggctggcgctgcgacaactgccgccgccccggcggcgagccctcccccgagggcaccaccggccagtcctacaaccagtactcccagcgctaccaccagcgcaccaacaccaacgtcaactgccccatcgagtgcttcatgcccctcgacgtccaggccgaccgcgaggactcccgcgagtga

SEQ ID NO: 1703 - RNA, 1143 nt, synthetic construct
  misc_feature 1..1143: note = AAA52471 variant
  source 1..1143: mol_type = other RNA
atgatgttctccggcttcaacgccgactacgaggcctcctcctcccgctgctcctccgcctcccccgccggcgactccctctcctactaccactcccccgccgactccttctcctccatgggctcccccgtcaacgcccaggacttctgcaccgacctcgccgtctcctccgccaacttcatccccaccgtcaccgccatctccacctcccccgacctccagtggctcgtccagcccgccctcgtctcctccgtcgccccctcccagacccgcgccccccaccccttcggcgtccccgccccctccgccggcgcctactcccgcgccggcgtcgtcaagaccatgaccggcggccgcgcccagtccatcggccgccgcggcaaggtcgagcagctctcccccgaggaggaggagaagcgccgcatccgccgcgagcgcaacaagatggccgccgccaagtgccgcaaccgccgccgcgagctcaccgacaccctccaggccgagaccgaccagctcgaggacgagaagtccgccctccagaccgagatcgccaacctcctcaaggagaaggagaagctcgagttcatcctcgccgcccaccgccccgcctgcaagatccccgacgacctcggcttccccgaggagatgtccgtcgcctccctcgacctcaccggcggcctccccgaggtcgccacccccgagtccgaggaggccttcaccctccccctcctcaacgaccccgagcccaagccctccgtcgagcccgtcaagtccatctcctccatggagctcaagaccgagcccttcgacgacttcctcttccccgcctcctcccgcccctccggctccgagaccgcccgctccgtccccgacatggacctctccggctccttctacgccgccgactgggagcccctccactccggctccctcggcatgggccccatggccaccgagctcgagcccctctgcacccccgtcgtcacctgcaccccctcctgcaccgcctacacctcctccttcgtcttcacctaccccgaggccgactccttcccctcctgcgccgccgcccaccgcaagggctcctcctccaacgagccctcctccgactccctctcctcccccaccctcctcgccctctga

SEQ ID NO: 1704 - RNA, 1296 nt, synthetic construct
  misc_feature 1..1296: note = AAG53607 variant
  source 1..1296: mol_type = other RNA
atgcccaacccccgccccggcaagccctccgccccctccctcgccctcggcccctcccccggcgcctccccctcctggcgcgccgcccccaaggcctccgacctcctcggcgcccgcggccccggcggcaccttccagggccgcgacctccgcggcggcgcccacgcctcctcctcctccctcaaccccatgcccccctcccagctccagctccccaccctccccctcgtcatggtcgccccctccggcgcccgcctcggccccctcccccacctccaggccctcctccaggaccgcccccacttcatgcaccagctctccaccgtcgacgcccacgcccgcacccccgtcctccaggtccaccccctcgagtcccccgccatgatctccctcaccccccccaccaccgccaccggcgtcttctccctcaaggcccgccccggcctcccccccggcatcaacgtcgcctccctcgagtgggtctcccgcgagcccgccctcctctgcaccttccccaacccctccgccccccgcaaggactccaccctctccgccgtcccccagtcctcctaccccctcctcgccaacggcgtctgcaagtggcccggctgcgagaaggtcttcgaggagcccgaggacttcctcaagcactgccaggccgaccacctcctcgacgagaagggccgcgcccagtgcctcctccagcgcgagatggtccagtccctcgagcagcagctcgtcctcgagaaggagaagctctccgccatgcaggcccacctcgccggcaagatggccctcaccaaggcctcctccgtcgcctcctccgacaagggctcctgctgcatcgtcgccgccggctcccagggccccgtcgtccccgcctggtccggcccccgcgaggcccccgactccctcttcgccgtccgccgccacctctggggctcccacggcaactccaccttccccgagttcctccacaacatggactacttcaagttccacaacatgcgcccccccttcacctacgccaccctcatccgctgggccatcctcgaggcccccgagaagcagcgcaccctcaacgagatctaccactggttcacccgcatgttcgccttcttccgcaaccaccccgccacctggaagaacgccatccgccacaacctctccctccacaagtgcttcgtccgcgtcgagtccgagaagggcgccgtctggaccgtcgacgagctcgagttccgcaagaagcgctcccagcgcccctcccgctgctccaaccccacccccggcccctga

SEQ ID NO: 1705 - RNA, 1098 nt, synthetic construct
  misc_feature 1..1098: note = AAA52639 variant
  source 1..1098: mol_type = other RNA
atgtggctccgctcccaccgccagctctgcctcgccttcctcctcgtctgcgtcctctccgtcatcttcttcctccacatccaccaggactccttcccccacggcctcggcctctccatcctctgccccgaccgccgcctcgtcaccccccccgtcgccatcttctgcctccccggcaccgccatgggccccaacgcctcctcctcctgcccccagcaccccgcctccctctccggcacctggaccgtctaccccaacggccgcttcggcaaccagatgggccagtacgccaccctcctcgccctcgcccagctcaacggccgccgcgccttcatcctccccgccatgcacgccgccctcgcccccgtcttccgcatcaccctccccgtcctcgcccccgaggtcgactcccgcaccccctggcgcgagctccagctccacgactggatgtccgaggagtacgccgacctccgcgaccccttcctcaagctctccggcttcccctgctcctggaccttcttccaccacctccgcgagcagatccgccgcgagttcaccctccacgaccacctccgcgaggaggcccagtccgtcctcggccagctccgcctcggccgcaccggcgaccgcccccgcaccttcgtcggcgtccacgtccgccgcggcgactacctccaggtcatgccccagcgctggaagggcgtcgtcggcgactccgcctacctccgccaggccatggactggttccgcgcccgccacgaggcccccgtcttcgtcgtcacctccaacggcatggagtggtgcaaggagaacatcgacacctcccagggcgacgtcaccttcgccggcgacggccaggaggccaccccctggaaggacttcgccctcctcacccagtgcaaccacaccatcatgaccatcggcaccttcggcttctgggccgcctacctcgccggcggcgacaccgtctacctcgccaacttcaccctccccgactccgagttcctcaagatcttcaagcccgaggccgccttcctccccgagtgggtcggcatcaacgccgacctctcccccctctggaccctcgccaagccctga

SEQ ID NO: 1706 - RNA, 1380 nt, synthetic construct
  misc_feature 1..1380: note = EAW58359 variant
  source 1..1380: mol_type = other RNA
atggcccccctctgcccctccccctggctccccctcctcatccccgcccccgcccccggcctcaccgtccagctcctcctctccctcctcctcctcgtccccgtccacccccagcgcctcccccgcatgcaggaggactcccccctcggcggcggctcctccggcgaggacgaccccctcggcgaggaggacctcccctccgaggaggactccccccgcgaggaggacccccccggcgaggaggacctccccggcgaggaggacctccccggcgaggaggacctccccgaggtcaagcccaagtccgaggaggagggctccctcaagctcgaggacctccccaccgtcgaggcccccggcgacccccaggagccccagaacaacgcccaccgcgacaaggagggcgacgaccagtcccactggcgctacggcggcgaccccccctggccccgcgtctcccccgcctgcgccggccgcttccagtcccccgtcgacatccgcccccagctcgccgccttctgccccgccctccgccccctcgagctcctcggcttccagctcccccccctccccgagctccgcctccgcaacaacggccactccgtccagctcaccctcccccccggcctcgagatggccctcggccccggccgcgagtaccgcgccctccagctccacctccactggggcgccgccggccgccccggctccgagcacaccgtcgagggccaccgcttccccgccgagatccacgtcgtccacctctccaccgccttcgcccgcgtcgacgaggccctcggccgccccggcggcctcgccgtcctcgccgccttcctcgaggagggccccgaggagaactccgcctacgagcagctcctctcccgcctcgaggagatcgccgaggagggctccgagacccaggtccccggcctcgacatctccgccctcctcccctccgacttctcccgctacttccagtacgagggctccctcaccacccccccctgcgcccagggcgtcatctggaccgtcttcaaccagaccgtcatgctctccgccaagcagctccacaccctctccgacaccctctggggccccggcgactcccgcctccagctcaacttccgcgccacccagcccctcaacggccgcgtcatcgaggcctccttccccgccggcgtcgactcctccccccgcgccgccgagcccgtccagctcaactcctgcctcgccgccggcgacatcctcgccctcgtcttcggcctcctcttcgccgtcacctccgtcgccttcctcgtccagatgcgccgccagcaccgccgcggcaccaagggcggcgtctcctaccgccccgccgaggtcgccgagaccggcgcctga

SEQ ID NO: 1707 - RNA, 417 nt, synthetic construct
  misc_feature 1..417: note = U19142.1 variant
  source 1..417: mol_type = other RNA
atgtcctggcgcggccgctccacctaccgcccccgcccccgccgctacgtcgagccccccgagatgatcggccccatgcgccccgagcagttctccgacgaggtcgagcccgccacccccgaggagggcgagcccgccacccagcgccaggaccccgccgccgcccaggagggcgaggacgagggcgcctccgccggccagggccccaagcccgaggccgactcccaggagcagggccacccccagaccggctgcgagtgcgaggacggccccgacggccaggagatggacccccccaaccccgaggaggtcaagacccccgaggaggagatgcgctcccactacgtcgcccagaccggcatcctctggctcctcatgaacaactgcttcctcaacctctccccccgcaagccctga

SEQ ID NO: 1708 - RNA, 351 nt, synthetic construct
  misc_feature 1..351: note = AAH69397 variant
  source 1..351: mol_type = other RNA
atgtcctggcgcggccgctccacctaccgcccccgcccccgccgctacgtcgagccccccgagatgatcggccccatgcgccccgagcagttctccgacgaggtcgagcccgccacccccgaggagggcgagcccgccacccagcgccaggaccccgccgccgcccaggagggccaggacgagggcgcctccgccggccagggccccaagcccgaggcccactcccaggagcagggccacccccagaccggctgcgagtgcgaggacggccccgacggccaggagatggacccccccaaccccgaggaggtcaagacccccgaggagggcgagaagcagtcccagtgctga

SEQ ID NO: 1709 - RNA, 357 nt, synthetic construct
  misc_feature 1..357: note = AAA82746 variant
  source 1..357: mol_type = other RNA
atgaacctctcccgcggcaagtccacctactactggccccgcccccgccgctacgtccagccccccgaggtcatcggccccatgcgccccgagcagttctccgacgaggtcgagcccgccacccccgaggagggcgagcccgccacccagcgccaggaccccgccgccgcccaggagggcgaggacgagggcgcctccgccggccagggccccaagcccgaggccgactcccaggagcagggccacccccagaccggctgcgagtgcgaggacggccccgacggccaggagatggacccccccaaccccgaggaggtcaagacccccgaggagggcgagaagcagtcccagtgctga

SEQ ID NO: 1710 - RNA, 354 nt, synthetic construct
  misc_feature 1..354: note = AAH69470 variant
  source 1..354: mol_type = other RNA
atgtcctggcgcggccgctccacctactactggccccgcccccgccgctacgtccagccccccgagatgatcggccccatgcgccccgagcagttctccgacgaggtcgagcccgccacccccgaggagggcgagcccgccacccagcgccaggaccccgccgccgcccaggagggcgaggacgagggcgcctccgccggccagggccccaagcccgaggccgactcccaggagcagggccacccccagaccggctgcgagtgcgaggacggccccgacggccaggagatggacccccccaaccccgaggaggtcaagacccccgaggagggcgagggccagtcccagtgctga

SEQ ID NO: 1711 - RNA, 354 nt, synthetic construct
  misc_feature 1..354: note = AAA82748 variant
  source 1..354: mol_type = other RNA
atgtcctggcgcggccgctccacctactactggccccgcccccgccgctacgtccagccccccgaggtcatcggccccatgcgccccgagcagttctccgacgaggtcgagcccgccacccccgaggagggcgagcccgccacccagcgccaggaccccgccgccgcccaggagggcgaggacgagggcgcctccgccggccagggccccaagcccgaggccgactcccaggagcagggccacccccagaccggctgcgagtgcgaggacggccccgacggccaggagatggacccccccaaccccgaggaggtcaagacccccgaggagggcgagaagcagtcccagtgctga

SEQ ID NO: 1712 - RNA, 354 nt, synthetic construct
  misc_feature 1..354: note = AAA82749 variant
  source 1..354: mol_type = other RNA
atgtcctggcgcggccgctccacctactactggccccgcccccgccgctacgtccagccccccgaggtcatcggccccatgcgccccgagcagttctccgacgaggtcgagcccgccacccccgaggagggcgagcccgccacccagcgccaggaccccgccgccgcccaggagggcgaggacgagggcgcctccgccggccagggccccaagcccgaggccgactcccaggagcagggccacccccagaccggctgcgagtgcgaggacggccccgacggccaggaggtcgacccccccaaccccgaggaggtcaagacccccgaggagggcgagaagcagtcccagtgctga

SEQ ID NO: 1713 - RNA, 354 nt, synthetic construct
  misc_feature 1..354: note = AAC25989 variant
  source 1..354: mol_type = other RNA
atgtcctggcgcggccgctccacctactactggccccgcccccgccgctacgtccagccccccgagatgatcggccccatgcgccccgagcagttctccgacgaggtcgagcccgccacccccgaggagggcgagcccgccacccagcgccaggaccccgccgccgcccaggagggcgaggacgagggcgcctccgccggccagggccccaagcccgaggcccactcccaggagcagggccacccccagaccggctgcgagtgcgaggacggccccgacggccaggagatggacccccccaaccccgaggaggtcaagacccccgaggagggcgagaagcagtcccagtgctga

SEQ ID NO: 1714 - RNA, 351 nt, synthetic construct
  misc_feature 1..351: note = AAC33676 variant
  source 1..351: mol_type = other RNA
atgtcctggcgcggccgctccacctaccgcccccgcccccgccgctacgtcgagccccccgagatgatcggccccatgcgccccgagcagttctccgacgaggtcgagcccgccacccccgaggagggcgagcccgccacccagcgccaggaccccgccgccgcccaggagggcgaggacgagggcgcctccgccggccagggccccaagcccgaggccgactcccaggagcagggccacccccagaccggctgcgagtgcgaggacggccccgacggccaggagatggacccccccaaccccgaggaggtcaagacccccgaggagggcgagaagcagtcccagtgctga

SEQ ID NO: 1715 - RNA, 1344 nt, synthetic construct
  misc_feature 1..1344: note = AAA35657 variant
  source 1..1344: mol_type = other RNA
atggagctcctcaagctcaaccgctccgtccagggcaccggccccggccccggcgcctccctctgccgccccggcgcccccctcctcaactcctcctccgtcggcaacctctcctgcgagcccccccgcatccgcggcgccggcacccgcgagctcgagctcgccatccgcatcaccctctacgccgtcatcttcctcatgtccgtcggcggcaacatgctcatcatcgtcgtcctcggcctctcccgccgcctccgcaccgtcaccaacgccttcctcctctccctcgccgtctccgacctcctcctcgccgtcgcctgcatgcccttcaccctcctccccaacctcatgggcaccttcatcttcggcaccgtcatctgcaaggccgtctcctacctcatgggcgtctccgtctccgtctccaccctctccctcgtcgccatcgccctcgagcgctactccgccatctgccgccccctccaggcccgcgtctggcagacccgctcccacgccgcccgcgtcatcgtcgccacctggctcctctccggcctcctcatggtcccctaccccgtctacaccgtcgtccagcccgtcggcccccgcgtcctccagtgcgtccaccgctggccctccgcccgcgtccgccagacctggtccgtcctcctcctcctcctcctcttcttcatccccggcgtcgtcatggccgtcgcctacggcctcatctcccgcgagctctacctcggcctccgcttcgacggcgactccgactccgactcccagtcccgcgtccgcaaccagggcggcctccccggcgccgtccaccagaacggccgctgccgccccgagaccggcgccgtcggcgaggactccgacggctgctacgtccagctcccccgctcccgccccgccctcgagctcaccgccctcaccgcccccggccccggctccggctcccgccccacccaggccaagctcctcgccaagaagcgcgtcgtccgcatgctcctcgtcatcgtcgtcctcttcttcctctgctggctccccgtctactccgccaacacctggcgcgccttcgacggccccggcgcccaccgcgccctctccggcgcccccatctccttcatccacctcctctcctacgcctccgcctgcgtcaaccccctcgtctactgcttcatgcaccgccgcttccgccaggcctgcctcgagacctgcgcccgctgctgcccccgccccccccgcgcccgcccccgcgccctccccgacgaggacccccccaccccctccatcgcctccctctcccgcctctcctacaccaccatctccaccctcggccccggctga

SEQ ID NO: 1716 - RNA, 2226 nt, synthetic construct
  misc_feature 1..2226: note = AAD22449 variant
  source 1..2226: mol_type = other RNA
atggccctcttcaccccctggaagctctcctcccagaagctcggcttcttcctcgtcaccttcggcttcatctggggcatgatgctcctccacttcaccatccagcagcgcacccagcccgagtcctcctccatgctccgcgagcagatcctcgacctctccaagcgctacatcaaggccctcgccgaggagaaccgcaacgtcgtcgacggcccctacgccggcgtcatgaccgcctacgacctcaagaagaccctcgccgtcctcctcgacaacatcctccagcgcatcggcaagctcgagtccaaggtcgacaacctcgtcgtcaacggcaccggcaccaactccaccaactccaccaccgccgtcccctccctcgtcgccctcgagaagatcaacgtcgccgacatcatcaacggcgcccaggagaagtgcgtcctcccccccatggacggctacccccactgcgagggcaagatcaagtggatgaaggacatgtggcgctccgacccctgctacgccgactacggcgtcgacggctccacctgctccttcttcatctacctctccgaggtcgagaactggtgcccccacctcccctggcgcgccaagaacccctacgaggaggccgaccacaactccctcgccgagatccgcaccgacttcaacatcctctactccatgatgaagaagcacgaggagttccgctggatgcgcctccgcatccgccgcatggccgacgcctggatccaggccatcaagtccctcgccgagaagcagaacctcgagaagcgcaagcgcaagaaggtcctcgtccacctcggcctcctcaccaaggagtccggcttcaagatcgccgagaccgccttctccggcggccccctcggcgagctcgtccagtggtccgacctcatcacctccctctacctcctcggccacgacatccgcatctccgcctccctcgccgagctcaaggagatcatgaagaaggtcgtcggcaaccgctccggctgccccaccgtcggcgaccgcatcgtcgagctcatctacatcgacatcgtcggcctcgcccagttcaagaagaccctcggcccctcctgggtccactaccagtgcatgctccgcgtcctcgactccttcggcaccgagcccgagttcaaccacgccaactacgcccagtccaagggccacaagaccccctggggcaagtggaacctcaacccccagcagttctacaccatgttcccccacacccccgacaactccttcctcggcttcgtcgtcgagcagcacctcaactcctccgacatccaccacatcaacgagatcaagcgccagaaccagtccctcgtctacggcaaggtcgactccttctggaagaacaagaagatctacctcgacatcatccacacctacatggaggtccacgccaccgtctacggctcctccaccaagaacatcccctcctacgtcaagaaccacggcatcctctccggccgcgacctccagttcctcctccgcgagaccaagctcttcgtcggcctcggcttcccctacgagggccccgcccccctcgaggccatcgccaacggctgcgccttcctcaaccccaagttcaacccccccaagtcctccaagaacaccgacttcttcatcggcaagcccaccctccgcgagctcacctcccagcacccctacgccgaggtcttcatcggccgcccccacgtctggaccgtcgacctcaacaaccaggaggaggtcgaggacgccgtcaaggccatcctcaaccagaagatcgagccctacatgccctacgagttcacctgcgagggcatgctccagcgcatcaacgccttcatcgagaagcaggacttctgccacggccaggtcatgtggccccccctctccgccctccaggtcaagctcgccgagcccggccagtcctgcaagcaggtctgccaggagtcccagctcatctgcgagccctccttcttccagcacctcaacaaggacaaggacatgctcaagtacaaggtcacctgccagtcctccgagctcgccaaggacatcctcgtcccctccttcgaccccaagaacaagcactgcgtcttccagggcgacctcctcctcttctcctgcgccggcgcccacccccgccaccagcgcgtctgcccctgccgcgacttcatcaagggccaggtcgccctctgcaaggactgcctctga

SEQ ID NO: 1717 - RNA, 1743 nt, synthetic construct
  misc_feature 1..1743: note = EAX11770 variant
  source 1..1743: mol_type = other RNA
atggccggcaccgtccgcaccgcctgcctcgtcgtcgccatgctcctctccctcgacttccccggccaggcccagccccccccccccccccccgacgccacctgccaccaggtccgctccttcttccagcgcctccagcccggcctcaagtgggtccccgagacccccgtccccggctccgacctccaggtctgcctccccaagggccccacctgctgctcccgcaagatggaggagaagtaccagctcaccgcccgcctcaacatggagcagctcctccagtccgcctccatggagctcaagttcctcatcatccagaacgccgccgtcttccaggaggccttcgagatcgtcgtccgccacgccaagaactacaccaacgccatgttcaagaacaactacccctccctcaccccccaggccttcgagttcgtcggcgagttcttcaccgacgtctccctctacatcctcggctccgacatcaacgtcgacgacatggtcaacgagctcttcgactccctcttccccgtcatctacacccagctcatgaaccccggcctccccgactccgccctcgacatcaacgagtgcctccgcggcgcccgccgcgacctcaaggtcttcggcaacttccccaagctcatcatgacccaggtctccaagtccctccaggtcacccgcatcttcctccaggccctcaacctcggcatcgaggtcatcaacaccaccgaccacctcaagttctccaaggactgcggccgcatgctcacccgcatgtggtactgctcctactgccagggcctcatgatggtcaagccctgcggcggctactgcaacgtcgtcatgcagggctgcatggccggcgtcgtcgagatcgacaagtactggcgcgagtacatcctctccctcgaggagctcgtcaacggcatgtaccgcatctacgacatggagaacgtcctcctcggcctcttctccaccatccacgactccatccagtacgtccagaagaacgccggcaagctcaccaccaccatcggcaagctctgcgcccactcccagcagcgccagtaccgctccgcctactaccccgaggacctcttcatcgacaagaaggtcctcaaggtcgcccacgtcgagcacgaggagaccctctcctcccgccgccgcgagctcatccagaagctcaagtccttcatctccttctactccgccctccccggctacatctgctcccactcccccgtcgccgagaacgacaccctctgctggaacggccaggagctcgtcgagcgctactcccagaaggccgcccgcaacggcatgaagaaccagttcaacctccacgagctcaagatgaagggccccgagcccgtcgtctcccagatcatcgacaagctcaagcacatcaaccagctcctccgcaccatgtccatgcccaagggccgcgtcctcgacaagaacctcgacgaggagggcttcgagtccggcgactgcggcgacgacgaggacgagtgcatcggcggctccggcgacggcatgatcaaggtcaagaaccagctccgcttcctcgccgagctcgcctacgacctcgacgtcgacgacgcccccggcaactcccagcaggccacccccaaggacaacgagatctccaccttccacaacctcggcaacgtccactcccccctcaagctcctcacctccatggccatctccgtcgtctgcttcttcttcctcgtccactga

SEQ ID NO: 1718 - RNA, 1743 nt, synthetic construct; identical to SEQ ID NO: 1717
  misc_feature 1..1743: note = AAA93471 variant
  source 1..1743: mol_type = other RNA

SEQ ID NO: 1719 - RNA, 1743 nt, synthetic construct
  misc_feature 1..1743: note = AAH35972 variant
  source 1..1743: mol_type = other RNA
atggccggcaccgtccgcaccgcctgcctcgtcgtcgccatgctcctctccctcgacttccccggccaggcccagccccccccccccccccccgacgccacctgccaccaggtccgctccttcttccagcgcctccagcccggcctcaagtgggtccccgagacccccgtccccggctccgacctccaggtctgcctccccaagggccccacctgctgctcccgcaagatggaggagaagtaccagctcaccgcccgcctcaacatggagcagctcctccagtccgcctccatggagctcaagttcctcatcatccagaacgccgccgtcttccaggaggccttcgagatcgtcgtccgccacgccaagaactacaccaacgccatgttcaagaacaactacccctccctcaccccccaggccttcgagttcgtcggcgagttcttcaccgacgtctccctctacatcctcggctccgacatcaacgtcgacgacatggtcaacgagctcttcgactccctcttccccgtcatctacacccagctcatgaaccccggcctccccgactccgccctcgacatcaacgagtgcctccgcggcgcccgccgcgacctcaaggtcttcggcaacttccccaagctcatcatgacccaggtctccaagtccctccaggtcacccgcatcttcctccaggccctcaacctcggcatcgaggtcatcaacaccaccgaccacctcaagttctccaaggactgcggccgcatgctcacccgcatgtggtactgctcctactgccagggcctcatgatggtcaagccctgcggcggctactgcaacgtcgtcatgcagggctgcatggccggcgtcgtcgagatcgacaagtactggcgcgagtacatcctctccctcgaggagctcgtcaacggcatgtaccgcatctacgacatggagaacgtcctcctcggcctcttctccaccatccacgactccatccagtacgtccagaagaacgccggcaagctcaccaccaccatcggcaagctctgcgcccactcccagcagcgccagtaccgcttcgcctactaccccgaggacctcttcatcgacaagaaggtcctcaaggtcgcccacgtcgagcacgaggagaccctctcctcccgccgccgcgagctcatccagaagctcaagtccttcatctccttctactccgccctccccggctacatctgctcccactcccccgtcgccgagaacgacaccctctgctggaacggccaggagctcgtcgagcgctactcccagaaggccgcccgcaacggcatgaagaaccagttcaacctccacgagctcaagatgaagggccccgagcccgtcgtctcccagatcatcgacaagctcaagcacatcaaccagctcctccgcaccatgtccatgcccaagggccgcgtcctcgacaagaacctcgacgaggagggcttcgagtccggcgactgcggcgacgacgaggacgagtgcatcggcggctccggcgacggcatgatcaaggtcaagaaccagctccgcttcctcgccgagctcgcctacgacctcgacgtcgacgacgcccccggcaactcccagcaggccacccccaaggacaacgagatctccaccttccacaacctcggcaacgtccactcccccctcaagctcctcacctccatggccatctccgtcgtctgcttcttcttcctcgtccactga

SEQ ID NO: 1720 - RNA, 1683 nt, synthetic construct
  misc_feature 1..1683: note = EAW93784 variant
  source 1..1683: mol_type = other RNA
atggagtgcctctactacttcctcggcttcctcctcctcgccgcccgcctccccctcgacgccgccaagcgcttccacgacgtcctcggcaacgagcgcccctccgcctacatgcgcgagcacaaccagctcaacggctggtcctccgacgagaacgactggaacgagaagctctaccccgtctggaagcgcggcgacatgcgctggaagaactcctggaagggcggccgcgtccaggccgtcctcacctccgactcccccgccctcgtcggctccaacatcaccttcgccgtcaacctcatcttcccccgctgccagaaggaggacgccaacggcaacatcgtctacgagaagaactgccgcaacgaggccggcctctccgccgacccctacgtctacaactggaccgcctggtccgaggactccgacggcgagaacggcaccggccagtcccaccacaacgtcttccccgacggcaagcccttcccccaccaccccggctggcgccgctggaacttcatctacgtcttccacaccctcggccagtacttccagaagctcggccgctgctccgtccgcgtctccgtcaacaccgccaacgtcaccctcggcccccagctcatggaggtcaccgtctaccgccgccacggccgcgcctacgtccccatcgcccaggtcaaggacgtctacgtcgtcaccgaccagatccccgtcttcgtcaccatgttccagaagaacgaccgcaactcctccgacgagaccttcctcaaggacctccccatcatgttcgacgtcctcatccacgacccctcccacttcctcaactactccaccatcaactacaagtggtccttcggcgacaacaccggcctcttcgtctccaccaaccacaccgtcaaccacacctacgtcctcaacggcaccttctccctcaacctcaccgtcaaggccgccgcccccggcccctgcccccccccccccccccccccccgcccctccaagcccaccccctccctcggccccgccggcgacaaccccctcgagctctcccgcatccccgacgagaactgccagatcaaccgctacggccacttccaggccaccatcaccatcgtcgagggcatcctcgaggtcaacatcatccagatgaccgacgtcctcatgcccgtcccctggcccgagtcctccctcatcgacttcgtcgtcacctgccagggctccatccccaccgaggtctgcaccatcatctccgaccccacctgcgagatcacccagaacaccgtctgctcccccgtcgacgtcgacgagatgtgcctcctcaccgtccgccgcaccttcaacggctccggcacctactgcgtcaacctcaccctcggcgacgacacctccctcgccctcacctccaccctcatctccgtccccgaccgcgaccccgcctcccccctccgcatggccaactccgccctcatctccgtcggctgcctcgccatcttcgtcaccgtcatctccctcctcgtctacaagaagcacaaggagtacaaccccatcgagaactcccccggcaacgtcgtccgctccaagggcctctccgtcttcctcaaccgcgccaaggccgtcttcttccccggcaaccaggagaaggaccccctcctcaagaaccaggagttcaagggcgtctcctga

SEQ ID NO: 1721 - RNA, 1719 nt, synthetic construct
  misc_feature 1..1719: note = AAH32783 variant
  source 1..1719: mol_type = other RNA
atggagtgcctctactacttcctcggcttcctcctcctcgccgcccgcctccccctcgacgccgccaagcgcttccacgacgtcctcggcaacgagcgcccctccgcctacatgcgcgagcacaaccagctcaacggctggtcctccgacgagaacgactggaacgagaagctctaccccgtctggaagcgcggcgacatgcgctggaagaactcctggaagggcggccgcgtccaggccgtcctcacctccgactcccccgccctcgtcggctccaacatcaccttcgccgtcaacctcatcttcccccgctgccagaaggaggacgccaacggcaacatcgtctacgagaagaactgccgcaacgaggccggcctctccgccgacccctacgtctacaactggaccgcctggtccgaggactccgacggcgagaacggcaccggccagtcccaccacaacgtcttccccgacggcaagcccttcccccaccaccccggctggcgccgctggaacttcatctacgtcttccacaccctcggccagtacttccagaagctcggccgctgctccgtccgcgtctccgtcaacaccgccaacgtcaccctcggcccccagctcatggaggtcaccgtctaccgccgccacggccgcgcctacgtccccatcgcccaggtcaaggacgtctacgtcgtcaccgaccagatccccgtcttcgtcaccatgttccagaagaacgaccgcaactcctccgacgagaccttcctcaaggacctccccatcatgttcgacgtcctcatccacgacccctcccacttcctcaactactccaccatcaactacaagtggtccttcggcgacaacaccggcctcttcgtctccaccaaccacaccgtcaaccacacctacgtcctcaacggcaccttctccctcaacctcaccgtcaaggccgccgcccccggcccctgcccccccccccccccccccccccgcccctccaagcccaccccctccctcgccaccaccctcaagtcctacgactccaacacccccggccccgccggcgacaaccccctcgagctctcccgcatccccgacgagaactgccagatcaaccgctacggccacttccaggccaccatcaccatcgtcgagggcatcctcgaggtcaacatcatccagatgaccgacgtcctcatgcccgtcccctggcccgagtcctccctcatcgacttcgtcgtcacctgccagggctccatccccaccgaggtctgcaccatcatctccgaccccacctgcgagatcacccagaacaccgtctgctcccccgtcgacgtcgacgagatgtgcctcctcaccgtccgccgcaccttcaacggctccggcacctactgcgtcaacctcaccctcggcgacgacacctccctcgccctcacctccaccctcatctccgtccccgaccgcgaccccgcctcccccctccgcatggccaactccgccctcatctccgtcggctgcctcgccatcttcgtcaccgtcatctccctcctcgtctacaagaagcacaaggagtacaaccccatcgagaactcccccggcaacgtcgtccgctccaagggcctctccgtcttcctcaaccgcgccaaggccgtcttcttccccggcaaccaggagaaggaccccctcctcaagaaccaggagttcaagggcgtctcctga

SEQ ID NO: 1722 - RNA, 621 nt, synthetic construct
  misc_feature 1..621: note = CAD43718 variant
  source 1..621: mol_type = other RNA
atggagtgcctctactacttcctcggcttcctcctcctcgccgcccgcctccccctcgacgccgccaagcgcttccacgacgtcctcggcaacgagcgcccctccgcctacatgcgcgagcacaaccagctcaacggctggtcctccgacgagaacgactggaacgagaagctctaccccgtctggaagcgcggcgacatgcgctggaagaactcctggaagggcggccgcgtccaggccgtcctcacctccgactcccccgccctcgtcggctccaacatcaccttcgccgtcaacctcatcttcccccgctgccagaaggaggacgccaacggcaacatcgtctacgagaagaactgccgcaacgaggccggcctctccgccgacccctacgtctacaactggaccgcctggtccgaggactccgacggcgagaacggcaccggccagtcccaccacaacgtcttccccgacggcaagcccttcccccaccaccccggctggcgccgctggaacttcatctacgtcttccacaccctcgactggctcctccagacccccaagctcctcctctacctctccctcaagttccagccctccctcttcctcctctacaactga

SEQ ID NO: 1723 - RNA, 621 nt, synthetic construct
  misc_feature 1..621: note = AAH11595 variant
  source 1..621: mol_type = other RNA
atggagtgcctctactacttcctcggcttcctcctcctcgccgcccgcctccccctcgacgccgccaagcgcttccacgacgtcctcggcaacgagcgcccctccgcctacatgcgcgagcacaaccagctcaacggctggtcctccgacgagaacgactggaacgagaagctctaccccgtctggaagcgcggcgacatgcgctggaagaactcctggaagggcggccgcgtccaggccgtcctcacctccgactcccccgccctcgtcggctccaacatcaccttcgccgtcaacctcatcttcccccgctgccagaaggaggacgccaacggcaacatcgtctacgagaagaactgccgcaacgaggccggcctctccgccgacccctacgtctacaactggaccgcctggtccgaggactccgacggcgagaacggcaccggccagtcccaccacaacgtcttccccgacggcaagcccttcccccaccaccccggctggcgccgctggaacttcatctacgtcttccacaccctcggctggctcctccagacccccaagctcctcctctacctctccctcaagttccagccctccctcttcctcctctacaactga

SEQ ID NO: 1724 - RNA, 2640 nt, synthetic construct
  misc_feature 1..2640: note = CCDS5600.1 variant
  source 1..2640: mol_type = other RNA
atgaagatgctcacccgcctccaggtcctcaccctcgccctcttctccaagggcttcctcctctccctcggcgaccacaacttcctccgccgcgagatcaagatcgagggcgacctcgtcctcggcggcctcttccccatcaacgagaagggcaccggcaccgaggagtgcggccgcatcaacgaggaccgcggcatccagcgcctcgaggccatgctcttcgccatcgacgagatcaacaaggacgactacctcctccccggcgtcaagctcggcgtccacatcctcgacacctgctcccgcgacacctacgccctcgagcagtccctcgagttcgtccgcgcctccctcaccaaggtcgacgaggccgagtacatgtgccccgacggctcctacgccatccaggagaacatccccctcctcatcgccggcgtcatcggcggctcctactcctccgtctccatccaggtcgccaacctcctccgcctcttccagatcccccagatctcctacgcctccacctccgccaagctctccgacaagtcccgctacgactacttcgcccgcaccgtcccccccgacttctaccaggccaaggccatggccgagatcctccgcttcttcaactggacctacgtctccaccgtcgcctccgagggcgactacggcgagaccggcatcgaggccttcgagcaggaggcccgcctccgcaacatctgcatcgccaccgccgagaaggtcggccgctccaacatccgcaagtcctacgactccgtcatccgcgagctcctccagaagcccaacgcccgcgtcgtcgtcctcttcatgcgctccgacgactcccgcgagctcatcgccgccgcctcccgcgccaacgcctccttcacctgggtcgcctccgacggctggggcgcccaggagtccatcatcaagggctccgagcacgtcgcctacggcgccatcaccctcgagctcgcctcccagcccgtccgccagttcgaccgctacttccagtccctcaacccctacaacaaccaccgcaacccctggttccgcgacttctgggagcagaagttccagtgctccctccagaacaagcgcaaccaccgccgcgtctgcgacaagcacctcgccatcgactcctccaactacgagcaggagtccaagatcatgttcgtcgtcaacgccgtctacgccatggcccacgccctccacaagatgcagcgcaccctctgccccaacaccaccaagctctgcgacgccatgaagatcctcgacggcaagaagctctacaaggactacctcctcaagatcaacttcaccgcccccttcaaccccaacaaggacgccgactccatcgtcaagttcgacaccttcggcgacggcatgggccgctacaacgtcttcaacttccagaacgtcggcggcaagtactcctacctcaaggtcggccactgggccgagaccctctccctcgacgtcaactccatccactggtcccgcaactccgtccccacctcccagtgctccgacccctgcgcccccaacgagatgaagaacatgcagcccggcgacgtctgctgctggatctgcatcccctgcgagccctacgagtacctcgccgacgagttcacctgcatggactgcggctccggccagtggcccaccgccgacctcaccggctgctacgacctccccgaggactacatccgctgggaggacgcctgggccatcggccccgtcaccatcgcctgcctcggcttcatgtgcacctgcatggtcgtcaccgtcttcatcaagcacaacaacacccccctcgtcaaggcctccggccgcgagctctgctacatcctcctcttcggcgtcggcctctcctactgcatgaccttcttcttcatcgccaagccctcccccgtcatctgcgccctccgccgcctcggcctcggctcctccttcgccatctgctactccgccctcctcaccaagaccaactgcatcgcccgcatcttcgacggcgtcaagaacggcgcccagcgccccaagttcatctccccctcctcccaggtcttcatctgcctcggcctcatcctcgtccagatcgtcatggtctccgtctggctcatcctcgaggcccccggcacccgccgctacaccctcgccgagaagcgcgagaccgtcatcctcaagtgcaacgtcaaggactcctccatgctcatctccctcacctacgacgtcatcctcgtcatcctctgcaccgtctacgccttcaagacccgcaagtgccccgagaacttcaacgaggccaagttcatcggcttcaccatgtacaccacctgcatcatctggctcgccttcctccccatcttctacgtcacctcctccgactaccgcgtccagaccaccaccatgtgcatctccgtctccctctccggcttcgtcgtcctcggctgcctcttcgcccccaaggtccacatcatcctcttccagccccagaagaacgtcgtcacccaccgcctccacctcaaccgcttctccgtctccggcaccggcaccacctactcccagtcctccgcctccacctacgtccccaccgtctgcaacggccgcgaggtcctcgactccaccacctcctccctctga

SEQ ID NO: 1725 - RNA, 1947 nt, synthetic construct
  misc_feature 1..1947: note = CCDS4977.1 variant
  source 1..1947: mol_type = other RNA
atgtcccaccacggcggcgcccccaaggcctccacctgggtcgtcgcctcccgccgctcctccaccgtctcccgcgcccccgagcgccgccccgccgaggagctcaaccgcaccggccccgagggctactccgtcggccgcggcggccgctggcgcggcacctcccgcccccccgaggccgtcgccgccggccacgaggagctccccctctgcttcgccctcaagtcccacttcgtcggcgccgtcatcggccgcggcggctccaagatcaagaacatccagtccaccaccaacaccaccatccagatcatccaggagcagcccgagtccctcgtcaagatcttcggctccaaggccatgcagaccaaggccaaggccgtcatcgacaacttcgtcaagaagctcgaggagaactacaactccgagtgcggcatcgacaccgccttccagccctccgtcggcaaggacggctccaccgacaacaacgtcgtcgccggcgaccgccccctcatcgactgggaccagatccgcgaggagggcctcaagtggcagaagaccaagtgggccgacctcccccccatcaagaagaacttctacaaggagtccaccgccacctccgccatgtccaaggtcgaggccgactcctggcgcaaggagaacttcaacatcacctgggacgacctcaaggacggcgagaagcgccccatccccaaccccacctgcaccttcgacgacgccttccagtgctaccccgaggtcatggagaacatcaagaaggccggcttccagaagcccacccccatccagtcccaggcctggcccatcgtcctccagggcatcgacctcatcggcgtcgcccagaccggcaccggcaagaccctctgctacctcatgcccggcttcatccacctcgtcctccagccctccctcaagggccagcgcaaccgccccggcatgctcgtcctcacccccacccgcgagctcgccctccaggtcgagggcgagtgctgcaagtactcctacaagggcctccgctccgtctgcgtctacggcggcggcaaccgcgacgagcagatcgaggagctcaagaagggcgtcgacatcatcatcgccacccccggccgcctcaacgacctccagatgtccaacttcgtcaacctcaagaacatcacctacctcgtcctcgacgaggccgacaagatgctcgacatgggcttcgagccccagatcatgaagatcctcctcgacgtccgccccgaccgccagaccgtcatgacctccgccacctggccccactccgtccaccgcctcgcccagtcctacctcaaggagcccatgatcgtctacgtcggcaccctcgacctcgtcgccgtctcctccgtcaagcagaacatcatcgtcaccaccgaggaggagaagtggtcccacatgcagaccttcctccagtccatgtcctccaccgacaaggtcatcgtcttcgtctcccgcaaggccgtcgccgaccacctctcctccgacctcatcctcggcaacatctccgtcgagtccctccacggcgaccgcgagcagcgcgaccgcgagaaggccctcgagaacttcaagaccggcaaggtccgcatcctcatcgccaccgacctcgcctcccgcggcctcgacgtccacgacgtcacccacgtctacaacttcgacttcccccgcaacatcgaggagtacgtccaccgcatcggccgcaccggccgcgccggccgcaccggcgtctccatcaccaccctcacccgcaacgactggcgcgtcgcctccgagctcatcaacatcctcgagcgcgccaaccagtccatccccgaggagctcgtctccatggccgagcgcttcaaggcccaccagcagaagcgcgagatggagcgcaagatggagcgcccccagggccgccccaagaagttccactga

SEQ ID NO: 1726 - RNA, 1209 nt, synthetic construct
  misc_feature 1..1209: note = ACD02430 variant
  source 1..1209: mol_type = other RNA
atggcccagaaggagggcggccgcaccgtcccctgctgctcccgccccaaggtcgccgccctcaccgccggcaccctcctcctcctcaccgccatcggcgccgcctcctgggccatcgtcgccgtcctcctccgctccgaccaggagcccctctaccccgtccaggtctcctccgccgacgcccgcctcatggtcttcgacaagaccgagggcacctggcgcctcctctgctcctcccgctccaacgcccgcgtcgccggcctctcctgcgaggagatgggcttcctccgcgccctcacccactccgagctcgacgtccgcaccgccggcgccaacggcacctccggcttcttctgcgtcgacgagggccgcctcccccacacccagcgcctcctcgaggtcatctccgtctgcgactgcccccgcggccgcttcctcgccgccatctgccaggactgcggccgccgcaagctccccgtcgaccgcatcgtcggcggccgcgacacctccctcggccgctggccctggcaggtctccctccgctacgacggcgcccacctctgcggcggctccctcctctccggcgactgggtcctcaccgccgcccactgcttccccgagcgcaaccgcgtcctctcccgctggcgcgtcttcgccggcgccgtcgcccaggcctccccccacggcctccagctcggcgtccaggccgtcgtctaccacggcggctacctccccttccgcgaccccaactccgaggagaactccaacgacatcgccctcgtccacctctcctcccccctccccctcaccgagtacatccagcccgtctgcctccccgccgccggccaggccctcgtcgacggcaagatctgcaccgtcaccggctggggcaacacccagtactacggccagcaggccggcgtcctccaggaggcccgcgtccccatcatctccaacgacgtctgcaacggcgccgacttctacggcaaccagatcaagcccaagatgttctgcgccggctaccccgagggcggcatcgacgcctgccagggcgactccggcggccccttcgtctgcgaggactccatctcccgcaccccccgctggcgcctctgcggcatcgtctcctggggcaccggctgcgccctcgcccagaagcccggcgtctacaccaaggtctccgacttccgcgagtggatcttccagtga

SEQ ID NO: 1727 - RNA, 1254 nt, synthetic construct
  misc_feature 1..1254: note = AAA36013 variant
  source 1..1254: mol_type = other RNA
atggcccagaaggagggcggccgcaccgtcccctgctgctcccgccccaaggtcgccgccctcaccgccggcaccctcctcctcctcaccgccatcggcgccgcctcctgggccatcgtcgccgtcctcctccgctccgaccaggagcccctctaccccgtccaggtctcctccgccgacgcccgcctcatggtcttcgacaagaccgagggcacctggcgcctcctctgctcctcccgctccaacgcccgcgtcgccggcctctcctgcgaggagatgggcttcctccgcgccctcacccactccgagctcgacgtccgcaccgccggcgccaacggcacctccggcttcttctgcgtcgacgagggccgcctcccccacacccagcgcctcctcgaggtcatctccgtctgcgactgcccccgcggccgcttcctcgccgccatctgccaggactgcggccgccgcaagctccccgtcgaccgcatcgtcggcggccgcgacacctccctcggccgctggccctggcaggtctccctccgctacgacggcgcccacctctgcggcggctccctcctctccggcgactgggtcctcaccgccgcccactgcttccccgagcgcaaccgcgtcctctcccgctggcgcgtcttcgccggcgccgtcgcccaggcctccccccacggcctccagctcggcgtccaggccgtcgtctaccacggcggctacctccccttccgcgaccccaactccgaggagaactccaacgacatcgccctcgtccacctctcctcccccctccccctcaccgagtacatccagcccgtctgcctccccgccgccggccaggccctcgtcgacggcaagatctgcaccgtcaccggctggggcaacacccagtactacggccagcaggccggcgtcctccaggaggcccgcgtccccatcatctccaacgacgtctgcaacggcgccgacttctacggcaaccagatcaagcccaagatgttctgcgccggctaccccgagggcggcatcgacgcctgccagggcgactccggcggccccttcgtctgcgaggactccatctcccgcaccccccgctggcgcctctgcggcatcgtctcctggggcaccggctgcgccctcgcccagaagcccggcgtctacaccaaggtctccgacttccgcgagtggatcttccaggccatcaagacccactccgaggcctccggcatggtcacccagctctga

SEQ ID NO: 1728 - RNA, 2940 nt, synthetic construct
  misc_feature 1..2940: note = BAG62073 variant
  source 1..2940: mol_type = other RNA
atggagctcgccgccctctgccgctggggcctcctcctcgccctcctcccccccggcgccgcctccacccaggacaactacctctccaccgacgtcggctcctgcaccctcgtctgccccctccacaaccaggaggtcaccgccgaggacggcacccagcgctgcgagaagtgctccaagccctgcgcccgcgtctgctacggcctcggcatggagcacctccgcgaggtccgcgccgtcacctccgccaacatccaggagttcgccggctgcaagaagatcttcggctccctcgccttcctccccgagtccttcgacggcgaccccgcctccaacaccgcccccctccagcccgagcagctccaggtcttcgagaccctcgaggagatcaccggctacctctacatctccgcctggcccgactccctccccgacctctccgtcttccagaacctccaggtcatccgcggccgcatcctccacaacggcgcctactccctcaccctccagggcctcggcatctcctggctcggcctccgctccctccgcgagctcggctccggcctcgccctcatccaccacaacacccacctctgcttcgtccacaccgtcccctgggaccagctcttccgcaacccccaccaggccctcctccacaccgccaaccgccccgaggacgagtgcgtcggcgagggcctcgcctgccaccagctctgcgcccgcggccactgctggggccccggccccacccagtgcgtcaactgctcccagttcctccgcggccaggagtgcgtcgaggagtgccgcgtcctccagggcctcccccgcgagtacgtcaacgcccgccactgcctcccctgccaccccgagtgccagccccagaacggctccgtcacctgcttcggccccgaggccgaccagtgcgtcgcctgcgcccactacaaggacccccccttctgcgtcgcccgctgcccctccggcgtcaagcccgacctctcctacatgcccatctggaagttccccgacgaggagggcgcctgccagccctgccccatcaactgcacccactcctgcgtcgacctcgacgacaagggctgccccgccgagcagcgcgcctcccccctcacctccatcatctccgccgtcgtcggcatcctcctcgtcgtcgtcctcggcgtcgtcttcggcatcctcatcaagcgccgccagcagaagatccgcaagtacaccatgcgccgcctcctccaggagaccgagctcgtcgagcccctcaccccctccggcgccatgcccaaccaggcccagatgcgcatcctcaaggagaccgagctccgcaaggtcaaggtcctcggctccggcgccttcggcaccgtctacaagggcatctggatccccgacggcgagaacgtcaagatccccgtcgccatcaaggtcctccgcgagaacacctcccccaaggccaacaaggagatcctcgacgaggcctacgtcatggccggcgtcggctccccctacgtctcccgcctcctcggcatctgcctcacctccaccgtccagctcgtcacccagctcatgccctacggctgcctcctcgaccacgtccgcgagaaccgcggccgcctcggctcccaggacctcctcaactggtgcatgcagatcgccaagggcatgtcctacctcgaggacgtccgcctcgtccaccgcgacctcgccgcccgcaacgtcctcgtcaagtcccccaaccacgtcaagatcaccgacttcggcctcgcccgcctcctcgacatcgacgagaccgagtaccacgccgacggcggcaaggtccccatcaagtggatggccctcgagtccatcctccgccgccgcttcacccaccagtccgacgtctggtcctacggcgtcaccgtctgggagctcatgaccttcggcgccaagccctacgacggcatccccgcccgcgagatccccgacctcctcgagaagggcgagcgcctcccccagccccccatctgcaccatcgacgtctacatgatcatggtcaagtgctggatgatcgactccgagtgccgcccccgcttccgcgagctcgtctccgagttctcccgcatggcccgcgacccccagcgcttcgtcgtcatccagaacgaggacctcggccccgcctcccccctcgactccaccttctaccgctccctcctcgaggacgacgacatgggcgacctcgtcgacgccgaggagtacctcgtcccccagcagggcttcttctgccccgaccccgcccccggcgccggcggcatggtccaccaccgccaccgctcctcctccacccgctccggcggcggcgacctcaccctcggcctcgagccctccgaggaggaggccccccgctcccccctcgccccctccgagggcgccggctccgacgtcttcgacggcgacctcggcatgggcgccgccaagggcctccagtccctccccacccacgacccctcccccctccagcgctactccgaggaccccaccgtccccctcccctccgagaccgacggctacgtcgcccccctcacctgctccccccagcccgagtacgtcaaccagcccgacgtccgcccccagcccccctccccccgcgagggccccctccccgccgcccgccccgccggcgccaccctcgagcgccccaagaccctctcccccggcaagaacggcgtcgtcaaggacgtcttcgccttcggcggcgccgtcgagaaccccgagtacctcaccccccagggcggcgccgccccccagccccaccccccccccgccttctcccccgccttcgacaacctctactactgggaccaggacccccccgagcgcggcgcccccccctccaccttcaagggcacccccaccgccgagaaccccgagtacctcggcctcgacgtccccgtctga

SEQ ID NO: 1729 - RNA, 264 nt, synthetic construct
  misc_feature 1..264: note = CCQ43016 variant
  source 1..264: mol_type = other RNA
atgatgcgcatgaagaccttcgtcatgatccacttccacctcatgaacggcggcaaggccaagctctactcccgcccccacgccaagctcctccccgagcagcgcgtcaccgacaagaccggcgcccccgtcgagtggcccggccagacccagtgctccaccgagacccagaccctcgccgccatgcccgcccaggccgtcatgcgcgtcacctgcaccgtcgtcgacatgcacaagtccgagtgcgcccccgcccagacctga

SEQ ID NO: 1730 - RNA, 3768 nt, synthetic construct
  misc_feature 1..3768: note = AAI67147 variant
  source 1..3768: mol_type = other RNA
atggagctcgccgccctctgccgctggggcctcctcctcgccctcctcccccccggcgccgcctccacccaggtctgcaccggcaccgacatgaagctccgcctccccgcctcccccgagacccacctcgacatgctccgccacctctaccagggctgccaggtcgtccagggcaacctcgagctcacctacctccccaccaacgcctccctctccttcctccaggacatccaggaggtccagggctacgtcctcatcgcccacaaccaggtccgccaggtccccctccagcgcctccgcatcgtccgcggcacccagctcttcgaggacaactacgccctcgccgtcctcgacaacggcgaccccctcaacaacaccacccccgtcaccggcgcctcccccggcggcctccgcgagctccagctccgctccctcaccgagatcctcaagggcggcgtcctcatccagcgcaacccccagctctgctaccaggacaccatcctctggaaggacatcttccacaagaacaaccagctcgccctcaccctcatcgacaccaaccgctcccgcgcctgccacccctgctcccccatgtgcaagggctcccgctgctggggcgagtcctccgaggactgccagtccctcacccgcaccgtctgcgccggcggctgcgcccgctgcaagggccccctccccaccgactgctgccacgagcagtgcgccgccggctgcaccggccccaagcactccgactgcctcgcctgcctccacttcaaccactccggcatctgcgagctccactgccccgccctcgtcacctacaacaccgacaccttcgagtccatgcccaaccccgagggccgctacaccttcggcgcctcctgcgtcaccgcctgcccctacaactacctctccaccgacgtcggctcctgcaccctcgtctgccccctccacaaccaggaggtcaccgccgaggacggcacccagcgctgcgagaagtgctccaagccctgcgcccgcgtctgctacggcctcggcatggagcacctccgcgaggtccgcgccgtcacctccgccaacatccaggagttcgccggctgcaagaagatcttcggctccctcgccttcctccccgagtccttcgacggcgaccccgcctccaacaccgcccccctccagcccgagcagctccaggtcttcgagaccctcgaggagatcaccggctacctctacatctccgcctggcccgactccctccccgacctctccgtcttccagaacctccaggtcatccgcggccgcatcctccacaacggcgcctactccctcaccctccagggcctcggcatctcctggctcggcctccgctccctccgcgagctcggctccggcctcgccctcatccaccacaacacccacctctgcttcgtccacaccgtcccctgggaccagctcttccgcaacccccaccaggccctcctccacaccgccaaccgccccgaggacgagtgcgtcggcgagggcctcgcctgccaccagctctgcgcccgcggccactgctggggccccggccccacccagtgcgtcaactgctcccagttcctccgcggccaggagtgcgtcgaggagtgccgcgtcctccagggcctcccccgcgagtacgtcaacgcccgccactgcctcccctgccaccccgagtgccagccccagaacggctccgtcacctgcttcggccccgaggccgaccagtgcgtcgcctgcgcccactacaaggacccccccttctgcgtcgcccgctgcccctccggcgtcaagcccgacctctcctacatgcccatctggaagttccccgacgaggagggcgcctgccagccctgccccatcaactgcacccactcctgcgtcgacctcgacgacaagggctgccccgccgagcagcgcgcctcccccctcacctccatcatctccgccgtcgtcggcatcctcctcgtcgtcgtcctcggcgtcgtcttcggcatcctcatcaagcgccgccagcagaagatccgcaagtacaccatgcgccgcctcctccaggagaccgagctcgtcgagcccctcaccccctccggcgccatgcccaaccaggcccagatgcgcatcctcaaggagaccgagctccgcaaggtcaaggtcctcggctccggcgccttcggcaccgtctacaagggcatctggatccccgacggcgagaacgtcaagatccccgtcgccatcaaggtcctccgcgagaacacctcccccaaggccaacaaggagatcctcgacgaggcctacgtcatggccggcgtcggctccccctacgtctcccgcctcctcggcatctgcctcacctccaccgtccagctcgtcacccagctcatgccctacggctgcctcctcgaccacgtccgcgagaaccgcggccgcctcggctcccaggacctcctcaactggtgcatgcagatcgccaagggcatgtcctacctcgaggacgtccgcctcgtccaccgcgacctcgccgcccgcaacgtcctcgtcaagtcccccaaccacgtcaagatcaccgacttcggcctcgcccgcctcctcgacatcgacgagaccgagtaccacgccgacggcggcaaggtccccatcaagtggatggccctcgagtccatcctccgccgccgcttcacccaccagtccgacgtctggtcctacggcgtcaccgtctgggagctcatgaccttcggcgccaagccctacgacggcatccccgcccgcgagatccccgacctcctcgagaagggcgagcgcctcccccagccccccatctgcaccatcgacgtctacatgatcatggtcaagtgctggatgatcgactccgagtgccgcccccgcttccgcgagctcgtctccgagttctcccgcatggcccgcgacccccagcgcttcgtcgtcatccagaacgaggacctcggccccgcctcccccctcgactccaccttctaccgctccctcctcgaggacgacgacatgggcgacctcgtcgacgccgaggagtacctcgtcccccagcagggcttcttctgccccgaccccgcccccggcgccggcggcatggtccaccaccgccaccgctcctcctccacccgctccggcggcggcgacctcaccctcggcctcgagccctccgaggaggaggccccccgctcccccctcgccccctccgagggcgccggctccgacgtcttcgacggcgacctcggcatgggcgccgccaagggcctccagtccctccccacccacgacccctcccccctccagcgctactccgaggaccccaccgtccccctcccctccgagaccgacggctacgtcgcccccctcacctgctccccccagcccgagtacgtcaaccagcccgacgtccgcccccagcccccctccccccgcgagggccccctccccgccgcccgccccgccggcgccaccctcgagcgccccaagaccctctcccccggcaagaacggcgtcgtcaaggacgtcttcgccttcggcggcgccgtcgagaaccccgagtacctcaccccccagggcggcgccgccccccagccccaccccccccccgccttctcccccgccttcgacaacctctactactgggaccaggacccccccgagcgcggcgcccccccctccaccttcaagggcacccccaccgccgagaaccccgagtacctcggcctcgacgtccccgtctga

SEQ ID NO: 1731 - RNA, 1260 nt, synthetic construct
  misc_feature 1..1260: note = AAD56009 variant
  source 1..1260: mol_type = other RNA
atggagctcgccgccctctgccgctggggcctcctcctcgccctcctcccccccggcgccgcctccacccaggtctgcaccggcaccgacatgaagctccgcctccccgcctcccccgagacccacctcgacatgctccgccacctctaccagggctgccaggtcgtccagggcaacctcgagctcacctacctccccaccaacgcctccctctccttcctccaggacatccaggaggtccagggctacgtcctcatcgcccacaaccaggtccgccaggtccccctccagcgcctccgcatcgtccgcggcacccagctcttcgaggacaactacgccctcgccgtcctcgacaacggcgaccccctcaacaacaccacccccgtcaccggcgcctcccccggcggcctccgcgagctccagctccgctccctcaccgagatcctcaagggcggcgtcctcatccagcgcaacccccagctctgctaccaggacaccatcctctggaaggacatcttccacaagaacaaccagctcgccctcaccctcatcgacaccaaccgctcccgcgcctgccacccctgctcccccatgtgcaagggctcccgctgctggggcgagtcctccgaggactgccagtccctcacccgcaccgtctgcgccggcggctgcgcccgctgcaagggccccctccccaccgactgctgccacgagcagtgcgccgccggctgcaccggccccaagcactccgactgcctcgcctgcctccacttcaaccactccggcatctgcgagctccactgccccgccctcgtcacctacaacaccgacaccttcgagtccatgcccaaccccgagggccgctacaccttcggcgcctcctgcgtcaccgcctgcccctacaactacctctccaccgacgtcggctcctgcaccctcgtctgccccctccacaaccaggaggtcaccgccgaggacggcacccagcgctgcgagaagtgctccaagccctgcgcccgcggcacccactccctccccccccgccccgccgccgtccccgtccccctccgcatgcagcccggccccgcccaccccgtcctctccttcctccgcccctcctgggacctcgtctccgccttctactccctccccctcgcccccctctcccccacctccgtccccatctcccccgtctccgtcggccgcggccccgaccccgacgcccacgtcgccgtcgacctctcccgctacgagggctga

SEQ ID NO: 1732 - RNA, 546 nt, synthetic construct
  misc_feature 1..546: note = U70863.1 variant
  source 1..546: mol_type = other RNA
ggctcccactccatgcgctacttcttcacctccgtctcccgccccggccgcggcgagccccgcttcatcgccgtcggctacgtcgacgacacccagttcgtccgcttcgactccgacgccgcctcccagcgcatggagccccgcgccccctggatcgagcaggagggccccgagtactgggacggcgagacccgcaaggtcaaggcccactcccagacccaccgcgtcgacctcggcaccctccgcggctactacaaccagtccgaggccggctcccacaccgtccagcgcatgtacggctgcgacgtcggctccgactggcgcttcctccgcggctaccaccagtacgcctacgacggcaaggactacatcgccctcaaggaggacctccgctcctggaccgccgccgacatggccgcccagaccaccaagcacaagtgggagaccgcccacgtcgccgagcagctccgcgcctacctcgagggcacctgcgtcgagtggctccgccgctacctcgagaacggcaaggagaccctccagcgcacc

SEQ ID NO: 1733 - RNA, 543 nt, synthetic construct
  misc_feature 1..543: note = AH009136.2 variant
  source 1..543: mol_type = other RNA
tcccactccatgcgctacttcttcacctccgtctcccgccccggccgcggcgagccccgcttcatcgccgtcggctacgtcgacgacacccagttcgtccgcttcgactccgacgccgcctcccagcgcatggagccccgcgccccctggatcgagcaggagggccccgagtactgggacggcgagacccgcaaggtcaaggcccactcccagacccaccgcgtcgacctcggcaccctccgcggctactacaaccagtccgaggccggctcccacaccgtccagcgcatgtacggctgcgacgtcggctccgactggcgcttcctccgcggctaccaccagtacgcctacgacggcaaggactacatcgccctcaaggaggacctccgctcctggaccgccgccgacatggccgcccagaccaccaagcacaagtgggaggccgcccacgtcgccgagcagctccgcgcctacctcgagggcacctgcgtcgagtggctccgccgctacctcgagaacggcaaggagaccctccagcgcacc

SEQ ID NO: 1734 - RNA, 705 nt, synthetic construct
  misc_feature 1..705: note = AAG09781 variant
  source 1..705: mol_type = other RNA
atgctccgcgtccccgagccccgccccggcgaggccaaggccgagggcgccgccccccccaccccctccaagcccctcacctccttcctcatccaggacatcctccgcgacggcgcccagcgccagggcggccgcacctcctcccagcgccagcgcgaccccgagcccgagcccgagcccgagcccgagggcggccgctcccgcgccggcgcccagaacgaccagctctccaccggcccccgcgccgcccccgaggaggccgagaccctcgccgagaccgagcccgagcgccacctcggctcctacctcctcgactccgagaacacctccggcgccctcccccgcctcccccagacccccaagcagccccagaagcgctcccgcgccgccttctcccacacccaggtcatcgagctcgagcgcaagttctcccaccagaagtacctctccgcccccgagcgcgcccacctcgccaagaacctcaagctcaccgagacccaggtcaagatctggttccagaaccgccgctacaagaccaagcgcaagcagctctcctccgagctcggcgacctcgagaagcactcctccctccccgccctcaaggaggaggccttctcccgcgcctccctcgtctccgtctacaactcctacccctactacccctacctctactgcgtcggctcctggtcccccgccttctggtga

SEQ ID NO: 1735 - RNA, 942 nt, synthetic construct
  misc_feature 1..942: note = BAG37303 variant
  source 1..942: mol_type = other RNA
atggcctccttccgcaagctcaccctctccgagaaggtcccccccaaccacccctcccgcaagaaggtcaacttcctcgacatgtccctcgacgacatcatcatctacaaggagctcgagggcaccaacgccgaggaggagaagaacaagcgccagaaccactccaagaaggagtccccctcccgccagcagtccaaggcccaccgccaccgccaccgccgcgactactcccgctgccgctccaactccgaggagggcaaccacgacaagaagccctcccagaagccctccggcttcaagtccggccagcaccccctcaacggccagcccctcatcgagcaggagaagtgctccgacaactacgaggcccaggccgagaagaaccagggccagtccgagggcaaccagcaccagtccgagggcaaccccgacaagtccgaggagtcccagggccagcccgaggagaaccaccactccgagcgctcccgcaaccacctcgagcgctccctctcccagtccgaccgctcccagggccagctcaagcgccaccacccccagtacgagcgctcccacggccagtacaagcgctcccacggccagtccgagcgctcccacggccactccgagcgctcccacggccactccgagcgctcccacggccactccgagcgctcccacggccactccaagcgctcccgctcccagggcgacctcgtcgacacccagtccgacctcatcgccacccagcgcgacctcatcgccacccagaaggacctcatcgccacccagcgcgacctcatcgccacccagcgcgacctcatcgtcacccagcgcgacctcgtcgccaccgagcgcgacctcatcaaccagtccggccgctcccacggccagtccgagcgccaccagcgctactccaccggcaagaacaccatcaccacctga

SEQ ID NO: 1736 - RNA, 942 nt, synthetic construct
  misc_feature 1..942: note = AAI28135 variant
  source 1..942: mol_type = other RNA
atggcctccttccgcaagctcaccctctccgagaaggtcccccccaaccacccctcccgcaagaaggtcaacttcctcgacatgtccctcgacgacatcatcatctacaaggagctcgagggcaccaacgccgaggaggagaagaacaagcgccagaaccactccaagaaggagtccccctcccgccagcagtccaaggcccaccgccaccgccaccgccgcggctactcccgctgccgctccaactccgaggagggcaaccacgacaagaagccctcccagaagccctccggcttcaagtccggccagcaccccctcaacggccagcccctcatcgagcaggagaagtgctccgacaactacgaggcccaggccgagaagaaccagggccagtccgagggcaaccagcaccagtccgagggcaaccccgacaagtccgaggagtcccagggccagcccgaggagaaccaccactccgagcgctcccgcaaccacctcgagcgctccctctcccagtccgaccgctcccagggccagctcaagcgccaccacccccagtacgagcgctcccacggccagtacaagcgctcccacggccagtccgagcgctcccacggccactccgagcgctcccacggccactccgagcgctcccacggccactccgagcgctcccacggccactccaagcgctcccgctcccagggcgacctcgtcgacacccagtccgacctcatcgccacccagcgcgacctcatcgccacccagaaggacctcatcgccacccagcgcgacctcatcgccacccagcgcgacctcatcgtcacccagcgcgacctcgtcgccaccgagcgcgacctcatcaaccagtccggccgctcccacggccagtccgagcgccaccagcgctactccaccggcaagaacaccatcaccacctga

SEQ ID NO: 1737 - RNA, 384 nt, synthetic construct
  misc_feature 1..384: note = 12543784 variant
  source 1..384: mol_type = other RNA
atgatcaagaagaacctcaagaagctcggcatcgaggagacctacctcaacatcatcaaggccatctacgaccgccccaccgcctccatccagaagaccgagaacctctccaccaagaccggcacctcccaggagtaccacctctcccccctctggttctacatcgtcctcgagatcctcgcctccaccatccgccaggagaagaacctcaaggacatccacaccgagaaggaggaggtcaagctctccctcttcgccgacgccatgatcctctacctcaagaagcccaacgactccacccgcaagctcctcgagctcatcaagaagatccactcctcctgccgcatcaagatcaacatccacttcgccttctgctcccagtga

SEQ ID NO: 1738 - RNA, 1926 nt, synthetic construct
  misc_feature 1..1926: note = AAA63226 variant
  source 1..1926: mol_type = other RNA
atggccaaggccgccgccatcggcatcgacctcggcaccacctactcctgcgtcggcgtcttccagcacggcaaggtcgagatcatcgccaacgaccagggcaaccgcaccaccccctcctacgtcgccttcaccgacaccgagcgcctcatcggcgacgccgccaagaaccaggtcgccctcaacccccagaacaccgtcttcgacgccaagcgcctcatcggccgcaagttcggcgaccccgtcgtccagtccgacatgaagcactggcccttccaggtcatcaacgacggcgacaagcccaaggtccaggtctcctacaagggcgagaccaaggccttctaccccgaggagatctcctccatggtcctcaccaagatgaaggagatcgccgaggcctacctcggctaccccgtcaccaacgccgtcatcaccgtccccgcctacttcaacgactcccagcgccaggccaccaaggacgccggcgtcatcgccggcctcaacgtcctccgcatcatcaacgagcccaccgccgccgccatcgcctacggcctcgaccgcaccggcaagggcgagcgcaacgtcctcatcttcgacctcggcggcggcaccttcgacgtctccatcctcaccatcgacgacggcatcttcgaggtcaaggccaccgccggcgacacccacctcggcggcgaggacttcgacaaccgcctcgtcaaccacttcgtcgaggagttcaagcgcaagcacaagaaggacatctcccagaacaagcgcgccgtccgccgcctccgcaccgcctgcgagcgcgccaagcgcaccctctcctcctccacccaggcctccctcgagatcgactccctcttcgagggcatcgacttctacacctccatcacccgcgcccgcttcgaggagctctgctccgacctcttccgctccaccctcgagcccgtcgagaaggccctccgcgacgccaagctcgacaaggcccagatccacgacctcgtcctcgtcggcggctccacccgcatccccaaggtccagaagctcctccaggacttcttcaacggccgcgacctcaacaagtccatcaaccccgacgaggccgtcgcctacggcgccgccgtccaggccgccatcctcatgggcgacaagtccgagaacgtccaggacctcctcctcctcgacgtcgcccccctctccctcggcctcgagaccgccggcggcgtcatgaccgccctcatcaagcgcaactccaccatccccaccaagcagacccagatcttcaccacctactccgacaaccagcccggcgtcctcatccaggtctacgagggcgagcgcgccatgaccaaggacaacaacctcctcggccgcttcgagctctccggcatcccccccgccccccgcggcgtcccccagatcgaggtcaccttcgacatcgacgccaacggcatcctcaacgtcaccgccaccgacaagtccaccggcaaggccaacaagatcaccatcaccaacgacaagggccgcctctccaaggaggagatcgagcgcatggtccaggaggccgagaagtacaaggccgaggacgaggtccagcgcgagcgcgtctccgccaagaacgccctcgagtcctacgccttcaacatgaagtccgccgtcgaggacgagggcctcaagggcaagatctccgaggccgacaagaagaaggtcctcgacaagtgccaggaggtcatctcctggctcgacgccaacaccctcgccgagaaggacgagttcgagcacaagcgcaaggagctcgagcaggtctgcaaccccatcatctccggcctctaccagggcgccggcggccccggccccggcggcttcggcgcccagggccccaagggcggctccggctccggccccaccatcgaggaggtcgactga

SEQ ID NO: 1739 - RNA, 1926 nt, synthetic construct; identical to SEQ ID NO: 1738
  misc_feature 1..1926: note = AAA63227 variant
  source 1..1926: mol_type = other RNA

SEQ ID NO: 1740 - RNA, 627 nt, synthetic construct
  misc_feature 1..627: note = AAI21098 variant
  source 1..627: mol_type = other RNA
atggccctcggccagaagctcttcatcaccatgtcccgcggcgccggccgcctccagggcaccctctgggccctcgtcttcctcggcatcctcgtcggcatggtcgtcccctcccccgccggcacccgcgccaacaacaccctcctcgactcccgcggctggggcaccctcctctcccgctcccgcgccggcctcgccggcgagatcgccggcgtcaactgggagtccggctacctcgtcggcatcaagcgccagcgccgcctctactgcaacgtcggcatcggcttccacctccaggtcctccccgacggccgcatctccggcacccacgaggagaacccctactccctcctcgagatctccaccgtcgagcgcggcgtcgtctccctcttcggcgtccgctccgccctcttcgtcgccatgaactccaagggccgcctctacgccaccccctccttccaggaggagtgcaagttccgcgagaccctcctccccaacaactacaacgcctacgagtccgacctctaccagggcacctacatcgccctctccaagtacggccgcgtcaagcgcggctccaaggtctcccccatcatgaccgtcacccacttcctcccccgcatctga

SEQ ID NO: 1741 - RNA, 1569 nt, synthetic construct
  misc_feature 1..1569: note = BAA74724 variant
  source 1..1569: mol_type = other RNA
atgccccgcgccccccgctgccgcgccgtccgctccctcctccgctcccactaccgcgaggtcctccccctcgccaccttcgtccgccgcctcggcccccagggctggcgcctcgtccagcgcggcgaccccgccgccttccgcgccctcgtcgcccagtgcctcgtctgcgtcccctgggacgcccgccccccccccgccgccccctccttccgccaggtctcctgcctcaaggagctcgtcgcccgcgtcctccagcgcctctgcgagcgcggcgccaagaacgtcctcgccttcggcttcgccctcctcgacggcgcccgcggcggcccccccgaggccttcaccacctccgtccgctcctacctccccaacaccgtcaccgacgccctccgcggctccggcgcctggggcctcctcctccgccgcgtcggcgacgacgtcctcgtccacctcctcgcccgctgcgccctcttcgtcctcgtcgccccctcctgcgcctaccaggtctgcggcccccccctctaccagctcggcgccgccacccaggcccgcccccccccccacgcctccggcccccgccgccgcctcggctgcgagcgcgcctggaaccactccgtccgcgaggccggcgtccccctcggcctccccgcccccggcgcccgccgccgcggcggctccgcctcccgctccctccccctccccaagcgcccccgccgcggcgccgcccccgagcccgagcgcacccccgtcggccagggctcctgggcccaccccggccgcacccgcggcccctccgaccgcggcttctgcgtcgtctcccccgcccgccccgccgaggaggccacctccctcgagggcgccctctccggcacccgccactcccacccctccgtcggccgccagcaccacgccggccccccctccacctcccgccccccccgcccctgggacaccccctgcccccccgtctacgccgagaccaagcacttcctctactcctccggcgacaaggagcagctccgcccctccttcctcctctcctccctccgccccatcctcaccggcgcccgccgcctcgtcgagaccatcttcctcggctcctcccccggctgccagggcctccccgccggctgccccgcctgcccctccgccaccggcaagtgcggcccctgcttctggtcctgcctcggcaccacccgctccgcccccaccggctgctcctcccgccgcaccgcccgctgcgagctccgctccccccagcagcccgtctccgtccccggccgctccccccgcgccctctggcgccccccccgccgccgcacccagacccccgtcgcctggtgctcctgctccgcctccaccgcccccctcgccggcgtccgcctccgcgccggcctccccgcccccgccggcgccccccgccccctcggcctccaggcccagcgccgccgcttcctccgcaacaccaagaagttcatctccctcggcaagcacgccaagctctccctccaggagctcacctggaagatgtccgtccgcgactgcgcctggctccgccgctccccc

SEQ ID NO: 1742 - RNA, 1680 nt, synthetic construct
  misc_feature 1..1680: note = BAA23606 variant
  source 1..1680: mol_type = other RNA
atgcgcctccaccgcctccgcgcccgcctctccgccgtcgcctgcggcctcctcctcctcctcgtccgcggccagggccaggactccgcctcccccatccgcaccacccacaccggccaggtcctcggctccctcgtccacgtcaagggcgccaacgccggcgtccagaccttcctcggcatccccttcgccaagccccccctcggccccctccgcttcgccccccccgagccccccgagtcctggtccggcgtccgcgacggcaccacccaccccgccatgtgcctccaggacctcaccgccgtcgagtccgagttcctctcccagttcaacatgaccttcccctccgactccatgtccgaggactgcctctacctctccatctacacccccgcccactcccacgagggctccaacctccccgtcatggtctggatccacggcggcgccctcgtcttcggcatggcctccctctacgacggctccatgctcgccgccctcgagaacgtcgtcgtcgtcatcatccagtaccgcctcggcgtcctcggcttcttctccaccggcgacaagcacgccaccggcaactggggctacctcgaccaggtcgccgccctccgctgggtccagcagaacatcgcccacttcggcggcaaccccgaccgcgtcaccatcttcggcgagtccgccggcggcacctccgtctcctccctcgtcgtctcccccatctcccagggcctcttccacggcgccatcatggagtccggcgtcgccctcctccccggcctcatcgcctcctccgccgacgtcatctccaccgtcgtcgccaacctctccgcctgcgaccaggtcgactccgaggccctcgtcggctgcctccgcggcaagtccaaggaggagatcctcgccatcaacaagcccttcaagatgatccccggcgtcgtcgacggcgtcttcctcccccgccacccccaggagctcctcgcctccgccgacttccagcccgtcccctccatcgtcggcgtcaacaacaacgagttcggctggctcatccccaaggtcatgcgcatctacgacacccagaaggagatggaccgcgaggcctcccaggccgccctccagaagatgctcaccctcctcatgctcccccccaccttcggcgacctcctccgcgaggagtacatcggcgacaacggcgacccccagaccctccaggcccagttccaggagatgatggccgactccatgttcgtcatccccgccctccaggtcgcccacttccagtgctcccgcgcccccgtctacttctacgagttccagcaccagccctcctggctcaagaacatccgccccccccacatgaaggccgaccacggcgacgagctccccttcgtcttccgctccttcttcggcggcaactacatcaagttcaccgaggaggaggagcagctctcccgcaagatgatgaagtactgggccaacttcgcccgcaacggcaaccccaacggcgagggcctcccccactggcccctcttcgaccaggaggagcagtacctccagctcaacctccagcccgccgtcggccgcgccctcaaggcccaccgcctccagttctggaagaaggccctcccccagaagatccaggagctcgaggagcccgaggagcgccacaccgagctctga

SEQ ID NO: 1743 - RNA, 1740 nt, synthetic construct
  misc_feature 1..1740: note = AAH65269 variant
  source 1..1740: mol_type = other RNA
atgaacaagctctacatcggcaacctctccgagaacgccgccccctccgacctcgagtccatcttcaaggacgccaagatccccgtctccggccccttcctcgtcaagaccggctacgccttcgtcgactgccccgacgagtcctgggccctcaaggccatcgaggccctctccggcaagatcgagctccacggcaagcccatcgaggtcgagcactccgtccccaagcgccagcgcatccgcaagctccagatccgcaacatccccccccacctccagtgggaggtcctcgactccctcctcgtccagtacggcgtcgtcgagtcctgcgagcaggtcaacaccgactccgagaccgccgtcgtcaacgtcacctactcctccaaggaccaggcccgccaggccctcgacaagctcaacggcttccagctcgagaacttcaccctcaaggtcgcctacatccccgacgagatggccgcccagcagaaccccctccagcagccccgcggccgccgcggcctcggccagcgcggctcctcccgccagggctcccccggctccgtctccaagcagaagccctgcgacctccccctccgcctcctcgtccccacccagttcgtcggcgccatcatcggcaaggagggcgccaccatccgcaacatcaccaagcagacccagtccaagatcgacgtccaccgcaaggagaacgccggcgccgccgagaagtccatcaccatcctctccacccccgagggcacctccgccgcctgcaagtccatcctcgagatcatgcacaaggaggcccaggacatcaagttcaccgaggagatccccctcaagatcctcgcccacaacaacttcgtcggccgcctcatcggcaaggagggccgcaacctcaagaagatcgagcaggacaccgacaccaagatcaccatctcccccctccaggagctcaccctctacaaccccgagcgcaccatcaccgtcaagggcaacgtcgagacctgcgccaaggccgaggaggagatcatgaagaagatccgcgagtcctacgagaacgacatcgcctccatgaacctccaggcccacctcatccccggcctcaacctcaacgccctcggcctcttcccccccacctccggcatgcccccccccacctccggccccccctccgccatgacccccccctacccccagttcgagcagtccgagaccgagaccgtccacctcttcatccccgccctctccgtcggcgccatcatcggcaagcagggccagcacatcaagcagctctcccgcttcgccggcgcctccatcaagatcgcccccgccgaggcccccgacgccaaggtccgcatggtcatcatcaccggcccccccgaggcccagttcaaggcccagggccgcatctacggcaagatcaaggaggagaacttcgtctcccccaaggaggaggtcaagctcgaggcccacatccgcgtcccctccttcgccgccggccgcgtcatcggcaagggcggcaagaccgtcaacgagctccagaacctctcctccgccgaggtcgtcgtcccccgcgaccagacccccgacgagaacgaccaggtcgtcgtcaagatcaccggccacttctacgcctgccaggtcgcccagcgcaagatccaggagatcctcacccaggtcaagcagcaccagcagcagaaggccctccagtccggccccccccagtcccgccgcaagtga

SEQ ID NO: 1744 - RNA, 537 nt, synthetic construct
  misc_feature 1..537: note = AAA63207 variant
  source 1..537: mol_type = other RNA
atgcactcctccgccctcctctgctgcctcgtcctcctcaccggcgtccgcgcctcccccggccagggcacccagtccgagaactcctgcacccacttccccggcaacctccccaacatgctccgcgacctccgcgacgccttctcccgcgtcaagaccttcttccagatgaaggaccagctcgacaacctcctcctcaaggagtccctcctcgaggacttcaagggctacctcggctgccaggccctctccgagatgatccagttctacctcgaggaggtcatgccccaggccgagaaccaggaccccgacatcaaggcccacgtcaactccctcggcgagaacctcaagaccctccgcctccgcctccgccgctgccaccgcttcctcccctgcgagaacaagtccaaggccgtcgagcaggtcaagaacgccttcaacaagctccaggagaagggcatctacaaggccatgtccgagttcgacatcttcatcaactacatcgaggcctacatgaccatgaagatccgcaactga

SEQ ID NO: 1745 - RNA, 1143 nt, synthetic construct
  misc_feature 1..1143: note = AAB17170 variant
  source 1..1143: mol_type = other RNA
atggccttcgtctgcctcgccatcggctgcctctacaccttcctcatctccaccaccttcggctgcacctcctcctccgacaccgagatcaaggtcaaccccccccaggacttcgagatcgtcgaccccggctacctcggctacctctacctccagtggcagccccccctctccctcgaccacttcaaggagtgcaccgtcgagtacgagctcaagtaccgcaacatcggctccgagacctggaagaccatcatcaccaagaacctccactacaaggacggcttcgacctcaacaagggcatcgaggccaagatccacaccctcctcccctggcagtgcaccaacggctccgaggtccagtcctcctgggccgagaccacctactggatctccccccagggcatccccgagaccaaggtccaggacatggactgcgtctactacaactggcagtacctcctctgctcctggaagcccggcatcggcgtcctcctcgacaccaactacaacctcttctactggtacgagggcctcgaccacgccctccagtgcgtcgactacatcaaggccgacggccagaacatcggctgccgcttcccctacctcgaggcctccgactacaaggacttctacatctgcgtcaacggctcctccgagaacaagcccatccgctcctcctacttcaccttccagctccagaacatcgtcaagcccctcccccccgtctacctcaccttcacccgcgagtcctcctgcgagatcaagctcaagtggtccatccccctcggccccatccccgcccgctgcttcgactacgagatcgagatccgcgaggacgacaccaccctcgtcaccgccaccgtcgagaacgagacctacaccctcaagaccaccaacgagacccgccagctctgcttcgtcgtccgctccaaggtcaacatctactgctccgacgacggcatctggtccgagtggtccgacaagcagtgctgggagggcgaggacctctccaagaagaccctcctccgcttctggctccccttcggcttcatcctcatcctcgtcatcttcgtcaccggcctcctcctccgcaagcccaacacctaccccaagatgatccccgagttcttctgcgacacctga

SEQ ID NO: 1746 - RNA, 819 nt, synthetic construct
  misc_feature 1..819: note = AAA67527 variant
  source 1..819: mol_type = other RNA
atggactcctacctcctcatgtggggcctcctcaccttcatcatggtccccggctgccaggccgagctctgcgacgacgacccccccgagatcccccacgccaccttcaaggccatggcctacaaggagggcaccatgctcaactgcgagtgcaagcgcggcttccgccgcatcaagtccggctccctctacatgctctgcaccggcaactcctcccactcctcctgggacaaccagtgccagtgcacctcctccgccacccgcaacaccaccaagcaggtcaccccccagcccgaggagcagaaggagcgcaagaccaccgagatgcagtcccccatgcagcccgtcgaccaggcctccctccccggccactgccgcgagccccccccctgggagaacgaggccaccgagcgcatctaccacttcgtcgtcggccagatggtctactaccagtgcgtccagggctaccgcgccctccaccgcggccccgccgagtccgtctgcaagatgacccacggcaagacccgctggacccagccccagctcatctgcaccggcgagatggagacctcccagttccccggcgaggagaagccccaggcctcccccgagggccgccccgagtccgagacctcctgcctcgtcaccaccaccgacttccagatccagaccgagatggccgccaccatggagacctccatcttcaccaccgagtaccaggtcgccgtcgccggctgcgtcttcctcctcatctccgtcctcctcctctccggcctcacctggcagcgccgccagcgcaagtcccgccgcaccatctga

SEQ ID NO: 1747 - RNA, 1656 nt, synthetic construct
  misc_feature 1..1656: note = AAA59143 variant
  source 1..1656: mol_type = other RNA
atggccgcccccgccctctcctggcgcctccccctcctcatcctcctcctccccctcgccacctcctgggcctccgccgccgtcaacggcacctcccagttcacctgcttctacaactcccgcgccaacatctcctgcgtctggtcccaggacggcgccctccaggacacctcctgccaggtccacgcctggcccgaccgccgccgctggaaccagacctgcgagctcctccccgtctcccaggcctcctgggcctgcaacctcatcctcggcgcccccgactcccagaagctcaccaccgtcgacatcgtcaccctccgcgtcctctgccgcgagggcgtccgctggcgcgtcatggccatccaggacttcaagcccttcgagaacctccgcctcatggcccccatctccctccaggtcgtccacgtcgagacccaccgctgcaacatctcctgggagatctcccaggcctcccactacttcgagcgccacctcgagttcgaggcccgcaccctctcccccggccacacctgggaggaggcccccctcctcaccctcaagcagaagcaggagtggatctgcctcgagaccctcacccccgacacccagtacgagttccaggtccgcgtcaagcccctccagggcgagttcaccacctggtccccctggtcccagcccctcgccttccgcaccaagcccgccgccctcggcaaggacaccatcccctggctcggccacctcctcgtcggcctctccggcgccttcggcttcatcatcctcgtctacctcctcatcaactgccgcaacaccggcccctggctcaagaaggtcctcaagtgcaacacccccgacccctccaagttcttctcccagctctcctccgagcacggcggcgacgtccagaagtggctctcctcccccttcccctcctcctccttctcccccggcggcctcgcccccgagatctcccccctcgaggtcctcgagcgcgacaaggtcacccagctcctcctccagcaggacaaggtccccgagcccgcctccctctcctccaaccactccctcacctcctgcttcaccaaccagggctacttcttcttccacctccccgacgccctcgagatcgaggcctgccaggtctacttcacctacgacccctactccgaggaggaccccgacgagggcgtcgccggcgcccccaccggctcctccccccagcccctccagcccctctccggcgaggacgacgcctactgcaccttcccctcccgcgacgacctcctcctcttctccccctccctcctcggcggcccctcccccccctccaccgcccccggcggctccggcgccggcgaggagcgcatgcccccctccctccaggagcgcgtcccccgcgactgggacccccagcccctcggcccccccacccccggcgtccccgacctcgtcgacttccagcccccccccgagctcgtcctccgcgaggccggcgaggaggtccccgacgccggcccccgcgagggcgtctccttcccctggtcccgcccccccggccagggcgagttccgcgccctcaacgcccgcctccccctcaacaccgacgcctacctctccctccaggagctccagggccaggaccccacccacctcgtctga

SEQ ID NO: 1748 - RNA, 1110 nt, synthetic construct
  misc_feature 1..1110: note = AAA59145 variant
  source 1..1110: mol_type = other RNA
atgctcaagccctccctccccttcacctccctcctcttcctccagctccccctcctcggcgtcggcctcaacaccaccatcctcacccccaacggcaacgaggacaccaccgccgacttcttcctcaccaccatgcccaccgactccctctccgtctccaccctccccctccccgaggtccagtgcttcgtcttcaacgtcgagtacatgaactgcacctggaactcctcctccgagccccagcccaccaacctcaccctccactactggtacaagaactccgacaacgacaaggtccagaagtgctcccactacctcttctccgaggagatcacctccggctgccagctccagaagaaggagatccacctctaccagaccttcgtcgtccagctccaggacccccgcgagccccgccgccaggccacccagatgctcaagctccagaacctcgtcatcccctgggcccccgagaacctcaccctccacaagctctccgagtcccagctcgagctcaactggaacaaccgcttcctcaaccactgcctcgagcacctcgtccagtaccgcaccgactgggaccactcctggaccgagcagtccgtcgactaccgccacaagttctccctcccctccgtcgacggccagaagcgctacaccttccgcgtccgctcccgcttcaaccccctctgcggctccgcccagcactggtccgagtggtcccaccccatccactggggctccaacacctccaaggagaaccccttcctcttcgccctcgaggccgtcgtcatctccgtcggctccatgggcctcatcatctccctcctctgcgtctacttctggctcgagcgcaccatgccccgcatccccaccctcaagaacctcgaggacctcgtcaccgagtaccacggcaacttctccgcctggtccggcgtctccaagggcctcgccgagtccctccagcccgactactccgagcgcctctgcctcgtctccgagatcccccccaagggcggcgccctcggcgagggccccggcgcctccccctgcaaccagcactccccctactgggcccccccctgctacaccctcaagcccgagacctga

SEQ ID NO: 1749 - RNA, 405 nt, synthetic construct
  misc_feature 1..405: note = AAA74469 variant
  source 1..405: mol_type = other RNA
atgcgcatgctcctccacctctccctcctcgccctcggcgccgcctacgtctacgccatccccaccgagatccccacctccgccctcgtcaaggagaccctcgccctcctctccacccaccgcaccctcctcatcgccaacgagaccctccgcatccccgtccccgtccacaagaaccaccagctctgcaccgaggagatcttccagggcatcggcaccctcgagtcccagaccgtccagggcggcaccgtcgagcgcctcttcaagaacctctccctcatcaagaagtacatcgacggccagaagaagaagtgcggcgaggagcgccgccgcgtcaaccagttcctcgactacctccaggagttcctcggcgtcatgaacaccgagtggatcatcgagtcctga

SEQ ID NO: 1750 - RNA, 555 nt, synthetic construct
  misc_feature 1..555: note = AAH06487 variant
  source 1..555: mol_type = other RNA
atggtccgcaagctcaagttccacgagcagaagctcctcaagcaggtcgacttcctcaactgggaggtcaccgaccacaacctccacgagctccgcgtcctccgccgctaccgcctccagcgccgcgaggactacacccgctacaaccagctctcccgcgccgtccgcgagctcgcccgccgcctccgcgacctccccgagcgcgaccagttccgcgtccgcgcctccgccgccctcctcgacaagctctacgccctcggcctcgtccccacccgcggctccctcgagctctgcgacttcgtcaccgcctcctccttctgccgccgccgcctccccaccgtcctcctcaagctccgcatggcccagcacctccaggccgccgtcgccttcgtcgagcagggccacgtccgcgtcggccccgacgtcgtcaccgaccccgccttcctcgtcacccgctccatggaggacttcgtcacctgggtcgactcctccaagatcaagcgccacgtcctcgagtacaacgaggagcgcgacgacttcgacctcgaggcctga

SEQ ID NO: 1751 - RNA, 3150 nt, synthetic construct
  misc_feature 1..3150: note = AAH08786 variant
  source 1..3150: mol_type = other RNA
atgggctcccgcacccccgagtcccccctccacgccgtccagctccgctggggcccccgccgccgcccccccctcctccccctcctcctcctcctcctccccccccccccccgcgtcggcggcttcaacctcgacgccgaggcccccgccgtcctctccggcccccccggctccttcttcggcttctccgtcgagttctaccgccccggcaccgacggcgtctccgtcctcgtcggcgcccccaaggccaacacctcccagcccggcgtcctccagggcggcgccgtctacctctgcccctggggcgcctcccccacccagtgcacccccatcgagttcgactccaagggctcccgcctcctcgagtcctccctctcctcctccgagggcgaggagcccgtcgagtacaagtccctccagtggttcggcgccaccgtccgcgcccacggctcctccatcctcgcctgcgcccccctctactcctggcgcaccgagaaggagcccctctccgaccccgtcggcacctgctacctctccaccgacaacttcacccgcatcctcgagtacgccccctgccgctccgacttctcctgggccgccggccagggctactgccagggcggcttctccgccgagttcaccaagaccggccgcgtcgtcctcggcggccccggctcctacttctggcagggccagatcctctccgccacccaggagcagatcgccgagtcctactaccccgagtacctcatcaacctcgtccagggccagctccagacccgccaggcctcctccatctacgacgactcctacctcggctactccgtcgccgtcggcgagttctccggcgacgacaccgaggacttcgtcgccggcgtccccaagggcaacctcacctacggctacgtcaccatcctcaacggctccgacatccgctccctctacaacttctccggcgagcagatggcctcctacttcggctacgccgtcgccgccaccgacgtcaacggcgacggcctcgacgacctcctcgtcggcgcccccctcctcatggaccgcacccccgacggccgcccccaggaggtcggccgcgtctacgtctacctccagcaccccgccggcatcgagcccacccccaccctcaccctcaccggccacgacgagttcggccgcttcggctcctccctcacccccctcggcgacctcgaccaggacggctacaacgacgtcgccatcggcgcccccttcggcggcgagacccagcagggcgtcgtcttcgtcttccccggcggccccggcggcctcggctccaagccctcccaggtcctccagcccctctgggccgcctcccacacccccgacttcttcggctccgccctccgcggcggccgcgacctcgacggcaacggctaccccgacctcatcgtcggctccttcggcgtcgacaaggccgtcgtctaccgcggccgccccatcgtctccgcctccgcctccctcaccatcttccccgccatgttcaaccccgaggagcgctcctgctccctcgagggcaaccccgtcgcctgcatcaacctctccttctgcctcaacgcctccggcaagcacgtcgccgactccatcggcttcaccgtcgagctccagctcgactggcagaagcagaagggcggcgtccgccgcgccctcttcctcgcctcccgccaggccaccctcacccagaccctcctcatccagaacggcgcccgcgaggactgccgcgagatgaagatctacctccgcaacgagtccgagttccgcgacaagctctcccccatccacatcgccctcaacttctccctcgacccccaggcccccgtcgactcccacggcctccgccccgccctccactaccagtccaagtcccgcatcgaggacaaggcccagatcctcctcgactgcggcgaggacaacatctgcgtccccgacctccagctcgaggtcttcggcgagcagaaccacgtctacctcggcgacaagaacgccctcaacctcaccttccacgcccagaacgtcggcgagggcggcgcctacgaggccgagctccgcgtcaccgccccccccgaggccgagtactccggcctcgtccgccaccccggcaacttctcctccctctcctgcgactacttcgccgtcaaccagtcccgcctcctcgtctgcgacctcggcaaccccatgaaggccggcgcctccctctggggcggcctccgcttcaccgtcccccacctccgcgacaccaagaagaccatccagttcgacttccagatcctctccaagaacctcaacaactcccagtccgacgtcgtctccttccgcctctccgtcgaggcccaggcccaggtcaccctcaacggcgtctccaagcccgaggccgtcctcttccccgtctccgactggcacccccgcgaccagccccagaaggaggaggacctcggccccgccgtccaccacgtctacgagctcatcaaccagggcccctcctccatctcccagggcgtcctcgagctctcctgcccccaggccctcgagggccagcagctcctctacgtcacccgcgtcaccggcctcaactgcaccaccaaccaccccatcaaccccaagggcctcgagctcgaccccgagggctccctccaccaccagcagaagcgcgaggccccctcccgctcctccgcctcctccggcccccagatcctcaagtgccccgaggccgagtgcttccgcctccgctgcgagctcggccccctccaccagcaggagtcccagtccctccagctccacttccgcgtctgggccaagaccttcctccagcgcgagcaccagcccttctccctccagtgcgaggccgtctacaaggccctcaagatgccctaccgcatcctcccccgccagctcccccagaaggagcgccaggtcgccaccgccgtccagtggaccaaggccgagggctcctacggcgtccccctctggatcatcatcctcgccatcctcttcggcctcctcctcctcggcctcctcatctacatcctctacaagctcggcttcttcaagcgctccctcccctacggcaccgccatggagaaggcccagctcaagccccccgccacctccgacgcctga

SEQ ID NO: 1752 - RNA, 2397 nt, synthetic construct
  misc_feature 1..2397: note = AAH20057 variant
  source 1..2397: mol_type = other RNA
atgaacctccagcccatcttctggatcggcctcatctcctccgtctgctgcgtcttcgcccagaccgacgagaaccgctgcctcaaggccaacgccaagtcctgcggcgagtgcatccaggccggccccaactgcggctggtgcaccaactccaccttcctccaggagggcatgcccacctccgcccgctgcgacgacctcgaggccctcaagaagaagggctgcccccccgacgacatcgagaacccccgcggctccaaggacatcaagaagaacaagaacgtcaccaaccgctccaagggcaccgccgagaagctcaagcccgaggacatcacccagatccagccccagcagctcgtcctccgcctccgctccggcgagccccagaccttcaccctcaagttcaagcgcgccgaggactaccccatcgacctctactacctcatggacctctcctactccatgaaggacgacctcgagaacgtcaagtccctcggcaccgacctcatgaacgagatgcgccgcatcacctccgacttccgcatcggcttcggctccttcgtcgagaagaccgtcatgccctacatctccaccacccccgccaagctccgcaacccctgcacctccgagcagaactgcacctcccccttctcctacaagaacgtcctctccctcaccaacaagggcgaggtcttcaacgagctcgtcggcaagcagcgcatctccggcaacctcgactcccccgagggcggcttcgacgccatcatgcaggtcgccgtctgcggctccctcatcggctggcgcaacgtcacccgcctcctcgtcttctccaccgacgccggcttccacttcgccggcgacggcaagctcggcggcatcgtcctccccaacgacggccagtgccacctcgagaacaacatgtacaccatgtcccactactacgactacccctccatcgcccacctcgtccagaagctctccgagaacaacatccagaccatcttcgccgtcaccgaggagttccagcccgtctacaaggagctcaagaacctcatccccaagtccgccgtcggcaccctctccgccaactcctccaacgtcatccagctcatcatcgacgcctacaactccctctcctccgaggtcatcctcgagaacggcaagctctccgagggcgtcaccatctcctacaagtcctactgcaagaacggcgtcaacggcaccggcgagaacggccgcaagtgctccaacatctccatcggcgacgaggtccagttcgagatctccatcacctccaacaagtgccccaagaaggactccgactccttcaagatccgccccctcggcttcaccgaggaggtcgaggtcatcctccagtacatctgcgagtgcgagtgccagtccgagggcatccccgagtcccccaagtgccacgagggcaacggcaccttcgagtgcggcgcctgccgctgcaacgagggccgcgtcggccgccactgcgagtgctccaccgacgaggtcaactccgaggacatggacgcctactgccgcaaggagaactcctccgagatctgctccaacaacggcgagtgcgtctgcggccagtgcgtctgccgcaagcgcgacaacaccaacgagatctactccggcaagttctgcgagtgcgacaacttcaactgcgaccgctccaacggcctcatctgcggcggcaacggcgtctgcaagtgccgcgtctgcgagtgcaaccccaactacaccggctccgcctgcgactgctccctcgacacctccacctgcgaggcctccaacggccagatctgcaacggccgcggcatctgcgagtgcggcgtctgcaagtgcaccgaccccaagttccagggccagacctgcgagatgtgccagacctgcctcggcgtctgcgccgagcacaaggagtgcgtccagtgccgcgccttcaacaagggcgagaagaaggacacctgcacccaggagtgctcctacttcaacatcaccaaggtcgagtcccgcgacaagctcccccagcccgtccagcccgaccccgtctcccactgcaaggagaaggacgtcgacgactgctggttctacttcacctactccgtcaacggcaacaacgaggtcatggtccacgtcgtcgagaaccccgagtgccccaccggccccgacatcatccccatcgtcgccggcgtcgtcgccggcatcgtcctcatcggcctcgccctcctcctcatctggaagctcctcatgatcatccacgaccgccgcgagttcgccaagttcgagaaggagaagatgaacgccaagtgggacaccggcgagaaccccatctacaagtccgccgtcaccaccgtcgtcaaccccaagtacgagggcaagtga

SEQ ID NO: 1753 - RNA, 2367 nt, synthetic construct
  misc_feature 1..2367: note = AAA36122 variant
  source 1..2367: mol_type = other RNA
atgggcatcgagctcctctgcctcttcttcctcttcctcggccgcaacgaccacgtccagggcggctgcgccctcggcggcgccgagacctgcgaggactgcctcctcatcggcccccagtgcgcctggtgcgcccaggagaacttcacccacccctccggcgtcggcgagcgctgcgacacccccgccaacctcctcgccaagggctgccagctcaacttcatcgagaaccccgtctcccaggtcgagatcctcaagaacaagcccctctccgtcggccgccagaagaactcctccgacatcgtccagatcgccccccagtccctcatcctcaagctccgccccggcggcgcccagaccctccaggtccacgtccgccagaccgaggactaccccgtcgacctctactacctcatggacctctccgcctccatggacgacgacctcaacaccatcaaggagctcggctcccgcctctccaaggagatgtccaagctcacctccaacttccgcctcggcttcggctccttcgtcgagaagcccgtctcccccttcgtcaagaccacccccgaggagatcgccaacccctgctcctccatcccctacttctgcctccccaccttcggcttcaagcacatcctccccctcaccaacgacgccgagcgcttcaacgagatcgtcaagaaccagaagatctccgccaacatcgacacccccgagggcggcttcgacgccatcatgcaggccgccgtctgcaaggagaagatcggctggcgcaacgactccctccacctcctcgtcttcgtctccgacgccgactcccacttcggcatggactccaagctcgccggcatcgtcatccccaacgacggcctctgccacctcgactccaagaacgagtactccatgtccaccgtcctcgagtaccccaccatcggccagctcatcgacaagctcgtccagaacaacgtcctcctcatcttcgccgtcacccaggagcaggtccacctctacgagaactacgccaagctcatccccggcgccaccgtcggcctcctccagaaggactccggcaacatcctccagctcatcatctccgcctacgaggagctccgctccgaggtcgagctcgaggtcctcggcgacaccgagggcctcaacctctccttcaccgccatctgcaacaacggcaccctcttccagcaccagaagaagtgctcccacatgaaggtcggcgacaccgcctccttctccgtcaccgtcaacatcccccactgcgagcgccgctcccgccacatcatcatcaagcccgtcggcctcggcgacgccctcgagctcctcgtctcccccgagtgcaactgcgactgccagaaggaggtcgaggtcaactcctccaagtgccaccacggcaacggctccttccagtgcggcgtctgcgcctgccaccccggccacatgggcccccgctgcgagtgcggcgaggacatgctctccaccgactcctgcaaggaggcccccgaccacccctcctgctccggccgcggcgactgctactgcggccagtgcatctgccacctctccccctacggcaacatctacggcccctactgccagtgcgacaacttctcctgcgtccgccacaagggcctcctctgcggcggcaacggcgactgcgactgcggcgagtgcgtctgccgctccggctggaccggcgagtactgcaactgcaccacctccaccgactcctgcgtctccgaggacggcgtcctctgctccggccgcggcgactgcgtctgcggcaagtgcgtctgcaccaaccccggcgcctccggccccacctgcgagcgctgccccacctgcggcgacccctgcaactccaagcgctcctgcatcgagtgccacctctccgccgccggccaggcccgcgaggagtgcgtcgacaagtgcaagctcgccggcgccaccatctccgaggaggaggacttctccaaggacggctccgtctcctgctccctccagggcgagaacgagtgcctcatcaccttcctcatcaccaccgacaacgagggcaagaccatcatccactccatcaacgagaaggactgccccaagccccccaacatccccatgatcatgctcggcgtctccctcgccatcctcctcatcggcgtcgtcctcctctgcatctggaagctcctcgtctccttccacgaccgcaaggaggtcgccaagttcgaggccgagcgctccaaggccaagtggcagaccggcaccaaccccctctaccgcggctccacctccaccttcaagaacgtcacctacaagcaccgcgagaagcagaaggtcgacctctccaccgactgctga

SEQ ID NO: 1754 - RNA, 786 nt, synthetic construct
  misc_feature 1..786: note = EAW71937 variant
  source 1..786: mol_type = other RNA
atgtgggacctcgtcctctccatcgccctctccgtcggctgcaccggcgccgtccccctcatccagtcccgcatcgtcggcggctgggagtgcgagaagcactcccagccctggcaggtcgccgtctactcccacggctgggcccactgcggcggcgtcctcgtccacccccagtgggtcctcaccgccgcccactgcctcaagaagaactcccaggtctggctcggccgccacaacctcttcgagcccgaggacaccggccagcgcgtccccgtctcccactccttcccccaccccctctacaacatgtccctcctcaagcaccagtccctccgccccgacgaggactcctcccacgacctcatgctcctccgcctctccgagcccgccaagatcaccgacgtcgtcaaggtcctcggcctccccacccaggagcccgccctcggcaccacctgctacgcctccggctggggctccatcgagcccgaggagttcctccgcccccgctccctccagtgcgtctccctccacctcctctccaacgacatgtgcgcccgcgcctactccgagaaggtcaccgagttcatgctctgcgccggcctctggaccggcggcaaggacacctgcggcggcgactccggcggccccctcgtctgcaacggcgtcctccagggcatcacctcctggggccccgagccctgcgccctccccgagaagcccgccgtctacaccaaggtcgtccactaccgcaagtggatcaaggacaccatcgccgccaacccctga

SEQ ID NO: 1755 - RNA, 672 nt, synthetic construct
  misc_feature 1..672: note = EAW71938 variant
  source 1..672: mol_type = other RNA
atgtgggacctcgtcctctccatcgccctctccgtcggctgcaccggcgccgtccccctcatccagtcccgcatcgtcggcggctgggagtgcgagaagcactcccagccctggcaggtcgccgtctactcccacggctgggcccactgcggcggcgtcctcgtccacccccagtgggtcctcaccgccgcccactgcctcaagaagaactcccaggtctggctcggccgccacaacctcttcgagcccgaggacaccggccagcgcgtccccgtctcccactccttcccccaccccctctacaacatgtccctcctcaagcaccagtccctccgccccgacgaggactcctcccacgacctcatgctcctccgcctctccgagcccgccaagatcaccgacgtcgtcaaggtcctcggcctccccacccaggagcccgccctcggcaccacctgctacgcctccggctggggctccatcgagcccgaggagttcctccgcccccgctccctccagtgcgtctccctccacctcctctccaacgacatgtgcgcccgcgcctactccgagaaggtcaccgagttcatgctctgcgccggcctctggaccggcggcaaggacacctgcggcgtctcccacccctactcccagcacctcgagggcaagggctga

SEQ ID NO: 1756 - RNA, 189 nt, synthetic construct
  misc_feature 1..189: note = BAF98781 variant
  source 1..189: mol_type = other RNA
atgtccctcctcaagcaccagtccctccgccccgacgaggactcctcccacgacctcatgctcctccgcctctccgagcccgccaagatcaccgacgtcgtcaaggtcctcggcctccccacccaggagcccgccctcggcaccacctgctacgcctccggctggggctccatcgagcccgaggagtga

SEQ ID NO: 1757 - RNA, 735 nt, synthetic construct
  misc_feature 1..735: note = BAG62239 variant
  source 1..735: mol_type = other RNA
atgggcaccctctggggctgccccggcgccccccccgtcggcgcccactcctgccccctccccaaggaggtctcccgcaccctcggctccggcgagggcatggccgtctcccaccgcaacaactccggcatgctcccccccggctccctcctccgcaactcccaggtctggctcggccgccacaacctcttcgagcccgaggacaccggccgccgcgtccccgtctcccactccttcccccaccccctctacaacatgtccctcctcaagcaccagtccctccgccccgacgaggactcctcccacgacctcatgctcctccgcctctccgagcccgccaagatcaccgacgtcgtcaaggtcctcggcctccccacccaggagcccgccctcggcaccacctgctacgcctccggctggggctccatcgagcccgaggagttcctccgcccccgctccctccagtgcgtctccctccacctcctctccaacgacatgtgcgcccgcgcctactccgagaaggtcaccgagttcatgctctgcgccggcctctggaccggcggcaaggacacctgcggcggcgactccggcggccccctcgtctgcaacggcgtcctccagggcatcacctcctggggccccgagccctgcgccctccccgagaagcccgccgtctacaccaaggtcgtccactaccgcaagtggatcaaggacaccatcgccgccaacccctga

SEQ ID NO: 1758 - RNA, 786 nt, synthetic construct; identical to SEQ ID NO: 1754
  misc_feature 1..786: note = AAA74454 variant
  source 1..786: mol_type = other RNA

SEQ ID NO: 1759 - RNA, 150 nt, synthetic construct
  misc_feature 1..150: note = AAR10469 variant
  source 1..150: mol_type = other RNA
atgtgggacctcgtcctctccatcgccctctccgtcggctgcaccggcatcgcccgctccggctgggtcggcaccacctgcctctccctcaagacccaggcccgcggctccctctccgccaccgcctcccacacccgctccaccatctga

SEQ ID NO: 1760 - RNA, 543 nt, synthetic construct
  misc_feature 1..543: note = AAR10468 variant
  source 1..543: mol_type = other RNA
atgtgggacctcgtcctctccatcgccctctccgtcggctgcaccggcgccgtccccctcatccagtcccgcatcgtcggcggctgggagtgcgagaagcactcccagccctggcaggtcgccgtctactcccacggctgggcccactgcggcggcgtcctcgtccacccccagtgggtcctcaccgccgcccactgcctcaagaagaactcccaggtctggctcggccgccacaacctcttcgagcccgaggacaccggccagcgcgtccccgtctcccactccttcccccaccccctctacaacatgtccctcctcaagcaccagtccctccgccccgacgaggactcctcccacgacctcatgctcctccgcctctccgagcccgccaagatcaccgacgtcgtcaaggtcctcggcctccccacccaggagcccgccctcggcaccacctgctacgcctccggctggggctccatcgagcccgaggagtgcacccccggccccgacggcgtcgccggctcccccgacgcctgggtctga

SEQ ID NO: 1761 - RNA, 765 nt, synthetic construct
  misc_feature 1..765: note = EAW71943 variant
  source 1..765: mol_type = other RNA
atggccaccgccggcaacccctggggctggttcctcggctacctcatcctcggcgtcgccggctccctcgtctccggctcctgctcccagatcatcaacggcgaggactgctccccccactcccagccctggcaggccgccctcgtcatggagaacgagctcttctgctccggcgtcctcgtccacccccagtgggtcctctccgccgcccactgcttccagaactcctacaccatcggcctcggcctccactccctcgaggccgaccaggagcccggctcccagatggtcgaggcctccctctccgtccgccaccccgagtacaaccgccccctcctcgccaacgacctcatgctcatcaagctcgacgagtccgtctccgagtccgacaccatccgctccatctccatcgcctcccagtgccccaccgccggcaactcctgcctcgtctccggctggggcctcctcgccaacggccgcatgcccaccgtcctccagtgcgtcaacgtctccgtcgtctccgaggaggtctgctccaagctctacgaccccctctaccacccctccatgttctgcgccggcggcggccaggaccagaaggactcctgcaacggcgactccggcggccccctcatctgcaacggctacctccagggcctcgtctccttcggcaaggccccctgcggccaggtcggcgtccccggcgtctacaccaacctctgcaagttcaccgagtggatcgagaagaccgtccaggcctcctga

SEQ ID NO: 1762 - RNA, 228 nt, synthetic construct
  misc_feature 1..228: note = AAX30051 variant
  source 1..228: mol_type = other RNA
atggccaccgccggcaacccctggggctggttcctcggctacctcatcctcggcgtcgccggctccctcgtctccggctcctgctcccagatcatcaacggcgaggactgctccccccactcccagccctggcaggccgccctcgtcatggagaacgagctcttctgctccggcgtcctcgtccacccccagtgggtcctctccgccgcccactgcttccagaagtga

SEQ ID NO: 1763 - RNA, 588 nt, synthetic construct
  misc_feature 1..588: note = AAL14782 variant
  source 1..588: mol_type = other RNA
atggccaccgccggcaacccctggggctggttcctcggctacctcatcctcggcgtcgccggctccctcgtctccggctcctgctcccagatcatcaacggcgaggactgctccccccactcccagccctggcaggccgccctcgtcatggagaacgagctcttctgctccggcgtcctcgtccacccccagtgggtcctctccgccgcccactgcttccagaactcctacaccatcggcctcggcctccactccctcgaggccgaccaggagcccggctcccagatggtcgaggcctccctctccgtccgccaccccgagtacaaccgccccctcctcgccaacgacctcatgctcatcaagctcgacgagtccgtctccgagtccgacaccatccgctccatctccatcgcctcccagtgccccaccgccggcaactcctgcctcgtctccggctggggcctcctcgccaacggcgagctcaccggcgtctgcctcccctcctcccgccgctcctccgcccagtcccgcggcctcacccagtcctccgcctcccaggccgagtgcctcccctgctgctccgcctga

SEQ ID NO: 1764 - RNA, 480 nt, synthetic construct
  misc_feature 1..480: note = AAL14781 variant
  source 1..480: mol_type = other RNA
atggccaccgccggcaacccctggggctggttcctcggctacctcatcctcggcgtcgccggctccctcgtctccggctcctgctcccagatcatcaacggcgaggactgctccccccactcccagccctggcaggccgccctcgtcatggagaacgagctcttctgctccggcgtcctcgtccacccccagtgggtcctctccgccgcccactgcttccagaactcctacaccatcggcctcggcctccactccctcgaggccgaccaggagcccggctcccagatggtcgaggcctccctctccgtccgccaccccgagtacaaccgccccctcctcgccaacgacctcatgctcatcaagctcgacgagtccgtctccgagtccgacaccatccgctccatctccatcgcctcccagtgccccaccgccggcaactcctgcctcgtctccggctggggcctcctcgccaacggctga

SEQ ID NO: 1765 - RNA, 765 nt, synthetic construct
  misc_feature 1..765: note = AAD21580 variant
  source 1..765: mol_type = other RNA
atggccaccgccggcaacccctggggctggttcctcggctacctcatcctcggcgtcgccggctccctcgtctccggctcctgctcccagatcatcaacggcgaggactgctccccccactcccagccctggcaggccgccctcgtcatggagaacgagctcttctgctccggcgtcctcgtccacccccagtgggtcctctccgccgcccactgcttccagaactcctacaccatcggcctcggcctccactccctcgaggccgaccaggagcccggctcccagatggtcgaggcctccctctccgtccgccaccccgagtacaaccgccccctcctcgccaacgacctcatgctcatcaagctcgacgagtccgtctccgagtccgacaccatccgctccatctccatcgcctcccagtgccccaccgccggcaactcctgcctcgtctccggctggggcctcctcgccaacggccgcatgcccaccgtcctccagtgcgtcaacgtctccgtcgtctccgaggaggtctgctccaagctctacgaccccctctaccacccctccatgttctgcgccggcggcggccacgaccagaaggactcctgcaacggcgactccggcggccccctcatctgcaacggctacctccagggcctcgtctccttcggcaaggccccctgcggccaggtcggcgtccccggcgtctacaccaacctctgcaagttcaccgagtggatcgagaagaccgtccaggcctcctga

SEQ ID NO: 1766 - RNA, 2673 nt, synthetic construct
  misc_feature 1..2673: note = AAC83230 variant
  source 1..2673: mol_type = other RNA
atgtcccagggcatcctctccccccccgccggcctcctctccgacgacgacgtcgtcgtctcccccatgttcgagtccaccgccgccgacctcggctccgtcgtccgcaagaacctcctctccgactgctccgtcgtctccacctccctcgaggacaagcagcaggtcccctccgaggactccatggagaaggtcaaggtctacctccgcgtccgccccctcctcccctccgagctcgagcgccaggaggaccagggctgcgtccgcatcgagaacgtcgagaccctcgtcctccaggcccccaaggactccttcgccctcaagtccaacgagcgcggcatcggccaggccacccaccgcttcaccttctcccagatcttcggccccgaggtcggccaggcctccttcttcaacctcaccgtcaaggagatggtcaaggacgtcctcaagggccagaactggctcatctacacctacggcgtcaccaactccggcaagacccacaccatccagggcaccatcaaggacggcggcatcctcccccgctccctcgccctcatcttcaactccctccagggccagctccaccccacccccgacctcaagcccctcctctccaacgaggtcatctggctcgactccaagcagatccgccaggaggagatgaagaagctctccctcctcaacggcggcctccaggaggaggagctctccacctccctcaagcgctccgtctacatcgagtcccgcatcggcacctccacctccttcgactccggcatcgccggcctctcctccatctcccagtgcacctcctcctcccagctcgacgagacctcccaccgctgggcccagcccgacaccgcccccctccccgtccccgccaacatccgcttctccatctggatctccttcttcgagatctacaacgagctcctctacgacctcctcgagcccccctcccagcagcgcaagcgccagaccctccgcctctgcgaggaccagaacggcaacccctacgtcaaggacctcaactggatccacgtccaggacgccgaggaggcctggaagctcctcaaggtcggccgcaagaaccagtccttcgcctccacccacctcaaccagaactcctcccgctcccactccatcttctccatccgcatcctccacctccagggcgagggcgacatcgtccccaagatctccgagctctccctctgcgacctcgccggctccgagcgctgcaaggaccagaagtccggcgagcgcctcaaggaggccggcaacatcaacacctccctccacaccctcggccgctgcatcgccgccctccgccagaaccagcagaaccgctccaagcagaacctcgtccccttccgcgactccaagctcacccgcgtcttccagggcttcttcaccggccgcggccgctcctgcatgatcgtcaacgtcaacccctgcgcctccacctacgacgagaccctccacgtcgccaagttctccgccatcgcctcccagctcgtccacgccccccccatgcagctcggcttcccctccctccactccttcatcaaggagcactccctccaggtctccccctccctcgagaagggcgccaaggccgacaccggcctcgacgacgacatcgagaacgaggccgacatctccatgtacggcaaggaggagctcctccaggtcgtcgaggccatgaagaccctcctcctcaaggagcgccaggagaagctccagctcgagatgcacctccgcgacgagatctgcaacgagatggtcgagcagatgcagcagcgcgagcagtggtgctccgagcacctcgacacccagaaggagctcctcgaggagatgtacgaggagaagctcaacatcctcaaggagtccctcacctccttctaccaggaggagatccaggagcgcgacgagaagatcgaggagctcgaggccctcctccaggaggcccgccagcagtccgtcgcccaccagcagtccggctccgagctcgccctccgccgctcccagcgcctcgccgcctccgcctccacccagcagctccaggaggtcaaggccaagctccagcagtgcaaggccgagctcaactccaccaccgaggagctccacaagtaccagaagatgctcgagccccccccctccgccaagcccttcaccatcgacgtcgacaagaagctcgaggagggccagaagaacatccgcctcctccgcaccgagctccagaagctcggcgagtccctccagtccgccgagcgcgcctgctgccactccaccggcgccggcaagctccgccaggccctcaccacctgcgacgacatcctcatcaagcaggaccagaccctcgccgagctccagaacaacatggtcctcgtcaagctcgacctccgcaagaaggccgcctgcatcgccgagcagtaccacaccgtcctcaagctccagggccaggtctccgccaagaagcgcctcggcaccaaccaggagaaccagcagcccaaccagcagccccccggcaagaagcccttcctccgcaacctcctcccccgcacccccacctgccagtcctccaccgactgctccccctacgcccgcatcctccgctcccgccgctcccccctcctcaagtccggccccttcggcaagaagtactga

SEQ ID NO: 1767 - RNA, 1113 nt, synthetic construct
  misc_feature 1..1113: note = AAH34621 variant
  source 1..1113: mol_type = other RNA
atggccatcaccctcgaggaggccccctggctcggctggctcctcgtcaaggccctcatgcgcttcgccttcatggtcgtcaacaacctcgtcgccatcccctcctacatctgctacgtcatcatcctccagcccctccgcgtcctcgactccaagcgcttctggtacatcgagggcatcatgtacaagtggctcctcggcatggtcgcctcctggggctggtacgccggctacaccgtcatggagtggggcgaggacatcaaggccgtctccaaggacgaggccgtcatgctcgtcaaccaccaggccaccggcgacgtctgcaccctcatgatgtgcctccaggacaagggcctcgtcgtcgcccagatgatgtggctcatggaccacatcttcaagtacaccaacttcggcatcgtctccctcgtccacggcgacttcttcatccgccagggccgctcctaccgcgaccagcagctcctcctcctcaagaagcacctcgagaacaactaccgctcccgcgaccgcaagtggatcgtcctcttccccgagggcggcttcctccgcaagcgccgcgagacctcccaggccttcgccaagaagaacaacctccccttcctcaccaacgtcaccctcccccgctccggcgccaccaagatcatcctcaacgccctcgtcgcccagcagaagaacggctcccccgccggcggcgacgccaaggagctcgactccaagtccaagggcctccagtggatcatcgacaccaccatcgcctaccccaaggccgagcccatcgacatccagacctggatcctcggctaccgcaagcccaccgtcacccacgtccactaccgcatcttccccatcaaggacgtccccctcgagaccgacgacctcaccacctggctctaccagcgcttcgtcgagaaggaggacctcctctcccacttctacgagaccggcgccttccccccctccaagggccacaaggaggccgtctcccgcgagatgaccctctccaacctctggatcttcctcatccagtccttcgccttcctctccggctacatgtggtacaacatcatccagtacttctaccactgcctcttctga

SEQ ID NO: 1768 - RNA, 2178 nt, synthetic construct
  misc_feature 1..2178: note = AAH14924 variant
  source 1..2178: mol_type = other RNA
atggccatggactcctccctccaggcccgcctcttccccggcctcgccatcaagatccagcgctccaacggcctcatccactccgccaacgtccgcaccgtcaacctcgagaagtcctgcgtctccgtcgagtgggccgagggcggcgccaccaagggcaaggagatcgacttcgacgacgtcgccgccatcaaccccgagctcctccagctcctccccctccaccccaaggacaacctccccctccaggagaacgtcaccatccagaagcagaagcgccgctccgtcaactccaagatccccgcccccaaggagtccctccgctcccgctccacccgcatgtccaccgtctccgagctccgcatcaccgcccaggagaacgacatggaggtcgagctccccgccgccgccaactcccgcaagcagttctccgtcccccccgcccccacccgcccctcctgccccgccgtcgccgagatccccctccgcatggtctccgaggagatggaggagcaggtccactccatccgcggctcctcctccgccaaccccgtcaactccgtccgccgcaagtcctgcctcgtcaaggaggtcgagaagatgaagaacaagcgcgaggagaagaaggcccagaactccgagatgcgcatgaagcgcgcccaggagtacgactcctccttccccaactgggagttcgcccgcatgatcaaggagttccgcgccaccctcgagtgccaccccctcaccatgaccgaccccatcgaggagcaccgcatctgcgtctgcgtccgcaagcgccccctcaacaagcaggagctcgccaagaaggagatcgacgtcatctccatcccctccaagtgcctcctcctcgtccacgagcccaagctcaaggtcgacctcaccaagtacctcgagaaccaggccttctgcttcgacttcgccttcgacgagaccgcctccaacgaggtcgtctaccgcttcaccgcccgccccctcgtccagaccatcttcgagggcggcaaggccacctgcttcgcctacggccagaccggctccggcaagacccacaccatgggcggcgacctctccggcaaggcccagaacgcctccaagggcatctacgccatggcctcccgcgacgtcttcctcctcaagaaccagccctgctaccgcaagctcggcctcgaggtctacgtcaccttcttcgagatctacaacggcaagctcttcgacctcctcaacaagaaggccaagctccgcgtcctcgaggacggcaagcagcaggtccaggtcgtcggcctccaggagcacctcgtcaactccgccgacgacgtcatcaagatgatcgacatgggctccgcctgccgcacctccggccagaccttcgccaactccaactcctcccgctcccacgcctgcttccagatcatcctccgcgccaagggccgcatgcacggcaagttctccctcgtcgacctcgccggcaacgagcgcggcgccgacacctcctccgccgaccgccagacccgcatggagggcgccgagatcaacaagtccctcctcgccctcaaggagtgcatccgcgccctcggccagaacaaggcccacacccccttccgcgagtccaagctcacccaggtcctccgcgactccttcatcggcgagaactcccgcacctgcatgatcgccaccatctcccccggcatctcctcctgcgagtacaccctcaacaccctccgctacgccgaccgcgtcaaggagctctccccccactccggcccctccggcgagcagctcatccagatggagaccgaggagatggaggcctgctccaacggcgccctcatccccggcaacctctccaaggaggaggaggagctctcctcccagatgtcctccttcaacgaggccatgacccagatccgcgagctcgaggagaaggccatggaggagctcaaggagatcatccagcagggccccgactggctcgagctctccgagatgaccgagcagcccgactacgacctcgagaccttcgtcaacaaggccgagtccgccctcgcccagcaggccaagcacttctccgccctccgcgacgtcatcaaggccctccgcctcgccatgcagctcgaggagcaggcctcccgccagatctcctccaagaagcgcccccagtga

SEQ ID NO: 1769 - RNA, 342 nt, synthetic construct
  misc_feature 1..342: note = AAH62223 variant
  source 1..342: mol_type = other RNA
atgaacttctacctcctcctcgcctcctccatcctctgcgccctcatcgtcttctggaagtaccgccgcttccagcgcaacaccggcgagatgtcctccaactccaccgccctcgccctcgtccgcccctcctcctccggcctcatcaactccaacaccgacaacaacctcgccgtctacgacctctcccgcgacatcctcaacaacttcccccactccatcgcccgccagaagcgcatcctcgtcaacctctccatggtcgagaacaagctcgtcgagctcgagcacaccctcctctccaagggcttccgcggcgcctccccccaccgcaagtccacctga

SEQ ID NO: 1770 - RNA, 2583 nt, synthetic construct
  misc_feature 1..2583: note = AAA56833 variant
  source 1..2583: mol_type = other RNA
atgggcccctggggctggaagctccgctggaccgtcgccctcctcctcgccgccgccggcaccgccgtcggcgaccgctgcgagcgcaacgagttccagtgccaggacggcaagtgcatctcctacaagtgggtctgcgacggctccgccgagtgccaggacggctccgacgagtcccaggagacctgcctctccgtcacctgcaagtccggcgacttctcctgcggcggccgcgtcaaccgctgcatcccccagttctggcgctgcgacggccaggtcgactgcgacaacggctccgacgagcagggctgcccccccaagacctgctcccaggacgagttccgctgccacgacggcaagtgcatctcccgccagttcgtctgcgactccgaccgcgactgcctcgacggctccgacgaggcctcctgccccgtcctcacctgcggccccgcctccttccagtgcaactcctccacctgcatcccccagctctgggcctgcgacaacgaccccgactgcgaggacggctccgacgagtggccccagcgctgccgcggcctctacgtcttccagggcgactcctccccctgctccgccttcgagttccactgcctctccggcgagtgcatccactcctcctggcgctgcgacggcggccccgactgcaaggacaagtccgacgaggagaactgcgccgtcgccacctgccgccccgacgagttccagtgctccgacggcaactgcatccacggctcccgccagtgcgaccgcgagtacgactgcaaggacatgtccgacgaggtcggctgcgtcaacgtcaccctctgcgagggccccaacaagttcaagtgccactccggcgagtgcatcaccctcgacaaggtctgcaacatggcccgcgactgccgcgactggtccgacgagcccatcaaggagtgcggcaccaacgagtgcctcgacaacaacggcggctgctcccacgtctgcaacgacctcaagatcggctacgagtgcctctgccccgacggcttccagctcgtcgcccagcgccgctgcgaggacatcgacgagtgccaggaccccgacacctgctcccagctctgcgtcaacctcgagggcggctacaagtgccagtgcgaggagggcttccagctcgacccccacaccaaggcctgcaaggccgtcggctccatcgcctacctcttcttcaccaaccgccacgaggtccgcaagatgaccctcgaccgctccgagtacacctccctcatccccaacctccgcaacgtcgtcgccctcgacaccgaggtcgcctccaaccgcatctactggtccgacctctcccagcgcatgatctgctccacccagctcgaccgcgcccacggcgtctcctcctacgacaccgtcatctcccgcgacatccaggcccccgacggcctcgccgtcgactggatccactccaacatctactggaccgactccgtcctcggcaccgtctccgtcgccgacaccaagggcgtcaagcgcaagaccctcttccgcgagaacggctccaagccccgcgccatcgtcgtcgaccccgtccacggcttcatgtactggaccgactggggcacccccgccaagatcaagaagggcggcctcaacggcgtcgacatctactccctcgtcaccgagaacatccagtggcccaacggcatcaccctcgacctcctctccggccgcctctactgggtcgactccaagctccactccatctcctccatcgacgtcaacggcggcaaccgcaagaccatcctcgaggacgagaagcgcctcgcccaccccttctccctcgccgtcttcgaggacaaggtcttctggaccgacatcatcaacgaggccatcttctccgccaaccgcctcaccggctccgacgtcaacctcctcgccgagaacctcctctcccccgaggacatggtcctcttccacaacctcacccagccccgcggcgtcaactggtgcgagcgcaccaccctctccaacggcggctgccagtacctctgcctccccgccccccagatcaacccccactcccccaagttcacctgcgcctgccccgacggcatgctcctcgcccgcgacatgcgctcctgcctcaccgaggccgaggccgccgtcgccacccaggagacctccaccgtccgcctcaaggtctcctccaccgccgtccgcacccagcacaccaccacccgccccgtccccgacacctcccgcctccccggcgccacccccggcctcaccaccgtcgagatcgtcaccatgtcccaccaggccctcggcgacgtcgccggccgcggcaacgagaagaagccctcctccgtccgcgccctctccatcgtcctccccatcgtcctcctcgtcttcctctgcctcggcgtcttcctcctctggaagaactggcgcctcaagaacatcaactccatcaacttcgacaaccccgtctaccagaagaccaccgaggacgaggtccacatctgccacaaccaggacggctactcctacccctcccgccagatggtctccctcgaggacgacgtcgcctga

SEQ ID NO: 1771 - RNA, 1302 nt, synthetic construct
  misc_feature 1..1302: note = CAA70989 variant
  source 1..1302: mol_type = other RNA
atggtctggaaggtcgccgtcttcctctccgtcgccctcggcatcggcgccgtccccatcgacgaccccgaggacggcggcaagcactgggtcgtcatcgtcgccggctccaacggctggtacaactaccgccaccaggccgacgcctgccacgcctaccagatcatccaccgcaacggcatccccgacgagcagatcgtcgtcatgatgtacgacgacatcgcctactccgaggacaaccccacccccggcatcgtcatcaaccgccccaacggcaccgacgtctaccagggcgtccccaaggactacaccggcgaggacgtcaccccccagaacttcctcgccgtcctccgcggcgacgccgaggccgtcaagggcatcggctccggcaaggtcctcaagtccggcccccaggaccacgtcttcatctacttcaccgaccacggctccaccggcatcctcgtcttccccaacgaggacctccacgtcaaggacctcaacgagaccatccactacatgtacaagcacaagatgtaccgcaagatggtcttctacatcgaggcctgcgagtccggctccatgatgaaccacctccccgacaacatcaacgtctacgccaccaccgccgccaacccccgcgagtcctcctacgcctgctactacgacgagaagcgctccacctacctcggcgactggtactccgtcaactggatggaggactccgacgtcgaggacctcaccaaggagaccctccacaagcagtaccacctcgtcaagtcccacaccaacacctcccacgtcatgcagtacggcaacaagaccatctccaccatgaaggtcatgcagttccagggcatgaagcgcaaggcctcctcccccgtccccctcccccccgtcacccacctcgacctcaccccctcccccgacgtccccctcaccatcatgaagcgcaagctcatgaacaccaacgacctcgaggagtcccgccagctcaccgaggagatccagcgccacctcgacgcccgccacctcatcgagaagtccgtccgcaagatcgtctccctcctcgccgcctccgaggccgaggtcgagcagctcctctccgagcgcgcccccctcaccggccactcctgctaccccgaggccctcctccacttccgcacccactgcttcaactggcactcccccacctacgagtacgccctccgccacctctacgtcctcgtcaacctctgcgagaagccctaccccctccaccgcatcaagctctccatggaccacgtctgcctcggccactactga

SEQ ID NO: 1772 - RNA, 1797 nt, synthetic construct
  misc_feature 1..1797: note = AAL36991 variant
  source 1..1797: mol_type = other RNA
atgacccccatcgtcaccgtcctcatctgcctcggcctctccctcggcccccgcacccacgtccagaccggcaccatccccaagcccaccctctgggccgagcccgactccgtcatcacccagggctcccccgtcaccctctcctgccagggctccctcgaggcccaggagtaccgcctctaccgcgagaagaagtccgcctcctggatcacccgcatccgccccgagctcgtcaagaacggccagttccacatcccctccatcacctgggagcacaccggccgctacggctgccagtactactcccgcgcccgctggtccgagctctccgaccccctcgtcctcgtcatgaccggcgcctaccccaagcccaccctctccgcccagccctcccccgtcgtcacctccggcggccgcgtcaccctccagtgcgagtcccaggtcgccttcggcggcttcatcctctgcaaggagggcgaggaggagcacccccagtgcctcaactcccagccccacgcccgcggctcctcccgcgccatcttctccgtcggccccgtctcccccaaccgccgctggtcccaccgctgctacggctacgacctcaactccccctacgtctggtcctccccctccgacctcctcgagctcctcgtccccggcgtctccaagaagccctccctctccgtccagcccggccccgtcgtcgcccccggcgagtccctcaccctccagtgcgtctccgacgtcggctacgaccgcttcgtcctctacaaggagggcgagcgcgacctccgccagctccccggccgccagccccaggccggcctctcccaggccaacttcaccctcggccccgtctcccgctcctacggcggccagtaccgctgctacggcgcccacaacctctcctccgagtgctccgccccctccgaccccctcgacatcctcatcaccggccagatccgcggcacccccttcatctccgtccagcccggccccaccgtcgcctccggcgagaacgtcaccctcctctgccagtcctggcgccagttccacaccttcctcctcaccaaggccggcgccgccgacgcccccctccgcctccgctccatccacgagtaccccaagtaccaggccgagttccccatgtcccccgtcacctccgcccacgccggcacctaccgctgctacggctccctcaactccgacccctacctcctctcccacccctccgagcccctcgagctcgtcgtctccggcccctccatgggctcctcccccccccccaccggccccatctccacccccgccggccccgaggaccagcccctcacccccaccggctccgacccccagtccggcctcggccgccacctcggcgtcgtcatcggcatcctcgtcgccgtcgtcctcctcctcctcctcctcctcctcctcttcctcatcctccgccaccgccgccagggcaagcactggacctccacccagcgcaaggccgacttccagcaccccgccggcgccgtcggccccgagcccaccgaccgcggcctccagtggcgctcctcccccgccgccgacgcccaggaggagaacctctacgccgccgtcaaggacacccagcccgaggacggcgtcgagatggacacccgcgccgccgcctccgaggccccccaggacgtcacctacgcccagctccactccctcaccctccgccgcaaggccaccgagccccccccctcccaggagcgcgagccccccgccgagccctccatctacgccaccctcgccatccactga

SEQ ID NO: 1773 - RNA, 498 nt, synthetic construct
  misc_feature 1..498: note = CCDS6385.2 variant
  source 1..498: mol_type = other RNA
atggccctcctcgccctcctcctcgtcgtcgccctcccccgcgtctggaccgacgccaacctcaccgcccgccagcgcgaccccgaggactcccagcgcaccgacgagggcgacaaccgcgtctggtgccacgtctgcgagcgcgagaacaccttcgagtgccagaacccccgccgctgcaagtggaccgagccctactgcgtcatcgccgccgtcaagatcttcccccgcttcttcatggtcgccaagcagtgctccgccggctgcgccgccatggagcgccccaagcccgaggagaagcgcttcctcctcgaggagcccatgcccttcttctacctcaagtgctgcaagatccgctactgcaacctcgagggcccccccatcaactcctccgtcttcaaggagtacgccggctccatgggcgagtcctgcggcggcctctggctcgccatcctcctcctcctcgcctccatcgccgccggcctctccctctcctga

SEQ ID NO: 1774 - RNA, 375 nt, synthetic construct
  misc_feature 1..375: note = AAA68873 variant
  source 1..375: mol_type = other RNA
atgtccctcgagcagaagtcccagcactgcaagcccgaggagggcctcgacacccaggaggaggccctcggcctcgtcggcgtccaggccgccaccaccgaggagcaggaggccgtctcctcctcctcccccctcgtccccggcaccctcggcgaggtccccgccgccggctcccccggccccctcaagtccccccagggcgcctccgccatccccaccgccatcgacttcaccctctggcgccagtccatcaagggctcctccaaccaggaggaggagggcccctccacctcccccgaccccgagtccgtcttccgcgccgccctctccaagaaggtcgccgacctcatccacttcctcctcctcaagtactga

SEQ ID NO: 1775 - RNA, 957 nt, synthetic construct
  misc_feature 1..957: note = AAH02455 variant
  source 1..957: mol_type = other RNA
atgctcctcggccagaagtcccagcgctacaaggccgaggagggcctccaggcccagggcgaggcccccggcctcatggacgtccagatccccaccgccgaggagcagaaggccgcctcctcctcctccaccctcatcatgggcaccctcgaggaggtcaccgactccggctccccctcccccccccagtcccccgagggcgcctcctcctccctcaccgtcaccgactccaccctctggtcccagtccgacgagggctcctcctccaacgaggaggagggcccctccacctcccccgaccccgcccacctcgagtccctcttccgcgaggccctcgacgagaaggtcgccgagctcgtccgcttcctcctccgcaagtaccagatcaaggagcccgtcaccaaggccgagatgctcgagtccgtcatcaagaactacaagaaccacttccccgacatcttctccaaggcctccgagtgcatgcaggtcatcttcggcatcgacgtcaaggaggtcgaccccgccggccactcctacatcctcgtcacctgcctcggcctctcctacgacggcctcctcggcgacgaccagtccacccccaagaccggcctcctcatcatcgtcctcggcatgatcctcatggagggctcccgcgcccccgaggaggccatctgggaggccctctccgtcatgggcctctacgacggccgcgagcactccgtctactggaagctccgcaagctcctcacccaggagtgggtccaggagaactacctcgagtaccgccaggcccccggctccgaccccgtccgctacgagttcctctggggcccccgcgccctcgccgagacctcctacgtcaaggtcctcgagcacgtcgtccgcgtcaacgcccgcgtccgcatctcctacccctccctccacgaggaggccctcggcgaggagaagggcgtctga

SEQ ID NO: 1776 - RNA, 1290 nt, synthetic construct
  misc_feature 1..1290: note = AAH04479 variant
  source 1..1290: mol_type = other RNA
atggagacccagttccgccgcggcggcctcggctgctcccccgcctccatcaagcgcaagaagaagcgcgaggactccggcgacttcggcctccaggtctccaccatgttctccgaggacgacttccagtccaccgagcgcgccccctacggcccccagctccagtggtcccaggacctcccccgcgtccaggtcttccgcgagcaggccaacctcgaggaccgctccccccgccgcacccagcgcatcaccggcggcgagcaggtcctctggggccccatcacccagatcttccccaccgtccgccccgccgacctcacccgcgtcatcatgcccctcgagcagcgctcccagcactgcaagcccgaggagggcctccaggcccaggaggaggacctcggcctcgtcggcgcccaggccctccaggccgaggagcaggaggccgccttcttctcctccaccctcaacgtcggcaccctcgaggagctccccgccgccgagtccccctcccccccccagtccccccaggaggagtccttctcccccaccgccatggacgccatcttcggctccctctccgacgagggctccggctcccaggagaaggagggcccctccacctcccccgacctcatcgaccccgagtccttctcccaggacatcctccacgacaagatcatcgacctcgtccacctcctcctccgcaagtaccgcgtcaagggcctcatcaccaaggccgagatgctcggctccgtcatcaagaactacgaggactacttccccgagatcttccgcgaggcctccgtctgcatgcagctcctcttcggcatcgacgtcaaggaggtcgaccccacctcccactcctacgtcctcgtcacctccctcaacctctcctacgacggcatccagtgcaacgagcagtccatgcccaagtccggcctcctcatcatcgtcctcggcgtcatcttcatggagggcaactgcatccccgaggaggtcatgtgggaggtcctctccatcatgggcgtctacgccggccgcgagcacttcctcttcggcgagcccaagcgcctcctcacccagaactgggtccaggagaagtacctcgtctaccgccaggtccccggcaccgaccccgcctgctacgagttcctctggggcccccgcgcccacgccgagacctccaagatgaaggtcctcgagtacatcgccaacgccaacggccgcgaccccacctcctacccctccctctacgaggacgccctccgcgaggagggcgagggcgtctga

SEQ ID NO: 1777 - RNA, 1110 nt, synthetic construct
  misc_feature 1..1110: note = EAW99421 variant
  source 1..1110: mol_type = other RNA
atgccccgcgcccccaagcgccagcgctgcatgcccgaggaggacctccagtcccagtccgagacccagggcctcgagggcgcccaggcccccctcgccgtcgaggaggacgcctcctcctccacctccacctcctcctccttcccctcctccttcccctcctcctcctcctcctcctcctcctcctgctaccccctcatcccctccacccccgaggaggtctccgccgacgacgagacccccaaccccccccagtccgcccagatcgcctgctcctccccctccgtcgtcgcctccctccccctcgaccagtccgacgagggctcctcctcccagaaggaggagtccccctccaccctccaggtcctccccgactccgagtccctcccccgctccgagatcgacgagaaggtcaccgacctcgtccagttcctcctcttcaagtaccagatgaaggagcccatcaccaaggccgagatcctcgagtccgtcatcaagaactacgaggaccacttccccctcctcttctccgaggcctccgagtgcatgctcctcgtcttcggcatcgacgtcaaggaggtcgaccccaccggccactccttcgtcctcgtcacctccctcggcctcacctacgacggcatgctctccgacgtccagtccatgcccaagaccggcatcctcatcctcatcctctccatcatcttcatcgagggctactgcacccccgaggaggtcatctgggaggccctcaacatgatgggcctctacgacggcatggagcacctcatctacggcgagccccgcaagctcctcacccaggactgggtccaggagaactacctcgagtaccgccaggtccccggctccgaccccgcccgctacgagttcctctggggcccccgcgcccacgccgagatccgcaagatgtccctcctcaagttcctcgccaaggtcaacggctccgacccccgctccttccccctctggtacgaggaggccctcaaggacgaggaggagcgcgcccaggaccgcatcgccaccaccgacgacaccaccgccatggcctccgcctcctcctccgccaccggctccttctcctaccccgagtga

SEQ ID NO: 1778 - RNA, 945 nt, synthetic construct
  misc_feature 1..945: note = AAH03408 variant
  source 1..945: mol_type = other RNA
atgcccctcgagcagcgctcccagcactgcaagcccgaggagggcctcgaggcccagggcgaggccctcggcctcgtcggcgcccaggcccccgccaccgaggagcaggagaccgcctcctcctcctccaccctcgtcgaggtcaccctccgcgaggtccccgccgccgagtccccctcccccccccactccccccagggcgcctccaccctccccaccaccatcaactacaccctctggtcccagtccgacgagggctcctccaacgaggagcaggagggcccctccaccttccccgacctcgagacctccttccaggtcgccctctcccgcaagatggccgagctcgtccacttcctcctcctcaagtaccgcgcccgcgagcccttcaccaaggccgagatgctcggctccgtcatccgcaacttccaggacttcttccccgtcatcttctccaaggcctccgagtacctccagctcgtcttcggcatcgaggtcgtcgaggtcgtccgcatcggccacctctacatcctcgtcacctgcctcggcctctcctacgacggcctcctcggcgacaaccagatcgtccccaagaccggcctcctcatcatcgtcctcgccatcatcgccaaggagggcgactgcgcccccgaggagaagatctgggaggagctctccgtcctcgaggcctccgacggccgcgaggactccgtcttcgcccacccccgcaagctcctcacccaggacctcgtccaggagaactacctcgagtaccgccaggtccccggctccgaccccgcctgctacgagttcctctggggcccccgcgccctcgtcgagacctcctacgtcaaggtcctccaccacctcctcaagatctccggcggcccccacatctcctacccccccctccacgagtgggccttccgcgagggcgaggagtga

SEQ ID NO: 1779 - RNA, 930 nt, synthetic construct
  misc_feature 1..930: note = AAA03229 variant
  source 1..930: mol_type = other RNA
atgtccctcgagcagcgctccctccactgcaagcccgaggaggccctcgaggcccagcaggaggccctcggcctcgtctgcgtccaggccgccacctcctcctcctcccccctcgtcctcggcaccctcgaggaggtccccaccgccggctccaccgaccccccccagtccccccagggcgcctccgccttccccaccaccatcaacttcacccgccagcgccagccctccgagggctcctcctcccgcgaggaggagggcccctccacctcctgcatcctcgagtccctcttccgcgccgtcatcaccaagaaggtcgccgacctcgtcggcttcctcctcctcaagtaccgcgcccgcgagcccgtcaccaaggccgagatgctcgagtccgtcatcaagaactacaagcactgcttccccgagatcttcggcaaggcctccgagtccctccagctcgtcttcggcatcgacgtcaaggaggccgaccccaccggccactcctacgtcctcgtcacctgcctcggcctctcctacgacggcctcctcggcgacaaccagatcatgcccaagaccggcttcctcatcatcgtcctcgtcatgatcgccatggagggcggccacgcccccgaggaggagatctgggaggagctctccgtcatggaggtctacgacggccgcgagcactccgcctacggcgagccccgcaagctcctcacccaggacctcgtccaggagaagtacctcgagtaccgccaggtccccgactccgaccccgcccgctacgagttcctctggggcccccgcgccctcgccgagacctcctacgtcaaggtcctcgagtacgtcatcaaggtctccgcccgcgtccgcttcttcttcccctccctccgcgaggccgccctccgcgaggaggaggagggcgtctga

SEQ ID NO: 1780 - RNA, 945 nt, synthetic construct
  misc_feature 1..945: note = AAA17729 variant
  source 1..945: mol_type = other RNA
atgcccctcgagcagcgctcccagcactgcaagcccgaggagggcctcgaggcccgcggcgaggccctcggcctcgtcggcgcccaggcccccgccaccgaggagcagcagaccgcctcctcctcctccaccctcgtcgaggtcaccctcggcgaggtccccgccgccgactccccctcccccccccactccccccagggcgcctcctccttctccaccaccatcaactacaccctctggcgccagtccgacgagggctcctccaaccaggaggaggagggcccccgcatgttccccgacctcgagtccgagttccaggccgccatctcccgcaagatggtcgagctcgtccacttcctcctcctcaagtaccgcgcccgcgagcccgtcaccaaggccgagatgctcgagtccgtcctccgcaactgccaggacttcttccccgtcatcttctccaaggcctccgagtacctccagctcgtcttcggcatcgaggtcgtcgaggtcgtccccatctcccacctctacatcctcgtcacctgcctcggcctctcctacgacggcctcctcggcgacaaccaggtcatgcccaagaccggcctcctcatcatcgtcctcgccatcatcgccatcgagggcgactgcgcccccgaggagaagatctgggaggagctctccatgctcgaggtcttcgagggccgcgaggactccgtcttcgcccacccccgcaagctcctcatgcaggacctcgtccaggagaactacctcgagtaccgccaggtccccggctccgaccccgcctgctacgagttcctctggggcccccgcgccctcatcgagacctcctacgtcaaggtcctccaccacaccctcaagatcggcggcgagccccacatctcctacccccccctccacgagcgcgccctccgcgagggcgaggagtga

SEQ ID NO: 1781 - RNA, 945 nt, synthetic construct
  misc_feature 1..945: note = AAA17446 variant
  source 1..945: mol_type = other RNA
atgcccctcgagcagcgctcccagcactgcaagcccgaggagggcctcgaggcccgcggcgaggccctcggcctcgtcggcgcccaggcccccgccaccgaggagcaggaggccgcctcctcctcctccaccctcgtcgaggtcaccctcggcgaggtccccgccgccgagtcccccgaccccccccagtccccccagggcgcctcctccctccccaccaccatgaactaccccctctggtcccagtcctacgaggactcctccaaccaggaggaggagggcccctccaccttccccgacctcgagtccgagttccaggccgccctctcccgcaaggtcgccgagctcgtccacttcctcctcctcaagtaccgcgcccgcgagcccgtcaccaaggccgagatgctcggctccgtcgtcggcaactggcagtacttcttccccgtcatcttctccaaggcctcctcctccctccagctcgtcttcggcatcgagctcatggaggtcgaccccatcggccacctctacatcttcgccacctgcctcggcctctcctacgacggcctcctcggcgacaaccagatcatgcccaaggccggcctcctcatcatcgtcctcgccatcatcgcccgcgagggcgactgcgcccccgaggagaagatctgggaggagctctccgtcctcgaggtcttcgagggccgcgaggactccatcctcggcgaccccaagaagctcctcacccagcacttcgtccaggagaactacctcgagtaccgccaggtccccggctccgaccccgcctgctacgagttcctctggggcccccgcgccctcgtcgagacctcctacgtcaaggtcctccaccacatggtcaagatctccggcggcccccacatctcctacccccccctccacgagtgggtcctccgcgagggcgaggagtga

SEQ ID NO: 1782 - RNA, 954 nt, synthetic construct
  misc_feature 1..954: note = EAW99410 variant
  source 1..954: mol_type = other RNA
atgtcctccgagcagaagtcccagcactgcaagcccgaggagggcgtcgaggcccaggaggaggccctcggcctcgtcggcgcccaggcccccaccaccgaggagcaggaggccgccgtctcctcctcctcccccctcgtccccggcaccctcgaggaggtccccgccgccgagtccgccggccccccccagtccccccagggcgcctccgccctccccaccaccatctccttcacctgctggcgccagcccaacgagggctcctcctcccaggaggaggagggcccctccacctcccccgacgccgagtccctcttccgcgaggccctctccaacaaggtcgacgagctcgcccacttcctcctccgcaagtaccgcgccaaggagctcgtcaccaaggccgagatgctcgagcgcgtcatcaagaactacaagcgctgcttccccgtcatcttcggcaaggcctccgagtccctcaagatgatcttcggcatcgacgtcaaggaggtcgaccccgcctccaacacctacaccctcgtcacctgcctcggcctctcctacgacggcctcctcggcaacaaccagatcttccccaagaccggcctcctcatcatcgtcctcggcaccatcgccatggagggcgactccgcctccgaggaggagatctgggaggagctcggcgtcatgggcgtctacgacggccgcgagcacaccgtctacggcgagccccgcaagctcctcacccaggactgggtccaggagaactacctcgagtaccgccaggtccccggctccaaccccgcccgctacgagttcctctggggcccccgcgccctcgccgagacctcctacgtcaaggtcctcgagcacgtcgtccgcgtcaacgcccgcgtccgcatcgcctacccctccctccgcgaggccgccctcctcgaggaggaggagggcgtctga

SEQ ID NO: 1783 - RNA, 954 nt, synthetic construct; identical to SEQ ID NO: 1782
  misc_feature 1..954: note = AAA68871 variant
  source 1..954: mol_type = other RNA

SEQ ID NO: 1784 - RNA, 954 nt, synthetic construct
  misc_feature 1..954: note = AAY27261 variant
  source 1..954: mol_type = other RNA
atgtcctccgagcagaagtcccagcactgcaagcccgaggagggcgtcgaggcccaggaggaggccctcggcctcgtcggcgcccaggcccccaccaccgaggagcaggaggccgccgtctcctcctcctcccccctcgtccccggcaccctcgaggaggtccccgccgccgagtccgccggccccccccagtccccccagggcgcctccgccctccccaccaccatctccttcacctgctggcgccagcccaacgagggctcctcctcccaggaggaggagggcccctccacctcccccgacgccgagtccctcttccgcgaggccctctccaacaaggtcgacgagctcgcccacttcctcctccgcaagtaccgcgccaaggagctcgtcaccaaggccgagatgctcgagcgcgtcatcaagaactacaagcgctgcttccccgtcatcttcggcaaggcctccgagtccctcaagatgatcttcggcatcgacgtcaaggaggtcgaccccacctccaacacctacaccctcgtcacctgcctcggcctctcctacgacggcctcctcggcaacaaccagatcttccccaagaccggcctcctcatcatcgtcctcggcaccatcgccatggagggcgactccgcctccgaggaggagatctgggaggagctcggcgtcatgggcgtctacgacggccgcgagcacaccgtctacggcgagccccgcaagctcctcacccaggactgggtccaggagaactacctcgagtaccgccaggtccccggctccaaccccgcccgctacgagttcctctggggcccccgcgccctcgccgagacctcctacgtcaaggtcctcgagcacgtcgtccgcgtcaacgcccgcgtccgcatcgcctacccctccctccgcgaggccgccctcctcgaggaggaggagggcgtctga

SEQ ID NO: 1785 - RNA, 945 nt, synthetic construct
  misc_feature 1..945: note = BAF82126 variant
  source 1..945: mol_type = other RNA
atgcccctcgagcagcgctcccagcactgcaagcccgaggagggcctcgaggcccgcggcgaggccctcggcctcgtcggcgcccaggcccccgccaccgaggagcaggaggccgcctcctcctcctccaccctcgtcgaggtcaccctcggcgaggtccccgccgccgagtcccccgaccccccccagtccccccagggcgcctcctccctccccaccaccatgaactaccccctctggtcccagtcctacgaggactcctccaaccaggaggaggagggcccctccaccttccccgacctcgagtccgagttccaggccgccctctcccgcaagctcgccaagctcgtccacttcctcctcctcaagtaccgcgcccgcgagcccgtcaccaaggccgagatgctcggctccgtcgtcggcaactggcagtacttcttccccgtcatcttctccaaggcctccgactccctccagctcgtcttcggcatcgagctcatggaggtcgaccccatcggccacgtctacatcttcgccacctgcctcggcctctcctacgacggcctcctcggcgacaaccagatcatgcccaagaccggcttcctcatcatcatcctcgccatcatcgccaaggagggcgactgcgcccccgaggagaagatctgggaggagctctccgtcctcgaggtcttcgagggccgcgaggacatcatcttcggcgaccccaagaagctcctcacccagtacttcgtccaggagaactacctcgagtaccgccaggtccccggctccgaccccgcctgctacgagttcctctggggcccccgcgccctcatcgagacctcctacgtcaaggtcctccaccacatggtcaagatctccggcggcccccgcatctcctaccccctcctccacgagtgggccctccgcgagggcgaggagtga

SEQ ID NO: 1786 - RNA, 945 nt, synthetic construct
  misc_feature 1..945: note = AAA19006 variant
  source 1..945: mol_type = other RNA
atgcccctcgagcagcgctcccagcactgcaagcccgaggagggcctcgaggcccgcggcgaggccctcggcctcgtcggcgcccaggcccccgccaccgaggagcaggaggccgcctcctcctcctccaccctcgtcgaggtcaccctcggcgaggtccccgccgccgagtcccccgaccccccccagtccccccagggcgcctcctccctccccaccaccatgaactaccccctctggtcccagtcctacgaggactcctccaaccaggaggaggagggcccctccaccttccccgacctcgagtccgagttccaggccgccctctcccgcaaggtcgccaagctcgtccacttcctcctcctcaagtaccgcgcccgcgagcccgtcaccaaggccgagatgctcggctccgtcgtcggcaactggcagtacttcttccccgtcatcttctccaaggcctccgactccctccagctcgtcttcggcatcgagctcatggaggtcgaccccatcggccacgtctacatcttcgccacctgcctcggcctctcctacgacggcctcctcggcgacaaccagatcatgcccaagaccggcttcctcatcatcatcctcgccatcatcgccaaggagggcgactgcgcccccgaggagaagatctgggaggagctctccgtcctcgaggtcttcgagggccgcgaggactccatcttcggcgaccccaagaagctcctcacccagtacttcgtccaggagaactacctcgagtaccgccaggtccccggctccgaccccgcctgctacgagttcctctggggcccccgcgccctcatcgagacctcctacgtcaaggtcctccaccacatggtcaagatctccggcggcccccgcatctcctaccccctcctccacgagtgggccctccgcgagggcgaggagtga

SEQ ID NO: 1787 - RNA, 945 nt, synthetic construct
  misc_feature 1..945: note = CAG46567 variant
  source 1..945: mol_type = other RNA
atgcccctcgagcagcgctcccagcactgcaagcccgaggagggcctcgaggcccgcggcgaggccctcggcctcgtcggcgcccaggcccccgccaccgaggagcaggaggccgcctcctcctcctccaccctcgtcgaggtcaccctcggcgaggtccccgccgccgagtcccccgaccccccccagtccccccagggcgcctcctccctccccaccaccatgaactaccccctctggtcccagtcctacgaggactcctccaaccaggaggaggagggcccctccaccttccccgacctcgagtccgagttccaggccgccctctcccgcaaggtcgccaagctcgtccacttcctcctcctcaagtaccgcgcccgcgagcccgtcaccaaggccgagatgctcggctccgtcgtcggcaactggcagtacttcttccccgtcatcttctccaaggcctccgactccctccagctcgtcttcggcatcgagctcatggaggtcgaccccatcggccacgtctacatcttcgccacctgcctcggcctctcctacgacggcctcctcggcgacaaccagatcatgcccaagaccggcttcctcatcatcatcctcgccatcatcgccaaggagggcgactgcgcccccgaggagaagatctgggaggagctctccgtcctcgaggtcttcgagggccgcgaggactccatcttcggcgaccccaagaagctcctcacccagtacttcgtccaggagaactacctcgagtaccgccaggtccccggctccgaccccgcctgctacgagttcctctggggcccccgcgccctcatcgagacctcctacgtcaaggtcctccaccacatggtcaagatctccggcggcccccgcatctcctaccccctcctccacgagtgggccttccgcgagggcgaggagtga

SEQ ID NO: 1788 - RNA, 948 nt, synthetic construct
  misc_feature 1..948: note = AAA68877 variant
  source 1..948: mol_type = other RNA
atgtccctcgagcagcgctccccccactgcaagcccgacgaggacctcgaggcccagggcgaggacctcggcctcatgggcgcccaggagcccaccggcgaggaggaggagaccacctcctcctccgactccaaggaggaggaggtctccgccgccggctcctcctcccccccccagtccccccagggcggcgcctcctcctccatctccgtctactacaccctctggtcccagttcgacgagggctcctcctcccaggaggaggaggagccctcctcctccgtcgaccccgcccagctcgagttcatgttccaggaggccctcaagctcaaggtcgccgagctcgtccacttcctcctccacaagtaccgcgtcaaggagcccgtcaccaaggccgagatgctcgagtccgtcatcaagaactacaagcgctacttccccgtcatcttcggcaaggcctccgagttcatgcaggtcatcttcggcaccgacgtcaaggaggtcgaccccgccggccactcctacatcctcgtcaccgccctcggcctctcctgcgactccatgctcggcgacggccactccatgcccaaggccgccctcctcatcatcgtcctcggcgtcatcctcaccaaggacaactgcgcccccgaggaggtcatctgggaggccctctccgtcatgggcgtctacgtcggcaaggagcacatgttctacggcgagccccgcaagctcctcacccaggactgggtccaggagaactacctcgagtaccgccaggtccccggctccgaccccgcccactacgagttcctctggggctccaaggcccacgccgagacctcctacgagaaggtcatcaactacctcgtcatgctcaacgcccgcgagcccatctgctacccctccctctacgaggaggtcctcggcgaggagcaggagggcgtctga

SEQ ID NO: 1789 - RNA, 1044 nt, synthetic construct
  misc_feature 1..1044: note = AAI01309 variant
  source 1..1044: mol_type = other RNA
atgccccgcggccagaagtccaagctccgcgcccgcgagaagcgccgccaggcccgcggcggcctcgaggacctcatcgacgccctcgacatcctcgaggaggaggaggagtcccccccctccgcctccgcctgcctcaaggacgtcttccagtcctccctcgacggcgcctccaacaacccccacggcctccgcgaggcccagtccacctccacctccgccaccgccgcctcccacacccgccaccccgagggcgtcaacgaccagatggaggagcgccccatctgcacccaggacctcgaggccaccgactccttcccccgcggccccgtcgacgagaaggtcatcatcctcgtccactacctcctctacaagtaccagatgaaggagcccatcaccaaggccgacatgctccgcaacgtcacccagatgtccaagtcccagttccccgtcatcctctcccgcgcctccgagcacctcgagctcatcttcggcctcgacctcaaggaggtcgagcccaacaagcacatctacgtcctcgtcaacaagctcgacctcggctgcgacgccaagctctccgacgagaccggcgtccccaagaccggcctcctcatgaccgtcctcggcatcatcttcaccaacggcaactgcgtcgccgaggaggaggtctggaaggtcttcaacaccatgggcctctacgacggcatcgagcacttcatgttcggcgagccccgcaagctcctcaccaaggacctcgtcaaggagaactacctcgagtaccagcaggtccccaactccgaccccccccgctaccagttcctctggggcccccgcgcccacgccgagacctccaagatgaaggtcctcgagttcctcgccaaggtcaacgacaccgccccctccgagttctccaactggtacaccgaggccctccaggacgaggaggagcgcgcccgcgcccgcgtcgccgccaaggcccgcgtctccgccaccgccggcgcccgctccaaggtcaagtcctccaagtcctcccagctccagtga

SEQ ID NO: 1790 - RNA, 975 nt, synthetic construct
  misc_feature 1..975: note = CCDS43927.1 variant
  source 1..975: mol_type = other RNA
atgtcccaggaccaggagtccccccgctgcacccacgaccagcacctccagaccttctccgagacccagtccctcgaggtcgcccaggtctccaaggccctcgagaagaccctcctctcctcctcccaccccctcgtccccggcaagctcaaggaggcccccgccgccaaggccgagtcccccctcgaggtcccccagtccttctgctcctcctccatcgccgtcaccaccacctcctcctccgagtccgacgaggcctcctccaaccaggaggaggaggactccccctcctcctccgaggacacctccgacccccgcaacgtccccgccgacgccctcgaccagaaggtcgccttcctcgtcaacttcatgctccacaagtgccagatgaagaagcccatcaccaaggccgacatgctcaagatcatcatcaaggacgacgagtcccacttctccgagatcctcctccgcgcctccgagcacctcgagatgatcttcggcctcgacgtcgtcgaggtcgaccccaccacccactgctacggcctcttcatcaagctcggcctcacctacgacggcatgctctccggcgagaagggcgtccccaagaccggcctcctcatcatcgtcctcggcgtcatcttcatgaagggcaaccgcgccaccgaggaggaggtctgggaggtcctcaacctcaccggcgtctactccggcaagaagcacttcatcttcggcgagccccgcatgctcatcaccaaggacttcgtcaaggagaagtacctcgagtaccagcaggtcgccaactccgaccccgcccgctacgagttcctctggggcccccgcgccaaggccgagacctccaagatgaaggtcctcgagttcgtcgccaaggtccacggctcctacccccactccttcccctcccagtacgccgaggccctcaaggaggaggaggagcgcgcccgcgcccgcatctga

SEQ ID NO: 1791 - RNA, 1011 nt, synthetic construct
  misc_feature 1..1011: note = CCDS59524.1 variant
  source 1..1011: mol_type = other RNA
atgccccgcggccaggcctccaagcgccgcgcccgcgagaagcgccgccaggcccgcggcgaggaccagtgcctcggcggcgcccaggccaccgccgccgagaaggagaagctcccctcctcctcctcccccgcctgccagtcccccccccagtccttccccaacgccggcatcccccaggagtcccagcgcgcctcctacccctcctcccccgcctccgccgtctccctcacctcctccgacgagggcgccaagggccagaagggcgagtcccccaactccttccacggcccctcctcctccgagtccaccggccgcgacctcctcaacaccaagaccggcgagctcgtccagttcctcctcaacaagtacatccgcaaggagcccatcacccgcgaggccatgctcaaggtcatcaaccgcaagtacaagcagcacttccccgagatcctccgccgctccaccgagaacgtcgaggtcgtcttcggcctctacctcaaggagatggacccctcccgccagtcctacgtcctcgtcggcaagctcgacttccccaaccagggctccctctccgacggcggcggcttccccctctccggcctcctcatggtcctcctctccaccatcttcatgcacggcaaccgcgccaccgaggaggagatgtgggagtgcctcaacgccctcggcatgtacaagggccgcaagcacttcatctacggcgagccccaggagctcgtcaccaaggacctcgtccgcgagggctacctcgagtaccagcaggtcccctcctccgaccccccccgctacgagttcctctggggcccccgcgcccgcgccgagacctccaagatgaaggtcctcgagttcgtcgccaagctcaacgacaccgtcgcctccacctacaagtcccgctacgaggaggccctccgcgaggaggaggagcaggcccgcgcccgcgccgtcgcccgcgactccgcccgcgcccgcgcctcccgctccttccagccctga

SEQ ID NO: 1792 - RNA, 1044 nt, synthetic construct
  misc_feature 1..1044: note = AAC23616 variant
  source 1..1044: mol_type = other RNA
atgccccgcggccagaagtccaagctccgcgcccgcgagaagcgccgcaaggcccgcgaggagacccagggcctcaaggtccgccacgccaccgccgccgagaaggaggagtgcccctcctcctcccccgtcctcggcgacacccccacctcctcccccgccgccggcatcccccagaagccccagggcgccccccccaccaccaccgccgccgccgccgtctcctgcaccgagtccgacgagggcgccaagtgccagggcgaggagaacgcctccttctcccaggccaccacctccaccgagtcctccgtcaaggaccccgtcgcctgggaggccggcatgctcatgcacttcatcctccgcaagtacaagatgcgcgagcccatcatgaaggccgacatgctcaaggtcgtcgacgagaagtacaaggaccacttcaccgagatcctcaacggcgcctcccgccgcctcgagctcgtcttcggcctcgacctcaaggaggacaacccctcctcccacacctacaccctcgtctccaagctcaacctcaccaacgacggcaacctctccaacgactgggacttcccccgcaacggcctcctcatgcccctcctcggcgtcatcttcctcaagggcaactccgccaccgaggaggagatctggaagttcatgaacgtcctcggcgcctacgacggcgaggagcacctcatctacggcgagccccgcaagttcatcacccaggacctcgtccaggagaagtacctcaagtacgagcaggtccccaactccgaccccccccgctaccagttcctctggggcccccgcgcctacgccgagaccaccaagatgaaggtcctcgagttcctcgccaagatgaacggcgccaccccccgcgacttcccctcccactacgaggaggccctccgcgacgaggaggagcgcgcccaggtccgctcctccgtccgcgcccgccgccgcaccaccgccaccaccttccgcgcccgctcccgcgcccccttctcccgctcctcccaccccatgtga

SEQ ID NO: 1793 - RNA, 960 nt, synthetic construct
  misc_feature 1..960: note = AAD10635 variant
  source 1..960: mol_type = other RNA
atgccccgcggccagaagtccaagctccgcgcccgcgagaagcgccgcaaggcccgcgacgagacccgcggcctcaacgtcccccaggtcaccgaggccgaggaggaggaggccccctgctgctcctcctccgtctccggcggcgccgcctcctcctcccccgccgccggcatcccccaggagccccagcgcgcccccaccaccgccgccgccgccgccgccggcgtctcctccaccaagtccaagaagggcgccaagtcccaccagggcgagaagaacgcctcctcctcccaggcctccacctccaccaagtccccctccgaggaccccctcacccgcaagtccggctccctcgtccagttcctcctctacaagtacaagatcaagaagtccgtcaccaagggcgagatgctcaagatcgtcggcaagcgcttccgcgagcacttccccgagatcctcaagaaggcctccgagggcctctccgtcgtcttcggcctcgagctcaacaaggtcaaccccaacggccacacctacaccttcatcgacaaggtcgacctcaccgacgaggagtccctcctctcctcctgggacttcccccgccgcaagctcctcatgcccctcctcggcgtcatcttcctcaacggcaactccgccaccgaggaggagatctgggagttcctcaacatgctcggcgtctacgacggcgaggagcactccgtcttcggcgagccctggaagctcatcaccaaggacctcgtccaggagaagtacctcgagtacaagcaggtcccctcctccgaccccccccgcttccagttcctctggggcccccgcgcctacgccgagacctccaagatgaaggtcctcgagttcctcgccaaggtcaacggcaccaccccctgcgccttccccacccactacgaggaggccctcaaggacgaggagaaggccggcgtctga

SEQ ID NO: 1794 - RNA, 1041 nt, synthetic construct
  misc_feature 1..1041: note = AAD10636 variant
  source 1..1041: mol_type = other RNA
atgccccgcggccagaagtccaccctccacgcccgcgagaagcgccagcagacccgcggccagacccaggaccaccagggcgcccagatcaccgccaccaacaagaagaaggtctccttctcctcccccctcatcctcggcgccaccatccagaagaagtccgccggccgctcccgctccgccctcaagaagccccagcgcgccctctccaccaccacctccgtcgacgtctcctacaagaagtcctacaagggcgccaactccaagatcgagaagaagcagtccttctcccagggcctctcctccaccgtccagtcccgcaccgaccccctcatcatgaagaccaacatgctcgtccagttcctcatggagatgtacaagatgaagaagcccatcatgaaggccgacatgctcaagatcgtccagaagtcccacaagaactgcttccccgagatcctcaagaaggcctccttcaacatggaggtcgtcttcggcgtcgacctcaagaaggtcgactccaccaaggactcctacgtcctcgtctccaagatggacctccccaacaacggcaccgtcacccgcggccgcggcttccccaagaccggcctcctcctcaacctcctcggcgtcatcttcatgaagggcaactgcgccaccgaggagaagatctgggagttcctcaacaagatgcgcatctacgacggcaagaagcacttcatcttcggcgagccccgcaagctcatcacccaggacctcgtcaagctcaagtacctcgagtaccgccaggtccccaactccaaccccgcccgctacgagttcctctggggcccccgcgcccacgccgagacctccaagatgaaggtcctcgagttctgggccaaggtcaacaagaccgtcccctccgccttccagttctggtacgaggaggccctccgcgacgaggaggagcgcgtccaggccgccgccatgctcaacgacggctcctccgccatgggccgcaagtgctccaaggccaaggcctcctcctcctcccacgcctga

SEQ ID NO: 1795 - RNA, 1041 nt, synthetic construct
  misc_feature 1..1041: note = AAC23619 variant
  source 1..1041: mol_type = other RNA
atgccccgcggccagaagtccaagctccgcgcccgcgagaagcgccagcgcacccgcggccagacccaggacctcaaggtcggccagcccaccgccgccgagaaggaggagtccccctcctcctcctcctccgtcctccgcgacaccgcctcctcctccctcgccttcggcatcccccaggagccccagcgcgagccccccaccacctccgccgccgccgccatgtcctgcaccggctccgacaagggcgacgagtcccaggacgaggagaacgcctcctcctcccaggcctccacctccaccgagcgctccctcaaggactccctcacccgcaagaccaagatgctcgtccagttcctcctctacaagtacaagatgaaggagcccaccaccaaggccgagatgctcaagatcatctccaagaagtacaaggagcacttccccgagatcttccgcaaggtctcccagcgcaccgagctcgtcttcggcctcgccctcaaggaggtcaaccccaccacccactcctacatcctcgtctccatgctcggccccaacgacggcaaccagtcctccgcctggaccctcccccgcaacggcctcctcatgcccctcctctccgtcatcttcctcaacggcaactgcgcccgcgaggaggagatctgggagttcctcaacatgctcggcatctacgacggcaagcgccacctcatcttcggcgagccccgcaagctcatcacccaggacctcgtccaggagaagtacctcgagtaccagcaggtccccaactccgaccccccccgctaccagttcctctggggcccccgcgcccacgccgagacctccaagatgaaggtcctcgagttcctcgccaaggtcaacgacaccacccccaacaacttccccctcctctacgaggaggccctccgcgacgaggaggagcgcgccggcgcccgcccccgcgtcgccgcccgccgcggcaccaccgccatgacctccgcctactcccgcgccacctcctcctcctcctcccagcccatgtga

SEQ ID NO: 1796 - RNA, 828 nt, synthetic construct
  misc_feature 1..828: note = CCDS65233.1 variant
  source 1..828: mol_type = other RNA
atgacctccgccggcgtcttcaacgccggctccgacgagcgcgccaactcccgcgacgaggagtacccctgctcctccgaggtctccccctccaccgagtcctcctgctccaacttcatcaacatcaaggtcggcctcctcgagcagttcctcctctacaagttcaagatgaagcagcgcatcctcaaggaggacatgctcaagatcgtcaacccccgctaccagaaccagttcgccgagatccaccgccgcgcctccgagcacatcgaggtcgtcttcgccgtcgacctcaaggaggtcaaccccacctgccacctctacgacctcgtctccaagctcaagctccccaacaacggccgcatccacgtcggcaaggtcctccccaagaccggcctcctcatgaccttcctcgtcgtcatcttcctcaagggcaactgcgccaacaaggaggacacctggaagttcctcgacatgatgcagatctacgacggcaagaagtactacatctacggcgagccccgcaagctcatcacccaggacttcgtccgcctcacctacctcgagtaccaccaggtcccctgctcctaccccgcccactaccagttcctctggggcccccgcgcctacaccgagacctccaagatgaaggtcctcgagtacctcgccaaggtcaacgacatcgcccccggcgccttctcctcccagtacgaggaggccctccaggacgaggaggagtccccctcccagcgctgctcccgcaactggcactactgctccggccaggactgcctccgcgccaagttctcctccttctcccagccctactga

SEQ ID NO: 1797 - RNA, 1224 nt, synthetic construct
  misc_feature 1..1224: note = AAH67286 variant
  source 1..1224: mol_type = other RNA
atgccccgcggccacaagtccaagctccgcacctgcgagaagcgccaggagaccaacggccagccccagggcctcaccggcccccaggccaccgccgagaagcaggaggagtcccactcctcctcctcctcctcccgcgcctgcctcggcgactgccgccgctcctccgacgcctccatcccccaggagtcccagggcgtctcccccaccggctcccccgacgccgtcgtctcctactccaagtccgacgtcgccgccaacggccaggacgagaagtccccctccacctcccgcgacgcctccgtcccccaggagtcccagggcgcctcccccaccggctcccccgacgccggcgtctccggctccaagtacgacgtcgccgccaacggccaggacgagaagtccccctccacctcccacgacgtctccgtcccccaggagtcccagggcgcctcccccaccggctcccccgacgccggcgtctccggctccaagtacgacgtcgccgccgagggcgaggacgaggagtccgtctccgcctcccagaaggccatcatcttcaagcgcctctccaaggacgccgtcaagaagaaggcctgcaccctcgcccagttcctccagaagaagttcgagaagaaggagtccatcctcaaggccgacatgctcaagtgcgtccgccgcgagtacaagccctacttcccccagatcctcaaccgcacctcccagcacctcgtcgtcgccttcggcgtcgagctcaaggagatggactcctccggcgagtcctacaccctcgtctccaagctcggcctcccctccgagggcatcctctccggcgacaacgccctccccaagtccggcctcctcatgtccctcctcgtcgtcatcttcatgaacggcaactgcgccaccgaggaggaggtctgggagttcctcggcctcctcggcatctacgacggcatcctccactccatctacggcgacgcccgcaagatcatcaccgaggacctcgtccaggacaagtacgtcgtctaccgccaggtctgcaactccgaccccccctgctacgagttcctctggggcccccgcgcctacgccgagaccaccaagatgcgcgtcctccgcgtcctcgccgactcctccaacacctcccccggcctctacccccacctctacgaggacgccctcatcgacgaggtcgagcgcgccctccgcctccgcgcctga

SEQ ID NO: 1798 - RNA, 3429 nt, synthetic construct
  misc_feature 1..3429: note = CCDS35417.1 variant
  source 1..3429: mol_type = other RNA
atgggcgacaaggacatgcccaccgccggcatgccctccctcctccagtcctcctccgagtccccccagtcctgccccgagggcgaggactcccagtcccccctccagatcccccagtcctcccccgagtccgacgacaccctctaccccctccagtccccccagtcccgctccgagggcgaggactcctccgaccccctccagcgcccccccgagggcaaggactcccagtcccccctccagatcccccagtcctcccccgagggcgacgacacccagtcccccctccagaactcccagtcctcccccgagggcaaggactccctctcccccctcgagatctcccagtccccccccgagggcgaggacgtccagtcccccctccagaaccccgcctcctccttcttctcctccgccctcctctccatcttccagtcctcccccgagtccacccagtcccccttcgagggcttcccccagtccgtcctccagatccccgtctccgccgcctcctcctccaccctcgtctccatcttccagtcctcccccgagtccacccagtcccccttcgagggcttcccccagtcccccctccagatccccgtctcccgctccttctcctccaccctcctctccatcttccagtcctcccccgagcgcacccagtccaccttcgagggcttcgcccagtcccccctccagatccccgtctccccctcctcctcctccaccctcctctccctcttccagtccttctccgagcgcacccagtccaccttcgagggcttcgcccagtcctccctccagatccccgtctccccctccttctcctccaccctcgtctccctcttccagtcctcccccgagcgcacccagtccaccttcgagggcttcccccagtcccccctccagatccccgtctcctcctcctcctcctccaccctcctctccctcttccagtcctcccccgagcgcacccactccaccttcgagggcttcccccagtccctcctccagatccccatgacctcctccttctcctccaccctcctctccatcttccagtcctcccccgagtccgcccagtccaccttcgagggcttcccccagtcccccctccagatccccggctccccctccttctcctccaccctcctctccctcttccagtcctcccccgagcgcacccactccaccttcgagggcttcccccagtcccccctccagatccccatgacctcctccttctcctccaccctcctctccatcctccagtcctcccccgagtccgcccagtccgccttcgagggcttcccccagtcccccctccagatccccgtctcctcctccttctcctacaccctcctctccctcttccagtcctcccccgagcgcacccactccaccttcgagggcttcccccagtcccccctccagatccccgtctcctcctcctcctcctcctccaccctcctctccctcttccagtcctcccccgagtgcacccagtccaccttcgagggcttcccccagtcccccctccagatcccccagtccccccccgagggcgagaacacccactcccccctccagatcgtcccctccctccccgagtgggaggactccctctccccccactacttcccccagtcccccccccagggcgaggactccctctccccccactacttcccccagtcccccccccagggcgaggactccctctccccccactacttcccccagtccccccagggcgaggactccctctccccccactacttcccccagtcccccccccagggcgaggactccatgtcccccctctacttcccccagtcccccctccagggcgaggagttccagtcctccctccagtcccccgtctccatctgctcctcctccaccccctcctccctcccccagtccttccccgagtcctcccagtccccccccgagggccccgtccagtcccccctccactccccccagtccccccccgagggcatgcactcccagtcccccctccagtcccccgagtccgcccccgagggcgaggactccctctcccccctccagatcccccagtcccccctcgagggcgaggactccctctcctccctccacttcccccagtccccccccgagtgggaggactccctctcccccctccacttcccccagttccccccccagggcgaggacttccagtcctccctccagtcccccgtctccatctgctcctcctccacctccctctccctcccccagtccttccccgagtccccccagtccccccccgagggccccgcccagtcccccctccagcgccccgtctcctccttcttctcctacaccctcgcctccctcctccagtcctcccacgagtccccccagtccccccccgagggccccgcccagtcccccctccagtcccccgtctcctccttcccctcctccacctcctcctccctctcccagtcctcccccgtctcctccttcccctcctccacctcctcctccctctccaagtcctcccccgagtcccccctccagtcccccgtcatctccttctcctcctccacctccctctcccccttctccgaggagtcctcctcccccgtcgacgagtacacctcctcctccgacaccctcctcgagtccgactccctcaccgactccgagtccctcatcgagtccgagcccctcttcacctacaccctcgacgagaaggtcgacgagctcgcccgcttcctcctcctcaagtaccaggtcaagcagcccatcaccaaggccgagatgctcaccaacgtcatctcccgctacaccggctacttccccgtcatcttccgcaaggcccgcgagttcatcgagatcctcttcggcatctccctccgcgaggtcgaccccgacgactcctacgtcttcgtcaacaccctcgacctcacctccgagggctgcctctccgacgagcagggcatgtcccagaaccgcctcctcatcctcatcctctccatcatcttcatcaagggcacctacgcctccgaggaggtcatctgggacgtcctctccggcatcggcgtccgcgccggccgcgagcacttcgccttcggcgagccccgcgagctcctcaccaaggtctgggtccaggagcactacctcgagtaccgcgaggtccccaactcctcccccccccgctacgagttcctctggggcccccgcgcccactccgaggtcatcaagcgcaaggtcgtcgagttcctcgccatgctcaagaacaccgtccccatcaccttcccctcctcctacaaggacgccctcaaggacgtcgaggagcgcgcccaggccatcatcgacaccaccgacgactccaccgccaccgagtccgcctcctcctccgtcatgtccccctccttctcctccgagtga

SEQ ID NO: 1799 - RNA, 1122 nt, synthetic construct
  misc_feature 1..1122: note = AAF07210 variant
  source 1..1122: mol_type = other RNA
atgccccccgtccccggcgtccccttccgcaacgtcgacaacgactcccccacctccgtcgagctcgaggactgggtcgacgcccagcaccccaccgacgaggaggaggaggaggcctcctccgcctcctccaccctctacctcgtcttctccccctcctccttctccacctcctcctccctcatcctcggcggccccgaggaggaggaggtcccctccggcgtcatccccaacctcaccgagtccatcccctcctcccccccccagggccccccccagggcccctcccagtcccccctctcctcctgctgctcctccttctcctggtcctccttctccgaggagtcctcctcccagaagggcgaggacaccggcacctgccagggcctccccgactccgagtcctccttcacctacaccctcgacgagaaggtcgccgagctcgtcgagttcctcctcctcaagtacgaggccgaggagcccgtcaccgaggccgagatgctcatgatcgtcatcaagtacaaggactacttccccgtcatcctcaagcgcgcccgcgagttcatggagctcctcttcggcctcgccctcatcgaggtcggccccgaccacttctgcgtcttcgccaacaccgtcggcctcaccgacgagggctccgacgacgagggcatgcccgagaactccctcctcatcatcatcctctccgtcatcttcatcaagggcaactgcgcctccgaggaggtcatctgggaggtcctcaacgccgtcggcgtctacgccggccgcgagcacttcgtctacggcgagccccgcgagctcctcaccaaggtctgggtccagggccactacctcgagtaccgcgaggtcccccactcctcccccccctactacgagttcctctggggcccccgcgcccactccgagtccatcaagaagaaggtcctcgagttcctcgccaagctcaacaacaccgtcccctcctccttcccctcctggtacaaggacgccctcaaggacgtcgaggagcgcgtccaggccaccatcgacaccgccgacgacgccaccgtcatggcctccgagtccctctccgtcatgtcctccaacgtctccttctccgagtga

SEQ ID NO: 1800 - RNA, 1932 nt, synthetic construct
  misc_feature 1..1932: note = AAM08355 variant
  source 1..1932: mol_type = other RNA
atgctcctcccctgccactgggtcctcgacgccaccttctccgacggctccctcggccagtgggtcaagaacacctgcgccacctacgccctctcccccgtcgtcctccccccccagccccagccccgcaagaaggccaccgacaaggactactccgccttccacctcggccacctccgcgaggtccgcctcttcctccgcggcggcacctccgaccagcgcatggactccctcgtcctctgccccacctacttcaagctctggcgcaccctctccggctcccccggcctccagctctccgacctccacttcggctcccagcccgagggcaagttctccctccgccgcgccgtctccgtcaagcagcgcgaggagccccaggactggcccctcaacgagaagcgcaccctctggaaggactccgacctccccacctggcgccgcggcaccggctacaccctctccctccccgccgtctcccccggcaagcgcctctggggcgagaaggccggctccctccccgagtccgagcccctcttcacctacaccctcgacgagaaggtcgacaagctcgtccagttcctcctcctcaagtaccaggccaaggagcccctcacccgcgccgagatgcagatgaacgtcatcaacacctacaccggctacttccccatgatcttccgcaaggcccgcgagttcatcgagatcctcttcggcatctccctcaccgaggtcgaccccgaccacttctacgtcttcgtcaacaccctcgacctcacctgcgagggctccctctccgacgagcagggcatgccccagaaccgcctcctcatcctcatcctctccgtcatcttcatcaagggcaactgcgcctccgaggaggtcatctgggaggtcctcaacgccatcggcccctggtccgccctcgccggcttcgccgacgtcctctcccgcctcgccctctgggagtccgagggccccgaggccttctgcgaggagtccggcctccgctccgccgagggctccgtcctcgacctcgccaacccccagggcctcgccggccaccgccaggaggacggccgccgcggcctcaccgaggcctccccccagcagaagaagggcggcgaggacgaggacatgcccgccgccggcatgccccccctcccccagtccccccccgagatccccccccagggcccccccaagatctccccccagggccccccccagtcccccccccagtcccccctcgactcctgctcctcccccctcctctggacccgcctcgacgaggagtcctcctccgaggaggaggacaccgccacctggcacgccctccccgagtccgagtccctcccccgctacgccctcgacgagaaggtcgccgagctcgtccagttcctcctcctcaagtaccagaccaaggagcccgtcaccaaggccgagatgctcaccaccgtcatcaagaagtacaaggactacttccccatgatcttcggcaaggcccacgagttcatcgagctcatcttcggcatcgccctcaccgacatggaccccgacaaccactcctacttcttcgaggacaccctcgacctcacctacgagggctccctcatcgacgaccagggcatgcccaagaactgcctcctcatcctcatcctctccatgatcttcatcaagggctcctgcgtccccgaggaggtcatctgggaggtcctctccgccatcggccccatccagcgccccgcccgcgaggtcctcgagttcctctccaagctctcctccatcatcccctccgccttcccctcctggtacatggacgccctcaaggacatggaggaccgcgcccaggccatcatcgacaccaccgacgacgccaccgccatggcctccgcctccccctccgtcatgtccaccaacttctgccccgagtga

SEQ ID NO: 1801 - RNA, 2337 nt, synthetic construct
  misc_feature 1..2337: note = AAG23757 variant
  source 1..2337: mol_type = other RNA
atggcccagaagatggactgcggcgccggcctcctcggcttccaggccgaggcctccgtcgaggactccgccctcctcatgcagaccctcatggaggccatccagatctccgaggccccccccaccaaccaggccaccgccgccgcctccccccagtcctcccagccccccaccgccaacgagatggccgacatccaggtctccgccgccgccgcccgccccaagtccgccttcaaggtccagaacgccaccaccaagggccccaacggcgtctacgacttctcccaggcccacaacgccaaggacgtccccaacacccagcccaaggccgccttcaagtcccagaacgccacccccaagggccccaacgccgcctacgacttctcccaggccgccaccaccggcgagctcgccgccaacaagtccgagatggccttcaaggcccagaacgccaccaccaaggtcggccccaacgccacctacaacttctcccagtccctcaacgccaacgacctcgccaactcccgccccaagacccccttcaaggcctggaacgacaccaccaaggcccccaccgccgacacccagacccagaacgtcaaccaggccaagatggccacctcccaggccgacatcgagaccgaccccggcatctccgagcccgacggcgccaccgcccagacctccgccgacggctcccaggcccagaacctcgagtcccgcaccatcatccgcggcaagcgcacccgcaagatcaacaacctcaacgtcgaggagaactcctccggcgaccagcgccgcgcccccctcgccgccggcacctggcgctccgcccccgtccccgtcaccacccagaacccccccggcgccccccccaacgtcctctggcagacccccctcgcctggcagaacccctccggctggcagaaccagaccgcccgccagaccccccccgcccgccagtccccccccgcccgccagaccccccccgcctggcagaaccccgtcgcctggcagaaccccgtcatctggcccaaccccgtcatctggcagaaccccgtcatctggcccaaccccatcgtctggcccggccccgtcgtctggcccaaccccctcgcctggcagaacccccccggctggcagaccccccccggctggcagaccccccccggctggcagggcccccccgactggcagggcccccccgactggcccctcccccccgactggcccctcccccccgactggcccctccccaccgactggcccctcccccccgactggatccccgccgactggcccatcccccccgactggcagaacctccgcccctcccccaacctccgcccctcccccaactcccgcgcctcccagaaccccggcgccgcccagccccgcgacgtcgccctcctccaggagcgcgccaacaagctcgtcaagtacctcatgctcaaggactacaccaaggtccccatcaagcgctccgagatgctccgcgacatcatccgcgagtacaccgacgtctaccccgagatcatcgagcgcgcctgcttcgtcctcgagaagaagttcggcatccagctcaaggagatcgacaaggaggagcacctctacatcctcatctccacccccgagtccctcgccggcatcctcggcaccaccaaggacacccccaagctcggcctcctcctcgtcatcctcggcgtcatcttcatgaacggcaaccgcgcctccgaggccgtcctctgggaggccctccgcaagatgggcctccgccccggcgtccgccaccccctcctcggcgacctccgcaagctcctcacctacgagttcgtcaagcagaagtacctcgactaccgccgcgtccccaactccaacccccccgagtacgagttcctctggggcctccgctcctaccacgagacctccaagatgaaggtcctccgcttcatcgccgaggtccagaagcgcgacccccgcgactggaccgcccagttcatggaggccgccgacgaggccctcgacgccctcgacgccgccgccgccgaggccgaggcccgcgccgaggcccgcacccgcatgggcatcggcgacgaggccgtctccggcccctggtcctgggacgacatcgagttcgagctcctcacctgggacgaggagggcgacttcggcgacccctggtcccgcatccccttcaccttctgggcccgctaccaccagaacgcccgctcccgcttcccccagaccttcgccggccccatcatcggccccggcggcaccgcctccgccaacttcgccgccaacttcggcgccatcggcttcttctgggtcgagtga

SEQ ID NO: 1802 - RNA, 1821 nt, synthetic construct
  misc_feature 1..1821: note = AAD28598 variant
  source 1..1821: mol_type = other RNA
atgtccgacacctccgagtccggcgccggcctcacccgcttccaggccgaggcctccgagaaggactcctcctccatgatgcagaccctcctcaccgtcacccagaacgtcgaggtccccgagacccccaaggcctccaaggccctcgaggtctccgaggacgtcaaggtctccaaggcctccggcgtctccaaggccaccgaggtctccaagacccccgaggcccgcgaggcccccgccacccaggcctcctccaccacccagctcaccgacacccaggtcctcgccgccgagaacaagtccctcgccgccgacaccaagaagcagaacgccgacccccaggccgtcaccatgcccgccaccgagaccaagaaggtctcccacgtcgccgacaccaaggtcaacaccaaggcccaggagaccgaggccgccccctcccaggcccccgccgacgagcccgagcccgagtccgccgccgcccagtcccaggagaaccaggacacccgccccaaggtcaaggccaagaaggcccgcaaggtcaagcacctcgacggcgaggaggacggctcctccgaccagtcccaggcctccggcaccaccggcggccgccgcgtctccaaggccctcatggcctccatggcccgccgcgcctcccgcggccccatcgccttctgggcccgccgcgcctcccgcacccgcctcgccgcctgggcccgccgcgccctcctctccctccgctcccccaaggcccgccgcggcaaggcccgccgccgcgccgccaagctccagtcctcccaggagcccgaggccccccccccccgcgacgtcgccctcctccagggccgcgccaacgacctcgtcaagtacctcctcgccaaggaccagaccaagatccccatcaagcgctccgacatgctcaaggacatcatcaaggagtacaccgacgtctaccccgagatcatcgagcgcgccggctactccctcgagaaggtcttcggcatccagctcaaggagatcgacaagaacgaccacctctacatcctcctctccaccctcgagcccaccgacgccggcatcctcggcaccaccaaggactcccccaagctcggcctcctcatggtcctcctctccatcatcttcatgaacggcaaccgctcctccgaggccgtcatctgggaggtcctccgcaagctcggcctccgccccggcatccaccactccctcttcggcgacgtcaagaagctcatcaccgacgagttcgtcaagcagaagtacctcgactacgcccgcgtccccaactccaacccccccgagtacgagttcttctggggcctccgctcctactacgagacctccaagatgaaggtcctcaagttcgcctgcaaggtccagaagaaggaccccaaggagtgggccgcccagtaccgcgaggccatggaggccgacctcaaggccgccgccgaggccgccgccgaggccaaggcccgcgccgagatccgcgcccgcatgggcatcggcctcggctccgagaacgccgccggcccctgcaactgggacgaggccgacatcggcccctgggccaaggcccgcatccaggccggcgccgaggccaaggccaaggcccaggagtccggctccgcctccaccggcgcctccacctccaccaacaactccgcctccgcctccgcctccacctccggcggcttctccgccggcgcctccctcaccgccaccctcaccttcggcctcttcgccggcctcggcggcgccggcgcctccacctccggctcctccggcgcctgcggcttctcctacaagtga

SEQ ID NO: 1803 - RNA, 2226 nt, synthetic construct
  misc_feature 1..2226: note = AAH63838 variant
  source 1..2226: mol_type = other RNA
atggccgagggctccttctccgtccagtccgagtcctactccgtcgaggacatggacgagggctccgacgaggtcggcgaggaggagatggtcgagggcaacgactacgaggagttcggcgccttcggcggctacggcaccctcacctccttcgacatccacatcctccgcgccttcggctccctcggccccggcctccgcatcctctccaacgagccctgggagctcgagaaccccgtcctcgcccagaccctcgtcgaggccctccagctcgaccccgagaccctcgccaacgagaccgccgcccgcgccgccaacgtcgcccgcgccgccgcctccaaccgcgccgcccgcgccgccgccgccgccgcccgcaccgccttctcccaggtcgtcgcctcccaccgcgtcgccaccccccaggtctccggcgaggacacccagcccaccacctacgccgccgaggcccagggccccacccccgagccccccctcgcctccccccagacctcccagatgctcgtcacctccaagatggccgcccccgaggcccccgccacctccgcccagtcccagaccggctcccccgcccaggaggccgccaccgagggcccctcctccgcctgcgccttctcccaggccccctgcgcccgcgaggtcgacgccaaccgcccctccaccgccttcctcggccagaacgacgtcttcgacttcacccagcccgccggcgtctccggcatggccttcccccgccccaagcgccccgcccccgcccaggaggccgccaccgagggcccctccgccgcctccggcgtcccccagaccggccccggccgcgaggtcgccgccacccgccccaagaccaccaagtccggcaaggccctcgccaagacccgctgggtcgagccccagaacgtcgtcgccgccgccgccgccaaggccaagatggccacctccatccccgagcccgagggcgccgccgccgccaccgcccagcactccgccgagccctgggcccgcatgggcggcaagcgcaccaagaagtccaagcacctcgacgacgagtacgagtcctccgaggaggagcgcgagacccccgccgtcccccccacctggcgcgcctcccagccctccctcaccgtccgcgcccagctcgccccccgcccccccatggccccccgctcccagatcccctcccgccacgtcctctgcctccccccccgcaacgtcaccctcctccaggagcgcgccaacaagctcgtcaagtacctcatgatcaaggactacaagaagatccccatcaagcgcgccgacatgctcaaggacgtcatccgcgagtacgacgagcacttccccgagatcatcgagcgcgccacctacaccctcgagaagaagttcggcatccacctcaaggagatcgacaaggaggagcacctctacatcctcgtctgcacccgcgactcctccgcccgcctcctcggcaagaccaaggacaccccccgcctctccctcctcctcgtcatcctcggcgtcatcttcatgaacggcaaccgcgcctccgaggccgtcctctgggaggccctccgcaagatgggcctccgccccggcgtccgccaccccttcctcggcgacctccgcaagctcatcaccgacgacttcgtcaagcagaagtacctcgagtacaagaagatccccaactccaacccccccgagtacgagttcctctggggcctccgcgcccgccacgagacctccaagatgcgcgtcctccgcttcatcgcccagaaccagaaccgcgacccccgcgagtggaaggcccacttcctcgaggccgtcgacgacgccttcaagaccatggacgtcgacatggccgaggagcacgcccgcgcccagatgcgcgcccagatgaacatcggcgacgaggccctcatcggccgctggtcctgggacgacatccaggtcgagctcctcacctgggacgaggacggcgacttcggcgacgcctgggcccgcatccccttcgccttctgggcccgctaccaccagtacatcctcaactccaaccgcgccaaccgccgcgccacctggcgcgccggcgtctcctccggcaccaacggcggcgcctccacctccgtcctcgacggcccctccacctcctccaccatccgcacccgcaacgccgcccgcgccggcgcctccttcttctcctggatccagcaccgctga

SEQ ID NO: 1804 - RNA, 1122 nt, synthetic construct
  misc_feature 1..1122: note = CAG33449 variant
  source 1..1122: mol_type = other RNA
atgccccccgtccccggcgtccccttccgcaacgtcgacaacgactcccccacctccgtcgagctcgaggactgggtcgacgcccagcaccccaccgacgaggaggaggaggaggcctcctccgcctcctccaccctctacctcgtcttctccccctcctccttctccacctcctcctccctcatcctcggcggccccgaggaggaggaggtcccctccggcgtcatccccaacctcaccgagtccatcccctcctcccccccccagggccccccccagggcccctcccagtcccccctctcctcctgctgctcctccttctcctggtcctccttctccgaggagtcctcctcccagaagggcgaggacaccggcacctgccagggcctccccgactccgagtcctccttcacctacaccctcgacgagaaggtcgccgagctcgtcgagttcctcctcctcaagtacgaggccgaggagcccgtcaccgaggccgagatgctcatgatcgtcatcaagtacaaggactacttccccgtcatcctcaagcgcgcccgcgagttcatggagctcctcttcggcctcgccctcatcgaggtcggccccgaccacttctgcgtcttcgccaacaccgtcggcctcaccgacgagggctccgacgacgagggcatgcccgagaactccctcctcatcatcatcctctccgtcatcttcatcaagggcaactgcgcctccgaggaggtcatctgggaggtcctcaacgccgtcggcgtctacgccggccgcgagcacttcgtctacggcgagccccgcgagctcctcaccaaggtctgggtccagggccactacctcgagtaccgcgaggtcccccactcctcccccccctactacgagttcctctggggcccccgcgcccactccgagtccatcaagaagaaggtcctcgagttcctcgccaagctcaacaacaccgtcccctcctccttcccctcctggtacaaggacgccctcaaggacgtcgaggagcgcgtccaggccaccatcgacaccgccgacgacgccaccgtcatggcctccgagtccctctccgtcatgtcctccaacgtctccttctccgactga

SEQ ID NO: 1805 - RNA, 2874 nt, synthetic construct
  misc_feature 1..2874: note = AAM08354 variant
  source 1..2874: mol_type = other RNA
atgtccctcgtctcccagaactcccgccgccgccgccgccgcgtcgccaaggccaccgcccacaactcctcctggggcgagatgcaggcccccaacgcccccggcctccccgccgacgtccccggctccgacgtcccccagggcccctccgactcccagatcctccagggcctctgcgcctccgagggcccctccacctccgtcctccccacctccgccgagggcccctccaccttcgtcccccccaccatctccgaggcctcctccgcctccggccagcccaccatctccgagggccccggcacctccgtcctccccaccccctccgagggcctctccacctccggcccccccaccatctccaagggcctctgcacctccgtcaccctcgccgcctccgagggccgcaacacctcccgcccccccacctcctccgaggagccctccacctccgtcccccccaccgcctccgaggtcccctccacctccctcccccccacccccggcgagggcacctccacctccgtcccccccaccgcctacgagggcccctccacctccgtcgtccccacccccgacgagggcccctccacctccgtcctccccacccccggcgagggccccggcacctccgtccccctcgccgccaccgagggcctctccacctccgtccaggccacccccgacgagggcccctccacctccgtcccccccaccgccaccgagggcctctccacccccgtcccccccacccgcgacgagggcccctccacctccgtccccgccacccccggcgagggcccctccacctccgtcctccccgccgcctccgacggccagtccatctccctcgtccccacccgcggcaagggctcctccacctccgtcccccccaccgccaccgagggcctctccacctccgtccagcccaccgccggcgagggctcctccacctccgtcccccccacccccggcggcggcctctccacctccgtcccccccaccgccaccgaggagctctccacctccgtcccccccacccccggcgagggcccctccacctccgtcctccccatccccggcgagggcctctccacctccgtcccccccaccgcctccgacggctccgacacctccgtcccccccacccccggcgagggcgcctccaccctcgtccagcccaccgcccccgacggccccggctcctccgtcctccccaaccccggcgagggcccctccaccctcttctcctcctccgcctccgtcgaccgcaacccctccaagtgctccctcgtcctcccctccccccgcgtcaccaaggcctccgtcgactccgactccgagggccccaagggcgccgagggccccatcgagttcgaggtcctccgcgactgcgagtcccccaactccatctccatcatgggcctcaacacctcccgcgtcgccatcaccctcaagccccaggaccccatggagcagaacgtcgccgagctcctccagttcctcctcgtcaaggaccagtccaagtaccccatccgcgagtccgagatgcgcgagtacatcgtcaaggagtaccgcaaccagttccccgagatcctccgccgcgccgccgcccacctcgagtgcatcttccgcttcgagctccgcgagctcgaccccgaggcccacacctacatcctcctcaacaagctcggccccgtccccttcgagggcctcgaggagtcccccaacggccccaagatgggcctcctcatgatgatcctcggccagatcttcctcaacggcaaccaggccaaggaggccgagatctgggagatgctctggcgcatgggcgtccagcgcgagcgccgcctctccatcttcggcaaccccaagcgcctcctctccgtcgagttcgtctggcagcgctacctcgactaccgccccgtcaccgactgcaagcccgtcgagtacgagttcttctggggcccccgctcccacctcgagaccaccaagatgaagatcctcaagttcatggccaagatctacaacaaggaccccatggactggcccgagaagtacaacgaggccctcgaggaggacgccgcccgcgccttcgccgagggctggcaggccctcccccacttccgccgccccttcttcgaggaggccgccgccgaggtcccctcccccgactccgaggtctcctcctactcctccaagtacgccccccactcctggcccgagtcccgcctcgagtccaaggcccgcaagctcgtccagctcttcctcctcatggactccaccaagctccccatccccaagaagggcatcctctactacatcggccgcgagtgctccaaggtcttccccgacctcctcaaccgcgccgcccgcaccctcaaccacgtctacggcaccgagctcgtcgtcctcgacccccgcaaccactcctacaccctctacaaccgccgcgagatggaggagaccgaggagatcgtcgactcccccaaccgccccggcaacaacttcctcatgcaggtcctctccttcatcttcatcatgggcaaccacgcccgcgagtccgccgtctgggccttcctccgcggcctcggcgtccaggccggccgcaagcacgtcatcacctgccgctacctctcccagcgctacatcgactccctccgcgtccccgactccgaccccgtccagtacgagttcgtctggggcccccgcgcccgcctcgagacctccaagatgaaggccctccgctacgtcgcccgcatccaccgcaaggagccccaggactggccccagcagtaccgcgaggccatggaggacgaggccaaccgcgccgacgtcggccaccgccagatcttcgtccacaacttccgctga

SEQ ID NO: 1806 - RNA, 1572 nt, synthetic construct
  misc_feature 1..1572: note = AAH93964 variant
  source 1..1572: mol_type = other RNA
atgtccctcgtctcccagaacgcccgccactgctccgccgagatcaccgccgactacggcgacggccgcggcgagatccaggccaccaacgcctccggctcccccacctccatgctcgtcgtcgacgccccccagtgcccccaggcccccatcaactcccagtgcgtcaacacctcccaggccgtccaggaccccaacgacctcgaggtcctcatcgacgagcagtcccgccgcctcggcgccctccgcgtccacgaccccctcgaggaccgctccatcgccctcgtcaacttcatgcgcatgaagtcccagaccgagggctccatccagcagtccgagatgctcgagttcctccgcgagtactccgaccagttccccgagatcctccgccgcgcctccgcccacctcgaccaggtcttcggcctcaacctccgcgtcatcgacccccaggccgacacctacaacctcgtctccaagcgcggcttccagatcaccgaccgcatcgccgagtccctcgacatgcccaaggcctccctcctcgccctcgtcctcggccacatcctcctcaacggcaaccgcgcccgcgaggcctccatctgggacctcctcctcaaggtcgacatgtgggacaagccccagcgcatcaacaacctcttcggcaacacccgcaacctcctcaccaccgacttcgtctgcatgcgcttcctcgagtactggcccgtctacggcaccaaccccctcgagttcgagttcctctggggctcccgcgcccaccgcgagatcaccaagatggaggccctcaagttcgtctccgacgcccacgacgaggagccctggtcctggcccgaggagtacaacaaggccctcgagggcgacaagaccaaggagcgctccctcaccgccggcctcgagttctggtccgaggacaccatgaacgacaaggccaacgacctcgtccagctcgccatctccgtcaccgaggagatgctccccatccaccaggacgagctcctcgcccacaccggcaaggagttcgaggacgtcttccccaacatcctcaaccgcgccaccctcatcctcgacatgttctacggcctctccctcatcgaggtcgacacctccgagcacatctacctcctcgtccagcagcccgagtccgaggaggagcaggtcatgctcgagtccctcggccgccccacccaggagtacgtcatgcccatcctcggcctcatcttcctcatgggcaaccgcgtcaaggaggccaacgtctggaacctcctccgccgcttctccgtcgacgtcggccgcaagcactccatcacccgcaagctcatgcgccagcgctacctcgagtgccgccccctctcctactccaaccccgtcgagtacgagctcctctggggcccccgcgcccaccacgagaccatcaagatgaaggtcctcgagtacatggcccgcctctaccgcaagcgcccccagaactggcccgagcagtaccgcgaggccgtcgaggacgaggaggcccgcgccaagtccgaggccaccatcatgttcttcctcgaccccacctga

SEQ ID NO: 1807 - RNA, 924 nt, synthetic construct
  misc_feature 1..924: note = CCDS3269.1 variant
  source 1..924: mol_type = other RNA
atgctccagacccccgagtcccgcggcctccccgtcccccaggccgagggcgagaaggacggcggccacgacggcgagacccgcgcccccaccgcctcccaggagcgccccaaggaggagctcggcgccggccgcgaggagggcgccgccgagcccgccctcacccgcaagggcgcccgcgccctcgccgccaaggccctcgcccgccgccgcgcctaccgccgcctcaaccgcaccgtcgccgagctcgtccagttcctcctcgtcaaggacaagaagaagtcccccatcacccgctccgagatggtcaagtacgtcatcggcgacctcaagatcctcttccccgacatcatcgcccgcgccgccgagcacctccgctacgtcttcggcttcgagctcaagcagttcgaccgcaagcaccacacctacatcctcatcaacaagctcaagcccctcgaggaggaggaggaggaggacctcggcggcgacggcccccgcctcggcctcctcatgatgatcctcggcctcatctacatgcgcggcaactccgcccgcgaggcccaggtctgggagatgctccgccgcctcggcgtccagccctccaagtaccacttcctcttcggctaccccaagcgcctcatcatggaggacttcgtccagcagcgctacctctcctaccgccgcgtcccccacaccaacccccccgagtacgagttctcctggggcccccgctccaacctcgagatctccaagatggaggtcctcggcttcgtcgccaagctccacaagaaggagccccagcactggcccgtccagtaccgcgaggccctcgccgacgaggccgaccgcgcccgcgccaaggcccgcgccgaggcctccatgcgcgcccgcgcctccgcccgcgccggcatccacctctggtga

SEQ ID NO: 1808 - RNA, 660 nt, synthetic construct
  misc_feature 1..660: note = AAD31314 variant
  source 1..660: mol_type = other RNA
atgccccgcggccgcaagtcccgccgccgccgcaacgcccgcgccgccgaggagaaccgcaacaaccgcaagatccaggcctccgaggcctccgagacccccatggccgcctccgtcgtcgcctccacccccgaggacgacctctccggccccgaggaggacccctccacccccgaggaggcctccaccacccccgaggaggcctcctccaccgcccaggcccagaagccctccgtcccccgctccaacttccagggcaccaagaagtccctcctcatgtccatcctcgccctcatcttcatcatgggcaactccgccaaggaggccctcgtctggaaggtcctcggcaagctcggcatgcagcccggccgccagcactccatcttcggcgaccccaagaagatcgtcaccgaggagttcgtccgccgcggctacctcatctacaagcccgtcccccgctcctcccccgtcgagtacgagttcttctggggcccccgcgcccacgtcgagtcctccaagctcaaggtcatgcacttcgtcgcccgcgtccgcaaccgctgctccaaggactggccctgcaactacgactgggactccgacgacgacgccgaggtcgaggccatcctcaactccggcgcccgcggctactccgccccctga

SEQ ID NO: 1809 - RNA, 3750 nt, synthetic construct
  misc_feature 1..3750: note = CCDS73700.1 variant
  source 1..3750: mol_type = other RNA
atgtcccagctctccaagaacctcggcgactcctccccccccgccgaggcccccaagccccccgtctactcccgccccaccgtcctcatgcgcgccccccccgcctcctcccgcgccccccccgtcccctgggaccccccccccatcgacctccaggcctccctcgccgcctggcaggccccccagcccgcctgggaggccccccagggccagctccccgcccccgtcgtccccatgacccagccccccgccctcggcggccccatcgtccccgccccccccctcggcggccccatgggcaagccccccacccccggcgtcctcatggtccacccccccccccccggcgcccccatggcccagccccccacccccggcgtcctcatggtccacccctccgcccccggcgcccccatggcccacccccccccccccggcacccccatgtcccacccccccccccccggcacccccatggcccacccccccccccccggcacccccatggcccacccccccccccccggcacccccatggtccacccccccccccccggcacccccatggcccacccccccccccccggcacccccatggcccacccccccccccccggcacccccatggcccacccccccccccccggcacccccatggcccacccccccccccccggcacccccatggcccagccccccgcccccggcgtcctcatggcccagcccctcacccccggcgtcctcatggtccagcccgccgcccccggcgcccccatggtccagcccccccccgccgccatgatgacccagccccagccctccggcgcccccatggccaagccccccggccccggcgtcctcatgatccacccccccggcgcccgcgcccccatgacccagccccccgcctccggcgcccccatggcccagcccgccgccccccccgcccagcccatggccccccccgcccagcccatggcctcctgggccccccaggcccagcccctcatcctccagatccagtcccaggtcatccgcgcccccccccaggtcccccagggcccccaggccccccccgcccagctcgccaccccccccggctggcaggccacctcccccggctggcaggccacccagcagggctggcaggccacccccctcacctggcagaccacccaggtcacctggcaggcccccgccgtcacctggcaggtccccccccccatgcgccagggccccccccccatccgccccggccccccccccatccgccccggccccccccccgtccgccaggccccccccctcatccgccaggccccccccgtcatccgccaggccccccccgtcatccgccaggccccccccgtcatccgccaggcccccgccgtcatccgccaggccccccccgtcatccgccaggccccccccgtcatccgccaggccccccccgtcatccgccaggccccccccctcatccgccaggcccccccccccatccgccccgccccccaggtcctcgccacccagccccccctctggcaggccctccccccccccccccccctccgccaggccccccaggcccgcctccccgccccccaggtccaggccgccccccaggtccccaccgccccccccgccacccaggtccccgccgccccccccgccggcccccaggtcccccagcccgtcctccccgcccccctctccgcccccctctccgccccccaggccgtccactgcccctccatcatctggcaggcccccaagggccagccccccgtcccccacgagatccccacctccatggagttccaggaggtccagcagacccaggccctcgcctggcaggcccagaaggcccccacccacatctggcagcccctccccgcccaggaggcccagcgccaggccccccccctcgtccagctcgagcagcccttccagggcgcccccccctcccagaaggccgtccagatccagctccccccccagcaggcccaggcctccggcccccaggccgaggtccccaccctccccctccagccctcctggcaggccccccccgccgtcctccaggcccagcccggcccccccgtcgccgccgccaacttccccctcggctccgccaagtccctcatgaccccctccggcgagtgccgcgcctcctccatcgaccgccgcggctcctccaaggagcgccgcacctcctccaaggagcgccgcgccccctccaaggaccgcatgatcttcgccgccaccttctgcgcccccaaggccgtctccgccgcccgcgcccacctccccgccgcctggaagaacctccccgccacccccgagaccttcgccccctcctcctccgtcttccccgccacctcccagttccagcccgcctccctcaacgccttcaagggcccctccgccgcctccgagacccccaagtccctcccctacgccctccaggaccccttcgcctgcgtcgaggccctccccgccgtcccctgggtcccccagcccaacatgaacgcctccaaggcctcccaggccgtccccaccttcctcatggccaccgccgccgccccccaggccaccgccaccacccaggaggcctccaagacctccgtcgagcccccccgccgctccggcaaggccacccgcaagaagaagcacctcgaggcccaggaggactcccgcggccacaccctcgccttccacgactggcagggcccccgcccctgggagaacctcaacctctccgactgggaggtccagtcccccatccaggtctccggcgactgggagcaccccaacaccccccgcggcctctccggctgggagggcccctccacctcccgcatcctctccggctgggagggcccctccgcctcctgggccctctccgcctgggagggcccctccacctcccgcgccctcggcctctccgagtcccccggctcctccctccccgtcgtcgtctccgaggtcgcctccgtctcccccggctcctccgccacccaggacaactccaaggtcgaggcccagcccctctcccccctcgacgagcgcgccaacgccctcgtccagttcctcctcgtcaaggaccaggccaaggtccccgtccagcgctccgagatggtcaaggtcatcctccgcgagtacaaggacgagtgcctcgacatcatcaaccgcgccaacaacaagctcgagtgcgccttcggctaccagctcaaggagatcgacaccaagaaccacgcctacatcatcatcaacaagctcggctaccacaccggcaacctcgtcgcctcctacctcgaccgccccaagttcggcctcctcatggtcgtcctctccctcatcttcatgaagggcaactgcgtccgcgaggacctcatcttcaacttcctcttcaagctcggcctcgacgtccgcgagaccaacggcctcttcggcaacaccaagaagctcatcaccgaggtcttcgtccgccagaagtacctcgagtaccgccgcatcccctacaccgagcccgccgagtacgagttcctctggggcccccgcgccttcctcgagacctccaagatgctcgtcctccgcttcctcgccaagctccacaagaaggacccccagtcctggcccttccactacctcgaggccctcgccgagtgcgagtgggaggacaccgacgaggacgagcccgacaccggcgactccgcccacggccccacctcccgcccccccccccgctga

SEQ ID NO: 1810 - RNA, 282 nt, synthetic construct
  misc_feature 1..282: note = AAC39608 variant
  source 1..282: mol_type = other RNA
atgaagctcctcatggtcctcatgctcgccgccctctcccagcactgctacgccggctccggctgccccctcctcgagaacgtcatctccaagaccatcaacccccaggtctccaagaccgagtacaaggagctcctccaggagttcatcgacgacaacgccaccaccaacgccatcgacgagctcaaggagtgcttcctcaaccagaccgacgagaccctctccaacgtcgaggtcttcatgcagctcatctacgactcctccctctgcgacctcttctga

SEQ ID NO: 1811 - RNA, 363 nt, synthetic construct
  misc_feature 1..363: note = AAH67220 variant
  source 1..363: mol_type = other RNA
atgaagctcctcatggtcctcatgctcgccgccctctcccagcactgctacgccggctccggctgccccctcctcgagaacgtcatctccaagaccatcaacccccaggtctccaagaccgagtacaaggagctcctccaggagttcatcgacgacaacgccaccaccaacgccatcgacgagctcaaggagtgcttcctcaaccagaccgacgagaccctctccaacgtcgaggtcttcatggtcatctccttctcctcctacaagctcttcaagtcccccgaccagggccaggtcggctcctccttcctcaccgacaacgccaaggccacctccgagcaggccttctcctacatcggctga

SEQ ID NO: 1812 - RNA, 357 nt, synthetic construct
  misc_feature 1..357: note = AAA19238 variant
  source 1..357: mol_type = other RNA
atgccccgcgaggacgcccacttcatctacggctaccccaagaagggccacggccactcctacaccaccgccgaggaggccgccggcatcggcatcctcaccgtcatcctcggcgtcctcctcctcatcggctgctggtactgccgccgccgcaacggctaccgcgccctcatggacaagtccctccacgtcggcacccagtgcgccctcacccgccgctgcccccaggagggcttcgaccaccgcgactccaaggtctccctccaggagaagaactgcgagcccgtcgtccccaacgccccccccgcctacgagaagctctccgccgagcagtccccccccccctactccccctga

SEQ ID NO: 1813 - RNA, 1482 nt, synthetic construct
  misc_feature 1..1482: note = EAW93427 variant
  source 1..1482: mol_type = other RNA
atgctcccccgctgggagctcgccctctacctcctcgcctccctcggcttccacttctactccttctacgaggtctacaaggtctcccgcgagcacgaggaggagctcgaccaggagttcgagctcgagaccgacaccctcttcggcggcctcaagaaggacgccaccgacttcgagtggtccttctggatggagtggggcaagcagtggctcgtctggctcctcctcggccacatggtcgtctcccagatggccaccctcctcgcccgcaagcaccgcccctggatcctcatgctctacggcatgtgggcctgctggtgcgtcctcggcacccccggcgtcgccatggtcctcctccacaccaccatctccttctgcgtcgcccagttccgctcccagctcctcacctggctctgctccctcctcctcctctccaccctccgcctccagggcgtcgaggaggtcaagcgccgctggtacaagaccgagaacgagtactacctcctccagttcaccctcaccgtccgctgcctctactacacctccttctccctcgagctctgctggcagcagctccccgccgcctccacctcctactccttcccctggatgctcgcctacgtcttctactaccccgtcctccacaacggccccatcctctccttctccgagttcatcaagcagatgcagcagcaggagcacgactccctcaaggcctccctctgcgtcctcgccctcggcctcggccgcctcctctgctggtggtggctcgccgagctcatggcccacctcatgtacatgcacgccatctactcctccatccccctcctcgagaccgtctcctgctggaccctcggcggcctcgccctcgcccaggtcctcttcttctacgtcaagtacctcgtcctcttcggcgtccccgccctcctcatgcgcctcgacggcctcaccccccccgccctcccccgctgcgtctccaccatgttctccttcaccggcatgtggcgctacttcgacgtcggcctccacaacttcctcatccgctacgtctacatccccgtcggcggctcccagcacggcctcctcggcaccctcttctccaccgccatgaccttcgccttcgtctcctactggcacggcggctacgactacctctggtgctgggccgccctcaactggctcggcgtcaccgtcgagaacggcgtccgccgcctcgtcgagaccccctgcatccaggactccctcgcccgctacttctccccccaggcccgccgccgcttccacgccgccctcgcctcctgctccacctccatgctcatcctctccaacctcgtcttcctcggcggcaacgaggtcggcaagacctactggaaccgcatcttcatccagggctggccctgggtcaccctctccgtcctcggcttcctctactgctactcccacgtcggcatcgcctgggcccagacctacgccaccgactga

SEQ ID NO: 1814 - RNA, 954 nt, synthetic construct
  misc_feature 1..954: note = AAD41349 variant
  source 1..954: mol_type = other RNA
atggccgtccagggctcccagcgccgcctcctcggctccctcaactccacccccaccgccatcccccagctcggcctcgccgccaaccagaccggcgcccgctgcctcgaggtctccatctccgacggcctcttcctctccctcggcctcgtctccctcgtcgagaacgccctcgtcgtcgccaccatcgccaagaaccgcaacctccactcccccatgtactgcttcatctgctgcctcgccctctccgacctcctcgtctccggctccaacgtcctcgagaccgccgtcatcctcctcctcgaggccggcgccctcgtcgcccgcgccgccgtcctccagcagctcgacaacgtcatcgacgtcatcacctgctcctccatgctctcctccctctgcttcctcggcgccatcgccgtcgaccgctacatctccatcttctacgccctccgctaccactccatcgtcaccctcccccgcgcccgccgcgccgtcgccgccatctgggtcgcctccgtcgtcttctccaccctcttcatcgcctactacgaccacgtcgccgtcctcctctgcctcgtcgtcttcttcctcgccatgctcgtcctcatggccgtcctctacgtccacatgctcgcccgcgcctgccagcacgcccagggcatcgcccgcctccacaagcgccagcgccccgtccaccagggcttcggcctcaagggcgccgtcaccctcaccatcctcctcggcatcttcttcctctgctggggccccttcttcctccacctcaccctcatcgtcctctgccccgagcaccccacctgcggctgcatcttcaagaacttcaacctcttcctcgccctcatcatctgcaacgccatcatcgaccccctcatctacgccttccactcccaggagctccgccgcaccctcaaggaggtcctcacctgctcctggtga

SEQ ID NO: 1815 - RNA, 954 nt, synthetic construct; identical to SEQ ID NO: 1814
  misc_feature 1..954: note = AHC09522 variant
  source 1..954: mol_type = other RNA

SEQ ID NO: 1816 - RNA, 954 nt, synthetic construct
  misc_feature 1..954: note = AHC09804 variant
  source 1..954: mol_type = other RNA
atggccgtccagggctcccagcgccgcctcctcggctccctcaactccacccccaccgccatcccccagctcggcctcgccgccaaccagaccggcgcccgctgcctcgaggtctccatctccgacggcctcttcctctccctcggcctcgtctccctcgtcgagaacgccctcgtcgtcgccaccatcgccaagaaccgcaacctccactcccccatgtactgcttcatctgctgcctcgccctctccgacctcctcgtctccggctccaacgtcctcgagaccgccgtcatcctcctcctcgaggccggcgccctcgtcgcccgcgccgccgtcctccagcagctcgacaacgtcatcgacgtcatcacctgctcctccatgctctcctccctctgcttcctcggcgccatcgccgtcgaccgctacatctccatcttctacgccctccgctaccactccatcgtcaccctcccccgcgcccgccaggccgtcgccgccatctgggtcgcctccgtcgtcttctccaccctcttcatcgcctactacgaccacgtcgccgtcctcctctgcctcgtcgtcttcttcctcgccatgctcgtcctcatggccgtcctctacgtccacatgctcgcccgcgcctgccagcacgcccagggcatcgcccgcctccacaagcgccagcgccccgtccaccagggcttcggcctcaagggcgccgtcaccctcaccatcctcctcggcatcttcttcctctgctggggccccttcttcctccacctcaccctcatcgtcctctgccccgagcaccccacctgcggctgcatcttcaagaacttcaacctcttcctcgccctcatcatctgcaacgccatcatcgaccccctcatctacgccttccactcccaggagctccgccgcaccctcaaggaggtcctcacctgctcctggtga

SEQ ID NO: 1817 - RNA, 954 nt, synthetic construct
  misc_feature 1..954: note = BAE94313 variant
  source 1..954: mol_type = other RNA
atggccgtccagggctcccagcgccgcctcctcggctccctcaactccacccccaccgccatcccccagctcggcctcgccgccaaccagaccggcgcccgctgcctcgaggtctccatctccgacggcctcttcctctccctcggcctcgtctccctcgtcgagaacgccctcgtcgtcgccaccatcgccaagaaccgcaacctccactcccccatgtactgcttcatctgctgcctcgccctctccgacctcctcgtctccggctccaacgtcctcgagaccgccgtcatcctcctcctcgaggccggcgccctcgtcgcccgcgccgccgtcctccagcagctcgacaacgtcaccgacgtcatcacctgctcctccatgctctcctccctctgcttcctcggcgccatcgccgtcgaccgctacatctccatcttctacgccctccgctaccactccatcgtcaccctcccccgcgcccgccgcgccgtcgccgccatctgggtcgcctccgtcgtcttctccaccctcttcatcgcctactacgaccacgtcgccgtcctcctctgcctcgtcgtcttcttcctcgccatgctcgtcctcatggccgtcctctacgtccacatgctcgcccgcgcctgccagcacgcccagggcatcgcccgcctccacaagcgccagcgccccgtccaccagggcttcggcctcaagggcgccgtcaccctcaccatcctcctcggcatcttcttcctctgctggggccccttcttcctccacctcaccctcatcgtcctctgccccgagcaccccacctgcggctgcatcttcaagaacttcaacctcttcctcgccctcatcatctgcaacgccatcatcgaccccctcatctacgccttccactcccaggagctccgccgcaccctcaaggaggtcctcacctgctcctggtga

SEQ ID NO: 1818 - RNA, 954 nt, synthetic construct
  misc_feature 1..954: note = AHC09531 variant
  source 1..954: mol_type = other RNA
atggccgtccagggctcccagcgccgcctcctcggctccctcaactccacccccaccgccatcccccagctcggcctcgccgccaaccagaccggcgcccgctgcctcgaggtctccatctccgacggcctcttcctctccctcggcctcgtctccctcgtcgagaacgccctcgtcgtcgccaccatcgccaagaaccgcaacctccactcccccatgtactgcttcatctgctgcctcgccctctccgacctcctcgtctccggctccaacatgctcgagaccgccgtcatcctcctcctcgaggccggcgccctcgtcgcccgcgccgccgtcctccagcagctcgacaacgtcatcgacgtcatcacctgctcctccatgctctcctccctctgcttcctcggcgccatcgccgtcgaccgctacatctccatcttctacgccctccgctaccactccatcgtcaccctcccccgcgcccgccgcgccgtcgccgccatctgggtcgcctccgtcgtcttctccaccctcttcatcgcctactacgaccacgtcgccgtcctcctctgcctcgtcgtcttcttcctcgccatgctcgtcctcatggccgtcctctacgtccacatgctcgcccgcgcctgccagcacgcccagggcatcgcccgcctccacaagcgccagcgccccgtccaccagggcttcggcctcaagggcgccgtcaccctcaccatcctcctcggcatcttcttcctctgctggggccccttcttcctccacctcaccctcatcgtcctctgccccgagcaccccacctgcggctgcatcttcaagaacttcaacctcttcctcgccctcatcatctgcaacgccatcatcgaccccctcatctacgccttccactcccaggagctccgccgcaccctcaaggaggtcctcacctgctcctggtga

SEQ ID NO: 1819 - RNA, 954 nt, synthetic construct
  misc_feature 1..954: note = BAE94311 variant
  source 1..954: mol_type = other RNA
atggccgtccagggctcccagcgccgcctcctcggctccctcaactccacccccaccgccatcccccagctcggcctcgccgccaaccagaccggcgcccgctgcctcgaggtctccatctccgacggcctcttcctctccctcggcctcgtctccctcgtcgagaacgccctcgtcgtcgccaccatcgccaagaaccagaacctccactcccccatgtactgcttcatctgctgcctcgccctctccgacctcctcgtctccggctccaacgtcctcgagaccgccgtcatcctcctcctcgaggccggcgccctcgtcgcccgcgccgccgtcctccagcagctcgacaacgtcatcgacgtcatcacctgctcctccatgctctcctccctctgcttcctcggcgccatcgccgtcgaccgctacatctccatcttctacgccctccgctaccactccatcgtcaccctcccccgcgcccgccaggccgtcgccgccatctgggtcgcctccgtcgtcttctccaccctcttcatcgcctactacgaccacgtcgccgtcctcctctgcctcgtcgtcttcttcctcgccatgctcgtcctcatggccgtcctctacgtccacatgctcgcccgcgcctgccagcacgcccagggcatcgcccgcctccacaagcgccagcgccccgtccaccagggcttcggcctcaagggcgccgtcaccctcaccatcctcctcggcatcttcttcctctgctggggccccttcttcctccacctcaccctcatcgtcctctgccccgagcaccccacctgcggctgcatcttcaagaacttcaacctcttcctcgccctcatcatctgcaacgccatcatcgaccccctcatctacgccttccactcccaggagctccgccgcaccctcaaggaggtcctcacctgctcctggtga

SEQ ID NO: 1820 - RNA, 954 nt, synthetic construct
  misc_feature 1..954: note = BAE94309 variant
  source 1..954: mol_type = other RNA
atggccgtccagggctcccagcgccgcctcctcggctccctcaactccacccccaccgccatcccccagctcggcctcgccgccaaccagaccggcgcccgctgcctcgaggtctccatctccgacggcctcttcctctccctcggcctcgtctccctcgtcgagaacgccctcgtcgtcgccaccatcgccaagaaccgcaacctccactcccccatgtactgcttcatctgctgcctcgccctctccgacctcctcgtctccggctccaacgtcctcgagaccgccgtcatcctcctcctcgaggccggcgccctcgtcgcccgcgccgccgtcctccagcagctcgacaacgtcatcgacgtcatcacctgctcctccatgctctcctccctctgcttcctcggcgccatcgccgtcgaccgctacatctccatcttctacgccctccgctaccactccatcgtcaccctcccccgcgcccgccaggccgtcggcgccatctgggtcgcctccgtcgtcttctccaccctcttcatcgcctactacgaccacgtcgccgtcctcctctgcctcgtcgtcttcttcctcgccatgctcgtcctcatggccgtcctctacgtccacatgctcgcccgcgcctgccagcacgcccagggcatcgcccgcctccacaagcgccagcgccccgtccaccagggcttcggcctcaagggcgccgtcaccctcaccatcctcctcggcatcttcttcctctgctggggccccttcttcctccacctcaccctcatcgtcctctgccccgagcaccccacctgcggctgcatcttcaagaacttcaacctcttcctcgccctcatcatctgcaacgccatcatcgaccccctcatctacgccttccactcccaggagctccgccgcaccctcaaggaggtcctcacctgctcctggtga

SEQ ID NO: 1821 - RNA, 954 nt, synthetic construct
  misc_feature 1..954: note = BAE94308 variant
  source 1..954: mol_type = other RNA
atggccgtccagggctcccagcgccgcctcctcggctccctcaactccacccccaccgccatcccccagctcggcctcgccgccaaccagaccggcgcccgctgcctcgaggtctccatctccgacggcctcttcctctccctcggcctcgtctccctcgtcgagaacgccctcgtcgtcgccaccatcgccaagaaccgcaacctccactcccccatgtactgcttcatctgctgcctcgccctctccgacctcctcgtctccggctccaacgtcctcgagaccgccgtcatcctcctcctcgaggccggcgccctcgtcgcccgcgccgccgtcctccagcagctcgacaacgtcaccgacgtcatcacctgctcctccatgctctcctccctctgcttcctcggcgccatcgccgtcgaccgctacatctccatcttctacgccctccgctaccactccatcgtcaccctcacccgcgcccgccgcgccgtcgccgccatctgggtcgcctccgtcgtcttctccaccctcttcatcgcctactacgaccacgtcgccgtcctcctctgcctcgtcgtcttcttcctcgccatgctcgtcctcatggccgtcctctacgtccacatgctcgcccgcgcctgccagcacgcccagggcatcgcccgcctccacaagcgccagcgccccgtccaccagggcttcggcctcaagggcgccgtcaccctcaccatcctcctcggcatcttcttcctctgctggggccccttcttcctccacctcaccctcatcgtcctctgccccgagcaccccacctgcggctgcatcttcaagaacttcaacctcttcctcgccctcatcatctgcaacgccatcatcgaccccctcatctacgccttccactcccaggagctccgccgcaccctcaaggaggtcctcacctgctcctggtga

SEQ ID NO: 1822 - RNA, 954 nt, synthetic construct
  misc_feature 1..954: note = BAE94307 variant
  source 1..954: mol_type = other RNA
atggccgtccagggctcccagcgccgcctcctcggctccctcaactccacccccaccgccatcccccagctcggcctcgccgccaaccagaccggcgcccgctgcctcgaggtctccatctccgacggcctcttcctctccctcggcctcgtctccctcgtcgagaacgccctcgtcgtcgccaccatcgccaagaaccgcaacctccactcccccatgtactgcttcatctgctgcctcgccctctccgacctcctcgtctccggctccaacatgctcgagaccgccgtcatcctcctcctcgaggccggcgccctcgtcgcccgcgccgccgtcctccagcagctcgacaacgtcatcgacgtcatcacctgctcctccatgctctcctccctctgcttcctcggcgccatcgccgtcgaccgctacatctccatcttctacgccctccgctaccactccatcgtcatcctcccccgcgcccgccgcgccgtcgccgccatctgggtcgcctccgtcgtcttctccaccctcttcatcgcctactacgaccacgtcgccgtcctcctctgcctcgtcgtcttcttcctcgccatgctcgtcctcatggccgtcctctacgtccacatgctcgcccgcgcctgccagcacgcccagggcatcgcccgcctccacaagcgccagcgccccgtccaccagggcttcggcctcaagggcgccgtcaccctcaccatcctcctcggcatcttcttcctctgctggggccccttcttcctccacctcaccctcatcgtcctctgccccgagcaccccacctgcggctgcatcttcaagaacttcaacctcttcctcgccctcatcatctgcaacgccatcatcgaccccctcatctacgccttccactcccaggagctccgccgcaccctcaaggaggtcctcacctgctcctggtga

SEQ ID NO: 1823 - RNA, 951 nt, synthetic construct
  misc_feature 1..951: note = BAE94306 variant
  source 1..951: mol_type = other RNA
atggccgtccagggctcccagcgccgcctcctcggctccctcaactccacccccaccgccatcccccagctcggcctcgccgccaaccagaccggcgcccgctgcctcgaggtctccatctccgacggcctcttcctctccctcggcctcgtctccctcgtcgagaacgccctcgtcgtcgccaccatcgccaagaaccgcaacctccactcccccatgtactgcttcatctgctgcctcgccctctccgacctcctcgtctccggctccaacgtcctcgagaccgccgtcatcctcctcctcgaggccggcgccctcgtcgcccgcgccgccgtcctccagcagctcgacaacgtcatcgacgtcatcacctgctcctccatgctctcctccctctgcttcctcggcgccatcgccgtcgaccgctacatctccatctacgccctccgctaccactccatcgtcaccctcccccgcgcccgccaggccgtcgccgccatctgggtcgcctccgtcgtcttctccaccctcttcatcgcctactacgaccacgtcgccgtcctcctctgcctcgtcgtcttcttcctcgccatgctcgtcctcatggccgtcctctacgtccacatgctcgcccgcgcctgccagcacgcccagggcatcgcccgcctccacaagcgccagcgccccgtccaccagggcttcggcctcaagggcgccgtcaccctcaccatcctcctcggcatcttcttcctctgctggggccccttcttcctccacctcaccctcatcgtcctctgccccgagcaccccacctgcggctgcatcttcaagaacttcaacctcttcctcgccctcatcatctgcaacgccatcatcgaccccctcatctacgccttccactcccaggagctccgccgcaccctcaaggaggtcctcacctgctcctggtga

SEQ ID NO: 1824 - RNA, 954 nt, synthetic construct
  misc_feature 1..954: note = AAQ62977 variant
  source 1..954: mol_type = other RNA
atggccgtccagggctcccagcgccgcctcctcggctccctcaactccacccccaccgccatcccccagctcggcctcgccgccaaccagaccggcgcccgctgcctcgaggtctccatctccgacggcctcttcctctccctcggcctcgtctccctcgtcgagaacgccctcgtcgtcgccaccatcgccaagaaccgcaacctccactcccccatgtactgcttcatctgctgcctcgccctctccgacctcctcgtctccggctccaacgtcctcgagaccgccgtcatcctcctcctcgaggccggcgccctcgtcgcccgcgccgccgtcctccagcagctcgacaacgtcatcgacgtcatcacctgctcctccatgctctcctccctctgcttcctcggcgccatcgccgtcgaccgctacatctccatcttctacgccctccgctaccactccatcgtcaccctcccccgcgcccgccgcgccgtcgccgccatctgggtcgcctccgtcgtcttctccaccctcttcatcgcctactacgaccacgtcgccgtcctcctctgcctcgtcgtcttcttcctcgccatgctcgtcctcatggccgtcctctacgtccacatgctcgcccgcgcctgccagcacgcccagggcatcgcccgcctccacaagcgccagcgccccgtccaccagggcttcggcctcaagggcgccgtcaccctcaccatcctcctcggcatcttcttcctctgctggggccccttcttcctccacctcaccctcatcatcctctgccccgagcaccccacctgcggctgcatcttcaagaacttcaacctcttcctcgccctcatcatctgcaacgccatcatcgaccccctcatctacgccttccactcccaggagctccgccgcaccctcaaggaggtcctcacctgctcctggtga

SEQ ID NO: 1825 - RNA, 954 nt, synthetic construct
  misc_feature 1..954: note = AAQ62975 variant
  source 1..954: mol_type = other RNA
atggccgtccagggctcccagcgccgcctcctcggctccctcaactccacccccaccgccatcccccagctcggcctcgccgccaaccagaccggcgcccgctgcctcgaggtctccatctccgacggcctcttcctctccctcggcctcgtctccctcgtcgagaacgccctcgtcgtcgccaccatcgccaagaaccgcaacctccactcccccatgtactgcttcatctgctgcctcgccctctccgacctcctcgtctccggctccaacgtcctcgagaccgccgtcatcctcctcctcgaggccggcgccctcgtcgcccgcgccgtcgtcctccagcagctcgacaacgtcatcgacgtcatcacctgctcctccatgctctcctccctctgcttcctcggcgccatcgccgtcgaccgctacatctccatcttctacgccctccgctaccactccatcgtcaccctcccccgcgcccgccgcgccgtcgccgccatctgggtcgcctccgtcgtcttctccaccctcttcatcgcctactacgaccacgtcgccgtcctcctctgcctcgtcgtcttcttcctcgccatgctcgtcctcatggccgtcctctacgtccacatgctcgcccgcgcctgccagcacgcccagggcatcgcccgcctccacaagcgccagcgccccgtccaccagggcttcggcctcaagggcgccgtcaccctcaccatcctcctcggcatcttcttcctctgctggggccccttcttcctccacctcaccctcatcgtcctctgccccgagcaccccacctgcggctgcatcttcaagaacttcaacctcttcctcgccctcatcatctgcaacgccatcatcgaccccctcatctacgccttccactcccaggagctccgccgcaccctcaaggaggtcctcacctgctcctggtga

SEQ ID NO: 1826 - RNA, 954 nt, synthetic construct
  misc_feature 1..954: note = AAQ62974 variant
  source 1..954: mol_type = other RNA
atggccgtccagggctcccagcgccgcctcctcggctccctcaactccacccccaccgccatcccccagctcggcctcgccgccaaccagaccggcgcccgctgcctcgaggtctccatctccgacggcctcttcctctccctcggcctcgtctccctcgtcgagaacgccctcgtcgtcgccaccatcgccaagaaccgcaacctccactcccccatgtactgcttcatctgctgcctcgccctctccgacctcctcgtctccggctccaacgtcctcgagaccgccgtcatcctcctcctcgaggccggcgccctcgtcgcccgcgccgccgtcctccagcagctcgacaacgtcatcgacgtcatcacctgctcctccatgctctcctccctctgcttcctcggcgccatcgccgtcgaccgctacatctccatcttctacgccctccgctaccactccatcgtcaccctcccccgcgcccgccgcgccgtcgccgccatctgggtcgcctccgtcgtcttctccaccctcttcatcgcctactacgaccacgtcgccgtcctcctctgcctcgtcgtcttcttcctcgccatgctcgtcctcatggccgtcctctacgtccacatgctcgcccgcgcctgccagcacgcccagggcatcgcccgcctccacaagcgccagcgccccgtccaccagggcttcggcctcaagggcgccgtcaccctcaccatcctcctcggcatcttcttcctctgctggggccccttcttcctccacctcaccctcatcgtcctctgccccgagcaccccacctgcggctgcatcttcaagaacttcaacctcttcctcgccctcatcatctgcaacgccatcatcgaccccctcatctacgccttccactcccaggagctccgccgcaccctcaaggaggtcctcacccgctcctggtga

SEQ ID NO: 1827 - RNA, 954 nt, synthetic construct
  misc_feature 1..954: note = AAQ62973 variant
  source 1..954: mol_type = other RNA
atggccgtccagggctcccagcgccgcctcctcggctccctcaactccacccccaccgccatcccccagctcggcctcgccgccaaccagaccggcgcccgctgcctcgaggtctccatctccgacggcctcttcctctccctcggcctcgtctccctcgtcgagaacgccctcgtcgtcgccaccatcgccaagaaccgcaacctccactcccccatgtactgcttcatctgctgcctcgccctctccgacctcctcgtctccggctccaacgtcctcgagaccgccgtcatcctcctcctcgaggccggcgccctcgtcgcccgcgccgccgtcctccagcagctcgacaacgtcatcgacgtcatcacctgctcctccatgctctcctccctctgcttcctcggcgccatcgccgtcgaccgctacatctccatcttctacgccctccgctaccactccatcgtcaccctcccccgcgcccgccgcgccgtcgccgccatctgggtcgcctccgtcgtcttctccaccctcttcatcgcctactacgaccacgtcgccgtcctcctctgcctcgtcgtcttcttcctcgccatgctcgtcctcatggccgtcctctacgtccacatgctcgcccgcgcctgccagcacgcccagggcatcgcccgcctccacaagcgccagcgccccgtccaccagggcttcggcctcaagggcgccgtcaccctcaccatcctcctcggcatcttcttcctctgctggggccccttcttcctccacctcaccctcatcgtcctctgccccgagcaccccacctgcggctgcatcttcaagaacttcaacctcttcctcgccctcatcatctgcaacgccatcatcgaccccctcatctacgccttccactcccaggagctccgccgcatgctcaaggaggtcctcacctgctcctggtga

SEQ ID NO: 1828 - RNA, 954 nt, synthetic construct
  misc_feature 1..954: note = AAQ62972 variant
  source 1..954: mol_type = other RNA
atggccgtccagggctcccagcgccgcctcctcggctccctcaactccacccccaccgccatcccccagctcggcctcgccgccaaccagaccggcgcccgctgcctcgaggtctccatctccgacggcctcttcctctccctcggcctcgtctccctcgtcgagaacgccctcgtcgtcgccaccatcgccaagaaccgcaacctccactcccccatgtactgcttcatctgctgcctcgccctctccgacctcctcgtctccggctccaacgtcctcgagaccgccgtcatcctcctcctcgaggccggcgccctcgtcgcccgcgccgccgtcctccagcagctcgacaacgtcatcgacgtcatcacctgctcctccatgctctcctccctctgcttcctcggcgccatcgccgtcgaccgctacatctccatcttctacgccctccgctaccactccatcgtcaccctcccccgcgcccgccgcgccgtcgccgccatctgggtcgcctccgtcgtcttctccaccctcttcatcgcctactacgaccacgtcgccgtcctcctctgcctcgtcgtcttcttcctcgccatgctcgtcctcatggccgtcctctacgtccacatgctcgcctgggcctgccagcacgcccagggcatcgcccgcctccacaagcgccagcgccccgtccaccagggcttcggcctcaagggcgccgtcaccctcaccatcctcctcggcatcttcttcctctgctggggccccttcttcctccacctcaccctcatcgtcctctgccccgagcaccccacctgcggctgcatcttcaagaacttcaacctcttcctcgccctcatcatctgcaacgccatcatcgaccccctcatctacgccttccactcccaggagctccgccgcaccctcaaggaggtcctcacctgctcctggtga

SEQ ID NO: 1829 - RNA, 954 nt, synthetic construct
  misc_feature 1..954: note = AAQ62971 variant
  source 1..954: mol_type = other RNA
atggccgtccagggctcccagcgccgcctcctcggctccctcaactccacccccaccgccatcccccagctcggcctcgccgccaaccagaccggcgcccgctgcctcgaggtctccatctccgacggcctcttcctctccctcggcctcgtctccctcgtcgagaacgccctcgtcgtcgccaccatcgccaagaaccgcaacctccactcccccatgtactgcttcatctgctgcctcgccctctccgacctcctcgtctccggctccaacgtcctcgagaccgccgtcatcctcctcctcgaggccggcgccctcgtcgcccgcgccgccgtcctccagcagctcgacaacgtcatcgacgtcatcacctgctcctccatgctctcctccctctgcttcctcggcgccatcgccgtcgaccgctacatctccatcttctacgccctccgctaccactccatcgtcaccctcccccaggcccgccgcgccgtcgccgccatctgggtcgcctccgtcgtcttctccaccctcttcatcgcctactacgaccacgtcgccgtcctcctctgcctcgtcgtcttcttcctcgccatgctcgtcctcatggccgtcctctacgtccacatgctcgcccgcgcctgccagcacgcccagggcatcgcccgcctccacaagcgccagcgccccgtccaccagggcttcggcctcaagggcgccgtcaccctcaccatcctcctcggcatcttcttcctctgctggggccccttcttcctccacctcaccctcatcgtcctctgccccgagcaccccacctgcggctgcatcttcaagaacttcaacctcttcctcgccctcatcatctgcaacgccatcatcgaccccctcatctacgccttccactcccaggagctccgccgcaccctcaaggaggtcctcacctgctcctggtga

SEQ ID NO: 1830 - RNA, 954 nt, synthetic construct
  misc_feature 1..954: note = AAQ62970 variant
  source 1..954: mol_type = other RNA
atggccgtccagggctcccagcgccgcctcctcggctccctcaactccacccccaccgccatcccccagctcggcctcgccgccaaccagaccggcgcccgctgcctcgaggtctccatctccgacggcctcttcctctccctcggcctcgtctccctcgtcgagaacgccctcgtcgtcgccaccatcgccaagaaccgcaacctccactcccccatgtactgcttcatctgctgcctcgccctcctcgacctcctcgtctccggctccaacgtcctcgagaccgccgtcatcctcctcctcgaggccggcgccctcgtcgcccgcgccgccgtcctccagcagctcgacaacgtcatcgacgtcatcacctgctcctccatgctctcctccctctgcttcctcggcgccatcgccgtcgaccgctacatctccatcttctacgccctccgctaccactccatcgtcaccctcccccgcgcccgccgcgccgtcgccgccatctgggtcgcctccgtcgtcttctccaccctcttcatcgcctactacgaccacgtcgccgtcctcctctgcctcgtcgtcttcttcctcgccatgctcgtcctcatggccgtcctctacgtccacatgctcgcccgcgcctgccagcacgcccagggcatcgcccgcctccacaagcgccagcgccccgtccaccagggcttcggcctcaagggcgccgtcaccctcaccatcctcctcggcatcttcttcctctgctggggccccttcttcctccacctcaccctcatcgtcctctgccccgagcaccccacctgcggctgcatcttcaagaacttcaacctcttcctcgccctcatcatctgcaacgccatcatcgaccccctcatctacgccttccactcccaggagctccgccgcaccctcaaggaggtcctcacctgctcctggtga

SEQ ID NO: 1831 - RNA, 954 nt, synthetic construct
  misc_feature 1..954: note = AAQ62969 variant
  source 1..954: mol_type = other RNA
atggccgtccagggctcccagcgccgcctcctcggctccctcaactccacccccaccgccatcccccagctcggcctcgccgccaaccagaccggcgcccgctgcctcgaggtctccatctccgacggcctcctcctctccctcggcctcgtctccctcgtcgagaacgccctcgtcgtcgccaccatcgccaagaaccgcaacctccactcccccatgtactgcttcatctgctgcctcgccctctccgacctcctcgtctccggctccaacgtcctcgagaccgccgtcatcctcctcctcgaggccggcgccctcgtcgcccgcgccgccgtcctccagcagctcgacaacgtcatcgacgtcatcacctgctcctccatgctctcctccctctgcttcctcggcgccatcgccgtcgaccgctacatctccatcttctacgccctccgctaccactccatcgtcaccctcccccgcgcccgccgcgccgtcgccgccatctgggtcgcctccgtcgtcttctccaccctcttcatcgcctactacgaccacgtcgccgtcctcctctgcctcgtcgtcttcttcctcgccatgctcgtcctcatggccgtcctctacgtccacatgctcgcccgcgcctgccagcacgcccagggcatcgcccgcctccacaagcgccagcgccccgtccaccagggcttcggcctcaagggcgccgtcaccctcaccatcctcctcggcatcttcttcctctgctggggccccttcttcctccacctcaccctcatcgtcctctgccccgagcaccccacctgcggctgcatcttcaagaacttcaacctcttcctcgccctcatcatctgcaacgccatcatcgaccccctcatctacgccttccactcccaggagctccgccgcaccctcaaggaggtcctcacctgctcctggtga

SEQ ID NO: 1832 - RNA, 954 nt, synthetic construct
  misc_feature 1..954: note = AAO21073 variant
  source 1..954: mol_type = other RNA
atggccgtccagggctcccagcgccgcctcctcggctccctcaactccacccccaccgccatcccccagctcggcctcgccgccaaccagaccggcgcccgctgcctcgaggtctccatctccgacggcctcttcctctccctcggcctcgtctccctcgtcgagaacgccctcgtcgtcgccaccatcgccaagaaccgcaacctccactcccccatgtactgcttcatctgctgcctcgccctctccgacctcctcgtctccggctccaacgtccgcgagaccgccgtcatcctcctcctcgaggccggcgccctcgtcgcccgcgccgccgtcctccagcagctcgacaacgtcatcgacgtcatcacctgctcctccatgctctcctccctctgcttcctcggcgccatcgccgtcgaccgctacatctccatcttctacgccctccgctaccactccatcgtcaccctcccccgcgcccgccgcgccgtcgccgccatctgggtcgcctccgtcgtcttctccaccctcttcatcgcctactacgaccacgtcgccgtcctcctctgcctcgtcgtcttcttcctcgccatgctcgtcctcatggccgtcctctacgtccacatgctcgcccgcgcctgccagcacgcccagggcatcgcccgcctccacaagcgccagcgccccgtccaccagggcttcggcctcaagggcgccgtcaccctcaccatcctcctcggcatcttcttcctctgctggggccccttcttcctccacctcaccctcatcgtcctctgccccgagcaccccacctgcggctgcatcttcaagaacttcaacctcttcctcgccctcatcatctgcaacgccatcatcgaccccctcatctacgccttccactcccaggagctccgccgcaccctcaaggaggtcctcacctgctcctggtga

SEQ ID NO: 1833 - RNA, 954 nt, synthetic construct
  misc_feature 1..954: note = AHC09567 variant
  source 1..954: mol_type = other RNA
atggccgtccagggctcccagcgccgcctcctcggctccctcaactccacccccaccgccatcccccagctcggcctcgccgccaaccagaccggcgcccgctgcctcgaggtctccatctccgacggcctcttcctctccctcggcctcgtctccctcgtcgagaacgccctcgtcgtcgccaccatcgccaagaaccgcaacctccactcccccatgtactgcttcatctgctgcctcgccctccccgacctcctcgtctccggctccaacgtcctcgagaccgccgtcatcctcctcctcgaggccggcgccctcgtcgcccgcgccgccgtcctccagcagctcgacaacgtcatcgacgtcatcacctgctcctccatgctctcctccctctgcttcctcggcgccatcgccgtcgaccgctacatctccatcttctacgccctccgctaccactccatcgtcaccctcccccgcgcccgccgcgccgtcgccgccatctgggtcgcctccgtcgtcttctccaccctcttcatcgcctactacgaccacgtcgccgtcctcctctgcctcgtcgtcttcttcctcgccatgctcgtcctcatggccgtcctctacgtccacatgctcgcccgcgcctgccagcacgcccagggcatcgcccgcctccacaagcgccagcgccccgtccaccagggcttcggcctcaagggcgccgtcaccctcaccatcctcctcggcatcttcttcctctgctggggccccttcttcctccacctcaccctcatcgtcctctgccccgagcaccccacctgcggctgcatcttcaagaacttcaacctcttcctcgccctcatcatctgcaacgccatcatcgaccccctcatctacgccttccactcccaggagctccgccgcaccctcaaggaggtcctcacctgctcctggtga

SEQ ID NO: 1834 - RNA, 954 nt, synthetic construct
  misc_feature 1..954: note = AHC09812 variant
  source 1..954: mol_type = other RNA
atggccgtccagggctcccagcgccgcctcctcggctccctcaactccacccccaccgccatcccccagctcggcctcgccgccaaccagaccggcgcccgctgcctcgaggtctccatctccgacggcctcttcctctccctcggcctcgtctccctcgtcgagaacgccctcgtcgtcgccaccatcgccaagaaccgcaacctccactcccccatgtactgcttcatctgctgcctcgccctctccgacctcctcgtctccggctccaacgtcctcgagaccgccgtcatcctcctcctcgaggccggcgccctcgtcgcccgcgccgccgtcctccagcagctcgacaacgtcatcgacgtcatcacctgctcctccatgctctcctccctctgcttcctcggcgccatcgccgtcgaccgctacatctccatcttctacgccctccgctaccactccatcgtcaccctcccccgcgcccgccgcgccgtcgccgccatctgggtcgcctccgtcgtcttctccaccctcttcatcgcctactacgaccacgtcgccgtcctcctctgcctcatggtcttcttcctcgccatgctcgtcctcatggccgtcctctacgtccacatgctcgcccgcgcctgccagcacgcccagggcatcgcccgcctccacaagcgccagcgccccgtccaccagggcttcggcctcaagggcgccgtcaccctcaccatcctcctcggcatcttcttcctctgctggggccccttcttcctccacctcaccctcatcgtcctctgccccgagcaccccacctgcggctgcatcttcaagaacttcaacctcttcctcgccctcatcatctgcaacgccatcatcgaccccctcatctacgccttccactcccaggagctccgccgcaccctcaaggaggtcctcacctgctcctggtga

SEQ ID NO: 1835 - RNA, 954 nt, synthetic construct
  misc_feature 1..954: note = AHC10192 variant
  source 1..954: mol_type = other RNA
atggccgtccagggctcccagcgccgcctcctcggctccctcaactccacccccaccgccatcccccagctcggcctcgccgccaaccagaccggcgcccgctgcctcgaggtctccatctccgacggcctcttcctctccctcggcctcgtctccctcgtcgagaacgccctcgtcgtcgccaccatcgccaagaaccgcaacctccactcccccatgtactgcttcatctgctgcctcgccctctccgacctcctcgtctccggctccaacgtcctcgagaccgccgtcatcctcctcctcgaggccggcgccctcgtcgcccgcgccgccgtcctccagcagctcgacaacgtcatcgacgtcatcacctgctcctccatgctctcctccctctgcttcctcggcgccatcgccgtcgaccgctacatctccatcttctacgccctccgctaccactccatcgtcaccctcccccgcgcccgccgcgccgtcgccgccatctgggtcgcctccgtcgtcttctccaccctcttcatcgcctactacgaccacgtcgccgtcctcctctgcctcgtcgtcttcttcctcgccatgctcgtcctcatggccgtcctctacgtccacatgctcgcccgcgcctgccagcacgcccagggcaccgcccgcctccacaagcgccagcgccccgtccaccagggcttcggcctcaagggcgccgtcaccctcaccatcctcctcggcatcttcttcctctgctggggccccttcttcctccacctcaccctcatcgtcctctgccccgagcaccccacctgcggctgcatcttcaagaacttcaacctcttcctcgccctcatcatctgcaacgccatcatcgaccccctcatctacgccttccactcccaggagctccgccgcaccctcaaggaggtcctcacctgctcctggtga

SEQ ID NO: 1836 - RNA, 954 nt, synthetic construct
  misc_feature 1..954: note = AHC09641 variant
  source 1..954: mol_type = other RNA
atggccgtccagggctcccagcgccgcctcctcggctccctcaactccacccccaccgccatcccccagctcggcctcgccgccaaccagaccggcgcccgctgcctcgaggtctccatctccgacggcctcttcctctccctcggcctcgtctccctcgtcgagaacgccctcgtcgtcgccaccatcgccaagaaccgcaacctccactcccccatgtactgcttcatctgctgcctcgccctctccgacctcctcgtctccggctccaacgtcctcgagaccgccgtcatcctcctcctcgaggccggcgccctcgtcgcccgcgccgccgtcctccagcagctcgacaacgtcatcgacgtcatcacctgctcctccatgctctcctccctctgcttcctcggcgccatcgccgtcgaccgctacatctccatcttctacgccctccgctaccactccaccgtcaccctcccccgcgcccgccgcgccgtcgccgccatctgggtcgcctccgtcgtcttctccaccctcttcatcgcctactacgaccacgtcgccgtcctcctctgcctcgtcgtcttcttcctcgccatgctcgtcctcatggccgtcctctacgtccacatgctcgcccgcgcctgccagcacgcccagggcatcgcccgcctccacaagcgccagcgccccgtccaccagggcttcggcctcaagggcgccgtcaccctcaccatcctcctcggcatcttcttcctctgctggggccccttcttcctccacctcaccctcatcgtcctctgccccgagcaccccacctgcggctgcatcttcaagaacttcaacctcttcctcgccctcatcatctgcaacgccatcatcgaccccctcatctacgccttccactcccaggagctccgccgcaccctcaaggaggtcctcacctgctcctggtga

SEQ ID NO: 1837 - RNA, 954 nt, synthetic construct
  misc_feature 1..954: note = AHC10044 variant
  source 1..954: mol_type = other RNA
atggccgtccagggctcccagcgccgcctcctcggctccctcaactccacccccaccgccatcccccagctcggcctcgccgccaaccagaccggcgcccgctacctcgaggtctccatctccgacggcctcttcctctccctcggcctcgtctccctcgtcgagaacgccctcgtcgtcgccaccatcgccaagaaccgcaacctccactcccccatgtactgcttcatctgctgcctcgccctctccgacctcctcgtctccggctccaacgtcctcgagaccgccgtcatcctcctcctcgaggccggcgccctcgtcgcccgcgccgccgtcctccagcagctcgacaacgtcatcgacgtcatcacctgctcctccatgctctcctccctctgcttcctcggcgccatcgccgtcgaccgctacatctccatcttctacgccctccgctaccactccatcgtcaccctcccccgcgcccgccgcgccgtcgccgccatctgggtcgcctccgtcgtcttctccaccctcttcatcgcctactacgaccacgtcgccgtcctcctctgcctcgtcgtcttcttcctcgccatgctcgtcctcatggccgtcctctacgtccacatgctcgcccgcgcctgccagcacgcccagggcatcgcccgcctccacaagcgccagcgccccgtccaccagggcttcggcctcaagggcgccgtcaccctcaccatcctcctcggcatcttcttcctctgctggggccccttcttcctccacctcaccctcatcgtcctctgccccgagcaccccacctgcggctgcatcttcaagaacttcaacctcttcctcgccctcatcatctgcaacgccatcatcgaccccctcatctacgccttccactcccaggagctccgccgcaccctcaaggaggtcctcacctgctcctggtga

SEQ ID NO: 1838 - RNA, 954 nt, synthetic construct
  misc_feature 1..954: note = AHC09532 variant
  source 1..954: mol_type = other RNA
atggccgtccagggctcccagcgccgcctcctcggctccctcaactccacccccaccgccatcccccagctcggcctcgccgccaaccagaccggcgcccgctgcctcgaggtctccatctccgacggcctcttcctctccctcggcctcgtctccctcgtcgagaacgccctcgtcctcgccaccatcgccaagaaccgcaacctccactcccccatgtactgcttcatctgctgcctcgccctctccgacctcctcgtctccggctccaacgtcctcgagaccgccgtcatcctcctcctcgaggccggcgccctcgtcgcccgcgccgccgtcctccagcagctcgacaacgtcatcgacgtcatcacctgctcctccatgctctcctccctctgcttcctcggcgccatcgccgtcgaccgctacatctccatcttctacgccctccgctaccactccatcgtcaccctcccccgcgcccgccgcgccgtcgccgccatctgggtcgcctccgtcgtcttctccaccctcttcatcgcctactacgaccacgtcgccgtcctcctctgcctcgtcgtcttcttcctcgccatgctcgtcctcatggccgtcctctacgtccacatgctcgcccgcgcctgccagcacgcccagggcatcgcccgcctccacaagcgccagcgccccgtccaccagggcttcggcctcaagggcgccgtcaccctcaccatcctcctcggcatcttcttcctctgctggggccccttcttcctccacctcaccctcatcgtcctctgccccgagcaccccacctgcggctgcatcttcaagaacttcaacctcttcctcgccctcatcatctgcaacgccatcatcgaccccctcatctacgccttccactcccaggagctccgccgcaccctcaaggaggtcctcacctgctcctggtga

SEQ ID NO: 1839 - RNA, 954 nt, synthetic construct
  misc_feature 1..954: note = AHC11042 variant
  source 1..954: mol_type = other RNA
atggccgtccagggctcccagcgccgcctcctcggctccctcaactccacccccaccgccatcccccagctcggcctcgccgccaaccagaccggcgcccgctgcctcgaggtctccatctccgacggcctcttcctctccctcggcctcgtctccctcgtcgagaacgccctcgtcgtcgccaccatcgccaagaaccgcaacctccactcccccatgtactgcttcatctgctgcctccccctctccgacctcctcgtctccggctccaacgtcctcgagaccgccgtcatcctcctcctcgaggccggcgccctcgtcgcccgcgccgccgtcctccagcagctcgacaacgtcatcgacgtcatcacctgctcctccatgctctcctccctctgcttcctcggcgccatcgccgtcgaccgctacatctccatcttctacgccctccgctaccactccatcgtcaccctcccccgcgcccgccgcgccgtcgccgccatctgggtcgcctccgtcgtcttctccaccctcttcatcgcctactacgaccacgtcgccgtcctcctctgcctcgtcgtcttcttcctcgccatgctcgtcctcatggccgtcctctacgtccacatgctcgcccgcgcctgccagcacgcccagggcatcgcccgcctccacaagcgccagcgccccgtccaccagggcttcggcctcaagggcgccgtcaccctcaccatcctcctcggcatcttcttcctctgctggggccccttcttcctccacctcaccctcatcgtcctctgccccgagcaccccacctgcggctgcatcttcaagaacttcaacctcttcctcgccctcatcatctgcaacgccatcatcgaccccctcatctacgccttccactcccaggagctccgccgcaccctcaaggaggtcctcacctgctcctggtga

SEQ ID NO: 1840 - RNA, 954 nt, synthetic construct
  misc_feature 1..954: note = AHC10733 variant
  source 1..954: mol_type = other RNA
atggccgtccagggctcccagcgccgcctcctcggctccctcaactccacccccaccgccatcccccagctcggcctcgccgccaaccagaccggcgcccgctgcctcgaggtctccatctccgacggcctcttcctctccctcggcctcgtctccctcgtcgagaacgccctcgtcgtcgccaccatcgccaagaaccgcaacctccactcccccatgtactgcttcatctgctgcctcgccctctccgacctcctcgtctccggctccaacgtcctcgagaccgccgtcatcctcctcctcgaggccggcgccctcgtcgcccgcgccgccgtcctccagcagctcgacaacgtcatcgacgtcatcacctgctcctccatgctctcctccctctgcttcctcggcgccatcgccgtcgaccgctacatctccatcttctacgccctccgctaccactccatcgtcaccctcccccgcgcccgccgcgccgtcgccgccatctgggtcgcctccgtcgtcttctccaccctcttcatcgcctactacgaccacgtcgccgtcctcctctgcctcgtcgtcttcttcctcgccatgctcgtcctcatggccgtcctctacgtccacatgctcgcccgcgcctgccagcacgcccagggcatcgcccgcctccacaagcgccagcgccccgtccaccagggcttcggcctcaagggcgccgtcaccctcaccatcctcctcggcatcttcttcctctgctggggccccttcttcctccacctcaccctcatcgtcctctgccccgagcaccccacctgcggctgcatcttcaagaacttctccctcttcctcgccctcatcatctgcaacgccatcatcgaccccctcatctacgccttccactcccaggagctccgccgcaccctcaaggaggtcctcacctgctcctggtga

SEQ ID NO: 1841 - RNA, 954 nt, synthetic construct
  misc_feature 1..954: note = AHC10696 variant
  source 1..954: mol_type = other RNA
atggccgtccagggctcccagcgccgcctcctcggctccctcaactccacccccaccgccatcccccagctcggcctcgccgccaaccagaccggcgcccgctgcctcgaggtctccatctccgacggcctcttcctctccctcggcctcgtctccctcgtcgagaacgccctcgtcgtcgccaccatcgccaagaaccgcaacctccactcccccatgtactgcttcatctgctgcctcgccctctccgacctcctcgtctccggctccaacgtcctcgagaccgccgtcatcctcctcctcgaggccggcgccctcgtcgcccgcgccgccgtcctccagcagctcgacaacgtcatcgacgtcatcacctgctcctccatgctctcctccctctgcttcctcggcgccatcgccgtcgaccgctacatctccatcttctacgccctccgctaccactccatcgtcaccctcccccgcgcccgccgcgccgtcgccgccatctgggtcgcctccgtcgtcttctccaccctcttcatcgcctactacgaccacgtcgccgtcctcctctgcctcgtcgtcttcttcctcgccatgctcgtcctcatggccgtcctctacgtccacatgctcgcccgcgcctgccagcacgcccagggcatcgcccgcctccacaagcgccagcgccccgtccaccagggcttcggcctcaagggcgccgtcaccctcaccatcctcctcggcatcttcttcctctgctggggccccttcttcctccacctcaccctcatcgtcctctgccccgagcaccccacctgcggctgcatcttcaagaacttcaacctcttcctcgccctcatcatctgcaacgccatcatcgaccccctcatccacgccttccactcccaggagctccgccgcaccctcaaggaggtcctcacctgctcctggtga

SEQ ID NO: 1842 - RNA, 954 nt, synthetic construct
  misc_feature 1..954: note = AHC09527 variant
  source 1..954: mol_type = other RNA
atggccgtccagggctcccagcgccgcctcctcggctccctcaactccacccccaccgccatcccccagctcggcctcgccgccaaccagaccggcgcccgctgcctcgaggtctccatctccgacggcctcttcctctccctcggcctcgtctccctcgtcgagaacgccctcgtcgtcgccaccatcgccaagaaccgcaacctccactcccccatgtactgcttcatctgctgcctcgccctctccgacctcctcgtctccggctccaacgtcctcgagaccgccgtcatcctcctcctcgaggccggcgccctcgtcgcccgcgccgccgtcctccagcagctcgacaacgtcatcgacgtcatcacctgctcctccatgctctcctccctctgcttcctcggcgccatcgccgtcgaccgctacatctccatcttctacgccctccgctaccactccatcgtcaccctcccccgcgcccgccgcgccgtcgccgccatctgggtcgcctccgtcgtcttctccaccctcttcatcgcctactacgaccacgtcgccgtcctcctctgcctcgtcgtcttcttcctcgccatgctcgtcctcatggccgtcctctacgtccacatgctcgcccgcgcctgccagcacgcccagggcatcgcccgcctccacaagcgccagcgccccgtccaccagggcttcggcctcaagggcgccgtcaccctcaccatcctcctcggcatcttcttcctctgctggggccccttcttcctccacctcaccctcatcgtcctctgccccgagcaccccacctgcggctgcatcttcaagaacttcaacctcttcctcgccctcatcatctgcaacgccatcatccaccccctcatctacgccttccactcccaggagctccgccgcaccctcaaggaggtcctcacctgctcctggtga

SEQ ID NO: 1843 - RNA, 954 nt, synthetic construct
  misc_feature 1..954: note = AHC10869 variant
  source 1..954: mol_type = other RNA
atggccgtccagggctcccagcgccgcctcctcggctccctcaactccacccccaccgccatcccccagctcggcctcgccgccaaccagaccggcgcccgctgcctcgaggtctccatctccgacggcctcttcctctccctcggcctcgtctccctcgtcgagaacgccctcgtcgtcgccaccatcgccaagaaccgcaacctccactcccccatgtactgcttcatctgctgcctcgccctctccgacctcctcgtctccggctccaacgtcctcgagaccgccgtcatcctcctcctcgaggccggcgccctcgtcgcccgcgccgccgtcctccagcagctcgacaacgtcatcgacgtcatcacctgctcctccatgctctcctccctctgcttcctcggcgccatcgccgtcgaccgctacatctccatcttctacgccctccgctaccactccatcgtcaccctcccccgcgcccgccgcgccgtcgccgccatctgggtcgcctccgtcgtcttctccaccctcttcatcgcctactacgaccacgtcgccgtcctcctctgcctcgtcgtcttcttcctcgccatgctcgtcctcatggccgtcctctacgtccacatgctcgcccgcgcctgccagcacgcccagggcatcgcccgcctccacaagcgccagcaccccgtccaccagggcttcggcctcaagggcgccgtcaccctcaccatcctcctcggcatcttcttcctctgctggggccccttcttcctccacctcaccctcatcgtcctctgccccgagcaccccacctgcggctgcatcttcaagaacttcaacctcttcctcgccctcatcatctgcaacgccatcatcgaccccctcatctacgccttccactcccaggagctccgccgcaccctcaaggaggtcctcacctgctcctggtga

SEQ ID NO: 1844 - RNA, 954 nt, synthetic construct
  misc_feature 1..954: note = AHC11615 variant
  source 1..954: mol_type = other RNA
atggccgtccagggctcccagcgccgcctcctcggctccctcaactccacccccaccgccatcccccagctcggcctcgccgccaaccagaccggcgcccgctgcctcgaggtctccatctccgacggcctcttcctctccctcggcctcgtctccctcgtcgagaacgccctcgtcgtcgccaccatcgccaagaaccgcaacctccactcccccatgtactgcttcatctgctgcctcgccctctccgacctcctcgtctccggctccaacgtcctcgagaccgccgtcatcctcctcctcgaggccggcgccctcgtcgcccgcgccgccgtcctccagcagctcgacaacgtcatcgacgtcatcacctgctcctccatgctctcctccctctgcttcctcggcgccatcgccgtcgaccgctacatctccatcttctacgccctccgctaccactccatcgtcaccctcccccgcgcccgccgcgccgtcgccgccatctgggtcgcctccgtcgtcttctccaccctcttcatcgcctactacgaccacgtcgccgtcctcctctgcctcgtcgtcttcttcctcgccatgctcgtcctcatggccgtcctctacgtccacatgctcgcccgcgcctgccagcacgcccagggcatcgcccgcctccacaagcgccagcgccccgtccaccagggcttcggcctcaagggcgccgtcaccctcaccatcctcctcggcatcttcttcctctgctggggccccttcttcctccacctcaccctcatcgtcctctgccccgagcaccccacctgcggctgcatcttcaagaacttcaacctcttcctcaccctcatcatctgcaacgccatcatcgaccccctcatctacgccttccactcccaggagctccgccgcaccctcaaggaggtcctcacctgctcctggtga

SEQ ID NO: 1845 - RNA, 954 nt, synthetic construct
  misc_feature 1..954: note = AHC09535 variant
  source 1..954: mol_type = other RNA
atggccgtccagggctcccagcgccgcctcctcggctccctcaactccacccccaccgccatcccccagctcggcctcgccgccaaccagaccggcgcccgctgcctcgaggtctccatctccgacggcctcttcctctccctcggcctcgtctccctcgtcgagaacgccctcgtcgtcgccaccatcgccaagaaccgcaacctccactcccccatgtactgcttcatctgctgcctcgccctctccgacctcctcgtctccggctccaacgtcctcgagaccgccgtcatcctcctcctcgaggccggcgccctcgtcgcccgcgccgccgtcctccagcagctcgacaacgtcatcgacgtcatcacctgctcctccatgctctcctccctctgcttcctcggcgccatcgccgtcgaccactacatctccatcttctacgccctccgctaccactccatcgtcaccctcccccgcgcccgccgcgccgtcgccgccatctgggtcgcctccgtcgtcttctccaccctcttcatcgcctactacgaccacgtcgccgtcctcctctgcctcgtcgtcttcttcctcgccatgctcgtcctcatggccgtcctctacgtccacatgctcgcccgcgcctgccagcacgcccagggcatcgcccgcctccacaagcgccagcgccccgtccaccagggcttcggcctcaagggcgccgtcaccctcaccatcctcctcggcatcttcttcctctgctggggccccttcttcctccacctcaccctcatcgtcctctgccccgagcaccccacctgcggctgcatcttcaagaacttcaacctcttcctcgccctcatcatctgcaacgccatcatcgaccccctcatctacgccttccactcccaggagctccgccgcaccctcaaggaggtcctcacctgctcctggtga

SEQ ID NO: 1846 - RNA, 954 nt, synthetic construct
  misc_feature 1..954: note = AHC11840 variant
  source 1..954: mol_type = other RNA
atggccgtccagggctcccagcgccgcctcctcggctccctcaactccacccccaccgccatcccccagctcggcctcgccgccaaccagaccggcgcccgctgcctcgaggtctccatctccgacggcctcttcctctccctcggcctcgtctccctcgtcgagaacgccctcgtcgtcgccaccatcgccaagaaccgcaacctccactcccccatgtactgcttcatctgctgcctcgccctctccgacctcctcgtctccggctccaacgtcctcgagaccgccgtcatcctcctcctcgaggccggcgccctcgtcgcccgcgccgccgtcctccagcagctcgacaacgtcatcgacgtcatcacctgctcctccatgctctcctccctctgcttcctcggcgccatcgccgtcgaccgctacatctccatcttctacgccctccgctaccactccatcgtcaccctcccccgcgcccgccgcgccgtcgccgccatctgggtcgcctccgtcgtcttctccaccctcttcatcgcctactacgaccacgtcgccgtcctcctctgcctcgtcgtcttcttcctcgccatgctcgtcctcatggccgtcctctacgtccacatgctcgcccgcgcctgccagcacgcccagggcatcgcccgcctccacaagcgccagcgccccgtccaccagggcttcggcctcaagggcgccgtcaccctcaccatcctcctcggcatcttcttcctctgctggggccccttcttcctccacctcaccctcatcgtcctctgccccgagcaccccacctgcggctgcatcttcaagaacttcaacctcttcctcgccctcatcatctgcaacgccatcatcgaccccctcatctacgccttccacaaccaggagctccgccgcaccctcaaggaggtcctcacctgctcctggtga

SEQ ID NO: 1847 - RNA, 954 nt, synthetic construct
  misc_feature 1..954: note = AHC09665 variant
  source 1..954: mol_type = other RNA
atggccgtccagggctcccagcgccgcctcctcggctccctcaactccacccccaccgccatcccccagctcggcctcgccgccaaccagaccggcgcccgctgcctcgaggtctccatctccgacggcctcttcctctccctcggcctcgtctccctcgtcgagaacgccctcgtcgtcgccaccatcgccaagaaccgcaacctccactcccccatgtactgcttcatctgctgcctcgccctctccgacctcctcgtctccggctccaacgtcctcgagaccgccgtcatcctcctcctcgaggccggcgccctcgtcgcccgcgccgccgtcctccagcagctcgacaacgtcatcgacatgatcacctgctcctccatgctctcctccctctgcttcctcggcgccatcgccgtcgaccgctacatctccatcttctacgccctccgctaccactccatcgtcaccctcccccgcgcccgccgcgccgtcgccgccatctgggtcgcctccgtcgtcttctccaccctcttcatcgcctactacgaccacgtcgccgtcctcctctgcctcgtcgtcttcttcctcgccatgctcgtcctcatggccgtcctctacgtccacatgctcgcccgcgcctgccagcacgcccagggcatcgcccgcctccacaagcgccagcgccccgtccaccagggcttcggcctcaagggcgccgtcaccctcaccatcctcctcggcatcttcttcctctgctggggccccttcttcctccacctcaccctcatcgtcctctgccccgagcaccccacctgcggctgcatcttcaagaacttcaacctcttcctcgccctcatcatctgcaacgccatcatcgaccccctcatctacgccttccactcccaggagctccgccgcaccctcaaggaggtcctcacctgctcctggtga

SEQ ID NO: 1848 - RNA, 954 nt, synthetic construct
  misc_feature 1..954: note = AHC11324 variant
  source 1..954: mol_type = other RNA
atggccgtccagggctcccagcgccgcctcctcggctccctcaactccacccccaccgccatcccccagctcggcctcgccgccaaccagaccggcgcccgctgcctcgaggtctccatctccgacggcctcttcctctccctcggcctcgtctccctcgtcgagaacgccctcgtcgtcgccaccatcgccaagaaccgcaacctccactcccccatgtactgcttcatctgctgcctcgccctctccgacctcctcgtctccggctccaacgtcctcgagaccgccgtcatcctcctcctcgaggccggcgccctcgtcgcccgcgccgccgtcctccagcagctcgacaacgtcatcgacgtcatcacctgctcctccatgctctcctccctctgcttcctcggcgccatcgccgtcgaccgctacatctccatcttctacgccctccgctaccactccatcgtcaccctcccccgcgcccgccgcgccgtcgccgccatctgggtcgcctccgtcgtcttctccaccctcttcatcgcctactacgaccacgtcgccgtcctcctctgcctcgtcgtcttcttcctcgccatgctcgtcctcatggccgtcctctacgtccacatgctcgcccgcgcctgccagcacgcccagggcatcgcccgcctccacaagcgccagcgccccgtccaccagggcttcggcctcaagggcgccgtcaccctcaccatcctcctcggcatcttcttcctctgctggggccccttcttcctccacctcaccctcatcgtcctctgccccgagcaccccacctgcggctgcatcttcaagaacttcaacctcttcctcgccctcatcatccgcaacgccatcatcgaccccctcatctacgccttccactcccaggagctccgccgcaccctcaaggaggtcctcacctgctcctggtga

SEQ ID NO: 1849 - RNA, 954 nt, synthetic construct
  misc_feature 1..954: note = AHC09521 variant
  source 1..954: mol_type = other RNA
atggccgtccagggctcccagcgccgcctcctcggctccctcaactccacccccaccgccatcccccagctcggcctcgccgccaaccagaccggcgcccgctgcctcgaggtctccatctccgacggcctcttcctctccctcggcctcgtctccctcgtcgagaacgccctcgtcgtcgccaccatcgccaagaaccgcaacctccactcccccatgtactgcttcatctgctgcctcgccctctccgacctcctcgtctccggctccaacgtcctcgagaccgccgtcatcctcctcctcgaggccggcgccctcgtcgcccgcgccgccgtcctccagcagctcgacaacgtcatcgacgtcatcacctgctcctccatgctctcctccctctgcttcctcggcgccatcgccgtcgaccgctacatctccatcttctacgccctccgctaccactccatcgtcaccctcccctgggcccgccgcgccgtcgccgccatctgggtcgcctccgtcgtcttctccaccctcttcatcgcctactacgaccacgtcgccgtcctcctctgcctcgtcgtcttcttcctcgccatgctcgtcctcatggccgtcctctacgtccacatgctcgcccgcgcctgccagcacgcccagggcatcgcccgcctccacaagcgccagcgccccgtccaccagggcttcggcctcaagggcgccgtcaccctcaccatcctcctcggcatcttcttcctctgctggggccccttcttcctccacctcaccctcatcgtcctctgccccgagcaccccacctgcggctgcatcttcaagaacttcaacctcttcctcgccctcatcatctgcaacgccatcatcgaccccctcatctacgccttccactcccaggagctccgccgcaccctcaaggaggtcctcacctgctcctggtga

SEQ ID NO: 1850 - RNA, 954 nt, synthetic construct
  misc_feature 1..954: note = AHC11794 variant
  source 1..954: mol_type = other RNA
atggccgtccagggctcccagcgccgcctcctcggctccctcaactccacccccaccgccatcccccagctcggcctcgccgccaaccagaccggcgcccgctgcctcgaggtctccatctccgacggcctcttcctctccctcggcctcgtctccctcgtcgagaacgccctcgtcgtcgccaccatcgccaagaaccgcaacctccactcccccatgtactgcttcatctgctgcctcgccctctccgacctcctcgtctccggctccaacgtcctcgagaccgccgtcatcctcctcctcgaggccggcgccctcgtcgcccgcgccgccgtcctccagcagctcgacaacgtcatcgacgtcatcacctgctcctccatgctctcctccctctgcttcctcggcgccatcgccgtcgaccgctacatctccatcttctacgccctccgctaccactccatcgtcaccctcccccgcgcccgccgcgccgtcgccgccatctgggtcgcctccgtcgtcttctccaccctcttcatcgcctactacgaccacgtcgccgtcctcctctgcctcgtcgtcttcttcctcgccatgctcgtcctcatggccgtcctctacgtccacatgctcgcccgcgcctgccagcacgcccagggcatcgcccgcctccacaagcgccagcgccccgtccaccagggcttcggcctcaagggcgccgtcaccctcaccatcctcctcggcatcttcttcctctgctggggccccttcttcctccacctcaccctcatcgtcctctgccccgagcaccccgagtgcggctgcatcttcaagaacttcaacctcttcctcgccctcatcatctgcaacgccatcatcgaccccctcatctacgccttccactcccaggagctccgccgcaccctcaaggaggtcctcacctgctcctggtga

SEQ ID NO: 1851 - RNA, 954 nt, synthetic construct
  misc_feature 1..954: note = AHC10874 variant
  source 1..954: mol_type = other RNA
atggccgtccagggctcccagcgccgcctcctcggctccctcaactccacccccaccgccatcccccagctcggcctcgccgccaaccagaccggcgcccgctgcctcgaggtctccatctccgacggcctcttcctctccctcggcctcgtctccctcgtcgagaacgccctcgtcgtcgccaccatcgccaagaaccgcaacctccactcccccatgtactgcttcatctgctgcctcgccctctccgagctcctcgtctccggctccaacgtcctcgagaccgccgtcatcctcctcctcgaggccggcgccctcgtcgcccgcgccgccgtcctccagcagctcgacaacgtcatcgacgtcatcacctgctcctccatgctctcctccctctgcttcctcggcgccatcgccgtcgaccgctacatctccatcttctacgccctccgctaccactccatcgtcaccctcccccgcgcccgccgcgccgtcgccgccatctgggtcgcctccgtcgtcttctccaccctcttcatcgcctactacgaccacgtcgccgtcctcctctgcctcgtcgtcttcttcctcgccatgctcgtcctcatggccgtcctctacgtccacatgctcgcccgcgcctgccagcacgcccagggcatcgcccgcctccacaagcgccagcgccccgtccaccagggcttcggcctcaagggcgccgtcaccctcaccatcctcctcggcatcttcttcctctgctggggccccttcttcctccacctcaccctcatcgtcctctgccccgagcaccccacctgcggctgcatcttcaagaacttcaacctcttcctcgccctcatcatctgcaacgccatcatcgaccccctcatctacgccttccactcccaggagctccgccgcaccctcaaggaggtcctcacctgctcctggtga

SEQ ID NO: 1852 - RNA, 954 nt, synthetic construct
  misc_feature 1..954: note = AHC09597 variant
  source 1..954: mol_type = other RNA
atggccgtccagggctcccagcgccgcctcctcggctccctcaactccacccccaccgccatcccccagctcggcctcgccgccaaccagaccggcgcccgctgcctcgaggtctccatctccgacggcctcttcctctccctcggcctcgtctccctcgtcgagaacgccctcgtcgtcgccaccatcgccaagaaccgcaacctccactcccccatgtactgcttcatctgctgcctcgccctctccgacctcctcgtctccggctccaacgtcctcgagaccgccgtcatcctcctcctcgaggccggcgccctcgtcgcccgcgccgccgtcctccagcagctcgacaacgtcatcgacgtcatcacctgctcctccatgctctcctccctctgcttcctcggcgccatcgccgtcgaccgctacatctccatcttctacgccctctgctaccactccatcgtcaccctcccccgcgcccgccgcgccgtcgccgccatctgggtcgcctccgtcgtcttctccaccctcttcatcgcctactacgaccacgtcgccgtcctcctctgcctcgtcgtcttcttcctcgccatgctcgtcctcatggccgtcctctacgtccacatgctcgcccgcgcctgccagcacgcccagggcatcgcccgcctccacaagcgccagcgccccgtccaccagggcttcggcctcaagggcgccgtcaccctcaccatcctcctcggcatcttcttcctctgctggggccccttcttcctccacctcaccctcatcgtcctctgccccgagcaccccacctgcggctgcatcttcaagaacttcaacctcttcctcgccctcatcatctgcaacgccatcatcgaccccctcatctacgccttccactcccaggagctccgccgcaccctcaaggaggtcctcacctgctcctggtga

SEQ ID NO: 1853 - RNA, 1665 nt, synthetic construct
  misc_feature 1..1665: note = CCDS816.1 variant
  source 1..1665: mol_type = other RNA
atgaccgcccccggcgccgccggccgctgcccccccaccacctggctcggctccctcctcctcctcgtctgcctcctcgcctcccgctccatcaccgaggaggtctccgagtactgctcccacatgatcggctccggccacctccagtccctccagcgcctcatcgactcccagatggagacctcctgccagatcaccttcgagttcgtcgaccaggagcagctcaaggaccccgtctgctacctcaagaaggccttcctcctcgtccaggacatcatggaggacaccatgcgcttccgcgacaacacccccaacgccatcgccatcgtccagctccaggagctctccctccgcctcaagtcctgcttcaccaaggactacgaggagcacgacaaggcctgcgtccgcaccttctacgagacccccctccagctcctcgagaaggtcaagaacgtcttcaacgagaccaagaacctcctcgacaaggactggaacatcttctccaagaactgcaacaactccttcgccgagtgctcctcccaggacgtcgtcaccaagcccgactgcaactgcctctaccccaaggccatcccctcctccgaccccgcctccgtctccccccaccagcccctcgccccctccatggcccccgtcgccggcctcacctgggaggactccgagggcaccgagggctcctccctcctccccggcgagcagcccctccacaccgtcgaccccggctccgccaagcagcgccccccccgctccacctgccagtccttcgagccccccgagacccccgtcgtcaaggactccaccatcggcggctccccccagccccgcccctccgtcggcgccttcaaccccggcatggaggacatcctcgactccgccatgggcaccaactgggtccccgaggaggcctccggcgaggcctccgagatccccgtcccccagggcaccgagctctccccctcccgccccggcggcggctccatgcagaccgagcccgcccgcccctccaacttcctctccgcctcctcccccctccccgcctccgccaagggccagcagcccgccgacgtcaccggcaccgccctcccccgcgtcggccccgtccgccccaccggccaggactggaaccacaccccccagaagaccgaccacccctccgccctcctccgcgacccccccgagcccggctccccccgcatctcctccctccgcccccagggcctctccaacccctccaccctctccgcccagccccagctctcccgctcccactcctccggctccgtcctccccctcggcgagctcgagggccgccgctccacccgcgaccgccgctcccccgccgagcccgagggcggccccgcctccgagggcgccgcccgccccctcccccgcttcaactccgtccccctcaccgacaccggccacgagcgccagtccgagggctccttctccccccagctccaggagtccgtcttccacctcctcgtcccctccgtcatcctcgtcctcctcgccgtcggcggcctcctcttctaccgctggcgccgccgctcccaccaggagccccagcgcgccgactcccccctcgagcagcccgagggctcccccctcacccaggacgaccgccaggtcgagctccccgtctga

SEQ ID NO: 1854 - RNA, 1893 nt, synthetic construct
  misc_feature 1..1893: note = EAW85719 variant
  source 1..1893: mol_type = other RNA
atggccctccccaccgcccgccccctcctcggctcctgcggcacccccgccctcggctccctcctcttcctcctcttctccctcggctgggtccagccctcccgcaccctcgccggcgagaccggccaggaggccgcccccctcgacggcgtcctcgccaacccccccaacatctcctccctctccccccgccagctcctcggcttcccctgcgccgaggtctccggcctctccaccgagcgcgtccgcgagctcgccgtcgccctcgcccagaagaacgtcaagctctccaccgagcagctccgctgcctcgcccaccgcctctccgagccccccgaggacctcgacgccctccccctcgacctcctcctcttcctcaaccccgacgccttctccggcccccaggcctgcacccgcttcttctcccgcatcaccaaggccaacgtcgacctcctcccccgcggcgcccccgagcgccagcgcctcctccccgccgccctcgcctgctggggcgtccgcggctccctcctctccgaggccgacgtccgcgccctcggcggcctcgcctgcgacctccccggccgcttcgtcgccgagtccgccgaggtcctcctcccccgcctcgtctcctgccccggccccctcgaccaggaccagcaggaggccgcccgcgccgccctccagggcggcggccccccctacggccccccctccacctggtccgtctccaccatggacgccctccgcggcctcctccccgtcctcggccagcccatcatccgctccatcccccagggcatcgtcgccgcctggcgccagcgctcctcccgcgacccctcctggcgccagcccgagcgcaccatcctccgcccccgcttccgccgcgaggtcgagaagaccgcctgcccctccggcaagaaggcccgcgagatcgacgagtccctcatcttctacaagaagtgggagctcgaggcctgcgtcgacgccgccctcctcgccacccagatggaccgcgtcaacgccatccccttcacctacgagcagctcgacgtcctcaagcacaagctcgacgagctctacccccagggctaccccgagtccgtcatccagcacctcggctacctcttcctcaagatgtcccccgaggacatccgcaagtggaacgtcacctccctcgagaccctcaaggccctcctcgaggtcaacaagggccacgagatgtccccccaggccccccgccgccccctcccccaggtcgccaccctcatcgaccgcttcgtcaagggccgcggccagctcgacaaggacaccctcgacaccctcaccgccttctaccccggctacctctgctccctctcccccgaggagctctcctccgtccccccctcctccatctgggccgtccgcccccaggacctcgacacctgcgacccccgccagctcgacgtcctctaccccaaggcccgcctcgccttccagaacatgaacggctccgagtacttcgtcaagatccagtccttcctcggcggcgcccccaccgaggacctcaaggccctctcccagcagaacgtctccatggacctcgccaccttcatgaagctccgcaccgacgccgtcctccccctcaccgtcgccgaggtccagaagctcctcggcccccacgtcgagggcctcaaggccgaggagcgccaccgccccgtccgcgactggatcctccgccagcgccaggacgacctcgacaccctcggcctcggcctccagggcggcatccccaacggctacctcgtcctcgacctctccatgcaggaggccctctccggcaccccctgcctcctcggccccggccccgtcctcaccgtcctcgccctcctcctcgcctccaccctcgcctga

SEQ ID NO: 1855 - RNA, 1515 nt, synthetic construct
  misc_feature 1..1515: note = CCDS46865.1 variant
  source 1..1515: mol_type = other RNA
atggaggccctccgcgtccagatgttcatgccctgctccttcgagtccctctacctctcctccgccgagcaccccggcgcctccaagccccccatctcctcctcctccatgacctcccgcatcctcctccgccagcagctcatgcgcgagcagatgcaggagcaggagcgccgcgagcagcagcagaagctccaggccgcccagttcatgcagcagcgcgtccccgtctcccagacccccgccatcaacgtctccgtccccaccaccctcccctccgccacccaggtccccatggaggtcctcaaggtccagacccacctcgagaaccccaccaagtaccacatccagcaggcccagcgccagcaggtcaagcagtacctctccaccaccctcgccaacaagcacgccaaccaggtcctctccctcccctgccccaaccagcccggcgaccacgtcatgccccccgtccccggctcctccgcccccaactcccccatggccatgctcaccctcaactccaactgcgagaaggagggcttctacaagttcgaggagcagaaccgcgccgagtccgagtgccccggcatgaacacccactcccgcgcctcctgcatgcagatggacgacgtcatcgacgacatcatctccctcgagtcctcctacaacgaggagatcctcggcctcatggaccccgccctccagatggccaacaccctccccgtctccggcaacctcatcgacctctacggcaaccagggcctccccccccccggcctcaccatctccaactcctgccccgccaacctccccaacatcaagcgcgagctcaccgagtccgaggcccgcgccctcgccaaggagcgccagaagaaggacaaccacaacctcatcgagcgccgccgccgcttcaacatcaacgaccgcatcaaggagctcggcaccctcatccccaagtccaacgaccccgacatgcgctggaacaagggcaccatcctcaaggcctccgtcgactacatccgcaagctccagcgcgagcagcagcgcgccaaggagctcgagaaccgccagaagaagctcgagcacgccaaccgccacctcctcctccgcatccaggagctcgagatgcaggcccgcgcccacggcctctccctcatcccctccaccggcctctgctcccccgacctcgtcaaccgcatcatcaagcaggagcccgtcctcgagaactgctcccaggacctcctccagcaccacgccgacctcacctgcaccaccaccctcgacctcaccgacggcaccatcaccttcaacaacaacctcggcaccggcaccgaggccaaccaggcctactccgtccccaccaagatgggctccaagctcgaggacatcctcatggacgacaccctctcccccgtcggcgtcaccgaccccctcctctcctccgtctcccccggcgcctccaagacctcctcccgccgctcctccatgtccatggaggagaccgagcacacctgctga

SEQ ID NO: 1856 - RNA, 1260 nt, synthetic construct
  misc_feature 1..1260: note = CCDS2913.1 variant
  source 1..1260: mol_type = other RNA
atgctcgagatgctcgagtacaaccactaccaggtccagacccacctcgagaaccccaccaagtaccacatccagcaggcccagcgccagcaggtcaagcagtacctctccaccaccctcgccaacaagcacgccaaccaggtcctctccctcccctgccccaaccagcccggcgaccacgtcatgccccccgtccccggctcctccgcccccaactcccccatggccatgctcaccctcaactccaactgcgagaaggagggcttctacaagttcgaggagcagaaccgcgccgagtccgagtgccccggcatgaacacccactcccgcgcctcctgcatgcagatggacgacgtcatcgacgacatcatctccctcgagtcctcctacaacgaggagatcctcggcctcatggaccccgccctccagatggccaacaccctccccgtctccggcaacctcatcgacctctacggcaaccagggcctccccccccccggcctcaccatctccaactcctgccccgccaacctccccaacatcaagcgcgagctcaccgcctgcatcttccccaccgagtccgaggcccgcgccctcgccaaggagcgccagaagaaggacaaccacaacctcatcgagcgccgccgccgcttcaacatcaacgaccgcatcaaggagctcggcaccctcatccccaagtccaacgaccccgacatgcgctggaacaagggcaccatcctcaaggcctccgtcgactacatccgcaagctccagcgcgagcagcagcgcgccaaggagctcgagaaccgccagaagaagctcgagcacgccaaccgccacctcctcctccgcatccaggagctcgagatgcaggcccgcgcccacggcctctccctcatcccctccaccggcctctgctcccccgacctcgtcaaccgcatcatcaagcaggagcccgtcctcgagaactgctcccaggacctcctccagcaccacgccgacctcacctgcaccaccaccctcgacctcaccgacggcaccatcaccttcaacaacaacctcggcaccggcaccgaggccaaccaggcctactccgtccccaccaagatgggctccaagctcgaggacatcctcatggacgacaccctctcccccgtcggcgtcaccgaccccctcctctcctccgtctcccccggcgcctccaagacctcctcccgccgctcctccatgtccatggaggagaccgagcacacctgctga

SEQ ID NO: 1857 - RNA, 1581 nt, synthetic construct
  misc_feature 1..1581: note = XM_005264754 variant
  source 1..1581: mol_type = other RNA
atgcagtccgagtccggcatcgtccccgacttcgaggtcggcgaggagttccacgaggagcccaagacctactacgagctcaagtcccagcccctcaagtcctcctcctccgccgagcaccccggcgcctccaagccccccatctcctcctcctccatgacctcccgcatcctcctccgccagcagctcatgcgcgagcagatgcaggagcaggagcgccgcgagcagcagcagaagctccaggccgcccagttcatgcagcagcgcgtccccgtctcccagacccccgccatcaacgtctccgtccccaccaccctcccctccgccacccaggtccccatggaggtcctcaaggtccagacccacctcgagaaccccaccaagtaccacatccagcaggcccagcgccagcaggtcaagcagtacctctccaccaccctcgccaacaagcacgccaaccaggtcctctccctcccctgccccaaccagcccggcgaccacgtcatgccccccgtccccggctcctccgcccccaactcccccatggccatgctcaccctcaactccaactgcgagaaggagggcttctacaagttcgaggagcagaaccgcgccgagtccgagtgccccggcatgaacacccactcccgcgcctcctgcatgcagatggacgacgtcatcgacgacatcatctccctcgagtcctcctacaacgaggagatcctcggcctcatggaccccgccctccagatggccaacaccctccccgtctccggcaacctcatcgacctctacggcaaccagggcctccccccccccggcctcaccatctccaactcctgccccgccaacctccccaacatcaagcgcgagctcaccgcctgcatcttccccaccgagtccgaggcccgcgccctcgccaaggagcgccagaagaaggacaaccacaacctcatcgagcgccgccgccgcttcaacatcaacgaccgcatcaaggagctcggcaccctcatccccaagtccaacgaccccgacatgcgctggaacaagggcaccatcctcaaggcctccgtcgactacatccgcaagctccagcgcgagcagcagcgcgccaaggagctcgagaaccgccagaagaagctcgagcacgccaaccgccacctcctcctccgcatccaggagctcgagatgcaggcccgcgcccacggcctctccctcatcccctccaccggcctctgctcccccgacctcgtcaaccgcatcatcaagcaggagcccgtcctcgagaactgctcccaggacctcctccagcaccacgccgacctcacctgcaccaccaccctcgacctcaccgacggcaccatcaccttcaacaacaacctcggcaccggcaccgaggccaaccaggcctactccgtccccaccaagatgggctccaagctcgaggacatcctcatggacgacaccctctcccccgtcggcgtcaccgaccccctcctctcctccgtctcccccggcgcctccaagacctcctcccgccgctcctccatgtccatggaggagaccgagcacacctgctga

SEQ ID NO: 1858 - RNA, 1065 nt, synthetic construct
  misc_feature 1..1065: note = BAG52140 variant
  source 1..1065: mol_type = other RNA
atggcccccgccgcctggctccgctccgccgccgcccgcgccctcctcccccccatgctcctcctcctcctccagcccccccccctcctcgcccgcgccctcccccccgacgtccaccacctccacgccgagcgccgcggcccccagccctggcacgccgccctcccctcctcccccgcccccgcccccgccacccaggaggccccccgccccgcctcctccctccgccccccccgctgcggcgtccccgacccctccgacggcctctccgcccgcaaccgccagaagcgcatcctccgcttcccctggcagctcgtccaggagcaggtccgccagaccatggccgaggccctcaaggtctggtccgacgtcacccccctcaccttcaccgaggtccacgagggccgcgccgacatcatgatcgacttcgcccgctactggcacggcgacgacctccccttcgacggccccggcggcatcctcgcccacgccttcttccccaagacccaccgcgagggcgacgtccacttcgactacgacgagacctggaccatcggcgacgaccagggcaccgacctcctccaggtcgccgcccacgagttcggccacgtcctcggcctccagcacaccaccgccgccaaggccctcatgtccgccttctacaccttccgctaccccctctccctctcccccgacgactgccgcggcgtccagcacctctacggccagccctggcccaccgtcacctcccgcacccccgccctcggcccccaggccggcatcgacaccaacgagatcgcccccctcgagcccgacgccccccccgacgcctgcgaggcctccttcgacgccgtctccaccatccgcggcgagctcttcttcttcaaggccggcttcgtctggcgcctccgcggcggccagctccagcccggctaccccgccctcgcctcccgccactggcagggcctcccctcccccgtcgacgccgccttcgaggacgcccagggccacatctggttcttccagggcaccaccggcgtctccacccccgcccccggcgtctga

SEQ ID NO: 1859 - RNA, 804 nt, synthetic construct
  misc_feature 1..804: note = AAV40839 variant
  source 1..804: mol_type = other RNA
atgcgcctcaccgtcctctgcgccgtctgcctcctccccggctccctcgccctccccctcccccaggaggccggcggcatgtccgagctccagtgggagcaggcccaggactacctcaagcgcttctacctctacgactccgagaccaagaacgccaactccctcgaggccaagctcaaggagatgcagaagttcttcggcctccccatcaccggcatgctcaactcccgcgtcatcgagatcatgcagaagccccgctgcggcgtccccgacgtcgccgagtactccctcttccccaactcccccaagtggacctccaaggtcgtcacctaccgcatcgtctcctacacccgcgacctcccccacatcaccgtcgaccgcctcgtctccaaggccctcaacatgtggggcaaggagatccccctccacttccgcaaggtcgtctggggcaccgccgacatcatgatcggcttcgcccgcggcgcccacggcgactcctaccccttcgacggccccggcaacaccctcgcccacgccttcgcccccggcaccggcctcggcggcgacgcccacttcgacgaggacgagcgctggaccgacggctcctccctcggcatcaacttcctctacgccgccacccacgagctcggccactccctcggcatgggccactcctccgaccccaacgccgtcatgtaccccacctacggcaacggcgacccccagaacttcaagctctcccaggacgacatcaagggcatccagaagctctacggcaagcgctccaactcccgcaagaagtga

SEQ ID NO: 1860 - RNA, 3768 nt, synthetic construct
  misc_feature 1..3768: note = J05582.1 variant
  source 1..3768: mol_type = other RNA
atgacccccggcacccagtcccccttcttcctcctcctcctcctcaccgtcctcaccgtcgtcaccggctccggccacgcctcctccacccccggcggcgagaaggagacctccgccacccagcgctcctccgtcccctcctccaccgagaagaacgccgtctccatgacctcctccgtcctctcctcccactcccccggctccggctcctccaccacccagggccaggacgtcaccctcgcccccgccaccgagcccgcctccggctccgccgccacctggggccaggacgtcacctccgtccccgtcacccgccccgccctcggctccaccaccccccccgcccacgacgtcacctccgcccccgacaacaagcccgcccccggctccaccgccccccccgcccacggcgtcacctccgcccccgacacccgccccgcccccggctccaccgccccccccgcccacggcgtcacctccgcccccgacacccgccccgcccccggctccaccgccccccccgcccacggcgtcacctccgcccccgacacccgccccgcccccggctccaccgccccccccgcccacggcgtcacctccgcccccgacacccgccccgcccccggctccaccgccccccccgcccacggcgtcacctccgcccccgacacccgccccgcccccggctccaccgccccccccgcccacggcgtcacctccgcccccgacacccgccccgcccccggctccaccgccccccccgcccacggcgtcacctccgcccccgacacccgccccgcccccggctccaccgccccccccgcccacggcgtcacctccgcccccgacacccgccccgcccccggctccaccgccccccccgcccacggcgtcacctccgcccccgacacccgccccgcccccggctccaccgccccccccgcccacggcgtcacctccgcccccgacacccgccccgcccccggctccaccgccccccccgcccacggcgtcacctccgcccccgacacccgccccgcccccggctccaccgccccccccgcccacggcgtcacctccgcccccgacacccgccccgcccccggctccaccgccccccccgcccacggcgtcacctccgcccccgacacccgccccgcccccggctccaccgccccccccgcccacggcgtcacctccgcccccgacacccgccccgcccccggctccaccgccccccccgcccacggcgtcacctccgcccccgacacccgccccgcccccggctccaccgccccccccgcccacggcgtcacctccgcccccgacacccgccccgcccccggctccaccgccccccccgcccacggcgtcacctccgcccccgacacccgccccgcccccggctccaccgccccccccgcccacggcgtcacctccgcccccgacacccgccccgcccccggctccaccgccccccccgcccacggcgtcacctccgcccccgacacccgccccgcccccggctccaccgccccccccgcccacggcgtcacctccgcccccgacacccgccccgcccccggctccaccgccccccccgcccacggcgtcacctccgcccccgacacccgccccgcccccggctccaccgccccccccgcccacggcgtcacctccgcccccgacacccgccccgcccccggctccaccgccccccccgcccacggcgtcacctccgcccccgacacccgccccgcccccggctccaccgccccccccgcccacggcgtcacctccgcccccgacacccgccccgcccccggctccaccgccccccccgcccacggcgtcacctccgcccccgacacccgccccgcccccggctccaccgccccccccgcccacggcgtcacctccgcccccgacacccgccccgcccccggctccaccgccccccccgcccacggcgtcacctccgcccccgacacccgccccgcccccggctccaccgccccccccgcccacggcgtcacctccgcccccgacacccgccccgcccccggctccaccgccccccccgcccacggcgtcacctccgcccccgacacccgccccgcccccggctccaccgccccccccgcccacggcgtcacctccgcccccgacacccgccccgcccccggctccaccgccccccccgcccacggcgtcacctccgcccccgacacccgccccgcccccggctccaccgccccccccgcccacggcgtcacctccgcccccgacacccgccccgcccccggctccaccgccccccccgcccacggcgtcacctccgcccccgacacccgccccgcccccggctccaccgccccccccgcccacggcgtcacctccgcccccgacacccgccccgcccccggctccaccgccccccccgcccacggcgtcacctccgcccccgacacccgccccgcccccggctccaccgccccccccgcccacggcgtcacctccgcccccgacacccgccccgcccccggctccaccgccccccccgcccacggcgtcacctccgcccccgacacccgccccgcccccggctccaccgccccccccgcccacggcgtcacctccgcccccgacacccgccccgcccccggctccaccgccccccccgcccacggcgtcacctccgcccccgacacccgccccgcccccggctccaccgccccccccgcccacggcgtcacctccgcccccgacacccgccccgcccccggctccaccgccccccccgcccacggcgtcacctccgcccccgacaaccgccccgccctcggctccaccgccccccccgtccacaacgtcacctccgcctccggctccgcctccggctccgcctccaccctcgtccacaacggcacctccgcccgcgccaccaccacccccgcctccaagtccacccccttctccatcccctcccaccactccgacacccccaccaccctcgcctcccactccaccaagaccgacgcctcctccacccaccactcctccgtcccccccctcacctcctccaaccactccacctccccccagctctccaccggcgtctccttcttcttcctctccttccacatctccaacctccagttcaactcctccctcgaggacccctccaccgactactaccaggagctccagcgcgacatctccgagatgttcctccagatctacaagcagggcggcttcctcggcctctccaacatcaagttccgccccggctccgtcgtcgtccagctcaccctcgccttccgcgagggcaccatcaacgtccacgacgtcgagacccagttcaaccagtacaagaccgaggccgcctcccgctacaacctcaccatctccgacgtctccgtctccgacgtccccttccccttctccgcccagtccggcgccggcgtccccggctggggcatcgccctcctcgtcctcgtctgcgtcctcgtcgccctcgccatcgtctacctcatcgccctcgccgtctgccagtgccgccgcaagaactacggccagctcgacatcttccccgcccgcgacacctaccaccccatgtccgagtaccccacctaccacacccacggccgctacgtccccccctcctccaccgaccgctccccctacgagaaggtctccgccggcaacggcggctcctccctctcctacaccaaccccgccgtcgccgccgcctccgccaacctctga

SEQ ID NO: 1861 - RNA, 2136 nt, synthetic construct
  misc_feature 1..2136: note = NM_032853 variant
  source 1..2136: mol_type = other RNA
atgatggccgacgccaagtacgtcctctgccgctgggagaagcgcctctggcccgccaaggtcctcgcccgcaccgccacctccaccaagaacaagcgccgcaaggagtacttcctcgccgtccagatcctctccctcgaggagaagatcaaggtcaagtccaccgaggtcgagatcctcgagaagtcccagatcgaggccatcgcctcctccctcgcctcccagaacgaggtccccgccgcccccctcgaggagctcgcctaccgccgctccctccgcgtcgccctcgacgtcctctccgagggctccatctggtcccaggagtcctccgccggcaccggccgcgccgaccgctccctccgcggcaagcccatggagcacgtctcctccccctgcgactccaactcctcctccctcccccgcggcgacgtcctcggctcctcccgcccccaccgccgccgcccctgcgtccagcagtccctctcctcctccttcacctgcgagaaggaccccgagtgcaaggtcgaccacaagaagggcctccgcaagtccgagaacccccgcggccccctcgtcctccccgccggcggcggcgcccaggacgagtccggctcccgcatccaccacaagaactggaccctcgcctccaagcgcggcggcaactccgcccagaaggcctccctctgcctcaacggctcctccctctccgaggacgacaccgagcgcgacatgggctccaagggcggctcctgggccgccccctccctcccctccggcgtccgcgaggacgacccctgcgccaacgccgagggccacgaccccggcctccccctcggctccctcaccgccccccccgcccccgagccctccgcctgctccgagcccggcgagtgccccgccaagaagcgcccccgcctcgacggctcccagcgcccccccgccgtccagctcgagcccatggccgccggcgccgccccctcccccggccccggccccggcccccgcgagtccgtcaccccccgctccaccgcccgcctcggcccccccccctcccacgcctccgccgacgccacccgctgcctcccctgccccgactcccagaagctcgagaaggagtgccagtcctccgaggagtccatgggctccaactccatgcgctccatcctcgaggaggacgaggaggacgaggagcccccccgcgtcctcctctaccacgagccccgctccttcgaggtcggcatgctcgtctggcacaagcacaagaagtaccccttctggcccgccgtcgtcaagtccgtccgccagcgcgacaagaaggcctccgtcctctacatcgagggccacatgaaccccaagatgaagggcttcaccgtctccctcaagtccctcaagcacttcgactgcaaggagaagcagaccctcctcaaccaggcccgcgaggacttcaaccaggacatcggctggtgcgtctccctcatcaccgactaccgcgtccgcctcggctgcggctccttcgccggctccttcctcgagtactacgccgccgacatctcctaccccgtccgcaagtccatccagcaggacgtcctcggcaccaagctcccccagctctccaagggctcccccgaggagcccgtcgtcggctgccccctcggccagcgccagccctgccgcaagatgctccccgaccgctcccgcgccgcccgcgaccgcgccaaccagaagctcgtcgagtacatcgtcaaggccaagggcgccgagtcccacctccgcgccatcctcaagtcccgcaagccctcccgctggctccagaccttcctctcctcctcccagtacgtcacctgcgtcgagacctacctcgaggacgagggccagctcgacctcgtcgtcaagtacctccagggcgtctaccaggaggtcggcgccaaggtcctccagcgcaccaacggcgaccgcatccgcttcatcctcgacgtcctcctccccgaggccatcatctgcgccatctccgccgtcgacgaggtcgactacaagaccgccgaggagaagtacatcaagggcccctccctctcctaccgcgagaaggagatcttcgacaaccagctcctcgaggagcgcaaccgccgccgccgctga

SEQ ID NO: 1862 - RNA, 438 nt, synthetic construct
  misc_feature 1..438: note = AAD44697 variant
  source 1..438: mol_type = other RNA
atgaccgtccacaacctctacctcttcgaccgcaacggcgtctgcctccactactccgagtggcaccgcaagaagcaggccggcatccccaaggaggaggagtacaagctcatgtacggcatgctcttctccatccgctccttcgtctccaagatgtcccccctcgacatgaaggacggcttcctcgccttccagacctcccgctacaagctccactactacgagacccccaccggcatcaaggtcgtcatgaacaccgacctcggcgtcggccccatccgcgacgtcctccaccacatctactccgccctctacgtcgagctcgtcgtcaagaaccccctctgccccctcggccagaccgtccagtccgagctcttccgctcccgcctcgactcctacgtccgctccctccccttcttctccgcccgcgccggctga

SEQ ID NO: 1863 - RNA, 1395 nt, synthetic construct
  misc_feature 1..1395: note = AAH02712 variant
  source 1..1395: mol_type = other RNA
atgccctcctgctccacctccaccatgcccggcatgatctgcaagaaccccgacctcgagttcgactccctccagccctgcttctaccccgacgaggacgacttctacttcggcggccccgactccaccccccccggcgaggacatctggaagaagttcgagctcctccccaccccccccctctccccctcccgcggcttcgccgagcactcctccgagcccccctcctgggtcaccgagatgctcctcgagaacgagctctggggctcccccgccgaggaggacgccttcggcctcggcggcctcggcggcctcacccccaaccccgtcatcctccaggactgcatgtggtccggcttctccgcccgcgagaagctcgagcgcgccgtctccgagaagctccagcacggccgcggcccccccaccgccggctccaccgcccagtcccccggcgccggcgccgcctcccccgccggccgcggccacggcggcgccgccggcgccggccgcgccggcgccgccctccccgccgagctcgcccaccccgccgccgagtgcgtcgaccccgccgtcgtcttccccttccccgtcaacaagcgcgagcccgcccccgtccccgccgcccccgcctccgcccccgccgccggccccgccgtcgcctccggcgccggcatcgccgcccccgccggcgcccccggcgtcgcccccccccgccccggcggccgccagacctccggcggcgaccacaaggccctctccacctccggcgaggacaccctctccgactccgacgacgaggacgacgaggaggaggacgaggaggaggagatcgacgtcgtcaccgtcgagaagcgccgctcctcctccaacaccaaggccgtcaccaccttcaccatcaccgtccgccccaagaacgccgccctcggccccggccgcgcccagtcctccgagctcatcctcaagcgctgcctccccatccaccagcagcacaactacgccgccccctccccctacgtcgagtccgaggacgcccccccccagaagaagatcaagtccgaggcctccccccgccccctcaagtccgtcatcccccccaaggccaagtccctctccccccgcaactccgactccgaggactccgagcgccgccgcaaccacaacatcctcgagcgccagcgccgcaacgacctccgctcctccttcctcaccctccgcgaccacgtccccgagctcgtcaagaacgagaaggccgccaaggtcgtcatcctcaagaaggccaccgagtacgtccactccctccaggccgaggagcaccagctcctcctcgagaaggagaagctccaggcccgccagcagcagctcctcaagaagatcgagcacgcccgcacctgctga

SEQ ID NO: 1864 - RNA, 3132 nt, synthetic construct
  misc_feature 1..3132: note = AAC78645 variant
  source 1..3132: mol_type = other RNA
atgcccctcctcgagggctccgtcggcgtcgaggacctcgtcctcctcgagcccctcgtcgaggagtccctcctcaagaacctccagctccgctacgagaacaaggagatctacacctacatcggcaacgtcgtcatctccgtcaacccctaccagcagctccccatctacggccccgagttcatcgccaagtaccaggactacaccttctacgagctcaagccccacatctacgccctcgccaacgtcgcctaccagtccctccgcgaccgcgaccgcgaccagtgcatcctcatcaccggcgagtccggctccggcaagaccgaggcctccaagctcgtcatgtcctacgtcgccgccgtctgcggcaagggcgagcaggtcaactccgtcaaggagcagctcctccagtccaaccccgtcctcgaggccttcggcaacgccaagaccatccgcaacaacaactcctcccgcttcggcaagtacatggacatcgagttcgacttcaagggctcccccctcggcggcgtcatcaccaactacctcctcgagaagtcccgcctcgtcaagcagctcaagggcgagcgcaacttccacatcttctaccagctcctcgccggcgccgacgagcagctcctcaaggccctcaagctcgagcgcgacaccaccggctacgcctacctcaaccacgaggtctcccgcgtcgacggcatggacgacgcctcctccttccgcgccgtccagtccgccatggccgtcatcggcttctccgaggaggagatccgccaggtcctcgaggtcacctccatggtcctcaagctcggcaacgtcctcgtcgccgacgagttccaggcctccggcatccccgcctccggcatccgcgacggccgcggcgtccgcgagatcggcgagatggtcggcctcaactccgaggaggtcgagcgcgccctctgctcccgcaccatggagaccgccaaggagaaggtcgtcaccgccctcaacgtcatgcaggcccagtacgcccgcgacgccctcgccaagaacatctactcccgcctcttcgactggatcgtcaaccgcatcaacgagtccatcaaggtcggcatcggcgagaagaagaaggtcatgggcgtcctcgacatctacggcttcgagatcctcgaggacaactccttcgagcagttcgtcatcaactactgcaacgagaagctccagcaggtcttcatcgagatgaccctcaaggaggagcaggaggagtacaagcgcgagggcatcccctggaccaaggtcgactacttcgacaacggcatcatctgcaagctcatcgagcacaaccagcgcggcatcctcgccatgctcgacgaggagtgcctccgccccggcgtcgtctccgactccaccttcctcgccaagctcaaccagctcttctccaagcacggccactacgagtccaaggtcacccagaacgcccagcgccagtacgaccacaccatgggcctctcctgcttccgcatctgccactacgccggcaaggtcacctacaacgtcacctccttcatcgacaagaacaacgacctcctcttccgcgacctcctccaggccatgtggaaggcccagcaccccctcctccgctccctcttccccgagggcaaccccaagcaggcctccctcaagcgcccccccaccgccggcgcccagttcaagtcctccgtcgccatcctcatgaagaacctctactccaagtcccccaactacatccgctgcatcaagcccaacgagcaccagcagcgcggccagttctcctccgacctcgtcgccacccaggcccgctacctcggcctcctcgagaacgtccgcgtccgccgcgccggctacgcccaccgccagggctacggccccttcctcgagcgctaccgcctcctctcccgctccacctggccccactggaacggcggcgaccgcgagggcgtcgagaaggtcctcggcgagctctccatgtcctccggcgagctcgccttcggcaagaccaagatcttcatccgctcccccaagaccctcttctacctcgaggagcagcgccgcctccgcctccagcagctcgccaccctcatccagaagatctaccgcggctggcgctgccgcacccactaccagctcatgcgcaagtcccagatcctcatctcctcctggttccgcggcaacatgcagaagaagtgctacggcaagatcaaggcctccgtcctcctcatccaggccttcgtccgcggctggaaggcccgcaagaactaccgcaagtacttccgctccgaggccgccctcaccctcgccgacttcatctacaagtccatggtccagaagttcctcctcggcctcaagaacaacctcccctccaccaacgtcctcgacaagacctggcccgccgccccctacaagtgcctctccaccgccaaccaggagctccagcagctcttctaccagtggaagtgcaagcgcttccgcgaccagctctcccccaagcaggtcgagatcctccgcgagaagctctgcgcctccgagctcttcaagggcaagaaggcctcctacccccagtccgtccccatccccttctgcggcgactacatcggcctccagggcaaccccaagctccagaagctcaagggcggcgaggagggccccgtcctcatggccgaggccgtcaagaaggtcaaccgcggcaacggcaagacctcctcccgcatcctcctcctcaccaagggccacgtcatcctcaccgacaccaagaagtcccaggccaagatcgtcatcggcctcgacaacgtcgccggcgtctccgtcacctccctcaaggacggcctcttctccctccacctctccgagatgtcctccgtcggctccaagggcgacttcctcctcgtctccgagcacgtcatcgagctcctcaccaagatgtaccgcgccgtcctcgacgccacccagcgccagctcaccgtcaccgtcaccgagaagttctccgtccgcttcaaggagaactccgtcgccgtcaaggtcgtccagggccccgccggcggcgacaactccaagctccgctacaagaagaagggctcccactgcctcgaggtcaccgtccagtga

SEQ ID NO: 1865 - RNA, 3411 nt, synthetic construct
  misc_feature 1..3411: note = AAH53558 variant
  source 1..3411: mol_type = other RNA
atggccaagatggaggtcaagacctccctcctcgacaacatgatcggcgtcggcgacatggtcctcctcgagcccctcaacgaggagaccttcatcaacaacctcaagaagcgcttcgaccactccgagatctacacctacatcggctccgtcgtcatctccgtcaacccctaccgctccctccccatctactcccccgagaaggtcgaggagtaccgcaaccgcaacttctacgagctctccccccacatcttcgccctctccgacgaggcctaccgctccctccgcgaccaggacaaggaccagtgcatcctcatcaccggcgagtccggcgccggcaagaccgaggcctccaagctcgtcatgtcctacgtcgccgccgtctgcggcaagggcgccgaggtcaaccaggtcaaggagcagctcctccagtccaaccccgtcctcgaggccttcggcaacgccaagaccgtccgcaacgacaactcctcccgcttcggcaagtacatggacatcgagttcgacttcaagggcgaccccctcggcggcgtcatctccaactacctcctcgagaagtcccgcgtcgtcaagcagccccgcggcgagcgcaacttccacgtcttctaccagctcctctccggcgcctccgaggagctcctcaacaagctcaagctcgagcgcgacttctcccgctacaactacctctccctcgactccgccaaggtcaacggcgtcgacgacgccgccaacttccgcaccgtccgcaacgccatgcagatcgtcggcttcatggaccacgaggccgagtccgtcctcgccgtcgtcgccgccgtcctcaagctcggcaacatcgagttcaagcccgagtcccgcgtcaacggcctcgacgagtccaagatcaaggacaagaacgagctcaaggagatctgcgagctcaccggcatcgaccagtccgtcctcgagcgcgccttctccttccgcaccgtcgaggccaagcaggagaaggtctccaccaccctcaacgtcgcccaggcctactacgcccgcgacgccctcgccaagaacctctactcccgcctcttctcctggctcgtcaaccgcatcaacgagtccatcaaggcccagaccaaggtccgcaagaaggtcatgggcgtcctcgacatctacggcttcgagatcttcgaggacaactccttcgagcagttcatcatcaactactgcaacgagaagctccagcagatcttcatcgagctcaccctcaaggaggagcaggaggagtacatccgcgaggacatcgagtggacccacatcgactacttcaacaacgccatcatctgcgacctcatcgagaacaacaccaacggcatcctcgccatgctcgacgaggagtgcctccgccccggcaccgtcaccgacgagaccttcctcgagaagctcaaccaggtctgcgccacccaccagcacttcgagtcccgcatgtccaagtgctcccgcttcctcaacgacacctccctcccccactcctgcttccgcatccagcactacgccggcaaggtcctctaccaggtcgagggcttcgtcgacaagaacaacgacctcctctaccgcgacctctcccaggccatgtggaaggcctcccacgccctcatcaagtccctcttccccgagggcaaccccgccaagatcaacctcaagcgcccccccaccgccggctcccagttcaaggcctccgtcgccaccctcatgaagaacctccagaccaagaaccccaactacatccgctgcatcaagcccaacgacaagaaggccgcccacatcttcaacgaggccctcgtctgccaccagatccgctacctcggcctcctcgagaacgtccgcgtccgccgcgccggctacgccttccgccaggcctacgagccctgcctcgagcgctacaagatgctctgcaagcagacctggccccactggaagggccccgcccgctccggcgtcgaggtcctcttcaacgagctcgagatccccgtcgaggagtactccttcggccgctccaagatcttcatccgcaacccccgcaccctcttcaagctcgaggacctccgcaagcagcgcctcgaggacctcgccaccctcatccagaagatctaccgcggctggaagtgccgcacccacttcctcctcatgaagaagtcccagatcgtcatcgccgcctggtaccgccgctacgcccagcagaagcgctaccagcagaccaagtcctccgccctcgtcatccagtcctacatccgcggctggaaggcccgcaagatcctccgcgagctcaagcaccagaagcgctgcaaggaggccgtcaccaccatcgccgcctactggcacggcacccaggcccgccgcgagctccgccgcctcaaggaggaggcccgcaacaagcacgccatcgccgtcatctgggcctactggctcggctccaaggcccgccgcgagctcaagcgcctcaaggaggaggcccgccgcaagcacgccgtcgccgtcatctgggcctactggctcggcctcaaggtccgccgcgagtaccgcaagttcttccgcgccaacgccggcaagaagatctacgagttcaccctccagcgcatcgtccagaagtacttcctcgagatgaagaacaagatgccctccctctcccccatcgacaagaactggccctcccgcccctacctcttcctcgactccacccacaaggagctcaagcgcatcttccacctctggcgctgcaagaagtaccgcgaccagttcaccgaccagcagaagctcatctacgaggagaagctcgaggcctccgagctcttcaaggacaagaaggccctctacccctcctccgtcggccagcccttccagggcgcctacctcgagatcaacaagaaccccaagtacaagaagctcaaggacgccatcgaggagaagatcatcatcgccgaggtcgtcaacaagatcaaccgcgccaacggcaagtccacctcccgcatcttcctcctcaccaacaacaacctcctcctcgccgaccagaagtccggccagatcaagtccgaggtccccctcgtcgacgtcaccaaggtctccatgtcctcccagaacgacggcttcttcgccgtccacctcaaggagggctccgaggccgcctccaagggcgacttcctcttctcctccgaccacctcatcgagatggccaccaagctctaccgcaccaccctctcccagaccaagcagaagctcaacatcgagatctccgacgagttcctcgtccagttccgccaggacaaggtctgcgtcaagttcatccagggcaaccagaagaacggctccgtccccacctgcaagcgcaagaacaaccgcctcctcgaggtcgccgtcccctga

SEQ ID NO: 1866 - RNA, 3192 nt, synthetic construct
  misc_feature 1..3192: note = CCDS42226.1 variant
  source 1..3192: mol_type = other RNA
atggccctccaggtcgagctcgtccccaccggcgagatcatccgcgtcgtccacccccaccgcccctgcaagctcgccctcggctccgacggcgtccgcgtcaccatggagtccgccctcaccgcccgcgaccgcgtcggcgtccaggacttcgtcctcctcgagaacttcacctccgaggccgccttcatcgagaacctccgccgccgcttccgcgagaacctcatctacacctacatcggccccgtcctcgtctccgtcaacccctaccgcgacctccagatctactcccgccagcacatggagcgctaccgcggcgtctccttctacgaggtccccccccacctcttcgccgtcgccgacaccgtctaccgcgccctccgcaccgagcgccgcgaccaggccgtcatgatctccggcgagtccggcgccggcaagaccgaggccaccaagcgcctcctccagttctacgccgagacctgccccgcccccgagcgcggcggcgccgtccgcgaccgcctcctccagtccaaccccgtcctcgaggccttcggcaacgccaagaccctccgcaacgacaactcctcccgcttcggcaagtacatggacgtccagttcgacttcaagggcgcccccgtcggcggccacatcctctcctacctcctcgagaagtcccgcgtcgtccaccagaaccacggcgagcgcaacttccacatcttctaccagctcctcgagggcggcgaggaggagaccctccgccgcctcggcctcgagcgcaacccccagtcctacctctacctcgtcaagggccagtgcgccaaggtctcctccatcaacgacaagtccgactggaaggtcgtccgcaaggccctcaccgtcatcgacttcaccgaggacgaggtcgaggacctcctctccatcgtcgcctccgtcctccacctcggcaacatccacttcgccgccaacgaggagtccaacgcccaggtcaccaccgagaaccagctcaagtacctcacccgcctcctctccgtcgagggctccaccctccgcgaggccctcacccaccgcaagatcatcgccaagggcgaggagctcctctcccccctcaacctcgagcaggccgcctacgcccgcgacgccctcgccaaggccgtctactcccgcaccttcacctggctcgtcggcaagatcaaccgctccctcgcctccaaggacgtcgagtccccctcctggcgctccaccaccgtcctcggcctcctcgacatctacggcttcgaggtcttccagcacaactccttcgagcagttctgcatcaactactgcaacgagaagctccagcagctcttcatcgagctcaccctcaagtccgagcaggaggagtacgaggccgagggcatcgcctgggagcccgtccagtacttcaacaacaagatcatctgcgacctcgtcgaggagaagttcaagggcatcatctccatcctcgacgaggagtgcctccgccccggcgaggccaccgacctcaccttcctcgagaagctcgaggacaccgtcaagcaccacccccacttcctcacccacaagctcgccgaccagcgcacccgcaagtccctcggccgcggcgagttccgcctcctccactacgccggcgaggtcacctactccgtcaccggcttcctcgacaagaacaacgacctcctcttccgcaacctcaaggagaccatgtgctcctccaagaaccccatcatgtcccagtgcttcgaccgctccgagctctccgacaagaagcgccccgagaccgtcgccacccagttcaagatgtccctcctccagctcgtcgagatcctccagtccaaggagcccgcctacgtccgctgcatcaagcccaacgacgccaagcagcccggccgcttcgacgaggtcctcatccgccaccaggtcaagtacctcggcctcctcgagaacctccgcgtccgccgcgccggcttcgcctaccgccgcaagtacgaggccttcctccagcgctacaagtccctctgccccgagacctggcccacctgggccggccgcccccaggacggcgtcgccgtcctcgtccgccacctcggctacaagcccgaggagtacaagatgggccgcaccaagatcttcatccgcttccccaagaccctcttcgccaccgaggacgccctcgaggtccgccgccagtccctcgccaccaagatccaggccgcctggcgcggcttccactggcgccagaagttcctccgcgtcaagcgctccgccatctgcatccagtcctggtggcgcggcaccctcggccgccgcaaggccgccaagcgcaagtgggccgcccagaccatccgccgcctcatccgcggcttcgtcctccgccacgccccccgctgccccgagaacgccttcttcctcgaccacgtccgcacctccttcctcctcaacctccgccgccagctcccccagaacgtcctcgacacctcctggcccacccccccccccgccctccgcgaggcctccgagctcctccgcgagctctgcatcaagaacatggtctggaagtactgccgctccatctcccccgagtggaagcagcagctccagcagaaggccgtcgcctccgagatcttcaagggcaagaaggacaactacccccagtccgtcccccgcctcttcatctccacccgcctcggcaccgacgagatctccccccgcgtcctccaggccctcggctccgagcccatccagtacgccgtccccgtcgtcaagtacgaccgcaagggctacaagccccgctcccgccagctcctcctcacccccaacgccgtcgtcatcgtcgaggacgccaaggtcaagcagcgcatcgactacgccaacctcaccggcatctccgtctcctccctctccgactccctcttcgtcctccacgtccagcgcgccgacaacaagcagaagggcgacgtcgtcctccagtccgaccacgtcatcgagaccctcaccaagaccgccctctccgccaaccgcgtcaactccatcaacatcaaccagggctccatcaccttcgccggcggccccggccgcgacggcaccatcgacttcacccccggctccgagctcctcatcaccaaggccaagaacggccacctcgccgtcgtcgccccccgcctcaactcccgctga

SEQ ID NO: 1867 - RNA, 3021 nt, synthetic construct
  misc_feature 1..3021: note = AAI46764 variant
  source 1..3021: mol_type = other RNA
atggccgagcaggagtccctcgagttcggcaaggccgacttcgtcctcatggacaccgtctccatgcccgagttcatggccaacctccgcctccgcttcgagaagggccgcatctacaccttcatcggcgaggtcgtcgtctccgtcaacccctacaagctcctcaacatctacggccgcgacaccatcgagcagtacaagggccgcgagctctacgagcgccccccccacctcttcgccatcgccgacgccgcctacaaggccatgaagcgccgctccaaggacacctgcatcgtcatctccggcgagtccggcgccggcaagaccgaggcctccaagtacatcatgcagtacatcgccgccatcaccaacccctcccagcgcgccgaggtcgagcgcgtcaagaacatgctcctcaagtccaactgcgtcctcgaggccttcggcaacgccaagaccaaccgcaacgacaactcctcccgcttcggcaagtacatggacatcaacttcgacttcaagggcgaccccatcggcggccacatcaacaactacctcctcgagaagtcccgcgtcatcgtccagcagcccggcgagcgctccttccactccttctaccagctcctccagggcggctccgagcagatgctccgctccctccacctccagaagtccctctcctcctacaactacatccacgtcggcgcccagctcaagtcctccatcaacgacgccgccgagttccgcgtcgtcgccgacgccatgaaggtcatcggcttcaagcccgaggagatccagaccgtctacaagatcctcgccgccatcctccacctcggcaacctcaagttcgtcgtcgacggcgacacccccctcatcgagaacggcaaggtcgtctccatcatcgccgagctcctctccaccaagaccgacatggtcgagaaggccctcctctaccgcaccgtcgccaccggccgcgacatcatcgacaagcagcacaccgagcaggaggcctcctacggccgcgacgccttcgccaaggccatctacgagcgcctcttctgctggatcgtcacccgcatcaacgacatcatcgaggtcaagaactacgacaccaccatccacggcaagaacaccgtcatcggcgtcctcgacatctacggcttcgagatcttcgacaacaactccttcgagcagttctgcatcaactactgcaacgagaagctccagcagctcttcatccagctcgtcctcaagcaggagcaggaggagtaccagcgcgagggcatcccctggaagcacatcgactacttcaacaaccagatcatcgtcgacctcgtcgagcagcagcacaagggcatcatcgccatcctcgacgacgcctgcatgaacgtcggcaaggtcaccgacgagatgttcctcgaggccctcaactccaagctcggcaagcacgcccacttctcctcccgcaagctctgcgcctccgacaagatcctcgagttcgaccgcgacttccgcatccgccactacgccggcgacgtcgtctactccgtcatcggcttcatcgacaagaacaaggacaccctcttccaggacttcaagcgcctcatgtacaactcctccaaccccgtcctcaagaacatgtggcccgagggcaagctctccatcaccgaggtcaccaagcgccccctcaccgccgccaccctcttcaagaactccatgatcgccctcgtcgacaacctcgcctccaaggagccctactacgtccgctgcatcaagcccaacgacaagaagtccccccagatcttcgacgacgagcgctgccgccaccaggtcgagtacctcggcctcctcgagaacgtccgcgtccgccgcgccggcttcgccttccgccagacctacgagaagttcctccaccgctacaagatgatctccgagttcacctggcccaaccacgacctcccctccgacaaggaggccgtcaagaagctcatcgagcgctgcggcttccaggacgacgtcgcctacggcaagaccaagatcttcatccgcaccccccgcaccctcttcaccctcgaggagctccgcgcccagatgctcatccgcatcgtcctcttcctccagaaggtctggcgcggcaccctcgcccgcatgcgctacaagcgcaccaaggccgccctcaccatcatccgctactaccgccgctacaaggtcaagtcctacatccacgaggtcgcccgccgcttccacggcgtcaagaccatgcgcgactacggcaagcacgtcaagtggccctccccccccaaggtcctccgccgcttcgaggaggccctccagaccatcttcaaccgctggcgcgcctcccagctcatcaagtccatccccgcctccgacctcccccaggtccgcgccaaggtcgccgccgtcgagatgctcaagggccagcgcgccgacctcggcctccagcgcgcctgggagggcaactacctcgcctccaagcccgacaccccccagacctccggcaccttcgtccccgtcgccaacgagctcaagcgcaaggacaagtacatgaacgtcctcttctcctgccacgtccgcaaggtcaaccgcttctccaaggtcgaggaccgcgccatcttcgtcaccgaccgccacctctacaagatggaccccaccaagcagtacaaggtcatgaagaccatccccctctacaacctcaccggcctctccgtctccaacggcaaggaccagctcgtcgtcttccacaccaaggacaacaaggacctcatcgtctgcctcttctccaagcagcccacccacgagtcccgcatcggcgagctcgtcggcgtcctcgtcaaccacttcaagtccgagaagcgccacctccaggtcaacgtcaccaaccccgtccagtgctccctccacggcaagaagtgcaccgtctccgtcgagacccgcctcaaccagccccagcccgacttcaccaagaaccgctccggcttcatcctctccgtccccggcaactga

SEQ ID NO: 1868 - RNA, 3327 nt, synthetic construct
  misc_feature 1..3327: note = CCDS32254.1 variant
  source 1..3327: mol_type = other RNA
atgggctccaagggcgtctaccagtaccactggcagtcccacaacgtcaagcactccggcgtcgacgacatggtcctcctctccaagatcaccgagaactccatcgtcgagaacctcaagaagcgctacatggacgactacatcttcacctacatcggctccgtcctcatctccgtcaaccccttcaagcagatgccctacttcggcgagaaggagatcgagatgtaccagggcgccgcccagtacgagaaccccccccacatctacgccctcgccgacaacatgtaccgcaacatgatcatcgaccgcgagaaccagtgcgtcatcatctccggcgagtccggcgccggcaagaccgtcgccgccaagtacatcatgtcctacatctcccgcgtctccggcggcggcaccaaggtccagcacgtcaaggacatcatcctccagtccaaccccctcctcgaggccttcggcaacgccaagaccgtccgcaacaacaactcctcccgcttcggcaagtacttcgagatccagttctcccccggcggcgagcccgacggcggcaagatctccaacttcctcctcgagaagtcccgcgtcgtcatgcgcaaccccggcgagcgctccttccacatcttctaccagctcatcgagggcgcctccgccgagcagaagcactccctcggcatcacctccatggactactactactacctctccctctccggctcctacaaggtcgacgacatcgacgaccgccgcgagttccaggagaccctccacgccatgaacgtcatcggcatcttcgccgaggagcagaccctcgtcctccagatcgtcgccggcatcctccacctcggcaacatctccttcaaggaggtcggcaactacgccgccgtcgagtccgaggagttcctcgccttccccgcctacctcctcggcatcaaccaggaccgcctcaaggagaagctcacctcccgccagatggactccaagtggggcggcaagtccgagtccatccacgtcaccctcaacgtcgagcaggcctgctacacccgcgacgccctcgccaaggccctccacgcccgcgtcttcgacttcctcgtcgactccatcaacaaggccatggagaaggaccacgaggagtacaacatcggcgtcctcgacatctacggcttcgagatcttccagaagaacggcttcgagcagttctgcatcaacttcgtcaacgagaagctccagcagatcttcatcgagctcaccctcaaggccgagcaggaggagtacgtccaggagggcatccgctggacccccatcgagtacttcaacaacaagatcgtctgcgacctcatcgagaacaaggtcaacccccccggcatcatgtccatcctcgacgacgtctgcgccaccatgcacgccgtcggcgagggcgccgaccagaccctcctccagaagctccagatgcagatcggctcccacgagcacttcaactcctggaaccagggcttcatcatccaccactacgccggcaaggtctcctacgacatggacggcttctgcgagcgcaaccgcgacgtcctcttcatggacctcatcgagctcatgcagtcctccgagctccccttcatcaagtccctcttccccgagaacctccaggccgacaagaagggccgccccaccaccgccggctccaagatcaagaagcaggccaacgacctcgtctccaccctcatgaagtgcaccccccactacatccgctgcatcaagcccaacgagaccaagaagccccgcgactgggaggagtcccgcgtcaagcaccaggtcgagtacctcggcctcaaggagaacatccgcgtccgccgcgccggctacgcctaccgccgcatcttccagaagttcctccagcgctacgccatcctcaccaaggccacctggccctcctggcagggcgaggagaagcagggcgtcctccacctcctccagtccgtcaacatggactccgaccagttccagctcggccgctccaaggtcttcatcaaggcccccgagtccctcttcctcctcgaggagatgcgcgagcgcaagtacgacggctacgcccgcgtcatccagaagtcctggcgcaagttcgtcgcccgcaagaagtacgtccagatgcgcgaggaggcctccgacctcctcctcaacaagaaggagcgccgccgcaactccatcaaccgcaacttcatcggcgactacatcggcatggaggagcaccccgagctccagcagttcgtcggcaagcgcgagaagatcgacttcgccgacaccgtcaccaagtacgaccgccgcttcaagggcgtcaagcgcgacctcctcctcacccccaagtgcctctacctcatcggccgcgagaaggtcaagcagggccccgacaagggcctcgtcaaggaggtcctcaagcgcaagatcgagatcgagcgcatcctctccgtctccctctccaccatgcaggacgacatcttcatcctccacgagcaggagtacgactccctcctcgagtccgtcttcaagaccgagttcctctccctcctcgccaagcgctacgaggagaagacccagaagcagctccccctcaagttctccaacaccctcgagctcaagctcaagaaggagaactggggcccctggtccgccggcggctcccgccaggtccagttccaccagggcttcggcgacctcgccgtcctcaagccctccaacaaggtcctccaggtctccatcggccccggcctccccaagaactcccgccccacccgccgcaacaccacccagaacaccggctactcctccggcacccagaacgccaactaccccgtccgcgccgccccccccccccccggctaccaccagaacggcgtcatccgcaaccagtacgtcccctacccccacgcccccggctcccagcgctccaaccagaagtccctctacacctccatggcccgcccccccctcccccgccagcagtccacctcctccgaccgcgtctcccagacccccgagtccctcgacttcctcaaggtccccgaccagggcgccgccggcgtccgccgccagaccacctcccgccccccccccgccggcggccgccccaagccccagcccaagcccaagccccaggtcccccagtgcaaggccctctacgcctacgacgcccaggacaccgacgagctctccttcaacgccaacgacatcatcgacatcatcaaggaggacccctccggctggtggaccggccgcctccgcggcaagcagggcctcttccccaacaactacgtcaccaagatctga

SEQ ID NO: 1869 - RNA, 3297 nt, synthetic construct
  misc_feature 1..3297: note = AAH28071 variant
  source 1..3297: mol_type = other RNA
atgggctccaaggagcgcttccactggcagtcccacaacgtcaagcagtccggcgtcgacgacatggtcctcctcccccagatcaccgaggacgccatcgccgccaacctccgcaagcgcttcatggacgactacatcttcacctacatcggctccgtcctcatctccgtcaaccccttcaagcagatgccctacttcaccgaccgcgagatcgacctctaccagggcgccgcccagtacgagaaccccccccacatctacgccctcaccgacaacatgtaccgcaacatgctcatcgactgcgagaaccagtgcgtcatcatctccggcgagtccggcgccggcaagaccgtcgccgccaagtacatcatgggctacatctccaaggtctccggcggcggcgagaaggtccagcacgtcaaggacatcatcctccagtccaaccccctcctcgaggccttcggcaacgccaagaccgtccgcaacaacaactcctcccgcttcggcaagtacttcgagatccagttctcccgcggcggcgagcccgacggcggcaagatctccaacttcctcctcgagaagtcccgcgtcgtcatgcagaacgagaacgagcgcaacttccacatctactaccagctcctcgagggcgcctcccaggagcagcgccagaacctcggcctcatgacccccgactactactactacctcaaccagtccgacacctaccaggtcgacggcaccgacgaccgctccgacttcggcgagaccctctccgccatgcaggtcatcggcatccccccctccatccagcagctcgtcctccagctcgtcgccggcatcctccacctcggcaacatctccttctgcgaggacggcaactacgcccgcgtcgagtccgtcgacctcctcgccttccccgcctacctcctcggcatcgactccggccgcctccaggagaagctcacctcccgcaagatggactcccgctggggcggccgctccgagtccatcaacgtcaccctcaacgtcgagcaggccgcctacacccgcgacgccctcgccaagggcctctacgcccgcctcttcgacttcctcgtcgaggccatcaaccgcgccatgcagaagccccaggaggagtactccatcggcgtcctcgacatctacggcttcgagatcttccagaagaacggcttcgagcagttctgcatcaacttcgtcaacgagaagctccagcagatcttcatcgagctcaccctcaaggccgagcaggaggagtacgtccaggagggcatccgctggacccccatccagtacttcaacaacaaggtcgtctgcgacctcatcgagaacaagctctccccccccggcatcatgtccgtcctcgacgacgtctgcgccaccatgcacgccaccggcggcggcgccgaccagaccctcctccagaagctccaggccgccgtcggcacccacgagcacttcaactcctggtccgccggcttcgtcatccaccactacgccggcaaggtctcctacgacgtctccggcttctgcgagcgcaaccgcgacgtcctcttctccgacctcatcgagctcatgcagacctccgagcaggccttcctccgcatgctcttccccgagaagctcgacggcgacaagaagggccgcccctccaccgccggctccaagatcaagaagcaggccaacgacctcgtcgccaccctcatgcgctgcaccccccactacatccgctgcatcaagcccaacgagaccaagcgcccccgcgactgggaggagaaccgcgtcaagcaccaggtcgagtacctcggcctcaaggagaacatccgcgtccgccgcgccggcttcgcctaccgccgccagttcgccaagttcctccagcgctacgccatcctcacccccgagacctggccccgctggcgcggcgacgagcgccagggcgtccagcacctcctccgcgccgtcaacatggagcccgaccagtaccagatgggctccaccaaggtcttcgtcaagaaccccgagtccctcttcctcctcgaggaggtccgcgagcgcaagttcgacggcttcgcccgcaccatccagaaggcctggcgccgccacgtcgccgtccgcaagtacgaggagatgcgcgaggaggcctccaacatcctcctcaacaagaaggagcgccgccgcaactccatcaaccgcaacttcgtcggcgactacctcggcctcgaggagcgccccgagctccgccagttcctcggcaagcgcgagcgcgtcgacttcgccgactccgtcaccaagtacgaccgccgcttcaagcccatcaagcgcgacctcatcctcacccccaagtgcgtctacgtcatcggccgcgagaaggtcaagaagggccccgagaagggccaggtctgcgaggtcctcaagaagaaggtcgacatccaggccctccgcggcgtctccctctccacccgccaggacgacttcttcatcctccaggaggacgccgccgactccttcctcgagtccgtcttcaagaccgagttcgtctccctcctctgcaagcgcttcgaggaggccacccgccgccccctccccctcaccttctccgacaccctccagttccgcgtcaagaaggagggctggggcggcggcggcacccgctccgtcaccttctcccgcggcttcggcgacctcgccgtcctcaaggtcggcggccgcaccctcaccgtctccgtcggcgacggcctccccaagtcctccaagcccacccgcaagggcatggccaagggcaagccccgccgctcctcccaggcccccacccgcgccgcccccgcccccccccgcggcatggaccgcaacggcgtccccccctccgcccgcggcggccccctccccctcgagatcatgtccggcggcggcacccaccgccccccccgcggccccccctccacctccctcggcgcctcccgccgcccccgcgcccgccccccctccgagcacaacaccgagttcctcaacgtccccgaccagggcatggccggcatgcagcgcaagcgctccgtcggccagcgccccgtccccggcgtcggccgccccaagccccagccccgcacccacggcccccgctgccgcgccctctaccagtacgtcggccaggacgtcgacgagctctccttcaacgtcaacgaggtcatcgagatcctcatggaggacccctccggctggtggaagggccgcctccacggccaggagggcctcttccccggcaactacgtcgagaagatctga

SEQ ID NO: 1870 - RNA, 3057 nt, synthetic construct
  misc_feature 1..3057: note = CCDS34629.1 variant
  source 1..3057: mol_type = other RNA
atggaggacgaggagggccccgagtacggcaagcccgacttcgtcctcctcgaccaggtcaccatggaggacttcatgcgcaacctccagctccgcttcgagaagggccgcatctacacctacatcggcgaggtcctcgtctccgtcaacccctaccaggagctccccctctacggccccgaggccatcgcccgctaccagggccgcgagctctacgagcgccccccccacctctacgccgtcgccaacgccgcctacaaggccatgaagcaccgctcccgcgacacctgcatcgtcatctccggcgagtccggcgccggcaagaccgaggcctccaagcacatcatgcagtacatcgccgccgtcaccaacccctcccagcgcgccgaggtcgagcgcgtcaaggacgtcctcctcaagtccacctgcgtcctcgaggccttcggcaacgcccgcaccaaccgcaaccacaactcctcccgcttcggcaagtacatggacatcaacttcgacttcaagggcgaccccatcggcggccacatccactcctacctcctcgagaagtcccgcgtcctcaagcagcacgtcggcgagcgcaacttccacgccttctaccagctcctccgcggctccgaggacaagcagctccacgagctccacctcgagcgcaaccccgccgtctacaacttcacccaccagggcgccggcctcaacatgaccgtccactccgccctcgactccgacgagcagtcccaccaggccgtcaccgaggccatgcgcgtcatcggcttctcccccgaggaggtcgagtccgtccaccgcatcctcgccgccatcctccacctcggcaacatcgagttcgtcgagaccgaggagggcggcctccagaaggagggcctcgccgtcgccgaggaggccctcgtcgaccacgtcgccgagctcaccgccaccccccgcgacctcgtcctccgctccctcctcgcccgcaccgtcgcctccggcggccgcgagctcatcgagaagggccacaccgccgccgaggcctcctacgcccgcgacgcctgcgccaaggccgtctaccagcgcctcttcgagtgggtcgtcaaccgcatcaactccgtcatggagccccgcggccgcgacccccgccgcgacggcaaggacaccgtcatcggcgtcctcgacatctacggcttcgaggtcttccccgtcaactccttcgagcagttctgcatcaactactgcaacgagaagctccagcagctcttcatccagctcatcctcaagcaggagcaggaggagtacgagcgcgagggcatcacctggcagtccgtcgagtacttcaacaacgccaccatcgtcgacctcgtcgagcgcccccaccgcggcatcctcgccgtcctcgacgaggcctgctcctccgccggcaccatcaccgaccgcatcttcctccagaccctcgacatgcaccaccgccaccacctccactacacctcccgccagctctgccccaccgacaagaccatggagttcggccgcgacttccgcatcaagcactacgccggcgacgtcacctactccgtcgagggcttcatcgacaagaaccgcgacttcctcttccaggacttcaagcgcctcctctacaactccaccgaccccaccctccgcgccatgtggcccgacggccagcaggacatcaccgaggtcaccaagcgccccctcaccgccggcaccctcttcaagaactccatggtcgccctcgtcgagaacctcgcctccaaggagcccttctacgtccgctgcatcaagcccaacgaggacaaggtcgccggcaagctcgacgagaaccactgccgccaccaggtcgcctacctcggcctcctcgagaacgtccgcgtccgccgcgccggcttcgcctcccgccagccctactcccgcttcctcctccgctacaagatgacctgcgagtacacctggcccaaccacctcctcggctccgacaaggccgccgtctccgccctcctcgagcagcacggcctccagggcgacgtcgccttcggccactccaagctcttcatccgctccccccgcaccctcgtcaccctcgagcagtcccgcgcccgcctcatccccatcatcgtcctcctcctccagaaggcctggcgcggcaccctcgcccgctggcgctgccgccgcctccgcgccatctacaccatcatgcgctggttccgccgccacaaggtccgcgcccacctcgccgagctccagcgccgcttccaggccgcccgccagccccccctctacggccgcgacctcgtctggcccctcccccccgccgtcctccagcccttccaggacacctgccacgccctcttctgccgctggcgcgcccgccagctcgtcaagaacatccccccctccgacatgccccagatcaaggccaaggtcgccgccatgggcgccctccagggcctccgccaggactggggctgccgccgcgcctgggcccgcgactacctctcctccgccaccgacaaccccaccgcctcctccctcttcgcccagcgcctcaagaccctccaggacaaggacggcttcggcgccgtcctcttctcctcccacgtccgcaaggtcaaccgcttccacaagatccgcaaccgcgccctcctcctcaccgaccagcacctctacaagctcgaccccgaccgccagtaccgcgtcatgcgcgccgtccccctcgaggccgtcaccggcctctccgtcacctccggcggcgaccagctcgtcgtcctccacgcccgcggccaggacgacctcgtcgtctgcctccaccgctcccgcccccccctcgacaaccgcgtcggcgagctcgtcggcgtcctcgccgcccactgccagggcgagggccgcaccctcgaggtccgcgtctccgactgcatccccctctcccaccgcggcgtccgccgcctcatctccgtcgagccccgccccgagcagcccgagcccgacttccgctgcgcccgcggctccttcaccctcctctggccctcccgctga

SEQ ID NO: 1871 - RNA, 3069 nt, synthetic construct
  misc_feature 1..3069: note = CCDS53826.1 variant
  source 1..3069: mol_type = other RNA
atggagggcgccctcaccgcccgcgacaaggtcggcgtccaggacttcgtcctcctcgacgcctacacctccgagtccgccttcgtcgacaacctccgcaagcgcttctccgagaacctcatctacacctacatcggcaccctcctcgtctccgtcaacccctaccaggagctcggcatctacaccgtctcccagatggagctctaccagggcgtcaacttcttcgagctccccccccacgtctacgccatcgccgacaacgcctaccgcatgatgtgcgccgagctcaacaaccacttcatcctcatctccggcgagtccggcgccggcaagaccgaggcctccaagaagatcctcgagtacttcgccgtcacctgccccatgacccagtccctccagatcgcccgcgaccgcctcctcttctccaaccccgtcctcgaggccttcggcaacgcccgcaccctccgcaacgacaactcctcccgcttcggcaagtacatggacatccagttcgacttccagggcatccccgtcggcggccacatcatctcctacctcatcgagaagtcccgcgtcgtctaccagaacgagggcgagcgcaacttccacatcttctaccagctcctcgccggcggcgaggaggagcgcctctcctacctcggcctcgagcgcgacccccagctctacaagtacctctcccagggccactgcgccaaggagtcctccatctccgacaagaacgactggaagaccgtctccaacgccttctccgtcatcgacttcaccgaggccgacctcgagaacctcttcggcatcatcgcctccgtcctccacctcggcaacatcggcttcgaggaggacgaccagggctgcgccaccatccccgacacccacgagatcaagtggatcgccaagctcctcggcgtccacccctccgtcctcctcgaggccctcacccaccgcaagatcgaggccaagaccgaggaggtcatctgccccctcaccctcgagctctccgtctacgcccgcgacgccatggccaaggccgtctacggccgcaccttcacctggctcgtcaacaagatcaactcctccctcgtcaacaaggacttcacccgcaagaccgtcatcggcctcctcgacatctacggcttcgaggtcttcgacaagaacggcttcgagcagttctgcatcaactactgcaacgagaagctccagcagctcctcatcgagcgcaccctcaaggccgagcaggccgagtacgagatggagggcatcgagtgggagcccatcaagtacttcaacaacaagatcatctgcgacctcgtcgaggagcgccacaagggcatcatctccatcctcgacgaggagtgcatccgccccggccccgccaccgacctctccttcctcgagaagctcgaggagaaggtcggcaagcacgcccacttcgagacccgcaagctcgccggccccaagggccgcaagcgcatcggctggatggagttccgcctcctccactacgccggcgaggtcacctactgcaccaagggcttcctcgagaagaacaacgacctcctctaccgccacctcaaggaggtcctctgcaagtccaagaacatcatcctccgcgagtgcttcctcctcgccgagctcgagaaccgccgccgcccccccaccgtcggcacccagttcaagaactccctctcctccctcctcgagaccctcatctccaaggagccctcctacatccgctgcatcaagcccaacgaccgcaaggagccctccaagttcgacgacttcctcatccgccaccagatcaagtacctcggcctcatggagcacctccgcgtccgccgcgccggcttcgcctaccgccgcaagtacgagcacttcctccagcgctacaagtccctctgccccgacacctggccccactggcacggcccccccgccgagggcgtcgagcgcctcatcaagtacatcggctacaagcccgaggagtacaagctcggcaagaccaagatcttcatccgcttcccccgcaccctcttcgccaccgaggacgccttcgagttctccaagcaccagctcgtcgcccgcatccaggccacctacaagcgctgcctcggccgccgcgagtacgtcaagaagcgccaggccgccatcaagctcgaggcccactggcgcggcgccctcgcccgcaaggccatccagcgccgcaagtgggccgtccgcatcatccgcaagttcatcaagggcttcatctcccgcaacaagcccctctgccccgacaacgaggagttcatcgtcttcgtccgcaagaactacatcctcaacctccgctaccacctccccaagaccgtcctcgacaagtcctggctccgcccccccggcatcctcgagaacgcctccgacctcctccgcaagatgtgcgtccgcaacctcgtccagaagtactgccgcggcatcaccgccgagcgcaaggccatgatgcagcagaaggtcgtcacctccgagatcttccgcggccgcaaggacggctacaccgagtccctcaaccagcccttcgtcaactcccgcatcgacgagggcgacatcaaccccaaggtcctccagctcatctcccacgagaagatccagtacggcgtccccgtcatcaagtacgaccgcaagggcttcaaggcccgccagcgccagctcatcctcacccagaaggccgcctacgtcgtcgagctcgccaagatcaagcagaagatcgagtactccgccctcaagggcgtctccacctccaacctctccgacggcatcctcgtcatccacgtctcccccgaggactccaagcagaagggcgacgccgtcctccagtgcggccacgtcttcgaggccgtcaccaagctcgtcatgctcgtcaagaaggagaacatcgtcaacgtcgtccagggctccctccagttcttcatctcccccggcaaggagggcaccatcgtcttcgacaccggcctcgaggagcaggtctacaagaacaagaacggccagctcaccgtcgtctccgtccgccgcaagtcctga

SEQ ID NO: 1872 - RNA, 2379 nt, synthetic construct
  misc_feature 1..2379: note = BAC84969 variant
  source 1..2379: mol_type = other RNA
atgatcaccgtcaaccccgacggcaagatcatggtccgccgctgcctcgtcaccctccgccccttccgcctcttcgtcctcggcatcggcttcttcaccctctgcttcctcatgacctccctcggcggccagttctccgcccgccgcctcggcgactcccccttcaccatccgcaccgaggtcatgggcggccccgagtcccgcggcgtcctccgcaagatgtccgacctcctcgagctcatggtcaagcgcatggacgccctcgcccgcctcgagaactcctccgagctccaccgcgccggcggcgacctccacttccccgccgaccgcatgccccccggcgccggcctcatggagcgcatccaggccatcgcccagaacgtctccgacatcgccgtcaaggtcgaccagatcctccgccactccctcctcctccactccaaggtctccgagggccgccgcgaccagtgcgaggccccctccgaccccaagttccccgactgctccggcaaggtcgagtggatgcgcgcccgctggacctccgacccctgctacgccttcttcggcgtcgacggcaccgagtgctccttcctcatctacctctccgaggtcgagtggttctgcccccccctcccctggcgcaaccagaccgccgcccagcgcgcccccaagcccctccccaaggtccaggccgtcttccgctccaacctctcccacctcctcgacctcatgggctccggcaaggagtccctcatcttcatgaagaagcgcaccaagcgcctcaccgcccagtgggccctcgccgcccagcgcctcgcccagaagctcggcgccacccagcgcgaccagaagcagatcctcgtccacatcggcttcctcaccgaggagtccggcgacgtcttctccccccgcgtcctcaagggcggccccctcggcgagatggtccagtgggccgacatcctcaccgccctctacgtcctcggccacggcctccgcgtcaccgtctccctcaaggagctccagtccaacctcggcgtcccccccggccgcggctcctgccccctcaccatgcccctccccttcgacctcatctacaccgactaccacggcctccagcagatgaagcgccacatgggcctctccttcaagaagtaccgctgccgcatccgcgtcatcgacaccttcggcaccgagcccgcctacaaccacgaggagtacgccaccctccacggctaccgcaccaactggggctactggaacctcaaccccaagcagttcatgaccatgttcccccacacccccgacaactccttcatgggcttcgtctccgaggagctcaacgagaccgagaagcgcctcatcaagggcggcaaggcctccaacatggccgtcgtctacggcaaggaggcctccatctggaagctccagggcaaggagaagttcctcggcatcctcaacaagtacatggagatccacggcaccgtctactacgagtcccagcgcccccccgaggtccccgccttcgtcaagaaccacggcctcctcccccagcccgagttccagcagctcctccgcaaggccaagctcttcatcggcttcggcttcccctacgagggccccgcccccctcgaggccatcgccaacggctgcatcttcctccagtcccgcttctcccccccccactcctccctcaaccacgagttcttccgcggcaagcccacctcccgcgaggtcttctcccagcacccctacgccgagaacttcatcggcaagccccacgtctggaccgtcgactacaacaactccgaggagttcgaggccgccatcaaggccatcatgcgcacccaggtcgacccctacctcccctacgagtacacctgcgagggcatgctcgagcgcatccacgcctacatccagcaccaggacttctgccgcgcccccgaccccgccctccccgaggcccacgccccccagtcccccttcgtcctcgcccccaacgccacccacctcgagtgggcccgcaacacctccctcgcccccggcgcctggccccccgcccacgccctccgcgcctggctcgccgtccccggccgcgcctgcaccgacacctgcctcgaccacggcctcatctgcgagccctccttcttccccttcctcaactcccaggacgccttcctcaagctccaggtcccctgcgactccaccgagtccgagatgaaccacctctaccccgccttcgcccagcccggccaggagtgctacctccagaaggagcccctcctcttctcctgcgccggctccaacaccaagtaccgccgcctctgcccctgccgcgacttccgcaagggccaggtcgccctctgccagggctgcctctga

SEQ ID NO: 1873 - RNA, 36 nt, synthetic construct
  misc_feature 1..36: note = AF164963.1 variant
  source 1..36: mol_type = other RNA
atgacccagggccagcacttcctccagaaggtctga

SEQ ID NO: 1874 - RNA, 2211 nt, synthetic construct
  misc_feature 1..2211: note = AAI11702 variant
  source 1..2211: mol_type = other RNA
atgaaggagatgtccgccaacaccgtcctcgactcccagcgccagcagaagcactacggcatcacctcccccatctccctcgcctcccccaaggagatcgaccacatctacacccagaagctcatcgacgccatgaagcccttcggcgtcttcgaggacgaggaggagctcaaccaccgcctcgtcgtcctcggcaagctcaacaacctcgtcaaggagtggatctccgacgtctccgagtccaagaacctccccccctccgtcgtcgccaccgtcggcggcaagatcttcaccttcggctcctaccgcctcggcgtccacaccaagggcgccgacatcgacgccctctgcgtcgccccccgccacgtcgagcgctccgacttcttccagtccttcttcgagaagctcaagcaccaggacggcatccgcaacctccgcgccgtcgaggacgccttcgtccccgtcatcaagttcgagttcgacggcatcgagatcgacctcgtcttcgcccgcctcgccatccagaccatctccgacaacctcgacctccgcgacgactcccgcctccgctccctcgacatccgctgcatccgctccctcaacggctgccgcgtcaccgacgagatcctccacctcgtccccaacaaggagaccttccgcctcaccctccgcgccgtcaagctctgggccaagcgccgcggcatctactccaacatgctcggcttcctcggcggcgtctcctgggccatgctcgtcgcccgcacctgccagctctaccccaacgccgccgcctccaccctcgtccacaagttcttcctcgtcttctccaagtgggagtggcccaaccccgtcctcctcaagcagcccgaggagtccaacctcaacctccccgtctgggacccccgcgtcaacccctccgaccgctaccacctcatgcccatcatcacccccgcctacccccagcagaactccacctacaacgtctccacctccacccgcaccgtcatggtcgaggagttcaagcagggcctcgccgtcaccgacgagatcctccagggcaagtccgactggtccaagctcctcgagccccccaacttcttccagaagtaccgccactacatcgtcctcaccgcctccgcctccaccgaggagaaccacctcgagtgggtcggcctcgtcgagtccaagatccgcgtcctcgtcggcaacctcgagcgcaacgagttcatcaccctcgcccacgtcaacccccagtccttccccggcaacaaggagcaccacaaggacaacaactacgtctccatgtggttcctcggcatcatcttccgccgcgtcgagaacgccgagtccgtcaacatcgacctcacctacgacatccagtccttcaccgacaccgtctaccgccaggccaacaacatcaacatgctcaaggagggcatgaagatcgaggccacccacgtcaagaagaagcagctccaccactacctccccgccgagatcctccagaagaagaagaagcagtccctctccgacgtcaaccgctcctccggcggcctccagtccaagcgcctctccctcgactcctcctgcctcgactcctcccgcgacaccgacaacggcacccccttcaactcccccgcctccaagtccgactccccctccgtcggcgagaccgagcgcaactccgccgagcccgccgccgtcatcgtcgagaagcccctctccgtcccccccgcccagggcctctccatccccgtcatcggcgccaaggtcgactccaccgtcaagaccgtctccccccccaccgtctgcaccatccccaccgtcgtcggccgcaacgtcatcccccgcatcaccaccccccacaaccccgcccagggccagccccacctcaacggcatgtccaacatcaccaagaccgtcacccccaagcgctcccactccccctccatcgacggcacccccaagcgcctcaaggacgtcgagaagttcatccgcctcgagtccaccttcaaggacccccgcaccgccgaggagcgcaagcgcaagtccgtcgacgccatcggcggcgagtccatgcccatccccaccatcgacacctcccgcaagaagcgcctcccctccaaggagctccccgactcctcctcccccgtccccgccaacaacatccgcgtcatcaagaactccatccgcctcaccctcaaccgctga

SEQ ID NO: 1875 - RNA, 1377 nt, synthetic construct
  misc_feature 1..1377: note = AAG28389 variant
  source 1..1377: mol_type = other RNA
atgtccaccgagggcggcttcggcggcacctcctcctccgacgcccagcagtccctccagtccttctggccccgcgtcatggaggagatccgcaacctcaccgtcaaggacttccgcgtccaggagctccccctcgcccgcatcaagaagatcatgaagctcgacgaggacgtcaagatgatctccgccgaggcccccgtcctcttcgccaaggccgcccagatcttcatcaccgagctcaccctccgcgcctggatccacaccgaggacaacaagcgccgcaccctccagcgcaacgacatcgccatggccatcaccaagttcgaccagttcgacttcctcatcgacatcgtcccccgcgacgagctcaagccccccaagcgccaggaggaggtccgccagtccgtcacccccgccgagcccgtccagtactacttcaccctcgcccagcagcccaccgccgtccaggtccagggccagcagcagggccagcagaccacctcctccaccaccaccatccagcccggccagatcatcatcgcccagccccagcagggccagaccacccccgtcaccatgcaggtcggcgagggccagcaggtccagatcgtccaggcccagccccagggccaggcccagcaggcccagtccggcaccggccagaccatgcaggtcatgcagcagatcatcaccaacaccggcgagatccagcagatccccgtccagctcaacgccggccagctccagtacatccgcctcgcccagcccgtctccggcacccaggtcgtccagggccagatccagaccctcgccaccaacgcccagcagggccagcgcaacgcctcccagggcaagccccgccgctgcctcaaggagaccctccagatcacccagaccgaggtccagcagggccagcagcagttctcccagttcaccgacggccagcgcaactccgtccagcaggcccgcgtctccgagctcaccggcgaggccgagccccgcgaggtcaaggccaccggcaactccaccccctgcacctcctccctccccaccacccaccccccctcccaccgcgccggcgcctcctgcgtctgctgctcccagccccagcagtcctccacctccccccccccctccgacgccctccagtgggtcgtcgtcgaggtctccggcacccccaaccagctcgagacccaccgcgagctccacgcccccctccccggcatgacctccctctcccccctccacccctcccagcagctctaccagatccagcaggtcaccatgcccgccggccaggacctcgcccagcccatgttcatccagtccgccaaccagccctccgacggccaggccccccaggtcaccggcgactga

SEQ ID NO: 1876 - RNA, 2802 nt, synthetic construct
  misc_feature 1..2802: note = CCDS33423.1 variant
  source 1..2802: mol_type = other RNA
atgcgcatggccgccaccgcctgggccggcctccagggcccccccctccccaccctctgccccgccgtccgcaccggcctctactgccgcgaccaggcccacgccgagcgctgggccatgacctccgagacctcctccggctcccactgcgcccgctcccgcatgctccgccgccgcgcccaggaggaggactccaccgtcctcatcgacgtctccccccccgaggccgagaagcgcggctcctacggctccaccgcccacgcctccgagcccggcggccagcaggccgccgcctgccgcgccggctcccccgccaagccccgcatcgccgacttcgtcctcgtctgggaggaggacctcaagctcgaccgccagcaggactccgccgcccgcgaccgcaccgacatgcaccgcacctggcgcgagaccttcctcgacaacctccgcgccgccggcctctgcgtcgaccagcaggacgtccaggacggcaacaccaccgtccactacgccctcctctccgcctcctgggccgtcctctgctactacgccgaggacctccgcctcaagctccccctccaggagctccccaaccaggcctccaactggtccgccggcctcctcgcctggctcggcatccccaacgtcctcctcgaggtcgtccccgacgtcccccccgagtactactcctgccgcttccgcgtcaacaagctcccccgcttcctcggctccgacaaccaggacaccttcttcacctccaccaagcgccaccagatcctcttcgagatcctcgccaagaccccctacggccacgagaagaagaacctcctcggcatccaccagctcctcgccgagggcgtcctctccgccgccttccccctccacgacggccccttcaagaccccccccgagggcccccaggccccccgcctcaaccagcgccaggtcctcttccagcactgggcccgctggggcaagtggaacaagtaccagcccctcgaccacgtccgccgctacttcggcgagaaggtcgccctctacttcgcctggctcggcttctacaccggctggctcctccccgccgccgtcgtcggcaccctcgtcttcctcgtcggctgcttcctcgtcttctccgacatccccacccaggagctctgcggctccaaggactccttcgagatgtgccccctctgcctcgactgccccttctggctcctctcctccgcctgcgccctcgcccaggccggccgcctcttcgaccacggcggcaccgtcttcttctccctcttcatggccctctgggccgtcctcctcctcgagtactggaagcgcaagtccgccaccctcgcctaccgctgggactgctccgactacgaggacaccgaggagcgcccccgcccccagttcgccgcctccgcccccatgaccgcccccaaccccatcaccggcgaggacgagccctacttccccgagcgctcccgcgcccgccgcatgctcgccggctccgtcgtcatcgtcgtcatggtcgccgtcgtcgtcatgtgcctcgtctccatcatcctctaccgcgccatcatggccatcgtcgtctcccgctccggcaacaccctcctcgccgcctgggcctcccgcatcgcctccctcaccggctccgtcgtcaacctcgtcttcatcctcatcctctccaagatctacgtctccctcgcccacgtcctcacccgctgggagatgcaccgcacccagaccaagttcgaggacgccttcaccctcaaggtcttcatcttccagttcgtcaacttctactcctcccccgtctacatcgccttcttcaagggccgcttcgtcggctaccccggcaactaccacaccctcttcggcgtccgcaacgaggagtgcgccgccggcggctgcctcatcgagctcgcccaggagctcctcgtcatcatggtcggcaagcaggtcatcaacaacatgcaggaggtcctcatccccaagctcaagggctggtggcagaagttccgcctccgctccaagaagcgcaaggccggcgcctccgccggcgcctcccagggcccctgggaggacgactacgagctcgtcccctgcgagggcctcttcgacgagtacctcgagatggtcctccagttcggcttcgtcaccatcttcgtcgccgcctgccccctcgcccccctcttcgccctcctcaacaactgggtcgagatccgcctcgacgcccgcaagttcgtctgcgagtaccgccgccccgtcgccgagcgcgcccaggacatcggcatctggttccacatcctcgccggcctcacccacctcgccgtcatctccaacgccttcctcctcgccttctcctccgacttcctcccccgcgcctactaccgctggacccgcgcccacgacctccgcggcttcctcaacttcaccctcgcccgcgccccctcctccttcgccgccgcccacaaccgcacctgccgctaccgcgccttccgcgacgacgacggccactactcccagacctactggaacctcctcgccatccgcctcgccttcgtcatcgtcttcgagcacgtcgtcttctccgtcggccgcctcctcgacctcctcgtccccgacatccccgagtccgtcgagatcaaggtcaagcgcgagtactacctcgccaagcaggccctcgccgagaacgaggtcctcttcggcaccaacggcaccaaggacgagcagcccgagggctccgagctctcctcccactggacccccttcaccgtccccaaggcctcccagctccagcagtga

SEQ ID NO: 1877 - RNA, 885 nt, synthetic construct
  misc_feature 1..885: note = AAA36380 variant
  source 1..885: mol_type = other RNA
atggaggactccatggacatggacatgtcccccctccgcccccagaactacctcttcggctgcgagctcaaggccgacaaggactaccacttcaaggtcgacaacgacgagaacgagcaccagctctccctccgcaccgtctccctcggcgccggcgccaaggacgagctccacatcgtcgaggccgaggccatgaactacgagggctcccccatcaaggtcaccctcgccaccctcaagatgtccgtccagcccaccgtctccctcggcggcttcgagatcaccccccccgtcgtcctccgcctcaagtgcggctccggccccgtccacatctccggccagcacctcgtcgccgtcgaggaggacgccgagtccgaggacgaggaggaggaggacgtcaagctcctctccatctccggcaagcgctccgcccccggcggcggctccaaggtcccccagaagaaggtcaagctcgccgccgacgaggacgacgacgacgacgacgaggaggacgacgacgaggacgacgacgacgacgacttcgacgacgaggaggccgaggagaaggcccccgtcaagaagtccatccgcgacacccccgccaagaacgcccagaagtccaaccagaacggcaaggactccaagccctcctccaccccccgctccaagggccaggagtccttcaagaagcaggagaagacccccaagacccccaagggcccctcctccgtcgaggacatcaaggccaagatgcaggcctccatcgagaagggcggctccctccccaaggtcgaggccaagttcatcaactacgtcaagaactgcttccgcatgaccgaccaggaggccatccaggacctctggcagtggcgcaagtccctctga

SEQ ID NO: 1878 - RNA, 3915 nt, synthetic construct
  misc_feature 1..3915: note = CCDS47686.1 variant
  source 1..3915: mol_type = other RNA
atgcagctcaagatcatgcccaagaagaagcgcctctccgccggccgcgtccccctcatcctcttcctctgccagatgatctccgccctcgaggtccccctcgaccccaagctcctcgaggacctcgtccagccccccaccatcacccagcagtcccccaaggactacatcatcgacccccgcgagaacatcgtcatccagtgcgaggccaagggcaagccccccccctccttctcctggacccgcaacggcacccacttcgacatcgacaaggaccccctcgtcaccatgaagcccggcaccggcaccctcatcatcaacatcatgtccgagggcaaggccgagacctacgagggcgtctaccagtgcaccgcccgcaacgagcgcggcgccgccgtctccaacaacatcgtcgtccgcccctcccgctcccccctctggaccaaggagaagctcgagcccatcaccctccagtccggccagtccctcgtcctcccctgccgcccccccatcggcctccccccccccatcatcttctggatggacaactccttccagcgcctcccccagtccgagcgcgtctcccagggcctcaacggcgacctctacttctccaacgtcctccccgaggacacccgcgaggactacatctgctacgcccgcttcaaccacacccagaccatccagcagaagcagcccatctccgtcaaggtcatctccgtcgacgagctcaacgacaccatcgccgccaacctctccgacaccgagttctacggcgccaagtcctcccgcgagcgcccccccaccttcctcacccccgagggcaacgcctccaacaaggaggagctccgcggcaacgtcctctccctcgagtgcatcgccgagggcctccccacccccatcatctactgggccaaggaggacggcatgctccccaagaaccgcaccgtctacaagaacttcgagaagaccctccagatcatccacgtctccgaggccgactccggcaactaccagtgcatcgccaagaacgccctcggcgccatccaccacaccatctccgtccgcgtcaaggccgccccctactggatcaccgccccccagaacctcgtcctctcccccggcgaggacggcaccctcatctgccgcgccaacggcaaccccaagccccgcatctcctggctcaccaacggcgtccccatcgagatcgcccccgacgacccctcccgcaagatcgacggcgacaccatcatcttctccaacgtccaggagcgctcctccgccgtctaccagtgcaacgcctccaacgagtacggctacctcctcgccaacgccttcgtcaacgtcctcgccgagcccccccgcatcctcacccccgccaacaccctctaccaggtcatcgccaaccgccccgccctcctcgactgcgccttcttcggctcccccctccccaccatcgagtggttcaagggcgccaagggctccgccctccacgaggacatctacgtcctccacgagaacggcaccctcgagatccccgtcgcccagaaggactccaccggcacctacacctgcgtcgcccgcaacaagctcggcatggccaagaacgaggtccacctcgagatcaaggaccccacctggatcgtcaagcagcccgagtacgccgtcgtccagcgcggctccatggtctccttcgagtgcaaggtcaagcacgaccacaccctctccctcaccgtcctctggctcaaggacaaccgcgagctcccctccgacgagcgcttcaccgtcgacaaggaccacctcgtcgtcgccgacgtctccgacgacgactccggcacctacacctgcgtcgccaacaccaccctcgactccgtctccgcctccgccgtcctctccgtcgtcgcccccacccccacccccgcccccgtctacgacgtccccaacccccccttcgacctcgagctcaccgaccagctcgacaagtccgtccagctctcctggacccccggcgacgacaacaactcccccatcaccaagttcatcatcgagtacgaggacgccatgcacaagcccggcctctggcaccaccagaccgaggtctccggcacccagaccaccgcccagctcaagctctccccctacgtcaactactccttccgcgtcatggccgtcaactccatcggcaagtccctcccctccgaggcctccgagcagtacctcaccaaggcctccgagcccgacaagaaccccaccgccgtcgagggcctcggctccgagcccgacaacctcgtcatcacctggaagcccctcaacggcttcgagtccaacggccccggcctccagtacaaggtctcctggcgccagaaggacggcgacgacgagtggacctccgtcgtcgtcgccaacgtctccaagtacatcgtctccggcacccccaccttcgtcccctacctcatcaaggtccaggccctcaacgacatgggcttcgcccccgagcccgccgtcgtcatgggccactccggcgaggacctccccatggtcgcccccggcaacgtccgcgtcaacgtcgtcaactccaccctcgccgaggtccactgggaccccgtccccctcaagtccatccgcggccacctccagggctaccgcatctactactggaagacccagtcctcctccaagcgcaaccgccgccacatcgagaagaagatcctcaccttccagggctccaagacccacggcatgctccccggcctcgagcccttctcccactacaccctcaacgtccgcgtcgtcaacggcaagggcgagggccccgcctcccccgaccgcgtcttcaacacccccgagggcgtcccctccgccccctcctccctcaagatcgtcaaccccaccctcgactccctcaccctcgagtgggaccccccctcccaccccaacggcatcctcaccgagtacaccctcaagtaccagcccatcaactccacccacgagctcggccccctcgtcgacctcaagatccccgccaacaagacccgctggaccctcaagaacctcaacttctccacccgctacaagttctacttctacgcccagacctccgccggctccggctcccagatcaccgaggaggccgtcaccaccgtcgacgaggccggcatcctcccccccgacgtcggcgccggcaaggtccaggccgtcaacccccgcatctccaacctcaccgccgccgccgccgagacctacgccaacatctcctgggagtacgagggccccgagcacgtcaacttctacgtcgagtacggcgtcgccggctccaaggaggagtggcgcaaggagatcgtcaacggctcccgctccttcttcggcctcaagggcctcatgcccggcaccgcctacaaggtccgcgtcggcgccgtcggcgactccggcttcgtctcctccgaggacgtcttcgagaccggccccgccatggcctcccgccaggtcgacatcgccacccagggctggttcatcggcctcatgtgcgccgtcgccctcctcatcctcatcctcctcatcgtctgcttcatccgccgcaacaagggcggcaagtaccccgtcaaggagaaggaggacgcccacgccgaccccgagatccagcccatgaaggaggacgacggcaccttcggcgagtactccgacgccgaggaccacaagcccctcaagaagggctcccgcaccccctccgaccgcaccgtcaagaaggaggactccgacgactccctcgtcgactacggcgagggcgtcaacggccagttcaacgaggacggctccttcatcggccagtactccggcaagaaggagaaggagcccgccgagggcaacgagtcctccgaggccccctcccccgtcaacgccatgaactccttcgtctga

SEQ ID NO: 1879 - RNA, 1305 nt, synthetic construct
  misc_feature 1..1305: note = AAB51320 variant
  source 1..1305: mol_type = other RNA
atgtccatcgagaagatctgggcccgcgagatcctcgactcccgcggcaaccccaccgtcgaggtcgacctctacaccgccaagggcctcttccgcgccgccgtcccctccggcgcctccaccggcatctacgaggccctcgagctccgcgacggcgacaagcagcgctacctcggcaagggcgtcctcaaggccgtcgaccacatcaactccaccatcgcccccgccctcatctcctccggcctctccgtcgtcgagcaggagaagctcgacaacctcatgctcgagctcgacggcaccgagaacaagtccaagttcggcgccaacgccatcctcggcgtctccctcgccgtctgcaaggccggcgccgccgagcgcgagctccccctctaccgccacatcgcccagctcgccggcaactccgacctcatcctccccgtccccgccttcaacgtcatcaacggcggctcccacgccggcaacaagctcgccatgcaggagttcatgatcctccccgtcggcgccgagtccttccgcgacgccatgcgcctcggcgccgaggtctaccacaccctcaagggcgtcatcaaggacaagtacggcaaggacgccaccaacgtcggcgacgagggcggcttcgcccccaacatcctcgagaactccgaggccctcgagctcgtcaaggaggccatcgacaaggccggctacaccgagaagatcgtcatcggcatggacgtcgccgcctccgagttctaccgcgacggcaagtacgacctcgacttcaagtcccccaccgacccctcccgctacatcaccggcgaccagctcggcgccctctaccaggacttcgtccgcgactaccccgtcgtctccatcgaggaccccttcgaccaggacgactgggccgcctggtccaagttcaccgccaacgtcggcatccagatcgtcggcgacgacctcaccgtcaccaaccccaagcgcatcgagcgcgccgtcgaggagaaggcctgcaactgcctcctcctcaaggtcaaccagatcggctccgtcaccgaggccatccaggcctgcaagctcgcccaggagaacggctggggcgtcatggtctcccaccgctccggcgagaccgaggacaccttcatcgccgacctcgtcgtcggcctctgcaccggccagatcaagaccggcgccccctgccgctccgagcgcctcgccaagtacaaccagctcatgcgcatcgaggaggagctcggcgacgaggcccgcttcgccggccacaacttccgcaacccctccgtcctctga

SEQ ID NO: 1880 - RNA, 1395 nt, synthetic construct
  misc_feature 1..1395: note = AAH08489 variant
  source 1..1395: mol_type = other RNA
atggagaccctctccttcccccgctacaacgtcgccgagatcgtcatccacatccgcaacaagatcctcaccggcgccgacggcaagaacctcaccaagaacgacctctaccccaaccccaagcccgaggtcctccacatgatctacatgcgcgccctccagatcgtctacggcatccgcctcgagcacttctacatgatgcccgtcaactccgaggtcatgtacccccacctcatggagggcttcctccccttctccaacctcgtcacccacctcgactccttcctccccatctgccgcgtcaacgacttcgagaccgccgacatcctctgccccaaggccaagcgcacctcccgcttcctctccggcatcatcaacttcatccacttccgcgaggcctgccgcgagacctacatggagttcctctggcagtacaagtcctccgccgacaagatgcagcagctcaacgccgcccaccaggaggccctcatgaagctcgagcgcctcgactccgtccccgtcgaggagcaggaggagttcaagcagctctccgacggcatccaggagctccagcagtccctcaaccaggacttccaccagaagaccatcgtcctccaggagggcaactcccagaagaagtccaacatctccgagaagaccaagcgcctcaacgagctcaagctctccgtcgtctccctcaaggagatccaggagtccctcaagaccaagatcgtcgactcccccgagaagctcaagaactacaaggagaagatgaaggacaccgtccagaagctcaagaacgcccgccaggaggtcgtcgagaagtacgagatctacggcgactccgtcgactgcctcccctcctgccagctcgaggtccagctctaccagaagaagatccaggacctctccgacaaccgcgagaagctcgcctccatcctcaaggagtccctcaacctcgaggaccagatcgagtccgacgagtccgagctcaagaagctcaagaccgaggagaactccttcaagcgcctcatgatcgtcaagaaggagaagctcgccaccgcccagttcaagatcaacaagaagcacgaggacgtcaagcagtacaagcgcaccgtcatcgaggactgcaacaaggtccaggagaagcgcggcgccgtctacgagcgcgtcaccaccatcaaccaggagatccagaagatcaagctcggcatccagcagctcaaggacgccgccgagcgcgagaagctcaagtcccaggagatcttcctcaacctcaagaccgccctcgagaagtaccacgacggcatcgagaaggccgccgaggactcctacgccaagatcgacgagaagaccgccgagctcaagcgcaagatgttcaagatgtccacctga

SEQ ID NO: 1881 - RNA, 543 nt, synthetic construct
  misc_feature 1..543: note = AAB49693 variant
  source 1..543: mol_type = other RNA
atgcaggccgagggccgcggcaccggcggctccaccggcgacgccgacggccccggcggccccggcatccccgacggccccggcggcaacgccggcggccccggcgaggccggcgccaccggcggccgcggcccccgcggcgccggcgccgcccgcgcctccggccccggcggcggcgccccccgcggcccccacggcggcgccgcctccggcctcaacggctgctgccgctgcggcgcccgcggccccgagtcccgcctcctcgagttctacctcgccatgcccttcgccacccccatggaggccgagctcgcccgccgctccctcgcccaggacgccccccccctccccgtccccggcgtcctcctcaaggagttcaccgtctccggcaacatcctcaccatccgcctcaccgccgccgaccaccgccagctccagctctccatctcctcctgcctccagcagctctccctcctcatgtggatcacccagtgcttcctccccgtcttcctcgcccagcccccctccggccagcgccgctga

SEQ ID NO: 1882 - RNA, 1215 nt, synthetic construct
  misc_feature 1..1215: note = CCDS14134.2 variant
  source 1..1215: mol_type = other RNA
atggcctccccccgcctcggcaccttctgctgccccacccgcgacgccgccacccagctcgtcctctccttccagccccgcgccttccacgccctctgcctcggctccggcggcctccgcctcgccctcggcctcctccagctcctccccggccgccgccccgccggccccggctcccccgccacctccccccccgcctccgtccgcatcctccgcgccgccgccgcctgcgacctcctcggctgcctcggcatggtcatccgctccaccgtctggctcggcttccccaacttcgtcgactccgtctccgacatgaaccacaccgagatctggcccgccgccttctgcgtcggctccgccatgtggatccagctcctctactccgcctgcttctggtggctcttctgctacgccgtcgacgcctacctcgtcatccgccgctccgccggcctctccaccatcctcctctaccacatcatggcctggggcctcgccaccctcctctgcgtcgagggcgccgccatgctctactacccctccgtctcccgctgcgagcgcggcctcgaccacgccatcccccactacgtcaccatgtacctccccctcctcctcgtcctcgtcgccaaccccatcctcttccagaagaccgtcaccgccgtcgcctccctcctcaagggccgccagggcatctacaccgagaacgagcgccgcatgggcgccgtcatcaagatccgcttcttcaagatcatgctcgtcctcatcatctgctggctctccaacatcatcaacgagtccctcctcttctacctcgagatgcagaccgacatcaacggcggctccctcaagcccgtccgcaccgccgccaagaccacctggttcatcatgggcatcctcaaccccgcccagggcttcctcctctccctcgccttctacggctggaccggctgctccctcggcttccagtccccccgcaaggagatccagtgggagtccctcaccacctccgccgccgagggcgcccacccctcccccctcatgccccacgagaaccccgcctccggcaaggtctcccaggtcggcggccagacctccgacgaggccctctccatgctctccgagggctccgacgcctccaccatcgagatccacaccgcctccgagtcctgcaacaagaacgagggcgaccccgccctccccacccacggcgacctctga

SEQ ID NO: 1883 - RNA, 3141 nt, synthetic construct
  misc_feature 1..3141: note = AAH38180 variant
  source 1..3141: mol_type = other RNA
atggcctcctccgtcggcaacgtcgccgactccaccgagcccaccaagcgcatgctctccttccagggcctcgccgagctcgcccaccgcgagtaccaggccggcgacttcgaggccgccgagcgccactgcatgcagctctggcgccaggagcccgacaacaccggcgtcctcctcctcctctcctccatccacttccagtgccgccgcctcgaccgctccgcccacttctccaccctcgccatcaagcagaaccccctcctcgccgaggcctactccaacctcggcaacgtctacaaggagcgcggccagctccaggaggccatcgagcactaccgccacgccctccgcctcaagcccgacttcatcgacggctacatcaacctcgccgccgccctcgtcgccgccggcgacatggagggcgccgtccaggcctacgtctccgccctccagtacaaccccgacctctactgcgtccgctccgacctcggcaacctcctcaaggccctcggccgcctcgaggaggccaaggcctgctacctcaaggccatcgagacccagcccaacttcgccgtcgcctggtccaacctcggctgcgtcttcaacgcccagggcgagatctggctcgccatccaccacttcgagaaggccgtcaccctcgaccccaacttcctcgacgcctacatcaacctcggcaacgtcctcaaggaggcccgcatcttcgaccgcgccgtcgccgcctacctccgcgccctctccctctcccccaaccacgccgtcgtccacggcaacctcgcctgcgtctactacgagcagggcctcatcgacctcgccatcgacacctaccgccgcgccatcgagctccagccccacttccccgacgcctactgcaacctcgccaacgccctcaaggagaagggctccgtcgccgaggccgaggactgctacaacaccgccctccgcctctgccccacccacgccgactccctcaacaacctcgccaacatcaagcgcgagcagggcaacatcgaggaggccgtccgcctctaccgcaaggccctcgaggtcttccccgagttcgccgccgcccactccaacctcgcctccgtcctccagcagcagggcaagctccaggaggccctcatgcactacaaggaggccatccgcatctcccccaccttcgccgacgcctactccaacatgggcaacaccctcaaggagatgcaggacgtccagggcgccctccagtgctacacccgcgccatccagatcaaccccgccttcgccgacgcccactccaacctcgcctccatccacaaggactccggcaacatccccgaggccatcgcctcctaccgcaccgccctcaagctcaagcccgacttccccgacgcctactgcaacctcgcccactgcctccagatcgtctgcgactggaccgactacgacgagcgcatgaagaagctcgtctccatcgtcgccgaccagctcgagaagaaccgcctcccctccgtccacccccaccactccatgctctaccccctctcccacggcttccgcaaggccatcgccgagcgccacggcaacctctgcctcgacaagatcaacgtcctccacaagcccccctacgagcaccccaaggacctcaagctctccgacggccgcctccgcgtcggctacgtctcctccgacttcggcaaccaccccacctcccacctcatgcagtccatccccggcatgcacaaccccgacaagttcgaggtcttctgctacgccctctcccccgacgacggcaccaacttccgcgtcaaggtcatggccgaggccaaccacttcatcgacctctcccagatcccctgcaacggcaaggccgccgaccgcatccaccaggacggcatccacatcctcgtcaacatgaacggctacaccaagggcgcccgcaacgagctcttcgccctccgccccgcccccatccaggccatgtggctcggctaccccggcacctccggcgccctcttcatggactacatcatcaccgaccaggagacctcccccgccgaggtcgccgagcagtactccgagaagctcgcctacatgccccacaccttcttcatcggcgaccacgccaacatgttcccccacctcaagaagaaggccgtcatcgacttcaagtccaacggccacatctacgacaaccgcatcgtcctcaacggcatcgacctcaaggccttcctcgactccctccccgacgtcaagatcgtcaagatgaagtgccccgacggcggcgacaacgccgactcctccaacaccgccctcaacatgcccgtcatccccatgaacaccatcgccgaggccgtcatcgagatgatcaaccgcggccagatccagatcaccatcaacggcttctccatctccaacggcctcgccaccacccagatcaacaacaaggccgccaccggcgaggaggtcccccgcaccatcatcgtcaccacccgctcccagtacggcctccccgaggacgccatcgtctactgcaacttcaaccagctctacaagatcgacccctccaccctccagatgtgggccaacatcctcaagcgcgtccccaactccgtcctctggctcctccgcttccccgccgtcggcgagcccaacatccagcagtacgcccagaacatgggcctcccccagaaccgcatcatcttctcccccgtcgcccccaaggaggagcacgtccgccgcggccagctcgccgacgtctgcctcgacacccccctctgcaacggccacaccaccggcatggacgtcctctgggccggcacccccatggtcaccatgcccggcgagaccctcgcctcccgcgtcgccgcctcccagctcacctgcctcggctgcctcgagctcatcgccaagaaccgccaggagtacgaggacatcgccgtcaagctcggcaccgacctcgagtacctcaagaaggtccgcggcaaggtctggaagcagcgcatctcctcccccctcttcaacaccaagcagtacaccatggagctcgagcgcctctacctccagatgtgggagcactacgccgccggcaacaagcccgaccacatgatcaagcccgtcgaggtcaccgagtccgcctga

SEQ ID NO: 1884 - RNA, 441 nt, synthetic construct
  misc_feature 1..441: note = BAG57972 variant
  source 1..441: mol_type = other RNA
atggccgccgagaccctcctctcctccctcctcggcctcctcctcctcggcctcctcctccccgcctccctcaccggcggcgtcggctccctcaacctcgaggagctctccgagatgcgctacggcatcgagatcctccccctccccgtcatgggcggccagtcccagtcctccgacgtcgtcatcgtctcctccaagtacaagcagcgctacgagtgccgcctccccgtcggcgccatccacttccagcgcgagcgcgaggaggagacccccgcctaccagggccccggcatccccgagctcctctcccccatgcgcgacgccccctgcctcctcaagaccaaggactggtggacctacgagttctgctacggccgccacatccagcagtaccacatggaggactccgagatcaagggcctccaggccgcctcctcctga

SEQ ID NO: 1885 - RNA, 1221 nt, synthetic construct
  misc_feature 1..1221: note = BAG65333 variant
  source 1..1221: mol_type = other RNA
atggccgccgagaccctcctctcctccctcctcggcctcctcctcctcggcctcctcctccccgcctccctcaccggcggcgtcggctccctcaacctcgaggagctctccgagatgcgctacggcatcgagatcctccccctccccgtcatgggcggccagtcccagtcctccgacgtcgtcatcgtctcctccaagtacaagcagcgctacgagtgccgcctccccgccggcgccatccacttccagcgcgagcgcgaggaggagacccccgcctaccagggccccggcatccccgagctcctctcccccatgcgcgacgccccctgcctcctcaagaccaaggactggtggacctacgagttctgctacggccgccacatccagcagtaccacatggaggactccgcctccggcgcccccaacgacttccagaacaacgtccaggtcaaggtcatccgctcccccgccgacctcatccgcttcatcgaggagctcaagggcggcaccaagaagggcaagcccaacatcggccaggagcagcccgtcgacgacgccgccgaggtcccccagcgcgagcccgagaaggagcgcggcgaccccgagcgccagcgcgagatggaggaggaggaggacgaggacgaggacgaggacgaggacgaggacgagcgccagctcctcggcgagttcgagaaggagctcgagggcatcctcctcccctccgaccgcgaccgcctccgctccgaggtcaaggccggcatggagcgcgagctcgagaacatcatccaggagaccgagaaggagctcgaccccgacggcctcaagaaggagtccgagcgcgaccgcgccatgctcgccctcacctccaccctcaacaagctcatcaagcgcctcgaggagaagcagtcccccgagctcgtcaagaagcacaagaagaagcgcgtcgtccccaagaagccccccccctccccccagcccaccggcaagatcgagatcaagatcgtccgcccctgggccgagggcaccgaggagggcgcccgctggctcaccgacgaggacacccgcaacctcaaggagatcttcttcaacatcctcgtccccggcgccgaggaggcccagaaggagcgccagcgccagaaggagctcgagtccaactaccgccgcgtctggggctcccccggcggcgagggcaccggcgacctcgacgagttcgacttctga

SEQ ID NO: 1886 - RNA, 2223 nt, synthetic construct
  misc_feature 1..2223: note = BAH13933 variant
  source 1..2223: mol_type = other RNA
atggccgtcgagaccctcctctcctccctcctcggcctcctcctcctcggcctcctcctccccgcctccctcaccggcggcgtcggctccctcaacctcgaggagctctccgagatgcgctacggcatcgagatcctccccctccccgtcatgggcggccagtcccagtcctccgacgtcgtcatcgtctcctccaagtacaagcagcgctacgagtgccgcctccccgccggcgccatccacttccagcgcgagcgcgaggaggagacccccgcctaccagggccccggcatccccgagctcctctcccccatgcgcgacgccccctgcctcctcaagaccaaggactggtggacctacgagttctgctacggccgccacatccagcagtaccacatggaggactccgagatcaagggcgaggtcctctacctcggctactaccagtccgccttcgactgggacgacgagaccgccaaggcctccaagcagcaccgcctcaagcgctaccactcccagacctacggcaacggctccaagtgcgacctcaacggccgcccccgcgaggccgaggtccgcttcctctgcgacgagggcgccggcatctccggcgactacatcgaccgcgtcgacgagcccctctcctgctcctacgtcctcaccatccgcaccccccgcctctgcccccaccccctcctccgcccccccccctccgccgccccccaggccatcctctgccacccctccctccagcccgaggagtacatggcctacgtccagcgccaggccgactccaagcagtacggcgacaagatcatcgaggagctccaggacctcggcccccaggtctggtccgagaccaagtccggcgtcgccccccagaagatggccggccgcaccctcttccacctcttccgcgagatccacttccacttcttcccctcccccgacctcaccgtcctcaccgactggtggggcggcggcggcgtcgagaagtaccacggcccctcctccctcggcgaccgcggcggcgagggcaccccctcctacctcctcccctccgtctcccccctcctctccgaccagtccctccccgtcctctgcaccctcggcgcctcccccaccaaggacgactccaaggactccgacttctggaagatgctcaacgagcccgaggaccaggcccccggcggcgaggaggtccccgccgaggagcaggacccctcccccgaggccgccgactccgcctccggcgcccccaacgacttccagaacaacgtccaggtcaaggtcatccgctcccccgccgacctcatccgcttcatcgaggagctcaagggcggcaccaagaagggcaagcccaacatcggccaggagcagcccgtcgacgacgccgccgaggtcccccagcgcgagcccgagaaggagcgcggcgaccccgagcgccagcgcgagatggaggaggaggaggacgaggacgaggacgaggacgaggacgaggacgagcgccagctcctcggcgagttcgagaaggagctcgagggcatcctcctcccctccgaccgcgaccgcctccgctccgaggtcaaggccggcatggagcgcgagctcgagaacatcatccaggagaccgagaaggagctcgaccccgacggcctcaagaaggagtccgagcgcgaccgcgccatgctcgccctcacctccaccctcaacaagctcatcaagcgcctcgaggagaagcagtcccccgagctcgtcaagaagcacaagaagaagcgcgtcgtccccaagaagccccccccctccccccagcccaccgaggaggaccccgagcaccgcgtccgcgtccgcgtcaccaagctccgcctcggcggccccaaccaggacctcaccgtcctcgagatgaagcgcgagaacccccagctcaagcagatcgagggcctcgtcaaggagctcctcgagcgcgagggcctcaccgccgccggcaagatcgagatcaagatcgtccgcccctgggccgagggcaccgaggagggcgcccgctggctcaccgacgaggacacccgcaacctcaaggagatcttcttcaacatcctcgtccccggcgccgaggaggcccagaaggagcgccagcgccagaaggagctcgagtccaactaccgccgcgtctggggctcccccggcggcgagggcaccggcgacctcgacgagttcgacttctga

SEQ ID NO: 1887 - RNA, 2004 nt, synthetic construct
  misc_feature 1..2004: note = AAB06495 variant
  source 1..2004: mol_type = other RNA
atggccgccgagaccctcctctcctccctcctcggcctcctcctcctcggcctcctcctccccgcctccctcaccggcggcgtcggctccctcaacctcgaggagctctccgagatgcgctacggcatcgagatcctccccctccccgtcatgggcggccagtcccagtcctccgacgtcgtcatcgtctcctccaagtacaagcagcgctacgagtgccgcctccccgccggcgccatccacttccagcgcgagcgcgaggaggagacccccgcctaccagggccccggcatccccgagctcctctcccccatgcgcgacgccccctgcctcctcaagaccaaggactggtggacctacgagttctgctacggccgccacatccagcagtaccacatggaggactccgagatcaagggcgaggtcctctacctcggctactaccagtccgccttcgactgggacgacgagaccgccaaggcctccaagcagcaccgcctcaagcgctaccactcccagacctacggcaacggctccaagtgcgacctcaacggccgcccccgcgaggccgaggtccgcttcctctgcgacgagggcgccggcatctccggcgactacatcgaccgcgtcgacgagcccctctcctgctcctacgtcctcaccatccgcaccccccgcctctgcccccaccccctcctccgcccccccccctccgccgccccccaggccatcctctgccacccctccctccagcccgaggagtacatggcctacgtccagcgccaggccgactccaagcagtacggcgacaagatcatcgaggagctccaggacctcggcccccaggtctggtccgagaccaagtccggcgtcgccccccagaagatggccggcgcctcccccaccaaggacgactccaaggactccgacttctggaagatgctcaacgagcccgaggaccaggcccccggcggcgaggaggtccccgccgaggagcaggacccctcccccgaggccgccgactccgcctccggcgcccccaacgacttccagaacaacgtccaggtcaaggtcatccgctcccccgccgacctcatccgcttcatcgaggagctcaagggcggcaccaagaagggcaagcccaacatcggccaggagcagcccgtcgacgacgccgccgaggtcccccagcgcgagcccgagaaggagcgcggcgaccccgagcgccagcgcgagatggaggaggaggaggacgaggacgaggacgaggacgaggacgaggacgagcgccagctcctcggcgagttcgagaaggagctcgagggcatcctcctcccctccgaccgcgaccgcctccgctccgaggtcaaggccggcatggagcgcgagctcgagaacatcatccaggagaccgagaaggagctcgaccccgacggcctcaagaaggagtccgagcgcgaccgcgccatgctcgccctcacctccaccctcaacaagctcatcaagcgcctcgaggagaagcagtcccccgagctcgtcaagaagcacaagaagaagcgcgtcgtccccaagaagccccccccctccccccagcccaccgaggaggaccccgagcaccgcgtccgcgtccgcgtcaccaagctccgcctcggcggccccaaccaggacctcaccgtcctcgagatgaagcgcgagaacccccagctcaagcagatcgagggcctcgtcaaggagctcctcgagcgcgagggcctcaccgccgccggcaagatcgagatcaagatcgtccgcccctgggccgagggcaccgaggagggcgcccgctggctcaccgacgaggacacccgcaacctcaaggagatcttcttcaacatcctcgtccccggcgccgaggaggcccagaaggagcgccagcgccagaaggagctcgagtccaactaccgccgcgtctggggctcccccggcggcgagggcaccggcgacctcgacgagttcgacttctga

SEQ ID NO: 1888 - RNA, 303 nt, synthetic construct
  misc_feature 1..303: note = AAI13433 variant
  source 1..303: mol_type = other RNA
atgcgcgccctcaccctcctcgccctcctcgccctcgccgccctctgcatcgccggccaggccggcgccaagccctccggcgccgagtcctccaagggcgccgccttcgtctccaagcaggagggctccgaggtcgtcaagcgcccccgccgctacctctaccagtggctcggcgcccccgtcccctaccccgaccccctcgagccccgccgcgaggtctgcgagctcaaccccgactgcgacgagctcgccgaccacatcggcttccaggaggcctaccgccgcttctacggccccgtctga

SEQ ID NO: 1889 - RNA, 945 nt, synthetic construct
  misc_feature 1..945: note = EAX06008 variant
  source 1..945: mol_type = other RNA
atgcgcatcgccgtcatctgcttctgcctcctcggcatcacctgcgccatccccgtcaagcaggccgactccggctcctccgaggagaagcagctctacaacaagtaccccgacgccgtcgccacctggctcaaccccgacccctcccagaagcagaacctcctcgccccccagaacgccgtctcctccgaggagaccaacgacttcaagcaggagaccctcccctccaagtccaacgagtcccacgaccacatggacgacatggacgacgaggacgacgacgaccacgtcgactcccaggactccatcgactccaacgactccgacgacgtcgacgacaccgacgactcccaccagtccgacgagtcccaccactccgacgagtccgacgagctcgtcaccgacttccccaccgacctccccgccaccgaggtcttcacccccgtcgtccccaccgtcgacacctacgacggccgcggcgactccgtcgtctacggcctccgctccaagtccaagaagttccgccgccccgacatccagtaccccgacgccaccgacgaggacatcacctcccacatggagtccgaggagctcaacggcgcctacaaggccatccccgtcgcccaggacctcaacgccccctccgactgggactcccgcggcaaggactcctacgagacctcccagctcgacgaccagtccgccgagacccactcccacaagcagtcccgcctctacaagcgcaaggccaacgacgagtccaacgagcactccgacgtcatcgactcccaggagctctccaaggtctcccgcgagttccactcccacgagttccactcccacgaggacatgctcgtcgtcgaccccaagtccaaggaggaggacaagcacctcaagttccgcatctcccacgagctcgactccgcctcctccgaggtcaactga

SEQ ID NO: 1890 - RNA, 903 nt, synthetic construct
  misc_feature 1..903: note = EAX06009 variant
  source 1..903: mol_type = other RNA
atgcgcatcgccgtcatctgcttctgcctcctcggcatcacctgcgccatccccgtcaagcaggccgactccggctcctccgaggagaagcagctctacaacaagtaccccgacgccgtcgccacctggctcaaccccgacccctcccagaagcagaacctcctcgccccccagaccctcccctccaagtccaacgagtcccacgaccacatggacgacatggacgacgaggacgacgacgaccacgtcgactcccaggactccatcgactccaacgactccgacgacgtcgacgacaccgacgactcccaccagtccgacgagtcccaccactccgacgagtccgacgagctcgtcaccgacttccccaccgacctccccgccaccgaggtcttcacccccgtcgtccccaccgtcgacacctacgacggccgcggcgactccgtcgtctacggcctccgctccaagtccaagaagttccgccgccccgacatccagtaccccgacgccaccgacgaggacatcacctcccacatggagtccgaggagctcaacggcgcctacaaggccatccccgtcgcccaggacctcaacgccccctccgactgggactcccgcggcaaggactcctacgagacctcccagctcgacgaccagtccgccgagacccactcccacaagcagtcccgcctctacaagcgcaaggccaacgacgagtccaacgagcactccgacgtcatcgactcccaggagctctccaaggtctcccgcgagttccactcccacgagttccactcccacgaggacatgctcgtcgtcgaccccaagtccaaggaggaggacaagcacctcaagttccgcatctcccacgagctcgactccgcctcctccgaggtcaactga

SEQ ID NO: 1891 - RNA, 864 nt, synthetic construct
  misc_feature 1..864: note = EAX06010 variant
  source 1..864: mol_type = other RNA
atgcgcatcgccgtcatctgcttctgcctcctcggcatcacctgcgccatccccgtcaagcaggccgactccggctcctccgaggagaagcagaacgccgtctcctccgaggagaccaacgacttcaagcaggagaccctcccctccaagtccaacgagtcccacgaccacatggacgacatggacgacgaggacgacgacgaccacgtcgactcccaggactccatcgactccaacgactccgacgacgtcgacgacaccgacgactcccaccagtccgacgagtcccaccactccgacgagtccgacgagctcgtcaccgacttccccaccgacctccccgccaccgaggtcttcacccccgtcgtccccaccgtcgacacctacgacggccgcggcgactccgtcgtctacggcctccgctccaagtccaagaagttccgccgccccgacatccagtaccccgacgccaccgacgaggacatcacctcccacatggagtccgaggagctcaacggcgcctacaaggccatccccgtcgcccaggacctcaacgccccctccgactgggactcccgcggcaaggactcctacgagacctcccagctcgacgaccagtccgccgagacccactcccacaagcagtcccgcctctacaagcgcaaggccaacgacgagtccaacgagcactccgacgtcatcgactcccaggagctctccaaggtctcccgcgagttccactcccacgagttccactcccacgaggacatgctcgtcgtcgaccccaagtccaaggaggaggacaagcacctcaagttccgcatctcccacgagctcgactccgcctcctccgaggtcaactga

SEQ ID NO: 1892 - RNA, 984 nt, synthetic construct
  misc_feature 1..984: note = BAH12087 variant
  source 1..984: mol_type = other RNA
atgggcatcgtcccccgctccctcgacaagaaggcccaccgcgtccagttccagctcaaccgcatcaaggccaagatcgagctcccctggggctccctccagctcgactgcctcatgaagaccctcaaggagctctacaacaagtaccccgacgccgtcgccacctggctcaaccccgacccctcccagaagcagaacctcctcgccccccagaacgccgtctcctccgaggagaccaacgacttcaagcaggagaccctcccctccaagtccaacgagtcccacgaccacatggacgacatggacgacgaggacgacgacgaccacgtcgactcccaggactccatcgactccaacgactccgacgacgtcgacgacaccgacgactcccaccagtccgacgagtcccaccactccgacgagtccgacgagctcgtcaccgacttccccaccgacctccccgccaccgaggtcttcacccccgtcgtccccaccgtcgacacctacgacggccgcggcgactccgtcgtctacggcctccgctccaagtccaagaagttccgccgccccgacatccagtaccccgacgccaccgacgaggacatcacctcccacatggagtccgaggagctcaacggcgcctacaaggccatccccgtcgcccaggacctcaacgccccctccgactgggactcccgcggcaaggactcctacgagacctcccagctcgacgaccagtccgccgagacccactcccacaagcagtcccgcctctacaagcgcaaggccaacgacgagtccaacgagcactccgacgtcatcgactcccaggagctctccaaggtctcccgcgagttccactcccacgagttccactcccacgaggacatgctcgtcgtcgaccccaagtccaaggaggaggacaagcacctcaagttccgcatctcccacgagctcgactccgcctcctccgaggtcaactga

SEQ ID NO: 1893 - RNA, 879 nt, synthetic construct
  misc_feature 1..879: note = AEA49030 variant
  source 1..879: mol_type = other RNA
atgcgcatcgccgtcatctgcttctgcctcctcggcatcacctgcgccatccccgtcaagcaggccgactccggctcctccgaggagaagcagctctacaacaagtaccccgacgccgtcgccacctggctcaaccccgacccctcccagaagcagaacctcctcgccccccagaacgccgtctcctccgaggagaccaacgacttcaagcaggagaccctcccctccaagtccaacgagtcccacgaccacatggacgacatggacgacgaggacgacgactcccaccagtccgacgagtcccaccactccgacgagtccgacgagctcgtcaccgacttccccaccgacctccccgccaccgaggtcttcacccccgtcgtccccaccgtcgacacctacgacggccgcggcgactccgtcgtctacggcctccgctccaagtccaagaagttccgccgccccgacatccagtaccccgacgccaccgacgaggacatcacctcccacatggagtccgaggagctcaacggcgcctacaaggccatccccgtcgcccaggacctcaacgccccctccgactgggactcccgcggcaaggactcctacgagacctcccagctcgacgaccagtccgccgagacccactcccacaagcagtcccgcctctacaagcgcaaggccaacgacgagtccaacgagcactccgacgtcatcgactcccaggagctctccaaggtctcccgcgagttccactcccacgagttccactcccacgaggacatgctcgtcgtcgaccccaagtccaaggaggaggacaagcacctcaagttccgcatctcccacgagctcgactccgcctcctccgaggtcaactga

SEQ ID NO: 1894 - RNA, 945 nt, synthetic construct; identical to SEQ ID NO: 1889
  misc_feature 1..945: note = AAA86886 variant
  source 1..945: mol_type = other RNA

SEQ ID NO: 1895 - RNA, 1182 nt, synthetic construct
  misc_feature 1..1182: note = AAA59988 variant
  source 1..1182: mol_type = other RNA
atggaggagccccagtccgacccctccgtcgagccccccctctcccaggagaccttctccgacctctggaagctcctccccgagaacaacgtcctctcccccctcccctcccaggccatggacgacctcatgctctcccccgacgacatcgagcagtggttcaccgaggaccccggccccgacgaggccccccgcatgcccgaggccgccccccccgtcgcccccgcccccgccgcccccacccccgccgcccccgcccccgccccctcctggcccctctcctcctccgtcccctcccagaagacctaccagggctcctacggcttccgcctcggcttcctccactccggcaccgccaagtccgtcacctgcacctactcccccgccctcaacaagatgttctgccagctcgccaagacctgccccgtccagctctgggtcgactccacccccccccccggcacccgcgtccgcgccatggccatctacaagcagtcccagcacatgaccgaggtcgtccgccgctgcccccaccacgagcgctgctccgactccgacggcctcgcccccccccagcacctcatccgcgtcgagggcaacctccgcgtcgagtacctcgacgaccgcaacaccttccgccactccgtcgtcgtcccctacgagccccccgaggtcggctccgactgcaccaccatccactacaactacatgtgcaactcctcctgcatgggcggcatgaaccgccgccccatcctcaccatcatcaccctcgaggactcctccggcaacctcctcggccgcaactccttcgaggtccgcgtctgcgcctgccccggccgcgaccgccgcaccgaggaggagaacctccgcaagaagggcgagccccaccacgagctcccccccggctccaccaagcgcgccctccccaacaacacctcctcctccccccagcccaagaagaagcccctcgacggcgagtacttcaccctccagatccgcggccgcgagcgcttcgagatgttccgcgagctcaacgaggccctcgagctcaaggacgcccaggccggcaaggagcccggcggctcccgcgcccactcctcccacctcaagtccaagaagggccagtccacctcccgccacaagaagctcatgttcaagaccgagggccccgactccgactga

SEQ ID NO: 1896 - RNA, 309 nt, synthetic construct
  misc_feature 1..309: note = AAF88037 variant
  source 1..309: mol_type = other RNA
atgtccgcccgcgtccgctcccgctcccgcggccgcggcgacggccaggaggcccccgacgtcgtcgccttcgtcgcccccggcgagtcccagcaggaggagccccccaccgacaaccaggacatcgagcccggccaggagcgcgagggcaccccccccatcgaggagcgcaaggtcgagggcgactgccaggagatggacctcgagaagacccgctccgagcgcggcgacggctccgacgtcaaggagaagaccccccccaaccccaagcacgccaagaccaaggaggccggcgacggccagccctga

SEQ ID NO: 1897 - RNA, 1209 nt, synthetic construct
  misc_feature 1..1209: note = AAA60003 variant
  source 1..1209: mol_type = other RNA
atgcagatgtcccccgccctcacctgcctcgtcctcggcctcgccctcgtcttcggcgagggctccgccgtccaccaccccccctcctacgtcgcccacctcgcctccgacttcggcgtccgcgtcttccagcaggtcgcccaggcctccaaggaccgcaacgtcgtcttctccccctacggcgtcgcctccgtcctcgccatgctccagctcaccaccggcggcgagacccagcagcagatccaggccgccatgggcttcaagatcgacgacaagggcatggcccccgccctccgccacctctacaaggagctcatgggcccctggaacaaggacgagatctccaccaccgacgccatcttcgtccagcgcgacctcaagctcgtccagggcttcatgccccacttcttccgcctcttccgctccaccgtcaagcaggtcgacttctccgaggtcgagcgcgcccgcttcatcatcaacgactgggtcaagacccacaccaagggcatgatctccaacctcctcggcaagggcgccgtcgaccagctcacccgcctcgtcctcgtcaacgccctctacttcaacggccagtggaagacccccttccccgactcctccacccaccgccgcctcttccacaagtccgacggctccaccgtctccgtccccatgatggcccagaccaacaagttcaactacaccgagttcaccacccccgacggccactactacgacatcctcgagctcccctaccacggcgacaccctctccatgttcatcgccgccccctacgagaaggaggtccccctctccgccctcaccaacatcctctccgcccagctcatctcccactggaagggcaacatgacccgcctcccccgcctcctcgtcctccccaagttctccctcgagaccgaggtcgacctccgcaagcccctcgagaacctcggcatgaccgacatgttccgccagttccaggccgacttcacctccctctccgaccaggagcccctccacgtcgcccaggccctccagaaggtcaagatcgaggtcaacgagtccggcaccgtcgcctcctcctccaccgccgtcatcgtctccgcccgcatggcccccgaggagatcatcatggaccgccccttcctcttcgtcgtccgccacaaccccaccggcaccgtcctcttcatgggccaggtcatggagccctga

SEQ ID NO: 1898 - RNA, 1248 nt, synthetic construct
  misc_feature 1..1248: note = AAA36797 variant
  source 1..1248: mol_type = other RNA
atggaggacctctgcgtcgccaacaccctcttcgccctcaacctcttcaagcacctcgccaaggcctcccccacccagaacctcttcctctccccctggtccatctcctccaccatggccatggtctacatgggctcccgcggctccaccgaggaccagatggccaaggtcctccagttcaacgaggtcggcgccaacgccgtcacccccatgacccccgagaacttcacctcctgcggcttcatgcagcagatccagaagggctcctaccccgacgccatcctccaggcccaggccgccgacaagatccactcctccttccgctccctctcctccgccatcaacgcctccaccggcaactacctcctcgagtccgtcaacaagctcttcggcgagaagtccgcctccttccgcgaggagtacatccgcctctgccagaagtactactcctccgagccccaggccgtcgacttcctcgagtgcgccgaggaggcccgcaagaagatcaactcctgggtcaagacccagaccaagggcaagatccccaacctcctccccgagggctccgtcgacggcgacacccgcatggtcctcgtcaacgccgtctacttcaagggcaagtggaagacccccttcgagaagaagctcaacggcctctaccccttccgcgtcaactccgcccagcgcacccccgtccagatgatgtacctccgcgagaagctcaacatcggctacatcgaggacctcaaggcccagatcctcgagctcccctacgccggcgacgtctccatgttcctcctcctccccgacgagatcgccgacgtctccaccggcctcgagctcctcgagtccgagatcacctacgacaagctcaacaagtggacctccaaggacaagatggccgaggacgaggtcgaggtctacatcccccagttcaagctcgaggagcactacgagctccgctccatcctccgctccatgggcatggaggacgccttcaacaagggccgcgccaacttctccggcatgtccgagcgcaacgacctcttcctctccgaggtcttccaccaggccatggtcgacgtcaacgaggagggcaccgaggccgccgccggcaccggcggcgtcatgaccggccgcaccggccacggcggcccccagttcgtcgccgaccaccccttcctcttcctcatcatgcacaagatcaccaactgcatcctcttcttcggccgcttctcctccccctga

SEQ ID NO: 1899 - RNA, 528 nt, synthetic construct
  misc_feature 1..528: note = AAA60020 variant
  source 1..528: mol_type = other RNA
atgctcccccccatggccctcccctccgtctcctggatgctcctctcctgcctcatgctcctctcccaggtccagggcgaggagccccagcgcgagctcccctccgcccgcatccgctgccccaagggctccaaggcctacggctcccactgctacgccctcttcctctcccccaagtcctggaccgacgccgacctcgcctgccagaagcgcccctccggcaacctcgtctccgtcctctccggcgccgagggctccttcgtctcctccctcgtcaagtccatcggcaactcctactcctacgtctggatcggcctccacgaccccacccagggcaccgagcccaacggcgagggctgggagtggtcctcctccgacgtcatgaactacttcgcctgggagcgcaacccctccaccatctcctcccccggccactgcgcctccctctcccgctccaccgccttcctccgctggaaggactacaactgcaacgtccgcctcccctacgtctgcaagttcaccgactga

SEQ ID NO: 1900 - RNA, 528 nt, synthetic construct; identical to SEQ ID NO: 1899
  misc_feature 1..528: note = AAT11159 variant
  source 1..528: mol_type = other RNA

SEQ ID NO: 1901 - RNA, 381 nt, synthetic construct
  misc_feature 1..381: note = AAH39863 variant
  source 1..381: mol_type = other RNA
atggacaagtccctcctcctcgagctccccatcctcctctgctgcttccgcgccctctccggctccctctccatgcgcaacgacgccgtcaacgagatcgtcgccgtcaagaacaacttccccgtcatcgagatcgtccagtgccgcatgtgccacctccagttccccggcgagaagtgctcccgcggccgcggcatctgcaccgccaccaccgaggaggcctgcatggtcggccgcatgttcaagcgcgacggcaacccctggctcaccttcatgggctgcctcaagaactgcgccgacgtcaagggcatccgctggtccgtctacctcgtcaacttccgctgctgccgctcccacgacctctgcaacgaggacctctga

SEQ ID NO: 1902 - RNA, 1440 nt, synthetic construct
  misc_feature 1..1440: note = CCDS42826.1 variant
  source 1..1440: mol_type = other RNA
atgaccaccctcgccggcgccgtcccccgcatgatgcgccccggccccggccagaactacccccgctccggcttccccctcgaggtctccacccccctcggccagggccgcgtcaaccagctcggcggcgtcttcatcaacggccgccccctccccaaccacatccgccacaagatcgtcgagatggcccaccacggcatccgcccctgcgtcatctcccgccagctccgcgtctcccacggctgcgtctccaagatcctctgccgctaccaggagaccggctccatccgccccggcgccatcggcggctccaagcccaagcaggtcaccacccccgacgtcgagaagaagatcgaggagtacaagcgcgagaaccccggcatgttctcctgggagatccgcgacaagctcctcaaggacgccgtctgcgaccgcaacaccgtcccctccgtctcctccatctcccgcatcctccgctccaagttcggcaagggcgaggaggaggaggccgacctcgagcgcaaggaggccgaggagtccgagaagaaggccaagcactccatcgacggcatcctctccgagcgcgcctccgccccccagtccgacgagggctccgacatcgactccgagcccgacctccccctcaagcgcaagcagcgccgctcccgcaccaccttcaccgccgagcagctcgaggagctcgagcgcgccttcgagcgcacccactaccccgacatctacacccgcgaggagctcgcccagcgcgccaagctcaccgaggcccgcgtccaggtctggttctccaaccgccgcgcccgctggcgcaagcaggccggcgccaaccagctcatggccttcaaccacctcatccccggcggcttcccccccaccgccatgcccaccctccccacctaccagctctccgagacctcctaccagcccacctccatcccccaggccgtctccgacccctcctccaccgtccaccgcccccagcccctccccccctccaccgtccaccagtccaccatcccctccaaccccgactcctcctccgcctactgcctcccctccacccgccacggcttctcctcctacaccgactccttcgtccccccctccggcccctccaaccccatgaaccccaccatcggcaacggcctctccccccaggtcatgggcctcctcaccaaccacggcggcgtcccccaccagccccagaccgactacgccctctcccccctcaccggcggcctcgagcccaccaccaccgtctccgcctcctgctcccagcgcctcgaccacatgaagtccctcgactccctccccacctcccagtcctactgcccccccacctactccaccaccggctactccatggaccccgtcaccggctaccagtacggccagtacggccagtccaagccctggaccttctga

SEQ ID NO: 1903 - RNA, 1176 nt, synthetic construct
  misc_feature 1..1176: note = AAA58397 variant
  source 1..1176: mol_type = other RNA
atggacctcgagaagaactaccccaccccccgcacctcccgcaccggccacggcggcgtcaaccagctcggcggcgtcttcgtcaacggccgccccctccccgacgtcgtccgccagcgcatcgtcgagctcgcccaccagggcgtccgcccctgcgacatctcccgccagctccgcgtctcccacggctgcgtctccaagatcctcggccgctactacgagaccggctccatcaagcccggcgtcatcggcggctccaagcccaaggtcgccacccccaaggtcgtcgagaagatcgccgagtacaagcgccagaaccccaccatgttcgcctgggagatccgcgaccgcctcctcgccgagcgcgtctgcgacaacgacaccgtcccctccgtctcctccatcaaccgcatcatccgcaccaaggtccagcagccccccaaccagcccgtccccgcctcctcccactccatcgtctccaccggctccgtcacccaggtctcctccgtctccaccgactccgccggctcctcctactccatctccggcatcctcggcatcacctccccctccgccgacaccaacaagcgcaagcgcgacgagggcatccaggagtcccccgtccccaacggccactccctccccggccgcgacttcctccgcaagcagatgcgcggcgacctcttcacccagcagcagctcgaggtcctcgaccgcgtcttcgagcgccagcactactccgacatcttcaccaccaccgagcccatcaagcccgagcagaccaccgagtactccgccatggcctccctcgccggcggcctcgacgacatgaaggccaacctcgcctcccccacccccgccgacatcggctcctccgtccccggcccccagtcctaccccatcgtcaccggccgcgacctcgcctccaccaccctccccggctaccccccccacgtcccccccgccggccagggctcctactccgcccccaccctcaccggcatggtccccggctccgagttctccggctccccctactcccacccccagtactcctcctacaacgactcctggcgcttccccaaccccggcctcctcggctccccctactactactccgccgccgcccgcggcgccgccccccccgccgccgccaccgcctacgaccgccactga

SEQ ID NO: 1904 - RNA, 873 nt, synthetic construct
  misc_feature 1..873: note = AAF25807 variant
  source 1..873: mol_type = other RNA
atgcgcatcttcgccgtcttcatcttcatgacctactggcacctcctcaacgccttcaccgtcaccgtccccaaggacctctacgtcgtcgagtacggctccaacatgaccatcgagtgcaagttccccgtcgagaagcagctcgacctcgccgccctcatcgtctactgggagatggaggacaagaacatcatccagttcgtccacggcgaggaggacctcaaggtccagcactcctcctaccgccagcgcgcccgcctcctcaaggaccagctctccctcggcaacgccgccctccagatcaccgacgtcaagctccaggacgccggcgtctaccgctgcatgatctcctacggcggcgccgactacaagcgcatcaccgtcaaggtcaacgccccctacaacaagatcaaccagcgcatcctcgtcgtcgaccccgtcacctccgagcacgagctcacctgccaggccgagggctaccccaaggccgaggtcatctggacctcctccgaccaccaggtcctctccggcaagaccaccaccaccaactccaagcgcgaggagaagctcttcaacgtcacctccaccctccgcatcaacaccaccaccaacgagatcttctactgcaccttccgccgcctcgaccccgaggagaaccacaccgccgagctcgtcatccccgagctccccctcgcccacccccccaacgagcgcacccacctcgtcatcctcggcgccatcctcctctgcctcggcgtcgccctcaccttcatcttccgcctccgcaagggccgcatgatggacgtcaagaagtgcggcatccaggacaccaactccaagaagcagtccgacacccacctcgaggagacctga

SEQ ID NO: 1905 - RNA, 867 nt, synthetic construct
  misc_feature 1..867: note = AAH74740 variant
  source 1..867: mol_type = other RNA
atgcagatcccccaggccccctggcccgtcgtctgggccgtcctccagctcggctggcgccccggctggttcctcgactcccccgaccgcccctggaacccccccaccttctcccccgccctcctcgtcgtcaccgagggcgacaacgccaccttcacctgctccttctccaacacctccgagtccttcgtcctcaactggtaccgcatgtccccctccaaccagaccgacaagctcgccgccttccccgaggaccgctcccagcccggccaggactgccgcttccgcgtcacccagctccccaacggccgcgacttccacatgtccgtcgtccgcgcccgccgcaacgactccggcacctacctctgcggcgccatctccctcgcccccaaggcccagatcaaggagtccctccgcgccgagctccgcgtcaccgagcgccgcgccgaggtccccaccgcccacccctccccctccccccgccccgccggccagttccagaccctcgtcgtcggcgtcgtcggcggcctcctcggctccctcgtcctcctcgtctgggtcctcgccgtcatctgctcccgcgccgcccgcggcaccatcggcgcccgccgcaccggccagcccctcaaggaggacccctccgccgtccccgtcttctccgtcgactacggcgagctcgacttccagtggcgcgagaagacccccgagccccccgtcccctgcgtccccgagcagaccgagtacgccaccatcgtcttcccctccggcatgggcacctcctcccccgcccgccgcggctccgccgacggcccccgctccgcccagcccctccgccccgaggacggccactgctcctggcccctctga

SEQ ID NO: 1906 - RNA, 1008 nt, synthetic construct
  misc_feature 1..1008: note = AAC95296 variant
  source 1..1008: mol_type = other RNA
atgggctccgcctcccccggcctctcctccgtctccccctcccacctcctcctcccccccgacaccgtctcccgcaccggcctcgagaaggccgccgccggcgccgtcggcctcgagcgccgcgactggtccccctccccccccgccacccccgagcagggcctctccgccttctacctctcctacttcgacatgctctaccccgaggactcctcctgggccgccaaggcccccggcgcctcctcccgcgaggagccccccgaggagcccgagcagtgccccgtcatcgactcccaggcccccgccggctccctcgacctcgtccccggcggcctcaccctcgaggagcactccctcgagcaggtccagtccatggtcgtcggcgaggtcctcaaggacatcgagaccgcctgcaagctcctcaacatcaccgccgaccccatggactggtccccctccaacgtccagaagtggctcctctggaccgagcaccagtaccgcctcccccccatgggcaaggccttccaggagctcgccggcaaggagctctgcgccatgtccgaggagcagttccgccagcgctcccccctcggcggcgacgtcctccacgcccacctcgacatctggaagtccgccgcctggatgaaggagcgcacctcccccggcgccatccactactgcgcctccacctccgaggagtcctggaccgactccgaggtcgactcctcctgctccggccagcccatccacctctggcagttcctcaaggagctcctcctcaagccccactcctacggccgcttcatccgctggctcaacaaggagaagggcatcttcaagatcgaggactccgcccaggtcgcccgcctctggggcatccgcaagaaccgccccgccatgaactacgacaagctctcccgctccatccgccagtactacaagaagggcatcatccgcaagcccgacatctcccagcgcctcgtctaccagttcgtccaccccatctga

SEQ ID NO: 1907 - RNA, 2217 nt, synthetic construct
  misc_feature 1..2217: note = AAA36429 variant
  source 1..2217: mol_type = other RNA
atgcagccccgctgggcccagggcgccaccatgtggctcggcgtcctcctcaccctcctcctctgctcctccctcgagggccaggagaactccttcaccatcaactccgtcgacatgaagtccctccccgactggaccgtccagaacggcaagaacctcaccctccagtgcttcgccgacgtctccaccacctcccacgtcaagccccagcaccagatgctcttctacaaggacgacgtcctcttctacaacatctcctccatgaagtccaccgagtcctacttcatccccgaggtccgcatctacgactccggcacctacaagtgcaccgtcatcgtcaacaacaaggagaagaccaccgccgagtaccagctcctcgtcgagggcgtcccctccccccgcgtcaccctcgacaagaaggaggccatccagggcggcatcgtccgcgtcaactgctccgtccccgaggagaaggcccccatccacttcaccatcgagaagctcgagctcaacgagaagatggtcaagctcaagcgcgagaagaactcccgcgaccagaacttcgtcatcctcgagttccccgtcgaggagcaggaccgcgtcctctccttccgctgccaggcccgcatcatctccggcatccacatgcagacctccgagtccaccaagtccgagctcgtcaccgtcaccgagtccttctccacccccaagttccacatctcccccaccggcatgatcatggagggcgcccagctccacatcaagtgcaccatccaggtcacccacctcgcccaggagttccccgagatcatcatccagaaggacaaggccatcgtcgcccacaaccgccacggcaacaaggccgtctactccgtcatggccatggtcgagcactccggcaactacacctgcaaggtcgagtcctcccgcatctccaaggtctcctccatcgtcgtcaacatcaccgagctcttctccaagcccgagctcgagtcctccttcacccacctcgaccagggcgagcgcctcaacctctcctgctccatccccggcgccccccccgccaacttcaccatccagaaggaggacaccatcgtctcccagacccaggacttcaccaagatcgcctccaagtccgactccggcacctacatctgcaccgccggcatcgacaaggtcgtcaagaagtccaacaccgtccagatcgtcgtctgcgagatgctctcccagccccgcatctcctacgacgcccagttcgaggtcatcaagggccagaccatcgaggtccgctgcgagtccatctccggcaccctccccatctcctaccagctcctcaagacctccaaggtcctcgagaactccaccaagaactccaacgaccccgccgtcttcaaggacaaccccaccgaggacgtcgagtaccagtgcgtcgccgacaactgccactcccacgccaagatgctctccgaggtcctccgcgtcaaggtcatcgcccccgtcgacgaggtccagatctccatcctctcctccaaggtcgtcgagtccggcgaggacatcgtcctccagtgcgccgtcaacgagggctccggccccatcacctacaagttctaccgcgagaaggagggcaagcccttctaccagatgacctccaacgccacccaggccttctggaccaagcagaaggcctccaaggagcaggagggcgagtactactgcaccgccttcaaccgcgccaaccacgcctcctccgtcccccgctccaagatcctcaccgtccgcgtcatcctcgccccctggaagaagggcctcatcgccgtcgtcatcatcggcgtcatcatcgccctcctcatcatcgccgccaagtgctacttcctccgcaaggccaaggccaagcagatgcccgtcgagatgtcccgccccgccgtccccctcctcaactccaacaacgagaagatgtccgaccccaacatggaggccaactcccactacggccacaacgacgacgtccgcaaccacgccatgaagcccatcaacgacaacaaggagcccctcaactccgacgtccagtacaccgaggtccaggtctcctccgccgagtcccacaaggacctcggcaagaaggacaccgagaccgtctactccgaggtccgcaaggccgtccccgacgccgtcgagtcccgctactcccgcaccgagggctccctcgacggcacctga

SEQ ID NO: 1908 - RNA, 2736 nt, synthetic construct
  misc_feature 1..2736: note = AAG23134 variant
  source 1..2736: mol_type = other RNA
atggcccagctcttcctccccctcctcgccgccctcgtcctcgcccaggcccccgccgccctcgccgacgtcctcgagggcgactcctccgaggaccgcgccttccgcgtccgcatcgccggcgacgcccccctccagggcgtcctcggcggcgccctcaccatcccctgccacgtccactacctccgcccccccccctcccgccgcgccgtcctcggctccccccgcgtcaagtggaccttcctctcccgcggccgcgaggccgaggtcctcgtcgcccgcggcgtccgcgtcaaggtcaacgaggcctaccgcttccgcgtcgccctccccgcctaccccgcctccctcaccgacgtctccctcgccctctccgagctccgccccaacgactccggcatctaccgctgcgaggtccagcacggcatcgacgactcctccgacgccgtcgaggtcaaggtcaagggcgtcgtcttcctctaccgcgagggctccgcccgctacgccttctccttctccggcgcccaggaggcctgcgcccgcatcggcgcccacatcgccacccccgagcagctctacgccgcctacctcggcggctacgagcagtgcgacgccggctggctctccgaccagaccgtccgctaccccatccagaccccccgcgaggcctgctacggcgacatggacggcttccccggcgtccgcaactacggcgtcgtcgaccccgacgacctctacgacgtctactgctacgccgaggacctcaacggcgagctcttcctcggcgacccccccgagaagctcaccctcgaggaggcccgcgcctactgccaggagcgcggcgccgagatcgccaccaccggccagctctacgccgcctgggacggcggcctcgaccactgctcccccggctggctcgccgacggctccgtccgctaccccatcgtcaccccctcccagcgctgcggcggcggcctccccggcgtcaagaccctcttcctcttccccaaccagaccggcttccccaacaagcactcccgcttcaacgtctactgcttccgcgactccgcccagccctccgccatccccgaggcctccaaccccgcctccaaccccgcctccgacggcctcgaggccatcgtcaccgtcaccgagaccctcgaggagctccagctcccccaggaggccaccgagtccgagtcccgcggcgccatctactccatccccatcatggaggacggcggcggcggctcctccacccccgaggaccccgccgaggccccccgcaccctcctcgagttcgagacccagtccatggtcccccccaccggcttctccgaggaggagggcaaggccctcgaggaggaggagaagtacgaggacgaggaggagaaggaggaggaggaggaggaggaggaggtcgaggacgaggccctctgggcctggccctccgagctctcctcccccggccccgaggcctccctccccaccgagcccgccgcccaggaggagtccctctcccaggcccccgcccgcgccgtcctccagcccggcgcctcccccctccccgacggcgagtccgaggcctcccgccccccccgcgtccacggcccccccaccgagaccctccccaccccccgcgagcgcaacctcgcctccccctccccctccaccctcgtcgaggcccgcgaggtcggcgaggccaccggcggccccgagctctccggcgtcccccgcggcgagtccgaggagaccggctcctccgagggcgccccctccctcctccccgccacccgcgcccccgagggcacccgcgagctcgaggccccctccgaggacaactccggccgcaccgcccccgccggcacctccgtccaggcccagcccgtcctccccaccgactccgcctcccgcggcggcgtcgccgtcgtccccgcctccggcgactgcgtcccctccccctgccacaacggcggcacctgcctcgaggaggaggagggcgtccgctgcctctgcctccccggctacggcggcgacctctgcgacgtcggcctccgcttctgcaaccccggctgggacgccttccagggcgcctgctacaagcacttctccacccgccgctcctgggaggaggccgagacccagtgccgcatgtacggcgcccacctcgcctccatctccacccccgaggagcaggacttcatcaacaaccgctaccgcgagtaccagtggatcggcctcaacgaccgcaccatcgagggcgacttcctctggtccgacggcgtccccctcctctacgagaactggaaccccggccagcccgactcctacttcctctccggcgagaactgcgtcgtcatggtctggcacgaccagggccagtggtccgacgtcccctgcaactaccacctctcctacacctgcaagatgggcctcgtctcctgcggccccccccccgagctccccctcgcccaggtcttcggccgcccccgcctccgctacgaggtcgacaccgtcctccgctaccgctgccgcgagggcctcgcccagcgcaacctccccctcatccgctgccaggagaacggccgctgggaggccccccagatctcctgcgtcccccgccgccccgcccgcgccctccaccccgaggaggaccccgagggccgccagggccgcctcctcggccgctggaaggccctcctcatccccccctcctcccccatgcccggcccctga

SEQ ID NO: 1909 - RNA, 3321 nt, synthetic construct
  misc_feature 1..3321: note = AAA60049 variant
  source 1..3321: mol_type = other RNA
atgcgcctccccggcgccatgcccgccctcgccctcaagggcgagctcctcctcctctccctcctcctcctcctcgagccccagatctcccagggcctcgtcgtcaccccccccggccccgagctcgtcctcaacgtctcctccaccttcgtcctcacctgctccggctccgcccccgtcgtctgggagcgcatgtcccaggagcccccccaggagatggccaaggcccaggacggcaccttctcctccgtcctcaccctcaccaacctcaccggcctcgacaccggcgagtacttctgcacccacaacgactcccgcggcctcgagaccgacgagcgcaagcgcctctacatcttcgtccccgaccccaccgtcggcttcctccccaacgacgccgaggagctcttcatcttcctcaccgagatcaccgagatcaccatcccctgccgcgtcaccgacccccagctcgtcgtcaccctccacgagaagaagggcgacgtcgccctccccgtcccctacgaccaccagcgcggcttctccggcatcttcgaggaccgctcctacatctgcaagaccaccatcggcgaccgcgaggtcgactccgacgcctactacgtctaccgcctccaggtctcctccatcaacgtctccgtcaacgccgtccagaccgtcgtccgccagggcgagaacatcaccctcatgtgcatcgtcatcggcaacgaggtcgtcaacttcgagtggacctacccccgcaaggagtccggccgcctcgtcgagcccgtcaccgacttcctcctcgacatgccctaccacatccgctccatcctccacatcccctccgccgagctcgaggactccggcacctacacctgcaacgtcaccgagtccgtcaacgaccaccaggacgagaaggccatcaacatcaccgtcgtcgagtccggctacgtccgcctcctcggcgaggtcggcaccctccagttcgccgagctccaccgctcccgcaccctccaggtcgtcttcgaggcctaccccccccccaccgtcctctggttcaaggacaaccgcaccctcggcgactcctccgccggcgagatcgccctctccacccgcaacgtctccgagacccgctacgtctccgagctcaccctcgtccgcgtcaaggtcgccgaggccggccactacaccatgcgcgccttccacgaggacgccgaggtccagctctccttccagctccagatcaacgtccccgtccgcgtcctcgagctctccgagtcccaccccgactccggcgagcagaccgtccgctgccgcggccgcggcatgccccagcccaacatcatctggtccgcctgccgcgacctcaagcgctgcccccgcgagctcccccccaccctcctcggcaactcctccgaggaggagtcccagctcgagaccaacgtcacctactgggaggaggagcaggagttcgaggtcgtctccaccctccgcctccagcacgtcgaccgccccctctccgtccgctgcaccctccgcaacgccgtcggccaggacacccaggaggtcatcgtcgtcccccactccctccccttcaaggtcgtcgtcatctccgccatcctcgccctcgtcgtcctcaccatcatctccctcatcatcctcatcatgctctggcagaagaagccccgctacgagatccgctggaaggtcatcgagtccgtctcctccgacggccacgagtacatctacgtcgaccccatgcagctcccctacgactccacctgggagctcccccgcgaccagctcgtcctcggccgcaccctcggctccggcgccttcggccaggtcgtcgaggccaccgcccacggcctctcccactcccaggccaccatgaaggtcgccgtcaagatgctcaagtccaccgcccgctcctccgagaagcaggccctcatgtccgagctcaagatcatgtcccacctcggcccccacctcaacgtcgtcaacctcctcggcgcctgcaccaagggcggccccatctacatcatcaccgagtactgccgctacggcgacctcgtcgactacctccaccgcaacaagcacaccttcctccagcaccactccgacaagcgccgccccccctccgccgagctctactccaacgccctccccgtcggcctccccctcccctcccacgtctccctcaccggcgagtccgacggcggctacatggacatgtccaaggacgagtccgtcgactacgtccccatgctcgacatgaagggcgacgtcaagtacgccgacatcgagtcctccaactacatggccccctacgacaactacgtcccctccgcccccgagcgcacctgccgcgccaccctcatcaacgagtcccccgtcctctcctacatggacctcgtcggcttctcctaccaggtcgccaacggcatggagttcctcgcctccaagaactgcgtccaccgcgacctcgccgcccgcaacgtcctcatctgcgagggcaagctcgtcaagatctgcgacttcggcctcgcccgcgacatcatgcgcgactccaactacatctccaagggctccaccttcctccccctcaagtggatggcccccgagtccatcttcaactccctctacaccaccctctccgacgtctggtccttcggcatcctcctctgggagatcttcaccctcggcggcaccccctaccccgagctccccatgaacgagcagttctacaacgccatcaagcgcggctaccgcatggcccagcccgcccacgcctccgacgagatctacgagatcatgcagaagtgctgggaggagaagttcgagatccgcccccccttctcccagctcgtcctcctcctcgagcgcctcctcggcgagggctacaagaagaagtaccagcaggtcgacgaggagttcctccgctccgaccaccccgccatcctccgctcccaggcccgcctccccggcttccacggcctccgctcccccctcgacacctcctccgtcctctacaccgccgtccagcccaacgagggcgacaacgactacatcatccccctccccgaccccaagcccgaggtcgccgacgagggccccctcgagggctccccctccctcgcctcctccaccctcaacgaggtcaacacctcctccaccatctcctgcgactcccccctcgagccccaggacgagcccgagcccgagccccagctcgagctccaggtcgagcccgagcccgagctcgagcagctccccgactccggctgccccgccccccgcgccgaggccgaggactccttcctctga

SEQ ID NO: 1910 - RNA, 942 nt, synthetic construct
  misc_feature 1..942: note = EAX03935 variant
  source 1..942: mol_type = other RNA
atgctcctctccaagatcaactccctcgcccacctccgcgccgccccctgcaacgacctccacgccaccaagctcgcccccggcaaggagaaggagcccctcgagtcccagtaccaggtcggccccctcctcggctccggcggcttcggctccgtctactccggcatccgcgtctccgacaacctccccgtcgccatcaagcacgtcgagaaggaccgcatctccgactggggcgagctccccaacggcacccgcgtccccatggaggtcgtcctcctcaagaaggtctcctccggcttctccggcgtcatccgcctcctcgactggttcgagcgccccgactccttcgtcctcatcctcgagcgccccgagcccgtccaggacctcttcgacttcatcaccgagcgcggcgccctccaggaggagctcgcccgctccttcttctggcaggtcctcgaggccgtccgccactgccacaactgcggcgtcctccaccgcgacatcaaggacgagaacatcctcatcgacctcaaccgcggcgagctcaagctcatcgacttcggctccggcgccctcctcaaggacaccgtctacaccgacttcgacggcacccgcgtctactccccccccgagtggatccgctaccaccgctaccacggccgctccgccgccgtctggtccctcggcatcctcctctacgacatggtctgcggcgacatccccttcgagcacgacgaggagatcatccgcggccaggtcttcttccgccagcgcgtctcctccgagtgccagcacctcatccgctggtgcctcgccctccgcccctccgaccgccccaccttcgaggagatccagaaccacccctggatgcaggacgtcctcctcccccaggagaccgccgagatccacctccactccctctcccccggcccctccaagtga

SEQ ID NO: 1911 - RNA, 303 nt, synthetic construct
  misc_feature 1..303: note = AAB81333 variant
  source 1..303: mol_type = other RNA
atggccgacgaggagaagctcccccccggctgggagaagcgcatgtcccgcccctccggccgcggctactacttcaaccacatcaccaacccctcccagtgggagcgcccctccggcaactcctcctccggcggcaagatctggcagggcgagcccgcccgcgtccgccgctcccacctcctcgtcaagcccgtcaaggccgccctcgacctcgccgccggcaaccaccccgaccagggcggcggccccggcgccgaccagcgcctccaccccgaggaccagggccgccgcgagggcctctga

SEQ ID NO: 1912 - RNA, 492 nt, synthetic construct
  misc_feature 1..492: note = AAC50492 variant
  source 1..492: mol_type = other RNA
atggccgacgaggagaagctcccccccggctgggagaagcgcatgtcccgctcctccggccgcgtctactacttcaaccacatcaccaacgcctcccagtgggagcgcccctccggcaactcctcctccggcggcaagaacggccagggcgagcccgcccgcgtccgctgctcccacctcctcgtcaagcactcccagtcccgccgcccctcctcctggcgccaggagaagatcacccgcaccaaggaggaggccctcgagctcatcaacggctacatccagaagatcaagtccggcgaggaggacttcgagtccctcgcctcccagttctccgactgctcctccgccaaggcccgcggcgacctcggcgccttctcccgcggccagatgcagaagcccttcgaggacgcctccttcgccctccgcaccggcgagatgtccggccccgtcttcaccgactccggcatccacatcatcctccgcaccgagtga

SEQ ID NO: 1913 - RNA, 138 nt, synthetic construct
  misc_feature 1..138: note = AAH31971 variant
  source 1..138: mol_type = other RNA
atgcagaagcccttcgaggacgcctccttcgccctccgcaccggcgagatgtccggccccgtcttcaccgactccggcatccacatcatcctccgcaccgagtgctggcgccagacccgcggccccaactgcttctga

SEQ ID NO: 1914 - RNA, 639 nt, synthetic construct
  misc_feature 1..639: note = AAG22596 variant
  source 1..639: mol_type = other RNA
atgaaggtcttcaagttcatcggcctcatgatcctcctcacctccgccttctccgccggctccggccagtcccccatgaccgtcctctgctccatcgactggttcatggtcaccgtccaccccttcatgctcaacaacgacgtctgcgtccacttccacgagctccacctcggcctcggctgcccccccaaccacgtccagccccacgcctaccagttcacctaccgcgtcaccgagtgcggcatccgcgccaaggccgtctcccaggacatggtcatctactccaccgagatccactactcctccaagggcaccccctccaagttcgtcatccccgtctcctgcgccgccccccagaagtccccctggctcaccaagccctgctccatgcgcgtcgcctccaagtcccgcgccaccgcccagaaggacgagaagtgctacgaggtcttctccctctcccagtcctcccagcgccccaactgcgactgccccccctgcgtcttctccgaggaggagcacacccaggtcccctgccaccaggccggcgcccaggaggcccagcccctccagccctcccacttcctcgacatctccgaggactggtccctccacaccgacgacatgatcggctccatgtga

SEQ ID NO: 1915 - RNA, 1986 nt, synthetic construct
  misc_feature 1..1986: note = AAB00386 variant
  source 1..1986: mol_type = other RNA
atggacctcgtcctcaagcgctgcctcctccacctcgccgtcatcggcgccctcctcgccgtcggcgccaccaaggtcccccgcaaccaggactggctcggcgtctcccgccagctccgcaccaaggcctggaaccgccagctctaccccgagtggaccgaggcccagcgcctcgactgctggcgcggcggccaggtctccctcaaggtctccaacgacggccccaccctcatcggcgccaacgcctccttctccatcgccctcaacttccccggctcccagaaggtcctccccgacggccaggtcatctgggtcaacaacaccatcatcaacggctcccaggtctggggcggccagcccgtctacccccaggagaccgacgacgcctgcatcttccccgacggcggcccctgcccctccggctcctggtcccagaagcgctccttcgtctacgtctggaagacctggggccagtactggcaggtcctcggcggccccgtctccggcctctccatcggcaccggccgcgccatgctcggcacccacaccatggaggtcaccgtctaccaccgccgcggctcccgctcctacgtccccctcgcccactcctcctccgccttcaccatcaccgaccaggtccccttctccgtctccgtctcccagctccgcgccctcgacggcggcaacaagcacttcctccgcaaccagcccctcaccttcgccctccagctccacgacccctccggctacctcgccgaggccgacctctcctacacctgggacttcggcgactcctccggcaccctcatctcccgcgccctcgtcgtcacccacacctacctcgagcccggccccgtcaccgcccaggtcgtcctccaggccgccatccccctcacctcctgcggctcctcccccgtccccggcaccaccgacggccaccgccccaccgccgaggcccccaacaccaccgccggccaggtccccaccaccgaggtcgtcggcaccacccccggccaggcccccaccgccgagccctccggcaccacctccgtccaggtccccaccaccgaggtcatctccaccgcccccgtccagatgcccaccgccgagtccaccggcatgacccccgagaaggtccccgtctccgaggtcatgggcaccaccctcgccgagatgtccacccccgaggccaccggcatgacccccgccgaggtctccatcgtcgtcctctccggcaccaccgccgcccaggtcaccaccaccgagtgggtcgagaccaccgcccgcgagctccccatccccgagcccgagggccccgacgcctcctccatcatgtccaccgagtccatcaccggctccctcggccccctcctcgacggcaccgccaccctccgcctcgtcaagcgccaggtccccctcgactgcgtcctctaccgctacggctccttctccgtcaccctcgacatcgtccagggcatcgagtccgccgagatcctccaggccgtcccctccggcgagggcgacgccttcgagctcaccgtctcctgccagggcggcctccccaaggaggcctgcatggagatctcctcccccggctgccagccccccgcccagcgcctctgccagcccgtcctcccctcccccgcctgccagctcgtcctccaccagatcctcaagggcggctccggcacctactgcctcaacgtctccctcgccgacaccaactccctcgccgtcgtctccacccagctcatcatgcccggccaggaggccggcctcggccaggtccccctcatcgtcggcatcctcctcgtcctcatggccgtcgtcctcgcctccctcatctaccgccgccgcctcatgaagcaggacttctccgtcccccagctcccccactcctcctcccactggctccgcctcccccgcatcttctgctcctgccccatcggcgagaactcccccctcctctccggccagcaggtctga

SEQ ID NO: 1916 - RNA, 2649 nt, synthetic construct
  misc_feature 1..2649: note = CCDS10255.1 variant
  source 1..2649: mol_type = other RNA
atggagcccgcccccgcccgctccccccgcccccagcaggaccccgcccgcccccaggagcccaccatgcccccccccgagaccccctccgagggccgccagccctccccctccccctcccccaccgagcgcgcccccgcctccgaggaggagttccagttcctccgctgccagcagtgccaggccgaggccaagtgccccaagctcctcccctgcctccacaccctctgctccggctgcctcgaggcctccggcatgcagtgccccatctgccaggccccctggcccctcggcgccgacacccccgccctcgacaacgtcttcttcgagtccctccagcgccgcctctccgtctaccgccagatcgtcgacgcccaggccgtctgcacccgctgcaaggagtccgccgacttctggtgcttcgagtgcgagcagctcctctgcgccaagtgcttcgaggcccaccagtggttcctcaagcacgaggcccgccccctcgccgagctccgcaaccagtccgtccgcgagttcctcgacggcacccgcaagaccaacaacatcttctgctccaaccccaaccaccgcacccccaccctcacctccatctactgccgcggctgctccaagcccctctgctgctcctgcgccctcctcgactcctcccactccgagctcaagtgcgacatctccgccgagatccagcagcgccaggaggagctcgacgccatgacccaggccctccaggagcaggactccgccttcggcgccgtccacgcccagatgcacgccgccgtcggccagctcggccgcgcccgcgccgagaccgaggagctcatccgcgagcgcgtccgccaggtcgtcgcccacgtccgcgcccaggagcgcgagctcctcgaggccgtcgacgcccgctaccagcgcgactacgaggagatggcctcccgcctcggccgcctcgacgccgtcctccagcgcatccgcaccggctccgccctcgtccagcgcatgaagtgctacgcctccgaccaggaggtcctcgacatgcacggcttcctccgccaggccctctgccgcctccgccaggaggagccccagtccctccaggccgccgtccgcaccgacggcttcgacgagttcaaggtccgcctccaggacctctcctcctgcatcacccagggcaaggacgccgccgtctccaagaaggcctcccccgaggccgcctccaccccccgcgaccccatcgacgtcgacctccccgaggaggccgagcgcgtcaaggcccaggtccaggccctcggcctcgccgaggcccagcccatggccgtcgtccagtccgtccccggcgcccaccccgtccccgtctacgccttctccatcaagggcccctcctacggcgaggacgtctccaacaccaccaccgcccagaagcgcaagtgctcccagacccagtgcccccgcaaggtcatcaagatggagtccgaggagggcaaggaggcccgcctcgcccgctcctcccccgagcagccccgcccctccacctccaaggccgtctcccccccccacctcgacggccccccctccccccgctcccccgtcatcggctccgaggtcttcctccccaactccaaccacgtcgcctccggcgccggcgaggccgaggagcgcgtcgtcgtcatctcctcctccgaggactccgacgccgagaactcctcctcccgcgagctcgacgactcctcctccgagtcctccgacctccagctcgagggcccctccaccctccgcgtcctcgacgagaacctcgccgacccccaggccgaggaccgccccctcgtcttcttcgacctcaagatcgacaacgagacccagaagatctcccagctcgccgccgtcaaccgcgagtccaagttccgcgtcgtcatccagcccgaggccttcttctccatctactccaaggccgtctccctcgaggtcggcctccagcacttcctctccttcctctcctccatgcgccgccccatcctcgcctgctacaagctctggggccccggcctccccaacttcttccgcgccctcgaggacatcaaccgcctctgggagttccaggaggccatctccggcttcctcgccgccctccccctcatccgcgagcgcgtccccggcgcctcctccttcaagctcaagaacctcgcccagacctacctcgcccgcaacatgtccgagcgctccgccatggccgccgtcctcgccatgcgcgacctctgccgcctcctcgaggtctcccccggcccccagctcgcccagcacgtctaccccttctcctccctccagtgcttcgcctccctccagcccctcgtccaggccgccgtcctcccccgcgccgaggcccgcctcctcgccctccacaacgtctccttcatggagctcctctccgcccaccgccgcgaccgccagggcggcctcaagaagtactcccgctacctctccctccagaccaccaccctcccccccgcccagcccgccttcaacctccaggccctcggcacctacttcgagggcctcctcgagggccccgccctcgcccgcgccgagggcgtctccacccccctcgccggccgcggcctcgccgagcgcgcctcccagcagtcctga

SEQ ID NO: 1917 - RNA, 3228 nt, synthetic construct
  misc_feature 1..3228: note = CCDS46409.1 variant
  source 1..3228: mol_type = other RNA
atggtcgtcgaggtcgactccatgcccgccgcctcctccgtcaagaagcccttcggcctccgctccaagatgggcaagtggtgctgccgctgcttcccctgctgccgcgagtccggcaagtccaacgtcggcacctccggcgaccacgacgactccgccatgaagaccctccgctccaagatgggcaagtggtgccgccactgcttcccctgctgccgcggctccggcaagtccaacgtcggcgcctccggcgaccacgacgactccgccatgaagaccctccgcaacaagatgggcaagtggtgctgccactgcttcccctgctgccgcggctcctccaagtccaaggtcggcgcctggggcgactacgacgactccgccttcatggagccccgctaccacgtccgcggcgaggacctcgacaagctccaccgcgccgcctggtggggcaaggtcccccgcaaggacctcatcgtcatgctccgcgacaccgacgtcaacaagcaggacaagcagaagcgcaccgccctccacctcgcctccgccaacggcaactccgaggtcgtcaagctcctcctcgaccgccgctgccagctcaacgtcctcgacaacaagaagcgcaccgccctcatcaaggccgtccagtgccaggaggacgagtgcgccctcatgctcctcgagcacggcaccgaccccaacatccccgacgagtacggcaacaccaccctccactacgccatctacaacgaggacaagctcatggccaaggccctcctcctctacggcgccgacatcgagtccaagaacaagcacggcctcacccccctcctcctcggcgtccacgagcagaagcagcaggtcgtcaagttcctcatcaagaagaaggccaacctcaacgccctcgaccgctacggccgcaccgccctcatcctcgccgtctgctgcggctccgcctccatcgtctccctcctcctcgagcagaacatcgacgtctcctcccaggacctctccggccagaccgcccgcgagtacgccgtctcctcccaccaccacgtcatctgccagctcctctccgactacaaggagaagcagatgctcaagatctcctccgagaactccaaccccgagcaggacctcaagctcacctccgaggaggagtcccagcgcttcaagggctccgagaactcccagcccgagaagatgtcccaggagcccgagatcaacaaggacggcgaccgcgaggtcgaggaggagatgaagaagcacgagtccaacaacgtcggcctcctcgagaacctcaccaacggcgtcaccgccggcaacggcgacaacggcctcatcccccagcgcaagtcccgcacccccgagaaccagcagttccccgacaacgagtccgaggagtaccaccgcatctgcgagctcctctccgactacaaggagaagcagatgcccaagtactcctccgagaactccaaccccgagcaggacctcaagctcacctccgaggaggagtcccagcgcctcaagggctccgagaacggccagcccgagaagcgctcccaggagcccgagatcaacaaggacggcgaccgcgagctcgagaacttcatggccatcgaggagatgaagaagcaccgctccacccacgtcggcttccccgagaacctcaccaacggcgccaccgccggcaacggcgacgacggcctcatccccccccgcaagtcccgcacccccgagtcccagcagttccccgacaccgagaacgaggagtaccactccgacgagcagaacgacacccagaagcagttctgcgaggagcagaacaccggcatcctccacgacgagatcctcatccacgaggagaagcagatcgaggtcgtcgagaagatgaactccgagctctccctctcctgcaagaaggagaaggacatcctccacgagaactccaccctccgcgaggagatcgccatgctccgcctcgagctcgacaccatgaagcaccagtcccagctccgcgagaagaagtacctcgaggacatcgagtccgtcaagaagcgcaacgacaacctcctcaaggccctccagctcaacgagctcaccatggacgacgacaccgccgtcctcgtcatcgacaacggctccggcatgtgcaaggccggcttcgccggcgacgacgccccccgcgccgtcttcccctccatcgtcggccgcccccgccagcagggcatgatgggcggcatgcaccagaaggagtcctacgtcggcaaggaggcccagtccaagcgcggcatcctcaccctcaagtaccccatggagcacggcatcatcaccaactgggacgacatggagaagatctggcaccacaccttctacaacgagctccgcgtcgcccccgaggagcaccccgtcctcctcaccgaggccaccctcaaccccaaggccaaccgcgagaagatgacccagatcatgttcgagaccttcaacacccccgccatgtacgtcgccatccaggccgtcctctccctctacacctccggccgcaccaccggcatcgtcatggactccggcgacggcgtcacccacaccgtccccatctacgagggcaacgccctcccccacgccaccctccgcctcgacctcgccggccgcgagctccccgactacctcatgaagatcctcaccgagcacggctaccgcttcaccaccatggccgagcgcgagatcgtccgcgacatcaaggagaagctctgctacgtcgccctcgacttcgagcaggagatggccaccgtcgcctcctcctcctccctcgagaagtcctacgagctccccgacggccaggtcatcaccatcggcaacgagcgcttccgctgccccgaggccctcttccagccctgcttcctcggcatggagtcctgcggcatccacgagaccaccttcaactccatcatgaagtccgacgtcgacatccgcaaggacctctacaccaacaccgtcctctccggcggcaccaccatgtaccccggcatggcccaccgcatgcagaaggagatcgccgccctcgccccctccatgatgaagatccgcatcatcgccccccccaagcgcaagtactccgtctgggtcggcggctccatcctcgcctccctctccaccttccagcagatgtggatctccaagcaggagtacgacgagtccggcccctccatcgtccaccgcaagtgcctctga

SEQ ID NO: 1918 - RNA, 1755 nt, synthetic construct
  misc_feature 1..1755: note = CCDS13562.1 variant
  source 1..1755: mol_type = other RNA
atggtcgccgaggtctgctccatgcccaccgcctccaccgtcaagaagcccttcgacctccgctccaagatgggcaagtggtgccaccaccgcttcccctgctgccgcggctccggcaagtccaacatgggcacctccggcgaccacgacgactccttcatgaagatgctccgctccaagatgggcaagtgctgccgccactgcttcccctgctgccgcggctccggcacctccaacgtcggcacctccggcgaccacgagaactccttcatgaagatgctccgctccaagatgggcaagtggtgctgccactgcttcccctgctgccgcggctccggcaagtccaacgtcggcgcctggggcgactacgaccactccgccttcatggagccccgctaccacatccgccgcgaggacctcgacaagctccaccgcgccgcctggtggggcaaggtcccccgcaaggacctcatcgtcatgctccgcgacaccgacatgaacaagcgcgacaaggagaagcgcaccgccctccacctcgcctccgccaacggcaactccgaggtcgtccagctcctcctcgaccgccgctgccagctcaacgtcctcgacaacaagaagcgcaccgccctcatcaaggccatccagtgccaggaggacgagtgcgtcctcatgctcctcgagcacggcgccgaccgcaacatccccgacgagtacggcaacaccgccctccactacgccatctacaacgaggacaagctcatggccaaggccctcctcctctacggcgccgacatcgagtccaagaacaagtgcggcctcacccccctcctcctcggcgtccacgagcagaagcagcaggtcgtcaagttcctcatcaagaagaaggccaacctcaacgtcctcgaccgctacggccgcaccgccctcatcctcgccgtctgctgcggctccgcctccatcgtcaacctcctcctcgagcagaacgtcgacgtctcctcccaggacctctccggccagaccgcccgcgagtacgccgtctcctcccaccaccacgtcatctgcgagctcctctccgactacaaggagaagcagatgctcaagatctcctccgagaactccaaccccgagcaggacctcaagctcacctccgaggaggagtcccagcgcctcaaggtctccgagaactcccagcccgagaagatgtcccaggagcccgagatcaacaaggactgcgaccgcgaggtcgaggaggagatcaagaagcacggctccaaccccgtcggcctccccgagaacctcaccaacggcgcctccgccggcaacggcgacgacggcctcatcccccagcgccgctcccgcaagcccgagaaccagcagttccccgacaccgagaacgaggagtaccactccgacgagcagaacgacacccgcaagcagctctccgaggagcagaacaccggcatctcccaggacgagatcctcaccaacaagcagaagcagatcgaggtcgccgagcagaagatgaactccgagctctccctctcccacaagaaggaggaggacctcctccgcgagaactccgtcctccaggaggagatcgccatgctccgcctcgagctcgacgagaccaagcaccagaaccagctccgcgagaacaagatcctcgaggagatcgagtccgtcaaggagaagaccgacaagctcctccgcgccatgcagctcaacgaggaggccctcaccaagaccaacatctga

SEQ ID NO: 1919 - RNA, 1530 nt, synthetic construct
  misc_feature 1..1530: note = EAW59519 variant
  source 1..1530: mol_type = other RNA
atggagcgccgccgcctctggggctccatccagtcccgctacatctccatgtccgtctggacctccccccgccgcctcgtcgagctcgccggccagtccctcctcaaggacgaggccctcgccatcgccgccctcgagctcctcccccgcgagctcttcccccccctcttcatggccgccttcgacggccgccactcccagaccctcaaggccatggtccaggcctggcccttcacctgcctccccctcggcgtcctcatgaagggccagcacctccacctcgagaccttcaaggccgtcctcgacggcctcgacgtcctcctcgcccaggaggtccgcccccgccgctggaagctccaggtcctcgacctccgcaagaactcccaccaggacttctggaccgtctggtccggcaaccgcgcctccctctactccttccccgagcccgaggccgcccagcccatgaccaagaagcgcaaggtcgacggcctctccaccgaggccgagcagcccttcatccccgtcgaggtcctcgtcgacctcttcctcaaggagggcgcctgcgacgagctcttctcctacctcatcgagaaggtcaagcgcaagaagaacgtcctccgcctctgctgcaagaagctcaagatcttcgccatgcccatgcaggacatcaagatgatcctcaagatggtccagctcgactccatcgaggacctcgaggtcacctgcacctggaagctccccaccctcgccaagttctccccctacctcggccagatgatcaacctccgccgcctcctcctctcccacatccacgcctcctcctacatctcccccgagaaggaggagcagtacatcgcccagttcacctcccagttcctctccctccagtgcctccaggccctctacgtcgactccctcttcttcctccgcggccgcctcgaccagctcctccgccacgtcatgaaccccctcgagaccctctccatcaccaactgccgcctctccgagggcgacgtcatgcacctctcccagtccccctccgtctcccagctctccgtcctctccctctccggcgtcatgctcaccgacgtctcccccgagcccctccaggccctcctcgagcgcgcctccgccaccctccaggacctcgtcttcgacgagtgcggcatcaccgacgaccagctcctcgccctcctcccctccctctcccactgctcccagctcaccaccctctccttctacggcaactccatctccatctccgccctccagtccctcctccagcacctcatcggcctctccaacctcacccacgtcctctaccccgtccccctcgagtcctacgaggacatccacggcaccctccacctcgagcgcctcgcctacctccacgcccgcctccgcgagctcctctgcgagctcggccgcccctccatggtctggctctccgccaacccctgcccccactgcggcgaccgcaccttctacgaccccgagcccatcctctgcccctgcttcatgcccaactga

SEQ ID NO: 1920 - RNA, 1530 nt, synthetic construct; identical to SEQ ID NO: 1919
  misc_feature 1..1530: note = AAC51160 variant
  source 1..1530: mol_type = other RNA

SEQ ID NO: 1921 - RNA, 645 nt, synthetic construct
  misc_feature 1..645: note = CCDS8069.1 variant
  source 1..645: mol_type = other RNA
atgggcctcgccggcgtctgcgccctccgccgctccgccggctacatcctcgtcggcggcgccggcggccagtccgccgccgccgccgcccgccgctactccgagggcgagtgggcctccggcggcgtccgctccttctcccgcgccgccgccgccatggcccccatcaaggtcggcgacgccatccccgccgtcgaggtcttcgagggcgagcccggcaacaaggtcaacctcgccgagctcttcaagggcaagaagggcgtcctcttcggcgtccccggcgccttcacccccggctgctccaagacccacctccccggcttcgtcgagcaggccgaggccctcaaggccaagggcgtccaggtcgtcgcctgcctctccgtcaacgacgccttcgtcaccggcgagtggggccgcgcccacaaggccgagggcaaggtccgcctcctcgccgaccccaccggcgccttcggcaaggagaccgacctcctcctcgacgactccctcgtctccatcttcggcaaccgccgcctcaagcgcttctccatggtcgtccaggacggcatcgtcaaggccctcaacgtcgagcccgacggcaccggcctcacctgctccctcgcccccaacatcatctcccagctctga

SEQ ID NO: 1922 - RNA, 309 nt, synthetic construct
  misc_feature 1..309: note = AAA63250 variant
  source 1..309: mol_type = other RNA
atggtccgctaccgcgtccgctccctctccgagcgctcccacgaggtctaccgccagcagctccacggccaggagcagggccaccacggccaggaggagcagggcctctcccccgagcacgtcgaggtctacgagcgcacccacggccagtcccactaccgccgccgccactgctcccgccgccgcctccaccgcatccaccgccgccagcaccgctcctgccgccgccgcaagcgccgctcctgccgccaccgccgccgccaccgccgcggctgccgcacccgcaagcgcacctgccgccgccactga

SEQ ID NO: 1923 - RNA, 1662 nt, synthetic construct
  misc_feature 1..1662: note = AAH50416 variant
  source 1..1662: mol_type = other RNA
atggtccagcgcctctgggtctcccgcctcctccgccaccgcaaggcccagctcctcctcgtcaacctcctcaccttcggcctcgaggtctgcctcgccgccggcatcacctacgtcccccccctcctcctcgaggtcggcgtcgaggagaagttcatgaccatggtcctcggcatcggccccgtcctcggcctcgtctgcgtccccctcctcggctccgcctccgaccactggcgcggccgctacggccgccgccgccccttcatctgggccctctccctcggcatcctcctctccctcttcctcatcccccgcgccggctggctcgccggcctcctctgccccgacccccgccccctcgagctcgccctcctcatcctcggcgtcggcctcctcgacttctgcggccaggtctgcttcacccccctcgaggccctcctctccgacctcttccgcgaccccgaccactgccgccaggcctactccgtctacgccttcatgatctccctcggcggctgcctcggctacctcctccccgccatcgactgggacacctccgccctcgccccctacctcggcacccaggaggagtgcctcttcggcctcctcaccctcatcttcctcacctgcgtcgccgccaccctcctcgtcgccgaggaggccgccctcggccccaccgagcccgccgagggcctctccgccccctccctctccccccactgctgcccctgccgcgcccgcctcgccttccgcaacctcggcgccctcctcccccgcctccaccagctctgctgccgcatgccccgcaccctccgccgcctcttcgtcgccgagctctgctcctggatggccctcatgaccttcaccctcttctacaccgacttcgtcggcgagggcctctaccagggcgtcccccgcgccgagcccggcaccgaggcccgccgccactacgacgagggcgtccgcatgggctccctcggcctcttcctccagtgcgccatctccctcgtcttctccctcgtcatggaccgcctcgtccagcgcttcggcacccgcgccgtctacctcgcctccgtcgccgccttccccgtcgccgccggcgccacctgcctctcccactccgtcgccgtcgtcaccgcctccgccgccctcaccggcttcaccttctccgccctccagatcctcccctacaccctcgcctccctctaccaccgcgagaagcaggtcttcctccccaagtaccgcggcgacaccggcggcgcctcctccgaggactccctcatgacctccttcctccccggccccaagcccggcgcccccttccccaacggccacgtcggcgccggcggctccggcctcctcccccccccccccgccctctgcggcgcctccgcctgcgacgtctccgtccgcgtcgtcgtcggcgagcccaccgaggcccgcgtcgtccccggccgcggcatctgcctcgacctcgccatcctcgactccgccttcctcctctcccaggtcgccccctccctcttcatgggctccatcgtccagctctcccagtccgtcaccgcctacatggtctccgccgccggcctcggcctcgtcgccatctacttcgccacccaggtcgtcttcgacaagtccgacctcgccaagtactccgcctga

SEQ ID NO: 1924 - RNA, 648 nt, synthetic construct
  misc_feature 1..648: note = CBI83574 variant
  source 1..648: mol_type = other RNA
atggcctccctccagatgcgcggcaaccccggctcccacttctgcggcggcaccctcatccacccctccttcgtcctcaccgccgcccactgcctccgcgacatcccccagcgcctcgtcaacgtcgtcctcggcgcccacaacgtccgcacccaggagcccacccagcagcacttctccgtcgcccaggtcttcctcaacaactacgacgccgagaacaagctcaacgacatcctcctcatccagctctcctcccccgccaacctctccgcctccgtcgccaccgtccagctcccccagcaggaccagcccgtcccccacggcacccagtgcctcgccatgggctggggccgcgtcggcgcccacgacccccccgcccaggtcctccaggagctcaacgtcaccgtcgtcaccttcttctgccgcccccacaacatctgcaccttcgtcccccgccgcaaggccggcatctgcttcggcgactccggcggccccctcatctgcgacggcatcatccagggcatcgactccttcgtcatctggggctgcgccacccgcctcttccccgacttcttcacccgcgtcgccctctacgtcgactggatccgctccaccctccgccgcgtcgaggccaagggccgcccctga

SEQ ID NO: 1925 - RNA, 771 nt, synthetic construct
  misc_feature 1..771: note = AAH96183 variant
  source 1..771: mol_type = other RNA
atggcccaccgccccccctcccccgccctcgcctccgtcctcctcgccctcctcctctccggcgccgcccgcgccgccgagatcgtcggcggccacgaggcccagccccactcccgcccctacatggcctccctccagatgcgcggcaaccccggctcccacttctgcggcggcaccctcatccacccctccttcgtcctcaccgccgcccactgcctccgcgacatcccccagcgcctcgtcaacgtcgtcctcggcgcccacaacgtccgcacccaggagcccacccagcagcacttctccgtcgcccaggtcttcctcaacaactacgacgccgagaacaagctcaacgacgtcctcctcatccagctctcctcccccgccaacctctccgcctccgtcgccaccgtccagctcccccagcaggaccagcccgtcccccacggcacccagtgcctcgccatgggctggggccgcgtcggcgcccacgacccccccgcccaggtcctccaggagctcaacgtcaccgtcgtcaccttcttctgccgcccccacaacatctgcaccttcgtcccccgccgcaaggccggcatctgcttcggcgactccggcggccccctcatctgcgacggcatcatccagggcatcgactccttcgtcatctggggctgcgccacccgcctcttccccgacttcttcacccgcgtcgccctctacgtcgactggatccgctccaccctccgccgcgtcgaggccaagggccgcccctga

SEQ ID NO: 1926 - RNA, 2760 nt, synthetic construct
  misc_feature 1..2760: note = CCDS45721.1 variant
  source 1..2760: mol_type = other RNA
atgtggctcgccgccgccgccccctccctcgcccgccgcctcctcttcctcggccccccccccccccccctcctcctcctcgtcttctcccgctcctcccgccgccgcctccactccctcggcctcgccgccatgcccgagaagcgccccttcgagcgcctccccgccgacgtctcccccatcaactactccctctgcctcaagcccgacctcctcgacttcaccttcgagggcaagctcgaggccgccgcccaggtccgccaggccaccaaccagatcgtcatgaactgcgccgacatcgacatcatcaccgcctcctacgcccccgagggcgacgaggagatccacgccaccggcttcaactaccagaacgaggacgagaaggtcaccctctccttcccctccaccctccagaccggcaccggcaccctcaagatcgacttcgtcggcgagctcaacgacaagatgaagggcttctaccgctccaagtacaccaccccctccggcgaggtccgctacgccgccgtcacccagttcgaggccaccgacgcccgccgcgccttcccctgctgggacgagcccgccatcaaggccaccttcgacatctccctcgtcgtccccaaggaccgcgtcgccctctccaacatgaacgtcatcgaccgcaagccctaccccgacgacgagaacctcgtcgaggtcaagttcgcccgcacccccgtcatgtccacctacctcgtcgccttcgtcgtcggcgagtacgacttcgtcgagacccgctccaaggacggcgtctgcgtccgcgtctacacccccgtcggcaaggccgagcagggcaagttcgccctcgaggtcgccgccaagaccctccccttctacaaggactacttcaacgtcccctaccccctccccaagatcgacctcatcgccatcgccgacttcgccgccggcgccatggagaactggggcctcgtcacctaccgcgagaccgccctcctcatcgaccccaagaactcctgctcctcctcccgccagtgggtcgccctcgtcgtcggccacgagctcgcccaccagtggttcggcaacctcgtcaccatggagtggtggacccacctctggctcaacgagggcttcgcctcctggatcgagtacctctgcgtcgaccactgcttccccgagtacgacatctggacccagttcgtctccgccgactacacccgcgcccaggagctcgacgccctcgacaactcccaccccatcgaggtctccgtcggccacccctccgaggtcgacgagatcttcgacgccatctcctactccaagggcgcctccgtcatccgcatgctccacgactacatcggcgacaaggacttcaagaagggcatgaacatgtacctcaccaagttccagcagaagaacgccgccaccgaggacctctgggagtccctcgagaacgcctccggcaagcccatcgccgccgtcatgaacacctggaccaagcagatgggcttccccctcatctacgtcgaggccgagcaggtcgaggacgaccgcctcctccgcctctcccagaagaagttctgcgccggcggctcctacgtcggcgaggactgcccccagtggatggtccccatcaccatctccacctccgaggaccccaaccaggccaagctcaagatcctcatggacaagcccgagatgaacgtcgtcctcaagaacgtcaagcccgaccagtgggtcaagctcaacctcggcaccgtcggcttctaccgcacccagtactcctccgccatgctcgagtccctcctccccggcatccgcgacctctccctcccccccgtcgaccgcctcggcctccagaacgacctcttctccctcgcccgcgccggcatcatctccaccgtcgaggtcctcaaggtcatggaggccttcgtcaacgagcccaactacaccgtctggtccgacctctcctgcaacctcggcatcctctccaccctcctctcccacaccgacttctacgaggagatccaggagttcgtcaaggacgtcttctcccccatcggcgagcgcctcggctgggaccccaagcccggcgagggccacctcgacgccctcctccgcggcctcgtcctcggcaagctcggcaaggccggccacaaggccaccctcgaggaggcccgccgccgcttcaaggaccacgtcgagggcaagcagatcctctccgccgacctccgctcccccgtctacctcaccgtcctcaagcacggcgacggcaccaccctcgacatcatgctcaagctccacaagcaggccgacatgcaggaggagaagaaccgcatcgagcgcgtcctcggcgccaccctcctccccgacctcatccagaaggtcctcaccttcgccctctccgaggaggtccgcccccaggacaccgtctccgtcatcggcggcgtcgccggcggctccaagcacggccgcaaggccgcctggaagttcatcaaggacaactgggaggagctctacaaccgctaccagggcggcttcctcatctcccgcctcatcaagctctccgtcgagggcttcgccgtcgacaagatggccggcgaggtcaaggccttcttcgagtcccaccccgccccctccgccgagcgcaccatccagcagtgctgcgagaacatcctcctcaacgccgcctggctcaagcgcgacgccgagtccatccaccagtacctcctccagcgcaaggcctccccccccaccgtctga

SEQ ID NO: 1927 - RNA, 660 nt, synthetic construct
  misc_feature 1..660: note = AAH65513 variant
  source 1..660: mol_type = other RNA
atgctccgcgccggcgcccccaccggcgacctcccccgcgccggcgaggtccacaccggcaccaccatcatggccgtcgagttcgacggcggcgtcgtcatgggctccgactcccgcgtctccgccggcgaggccgtcgtcaaccgcgtcttcgacaagctctcccccctccacgagcgcatctactgcgccctctccggctccgccgccgacgcccaggccgtcgccgacatggccgcctaccagctcgagctccacggcatcgagctcgaggagccccccctcgtcctcgccgccgccaacgtcgtccgcaacatctcctacaagtaccgcgaggacctctccgcccacctcatggtcgccggctgggaccagcgcgagggcggccaggtctacggcaccctcggcggcatgctcacccgccagcccttcgccatcggcggctccggctccaccttcatctacggctacgtcgacgccgcctacaagcccggcatgtcccccgaggagtgccgccgcttcaccaccgacgccatcgccctcgccatgtcccgcgacggctcctccggcggcgtcatctacctcgtcaccatcaccgccgccggcgtcgaccaccgcgtcatcctcggcaacgagctccccaagttctacgacgagtga

SEQ ID NO: 1928 - RNA, 345 nt, synthetic construct
  misc_feature 1..345: note = EAW82312 variant
  source 1..345: mol_type = other RNA
atggccggcctcgccctccagcccggcaccgccctcctctgctactcctgcaaggcccaggtctccaacgaggactgcctccaggtcgagaactgcacccagctcggcgagcagtgctggaccgcccgcatccgcgccgtcggcctcctcaccgtcatctccaagggctgctccctcaactgcgtcgacgactcccaggactactacgtcggcaagaagaacatcacctgctgcgacaccgacctctgcaacgcctccggcgcccacgccctccagcccgccgccgccatcctcgccctcctccccgccctcggcctcctcctctggggccccggccagctctga

SEQ ID NO: 1929 - RNA, 372 nt, synthetic construct
  misc_feature 1..372: note = AAC39607 variant
  source 1..372: mol_type = other RNA
atgaaggccgtcctcctcgccctcctcatggccggcctcgccctccagcccggcaccgccctcctctgctactcctgcaaggcccaggtctccaacgaggactgcctccaggtcgagaactgcacccagctcggcgagcagtgctggaccgcccgcatccgcgccgtcggcctcctcaccgtcatctccaagggctgctccctcaactgcgtcgacgactcccaggactactacgtcggcaagaagaacatcacctgctgcgacaccgacctctgcaacgcctccggcgcccacgccctccagcccgccgccgccatcctcgccctcctccccgccctcggcctcctcctctggggccccggccagctctga

SEQ ID NO: 1930 - RNA, 963 nt, synthetic construct
  misc_feature 1..963: note = AAG40776 variant
  source 1..963: mol_type = other RNA
atgtcctcctgcaacttcacccacgccaccttcgtcctcatcggcatccccggcctcgagaaggcccacttctgggtcggcttccccctcctctccatgtacgtcgtcgccatgttcggcaactgcatcgtcgtcttcatcgtccgcaccgagcgctccctccacgcccccatgtacctcttcctctgcatgctcgccgccatcgacctcgccctctccacctccaccatgcccaagatcctcgccctcttctggttcgactcccgcgagatctccttcgaggcctgcctcacccagatgttcttcatccacgccctctccgccatcgagtccaccatcctcctcgccatggccttcgaccgctacgtcgccatctgccaccccctccgccacgccgccgtcctcaacaacaccgtcaccgcccagatcggcatcgtcgccgtcgtccgcggctccctcttcttcttccccctccccctcctcatcaagcgcctcgccttctgccactccaacgtcctctcccactcctactgcgtccaccaggacgtcatgaagctcgcctacgccgacaccctccccaacgtcgtctacggcctcaccgccatcctcctcgtcatgggcgtcgacgtcatgttcatctccctctcctacttcctcatcatccgcaccgtcctccagctcccctccaagtccgagcgcgccaaggccttcggcacctgcgtctcccacatcggcgtcgtcctcgccttctacgtccccctcatcggcctctccgtcgtccaccgcttcggcaactccctccaccccatcgtccgcgtcgtcatgggcgacatctacctcctcctcccccccgtcatcaaccccatcatctacggcgccaagaccaagcagatccgcacccgcgtcctcgccatgttcaagatctcctgcgacaaggacctccaggccgtcggcggcaagtga

SEQ ID NO: 1931 - RNA, 2253 nt, synthetic construct
  misc_feature 1..2253: note = AAA60209 variant
  source 1..2253: mol_type = other RNA
atgtggaacctcctccacgagaccgactccgccgtcgccaccgcccgccgcccccgctggctctgcgccggcgccctcgtcctcgccggcggcttcttcctcctcggcttcctcttcggctggttcatcaagtcctccaacgaggccaccaacatcacccccaagcacaacatgaaggccttcctcgacgagctcaaggccgagaacatcaagaagttcctctacaacttcacccagatcccccacctcgccggcaccgagcagaacttccagctcgccaagcagatccagtcccagtggaaggagttcggcctcgactccgtcgagctcgcccactacgacgtcctcctctcctaccccaacaagacccaccccaactacatctccatcatcaacgaggacggcaacgagatcttcaacacctccctcttcgagccccccccccccggctacgagaacgtctccgacatcgtcccccccttctccgccttctccccccagggcatgcccgagggcgacctcgtctacgtcaactacgcccgcaccgaggacttcttcaagctcgagcgcgacatgaagatcaactgctccggcaagatcgtcatcgcccgctacggcaaggtcttccgcggcaacaaggtcaagaacgcccagctcgccggcgccaagggcgtcatcctctactccgaccccgccgactacttcgcccccggcgtcaagtcctaccccgacggctggaacctccccggcggcggcgtccagcgcggcaacatcctcaacctcaacggcgccggcgaccccctcacccccggctaccccgccaacgagtacgcctaccgccgcggcatcgccgaggccgtcggcctcccctccatccccgtccaccccatcggctactacgacgcccagaagctcctcgagaagatgggcggctccgccccccccgactcctcctggcgcggctccctcaaggtcccctacaacgtcggccccggcttcaccggcaacttctccacccagaaggtcaagatgcacatccactccaccaacgaggtcacccgcatctacaacgtcatcggcaccctccgcggcgccgtcgagcccgaccgctacgtcatcctcggcggccaccgcgactcctgggtcttcggcggcatcgacccccagtccggcgccgccgtcgtccacgagatcgtccgctccttcggcaccctcaagaaggagggctggcgcccccgccgcaccatcctcttcgcctcctgggacgccgaggagttcggcctcctcggctccaccgagtgggccgaggagaactcccgcctcctccaggagcgcggcgtcgcctacatcaacgccgactcctccatcgagggcaactacaccctccgcgtcgactgcacccccctcatgtactccctcgtccacaacctcaccaaggagctcaagtcccccgacgagggcttcgagggcaagtccctctacgagtcctggaccaagaagtccccctcccccgagttctccggcatgccccgcatctccaagctcggctccggcaacgacttcgaggtcttcttccagcgcctcggcatcgcctccggccgcgcccgctacaccaagaactgggagaccaacaagttctccggctaccccctctaccactccgtctacgagacctacgagctcgtcgagaagttctacgaccccatgttcaagtaccacctcaccgtcgcccaggtccgcggcggcatggtcttcgagctcgccaactccatcgtcctccccttcgactgccgcgactacgccgtcgtcctccgcaagtacgccgacaagatctactccatctccatgaagcacccccaggagatgaagacctactccgtctccttcgactccctcttctccgccgtcaagaacttcaccgagatcgcctccaagttctccgagcgcctccaggacttcgacaagtccaaccccatcgtcctccgcatgatgaacgaccagctcatgttcctcgagcgcgccttcatcgaccccctcggcctccccgaccgccccttctaccgccacgtcatctacgccccctcctcccacaacaagtacgccggcgagtccttccccggcatctacgacgccctcttcgacatcgagtccaaggtcgacccctccaaggcctggggcgaggtcaagcgccagatctacgtcgccgccttcaccgtccaggccgccgccgagaccctctccgaggtcgcctga

SEQ ID NO: 1932 - RNA, 3921 nt, synthetic construct
  misc_feature 1..3921: note = CCDS1397.2 variant
  source 1..3921: mol_type = other RNA
atgaccatgtacctctggctcaagctcctcgccttcggcttcgccttcctcgacaccgaggtcttcgtcaccggccagtcccccaccccctcccccaccggcctcaccaccgccaagatgccctccgtccccctctcctccgaccccctccccacccacaccaccgccttctcccccgcctccaccttcgagcgcgagaacgacttctccgagaccaccacctccctctcccccgacaacacctccacccaggtctcccccgactccctcgacaacgcctccgccttcaacaccaccggcgtctcctccgtccagaccccccacctccccacccacgccgactcccagaccccctccgccggcaccgacacccagaccttctccggctccgccgccaacgccaagctcaaccccacccccggctccaacgccatctccgacgtccccggcgagcgctccaccgcctccaccttccccaccgaccccgtctcccccctcaccaccaccctctccctcgcccaccactcctccgccgccctccccgcccgcacctccaacaccaccatcaccgccaacacctccgacgcctacctcaacgcctccgagaccaccaccctctccccctccggctccgccgtcatctccaccaccaccatcgccaccaccccctccaagcccacctgcgacgagaagtacgccaacatcaccgtcgactacctctacaacaaggagaccaagctcttcaccgccaagctcaacgtcaacgagaacgtcgagtgcggcaacaacacctgcaccaacaacgaggtccacaacctcaccgagtgcaagaacgcctccgtctccatctcccacaactcctgcaccgcccccgacaagaccctcatcctcgacgtcccccccggcgtcgagaagttccagctccacgactgcacccaggtcgagaaggccgacaccaccatctgcctcaagtggaagaacatcgagaccttcacctgcgacacccagaacatcacctaccgcttccagtgcggcaacatgatcttcgacaacaaggagatcaagctcgagaacctcgagcccgagcacgagtacaagtgcgactccgagatcctctacaacaaccacaagttcaccaacgcctccaagatcatcaagaccgacttcggctcccccggcgagccccagatcatcttctgccgctccgaggccgcccaccagggcgtcatcacctggaaccccccccagcgctccttccacaacttcaccctctgctacatcaaggagaccgagaaggactgcctcaacctcgacaagaacctcatcaagtacgacctccagaacctcaagccctacaccaagtacgtcctctccctccacgcctacatcatcgccaaggtccagcgcaacggctccgccgccatgtgccacttcaccaccaagtccgcccccccctcccaggtctggaacatgaccgtctccatgacctccgacaactccatgcacgtcaagtgccgccccccccgcgaccgcaacggcccccacgagcgctaccacctcgaggtcgaggccggcaacaccctcgtccgcaacgagtcccacaagaactgcgacttccgcgtcaaggacctccagtactccaccgactacaccttcaaggcctacttccacaacggcgactaccccggcgagcccttcatcctccaccactccacctcctacaactccaaggccctcatcgccttcctcgccttcctcatcatcgtcacctccatcgccctcctcgtcgtcctctacaagatctacgacctccacaagaagcgctcctgcaacctcgacgagcagcaggagctcgtcgagcgcgacgacgagaagcagctcatgaacgtcgagcccatccacgccgacatcctcctcgagacctacaagcgcaagatcgccgacgagggccgcctcttcctcgccgagttccagtccatcccccgcgtcttctccaagttccccatcaaggaggcccgcaagcccttcaaccagaacaagaaccgctacgtcgacatcctcccctacgactacaaccgcgtcgagctctccgagatcaacggcgacgccggctccaactacatcaacgcctcctacatcgacggcttcaaggagccccgcaagtacatcgccgcccagggcccccgcgacgagaccgtcgacgacttctggcgcatgatctgggagcagaaggccaccgtcatcgtcatggtcacccgctgcgaggagggcaaccgcaacaagtgcgccgagtactggccctccatggaggagggcacccgcgccttcggcgacgtcgtcgtcaagatcaaccagcacaagcgctgccccgactacatcatccagaagctcaacatcgtcaacaagaaggagaaggccaccggccgcgaggtcacccacatccagttcacctcctggcccgaccacggcgtccccgaggacccccacctcctcctcaagctccgccgccgcgtcaacgccttctccaacttcttctccggccccatcgtcgtccactgctccgccggcgtcggccgcaccggcacctacatcggcatcgacgccatgctcgagggcctcgaggccgagaacaaggtcgacgtctacggctacgtcgtcaagctccgccgccagcgctgcctcatggtccaggtcgaggcccagtacatcctcatccaccaggccctcgtcgagtacaaccagttcggcgagaccgaggtcaacctctccgagctccacccctacctccacaacatgaagaagcgcgaccccccctccgagccctcccccctcgaggccgagttccagcgcctcccctcctaccgctcctggcgcacccagcacatcggcaaccaggaggagaacaagtccaagaaccgcaactccaacgtcatcccctacgactacaaccgcgtccccctcaagcacgagctcgagatgtccaaggagtccgagcacgactccgacgagtcctccgacgacgactccgactccgaggagccctccaagtacatcaacgcctccttcatcatgtcctactggaagcccgaggtcatgatcgccgcccagggccccctcaaggagaccatcggcgacttctggcagatgatcttccagcgcaaggtcaaggtcatcgtcatgctcaccgagctcaagcacggcgaccaggagatctgcgcccagtactggggcgagggcaagcagacctacggcgacatcgaggtcgacctcaaggacaccgacaagtcctccacctacaccctccgcgtcttcgagctccgccactccaagcgcaaggactcccgcaccgtctaccagtaccagtacaccaactggtccgtcgagcagctccccgccgagcccaaggagctcatctccatgatccaggtcgtcaagcagaagctcccccagaagaactcctccgagggcaacaagcaccacaagtccacccccctcctcatccactgccgcgacggctcccagcagaccggcatcttctgcgccctcctcaacctcctcgagtccgccgagaccgaggaggtcgtcgacatcttccaggtcgtcaaggccctccgcaaggcccgccccggcatggtctccaccttcgagcagtaccagttcctctacgacgtcatcgcctccacctaccccgcccagaacggccaggtcaagaagaacaaccaccaggaggacaagatcgagttcgacaacgaggtcgacaaggtcaagcaggacgccaactgcgtcaaccccctcggcgcccccgagaagctccccgaggccaaggagcaggccgagggctccgagcccacctccggcaccgagggccccgagcactccgtcaacggccccgcctcccccgccctcaaccagggctcctga

SEQ ID NO: 1933 - RNA, 624 nt, synthetic construct
  misc_feature 1..624: note = AAH02977 variant
  source 1..624: mol_type = other RNA
atggccaagacctacgactacctcttcaagctcctcctcatcggcgactccggcgtcggcaagacctgcgtcctcttccgcttctccgaggacgccttcaactccaccttcatctccaccatcggcatcgacttcaagatccgcaccatcgagctcgacggcaagcgcatcaagctccagatctgggacaccgccggccaggagcgcttccgcaccatcaccaccgcctactaccgcggcgccatgggcatcatgctcgtctacgacatcaccaacgagaagtccttcgacaacatccgcaactggatccgcaacatcgaggagcacgcctccgccgacgtcgagaagatgatcctcggcaacaagtgcgacgtcaacgacaagcgccaggtctccaaggagcgcggcgagaagctcgccctcgactacggcatcaagttcatggagacctccgccaaggccaacatcaacgtcgagaacgccttcttcaccctcgcccgcgacatcaaggccaagatggacaagaagctcgagggcaactccccccagggctccaaccagggcgtcaagatcacccccgaccagcagaagcgctcctccttcttccgctgcgtcctcctctga

SEQ ID NO: 1934 - RNA, 1260 nt, synthetic construct
  misc_feature 1..1260: note = BAA81688 variant
  source 1..1260: mol_type = other RNA
atgaagaactacaaggccatcggcaagatcggcgagggcaccttctccgaggtcatgaagatgcagtccctccgcgacggcaactactacgcctgcaagcagatgaagcagcgcttcgagtccatcgagcaggtcaacaacctccgcgagatccaggccctccgccgcctcaacccccaccccaacatcctcatgctccacgaggtcgtcttcgaccgcaagtccggctccctcgccctcatctgcgagctcatggacatgaacatctacgagctcatccgcggccgccgctaccccctctccgagaagaagatcatgcactacatgtaccagctctgcaagtccctcgaccacatccaccgcaacggcatcttccaccgcgacgtcaagcccgagaacatcctcatcaagcaggacgtcctcaagctcggcgacttcggctcctgccgctccgtctactccaagcagccctacaccgagtacatctccacccgctggtaccgcgcccccgagtgcctcctcaccgacggcttctacacctacaagatggacctctggtccgccggctgcgtcttctacgagatcgcctccctccagcccctcttccccggcgtcaacgagctcgaccagatctccaagatccacgacgtcatcggcacccccgcccagaagatcctcaccaagttcaagcagtcccgcgccatgaacttcgacttccccttcaagaagggctccggcatccccctcctcaccaccaacctctccccccagtgcctctccctcctccacgccatggtcgcctacgaccccgacgagcgcatcgccgcccaccaggccctccagcacccctacttccaggagcagcgcaagaccgagaagcgcgccctcggctcccaccgcaaggccggcttccccgagcaccccgtcgcccccgagcccctctccaactcctgccagatctccaaggagggccgcaagcagaagcagtccctcaagcaggaggaggaccgccccaagcgccgcggccccgcctacgtcatggagctccccaagctcaagctctccggcgtcgtccgcctctcctcctactcctcccccaccctccagtccgtcctcggctccggcaccaacggccgcgtccccgtcctccgccccctcaagtgcatccccgcctccaagaagaccgacccccagaaggacctcaagcccgccccccagcagtgccgcctccccaccatcgtccgcaagggcggccgctga

SEQ ID NO: 1935 - RNA, 1389 nt, synthetic construct
  misc_feature 1..1389: note = AAH08727 variant
  source 1..1389: mol_type = other RNA
atggcctccaactcctcctcctgccccacccccggcggcggccacctcaacggctaccccgtccccccctacgccttcttcttcccccccatgctcggcggcctctccccccccggcgccctcaccaccctccagcaccagctccccgtctccggctactccaccccctcccccgccaccatcgagacccagtcctcctcctccgaggagatcgtcccctcccccccctcccccccccccctcccccgcatctacaagccctgcttcgtctgccaggacaagtcctccggctaccactacggcgtctccgcctgcgagggctgcaagggcttcttccgccgctccatccagaagaacatggtctacacctgccaccgcgacaagaactgcatcatcaacaaggtcacccgcaaccgctgccagtactgccgcctccagaagtgcttcgaggtcggcatgtccaaggagtccgtccgcaacgaccgcaacaagaagaagaaggaggtccccaagcccgagtgctccgagtcctacaccctcacccccgaggtcggcgagctcatcgagaaggtccgcaaggcccaccaggagaccttccccgccctctgccagctcggcaagtacaccaccaacaactcctccgagcagcgcgtctccctcgacatcgacctctgggacaagttctccgagctctccaccaagtgcatcatcaagaccgtcgagttcgccaagcagctccccggcttcaccaccctcaccatcgccgaccagatcaccctcctcaaggccgcctgcctcgacatcctcatcctccgcatctgcacccgctacacccccgagcaggacaccatgaccttctccgacggcctcaccctcaaccgcacccagatgcacaacgccggcttcggccccctcaccgacctcgtcttcgccttcgccaaccagctcctccccctcgagatggacgacgccgagaccggcctcctctccgccatctgcctcatctgcggcgaccgccaggacctcgagcagcccgaccgcgtcgacatgctccaggagcccctcctcgaggccctcaaggtctacgtccgcaagcgccgcccctcccgcccccacatgttccccaagatgctcatgaagatcaccgacctccgctccatctccgccaagggcgccgagcgcgtcatcaccctcaagatggagatccccggctccatgccccccctcatccaggagatgctcgagaactccgagggcctcgacaccctctccggccagcccggcggcggcggccgcgacggcggcggcctcgcccccccccccggctcctgctccccctccctctccccctcctccaaccgctcctcccccgccacccactccccctga

SEQ ID NO: 1936 - RNA, 570 nt, synthetic construct
  misc_feature 1..570: note = AAB02605 variant
  source 1..570: mol_type = other RNA
atgaccgagtacaagctcgtcgtcgtcggcgccggcggcgtcggcaagtccgccctcaccatccagctcatccagaaccacttcgtcgacgagtacgaccccaccatcgaggactcctaccgcaagcaggtcgtcatcgacggcgagacctgcctcctcgacatcctcgacaccgccggccaggaggagtactccgccatgcgcgaccagtacatgcgcaccggcgagggcttcctctgcgtcttcgccatcaacaacaccaagtccttcgaggacatccaccagtaccgcgagcagatcaagcgcgtcaaggactccgacgacgtccccatggtcctcgtcggcaacaagtgcgacctcgccgcccgcaccgtcgagtcccgccaggcccaggacctcgcccgctcctacggcatcccctacatcgagacctccgccaagacccgccagggcgtcgaggacgccttctacaccctcgtccgcgagatccgccagcacaagctccgcaagctcaacccccccgacgagtccggccccggctgcatgtcctgcaagtgcgtcctctcctga

SEQ ID NO: 1937 - RNA, 570 nt, synthetic construct
  misc_feature 1..570: note = AAB59445 variant
  source 1..570: mol_type = other RNA
atgaccgagtacaagctcgtcgtcgtcggcgccggcggcgtcggcaagtccgccctcaccatccagctcatccagaaccacttcgtcgacgagtacgaccccaccatcgaggactcctaccgcaagcaggtcgtcatcgacggcgagacctgcctcctcgacatcctcgacaccgccggccaggaggagtactccgccatgcgcgaccagtacatgcgcaccggcgagggcttcctctgcgtcttcgccatcaacaacaccaagtccttcgaggacatccaccactaccgcgagcagatcaagcgcgtcaaggactccgaggacgtccccatggtcctcgtcggcaacaagtgcgacctcccctcccgcaccgtcgacaccaagcaggcccaggacctcgcccgctcctacggcatccccttcatcgagacctccgccaagacccgccagcgcgtcgaggacgccttctacaccctcgtccgcgagatccgccagtaccgcctcaagaagatctccaaggaggagaagacccccggctgcgtcaagatcaagaagtgcatcatcatgtga

SEQ ID NO: 1938 - RNA, 570 nt, synthetic construct
  misc_feature 1..570: note = AAA60255 variant
  source 1..570: mol_type = other RNA
atgaccgagtacaagctcgtcgtcgtcggcgccggcggcgtcggcaagtccgccctcaccatccagctcatccagaaccacttcgtcgacgagtacgaccccaccatcgaggactcctaccgcaagcaggtcgtcatcgacggcgagacctgcctcctcgacatcctcgacaccgccggccaggaggagtactccgccatgcgcgaccagtacatgcgcaccggcgagggcttcctctgcgtcttcgccatcaacaactccaagtccttcgccgacatcaacctctaccgcgagcagatcaagcgcgtcaaggactccgacgacgtccccatggtcctcgtcggcaacaagtgcgacctccccacccgcaccgtcgacaccaagcaggcccacgagctcgccaagtcctacggcatccccttcatcgagacctccgccaagacccgccagggcgtcgaggacgccttctacaccctcgtccgcgagatccgccagtaccgcatgaagaagctcaactcctccgacgacggcacccagggctgcatgggcctcccctgcgtcgtcatgtga

SEQ ID NO: 1939 - RNA, 546 nt, synthetic construct
  misc_feature 1..546: note = AAB84001 variant
  source 1..546: mol_type = other RNA
atgtgcaagggcctcgccgccctcccccactcctgcctcgagcgcgccaaggagatcaagatcaagctcggcatcctcctccagaagcccgactccgtcggcgacctcgtcatcccctacaacgagaagcccgagaagcccgccaagacccagaagacctccctcgacgaggccctccagtggcgcgactccctcgacaagctcctccagaacaactacggcctcgcctccttcaagtccttcctcaagtccgagttctccgaggagaacctcgagttctggatcgcctgcgaggactacaagaagatcaagtcccccgccaagatggccgagaaggccaagcagatctacgaggagttcatccagaccgaggcccccaaggaggtcaacatcgaccacttcaccaaggacatcaccatgaagaacctcgtcgagccctccctctcctccttcgacatggcccagaagcgcatccacgccctcatggagaaggactccctcccccgcttcgtccgctccgagttctaccaggagctcatcaagtga

SEQ ID NO: 1940 - RNA, 2175 nt, synthetic construct
  misc_feature 1..2175: note = CCDS4362.1 variant
  source 1..2175: mol_type = other RNA
atgtccttccccaaggcccccctcaagcgcttcaacgacccctccggctgcgccccctcccccggcgcctacgacgtcaagaccctcgaggtcctcaagggccccgtctccttccagaagtcccagcgcttcaagcagcagaaggagtccaagcagaacctcaacgtcgacaaggacaccaccctccccgcctccgcccgcaaggtcaagtcctccgagtccaaggagtcccagaagaacgacaaggacctcaagatcctcgagaaggagatccgcgtcctcctccaggagcgcggcgcccaggaccgccgcatccaggacctcgagaccgagctcgagaagatggaggcccgcctcaacgccgccctccgcgagaagacctccctctccgccaacaacgccaccctcgagaagcagctcatcgagctcacccgcaccaacgagctcctcaagtccaagttctccgagaacggcaaccagaagaacctccgcatcctctccctcgagctcatgaagctccgcaacaagcgcgagaccaagatgcgcggcatgatggccaagcaggagggcatggagatgaagctccaggtcacccagcgctccctcgaggagtcccagggcaagatcgcccagctcgagggcaagctcgtctccatcgagaaggagaagatcgacgagaagtccgagaccgagaagctcctcgagtacatcgaggagatctcctgcgcctccgaccaggtcgagaagtacaagctcgacatcgcccagctcgaggagaacctcaaggagaagaacgacgagatcctctccctcaagcagtccctcgaggagaacatcgtcatcctctccaagcaggtcgaggacctcaacgtcaagtgccagctcctcgagaaggagaaggaggaccacgtcaaccgcaaccgcgagcacaacgagaacctcaacgccgagatgcagaacctcaagcagaagttcatcctcgagcagcaggagcgcgagaagctccagcagaaggagctccagatcgactccctcctccagcaggagaaggagctctcctcctccctccaccagaagctctgctccttccaggaggagatggtcaaggagaagaacctcttcgaggaggagctcaagcagaccctcgacgagctcgacaagctccagcagaaggaggagcaggccgagcgcctcgtcaagcagctcgaggaggaggccaagtcccgcgccgaggagctcaagctcctcgaggagaagctcaagggcaaggaggccgagctcgagaagtcctccgccgcccacacccaggccaccctcctcctccaggagaagtacgactccatggtccagtccctcgaggacgtcaccgcccagttcgagtcctacaaggccctcaccgcctccgagatcgaggacctcaagctcgagaactcctccctccaggagaaggccgccaaggccggcaagaacgccgaggacgtccagcaccagatcctcgccaccgagtcctccaaccaggagtacgtccgcatgctcctcgacctccagaccaagtccgccctcaaggagaccgagatcaaggagatcaccgtctccttcctccagaagatcaccgacctccagaaccagctcaagcagcaggaggaggacttccgcaagcagctcgaggacgaggagggccgcaaggccgagaaggagaacaccaccgccgagctcaccgaggagatcaacaagtggcgcctcctctacgaggagctctacaacaagaccaagcccttccagctccagctcgacgccttcgaggtcgagaagcaggccctcctcaacgagcacggcgccgcccaggagcagctcaacaagatccgcgactcctacgccaagctcctcggccaccagaacctcaagcagaagatcaagcacgtcgtcaagctcaaggacgagaactcccagctcaagtccgaggtctccaagctccgctgccagctcgccaagaagaagcagtccgagaccaagctccaggaggagctcaacaaggtcctcggcatcaagcacttcgacccctccaaggccttccaccacgagtccaaggagaacttcgccctcaagacccccctcaaggagggcaacaccaactgctaccgcgcccccatggagtgccaggagtcctggaagtga

SEQ ID NO: 1941 - RNA, 582 nt, synthetic construct
  misc_feature 1..582: note = AAC33179 variant
  source 1..582: mol_type = other RNA
atggccgccatccgcaagaagctcgtcatcgtcggcgacggcgcctgcggcaagacctgcctcctcatcgtcttctccaaggaccagttccccgaggtctacgtccccaccgtcttcgagaactacatcgccgacatcgaggtcgacggcaagcaggtcgagctcgccctctgggacaccgccggccaggaggactacgaccgcctccgccccctctcctaccccgacaccgacgtcatcctcatgtgcttctccatcgactcccccgactccctcgagaacatccccgagaagtggacccccgaggtcaagcacttctgccccaacgtccccatcatcctcgtcggcaacaagaaggacctccgccaggacgagcacacccgccgcgagctcgccaagatgaagcaggagcccgtccgctccgaggagggccgcgacatggccaaccgcatctccgccttcggctacctcgagtgctccgccaagaccaaggagggcgtccgcgaggtcttcgagatggccacccgcgccggcctccaggtccgcaagaacaagcgccgccgcggctgccccatcctctga

SEQ ID NO: 1942 - RNA, 888 nt, synthetic construct
  misc_feature 1..888: note = AAA36161 variant
  source 1..888: mol_type = other RNA
atgtccggcgccctcgacgtcctccagatgaaggaggaggacgtcctcaagttcctcgccgccggcacccacctcggcggcaccaacctcgacttccagatggagcagtacatctacaagcgcaagtccgacggcatctacatcatcaacctcaagcgcacctgggagaagctcctcctcgccgcccgcgccatcgtcgccatcgagaaccccgccgacgtctccgtcatctcctcccgcaacaccggccagcgcgccgtcctcaagttcgccgccgccaccggcgccacccccatcgccggccgcttcacccccggcaccttcaccaaccagatccaggccgccttccgcgagccccgcctcctcgtcgtcaccgacccccgcgccgaccaccagcccctcaccgaggcctcctacgtcaacctccccaccatcgccctctgcaacaccgactcccccctccgctacgtcgacatcgccatcccctgcaacaacaagggcgcccactccgtcggcctcatgtggtggatgctcgcccgcgaggtcctccgcatgcgcggcaccatctcccgcgagcacccctgggaggtcatgcccgacctctacttctaccgcgaccccgaggagatcgagaaggaggagcaggccgccgccgagaaggccgtcaccaaggaggagttccagggcgagtggaccgcccccgcccccgagttcaccgccacccagcccgaggtcgccgactggtccgagggcgtccaggtcccctccgtccccatccagcagttccccaccgaggactggtccgcccagcccgccaccgaggactggtccgccgcccccaccgcccaggccaccgagtgggtcggcgccaccaccgactggtcctga

SEQ ID NO: 1943 - RNA, 2601 nt, synthetic construct
  misc_feature 1..2601: note = AAH14614 variant
  source 1..2601: mol_type = other RNA
atgaacggcgagcagcagctcgacgccgacgccggctccggcatggaggaggtcgagctctcctgggaggactacctcgaggagaccggctccaccgccgtcccctacggctccttcaagcacgtcgacacccgcctccagaacggcttcgcccccggcatgaagctcgaggtcgccgtccgcaccgaccccgagacctactgggtcgccaccgtcatcaccacctgcgagcagctcctcctcctccgctacgacggctacggcgaggaccgccgcgccgacttctggtgcgacatccgcaaggccgacctctaccccatcggctggtgcgagcagaacaagaagaccctcgaggcccccgagggcatccgcgacaaggtctccgactgggacgagttcctccgccagaccctcatcggcgcctgctccccccccgtccccctcctcgagggcctccgcaacggccgcaaccccctcgacctcatcgcccccggctcccgcctcgagtgccaggccttccaggactccctctccacctggatcgtcaccgtcgtcgagaacatcggcggccgcctcaagctccgctacgagggcctcgagtcctccgacaactacgagcactggctctactacctcgaccccttcctccaccacgtcggctgggccgcccagcagggctacgagctccagcccccctccgccatccgccacctcaagaacgaggccgagtggcaggagatcctcgccaaggtcaaggaggaggaggaggagcccctcccctcctacctcttcaaggacaagcaggtcatcggcatccacaccttctccgtcaacatgaagctcgaggccgtcgacccctggtcccccttcggcatctcccccgccaccgtcgtcaaggtcttcgacgagaagtacttcctcgtcgagatggacgacctccgccccgagaaccacgcccgccgctccttcgtctgccacgccgactcccccggcatcttccccgtccagtggtccctcaagaacggcctccacatctcccccccccccggctacccctcccaggacttcgactgggccgactacctcaagcagtgcggcgccgaggccgccccccagcgctgcttcccccccctcatctccgagcacgagttcaaggagaacatgaagctcgaggccgtcaaccccatcctccccgaggaggtctgcgtcgccaccatcaccgccgtccgcggctcctacctctggctccagctcgagggctccaagaagcccatccccgagtgcatcgtctccgtcgagtccatggacatcttccccctcggctggtgcgagaccaacggccaccccctctccaccccccgccgcgcccgcgtctacaagcagcgcaagatcgccgtcgtccagcccgagaagcaggtcccctcctcccgcaccgtccacgagggcctccgcaaccaggagctcaactccaccgagtccgtcatgatcaacggcaagtactgctgccccaagatctacttcaaccaccgctgcttctccggcccctacctcaacaagggccgcatcgccgagctcccccagtgcgtcggccccggcaactgcgtcctcgtcctccgcgaggtcctcaccctcctcatcaacgccgcctacaagccctcccgcgtcctccgcgagctccagctcgacaaggactccgtctggcacggctgcggcgaggtcctcaaggccaagtacaagggcaagtcctaccgcgccaccgtcgagatcgtcaagaccgccgaccgcgtcaccgagttctgccgccagacctgcatcaagctcgagtgctgccccaacctcttcggcccccgcatggtcctcgacaagtgctccgagaactgctccgtcctcaccaagaccaagtacacccactactacggcaagaagaagaacaagcgcatcggccgcccccccggcggccactccaacctcgcctgcgccctcaagaaggcctccaagcgccgcaagcgccgcaagaacgtcttcgtccacaagaagaagcgctcctccgcctccgtcgacaacacccccgccggctccccccagggctccggcggcgaggacgaggacgaccccgacgagggcgacgacgactccctctccgagggctccacctccgagcagcaggacgagctccaggaggagtccgagatgtccgagaagaagtcctgctcctcctcccccacccagtccgagatctccacctccctcccccccgaccgccagcgccgcaagcgcgagctccgcaccttctccttctccgacgacgagaacaagcccccctcccccaaggagatccgcatcgaggtcgccgagcgcctccacctcgactccaaccccctcaagtggtccgtcgccgacgtcgtccgcttcatccgctccaccgactgcgcccccctcgcccgcatcttcctcgaccaggagatcgacggccaggccctcctcctcctcaccctccccaccgtccaggagtgcatggacctcaagctcggccccgccatcaagctctgccaccacatcgagcgcatcaagttcgccttctacgagcagttcgccaactga

SEQ ID NO: 1944 - RNA, 1431 nt, synthetic construct
  misc_feature 1..1431: note = CCDS4550.1 variant
  source 1..1431: mol_type = other RNA
atgtccggctcctccgcccgctcctcccacctctcccagcccgtcgtcaagtccgtcctcgtctaccgcaacggcgaccccttctacgccggccgccgcgtcgtcatccacgagaagaaggtctcctccttcgaggtcttcctcaaggaggtcaccggcggcgtccaggcccccttcggcgccgtccgcaacatctacaccccccgcaccggccaccgcatccgcaagctcgaccagatccagtccggcggcaactacgtcgccggcggccaggaggccttcaagaagctcaactacctcgacatcggcgagatcaagaagcgccccatggaggtcgtcaacaccgaggtcaagcccgtcatccactcccgcatcaacgtctccgcccgcttccgcaagcccctccaggagccctgcaccatcttcctcatcgccaacggcgacctcatcaaccccgcctcccgcctcctcatcccccgcaagaccctcaaccagtgggaccacgtcctccagatggtcaccgagaagatcaccctccgctccggcgccgtccaccgcctctacaccctcgagggcaagctcgtcgagtccggcgccgagctcgagaacggccagttctacgtcgccgtcggccgcgacaagttcaagaagctcccctactccgagctcctcttcgacaagtccaccatgcgccgccccttcggccagaaggcctcctccctcccccccatcgtcggctcccgcaagtccaagggctccggcaacgaccgccactccaagtccaccgtcggctcctccgacaactcctccccccagcccctcaagcgcaagggcaagaaggaggacgtcaactccgagaagctcaccaagctcaagcagaacgtcaagctcaagaactcccaggagaccatccccaactccgacgagggcatcttcaaggccggcgccgagcgctccgagacccgcggcgccgccgaggtccaggaggacgaggacacccaggtcgaggtccccgtcgaccagcgccccgccgagatcgtcgacgaggaggaggacggcgagaaggccaacaaggacgccgagcagaaggaggacttctccggcatgaacggcgacctcgaggaggagggcggccgcgaggccaccgacgcccccgagcaggtcgaggagatcctcgaccactccgagcagcaggcccgccccgcccgcgtcaacggcggcaccgacgaggagaacggcgaggagctccagcaggtcaacaacgagctccagctcgtcctcgacaaggagcgcaagtcccagggcgccggctccggccaggacgaggccgacgtcgacccccagcgccccccccgccccgaggtcaagatcacctcccccgaggagaacgagaacaaccagcagaacaaggactacgccgccgtcgcctga

SEQ ID NO: 1945 - RNA, 1362 nt, synthetic construct
  misc_feature 1..1362: note = BAA07903 variant
  source 1..1362: mol_type = other RNA
atgcgcatccccgtcgacgcctccacctcccgccgcttcacccccccctccaccgccctctcccccggcaagatgtccgaggccctccccctcggcgcccccgacgccggcgccgccctcgccggcaagctccgctccggcgaccgctccatggtcgaggtcctcgccgaccaccccggcgagctcgtccgcaccgactcccccaacttcctctgctccgtcctccccacccactggcgctgcaacaagaccctccccatcgccttcaaggtcgtcgccctcggcgacgtccccgacggcaccctcgtcaccgtcatggccggcaacgacgagaactactccgccgagctccgcaacgccaccgccgccatgaagaaccaggtcgcccgcttcaacgacctccgcttcgtcggccgctccggccgcggcaagtccttcaccctcaccatcaccgtcttcaccaaccccccccaggtcgccacctaccaccgcgccatcaagatcaccgtcgacggcccccgcgagccccgccgccaccgccagaagctcgacgaccagaccaagcccggctccctctccttctccgagcgcctctccgagctcgagcagctccgccgcaccgccatgcgcgtctccccccaccaccccgcccccacccccaacccccgcgcctccctcaaccactccaccgccttcaacccccagccccagtcccagatgcaggacacccgccagatccagccctcccccccctggtcctacgaccagtcctaccagtacctcggctccatcgcctccccctccgtccaccccgccacccccatctcccccggccgcgcctccggcatgaccaccctctccgccgagctctcctcccgcctctccaccgcccccgacctcaccgccttctccgacccccgccagttccccgccctcccctccatctccgacccccgcatgcactaccccggcgccttcacctactcccccacccccgtcacctccggcatcggcatcggcatgtccgccatgggctccgccacccgctaccacacctacctcccccccccctaccccggctcctcccaggcccagggcggccccttccaggcctcctccccctcctaccacctctactacggcgcctccgccggctcctaccagttctccatggtcggcggcgagcgctcccccccccgcatcctccccccctgcaccaacgcctccaccggctccgccctcctcaacccctccctccccaaccagtccgacgtcgtcgaggccgagggctcccactccaactcccccaccaacatggccccctccgcccgcctcgaggaggccgtctggcgcccctactga

SEQ ID NO: 1946 - RNA, 1080 nt, synthetic construct
  misc_feature 1..1080: note = ACI46041 variant
  source 1..1080: mol_type = other RNA
atgcccctcgagctcgagctctgccccggccgctgggtcggcggccagcacccctgcttcatcatcgccgagatcggccagaaccaccagggcgacctcgacgtcgccaagcgcatgatccgcatggccaaggagtgcggcgccgactgcgccaagttccagaagtccgagctcgagttcaagttcaaccgcaaggccctcgagcgcccctacacctccaagcactcctggggcaagacctacggcgagcacaagcgccacctcgagttctcccacgaccagtaccgcgagctccagcgctacgccgaggaggtcggcatcttcttcaccgcctccggcatggacgagatggccgtcgagttcctccacgagctcaacgtccccttcttcaaggtcggctccggcgacaccaacaacttcccctacctcgagaagaccgccaagaagggccgccccatggtcatctcctccggcatgcagtccatggacaccatgaagcaggtctaccagatcgtcaagcccctcaaccccaacttctgcttcctccagtgcacctccgcctaccccctccagcccgaggacgtcaacctccgcgtcatctccgagtaccagaagctcttccccgacatccccatcggctactccggccacgagaccggcatcgccatctccgtcgccgccgtcgccctcggcgccaaggtcctcgagcgccacatcaccctcgacaagacctggaagggctccgaccactccgcctccctcgagcccggcgagctcgccgagctcgtccgctccgtccgcctcgtcgagcgcgccctcggctcccccaccaagcagctcctcccctgcgagatggcctgcaacgagaagctcggcaagtccgtcgtcgccaaggtcaagatccccgagggcaccatcctcaccatggacatgctcaccgtcaaggtcggcgagcccaaggcctacccccccgaggacatcttcaacctcgtcggcaagaaggtcctcgtcaccgtcgaggaggacgacaccatcatggaggagctcgtcgacaaccacggcaagaagatcaagtcctga

SEQ ID NO: 1947 - RNA, 2715 nt, synthetic construct
  misc_feature 1..2715: note = CCDS14652.1 variant
  source 1..2715: mol_type = other RNA
atgcaggcctcccccctccagacctcccagcccaccccccccgaggagctccacgccgccgcctacgtcttcaccaacgacggccagcagatgcgctccgacgaggtcaacctcgtcgccaccggccaccagtccaagaagaagcactcccgcaagtccaagcgccactcctcctccaagcgccgcaagtccatgtcctcctggctcgacaagcaggaggacgccgccgtcacccactccatctgcgaggagcgcatcaacaacggccagcccgtcgccgacaacgtcctctccaccgcccccccctggcccgacgccaccatcgcccacaacatccgcgaggagcgcatggagaacggccagtcccgcaccgacaaggtcctctccaccgcccccccccagctcgtccacatggccgccgccggcatcccctccatgtccacccgcgacctccactccaccgtcacccacaacatccgcgaggagcgcatggagaacggccagccccagcccgacaacgtcctctccaccggccccaccggcctcatcaacatggccgccacccccatccccgccatgtccgcccgcgacctctacgccaccgtcacccacaacgtctgcgagcagaagatggagaacgtccagcccgcccccgacaacgtcctcctcaccctccgcccccgccgcatcaacatgaccgacaccggcatctcccccatgtccacccgcgacccctacgccaccatcacctacaacgtccccgaggagaagatggagaagggccagccccagcccgacaacatcctctccaccgcctccaccggcctcatcaacgtcgccggcgccggcacccccgccatctccaccaacggcctctactccaccgtcccccacaacgtctgcgaggagaagatggagaacgaccagccccagcccaacaacgtcctctccaccgtccagcccgtcatcatctacctcaccgccaccggcatccccggcatgaacacccgcgaccagtacgccaccatcacccacaacgtctgcgaggagcgcgtcgtcaacaaccagcccctcccctccaacgccctctccaccgtcctccccggcctcgcctacctcgccaccgccgacatgcccgccatgtccacccgcgaccagcacgccaccatcatccacaacctccgcgaggagaagaaggacaactcccagcccacccccgacaacgtcctctccgccgtcacccccgagctcatcaacctcgccggcgccggcatcccccccatgtccacccgcgaccagtacgccaccgtcaaccaccacgtccacgaggcccgcatggagaacggccagcgcaagcaggacaacgtcctctccaacgtcctctccggcctcatcaacatggccggcgcctccatccccgccatgtcctcccgcgacctctacgccaccatcacccactccgtccgcgaggagaagatggagtccggcaagccccagaccgacaaggtcatctccaacgacgccccccagctcggccacatggccgccggcggcatcccctccatgtccaccaaggacctctacgccaccgtcacccagaacgtccacgaggagcgcatggagaacaaccagccccagccctcctacgacctctccaccgtcctccccggcctcacctacctcaccgtcgccggcatccccgccatgtccacccgcgaccagtacgccaccgtcacccacaacgtccacgaggagaagatcaagaacggccaggccgcctccgacaacgtcttctccaccgtcccccccgccttcatcaacatggccgccaccggcgtctcctccatgtccacccgcgaccagtacgccgccgtcacccacaacatccgcgaggagaagatcaacaactcccagcccgcccccggcaacatcctctccaccgcccccccctggctccgccacatggccgccgccggcatctcctccaccatcacccgcgacctctacgtcaccgccacccactccgtccacgaggagaagatgaccaacggccagcaggcccccgacaactccctctccaccgtcccccccggctgcatcaacctctccggcgccggcatctcctgccgctccacccgcgacctctacgccaccgtcatccacgacatccaggaggaggagatggagaacgaccagaccccccccgacggcttcctctccaactccgactcccccgagctcatcaacatgaccggccactgcatgccccccaacgccctcgactccttctcccacgacttcacctccctctccaaggacgagctcctctacaagcccgactccaacgagttcgccgtcggcaccaagaactactccgtctccgccggcgacccccccgtcaccgtcatgtccctcgtcgagaccgtccccaacaccccccagatctcccccgccatggccaagaagatcaacgacgacatcaagtaccagctcatgaaggaggtccgccgcttcggccagaactacgagcgcatcttcatcctcctcgaggaggtccagggctccatgaaggtcaagcgccagttcgtcgagttcaccatcaaggaggccgcccgcttcaagaaggtcgtcctcatccagcagctcgagaaggccctcaaggagatcgactcccactgccacctccgcaaggtcaagcacatgcgcaagcgctga

SEQ ID NO: 1948 - RNA, 2403 nt, synthetic construct
  misc_feature 1..2403: note = AAH01058 variant
  source 1..2403: mol_type = other RNA
atgggctcctccaagaagcaccgcggcgagaaggaggccgccggcaccaccgccgccgccggcaccggcggcgccaccgagcagcccccccgccaccgcgagcacaagaagcacaagcaccgctccggcggctccggcggctccggcggcgagcgccgcaagcgctcccgcgagcgcggcggcgagcgcggctccggccgccgcggcgccgaggccgaggcccgctcctccacccacggccgcgagcgctcccaggccgagccctccgagcgccgcgtcaagcgcgagaagcgcgacgacggctacgaggccgccgcctcctccaagacctcctccggcgacgcctcctccctctccatcgaggagaccaacaagctccgcgccaagctcggcctcaagcccctcgaggtcaacgccatcaagaaggaggccggcaccaaggaggagcccgtcaccgccgacgtcatcaaccccatggccctccgccagcgcgaggagctccgcgagaagctcgccgccgccaaggagaagcgcctcctcaaccagaagctcggcaagatcaagaccctcggcgaggacgacccctggctcgacgacaccgccgcctggatcgagcgctcccgccagctccagaaggagaaggacctcgccgagaagcgcgccaagctcctcgaggagatggaccaggagttcggcgtctccaccctcgtcgaggaggagttcggccagcgccgccaggacctctactccgcccgcgacctccagggcctcaccgtcgagcacgccatcgactccttccgcgagggcgagaccatgatcctcaccctcaaggacaagggcgtcctccaggaggaggaggacgtcctcgtcaacgtcaacctcgtcgacaaggagcgcgccgagaagaacgtcgagctccgcaagaagaagcccgactacctcccctacgccgaggacgagtccgtcgacgacctcgcccagcagaagccccgctccatcctctccaagtacgacgaggagctcgagggcgagcgcccccactccttccgcctcgagcagggcggcaccgccgacggcctccgcgagcgcgagctcgaggagatccgcgccaagctccgcctccaggcccagtccctctccaccgtcggcccccgcctcgcctccgagtacctcacccccgaggagatggtcaccttcaagaagaccaagcgccgcgtcaagaagatccgcaagaaggagaaggaggtcgtcgtccgcgccgacgacctcctccccctcggcgaccagacccaggacggcgacttcggctcccgcctccgcggccgcggccgccgccgcgtctccgaggtcgaggaggagaaggagcccgtcccccagcccctcccctccgacgacacccgcgtcgagaacatggacatctccgacgaggaggagggcggcgcccccccccccggctccccccaggtcctcgaggaggacgaggccgagctcgagctccagaagcagctcgagaagggccgccgcctccgccagctccagcagctccagcagctccgcgactccggcgagaaggtcgtcgagatcgtcaagaagctcgagtcccgccagcgcggctgggaggaggacgaggaccccgagcgcaagggcgccatcgtcttcaacgccacctccgagttctgccgcaccctcggcgagatccccacctacggcctcgccggcaaccgcgaggagcaggaggagctcatggacttcgagcgcgacgaggagcgctccgccaacggcggctccgagtccgacggcgaggagaacatcggctggtccaccgtcaacctcgacgaggagaagcagcagcaggacttctccgcctcctccaccaccatcctcgacgaggagcccatcgtcaaccgcggcctcgccgccgccctcctcctctgccagaacaagggcctcctcgagaccaccgtccagaaggtcgcccgcgtcaaggcccccaacaagtccctcccctccgccgtctactgcatcgaggacaagatggccatcgacgacaagtactcccgccgcgaggagtaccgcggcttcacccaggacttcaaggagaaggacggctacaagcccgacgtcaagatcgagtacgtcgacgagaccggccgcaagctcacccccaaggaggccttccgccagctctcccaccgcttccacggcaagggctccggcaagatgaagaccgagcgccgcatgaagaagctcgacgaggaggccctcctcaagaagatgtcctcctccgacacccccctcggcaccgtcgccctcctccaggagaagcagaaggcccagaagaccccctacatcgtcctctccggctccggcaagtccatgaacgccaacaccatcaccaagtga

SEQ ID NO: 1949 - RNA, 2877 nt, synthetic construct
  misc_feature 1..2877: note = AAF00087 variant
  source 1..2877: mol_type = other RNA
atgcgcacccacacccgcggcgccccctccgtcttcttcatctacctcctctgcttcgtctccgcctacatcaccgacgagaaccccgaggtcatgatccccttcaccaacgccaactacgactcccaccccatgctctacttctcccgcgccgaggtcgccgagctccagctccgcgccgcctcctcccacgagcacatcgccgcccgcctcaccgaggccgtccacaccatgctctcctcccccctcgagtacctccccccctgggaccccaaggactactccgcccgctggaacgagatcttcggcaacaacctcggcgccctcgccatgttctgcgtcctctaccccgagaacatcgaggcccgcgacatggccaaggactacatggagcgcatggccgcccagccctcctggctcgtcaaggacgccccctgggacgaggtccccctcgcccactccctcgtcggcttcgccaccgcctacgacttcctctacaactacctctccaagacccagcaggagaagttcctcgaggtcatcgccaacgcctccggctacatgtacgagacctcctaccgccgcggctggggcttccagtacctccacaaccaccagcccaccaactgcatggccctcctcaccggctccctcgtcctcatgaaccagggctacctccaggaggcctacctctggaccaagcaggtcctcaccatcatggagaagtccctcgtcctcctccgcgaggtcaccgacggctccctctacgagggcgtcgcctacggctcctacaccacccgctccctcttccagtacatgttcctcgtccagcgccacttcaacatcaaccacttcggccacccctggctcaagcagcacttcgccttcatgtaccgcaccatcctccccggcttccagcgcaccgtcgccatcgccgactccaactacaactggttctacggccccgagtcccagctcgtcttcctcgacaagttcgtcatgcgcaacggctccggcaactggctcgccgaccagatccgccgcaaccgcgtcgtcgagggccccggcaccccctccaagggccagcgctggtgcaccctccacaccgagttcctctggtacgacggctccctcaagtccgtccccccccccgacttcggcacccccaccctccactacttcgaggactggggcgtcgtcacctacggctccgccctccccgccgagatcaaccgctccttcctctccttcaagtccggcaagctcggcggccgcgccatctacgacatcgtccaccgcaacaagtacaaggactggatcaagggctggcgcaacttcaacgccggccacgagcaccccgaccagaactccttcaccttcgcccccaacggcgtccccttcatcaccgaggccctctacggccccaagtacaccttcttcaacaacgtcctcatgttctcccccgccgtctccaagtcctgcttctccccctgggtcggccaggtcaccgaggactgctcctccaagtggtccaagtacaagcacgacctcgccgcctcctgccagggccgcgtcgtcgccgccgaggagaagaacggcgtcgtcttcatccgcggcgagggcgtcggcgcctacaacccccagctcaacctcaagaacgtccagcgcaacctcatcctcctccacccccagctcctcctcctcgtcgaccagatccacctcggcgaggagtcccccctcgagaccgccgcctccttcttccacaacgtcgacgtccccttcgaggagaccgtcgtcgacggcgtccacggcgccttcatccgccagcgcgacggcctctacaagatgtactggatggacgacaccggctactccgagaaggccaccttcgcctccgtcacctacccccgcggctacccctacaacggcaccaactacgtcaacgtcaccatgcacctccgctcccccatcacccgcgccgcctacctcttcatcggcccctccatcgacgtccagtccttcaccgtccacggcgactcccagcagctcgacgtcttcatcgccacctccaagcacgcctacgccacctacctctggaccggcgaggccaccggccagtccgccttcgcccaggtcatcgccgaccgccacaagatcctcttcgaccgcaactccgccatcaagtcctccatcgtccccgaggtcaaggactacgccgccatcgtcgagcagaacctccagcacttcaagcccgtcttccagctcctcgagaagcagatcctctcccgcgtccgcaacaccgcctccttccgcaagaccgccgagcgcctcctccgcttctccgacaagcgccagaccgaggaggccatcgaccgcatcttcgccatctcccagcagcagcagcagcagtccaagtccaagaagaaccgccgcgccggcaagcgctacaagttcgtcgacgccgtccccgacatcttcgcccagatcgaggtcaacgagaagaagatccgccagaaggcccagatcctcgcccagaaggagctccccatcgacgaggacgaggagatgaaggacctcctcgacttcgccgacgtcacctacgagaagcacaagaacggcggcctcatcaagggccgcttcggccaggcccgcatggtcaccaccacccactcccgcgccccctccctctccgcctcctacacccgcctcttcctcatcctcaacatcgccatcttcttcgtcatgctcgccatgcagctcacctacttccagcgcgcccagtccctccacggccagcgctgcctctacgccgtcctcctcatcgactcctgcatcctcctctggctctactcctcctgctcccagtcccagtgctga

SEQ ID NO: 1950 - RNA, 2892 nt, synthetic construct
  misc_feature 1..2892: note = AAH93784 variant
  source 1..2892: mol_type = other RNA
atggccaccgccgccgagacctccgcctccgagcccgaggccgagtccaaggccggccccaaggccgacggcgaggaggacgaggtcaaggccgcccgcacccgccgcaaggtcctctcccgcgccgtcgccgccgccacctacaagaccatgggccccgcctgggaccagcaggaggagggcgtctccgagtccgacggcgacgagtacgccatggcctcctccgccgagtcctcccccggcgagtacgagtgggagtacgacgaggaggaggagaagaaccagctcgagatcgagcgcctcgaggagcagctctccatcaacgtctacgactacaactgccacgtcgacctcatccgcctcctccgcctcgagggcgagctcaccaaggtccgcatggcccgccagaagatgtccgagatcttccccctcaccgaggagctctggctcgagtggctccacgacgagatctccatggcccaggacggcctcgaccgcgagcacgtctacgacctcttcgagaaggccgtcaaggactacatctgccccaacatctggctcgagtacggccagtactccgtcggcggcatcggccagaagggcggcctcgagaaggtccgctccgtcttcgagcgcgccctctcctccgtcggcctccacatgaccaagggcctcgccctctgggaggcctaccgcgagttcgagtccgccatcgtcgaggccgcccgcctcgagaaggtccactccctcttccgccgccagctcgccatccccctctacgacatggaggccaccttcgccgagtacgaggagtggtccgaggaccccatccccgagtccgtcatccagaactacaacaaggccctccagcagctcgagaagtacaagccctacgaggaggccctcctccaggccgaggccccccgcctcgccgagtaccaggcctacatcgacttcgagatgaagatcggcgaccccgcccgcatccagctcatcttcgagcgcgccctcgtcgagaactgcctcgtccccgacctctggatccgctactcccagtacctcgaccgccagctcaaggtcaaggacctcgtcctctccgtccacaaccgcgccatccgcaactgcccctggaccgtcgccctctggtcccgctacctcctcgccatggagcgccacggcgtcgaccaccaggtcatctccgtcaccttcgagaaggccctcaacgccggcttcatccaggccaccgactacgtcgagatctggcaggcctacctcgactacctccgccgccgcgtcgacttcaagcaggactcctccaaggagctcgaggagctccgcgccgccttcacccgcgccctcgagtacctcaagcaggaggtcgaggagcgcttcaacgagtccggcgacccctcctgcgtcatcatgcagaactgggcccgcatcgaggcccgcctctgcaacaacatgcagaaggcccgcgagctctgggactccatcatgacccgcggcaacgccaagtacgccaacatgtggctcgagtactacaacctcgagcgcgcccacggcgacacccagcactgccgcaaggccctccaccgcgccgtccagtgcacctccgactaccccgagcacgtctgcgaggtcctcctcaccatggagcgcaccgagggctccctcgaggactgggacatcgccgtccagaagaccgagacccgcctcgcccgcgtcaacgagcagcgcatgaaggccgccgagaaggaggccgccctcgtccagcaggaggaggagaaggccgagcagcgcaagcgcgcccgcgccgagaagaaggccctcaagaagaagaagaagatccgcggccccgagaagcgcggcgccgacgaggacgacgagaaggagtggggcgacgacgaggaggagcagccctccaagcgccgccgcgtcgagaactccatccccgccgccggcgagacccagaacgtcgaggtcgccgccggccccgccggcaagtgcgccgccgtcgacgtcgagcccccctccaagcagaaggagaaggccgcctccctcaagcgcgacatgcccaaggtcctccacgactcctccaaggactccatcaccgtcttcgtctccaacctcccctactccatgcaggagcccgacaccaagctccgccccctcttcgaggcctgcggcgaggtcgtccagatccgccccatcttctccaaccgcggcgacttccgcggctactgctacgtcgagttcaaggaggagaagtccgccctccaggccctcgagatggaccgcaagtccgtcgagggccgccccatgttcgtctccccctgcgtcgacaagtccaagaaccccgacttcaaggtcttccgctactccacctccctcgagaagcacaagctcttcatctccggcctccccttctcctgcaccaaggaggagctcgaggagatctgcaaggcccacggcaccgtcaaggacctccgcctcgtcaccaaccgcgccggcaagcccaagggcctcgcctacgtcgagtacgagaacgagtcccaggcctcccaggccgtcatgaagatggacggcatgaccatcaaggagaacatcatcaaggtcgccatctccaaccccccccagcgcaaggtccccgagaagcccgagacccgcaaggcccccggcggccccatgctcctcccccagacctacggcgcccgcggcaagggccgcacccagctctccctcctcccccgcgccctccagcgcccctccgccgccgccccccaggccgagaacggccccgccgccgcccccgccgtcgccgcccccgccgccaccgaggcccccaagatgtccaacgccgacttcgccaagctcttcctccgcaagtga

SEQ ID NO: 1951 - RNA, 2283 nt, synthetic construct
  misc_feature 1..2283: note = AAC51668 variant
  source 1..2283: mol_type = other RNA
atgaagacctgggtcaagatcgtcttcggcgtcgccacctccgccgtcctcgccctcctcgtcatgtgcatcgtcctccgcccctcccgcgtccacaactccgaggagaacaccatgcgcgccctcaccctcaaggacatcctcaacggcaccttctcctacaagaccttcttccccaactggatctccggccaggagtacctccaccagtccgccgacaacaacatcgtcctctacaacatcgagaccggccagtcctacaccatcctctccaaccgcaccatgaagtccgtcaacgcctccaactacggcctctcccccgaccgccagttcgtctacctcgagtccgactactccaagctctggcgctactcctacaccgccacctactacatctacgacctctccaacggcgagttcgtccgcggcaacgagctcccccgccccatccagtacctctgctggtcccccgtcggctccaagctcgcctacgtctaccagaacaacatctacctcaagcagcgccccggcgacccccccttccagatcaccttcaacggccgcgagaacaagatcttcaacggcatccccgactgggtctacgaggaggagatgctcgccaccaagtacgccctctggtggtcccccaacggcaagttcctcgcctacgccgagttcaacgacaccgacatccccgtcatcgcctactcctactacggcgacgagcagtacccccgcaccatcaacatcccctaccccaaggccggcgccaagaaccccgtcgtccgcatcttcatcatcgacaccacctaccccgcctacgtcggcccccaggaggtccccgtccccgccatgatcgcctcctccgactactacttctcctggctcacctgggtcaccgacgagcgcgtctgcctccagtggctcaagcgcgtccagaacgtctccgtcctctccatctgcgacttccgcgaggactggcagacctgggactgccccaagacccaggagcacatcgaggagtcccgcaccggctgggccggcggcttcttcgtctccacccccgtcttctcctacgacgccatctcctactacaagatcttctccgacaaggacggctacaagcacatccactacatcaaggacaccgtcgagaacgccatccagatcacctccggcaagtgggaggccatcaacatcttccgcgtcacccaggactccctcttctactcctccaacgagttcgaggagtaccccggccgccgcaacatctaccgcatctccatcggctcctaccccccctccaagaagtgcgtcacctgccacctccgcaaggagcgctgccagtactacaccgcctccttctccgactacgccaagtactacgccctcgtctgctacggccccggcatccccatctccaccctccacgacggccgcaccgaccaggagatcaagatcctcgaggagaacaaggagctcgagaacgccctcaagaacatccagctccccaaggaggagatcaagaagctcgaggtcgacgagatcaccctctggtacaagatgatcctccccccccagttcgaccgctccaagaagtaccccctcctcatccaggtctacggcggcccctgctcccagtccgtccgctccgtcttcgccgtcaactggatctcctacctcgcctccaaggagggcatggtcatcgccctcgtcgacggccgcggcaccgccttccagggcgacaagctcctctacgccgtctaccgcaagctcggcgtctacgaggtcgaggaccagatcaccgccgtccgcaagttcatcgagatgggcttcatcgacgagaagcgcatcgccatctggggctggtcctacggcggctacgtctcctccctcgccctcgcctccggcaccggcctcttcaagtgcggcatcgccgtcgcccccgtctcctcctgggagtactacgcctccgtctacaccgagcgcttcatgggcctccccaccaaggacgacaacctcgagcactacaagaactccaccgtcatggcccgcgccgagtacttccgcaacgtcgactacctcctcatccacggcaccgccgacgacaacgtccacttccagaactccgcccagatcgccaaggccctcgtcaacgcccaggtcgacttccaggccatgtggtactccgaccagaaccacggcctctccggcctctccaccaaccacctctacacccacatgacccacttcctcaagcagtgcttctccctctccgactga

SEQ ID NO: 1952 - RNA, 1128 nt, synthetic construct
  misc_feature 1..1128: note = CCDS32839.1 variant
  source 1..1128: mol_type = other RNA
atggacgccctccagctcgccaactccgccttcgccgtcgacctcttcaagcagctctgcgagaaggagcccctcggcaacgtcctcttctcccccatctgcctctccacctccctctccctcgcccaggtcggcgccaagggcgacaccgccaacgagatcggccaggtcctccacttcgagaacgtcaaggacgtccccttcggcttccagaccgtcacctccgacgtcaacaagctctcctccttctactccctcaagctcatcaagcgcctctacgtcgacaagtccctcaacctctccaccgagttcatctcctccaccaagcgcccctacgccaaggagctcgagaccgtcgacttcaaggacaagctcgaggagaccaagggccagatcaacaactccatcaaggacctcaccgacggccacttcgagaacatcctcgccgacaactccgtcaacgaccagaccaagatcctcgtcgtcaacgccgcctacttcgtcggcaagtggatgaagaagttctccgagtccgagaccaaggagtgccccttccgcgtcaacaagaccgacaccaagcccgtccagatgatgaacatggaggccaccttctgcatgggcaacatcgactccatcaactgcaagatcatcgagctccccttccagaacaagcacctctccatgttcatcctcctccccaaggacgtcgaggacgagtccaccggcctcgagaagatcgagaagcagctcaactccgagtccctctcccagtggaccaacccctccaccatggccaacgccaaggtcaagctctccatccccaagttcaaggtcgagaagatgatcgaccccaaggcctgcctcgagaacctcggcctcaagcacatcttctccgaggacacctccgacttctccggcatgtccgagaccaagggcgtcgccctctccaacgtcatccacaaggtctgcctcgagatcaccgaggacggcggcgactccatcgaggtccccggcgcccgcatcctccagcacaaggacgagctcaacgccgaccaccccttcatctacatcatccgccacaacaagacccgcaacatcatcttcttcggcaagttctgctccccctga

SEQ ID NO: 1953 - RNA, 1002 nt, synthetic construct
  misc_feature 1..1002: note = AAH06564 variant
  source 1..1002: mol_type = other RNA
atggcctgctcccgccccccctcccagtgcgagcccacctccctcccccccggcccccccgccggccgccgccacctccccctctcccgccgccgccgcgagatgtcctccaacaaggagcagcgctccgccgtcttcgtcatcctcttcgccctcatcaccatcctcatcctctactcctccaactccgccaacgaggtcttccactacggctccctccgcggccgctcccgccgccccgtcaacctcaagaagtggtccatcaccgacggctacgtccccatcctcggcaacaagaccctcccctcccgctgccaccagtgcgtcatcgtctcctcctcctcccacctcctcggcaccaagctcggccccgagatcgagcgcgccgagtgcaccatccgcatgaacgacgcccccaccaccggctactccgccgacgtcggcaacaagaccacctaccgcgtcgtcgcccactcctccgtcttccgcgtcctccgccgcccccaggagttcgtcaaccgcacccccgagaccgtcttcatcttctggggccccccctccaagatgcagaagccccagggctccctcgtccgcgtcatccagcgcgccggcctcgtcttccccaacatggaggcctacgccgtctcccccggccgcatgcgccagttcgacgacctcttccgcggcgagaccggcaaggaccgcgagaagtcccactcctggctctccaccggctggttcaccatggtcatcgccgtcgagctctgcgaccacgtccacgtctacggcatggtcccccccaactactgctcccagcgcccccgcctccagcgcatgccctaccactactacgagcccaagggccccgacgagtgcgtcacctacatccagaacgagcactcccgcaagggcaaccaccaccgcttcatcaccgagaagcgcgtcttctcctcctgggcccagctctacggcatcaccttctcccacccctcctggacctga

SEQ ID NO: 1954 - RNA, 1071 nt, synthetic construct
  misc_feature 1..1071: note = AAC37586 variant
  source 1..1071: mol_type = other RNA
atgtccccctgcggccgcgcccgccgccagacctcccgcggcgccatggccgtcctcgcctggaagttcccccgcacccgcctccccatgggcgcctccgccctctgcgtcgtcgtcctctgctggctctacatcttccccgtctaccgcctccccaacgagaaggagatcgtccagggcgtcctccagcagggcaccgcctggcgccgcaaccagaccgccgcccgcgccttccgcaagcagatggaggactgctgcgaccccgcccacctcttcgccatgaccaagatgaactcccccatgggcaagtccatgtggtacgacggcgagttcctctactccttcaccatcgacaactccacctactccctcttcccccaggccacccccttccagctccccctcaagaagtgcgccgtcgtcggcaacggcggcatcctcaagaagtccggctgcggccgccagatcgacgaggccaacttcgtcatgcgctgcaacctcccccccctctcctccgagtacaccaaggacgtcggctccaagtcccagctcgtcaccgccaacccctccatcatccgccagcgcttccagaacctcctctggtcccgcaagaccttcgtcgacaacatgaagatctacaaccactcctacatctacatgcccgccttctccatgaagaccggcaccgagccctccctccgcgtctactacaccctctccgacgtcggcgccaaccagaccgtcctcttcgccaaccccaacttcctccgctccatcggcaagttctggaagtcccgcggcatccacgccaagcgcctctccaccggcctcttcctcgtctccgccgccctcggcctctgcgaggaggtcgccatctacggcttctggcccttctccgtcaacatgcacgagcagcccatctcccaccactactacgacaacgtcctccccttctccggcttccacgccatgcccgaggagttcctccagctctggtacctccacaagatcggcgccctccgcatgcagctcgacccctgcgaggacacctccctccagcccacctcctga

SEQ ID NO: 1955 - RNA, 1257 nt, synthetic construct
  misc_feature 1..1257: note = BAG50894 variant
  source 1..1257: mol_type = other RNA
atgcgcaccaaggccgccggctgcgccgagcgccgccccctccagccccgcaccgaggccgccgccgcccccgccggccgcgccatgccctccgagtacacctacgtcaagctccgctccgactgctcccgcccctccctccagtggtacacccgcgcccagtccaagatgcgccgcccctccctcctcctcaaggacatcctcaagtgcaccctcctcgtcttcggcgtctggatcctctacatcctcaagctcaactacaccaccgaggagtgcgacatgaagaagatgcactacgtcgaccccgaccacgtcaagcgcgcccagaagtacgcccagcaggtcctccagaaggagtgccgccccaagttcgccaagacctccatggccctcctcttcgagcaccgctactccgtcgacctcctccccttcgtccagaaggcccccaaggactccgaggccgagtccaagtacgacccccccttcggcttccgcaagttctcctccaaggtccagaccctcctcgagctcctccccgagcacgacctccccgagcacctcaaggccaagacctgccgccgctgcgtcgtcatcggctccggcggcatcctccacggcctcgagctcggccacaccctcaaccagttcgacgtcgtcatccgcctcaactccgcccccgtcgagggctactccgagcacgtcggcaacaagaccaccatccgcatgacctaccccgagggcgcccccctctccgacctcgagtactactccaacgacctcttcgtcgccgtcctcttcaagtccgtcgacttcaactggctccaggccatggtcaagaaggagaccctccccttctgggtccgcctcttcttctggaagcaggtcgccgagaagatccccctccagcccaagcacttccgcatcctcaaccccgtcatcatcaaggagaccgccttcgacatcctccagtactccgagccccagtcccgcttctggggccgcgacaagaacgtccccaccatcggcgtcatcgccgtcgtcctcgccacccacctctgcgacgaggtctccctcgccggcttcggctacgacctcaaccagccccgcacccccctccactacttcgactcccagtgcatggccgccatgaacttccagaccatgcacaacgtcaccaccgagaccaagttcctcctcaagctcgtcaaggagggcgtcgtcaaggacctctccggcggcatcgaccgcgagttctga

SEQ ID NO: 1956 - RNA, 1059 nt, synthetic construct
  misc_feature 1..1059: note = EAW56837 variant
  source 1..1059: mol_type = other RNA
atggacttcctccgcaacctcttctcccagaccctctccctcggctcccagaaggagcgcctcctcgacgagctcaccctcgagggcgtcgcccgctacatgcagtccgagcgctgccgccgcgtcatctgcctcgtcggcgccggcatctccacctccgccggcatccccgacttccgctccccctccaccggcctctacgacaacctcgagaagtaccacctcccctaccccgaggccatcttcgagatctcctacttcaagaagcaccccgagcccttcttcgccctcgccaaggagctctaccccggccagttcaagcccaccatctgccactacttcatgcgcctcctcaaggacaagggcctcctcctccgctgctacacccagaacatcgacaccctcgagcgcatcgccggcctcgagcaggaggacctcgtcgaggcccacggcaccttctacacctcccactgcgtctccgcctcctgccgccacgagtaccccctctcctggatgaaggagaagatcttctccgaggtcacccccaagtgcgaggactgccagtccctcgtcaagcccgacatcgtcttcttcggcgagtccctccccgcccgcttcttctcctgcatgcagtccgacttcctcaaggtcgacctcctcctcgtcatgggcacctccctccaggtccagcccttcgcctccctcatctccaaggcccccctctccaccccccgcctcctcatcaacaaggagaaggccggccagtccgaccccttcctcggcatgatcatgggcctcggcggcggcatggacttcgactccaagaaggcctaccgcgacgtcgcctggctcggcgagtgcgaccagggctgcctcgccctcgccgagctcctcggctggaagaaggagctcgaggacctcgtccgccgcgagcacgcctccatcgacgcccagtccggcgccggcgtccccaacccctccacctccgcctcccccaagaagtcccccccccccgccaaggacgaggcccgcaccaccgagcgcgagaagccccagtga

SEQ ID NO: 1957 - RNA, 1170 nt, synthetic construct
  misc_feature 1..1170: note = AAD40850 variant
  source 1..1170: mol_type = other RNA
atggccgagcccgacccctcccaccccctcgagacccaggccggcaaggtccaggaggcccaggactccgactccgactccgagggcggcgccgccggcggcgaggccgacatggacttcctccgcaacctcttctcccagaccctctccctcggctcccagaaggagcgcctcctcgacgagctcaccctcgagggcgtcgcccgctacatgcagtccgagcgctgccgccgcgtcatctgcctcgtcggcgccggcatctccacctccgccggcatccccgacttccgctccccctccaccggcctctacgacaacctcgagaagtaccacctcccctaccccgaggccatcttcgagatctcctacttcaagaagcaccccgagcccttcttcgccctcgccaaggagctctaccccggccagttcaagcccaccatctgccactacttcatgcgcctcctcaaggacaagggcctcctcctccgctgctacacccagaacatcgacaccctcgagcgcatcgccggcctcgagcaggaggacctcgtcgaggcccacggcaccttctacacctcccactgcgtctccgcctcctgccgccacgagtaccccctctcctggatgaaggagaagatcttctccgaggtcacccccaagtgcgaggactgccagtccctcgtcaagcccgacatcgtcttcttcggcgagtccctccccgcccgcttcttctcctgcatgcagtccgacttcctcaaggtcgacctcctcctcgtcatgggcacctccctccaggtccagcccttcgcctccctcatctccaaggcccccctctccaccccccgcctcctcatcaacaaggagaaggccggccagtccgaccccttcctcggcatgatcatgggcctcggcggcggcatggacttcgactccaagaaggcctaccgcgacgtcgcctggctcggcgagtgcgaccagggctgcctcgccctcgccgagctcctcggctggaagaaggagctcgaggacctcgtccgccgcgagcacgcctccatcgacgcccagtccggcgccggcgtccccaacccctccacctccgcctcccccaagaagtcccccccccccgccaaggacgaggcccgcaccaccgagcgcgagaagccccagtga

SEQ ID NO: 1958 - RNA, 1401 nt, synthetic construct
  misc_feature 1..1401: note = AAH02824 variant
  source 1..1401: mol_type = other RNA
atggccgaggagcaggacctctccgaggtcgagctctcccccgtcggctccgaggagccccgctgcctctcccccggctccgccccctccctcggccccgacggcggcggcggcggctccggcctccgcgcctcccccggccccggcgagctcggcaaggtcaagaaggagcagcaggacggcgaggccgacgacgacaagttccccgtctgcatccgcgaggccgtctcccaggtcctctccggctacgactggaccctcgtccccatgcccgtccgcgtcaacggcgcctccaagtccaagccccacgtcaagcgccccatgaacgccttcatggtctgggcccaggccgcccgccgcaagctcgccgaccagtacccccacctccacaacgccgagctctccaagaccctcggcaagctctggcgcctcctcaacgagtccgacaagcgccccttcatcgaggaggccgagcgcctccgcatgcagcacaagaaggaccaccccgactacaagtaccagccccgccgccgcaagaacggcaaggccgcccagggcgaggccgagtgccccggcggcgaggccgagcagggcggcaccgccgccatccaggcccactacaagtccgcccacctcgaccaccgccaccccggcgagggctcccccatgtccgacggcaaccccgagcacccctccggccagtcccacggcccccccaccccccccaccacccccaagaccgagctccagtccggcaaggccgaccccaagcgcgacggccgctccatgggcgagggcggcaagccccacatcgacttcggcaacgtcgacatcggcgagatctcccacgaggtcatgtccaacatggagaccttcgacgtcgccgagctcgaccagtacctcccccccaacggccaccccggccacgtctcctcctactccgccgccggctacggcctcggctccgccctcgccgtcgcctccggccactccgcctggatctccaagccccccggcgtcgccctccccaccgtctccccccccggcgtcgacgccaaggcccaggtcaagaccgagaccgccggcccccagggccccccccactacaccgaccagccctccacctcccagatcgcctacacctccctctccctcccccactacggctccgccttcccctccatctcccgcccccagttcgactactccgaccaccagccctccggcccctactacggccactccggccaggcctccggcctctactccgccttctcctacatgggcccctcccagcgccccctctacaccgccatctccgacccctccccctccggcccccagtcccactcccccacccactgggagcagcccgtctacaccaccctctcccgcccctga

SEQ ID NO: 1959 - RNA, 456 nt, synthetic construct
  misc_feature 1..456: note = AAH32457 variant
  source 1..456: mol_type = other RNA
atgtccatccccttctccaacacccactaccgcatcccccagggcttcggcaacctcctcgagggcctcacccgcgagatcctccgcgagcagcccgacaacatccccgccttcgccgccgcctacttcgagtccctcctcgagaagcgcgagaagaccaacttcgaccccgccgagtggggctccaaggtcgaggaccgcttctacaacaaccacgccttcgaggagcaggagccccccgagaagtccgaccccaagcaggaggagtcccagatctccggcaaggaggaggagacctccgtcaccatcctcgactcctccgaggaggacaaggagaaggaggaggtcgccgccgtcaagatccaggccgccttccgcggccacatcgcccgcgaggaggccaagaagatgaagaccaactccctccagaacgaggagaaggaggagaacaagtga

SEQ ID NO: 1960 - RNA, 294 nt, synthetic construct
  misc_feature 1..294: note = AAF28420 variant
  source 1..294: mol_type = other RNA
atggacaagcagtcctccgccggcggcgtcaagcgctccgtcccctgcgactccaacgaggccaacgagatgatgcccgagacccccaccggcgactccgacccccagcccgcccccaagaagatgaagacctccgagtcctccaccatcctcgtcgtccgctaccgccgcaacttcaagcgcacctcccccgaggagctcctcaacgaccacgcccgcgagaaccgcatcaaccccctccagatggaggaggaggagttcatggagatcatggtcgagatccccgccaagtga

SEQ ID NO: 1961 - RNA, 426 nt, synthetic construct
  misc_feature 1..426: note = AAH62750 variant
  source 1..426: mol_type = other RNA
atggagcagcccacctcctccaccaacggcgagaagaccaagtccccctgcgagtccaacaacaagaagaacgacgagatgcaggaggtccccaaccgcgtcctcgcccccgagcagtccctcaagaagaccaagacctccgagtaccccatcatcttcgtctactacctccgcaagggcaagaagatcaactccaaccagctcgagaacgagcagtcccaggagaactccatcaaccccatccagaaggaggaggacgagggcgtcgacctctccgagggctcctccaacgaggacgaggacctcggcccctgcgagggcccctccaaggaggacaaggacctcgactcctccgagggctcctcccaggaggacgaggacctcggcctctccgagggctcctcccaggactccggcgaggactga

SEQ ID NO: 1962 - RNA, 567 nt, synthetic construct
  misc_feature 1..567: note = AAH01003 variant
  source 1..567: mol_type = other RNA
atgaacggcgacgacaccttcgccaagcgcccccgcgacgacgccaaggcctccgagaagcgctccaaggccttcgacgacatcgccacctacttctccaagaaggagtggaagaagatgaagtactccgagaagatctcctacgtctacatgaagcgcaactacaaggccatgaccaagctcggcttcaaggtcaccctcccccccttcatgtgcaacaagcaggccaccgacttccagggcaacgacttcgacaacgaccacaaccgccgcatccaggtcgagcacccccagatgaccttcggccgcctccaccgcatcatccccaagatcatgcccaagaagcccgccgaggacgagaacgactccaagggcgtctccgaggcctccggcccccagaacgacggcaagcagctccacccccccggcaaggccaacatctccgagaagatcaacaagcgctccggccccaagcgcggcaagcacgcctggacccaccgcctccgcgagcgcaagcagctcgtcatctacgaggagatctccgaccccgaggaggacgacgagtga

SEQ ID NO: 1963 - RNA, 567 nt, synthetic construct
  misc_feature 1..567: note = AAH16957 variant
  source 1..567: mol_type = other RNA
atgaacggcgacgacgccttcgcccgccgccccaccgtcggcgcccagatccccgagaagatccagaaggccttcgacgacatcgccaagtacttctccaaggaggagtgggagaagatgaaggcctccgagaagatcttctacgtctacatgaagcgcaagtacgaggccatgaccaagctcggcttcaaggccaccctcccccccttcatgtgcaacaagcgcgccgaggacttccagggcaacgacctcgacaacgaccccaaccgcggcaaccaggtcgagcgcccccagatgaccttcggccgcctccagggcatctcccccaagatcatgcccaagaagcccgccgaggagggcaacgactccgaggaggtccccgaggcctccggcccccagaacgacggcaaggagctctgcccccccggcaagcccaccacctccgagaagatccacgagcgctccggccccaagcgcggcgagcacgcctggacccaccgcctccgcgagcgcaagcagctcgtcatctacgaggagatctccgaccccgaggaggacgacgagtga

SEQ ID NO: 1964 - RNA, 567 nt, synthetic construct
  misc_feature 1..567: note = AAC05819 variant
  source 1..567: mol_type = other RNA
atgaacggcgacgacaccttcgcccgccgccccaccgtcggcgcccagatccccgagaagatccagaaggccttcgacgacatcgccaagtacttctccaaggaggagtgggagaagatgaaggtctccgagaagatcgtctacgtctacatgaagcgcaagtacgaggccatgaccaagctcggcttcaaggccatcctcccctccttcatgcgcaacaagcgcgtcaccgacttccagggcaacgacttcgacaacgaccccaaccgcggcaaccaggtccagcgcccccagatgaccttcggccgcctccagggcatcttccccaagatcatgcccaagaagcccgccgaggagggcaacgtctccaaggaggtccccgaggcctccggcccccagaacgacggcaagcagctctgcccccccggcaagcccaccacctccgagaagatcaacatgatctccggccccaagcgcggcgagcacgcctggacccaccgcctccgcgagcgcaagcagctcgtcatctacgaggagatctccgaccccgaggaggacgacgagtga

SEQ ID NO: 1965 - RNA, 567 nt, synthetic construct
  misc_feature 1..567: note = AAC05820 variant
  source 1..567: mol_type = other RNA
atgaacggcgacgacgccttcgcccgccgcccccgcgacgacgcccagatctccgagaagctccgcaaggccttcgacgacatcgccaagtacttctccaagaaggagtgggagaagatgaagtcctccgagaagatcgtctacgtctacatgaagctcaactacgaggtcatgaccaagctcggcttcaaggtcaccctcccccccttcatgcgctccaagcgcgccgccgacttccacggcaacgacttcggcaacgaccgcaaccaccgcaaccaggtcgagcgcccccagatgaccttcggctccctccagcgcatcttccccaagatcatgcccaagaagcccgccgaggaggagaacggcctcaaggaggtccccgaggcctccggcccccagaacgacggcaagcagctctgcccccccggcaacccctccaccctcgagaagatcaacaagacctccggccccaagcgcggcaagcacgcctggacccaccgcctccgcgagcgcaagcagctcgtcgtctacgaggagatctccgaccccgaggaggacgacgagtga

SEQ ID NO: 1966 - RNA, 888 nt, synthetic construct
  misc_feature 1..888: note = CCDS32420.1 variant
  source 1..888: mol_type = other RNA
atggagctcatccaggacacctcccgcccccccctcgagtacgtcaagggcgtccccctcatcaagtacttcgccgaggccctcggccccctccagtccttccaggcccgccccgacgacctcctcatctccacctaccccaagtccggcaccacctgggtctcccagatcctcgacatgatctaccagggcggcgacctcgagaagtgccaccgcgcccccatcttcatgcgcgtccccttcctcgagttcaaggcccccggcatcccctccggcatggagaccctcaaggacacccccgccccccgcctcctcaagacccacctccccctcgccctcctcccccagaccctcctcgaccagaaggtcaaggtcgtctacgtcgcccgcaacgccaaggacgtcgccgtctcctactaccacttctaccacatggccaaggtccaccccgagcccggcacctgggactccttcctcgagaagttcatggtcggcgaggtctcctacggctcctggtaccagcacgtccaggagtggtgggagctctcccgcacccaccccgtcctctacctcttctacgaggacatgaaggagaaccccaagcgcgagatccagaagatcctcgagttcgtcggccgctccctccccgaggagaccgtcgacttcgtcgtccagcacacctccttcaaggagatgaagaagaaccccatgaccaactacaccaccgtcccccaggagttcatggaccactccatctcccccttcatgcgcaagggcatggccggcgactggaagaccaccttcaccgtcgcccagaacgagcgcttcgacgccgactacgccgagaagatggccggctgctccctctccttccgctccgagctctga

SEQ ID NO: 1967 - RNA, 3807 nt, synthetic construct
  misc_feature 1..3807: note = CCDS43990.1 variant
  source 1..3807: mol_type = other RNA
atgatcgccgcccccgagatccccaccgacttcaacctcctccaggagtccgagacccacttctcctccgacaccgacttcgaggacatcgagggcaagaaccagaagcagggcaagggcaagacctgcaagaagggcaagaagggccccgccgagaagggcaagggcggcaacggcggcggcaagcccccctccggccccaaccgcatgaacggccaccaccagcagaacggcgtcgagaacatgatgctcttcgaggtcgtcaagatgggcaagtccgccatgcagtccgtcgtcgacgactggatcgagtcctacaagcacgaccgcgacatcgccctcctcgacctcatcaacttcttcatccagtgctccggctgcaagggcgtcgtcaccgccgagatgttccgccacatgcagaactccgagatcatccgcaagatgaccgaggagttcgacgaggactccggcgactaccccctcaccatggccggcccccagtggaagaagttcaagtcctccttctgcgagttcatcggcgtcctcgtccgccagtgccagtactccatcatctacgacgagtacatgatggacaccgtcatctccctcctcaccggcctctccgactcccaggtccgcgccttccgccacacctccaccctcgccgccatgaagctcatgaccgccctcgtcaacgtcgccctcaacctctccatcaacatggacaacacccagcgccagtacgaggccgagcgcaacaagatgatcggcaagcgcgccaacgagcgcctcgagctcctcctccagaagcgcaaggagctccaggagaaccaggacgagatcgagaacatgatgaacgccatcttcaagggcgtcttcgtccaccgctaccgcgacgccatcgccgagatccgcgccatctgcatcgaggagatcggcatctggatgaagatgtactccgacgccttcctcaacgactcctacctcaagtacgtcggctggaccatgcacgacaagcagggcgaggtccgcctcaagtgcctcaccgccctccagggcctctactacaacaaggagctcaactccaagctcgagctcttcacctcccgcttcaaggaccgcatcgtctccatgaccctcgacaaggagtacgacgtcgccgtccaggccatcaagctcctcaccctcgtcctccagtcctccgaggaggtcctcaccgccgaggactgcgagaacgtctaccacctcgtctactccgcccaccgccccgtcgccgtcgccgccggcgagttcctctacaagaagctcttctcccgccgcgaccccgaggaggacggcatgatgaagcgccgcggccgccagggccccaacgccaacctcgtcaagaccctcgtcttcttcttcctcgagtccgagctccacgagcacgccgcctacctcgtcgactccatgtgggactgcgccaccgagctcctcaaggactgggagtgcatgaactccctcctcctcgaggagcccctctccggcgaggaggccctcaccgaccgccaggagtccgccctcatcgagatcatgctctgcaccatccgccaggccgccgagtgccacccccccgtcggccgcggcaccggcaagcgcgtcctcaccgccaaggagaagaagacccagctcgacgaccgcaccaagatcaccgagctcttcgccgtcgccctcccccagctcctcgccaagtactccgtcgacgccgagaaggtcaccaacctcctccagctcccccagtacttcgacctcgagatctacaccaccggccgcctcgagaagcacctcgacgccctcctccgccagatccgcaacatcgtcgagaagcacaccgacaccgacgtcctcgaggcctgctccaagacctaccacgccctctgcaacgaggagttcaccatcttcaaccgcgtcgacatctcccgctcccagctcatcgacgagctcgccgacaagttcaaccgcctcctcgaggacttcctccaggagggcgaggagcccgacgaggacgacgcctaccaggtcctctccaccctcaagcgcatcaccgccttccacaacgcccacgacctctccaagtgggacctcttcgcctgcaactacaagctcctcaagaccggcatcgagaacggcgacatgcccgagcagatcgtcatccacgccctccagtgcacccactacgtcatcctctggcagctcgccaagatcaccgagtcctcctccaccaaggaggacctcctccgcctcaagaagcagatgcgcgtcttctgccagatctgccagcactacctcaccaacgtcaacaccaccgtcaaggagcaggccttcaccatcctctgcgacatcctcatgatcttctcccaccagatcatgtccggcggccgcgacatgctcgagcccctcgtctacacccccgactcctccctccagtccgagctcctctccttcatcctcgaccacgtcttcatcgagcaggacgacgacaacaactccgccgacggccagcaggaggacgaggcctccaagatcgaggccctccacaagcgccgcaacctcctcgccgccttctgcaagctcatcgtctacaccgtcgtcgagatgaacaccgccgccgacatcttcaagcagtacatgaagtactacaacgactacggcgacatcatcaaggagaccatgtccaagacccgccagatcgacaagatccagtgcgccaagaccctcatcctctccctccagcagctcttcaacgagatgatccaggagaacggctacaacttcgaccgctcctcctccaccttctccggcatcaaggagctcgcccgccgcttcgccctcaccttcggcctcgaccagctcaagacccgcgaggccatcgccatgctccacaaggacggcatcgagttcgccttcaaggagcccaacccccagggcgagtcccacccccccctcaacctcgccttcctcgacatcctctccgagttctcctccaagctcctccgccaggacaagcgcaccgtctacgtctacctcgagaagttcatgaccttccagatgtccctccgccgcgaggacgtctggctccccctcatgtcctaccgcaactccctcctcgccggcggcgacgacgacaccatgtccgtcatctccggcatctcctcccgcggctccaccgtccgctccaagaagtccaagccctccaccggcaagcgcaaggtcgtcgagggcatgcagctctccctcaccgaggagtcctcctcctccgactccatgtggctctcccgcgagcagaccctccacacccccgtcatgatgcagaccccccagctcacctccaccatcatgcgcgagcccaagcgcctccgccccgaggactccttcatgtccgtctaccccatgcagaccgagcaccaccagacccccctcgactacaacacccaggtcacctggatgctcgcccagcgccagcaggaggaggcccgccagcagcaggagcgcgccgccatgtcctacgtcaagctccgcaccaacctccagcacgccatccgccgcggcacctccctcatggaggacgacgaggagcccatcgtcgaggacgtcatgatgtcctccgagggccgcatcgaggacctcaacgagggcatggacttcgacaccatggacatcgacctccccccctccaagaaccgccgcgagcgcaccgagctcaagcccgacttcttcgaccccgcctccatcatggacgagtccgtcctcggcgtctccatgttctga

SEQ ID NO: 1968 - RNA, 1473 nt, synthetic construct
  misc_feature 1..1473: note = CCDS5615.1 variant
  source 1..1473: mol_type = other RNA
atggagtccatctccatgatgggctcccccaagtccctctccgagaccttcctccccaacggcatcaacggcatcaaggacgcccgcaaggtcaccgtcggcgtcatcggctccggcgacttcgccaagtccctcaccatccgcctcatccgctgcggctaccacgtcgtcatcggctcccgcaaccccaagttcgcctccgagttcttcccccacgtcgtcgacgtcacccaccacgaggacgccctcaccaagaccaacatcatcttcgtcgccatccaccgcgagcactacacctccctctgggacctccgccacctcctcgtcggcaagatcctcatcgacgtctccaacaacatgcgcatcaaccagtaccccgagtccaacgccgagtacctcgcctccctcttccccgactccctcatcgtcaagggcttcaacgtcgtctccgcctgggccctccagctcggccccaaggacgcctcccgccaggtctacatctgctccaacaacatccaggcccgccagcaggtcatcgagctcgcccgccagctcaacttcatccccatcgacctcggctccctctcctccgcccgcgagatcgagaacctccccctccgcctcttcaccctctggcgcggccccgtcgtcgtcgccatctccctcgccaccttcttcttcctctactccttcgtccgcgacgtcatccacccctacgcccgcaaccagcagtccgacttctacaagatccccatcgagatcgtcaacaagaccctccccatcgtcgccatcaccctcctctccctcgtctacctcgccggcctcctcgccgccgcctaccagctctactacggcaccaagtaccgccgcttccccccctggctcgagacctggctccagtgccgcaagcagctcggcctcctctccttcttcttcgccatggtccacgtcgcctactccctctgcctccccatgcgccgctccgagcgctacctcttcctcaacatggcctaccagcaggtccacgccaacatcgagaactcctggaacgaggaggaggtctggcgcatcgagatgtacatctccttcggcatcatgtccctcggcctcctctccctcctcgccgtcacctccatcccctccgtctccaacgccctcaactggcgcgagttctccttcatccagtccaccctcggctacgtcgccctcctcatctccaccttccacgtcctcatctacggctggaagcgcgccttcgaggaggagtactaccgcttctacaccccccccaacttcgtcctcgccctcgtcctcccctccatcgtcatcctcggcaagatcatcctcttcctcccctgcatctcccgcaagctcaagcgcatcaagaagggctgggagaagtcccagttcctcgaggagggcatgggcggcaccatcccccacgtctcccccgagcgcgtcaccgtcatgtga

SEQ ID NO: 1969 - RNA, 777 nt, synthetic construct
  misc_feature 1..777: note = EAW93749 variant
  source 1..777: mol_type = other RNA
atggagtcccgcaaggacatcaccaaccaggaggagatctggaagatgaagccccgccgcaacctcgaggacaacgactacctccacaaggacaccggcgagacctccatgctcaagcgccccgtcctcctccacctccagcagaccgcccacgccgacgagttcgactgcccctccgagctccagcacgcccaggagctcttcccccagtggcacctccccatcaagatcgccgccgtcatggcctccctcaccttcctctacaccctcctccgcgaggtcatccaccccctcgccacctcccaccagcagtacttctacaagatccccatcctcgtcatcaacaaggtcctccccatggtctccatcaccctcctcgccctcgtctacctccccggcgtcatcgccgccatcgtccaggtccacaacggcaccaagtacaagaagttcccccactggctcgacaagtggatgctcacccgcaagcagttcggcctcctctccctcttcttcgccgtcctccacgccatctacaccctctcctacgccatgcgccgctcctaccgctacaagctcctcaactgggcctaccagcaggtccagcagaacaaggaggacgcctggatcgagcacgacgtctggcgcatggagatctacgtctccctcggcatcgtcggcctcgccatcctcgccctcctcgccgtcacctccatcccctccgtctccgactccctcacctggcgcgagttccactacatccaggtcaacaacatctga

SEQ ID NO: 1970 - RNA, 1020 nt, synthetic construct
  misc_feature 1..1020: note = AAD15620 variant
  source 1..1020: mol_type = other RNA
atggagtcccgcaaggacatcaccaaccaggaggagctctggaagatgaagccccgccgcaacctcgaggaggacgactacctccacaaggacaccggcgagacctccatgctcaagcgccccgtcctcctccacctccaccagaccgcccacgccgacgagttcgactgcccctccgagctccagcacacccaggagctcttcccccagtggcacctccccatcaagatcgccgccatcatcgcctccctcaccttcctctacaccctcctccgcgaggtcatccaccccctcgccacctcccaccagcagtacttctacaagatccccatcctcgtcatcaacaaggtcctccccatggtctccatcaccctcctcgccctcgtctacctccccggcgtcatcgccgccatcgtccagctccacaacggcaccaagtacaagaagttcccccactggctcgacaagtggatgctcacccgcaagcagttcggcctcctctccttcttcttcgccgtcctccacgccatctactccctctcctaccccatgcgccgctcctaccgctacaagctcctcaactgggcctaccagcaggtccagcagaacaaggaggacgcctggatcgagcacgacgtctggcgcatggagatctacgtctccctcggcatcgtcggcctcgccatcctcgccctcctcgccgtcacctccatcccctccgtctccgactccctcacctggcgcgagttccactacatccagtccaagctcggcatcgtctccctcctcctcggcaccatccacgccctcatcttcgcctggaacaagtggatcgacatcaagcagttcgtctggtacaccccccccaccttcatgatcgccgtcttcctccccatcgtcgtcctcatcttcaagtccatcctcttcctcccctgcctccgcaagaagatcctcaagatccgccacggctgggaggacgtcaccaagatcaacaagaccgagatctgctcccagctctga

SEQ ID NO: 1971 - RNA, 498 nt, synthetic construct
  misc_feature 1..498: note = CCDS32752.1 variant
  source 1..498: mol_type = other RNA
atgggcgcccccaccctcccccccgcctggcagcccttcctcaaggaccaccgcatctccaccttcaagaactggcccttcctcgagggctgcgcctgcacccccgagcgcatggccgaggccggcttcatccactgccccaccgagaacgagcccgacctcgcccagtgcttcttctgcttcaaggagctcgagggctgggagcccgacgacgaccccatcggccccggcaccgtcgcctacgcctgcaacacctccaccctcggcggccgcggcggccgcatcacccgcgaggagcacaagaagcactcctccggctgcgccttcctctccgtcaagaagcagttcgaggagctcaccctcggcgagttcctcaagctcgaccgcgagcgcgccaagaacaagatcgccaaggagaccaacaacaagaagaaggagttcgaggagaccgccgagaaggtccgccgcgccatcgagcagctcgccgccatggactga

SEQ ID NO: 1972 - RNA, 429 nt, synthetic construct
  misc_feature 1..429: note = AAC51660 variant
  source 1..429: mol_type = other RNA
atgggcgcccccaccctcccccccgcctggcagcccttcctcaaggaccaccgcatctccaccttcaagaactggcccttcctcgagggctgcgcctgcacccccgagcgcatggccgaggccggcttcatccactgccccaccgagaacgagcccgacctcgcccagtgcttcttctgcttcaaggagctcgagggctgggagcccgacgacgaccccatcgaggagcacaagaagcactcctccggctgcgccttcctctccgtcaagaagcagttcgaggagctcaccctcggcgagttcctcaagctcgaccgcgagcgcgccaagaacaagatcgccaaggagaccaacaacaagaagaaggagttcgaggagaccgccaagaaggtccgccgcgccatcgagcagctcgccgccatggactga

SEQ ID NO: 1973 - RNA, 2931 nt, synthetic construct
  misc_feature 1..2931: note = EAW56623 variant
  source 1..2931: mol_type = other RNA
atggagaagcagaagcccttcgccctcttcgtccccccccgctcctcctcctcccaggtctccgccgtcaagccccagaccctcggcggcgactccaccttcttcaagtccttcaacaagtgcaccgaggacgacttcgagttccccttcgccaagaccaacctctccaagaacggcgagaacatcgactccgaccccgccctccagaaggtcaacttcctccccgtcctcgagcaggtcggcaactccgactgccactaccaggagggcctcaaggactccgacctcgagaactccgagggcctctcccgcgtctactccaagctctacaaggaggccgagaagatcaagaagtggaaggtctccaccgaggccgagctccgccagaaggagtccaagctccaggagaaccgcaagatcatcgaggcccagcgcaaggccatccaggagctccagttcggcaacgagaaggtctccctcaagctcgaggagggcatccaggagaacaaggacctcatcaaggagaacaacgccacccgccacctctgcaacctcctcaaggagacctgcgcccgctccgccgagaagaccaagaagtacgagtacgagcgcgaggagacccgccaggtctacatggacctcaacaacaacatcgagaagatgatcaccgccttcgaggagctccgcgtccaggccgagaactcccgcctcgagatgcacttcaagctcaaggaggactacgagaagatccagcacctcgagcaggagtacaagaaggagatcaacgacaaggagaagcaggtctccctcctcctcatccagatcaccgagaaggagaacaagatgaaggacctcaccttcctcctcgaggagtcccgcgacaaggtcaaccagctcgaggagaagaccaagctccagtccgagaacctcaagcagtccatcgagaagcagcaccacctcaccaaggagctcgaggacatcaaggtctccctccagcgctccgtctccacccagaaggccctcgaggaggacctccagatcgccaccaagaccatctgccagctcaccgaggagaaggagacccagatggaggagtccaacaaggcccgcgccgcccactccttcgtcgtcaccgagttcgagaccaccgtctgctccctcgaggagctcctccgcaccgagcagcagcgcctcgagaagaacgaggaccagctcaagatcctcaccatggagctccagaagaagtcctccgagctcgaggagatgaccaagctcaccaacaacaaggaggtcgagctcgaggagctcaagaaggtcctcggcgagaaggagaccctcctctacgagaacaagcagttcgagaagatcgccgaggagctcaagggcaccgagcaggagctcatcggcctcctccaggcccgcgagaaggaggtccacgacctcgagatccagctcaccgccatcaccacctccgagcagtactactccaaggaggtcaaggacctcaagaccgagctcgagaacgagaagctcaagaacaccgagctcacctcccactgcaacaagctctccctcgagaacaaggagctcacccaggagacctccgacatgaccctcgagctcaagaaccagcaggaggacatcaacaacaacaagaagcaggaggagcgcatgctcaagcagatcgagaacctccaggagaccgagacccagctccgcaacgagctcgagtacgtccgcgaggagctcaagcagaagcgcgacgaggtcaagtgcaagctcgacaagtccgaggagaactgcaacaacctccgcaagcaggtcgagaacaagaacaagtacatcgaggagctccagcaggagaacaaggccctcaagaagaagggcaccgccgagtccaagcagctcaacgtctacgagatcaaggtcaacaagctcgagctcgagctcgagtccgccaagcagaagttcggcgagatcaccgacacctaccagaaggagatcgaggacaagaagatctccgaggagaacctcctcgaggaggtcgagaaggccaaggtcatcgccgacgaggccgtcaagctccagaaggagatcgacaagcgctgccagcacaagatcgccgagatggtcgccctcatggagaagcacaagcaccagtacgacaagatcatcgaggagcgcgactccgagctcggcctctacaagtccaaggagcaggagcagtcctccctccgcgcctccctcgagatcgagctctccaacctcaaggccgagctcctctccgtcaagaagcagctcgagatcgagcgcgaggagaaggagaagctcaagcgcgaggccaaggagaacaccgccaccctcaaggagaagaaggacaagaagacccagaccttcctcctcgagacccccgagatctactggaagctcgactccaaggccgtcccctcccagaccgtctcccgcaacttcacctccgtcgaccacggcatctccaaggacaagcgcgactacctctggacctccgccaagaacaccctctccacccccctccccaaggcctacaccgtcaagacccccaccaagcccaagctccagcagcgcgagaacctcaacatccccatcgaggagtccaagaagaagcgcaagatggccttcgagttcgacatcaactccgactcctccgagaccaccgacctcctctccatggtctccgaggaggagaccctcaagaccctctaccgcaacaacaacccccccgcctcccacctctgcgtcaagacccccaagaaggccccctcctccctcaccacccccggctccaccctcaagttcggcgccatccgcaagatgcgcgaggaccgctgggccgtcatcgccaagatggaccgcaagaagaagctcaaggaggccgagaagctcttcgtctga

SEQ ID NO: 1974 - RNA, 2931 nt, synthetic construct
  misc_feature 1..2931: note = AAI44020 variant
  source 1..2931: mol_type = other RNA
atggagaagcagaagcccttcgccctcttcgtccccccccgctcctcctcctcccaggtctccgccgtcaagccccagaccctcggcggcgactccaccttcttcaagtccttcaacaagtgcaccgaggacgacttcgagttccccttcgccaagaccaacctctccaagaacggcgagaacatcgactccgaccccgccctccagaaggtcaacttcctccccgtcttcgagcaggtcggcaactccgactgccactaccaggagggcctcaaggactccgacctcgagaactccgagggcctctcccgcgtctactccaagctctacaaggaggccgagaagatcaagaagtggaaggtctccaccgaggccgagctccgccagaaggagtccaagctccaggagaaccgcaagatcatcgaggcccagcgcaaggccatccaggagctccagttcggcaacgagaaggtctccctcaagctcgaggagggcatccaggagaacaaggacctcatcaaggagaacaacgccacccgccacctctgcaacctcctcaaggagacctgcgcccgctccgccgagaagaccaagaagtacgagtacgagcgcgaggagacccgccaggtctacatggacctcaactccaacatcgagaagatgatcaccgccttcgaggagctccgcgtccaggccgagaactcccgcctcgagatgcacttcaagctcaaggaggactacgagaagatccagcacctcgagcaggagtacaagaaggagatcaacgacaaggagaagcaggtctccctcctcctcatccagatcaccgagaaggagaacaagatgaaggacctcaccttcctcctcgaggagtcccgcgacaaggtcaaccagctcgaggagaagaccaagctccagtccgagaacctcaagcagtccatcgagaagcagcaccacctcaccaaggagctcgaggacatcaaggtctccctccagcgctccgtctccacccagaaggccctcgaggaggacctccagatcgccaccaagaccatctgccagctcaccgaggagaaggagacccagatggaggagtccaacaaggcccgcgccgcccactccttcgtcgtcaccgagttcgagaccaccgtctgctccctcgaggagctcctccgcaccgagcagcagcgcctcgagaagaacgaggaccagctcaagatcctcaccatggagctccagaagaagtcctccgagctcgaggagatgaccaagctcaccaacaacaaggaggtcgagctcgaggagctcaagaaggtcctcggcgagaaggagaccctcctctacgagaacaagcagttcgagaagatcgccgaggagctcaagggcaccgagcaggagctcatcggcctcctccaggcccgcgagaaggaggtccacgacctcgagatccagctcaccgccatcaccacctccgagcagtactactccaaggaggtcaaggacctcaagaccgagctcgagaacgagaagctcaagaacaccgagctcacctcccactgcaacaagctctccctcgagaacaaggagctcacccaggagacctccgacatgaccctcgagctcaagaaccagcaggaggacatcaacaacaacaagaagcaggaggagcgcatgctcaagcagatcgagaacctccaggagaccgagacccagctccgcaacgagctcgagtacgtccgcgaggagctcaagcagaagcgcgacgaggtcaagtgcaagctcgacaagtccgaggagaactgcaacaacctccgcaagcaggtcgagaacaagaacaagtacatcgaggagctccagcaggagaacaaggccctcaagaagaagggcaccgccgagtccaagcagctcaacgtctacgagatcaaggtcaacaagctcgagctcgagctcgagtccgccaagcagaagttcggcgagatcaccgacacctaccagaaggagatcgaggacaagaagatctccgaggagaacctcctcgaggaggtcgagaaggccaaggtcatcgccgacgaggccgtcaagctccagaaggagatcgacaagcgctgccagcacaagatcgccgagatggtcgccctcatggagaagcacaagcaccagtacgacaagatcatcgaggagcgcgactccgagctcggcctctacaagtccaaggagcaggagcagtcctccctccgcgcctccctcgagatcgagctctccaacctcaaggccgagctcctctccgtcaagaagcagctcgagatcgagcgcgaggagaaggagaagctcaagcgcgaggccaaggagaacaccgccaccctcaaggagaagaaggacaagaagacccagaccttcctcctcgagacccccgagatctactggaagctcgactccaaggccgtcccctcccagaccgtctcccgcaacttcacctccgtcgaccacggcatctccaaggacaagcgcgactacctctggacctccgccaagaacaccctctccacccccctccccaaggcctacaccgtcaagacccccaccaagcccaagctccagcagcgcgagaacctcaacatccccatcgaggagtccaagaagaagcgcaagatggccttcgagttcgacatcaactccgactcctccgagaccaccgacctcctctccatggtctccgaggaggagaccctcaagaccctctaccgcaacaacaacccccccgcctcccacctctgcgtcaagacccccaagaaggccccctcctccctcaccacccccggctccaccctcaagttcggcgccatccgcaagatgcgcgaggaccgctgggccgtcatcgccaagatggaccgcaagaagaagctcaaggaggccgagaagctcttcgtctga

SEQ ID NO: 1975 - RNA, 2931 nt, synthetic construct; identical to SEQ ID NO: 1973
  misc_feature 1..2931: note = AAI26267 variant
  source 1..2931: mol_type = other RNA

SEQ ID NO: 1976 - RNA, 330 nt, synthetic construct
  misc_feature 1..330: note = AAI05300 variant
  source 1..330: mol_type = other RNA
atggagaagcagaagcccttcgccctcttcgtccccccccgctcctcctcctcccaggtctccgccgtcaagccccagaccctcggcggcgactccaccttcttcaagtccttcaacaagtgcaccgaggacgacttcgagttccccttcgccaagaccaacctctccaagaacggcgagaacatcgactccgaccccgccctccagaacgtcaacttcctccccgtcctcgagcaggtcggcaactccgactgccactaccaggagggcctcaaggactccgacctcgagaactccgagggcctctcccgcgtctactccaagctctga

SEQ ID NO: 1977 - RNA, 1467 nt, synthetic construct
  misc_feature 1..1467: note = BAF56181 variant
  source 1..1467: mol_type = other RNA
atgtccgtcgccttcgccgccccccgccagcgcggcaagggcgagatcacccccgccgccatccagaagatgctcgacgacaacaaccacctcatccagtgcatcatggactcccagaacaagggcaagacctccgagtgctcccagtaccagcagatgctccacaccaacctcgtctacctcgccaccatcgccgactccaaccagaacatgcagtccctcctccccgccccccccacccagaacatgcccatgggccccggcggcatgaaccagtccggcccccccccccccccccgctcccacaacatgccctccgacggcatggtcggcggcggcccccccgccccccacatgcagaaccagatgaacggccagatgcccggccccaaccacatgcccatgcagggccccggccccaaccagctcaacatgaccaactcctccatgaacatgccctcctcctcccacggctccatgggcggctacaaccactccgtcccctcctcccagtccatgcccgtccagaaccagatgaccatgtcccagggccagcccatgggcaactacggcccccgccccaacatgtccatgcagcccaaccagggccccatgatgcaccagcagcccccctcccagcagtacaacatgccccagggcggcggccagcactaccagggccagcagccccccatgggcatgatgggccaggtcaaccagggcaaccacatgatgggccagcgccagatccccccctaccgccccccccagcagggccccccccagcagtactccggccaggaggactactacggcgaccagtactcccacggcggccagggcccccccgagggcatgaaccagcagtactaccccgacggccacaacgactacggctaccagcagccctcctaccccgagcagggctacgaccgcccctacgaggactcctcccagcactactacgagggcggcaactcccagtacggccagcagcaggacgcctaccagggcccccccccccagcagggctaccccccccagcagcagcagtaccccggccagcagggctaccccggccagcagcagggctacggcccctcccagggcggccccggcccccagtaccccaactacccccagggccagggccagcagtacggcggctaccgccccacccagcccggccccccccagcccccccagcagcgcccctacggctacgaccagatcatgcccaagaagcccgccgaggacgagaacgactccaagggcgtctccgaggcctccggcccccagaacgacggcaagcagctccacccccccggcaaggccaacatctccgagaagatcaacaagcgctccggccccaagcgcggcaagcacgcctggacccaccgcctccgcgagcgcaagcagctcgtcatctacgaggagatctccgaccccgaggaggacgacgagtga

SEQ ID NO: 1978 - RNA, 1374 nt, synthetic construct
  misc_feature 1..1374: note = BAF56182 variant
  source 1..1374: mol_type = other RNA
atgtccgtcgccttcgccgccccccgccagcgcggcaagggcgagatcacccccgccgccatccagaagatgctcgacgacaacaaccacctcatccagtgcatcatggactcccagaacaagggcaagacctccgagtgctcccagtaccagcagatgctccacaccaacctcgtctacctcgccaccatcgccgactccaaccagaacatgcagtccctcctccccgccccccccacccagaacatgcccatgggccccggcggcatgaaccagtccggcccccccccccccccccgctcccacaacatgccctccgacggcatggtcggcggcggcccccccgccccccacatgcagaaccagatgaacggccagatgcccggccccaaccacatgcccatgcagggccccggccccaaccagctcaacatgaccaactcctccatgaacatgccctcctcctcccacggctccatgggcggctacaaccactccgtcccctcctcccagtccatgcccgtccagaaccagatgaccatgtcccagggccagcccatgggcaactacggcccccgccccaacatgtccatgcagcccaaccagggccccatgatgcaccagcagcccccctcccagcagtacaacatgccccagggcggcggccagcactaccagggccagcagccccccatgggcatgatgggccaggtcaaccagggcaaccacatgatgggccagcgccagatccccccctaccgccccccccagcagggccccccccagcagtactccggccaggaggactactacggcgaccagtactcccacggcggccagggcccccccgagggcatgaaccagcagtactaccccgacggcaactcccagtacggccagcagcaggacgcctaccagggcccccccccccagcagggctaccccccccagcagcagcagtaccccggccagcagggctaccccggccagcagcagggctacggcccctcccagggcggccccggcccccagtaccccaactacccccagggccagggccagcagtacggcggctaccgccccacccagcccggccccccccagcccccccagcagcgcccctacggctacgaccagatcatgcccaagaagcccgccgaggacgagaacgactccaagggcgtctccgaggcctccggcccccagaacgacggcaagcagctccacccccccggcaaggccaacatctccgagaagatcaacaagcgctccggccccaagcgcggcaagcacgcctggacccaccgcctccgcgagcgcaagcagctcgtcatctacgaggagatctccgaccccgaggaggacgacgagtga

SEQ ID NO: 1979 - RNA, 1467 nt, synthetic construct
  misc_feature 1..1467: note = BAF56183 variant
  source 1..1467: mol_type = other RNA
atgtccgtcgccttcgccgccccccgccagcgcggcaagggcgagatcacccccgccgccatccagaagatgctcgacgacaacaaccacctcatccagtgcatcatggactcccagaacaagggcaagacctccgagtgctcccagtaccagcagatgctccacaccaacctcgtctacctcgccaccatcgccgactccaaccagaacatgcagtccctcctccccgccccccccacccagaacatgcccatgggccccggcggcatgaaccagtccggcccccccccccccccccgctcccacaacatgccctccgacggcatggtcggcggcggcccccccgccccccacatgcagaaccagatgaacggccagatgcccggccccaaccacatgcccatgcagggccccggccccaaccagctcaacatgaccaactcctccatgaacatgccctcctcctcccacggctccatgggcggctacaaccactccgtcccctcctcccagtccatgcccgtccagaaccagatgaccatgtcccagggccagcccatgggcaactacggcccccgccccaacatgtccatgcagcccaaccagggccccatgatgcaccagcagcccccctcccagcagtacaacatgccccagggcggcggccagcactaccagggccagcagccccccatgggcatgatgggccaggtcaaccagggcaaccacatgatgggccagcgccagatccccccctaccgccccccccagcagggccccccccagcagtactccggccaggaggactactacggcgaccagtactcccacggcggccagggcccccccgagggcatgaaccagcagtactaccccgacggccacaacgactacggctaccagcagccctcctaccccgagcagggctacgaccgcccctacgaggactcctcccagcactactacgagggcggcaactcccagtacggccagcagcaggacgcctaccagggcccccccccccagcagggctaccccccccagcagcagcagtaccccggccagcagggctaccccggccagcagcagggctacggcccctcccagggcggccccggcccccagtaccccaactacccccagggccagggccagcagtacggcggctaccgccccacccagcccggccccccccagcccccccagcagcgcccctacggctacgaccagatcatgcccaagaagcccgccgaggagggcaacgactccgaggaggtccccgaggcctccggcccccagaacgacggcaaggagctctgcccccccggcaagcccaccacctccgagaagatccacgagcgctccggccccaagcgcggcgagcacgcctggacccaccgcctccgcgagcgcaagcagctcgtcatctacgaggagatctccgaccccgaggaggacgacgagtga

SEQ ID NO: 1980 - RNA, 1374 nt, synthetic construct
  misc_feature 1..1374: note = BAF56184 variant
  source 1..1374: mol_type = other RNA
atgtccgtcgccttcgccgccccccgccagcgcggcaagggcgagatcacccccgccgccatccagaagatgctcgacgacaacaaccacctcatccagtgcatcatggactcccagaacaagggcaagacctccgagtgctcccagtaccagcagatgctccacaccaacctcgtctacctcgccaccatcgccgactccaaccagaacatgcagtccctcctccccgccccccccacccagaacatgcccatgggccccggcggcatgaaccagtccggcccccccccccccccccgctcccacaacatgccctccgacggcatggtcggcggcggcccccccgccccccacatgcagaaccagatgaacggccagatgcccggccccaaccacatgcccatgcagggccccggccccaaccagctcaacatgaccaactcctccatgaacatgccctcctcctcccacggctccatgggcggctacaaccactccgtcccctcctcccagtccatgcccgtccagaaccagatgaccatgtcccagggccagcccatgggcaactacggcccccgccccaacatgtccatgcagcccaaccagggccccatgatgcaccagcagcccccctcccagcagtacaacatgccccagggcggcggccagcactaccagggccagcagccccccatgggcatgatgggccaggtcaaccagggcaaccacatgatgggccagcgccagatccccccctaccgccccccccagcagggccccccccagcagtactccggccaggaggactactacggcgaccagtactcccacggcggccagggcccccccgagggcatgaaccagcagtactaccccgacggcaactcccagtacggccagcagcaggacgcctaccagggcccccccccccagcagggctaccccccccagcagcagcagtaccccggccagcagggctaccccggccagcagcagggctacggcccctcccagggcggccccggcccccagtaccccaactacccccagggccagggccagcagtacggcggctaccgccccacccagcccggccccccccagcccccccagcagcgcccctacggctacgaccagatcatgcccaagaagcccgccgaggagggcaacgactccgaggaggtccccgaggcctccggcccccagaacgacggcaaggagctctgcccccccggcaagcccaccacctccgagaagatccacgagcgctccggccccaagcgcggcgagcacgcctggacccaccgcctccgcgagcgcaagcagctcgtcatctacgaggagatctccgaccccgaggaggacgacgagtga

SEQ ID NO: 1981 - RNA, 336 nt, synthetic construct
  misc_feature 1..336: note = AAI05590 variant
  source 1..336: mol_type = other RNA
atgaagaccaacgacacctacatgaagttctcctggctcaccgtccccgagaagtccctcgacaaggagcaccgctgcatcgtccgccacgagaacaacaagaacggcgtcgaccaggagatcatcttcccccccatcaagaccgacgtcatcaccatggaccccaaggacaactgctccaaggacgccaacgacaccctcctcctccagctcaccaacacctccgcctactacatgtacctcctcctcctcctcaagtccgtcgtctacttcgccatcatcacctgctgcctcctccgccgcaccgccttctgctgcaacggcgagaagtcctga

SEQ ID NO: 1982 - RNA, 177 nt, synthetic construct
  misc_feature 1..177: note = AAG29337 variant
  source 1..177: mol_type = other RNA
atgcagatgttccccccctcccccctcttcttcttcctccagctcctcaagcagtcctcccgccgcctcgagcacaccttcgtcttcctccgcaacttctccctcatgctcctccgctacatcggcaagaagcgccgcgccacccgcttctgggacccccgccgcggcaccccctga

SEQ ID NO: 1983 - RNA, 1131 nt, synthetic construct
  misc_feature 1..1131: note = AAF26776 variant
  source 1..1131: mol_type = other RNA
atggccaactccgccaacaccaacaccgtccccaagctctaccgctccgtcatcgaggacgtcatcaacgacgtccgcgacatcttcctcgacgacggcgtcgacgagcaggtcctcatggagctcaagaccctctgggagaacaagctcatgcagtcccgcgccgtcgacggcttccactccgaggagcagcagctcctcctccaggtccagcagcagcaccagccccagcagcagcagcaccaccaccaccaccaccaccagcaggcccagccccagcagaccgtcccccagcaggcccagacccagcaggtcctcatccccgcctcccagcaggccaccgccccccaggtcatcgtccccgactccaagctcatccagcacatgaacgcctccaacatgtccgccgccgccaccgccgccaccctcgccctccccgccggcgtcacccccgtccagcagatcctcaccaactccggccagctcctccaggtcgtccgcgccgccaacggcgcccagtacatcttccagccccagcagtccgtcgtcctccagcagcaggtcatcccccagatgcagcccggcggcgtccaggcccccgtcatccagcaggtcctcgcccccctccccggcggcatctccccccagaccggcgtcatcatccagccccagcagatcctcttcaccggcaacaagacccaggtcatccccaccaccgtcgccgcccccacccccgcccaggcccagatcaccgccaccggccagcagcagccccaggcccagcccgcccagacccaggcccccctcgtcctccaggtcgacggcaccggcgacacctcctccgaggaggacgaggacgaggaggaggactacgacgacgacgaggaggaggacaaggagaaggacggcgccgaggacggccaggtcgaggaggagcccctcaactccgaggacgacgtctccgacgaggagggccaggagctcttcgacaccgagaacgtcgtcgtctgccagtacgacaagatccaccgctccaagaacaagtggaagttccacctcaaggacggcatcatgaacctcaacggccgcgactacatcttctccaaggccatcggcgacgccgagtggtga

SEQ ID NO: 1984 - RNA, 1173 nt, synthetic construct
  misc_feature 1..1173: note = AAH00125 variant
  source 1..1173: mol_type = other RNA
atgcccccctccggcctccgcctcctcctcctcctcctccccctcctctggctcctcgtcctcacccccggccgccccgccgccggcctctccacctgcaagaccatcgacatggagctcgtcaagcgcaagcgcatcgaggccatccgcggccagatcctctccaagctccgcctcgcctcccccccctcccagggcgaggtcccccccggccccctccccgaggccgtcctcgccctctacaactccacccgcgaccgcgtcgccggcgagtccgccgagcccgagcccgagcccgaggccgactactacgccaaggaggtcacccgcgtcctcatggtcgagacccacaacgagatctacgacaagttcaagcagtccacccactccatctacatgttcttcaacacctccgagctccgcgaggccgtccccgagcccgtcctcctctcccgcgccgagctccgcctcctccgcctcaagctcaaggtcgagcagcacgtcgagctctaccagaagtactccaacaactcctggcgctacctctccaaccgcctcctcgccccctccgactcccccgagtggctctccttcgacgtcaccggcgtcgtccgccagtggctctcccgcggcggcgagatcgagggcttccgcctctccgcccactgctcctgcgactcccgcgacaacaccctccaggtcgacatcaacggcttcaccaccggccgccgcggcgacctcgccaccatccacggcatgaaccgccccttcctcctcctcatggccacccccctcgagcgcgcccagcacctccagtcctcccgccaccgccgcgccctcgacaccaactactgcttctcctccaccgagaagaactgctgcgtccgccagctctacatcgacttccgcaaggacctcggctggaagtggatccacgagcccaagggctaccacgccaacttctgcctcggcccctgcccctacatctggtccctcgacacccagtactccaaggtcctcgccctctacaaccagcacaaccccggcgcctccgccgccccctgctgcgtcccccaggccctcgagcccctccccatcgtctactacgtcggccgcaagcccaaggtcgagcagctctccaacatgatcgtccgctcctgcaagtgctcctga

SEQ ID NO: 1985 - RNA, 1704 nt, synthetic construct
  misc_feature 1..1704: note = AAT70724 variant
  source 1..1704: mol_type = other RNA
atgggccgcggcctcctccgcggcctctggcccctccacatcgtcctctggacccgcatcgcctccaccatccccccccacgtccagaagtccgtcaacaacgacatgatcgtcaccgacaacaacggcgccgtcaagttcccccagctctgcaagttctgcgacgtccgcttctccacctgcgacaaccagaagtcctgcatgtccaactgctccatcacctccatctgcgagaagccccaggaggtctgcgtcgccgtctggcgcaagaacgacgagaacatcaccctcgagaccgtctgccacgaccccaagctcccctaccacgacttcatcctcgaggacgccgcctcccccaagtgcatcatgaaggagaagaagaagcccggcgagaccttcttcatgtgctcctgctcctccgacgagtgcaacgacaacatcatcttctccgaggagtacaacacctccaaccccgacctcctcctcgtcatcttccaggtcaccggcatctccctcctcccccccctcggcgtcgccatctccgtcatcatcatcttctactgctaccgcgtcaaccgccagcagaagctctcctccacctgggagaccggcaagacccgcaagctcatggagttctccgagcactgcgccatcatcctcgaggacgaccgctccgacatctcctccacctgcgccaacaacatcaaccacaacaccgagctcctccccatcgagctcgacaccctcgtcggcaagggccgcttcgccgaggtctacaaggccaagctcaagcagaacacctccgagcagttcgagaccgtcgccgtcaagatcttcccctacgaggagtacgcctcctggaagaccgagaaggacatcttctccgacatcaacctcaagcacgagaacatcctccagttcctcaccgccgaggagcgcaagaccgagctcggcaagcagtactggctcatcaccgccttccacgccaagggcaacctccaggagtacctcacccgccacgtcatctcctgggaggacctccgcaagctcggctcctccctcgcccgcggcatcgcccacctccactccgaccacaccccctgcggccgccccaagatgcccatcgtccaccgcgacctcaagtcctccaacatcctcgtcaagaacgacctcacctgctgcctctgcgacttcggcctctccctccgcctcgaccccaccctctccgtcgacgacctcgccaactccggccaggtcggcaccgcccgctacatggcccccgaggtcctcgagtcccgcatgaacctcgagaacgtcgagtccttcaagcagaccgacgtctactccatggccctcgtcctctgggagatgacctcccgctgcaacgccgtcggcgaggtcaaggactacgagccccccttcggctccaaggtccgcgagcacccctgcgtcgagtccatgaaggacaacgtcctccgcgaccgcggccgccccgagatcccctccttctggctcaaccaccagggcatccagatggtctgcgagaccctcaccgagtgctgggaccacgaccccgaggcccgcctcaccgcccagtgcgtcgccgagcgcttctccgagctcgagcacctcgaccgcctctccggccgctcctgctccgaggagaagatccccgaggacggctccctcaacaccaccaagtga

SEQ ID NO: 1986 - RNA, 2055 nt, synthetic construct
  misc_feature 1..2055: note = BAG35778 variant
  source 1..2055: mol_type = other RNA
atgatggacgcctccaaggagctccaggtcctccacatcgacttcctcaaccaggacaacgccgtctcccaccacacctgggagttccagacctcctcccccgtcttccgccgcggccaggtcttccacctccgcctcgtcctcaaccagcccccccagtcctaccaccagctcaagctcgagttctccaccggccccaacccctccatcgccaagcacaccctcgtcgtcctcgacccccgcaccccctccgaccactacaactggcaggccaccctccagaacgagtccggcaaggaggtcaccgtcgccgtcacctcctcccccaacgccatcctcggcaagtaccagctcaacgtcaagaccggcaaccacatcctcaagtccgaggagaacatcctctacctcctcttcaacccctggtgcaaggaggacatggtcttcatgcccgacgaggacgagcgcaaggagtacatcctcaacgacaccggctgccactacgtcggcgccgcccgctccatcaagtgcaagccctggaacttcggccagttcgagaagaacgtcctcgactgctgcatctccctcctcaccgagtcctccctcaagcccaccgaccgccgcgaccccgtcctcgtctgccgcgccatgtgcgccatgatgtccttcgagaagggccagggcgtcctcatcggcaactggaccggcgactacgagggcggcaccgccccctacaagtggaccggctccgcccccatcctccagcagtactacaacaccaagcaggccgtctgcttcggccagtgctgggtcttcgccggcatcctcaccaccgtcctccgcgccctcggcatccccgcccgctccgtcaccggcttcgactccgcccacgacaccgagcgcaacctcaccgtcgacacctacgtcaacgagaacggcgagaagatcacctccatgacccacgactccgtctggaacttccacgtctggaccgacgcctggatgaagcgccccgacctccccaagggctacgacggctggcaggccgtcgacgccaccccccaggagcgctcccagggcgtcttctgctgcggcccctcccccctcaccgccatccgcaagggcgacatcttcatcgtctacgacacccgcttcgtcttctccgaggtcaacggcgaccgcctcatctggctcgtcaagatggtcaacggccaggaggagctccacgtcatctccatggagaccacctccatcggcaagaacatctccaccaaggccgtcggccaggaccgccgccgcgacatcacctacgagtacaagtaccccgagggctcctccgaggagcgccaggtcatggaccacgccttcctcctcctctcctccgagcgcgagcaccgccgccccgtcaaggagaacttcctccacatgtccgtccagtccgacgacgtcctcctcggcaactccgtcaacttcaccgtcatcctcaagcgcaagaccgccgccctccagaacgtcaacatcctcggctccttcgagctccagctctacaccggcaagaagatggccaagctctgcgacctcaacaagacctcccagatccagggccaggtctccgaggtcaccctcaccctcgactccaagacctacatcaactccctcgccatcctcgacgacgagcccgtcatccgcggcttcatcatcgccgagatcgtcgagtccaaggagatcatggcctccgaggtcttcacctccttccagtaccccgagttctccatcgagctccccaacaccggccgcatcggccagctcctcgtctgcaactgcatcttcaagaacaccctcgccatccccctcaccgacgtcaagttctccctcgagtccctcggcatctcctccctccagacctccgaccacggcaccgtccagcccggcgagaccatccagtcccagatcaagtgcacccccatcaagaccggccccaagaagttcatcgtcaagctctcctccaagcaggtcaaggagatcaacgcccagaagatcgtcctcatcaccaagtga

SEQ ID NO: 1987 - RNA, 3375 nt, synthetic construct
  misc_feature 1..3375: note = CCDS6519.1 variant
  source 1..3375: mol_type = other RNA
atggactccctcgcctccctcgtcctctgcggcgtctccctcctcctctccggcaccgtcgagggcgccatggacctcatcctcatcaactccctccccctcgtctccgacgccgagacctccctcacctgcatcgcctccggctggcgcccccacgagcccatcaccatcggccgcgacttcgaggccctcatgaaccagcaccaggaccccctcgaggtcacccaggacgtcacccgcgagtgggccaagaaggtcgtctggaagcgcgagaaggcctccaagatcaacggcgcctacttctgcgagggccgcgtccgcggcgaggccatccgcatccgcaccatgaagatgcgccagcaggcctccttcctccccgccaccctcaccatgaccgtcgacaagggcgacaacgtcaacatctccttcaagaaggtcctcatcaaggaggaggacgccgtcatctacaagaacggctccttcatccactccgtcccccgccacgaggtccccgacatcctcgaggtccacctcccccacgcccagccccaggacgccggcgtctactccgcccgctacatcggcggcaacctcttcacctccgccttcacccgcctcatcgtccgccgctgcgaggcccagaagtggggccccgagtgcaaccacctctgcaccgcctgcatgaacaacggcgtctgccacgaggacaccggcgagtgcatctgcccccccggcttcatgggccgcacctgcgagaaggcctgcgagctccacaccttcggccgcacctgcaaggagcgctgctccggccaggagggctgcaagtcctacgtcttctgcctccccgacccctacggctgctcctgcgccaccggctggaagggcctccagtgcaacgaggcctgccaccccggcttctacggccccgactgcaagctccgctgctcctgcaacaacggcgagatgtgcgaccgcttccagggctgcctctgctcccccggctggcagggcctccagtgcgagcgcgagggcatccagcgcatgacccccaagatcgtcgacctccccgaccacatcgaggtcaactccggcaagttcaaccccatctgcaaggcctccggctggcccctccccaccaacgaggagatgaccctcgtcaagcccgacggcaccgtcctccaccccaaggacttcaaccacaccgaccacttctccgtcgccatcttcaccatccaccgcatcctcccccccgactccggcgtctgggtctgctccgtcaacaccgtcgccggcatggtcgagaagcccttcaacatctccgtcaaggtcctccccaagcccctcaacgcccccaacgtcatcgacaccggccacaacttcgccgtcatcaacatctcctccgagccctacttcggcgacggccccatcaagtccaagaagctcctctacaagcccgtcaaccactacgaggcctggcagcacatccaggtcaccaacgagatcgtcaccctcaactacctcgagccccgcaccgagtacgagctctgcgtccagctcgtccgccgcggcgagggcggcgagggccaccccggccccgtccgccgcttcaccaccgcctccatcggcctcccccccccccgcggcctcaacctcctccccaagtcccagaccaccctcaacctcacctggcagcccatcttcccctcctccgaggacgacttctacgtcgaggtcgagcgccgctccgtccagaagtccgaccagcagaacatcaaggtccccggcaacctcacctccgtcctcctcaacaacctccacccccgcgagcagtacgtcgtccgcgcccgcgtcaacaccaaggcccagggcgagtggtccgaggacctcaccgcctggaccctctccgacatcctccccccccagcccgagaacatcaagatctccaacatcacccactcctccgccgtcatctcctggaccatcctcgacggctactccatctcctccatcaccatccgctacaaggtccagggcaagaacgaggaccagcacgtcgacgtcaagatcaagaacgccaccatcacccagtaccagctcaagggcctcgagcccgagaccgcctaccaggtcgacatcttcgccgagaacaacatcggctcctccaaccccgccttctcccacgagctcgtcaccctccccgagtcccaggcccccgccgacctcggcggcggcaagatgctcctcatcgccatcctcggctccgccggcatgacctgcctcaccgtcctcctcgccttcctcatcatcctccagctcaagcgcgccaacgtccagcgccgcatggcccaggccttccagaacgtccgcgaggagcccgccgtccagttcaactccggcaccctcgccctcaaccgcaaggtcaagaacaaccccgaccccaccatctaccccgtcctcgactggaacgacatcaagttccaggacgtcatcggcgagggcaacttcggccaggtcctcaaggcccgcatcaagaaggacggcctccgcatggacgccgccatcaagcgcatgaaggagtacgcctccaaggacgaccaccgcgacttcgccggcgagctcgaggtcctctgcaagctcggccaccaccccaacatcatcaacctcctcggcgcctgcgagcaccgcggctacctctacctcgccatcgagtacgccccccacggcaacctcctcgacttcctccgcaagtcccgcgtcctcgagaccgaccccgccttcgccatcgccaactccaccgcctccaccctctcctcccagcagctcctccacttcgccgccgacgtcgcccgcggcatggactacctctcccagaagcagttcatccaccgcgacctcgccgcccgcaacatcctcgtcggcgagaactacgtcgccaagatcgccgacttcggcctctcccgcggccaggaggtctacgtcaagaagaccatgggccgcctccccgtccgctggatggccatcgagtccctcaactactccgtctacaccaccaactccgacgtctggtcctacggcgtcctcctctgggagatcgtctccctcggcggcaccccctactgcggcatgacctgcgccgagctctacgagaagctcccccagggctaccgcctcgagaagcccctcaactgcgacgacgaggtctacgacctcatgcgccagtgctggcgcgagaagccctacgagcgcccctccttcgcccagatcctcgtctccctcaaccgcatgctcgaggagcgcaagacctacgtcaacaccaccctctacgagaagttcacctacgccggcatcgactgctccgccgaggaggccgcctga

SEQ ID NO: 1988 - RNA, 1791 nt, synthetic construct
  misc_feature 1..1791: note = BAF84950 variant
  source 1..1791: mol_type = other RNA
atggccgacgccgaggcccgcgccgagttccccgaggaggcccgccccgaccgcggcaccctccaggtcctccaggacatggcctcccgcctccgcatccactccatccgcgccacctgctccacctcctccggccaccccacctcctgctcctcctcctccgagatcatgtccgtcctcttcttctacatcatgcgctacaagcagtccgaccccgagaaccccgacaacgaccgcttcgtcctcgccaagcgcctctccttcgtcgacgtcgccaccggctggctcggccagggcctcggcgtcgcctgcggcatggcctacaccggcaagtacttcgaccgcgcctcctaccgcgtcttctgcctcatgtccgacggcgagtcctccgagggctccgtctgggaggccatggccttcgcctcctactactccctcgacaacctcgtcgccatcttcgacgtcaaccgcctcggccactccggcgccctccccgccgagcactgcatcaacatctaccagcgccgctgcgaggccttcggctggaacacctacgtcgtcgacggccgcgacgtcgaggccctctgccaggtcttctggcaggcctcccaggtcaagcacaagcccaccgccgtcgtcgccaagaccttcaagggccgcggcaccccctccatcgaggacgccgagtcctggcacgccaagcccatgccccgcgagcgcgccgacgccatcatcaagctcatcgagtcccagatccagacctcccgcaacctcgacccccagccccccatcgaggactcccccgaggtcaacatcaccgacgtccgcatgacctccccccccgactaccgcgtcggcgacaagatcgccacccgcaaggcctgcggcctcgccctcgccaagctcggctacgccaacaaccgcgtcgtcgtcctcgacggcgacacccgctactccaccttctccgagatcttcaacaaggagtaccccgagcgcttcatcgagtgcttcatggccgagcagaacatggtctccgtcgccctcggctgcgcctcccgcggccgcaccatcgccttcgcctccaccttcgccgccttcctcacccgcgccttcgaccacatccgcatcggcggcctcgccgagtccaacatcaacatcatcggctcccactgcggcgtctccgtcggcgacgacggcgcctcccagatggccctcgaggacatcgccatgttccgcaccatccccaagtgcaccatcttctaccccaccgacgccgtctccaccgagcacgccgtcgccctcgccgccaacgccaagggcatgtgcttcatccgcaccacccgccccgagaccatggtcatctacaccccccaggagcgcttcgagatcggccaggccaaggtcctccgccactgcgtctccgacaaggtcaccgtcatcggcgccggcatcaccgtctacgaggccctcgccgccgccgacgagctctccaagcaggacatcttcatccgcgtcatcgacctcttcaccatcaagcccctcgacgtcgccaccatcgtctcctccgccaaggccaccgagggccgcatcatcaccgtcgaggaccactacccccagggcggcatcggcgaggccgtctgcgccgccgtctccatggaccccgacatccaggtccactccctcgccgtctccggcgtcccccagtccggcaagtccgaggagctcctcgacatgtacggcatctccgcccgccacatcatcgtcgccgtcaagtgcatgctcctcaactga

SEQ ID NO: 1989 - RNA, 861 nt, synthetic construct
  misc_feature 1..861: note = EAW88722 variant
  source 1..861: mol_type = other RNA
atggccgaggacggcgaggaggccgagttccacttcgccgccctctacatctccggccagtggccccgcctccgcgccgacaccgacctccagcgcctcggctcctccgccatggccccctcccgcaagttcttcgtcggcggcaactggaagatgaacggccgcaagcagtccctcggcgagctcatcggcaccctcaacgccgccaaggtccccgccgacaccgaggtcgtctgcgccccccccaccgcctacatcgacttcgcccgccagaagctcgaccccaagatcgccgtcgccgcccagaactgctacaaggtcaccaacggcgccttcaccggcgagatctcccccggcatgatcaaggactgcggcgccacctgggtcgtcctcggccactccgagcgccgccacgtcttcggcgagtccgacgagctcatcggccagaaggtcgcccacgccctcgccgagggcctcggcgtcatcgcctgcatcggcgagaagctcgacgagcgcgaggccggcatcaccgagaaggtcgtcttcgagcagaccaaggtcatcgccgacaacgtcaaggactggtccaaggtcgtcctcgcctacgagcccgtctgggccatcggcaccggcaagaccgccaccccccagcaggcccaggaggtccacgagaagctccgcggctggctcaagtccaacgtctccgacgccgtcgcccagtccacccgcatcatctacggcggctccgtcaccggcgccacctgcaaggagctcgcctcccagcccgacgtcgacggcttcctcgtcggcggcgcctccctcaagcccgagttcgtcgacatcatcaacgccaagcagtga

SEQ ID NO: 1990 - RNA, 357 nt, synthetic construct
  misc_feature 1..357: note = CAA72108 variant
  source 1..357: mol_type = other RNA
atgcccctcgtcgtcgccgtcatcttcttctccctctgggtcttcgccctcggccagctcgagcagcccgagatctccatctcccgccccgccaacaagtccgcccacatctcctggaaggcctccatccagggcttctcctccaagatcatccactggtactggcagaagcccaacaagggcctcgagtacctcctccacgtcttcctcaccatctccgcccaggactgctccggcggcaagaccaagaagctcgaggtctccaagaacgcccacacctccacctccaccctcaagatcaagttcctcgagaaggaggacgaggtcgtctaccactgcgcctgctggatccgccac

SEQ ID NO: 1991 - RNA, 414 nt, synthetic construct
  misc_feature 1..414: note = EAL23985 variant
  source 1..414: mol_type = other RNA
atgctctccctcctccacacctccaccctcgccgtcctcggcgccctctgcgtctacggcgccggccacctcgagcagccccagatctcctccaccaagaccctctccaagaccgcccgcctcgagtgcgtcgtctccggcatcaccatctccgccacctccgtctactggtaccgcgagcgccccggcgaggtcatccagttcctcgtctccatctcctacgacggcaccgtccgcaaggagtccggcatcccctccggcaagttcgaggtcgaccgcatccccgagacctccacctccaccctcaccatccacaacgtcgagaagcaggacatcgccacctactactgcgccctctgggaggtccactcctcccgccagttcgagccctcccactccatcaacgtctactga

SEQ ID NO: 1992 - RNA, 366 nt, synthetic construct
  misc_feature 1..366: note = CAA30181 variant
  source 1..366: mol_type = other RNA
atgctctccctcctccacacctccaccctcgccgtcctcggcgccctctgcgtctacggcgccggccacctcgagcagccccagatctcctccaccaagaccctctccaagaccgcccgcctcgagtgcgtcgtctccggcatcaccatctccgccacctccgtctactggtaccgcgagcgccccggcgaggtcatccagttcctcgtctccatctcctacgacggcaccgtccgcaaggagtccggcatcccctccggcaagttcgaggtcgaccgcatccccgagacctccacctccaccctcaccatccacaacgtcgagaagcaggacatcgccacctactactgcgccctctgggaggtc

SEQ ID NO: 1993 - RNA, 366 nt, synthetic construct
  misc_feature 1..366: note = CAA33345 variant
  source 1..366: mol_type = other RNA
atgctctccctcctccacacctccaccctcgccgtcctcggcgccctctgcgtctacggcgccggccacctcgagcagccccagatctcctccaccaagaccctctccaagaccgcccgcctcgagtgcgtcgtctccggcatcaagatctccgccacctccgtctactggtaccgcgagcgccccggcgaggtcatccagttcctcgtctccatctcctacgacggcaccgtccgcaaggagtccggcatcccctccggcaagttcgaggtcgaccgcatccccgagacctccacctccaccctcaccatccacaacgtcgagaagcaggacatcgccacctactactgcgccctctgggaggtc

SEQ ID NO: 1994 - RNA, 2382 nt, synthetic construct
  misc_feature 1..2382: note = AAA93251 variant
  source 1..2382: mol_type = other RNA
atgatggccgccctctacccctccaccgacctctccggcgcctcctcctcctccctcccctcctccccctcctcctcctcccccaacgaggtcatggccctcaaggacgtccgcgaggtcaaggaggagaacaccctcaacgagaagctcttcctcctcgcctgcgacaagggcgactactacatggtcaagaagatcctcgaggagaactcctccggcgacctcaacatcaactgcgtcgacgtcctcggccgcaacgccgtcaccatcaccatcgagaacgagaacctcgacatcctccagctcctcctcgactacggctgccagtccgccgacgccctcctcgtcgccatcgactccgaggtcgtcggcgccgtcgacatcctcctcaaccaccgccccaagcgctcctcccgccccaccatcgtcaagctcatggagcgcatccagaaccccgagtactccaccaccatggacgtcgcccccgtcatcctcgccgcccaccgcaacaactacgagatcctcaccatgctcctcaagcaggacgtctccctccccaagccccacgccgtcggctgcgagtgcaccctctgctccgccaagaacaagaaggactccctccgccactcccgcttccgcctcgacatctaccgctgcctcgcctcccccgccctcatcatgctcaccgaggaggaccccatcctccgcgccttcgagctctccgccgacctcaaggagctctccctcgtcgaggtcgagttccgcaacgactacgaggagctcgcccgccagtgcaagatgttcgccaaggacctcctcgcccaggcccgcaactcccgcgagctcgaggtcatcctcaaccacacctcctccgacgagcccctcgacaagcgcggcctcctcgaggagcgcatgaacctctcccgcctcaagctcgccatcaagtacaaccagaaggagttcgtctcccagtccaactgccagcagttcctcaacaccgtctggttcggccagatgtccggctaccgccgcaagcccacctgcaagaagatcatgaccgtcctcaccgtcggcatcttctggcccgtcctctccctctgctacctcatcgcccccaagtcccagttcggccgcatcatccacacccccttcatgaagttcatcatccacggcgcctcctacttcaccttcctcctcctcctcaacctctactccctcgtctacaacgaggacaagaagaacaccatgggccccgccctcgagcgcatcgactacctcctcatcctctggatcatcggcatgatctggtccgacatcaagcgcctctggtacgagggcctcgaggacttcctcgaggagtcccgcaaccagctctccttcgtcatgaactccctctacctcgccaccttcgccctcaaggtcgtcgcccacaacaagttccacgacttcgccgaccgcaaggactgggacgccttccaccccaccctcgtcgccgagggcctcttcgccttcgccaacgtcctctcctacctccgcctcttcttcatgtacaccacctcctccatcctcggccccctccagatctccatgggccagatgctccaggacttcggcaagttcctcggcatgttcctcctcgtcctcttctccttcaccatcggcctcacccagctctacgacaagggctacacctccaaggagcagaaggactgcgtcggcatcttctgcgagcagcagtccaacgacaccttccactccttcatcggcacctgcttcgccctcttctggtacatcttctccctcgcccacgtcgccatcttcgtcacccgcttctcctacggcgaggagctccagtccttcgtcggcgccgtcatcgtcggcacctacaacgtcgtcgtcgtcatcgtcctcaccaagctcctcgtcgccatgctccacaagtccttccagctcatcgccaaccacgaggacaaggagtggaagttcgcccgcgccaagctctggctctcctacttcgacgacaagtgcaccctccccccccccttcaacatcatcccctcccccaagaccatctgctacatgatctcctccctctccaagtggatctgctcccacacctccaagggcaaggtcaagcgccagaactccctcaaggagtggcgcaacctcaagcagaagcgcgacgagaactaccagaaggtcatgtgctgcctcgtccaccgctacctcacctccatgcgccagaagatgcagtccaccgaccaggccaccgtcgagaacctcaacgagctccgccaggacctctccaagttccgcaacgagatccgcgacctcctcggcttccgcacctccaagtacgccatgttctacccccgcaactga

SEQ ID NO: 1995 - RNA, 3315 nt, synthetic construct
  misc_feature 1..3315: note = AAZ73614 variant
  source 1..3315: mol_type = other RNA
atgtccttccgcgccgcccgcctctccatgcgcaaccgccgcaacgacaccctcgactccacccgcaccctctactcctccgcctcccgctccaccgacctctcctactccgagtccgacctcgtcaacttcatccaggccaacttcaagaagcgcgagtgcgtcttcttcaccaaggactccaaggccaccgagaacgtctgcaagtgcggctacgcccagtcccagcacatggagggcacccagatcaaccagtccgagaagtggaactacaagaagcacaccaaggagttccccaccgacgccttcggcgacatccagttcgagaccctcggcaagaagggcaagtacatccgcctctcctgcgacaccgacgccgagatcctctacgagctcctcacccagcactggcacctcaagacccccaacctcgtcatctccgtcaccggcggcgccaagaacttcgccctcaagccccgcatgcgcaagatcttctcccgcctcatctacatcgcccagtccaagggcgcctggatcctcaccggcggcacccactacggcctcatgaagtacatcggcgaggtcgtccgcgacaacaccatctcccgctcctccgaggagaacatcgtcgccatcggcatcgccgcctggggcatggtctccaaccgcgacaccctcatccgcaactgcgacgccgagggctacttcctcgcccagtacctcatggacgacttcacccgcgaccccctctacatcctcgacaacaaccacacccacctcctcctcgtcgacaacggctgccacggccaccccaccgtcgaggccaagctccgcaaccagctcgagaagtacatctccgagcgcaccatccaggactccaactacggcggcaagatccccatcgtctgcttcgcccagggcggcggcaaggagaccctcaaggccatcaacacctccatcaagaacaagatcccctgcgtcgtcgtcgagggctccggccagatcgccgacgtcatcgcctccctcgtcgaggtcgaggacgccctcacctcctccgccgtcaaggagaagctcgtccgcttcctcccccgcaccgtctcccgcctccccgaggaggagaccgagtcctggatcaagtggctcaaggagatcctcgagtgctcccacctcctcaccgtcatcaagatggaggaggccggcgacgagatcgtctccaacgccatctcctacgccctctacaaggccttctccacctccgagcaggacaaggacaactggaacggccagctcaagctcctcctcgagtggaaccagctcgacctcgccaacgacgagatcttcaccaacgaccgccgctgggagtccgccgacctccaggaggtcatgttcaccgccctcatcaaggaccgccccaagttcgtccgcctcttcctcgagaacggcctcaacctccgcaagttcctcacccacgacgtcctcaccgagctcttctccaaccacttctccaccctcgtctaccgcaacctccagatcgccaagaactcctacaacgacgccctcctcaccttcgtctggaagctcgtcgccaacttccgccgcggcttccgcaaggaggaccgcaacggccgcgacgagatggacatcgagctccacgacgtctcccccatcacccgccaccccctccaggccctcttcatctgggccatcctccagaacaagaaggagctctccaaggtcatctgggagcagacccgcggctgcaccctcgccgccctcggcgcctccaagctcctcaagaccctcgccaaggtcaagaacgacatcaacgccgccggcgagtccgaggagctcgccaacgagtacgagacccgcgccgtcgagctcttcaccgagtgctactcctccgacgaggacctcgccgagcagctcctcgtctactcctgcgaggcctggggcggctccaactgcctcgagctcgccgtcgaggccaccgaccagcacttcatcgcccagcccggcgtccagaacttcctctccaagcagtggtacggcgagatctcccgcgacaccaagaactggaagatcatcctctgcctcttcatcatccccctcgtcggctgcggcttcgtctccttccgcaagaagcccgtcgacaagcacaagaagctcctctggtactacgtcgccttcttcacctcccccttcgtcgtcttctcctggaacgtcgtcttctacatcgccttcctcctcctcttcgcctacgtcctcctcatggacttccactccgtcccccacccccccgagctcgtcctctactccctcgtcttcgtcctcttctgcgacgaggtccgccagtggtacgtcaacggcgtcaactacttcaccgacctctggaacgtcatggacaccctcggcctcttctacttcatcgccggcatcgtcttccgcctccactcctccaacaagtcctccctctactccggccgcgtcatcttctgcctcgactacatcatcttcaccctccgcctcatccacatcttcaccgtctcccgcaacctcggccccaagatcatcatgctccagcgcatgctcatcgacgtcttcttcttcctcttcctcttcgccgtctggatggtcgccttcggcgtcgcccgccagggcatcctccgccagaacgagcagcgctggcgctggatcttccgctccgtcatctacgagccctacctcgccatgttcggccaggtcccctccgacgtcgacggcaccacctacgacttcgcccactgcaccttcaccggcaacgagtccaagcccctctgcgtcgagctcgacgagcacaacctcccccgcttccccgagtggatcaccatccccctcgtctgcatctacatgctctccaccaacatcctcctcgtcaacctcctcgtcgccatgttcggctacaccgtcggcaccgtccaggagaacaacgaccaggtctggaagttccagcgctacttcctcgtccaggagtactgctcccgcctcaacatccccttccccttcatcgtcttcgcctacttctacatggtcgtcaagaagtgcttcaagtgctgctgcaaggagaagaacatggagtcctccgtctgctgcttcaagaacgaggacaacgagaccctcgcctgggagggcgtcatgaaggagaactacctcgtcaagatcaacaccaaggccaacgacacctccgaggagatgcgccaccgcttccgccagctcgacaccaagctcaacgacctcaagggcctcctcaaggagatcgccaacaagatcaagtga

SEQ ID NO: 1996 - RNA, 2097 nt, synthetic construct
  misc_feature 1..2097: note = AAK13079 variant
  source 1..2097: mol_type = other RNA
atgatgcgctcccgctccaagtccccccgccgcccctcccccaccgcccgcggcgccaactgcgacgtcgagctcctcaagaccaccacccgcgaccgcgaggagctcaagtgcatgctcgagaagtacgagcgccacctcgccgagatccagggcaacgtcaaggtcctcaagtccgagcgcgacaagatcttcctcctctacgagcaggcccaggaggagatcacccgcctccgccgcgagatgatgaagtcctgcaagtcccccaagtccaccaccgcccacgccatcctccgccgcgtcgagaccgagcgcgacgtcgccttcaccgacctccgccgcatgaccaccgagcgcgactccctccgcgagcgcctcaagatcgcccaggagaccgccttcaacgagaaggcccacctcgagcagcgcatcgaggagctcgagtgcaccgtccacaacctcgacgacgagcgcatggagcagatgtccaacatgaccctcatgaaggagaccatctccaccgtcgagaaggagatgaagtccctcgcccgcaaggccatggacaccgagtccgagctcggccgccagaaggccgagaacaactccctccgcctcctctacgagaacaccgagaaggacctctccgacacccagcgccacctcgccaagaagaagtacgagctccagctcacccaggagaagatcatgtgcctcgacgagaagatcgacaacttcacccgccagaacatcgcccagcgcgaggagatctccatcctcggcggcaccctcaacgacctcgccaaggagaaggagtgcctccaggcctgcctcgacaagaagtccgagaacatcgcctccctcggcgagtccctcgccatgaaggagaagaccatctccggcatgaagaacatcatcgccgagatggagcaggcctcccgccagtgcaccgaggccctcatcgtctgcgagcaggacgtctcccgcatgcgccgccagctcgacgagaccaacgacgagctcgcccagatcgcccgcgagcgcgacatcctcgcccacgacaacgacaacctccaggagcagttcgccaaggccaagcaggagaaccaggccctctccaagaagctcaacgacacccacaacgagctcaacgacatcaagcagaaggtccaggacaccaacctcgaggtcaacaagctcaagaacatcctcaagtccgaggagtccgagaaccgccagatgatggagcagctccgcaaggccaacgaggacgccgagaactgggagaacaaggcccgccagtccgaggccgacaacaacaccctcaagctcgagctcatcaccgccgaggccgagggcaaccgcctcaaggagaaggtcgactccctcaaccgcgaggtcgagcagcacctcaacgccgagcgctcctacaagtcccagatctccaccctccacaagtccgtcgtcaagatggaggaggagctccagaaggtccagttcgagaaggtctccgccctcgccgacctctcctccacccgcgagctctgcatcaagctcgactcctccaaggagctcctcaaccgccagctcgtcgccaaggaccaggagatcgagatgcgcgagaacgagctcgactccgcccactccgagatcgagctcctccgctcccagatggccaacgagcgcatctccatgcagaacctcgaggccctcctcgtcgccaaccgcgacaaggagtaccagtcccagatcgccctccaggagaaggagtccgagatccagctcctcaaggagcacctctgcctcgccgagaacaagatggccatccagtcccgcgacgtcgcccagttccgcaacgtcgtcacccagctcgaggccgacctcgacatcaccaagcgccagctcggcaccgagcgcttcgagcgcgagcgcgccgtccaggagctccgccgccagaactactcctccaacgcctaccacatgtcctccaccatgaagcccaacaccaagtgccactcccccgagcgcgcccaccaccgctcccccgaccgcggcctcgaccgctccctcgaggagaacctctgctaccgcgacttctga

SEQ ID NO: 1997 - RNA, 927 nt, synthetic construct
  misc_feature 1..927: note = CCDS48205.1 variant
  source 1..927: mol_type = other RNA
atgcgccccgagggctccctcacctaccgcgtccccgagcgcctccgccagggcttctgcggcgtcggccgcgccgcccaggccctcgtctgcgcctccgccaaggagggcaccgccttccgcatggaggccgtccaggagggcgccgccggcgtcgagtccgagcaggccgccctcggcgaggaggccgtcctcctcctcgacgacatcatggccgaggtcgaggtcgtcgccgaggaggagggcctcgtcgagcgccgcgaggaggcccagcgcgcccagcaggccgtccccggccccggccccatgacccccgagtccgcccccgaggagctcctcgccgtccaggtcgagctcgagcccgtcaacgcccaggcccgcaaggccttctcccgccagcgcgagaagatggagcgccgccgcaagccccacctcgaccgccgcggcgccgtcatccagtccgtccccggcttctgggccaacgtcatcgccaaccacccccagatgtccgccctcatcaccgacgaggacgaggacatgctctcctacatggtctccctcgaggtcggcgaggagaagcaccccgtccacctctgcaagatcatgctcttcttccgctccaacccctacttccagaacaaggtcatcaccaaggagtacctcgtcaacatcaccgagtaccgcgcctcccactccacccccatcgagtggtaccccgactacgaggtcgaggcctaccgccgccgccaccacaactcctccctcaacttcttcaactggttctccgaccacaacttcgccggctccaacaagatcgccgagatcctctgcaaggacctctggcgcaaccccctccagtactacaagcgcatgaagccccccgaggagggcaccgagacctccggcgactcccagctcctctcctga

SEQ ID NO: 1998 - RNA, 369 nt, synthetic construct
  misc_feature 1..369: note = M13231.1 variant
  source 1..369: mol_type = other RNA
atgcgctgggccctcctcgtcctcctcgccttcctctcccccgcctcccagaagtcctccaacctcgagggccgcaccaagtccgtcacccgccagaccggctcctccgccgagatcacctgcgacctcaccgtcaccaacaccttctacatccactggtacctccaccaggagggcaaggccccccagcgcctcctctactacgacgtctccaccgcccgcgacgtcctcgagtccggcctctcccccggcaagtactacacccacaccccccgccgctggtcctggatcctccgcctccagaacctcatcgagaacgactccggcgtctactactgcgccacctgggaccgccagaagctcctctga

SEQ ID NO: 1999 - RNA, 804 nt, synthetic construct
  misc_feature 1..804: note = CCDS12619.1 variant
  source 1..804: mol_type = other RNA
atgggcgcccgccagatccagacctcctcctcccagacctcccccgaggaggccatgggcaccccccgcatccagcacctcctcatcctcctcgtcctcggcgcctccctcctcacctccggcctcgagctctactgccagaagggcctctccatgaccgtcgaggccgaccccgccaacatgttcaactggaccaccgaggaggtcgagacctgcgacaagggcgccctctgccaggagaccatcctcatcatcaaggccggcaccgagaccgccatcctcgccaccaagggctgcatccccgagggcgaggaggccatcaccatcgtccagcactcctccccccccggcctcatcgtcacctcctactccaactactgcgaggactccttctgcaacgacaaggactccctctcccagttctgggagttctccgagaccaccgcctccaccgtctccaccaccctccactgccccacctgcgtcgccctcggcacctgcttctccgccccctccctcccctgccccaacggcaccacccgctgctaccagggcaagctcgagatcaccggcggcggcatcgagtcctccgtcgaggtcaagggctgcaccgccatgatcggctgccgcctcatgtccggcatcctcgccgtcggccccatgttcgtccgcgaggcctgcccccaccagctcctcacccagccccgcaagaccgagaacggcgccacctgcctccccatccccgtctggggcctccagctcctcctccccctcctcctcccctccttcatccacttctcctga

SEQ ID NO: 2000 - RNA, 1590 nt, synthetic construct
  misc_feature 1..1590: note = AHZ44440 variant
  source 1..1590: mol_type = other RNA
atgctcctcgccgtcctctactgcctcctctggtccttccagacctccgccggccacttcccccgcgcctgcgtctcctccaagaacctcatggagaaggagtgctgccccccctggtccggcgaccgctccccctgcggccagctctccggccgcggctcctgccagaacatcctcctctccaacgcccccctcggcccccagttccccttcaccggcgtcgacgaccgcgagtcctggccctccgtcttctacaaccgcacctgccagtgctccggcaacttcatgggcttcaactgcggcaactgcaagttcggcttctggggccccaactgcaccgagcgccgcctcctcgtccgccgcaacatcttcgacctctccgcccccgagaaggacaagttcttcgcctacctcaccctcgccaagcacaccatctcctccgactacgtcatccccatcggcacctacggccagatgaagaacggctccacccccatgttcaacgacatcaacatctacgacctcttcgtctggatgcactactacgtctccatggacgccctcctcggcggctccgagatctggcgcgacatcgacttcgcccacgaggcccccgccttcctcccctggcaccgcctcttcctcctccgctgggagcaggagatccagaagctcaccggcgacgagaacttcaccatcccctactgggactggcgcgacgccgagaagtgcgacatctgcaccgacgagtacatgggcggccagcaccccaccaaccccaacctcctctcccccgcctccttcttctcctcctggcagatcgtctgctcccgcctcgaggagtacaactcccaccagtccctctgcaacggcacccccgagggccccctccgccgcaaccccggcaaccacgacaagtcccgcaccccccgcctcccctcctccgccgacgtcgagttctgcctctccctcacccagtacgagtccggctccatggacaaggccgccaacttctccttccgcaacaccctcgagggcttcgcctcccccctcaccggcatcgccgacgcctcccagtcctccatgcacaacgccctccacatctacatgaacggcaccatgtcccaggtccagggctccgccaacgaccccatcttcctcctccaccacgccttcgtcgactccatcttcgagcagtggctccgccgccaccgccccctccaggaggtctaccccgaggccaacgcccccatccgccacaaccgcgagtcctacatggtccccttcatccccctctaccgcaacggcgacttcttcatctcctccaaggacctcggctacgactactcctacctccaggactccgaccccgactccttccaggactacatcaagtcctacctcgagcaggcctcccgcatctggtcctggctcctcggcgccgccatggtcggcgccgtcctcaccgccctcctcgccggcctcgtctccctcctctgccgccacaagcgcaagcagctccccgaggagaagcagcccctcctcatggagaaggaggactaccactccctctaccagtcccacctctga

SEQ ID NO: 2001 - RNA, 1590 nt, synthetic construct
  misc_feature 1..1590: note = AGV39051 variant
  source 1..1590: mol_type = other RNA
atgctcctcgccgtcctctactgcctcctctggtccttccagacctccgccggccacttcccccgcgcctgcgtctcctccaagaacctcatggagaaggagtgctgccccccctggtccggcgaccgctccccctgcggccagctctccggccgcggctcctgccagaacatcctcctctccaacgcccccctcggcccccagttccccttcaccggcgtcgacgaccgcgagtcctggccctccgtcttctacaaccgcacctgccagtgctccggcaacttcatgggcttcaactgcggcaactgcaagttcggcttctggggccccaactgcaccgagcgccgcctcctcgtccgccgcaacatcttcgacctctccgcccccgagaaggacaagttcttcgcctacctcaccctcgccaagcacaccatctcctccgactacgtcatccccatcggcacctacggccagatgaagaacggctccacccccatgttcaacgacatcaacatctacgacctcttcgtctggatgcactactacgtctccatggacgccctcctcggcggctccgagatctggcgcgacatcgacttcgcccacgaggcccccgccttcctcccctggcaccgcctcttcctcctccgctgggagcaggagatccagaagctcaccggcgacgagaacttcaccatcccctactgggactggcgcgacgccgagaagtgcgacatctgcaccgacgagtacatgggcggccagcaccccaccaaccccaacctcctctcccccgcctccttcttctcctcctggcagatcgtctgctcccgcctcgaggagtacaactcccaccagtccctctgcaacggcacccccgagggccccctccgccgcaaccccggcaaccacgacaagtcccgcaccccccgcctcccctcctccgccgacgtcgagttctgcctctccctcacccagtacgagtccggctccatggacaaggccgccaacttctccttccgcaacaccctcgagggcttcgcctcccccctcaccggcatcgccgacgcctcccagtcctccatgcacaacgccctccacatctacatgaacggcaccatgtcccaggtccagggctccgccaacgaccccatcttcctcctccaccacgccttcgtcgactccatcttcgagcagtggctccgccgccaccgccccctccaggaggtctaccccgaggccaacgcccccatcggccacaaccgcgagtcctacatggtccccttcatccccctctaccgcaacggcgacttcttcatctcctccaaggacctcggctacgactactcctacctccaggactccgaccccgactccttccaggactacatcaagtcctacctcgagcaggcctcccgcatctggtcctggctcctcggcgccgccatggtcggcgccgtcctcaccgccctcctcgccggcctcgtctccctcctctgccgccacaagcgcaagcagctccccgaggagaagcagcccctcctcatggagaaggaggactaccactccctctaccagtcccacctctga

SEQ ID NO: 2002 - RNA, 1590 nt, synthetic construct
  misc_feature 1..1590: note = AGV39049 variant
  source 1..1590: mol_type = other RNA
atgctcctcgccgtcctctactgcctcctctggtccttccagacctccgccggccacttcccccgcgcctgcgtctcctccaagaacctcatggagaaggagtgctgccccccctggtccggcgaccgctccccctgcggccagctctccggccgcggctcctgccagaacatcctcctctccaacgcccccctcggcccccagttccccttcaccggcgtcgacgaccgcgagtcctggccctccgtcttctacaaccgcacctgccagtgctccggcaacttcatgggcttcaactgcggcaactgcaagttcggcttctggggccccaactgcaccgagcgccgcctcctcgtccgccgcaacatcttcgacctctccgcccccgagaaggacaagttcttcgcctacctcaccctcgccaagcacaccatctcctccgactacgtcatccccatcggcacctacggccagatgaagaacggctccacccccatgttcaacgacatcaacatctacgacctcttcgtctggatgcactactacgtctccatggacgccctcctcggcggctccgagatctggcgcgacatcgacttcgcccacgaggcccccgccttcctcccctggcaccgcctcttcctcctccgctgggagcaggagatccagaagctcaccggcgacgagaacttcaccatcccctactgggactggcgcgacgccgagaagtgcgacatctgcaccgacgagtacatgggcggccagcaccccaccaaccccaacctcctctcccccgcctccttcttctcctcctggcagatcgtctgctcccgcctcgaggagtacaactcccaccagtccctctgcaacggcacccccgagggccccctccgccgcaaccccggcaaccacgacaagtcccgcaccccccgcctcccctcctccgccgacgtcgagttctgcctctccctcacccagtacgagtccggctccatggacaaggccgccaacttctccttccgcaacaccctcgagggcttcgcctcccccctcaccggcatcgccgacgcctcccagtcctccatgcacaacgccctccacatctacatgaacggcaccatgtcccaggtccagggctccgccaacgaccccatcttcctcctccaccacgccttcgtcgactccatcttcgagcagtggctccagcgccaccgccccctccaggaggtctaccccgaggccaacgcccccatcggccacaaccgcgagtcctacatggtccccttcatccccctctaccgcaacggcgacttcttcatctcctccaaggacctcggctacgactactcctacctccaggactccgaccccgactccttccaggactacatcaagtcctacctcgagcaggcctcccgcatctggtcctggctcctcggcgccgccatggtcggcgccgtcctcaccgccctcctcgccggcctcgtctccctcctctgccgccacaagcgcaagcagctccccgaggagaagcagcccctcctcatggagaaggaggactaccactccctctaccagtcccacctctga

SEQ ID NO: 2003 - RNA, 1590 nt, synthetic construct
  misc_feature 1..1590: note = AGV39050 variant
  source 1..1590: mol_type = other RNA
atgctcctcgccgtcctctactgcctcctctggtccttccagacctccgccggccacttcccccgcgcctgcgtctcctccaagaacctcatggagaaggagtgctgccccccctggtccggcgaccgctccccctgcggccagctctccggccgcggctcctgccagaacatcctcctctccaacgcccccctcggcccccagttccccttcaccggcgtcgacgaccgcgagtcctggccctccgtcttctacaaccgcacctgccagtgctccggcaacttcatgggcttcaactgcggcaactgcaagttcggcttctggggccccaactgcaccgagcgccgcctcctcgtccgccgcaacatcttcgacctctccgcccccgagaaggacaagttcttcgcctacctcaccctcgccaagcacaccatctcctccgactacgtcatccccatcggcacctacggccagatgaagaacggctccacccccatgttcaacgacatcaacatctacgacctcttcgtctggatgcactactacgtctccatggacgccctcctcggcggctacgagatctggcgcgacatcgacttcgcccacgaggcccccgccttcctcccctggcaccgcctcttcctcctccgctgggagcaggagatccagaagctcaccggcgacgagaacttcaccatcccctactgggactggcgcgacgccgagaagtgcgacatctgcaccgacgagtacatgggcggccagcaccccaccaaccccaacctcctctcccccgcctccttcttctcctcctggcagatcgtctgctcccgcctcgaggagtacaactcccaccagtccctctgcaacggcacccccgagggccccctccgccgcaaccccggcaaccacgacaagtcccgcaccccccgcctcccctcctccgccgacgtcgagttctgcctctccctcacccagtacgagtccggctccatggacaaggccgccaacttctccttccgcaacaccctcgagggcttcgcctcccccctcaccggcatcgccgacgcctcccagtcctccatgcacaacgccctccacatctacatgaacggcaccatgtcccaggtccagggctccgccaacgaccccatcttcctcctccaccacgccttcgtcgactccatcttcgagcagtggctccgccgccaccgccccctccaggaggtctaccccgaggccaacgcccccatcggccacaaccgcgagtcctacatggtccccttcatccccctctaccgcaacggcgacttcttcatctcctccaaggacctcggctacgactactcctacctccaggactccgaccccgactccttccaggactacatcaagtcctacctcgagcaggcctcccgcatctggtcctggctcctcggcgccgccatggtcggcgccgtcctcaccgccctcctcgccggcctcgtctccctcctctgccgccacaagcgcaagcagctccccgaggagaagcagcccctcctcatggagaaggaggactaccactccctctaccagtcccacctctga

SEQ ID NO: 2004 - RNA, 714 nt, synthetic construct
  misc_feature 1..714: note = CAA04137 variant
  source 1..714: mol_type = other RNA
atgtcccccctctggtggggcttcctcctctcctgcctcggctgcaagatcctccccggcgcccagggccagttcccccgcgtctgcatgaccgtcgactccctcgtcaacaaggagtgctgcccccgcctcggcgccgagtccgccaacgtctgcggctcccagcagggccgcggccagtgcaccgaggtccgcgccgacacccgcccctggtccggcccctacatcctccgcaaccaggacgaccgcgagctctggccccgcaagttcttccaccgcacctgcaagtgcaccggcaacttcgccggctacaactgcggcgactgcaagttcggctggaccggccccaactgcgagcgcaagaagccccccgtcatccgccagaacatccactccctctccccccaggagcgcgagcagttcctcggcgccctcgacctcgccaagaagcgcgtccaccccgactacgtcatcaccacccagcactgggtcggcctcctcggccccaacggcacccagccccagttcgccaactgctccgtctacgacttcttcgtctggctccactactactccgtccgcgacaccctcctcggcggcttcttcccctggctcaaggtctactactaccgcttcgtcatcggcctccgcgtctggcagtgggaggtcatctcctgcaagctcatcaagcgcgccaccacccgccagccctga

SEQ ID NO: 2005 - RNA, 1590 nt, synthetic construct; identical to SEQ ID NO: 2001
  misc_feature 1..1590: note = AAA61242 variant
  source 1..1590: mol_type = other RNA

SEQ ID NO: 2006 - RNA, 1590 nt, synthetic construct
  misc_feature 1..1590: note = AGV39054 variant
  source 1..1590: mol_type = other RNA
atgctcctcgccgtcctctactgcctcctctggtccttccagacctccgccggccacttcccccgcgcctgcgtctcctccaagaacctcatggagaaggagtgctgccccccctggtccggcgaccgctccccctgcggccagctctccggccgcggctcctgccagaacatcctcctctccaacgcccccctcggcccccagttccccttcaccggcgtcgacgaccgcgagtcctggccctccgtcttctacaaccgcacctgccagtgctccggcaacttcatgggcttcaactgcggcaactgcaagttcggcttctggggccccaactgcaccgagcgccgcctcctcgtccgccgcaacatcttcgacctctccgcccccgagaaggacaagttcttcgcctacctcaccctcgccaagcacaccatctcctccgactacgtcatccccatcggcacctacggccagatgaagaacggctccacccccatgttcaacgacatcaacatctacgacctcttcgtctggatgcactactacgtctccatggacgccctcctcggcggctccgagatctggcgcgacatcgacttcgcccacgaggcccccgccttcctcccctggcaccgcctcttcctcctccgctgggagcaggagatccagaagctcaccggcgacgagaacttcaccatcccctactgggactggcgcgacgccgagaagtgcgacatctgcaccgacgagtacgtcggcggccagcaccccaccaaccccaacctcctctcccccgcctccttcttctcctcctggcagatcgtctgctcccgcctcgaggagtacaactcccaccagtccctctgcaacggcacccccgagggccccctccgccgcaaccccggcaaccacgacaagtcccgcaccccccgcctcccctcctccgccgacgtcgagttctgcctctccctcacccagtacgagtccggctccatggacaaggccgccaacttctccttccgcaacaccctcgagggcttcgcctcccccctcaccggcatcgccgacgcctcccagtcctccatgcacaacgccctccacatctacatgaacggcaccatgtcccaggtccagggctccgccaacgaccccatcttcctcctccaccacgccttcgtcgactccatcttcgagcagtggctccgccgccaccgccccctccaggaggtctaccccgaggccaacgcccccatcggccacaaccgcgagtcctacatggtccccttcatccccctctaccgcaacggcgacttcttcatctcctccaaggacctcggctacgactactcctacctccaggactccgaccccgactccttccaggactacatcaagtcctacctcgagcaggcctcccgcatctggtcctggctcctcggcgccgccatggtcggcgccgtcctcaccgccctcctcgccggcctcgtctccctcctctgccgccacaagcgcaagcagctccccgaggagaagcagcccctcctcatggagaaggaggactaccactccctctaccagtcccacctctga

SEQ ID NO: 2007 - RNA, 1590 nt, synthetic construct
  misc_feature 1..1590: note = AGV39162 variant
  source 1..1590: mol_type = other RNA
atgctcctcgccgtcctctactgcctcctctggtccttccagacctccgccggccacttcccccgcgcctgcgtctcctccaagaacctcatggagaaggagtgctgccccccctggtccggcgaccgctccccctgcggccagctctccggccgcggctcctgccagaacatcctcctctccaacgcccccctcggcccccagttccccttcaccggcgtcgacgaccgcgagtcctggccctccgtcttctacaaccgcacctgccagtgctccggcaacttcatgggcttcaactgcggcaactgcaagttcggcttctggggccccaactgcaccgagcgccgcctcctcgtccgccgcaacatcttcgacctctccgcccccgagaaggacaagttcttcgcctacctcaccctcgccaagcacaccatctcctccgactacgtcatccccatcggcacctacggccagatgaagaacggctccacccccatgttcaacgacatcaacatctacgacctcttcgtctggatgcactactacgtctccatggacgccctcctcggcggctccgagatctggcgcgacatcgacttcgcccacgaggcccccgccttcctcccctggcaccgcctcttcctcctccgctgggagcaggagatccagaagctcaccggcgacgagaacttcaccatcccctactgggactggcgcgacgccgagaagtgcgacatctgcaccgacgagtacatgggcggccagcaccccaccaaccccaacctcctctcccccgcctccttcttctcctcctggcagatcgtctgctcccgcctcgaggagtacaactcccaccagtccctctgcaacggcacccccgagggccccctccgccgcaaccccggcaaccacgacaagtcccgcaccccccgcctcccctcctccgccgacgtcgagttctgcctctccctcacccagtacgagtccggctccatggacaaggccgccaacttctccttccgcaacaccctcgagggcttcgcctcccccctcaccggcatcgccgacgcctcccagtcctccatgcacaacgccctccacatctacatgaacggcaccatgtcccaggtccagggctccgccaacgaccccatcttcctcctccaccacgccttcgtcgactccatcttcgagcagtggctccgccgccaccgcctcctccaggaggtctaccccgaggccaacgcccccatcggccacaaccgcgagtcctacatggtccccttcatccccctctaccgcaacggcgacttcttcatctcctccaaggacctcggctacgactactcctacctccaggactccgaccccgactccttccaggactacatcaagtcctacctcgagcaggcctcccgcatctggtcctggctcctcggcgccgccatggtcggcgccgtcctcaccgccctcctcgccggcctcgtctccctcctctgccgccacaagcgcaagcagctccccgaggagaagcagcccctcctcatggagaaggaggactaccactccctctaccagtcccacctctga

SEQ ID NO: 2008 - RNA, 1590 nt, synthetic construct
  misc_feature 1..1590: note = AGV39086 variant
  source 1..1590: mol_type = other RNA
atgctcctcgccgtcctctactgcctcctctggtccttccagacctccgccggccacttcccccgcgcctgcgtctcctccaagaacctcatggagaaggagtgctgccccccctggtccggcgaccgctccccctgcggccagctctccggccgcggctcctgccagaacatcctcctctccaacgcccccctcggcccccagttccccttcaccggcgtcgacgaccgcgagtcctggccctccgtcttctacaaccgcacctgccagtgctccggcaacttcatgggcttcaactgcggcaactgcaagttcggcttctggggccccaactgcaccgagcgccgcctcctcgtccgccgcaacatcttcgacctctccgcccccgagaaggacaagttcttcgcctacctcaccctcgccaagcacaccatctcctccgactacgtcatccccatcggcacctacggccagatgaagaacggctccacccccatgttcaacgacatcaacatctacgacctcttcgtctggatgcactactacgtctccatggacgccctcctcggcggctccgagatctggcgcgacatcgacttcgcccacgaggcccccgccttcctcccctggcaccgcctcttcctcctccgctgggagcaggagatccagaagctcaccggcgacgagaacttcaccatcccctactgggactggcgcgacgccgagaagtgcgacatctgcaccgacgagtacatgggcggccagcaccccaccaaccccaacctcctctcccccgcctccttcttctcctcctggcagatcgtctgctcccgcctcgaggagtacaactcccaccagtccctctgcaacggcacccccgagggccccctccgccgcaaccccggcaaccacgacaagtcccgcaccccccgcctcccctcctccgccgacgtcgagttctgcctctccctcacccagtacgagtccggctccatggacaaggccgccaacttctccttccgcaacaccctcgagggcttcgcctcccccctcaccggcatcgccgacgcctcccagtcctccatgcacaacgccctccacatctacatgaacggcaccatgtcccaggtccagggctccgccaacgaccccatcttcctcctccaccacgccttcgtcgactccatgttcgagcagtggctccgccgccaccgccccctccaggaggtctaccccgaggccaacgcccccatcggccacaaccgcgagtcctacatggtccccttcatccccctctaccgcaacggcgacttcttcatctcctccaaggacctcggctacgactactcctacctccaggactccgaccccgactccttccaggactacatcaagtcctacctcgagcaggcctcccgcatctggtcctggctcctcggcgccgccatggtcggcgccgtcctcaccgccctcctcgccggcctcgtctccctcctctgccgccacaagcgcaagcagctccccgaggagaagcagcccctcctcatggagaaggaggactaccactccctctaccagtcccacctctga

SEQ ID NO: 2009 - RNA, 1614 nt, synthetic construct
  misc_feature 1..1614: note = AAC15468 variant
  source 1..1614: mol_type = other RNA
atgtccgcccccaagctcctctccctcggctgcatcttcttccccctcctcctcttccagcaggcccgcgcccagttcccccgccagtgcgccaccgtcgaggccctccgctccggcatgtgctgccccgacctctcccccgtctccggccccggcaccgaccgctgcggctcctcctccggccgcggccgctgcgaggccgtcaccgccgactcccgcccccactccccccagtacccccacgacggccgcgacgaccgcgaggtctggcccctccgcttcttcaaccgcacctgccactgcaacggcaacttctccggccacaactgcggcacctgccgccccggctggcgcggcgccgcctgcgaccagcgcgtcctcatcgtccgccgcaacctcctcgacctctccaaggaggagaagaaccacttcgtccgcgccctcgacatggccaagcgcaccacccaccccctcttcgtcatcgccacccgccgctccgaggagatcctcggccccgacggcaacaccccccagttcgagaacatctccatctacaactacttcgtctggacccactactactccgtcaagaagaccttcctcggcgtcggccaggagtccttcggcgaggtcgacttctcccacgagggccccgccttcctcacctggcaccgctaccacctcctccgcctcgagaaggacatgcaggagatgctccaggagccctccttctccctcccctactggaacttcgccaccggcaagaacgtctgcgacatctgcaccgacgacctcatgggctcccgctccaacttcgactccaccctcatctcccccaactccgtcttctcccagtggcgcgtcgtctgcgactccctcgaggactacgacaccctcggcaccctctgcaactccaccgaggacggccccatccgccgcaaccccgccggcaacgtcgcccgccccatggtccagcgcctccccgagccccaggacgtcgcccagtgcctcgaggtcggcctcttcgacaccccccccttctactccaactccaccaactccttccgcaacaccgtcgagggctactccgaccccaccggcaagtacgaccccgccgtccgctccctccacaacctcgcccacctcttcctcaacggcaccggcggccagacccacctctcccccaacgaccccatcttcgtcctcctccacaccttcaccgacgccgtcttcgacgagtggctccgccgctacaacgccgacatctccaccttccccctcgagaacgcccccatcggccacaaccgccagtacaacatggtccccttctggccccccgtcaccaacaccgagatgttcgtcaccgcccccgacaacctcggctacacctacgagatccagtggccctcccgcgagttctccgtccccgagatcatcgccatcgccgtcgtcggcgccctcctcctcgtcgccctcatcttcggcaccgcctcctacctcatccgcgcccgccgctccatggacgaggccaaccagcccctcctcaccgaccagtaccagtgctacgccgaggagtacgagaagctccagaaccccaaccagtccgtcgtctga

SEQ ID NO: 2010 - RNA, 1560 nt, synthetic construct
  misc_feature 1..1560: note = AAA20870 variant
  source 1..1560: mol_type = other RNA
atgtcccccctctggtggggcttcctcctctcctgcctcggctgcaagatcctccccggcgcccagggccagttcccccgcgtctgcatgaccgtcgactccctcgtcaacaaggagtgctgcccccgcctcggcgccgagtccgccaacgtctgcggctcccagcagggccgcggccagtgcaccgaggtccgcgccgacacccgcccctggtccggcccctacatcctccgcaaccaggacgaccgcgagctctggccccgcaagttcttccaccgcacctgcaagtgcaccggcaacttcgccggctacaactgcggcgactgcaagttcggctggaccggccccaactgcgagcgcaagaagccccccgtcatccgccagaacatccactccctctccccccaggagcgcgagcagttcctcggcgccctcgacctcgccaagaagcgcgtccaccccgactacgtcatcaccacccagcactggctcggcctcctcggccccaacggcacccagccccagttcgccaactgctccgtctacgacttcttcgtctggctccactactactccgtccgcgacaccctcctcggccccggccgcccctaccgcgccatcgacttctcccaccagggccccgccttcgtcacctggcaccgctaccacctcctctgcctcgagcgcgacctccagcgcctcatcggcaacgagtccttcgccctcccctactggaacttcgccaccggccgcaacgagtgcgacgtctgcaccgaccagctcttcggcgccgcccgccccgacgaccccaccctcatctcccgcaactcccgcttctcctcctgggagaccgtctgcgactccctcgacgactacaaccacctcgtcaccctctgcaacggcacctacgagggcctcctccgccgcaaccagatgggccgcaactccatgaagctccccaccctcaaggacatccgcgactgcctctccctccagaagttcgacaacccccccttcttccagaactccaccttctccttccgcaacgccctcgagggcttcgacaaggccgacggcaccctcgactcccaggtcatgtccctccacaacctcgtccactccttcctcaacggcaccaacgccctcccccactccgccgccaacgaccccatcttcgtcgtcctccactccttcaccgacgccatcttcgacgagtggatgaagcgcttcaacccccccgccgacgcctggccccaggagctcgcccccatcggccacaaccgcatgtacaacatggtccccttcttcccccccgtcaccaacgaggagctcttcctcacctccgaccagctcggctactcctacgccatcgacctccccgtctccgtcgaggagacccccggctggcccaccaccctcctcgtcgtcatgggcaccctcgtcgccctcgtcggcctcttcgtcctcctcgccttcctccagtaccgccgcctccgcaagggctacacccccctcatggagacccacctctcctccaagcgctacaccgaggaggcctga

SEQ ID NO: 2011 - RNA, 456 nt, synthetic construct
  misc_feature 1..456: note = CCDS7679.1 variant
  source 1..456: mol_type = other RNA
atgcgccgcctcctcctcgtcacctccctcgtcgtcgtcctcctctgggaggccggcgccgtccccgcccccaaggtccccatcaagatgcaggtcaagcactggccctccgagcaggaccccgagaaggcctggggcgcccgcgtcgtcgagccccccgagaaggacgaccagctcgtcgtcctcttccccgtccagaagcccaagctcctcaccaccgaggagaagccccgcggccagggccgcggccccatcctccccggcaccaaggcctggatggagaccgaggacaccctcggccacgtcctctcccccgagcccgaccacgactccctctaccaccccccccccgaggaggaccagggcgaggagcgcccccgcctctgggtcatgcccaaccaccaggtcctcctcggccccgaggaggaccaggaccacatctaccacccccagtga

SEQ ID NO: 2012 - RNA, 525 nt, synthetic construct
  misc_feature 1..525: note = ACF47598 variant
  source 1..525: mol_type = other RNA
atggtctcctactgggacaccggcgtcctcctctgcgccctcctctcctgcctcctcctcaccggctcctcctccggctccaagctcaaggaccccgagctctccctcaagggcacccagcacatcatgcaggccggccagaccctccacctccagtgccgcggcgaggccgcccacaagtggtccctccccgagatggtctccaaggagtccgagcgcctctccatcaccaagtccgcctgcggccgcaacggcaagcagttctgctccaccctcaccctcaacaccgcccaggccaaccacaccggcttctactcctgcaagtacctcgccgtccccacctccaagaagaaggagaccgagtccgccatctacatcttcatctccgacaccggccgccccttcgtcgagatgtactccgagatccccgagatcatccacatgaccgagggccgcgagctcgtcatcccctgccgcgtcacctcccccaacatcaccgtcaccctcaagaagaagaaggcctga

SEQ ID NO: 2013 - RNA, 750 nt, synthetic construct
  misc_feature 1..750: note = BAR92607 variant
  source 1..750: mol_type = other RNA
atgggctccgacgtccgcgacctcaacgccctcctccccgccgtcccctccctcggcggcggcggcggctgcgccctccccgtctccggcgccgcccagtgggcccccgtcctcgacttcgccccccccggcgcctccgcctacggctccctcggcggccccgcccccccccccgccccccccccccccccccccccccccccccactccttcatcaagcaggagccctcctggggcggcgccgagccccacgaggagcagtgcctctccgccttcaccgtccacttctccggccagttcaccggcaccgccggcgcctgccgctacggccccttcggccccccccccccctcccaggcctcctccggccaggcccgcatgttccccaacgccccctacctcccctcctgcctcgagtcccagcccgccatccgcaaccagggctactccaccgtcaccttcgacggcaccccctcctacggccacaccccctcccaccacgccgcccagttccccaaccactccttcaagcacgaggaccccatgggccagcagggctccctcggcgagcagcagtactccgtccccccccccgtctacggctgccacacccccaccgactcctgcaccggctcccaggccctcctcctccgcaccccctactcctccgacaacctctaccagatgacctcccagctcgagtgcatgacctggaaccagatgaacctcggcgccaccctcaagggctga

SEQ ID NO: 2014 - RNA, 1350 nt, synthetic construct
  misc_feature 1..1350: note = AAA61299 variant
  source 1..1350: mol_type = other RNA
atgggctccgacgtccgcgacctcaacgccctcctccccgccgtcccctccctcggcggcggcggcggctgcgccctccccgtctccggcgccgcccagtgggcccccgtcctcgacttcgccccccccggcgcctccgcctacggctccctcggcggccccgcccccccccccgccccccccccccccccccccccccccccccactccttcatcaagcaggagccctcctggggcggcgccgagccccacgaggagcagtgcctctccgccttcaccgtccacttctccggccagttcaccggcaccgccggcgcctgccgctacggccccttcggccccccccccccctcccaggcctcctccggccaggcccgcatgttccccaacgccccctacctcccctcctgcctcgagtcccagcccgccatccgcaaccagggctactccaccgtcaccttcgacggcaccccctcctacggccacaccccctcccaccacgccgcccagttccccaaccactccttcaagcacgaggaccccatgggccagcagggctccctcggcgagcagcagtactccgtccccccccccgtctacggctgccacacccccaccgactcctgcaccggctcccaggccctcctcctccgcaccccctactcctccgacaacctctaccagatgacctcccagctcgagtgcatgacctggaaccagatgaacctcggcgccaccctcaagggcgtcgccgccggctcctcctcctccgtcaagtggaccgagggccagtccaaccactccaccggctacgagtccgacaaccacaccacccccatcctctgcggcgcccagtaccgcatccacacccacggcgtcttccgcggcatccaggacgtccgccgcgtccccggcgtcgcccccaccctcgtccgctccgcctccgagacctccgagaagcgccccttcatgtgcgcctaccccggctgcaacaagcgctacttcaagctctcccacctccagatgcactcccgcaagcacaccggcgagaagccctaccagtgcgacttcaaggactgcgagcgccgcttctcccgctccgaccagctcaagcgccaccagcgccgccacaccggcgtcaagcccttccagtgcaagacctgccagcgcaagttctcccgctccgaccacctcaagacccacacccgcacccacaccggcaagacctccgagaagcccttctcctgccgctggccctcctgccagaagaagttcgcccgctccgacgagctcgtccgccaccacaacatgcaccagcgcaacatgaccaagctccagctcgccctctga

SEQ ID NO: 2015 - RNA, 279 nt, synthetic construct
  misc_feature 1..279: note = AAA63269 variant
  source 1..279: mol_type = other RNA
atgcagcgccgcggccagcccctcgagaaccacgtcgccctcatccactggcagtccgccggcatccccgcctccaaggtccacaactactgcaacatgaagaagtcccgcctcggccgctcccgcgccgtccgcatctcccagcccctcctctccccccgccgctgccccctccacctcaccgagcgcggcgccggcctcctccagccccagccccagggccccgtccgcacccccggccccccctccggctcccaccccgccgccgccgacaactga

SEQ ID NO: 2016 - RNA, 246 nt, synthetic construct
  misc_feature 1..246: note = AAP35763 variant
  source 1..246: mol_type = other RNA
atggagtcccccaagaagaagaaccagcagctcaaggtcggcatcctccacctcggctcccgccagaagaagatccgcatccagctccgctcccagtgcgccacctggaaggtcatctgcaagtcctgcatctcccagacccccggcatcaacctcgacctcggctccggcgtcaaggtcaagatcatccccaaggaggagcactgcaagatgcccgaggccggcgaggagcagccccaggtctga

SEQ ID NO: 2017 - RNA, 1098 nt, synthetic construct
  misc_feature 1..1098: note = AAA59652 variant
  source 1..1098: mol_type = other RNA
atggccgtgatggctcccagaaccctgctccttctgttgagcggcgcattagccctgacacagacttgggcggggtcccactctatgaggtacttctttacgtcagtcagtcggcctggacgcggtgagccacgattcatcgctgttggctatgtggacgatacccaatttgtacgtttcgacagcgatgccgcatcccagaagatggaaccgagagccccctggattgagcaggaagggcctgagtactgggaccaggaaacaaggaacatgaaagctcattctcaaactgatcgggcaaatctaggaaccctccgcggctattacaaccagtcggaggacggttcacacacaatacagatcatgtatgggtgcgatgtgggaccagacggcagatttctgaggggctaccggcaggatgcctatgacgggaaggattacattgctcttaatgaggacctgcgcagctggaccgccgcggatatggcagcccaaatcactaaacgaaagtgggaagctgtccatgccgcagagcagagaagggtgtacttggaaggacggtgtgttgacggtctccgtcgctatctggagaacggcaaagagacactgcagagaaccgatccccctaagacgcacatgactcatcacccaattagtgaccacgaagctaccctcaggtgctgggccttagggttctaccccgcggagatcacactgacttggcagcgggacggagaagatcaaacccaggacacagagcttgtggaaacccgacctgccggcgatggtacgtttcagaagtgggcagctgtcgtggtaccatccggggaggagcaacgctatacttgtcatgttcagcacgaaggattgccgaaacccctgacactaagatgggagctctctagccagcctaccataccaatcgtgggcattatcgccggcctggtccttctgggggctgtgattactggagccgtggtcgcagccgttatgtggaggcggaagtcctcagaccgcaaaggtggcagttacacacaggctgcgagctctgattccgcacaagggtcagacgtgagcttgaccgcctgcaaggtatga

SEQ ID NO: 2018 - RNA, 1098 nt, synthetic construct
  misc_feature 1..1098: note = AAA59606 variant
  source 1..1098: mol_type = other RNA
atggccgtgatggctcccagaaccctggtcctccttctgagcggcgcattggccttaacacagacttgggcggggtcccactctatgaggtacttctttacgtcagttagtcggcctggacgcggtgagccacgattcatcgctgtgggctatgtagacgatacccaatttgtgcgtttcgacagcgatgccgcatcccagagaatggaaccgagggccccctggattgagcaggaagggcctgagtactgggacggagaaacacggaaggtcaaagctcattctcagactcaccgcgtggatctgggcaccctaagaggttattacaaccaatcggaggcagggtcacatacagttcagaggatgtatggatgcgacgtgggcagcgattggcggtttctccgcggctaccaccagtatgcctacgacgggaaggattacatagctctgaaagaggaccttcgaagttggaccgccgcggatatggcagcccagactacaaagcataaatgggaagctgcccacgtcgcagagcaactgagagcttatttggaaggaacctgtgtggagtggctcaggcggtacctggagaatggtaaggaaacgctgcagcgtactgacgccccaaagacccacatgacacatcacgcggtatccgatcatgaggccactctccgctgctgggcattatctttctatcccgctgaaatcaccctgacatggcagagagacggcgaggaccagacccaagatacggaacttgttgagactaggcctgccggggacggaacatttcagaaatgggctgccgtggtcgtgccaagcggccaggagcaacggtacacctgtcacgtgcagcacgaaggtttgcccaagcctctgactctacgatgggagccatcctcacagccgacaattcccatcgtcgggattatcgcaggactcgttctgttcggcgccgtgataaccggcgctgtagtggcggcagtcatgtggcgcagaaaaagtagcgataggaaagggggatcttattcccaggccgcttcaagcgacagtgcccaaggttctgatgtgtcccttacggcatgcaaggtttga

SEQ ID NO: 2019 - RNA, 1263 nt, synthetic construct
  misc_feature 1..1263: note = AAH37161 variant
  source 1..1263: mol_type = other RNA
atgcccggcgggtgcagcagaggacctgccgctggtgacggcaggctgcggctcgcacgccttgccctggtgttgttagggtgggtctcctcttcaagtccaaccagctccgcgtcttcgttctcaagcagtgctccgtttctggcctccgcagtttctgcccagccccctctaccagatcaatgtcccgctctctgcgagtgtagcgaagcagcccgaacagtgaagtgcgtaaaccgtaatctgactgaggtgcctacggaccttccagcttacgtcagaaacctgttcttgaccggaaatcagctcgccgtgctgcccgcgggcgcatttgccaggcggcctccactggctgaactcgccgcattaaacctgtccggttcacgccttgatgaggttagagctggggccttcgaacacttgccgagtctgaggcagctagacctcagccataatcccctggcggatctttctccttttgccttctccggatcaaacgcaagcgtgagtgctccatctcccctggtcgagttgatcctcaatcacattgtgcctccagaggacgaacggcagaaccgctcctttgagggcatggtagttgccgctctgttagccggccgagcactgcaagggctcagaaggcttgaactggccagcaatcatttcttgtatctaccccgggatgtgctggctcagctcccgtcgctgcgtcaccttgacctgtctaacaattccttggtctcactcacatacgtgagttttcgcaacctgactcatttagagagcctgcacctagaggataatgcgctcaaagtgctgcacaacggaacccttgcagaattgcagggtctgcctcatataagagtcttcctcgacaataacccctgggtttgtgattgccacatggccgacatggtgacatggctgaaggagaccgaagtagtgcagggcaaagataggcttacttgtgcttatccagagaagatgcggaaccgagtcctgttggaactcaattccgccgacctggactgcgatcctatcttacccccatctctgcaaacaagctacgtgtttctagggattgttctcgcactgatcggagccattttccttttggtgctgtatctcaaccgcaaaggcatcaagaagtggatgcataatataagagacgcttgtagggatcacatggagggttaccactatcggtacgagatcaacgccgacccccgcctgaccaatttatcaagtaactccgatgtctga

SEQ ID NO: 2020 - RNA, 1632 nt, synthetic construct
  misc_feature 1..1632: note = AAH33010 variant
  source 1..1632: mol_type = other RNA
atgagaaagcccgccgctggcttcctgcctagcctccttaaagtgctgttgttaccactggcaccggccgcggctcaggactccacccaagcctctacacccgggtcacctctaagtccaactgagtacgaaaggtttttcgcactcctgacgcccacctggaaggccgagacaacttgccggcttcgcgctacccacggatgtcgaaaccctacactggtccagttggatcagtatgaaaatcatggtctcgttccagacggcgcagtgtgcagcaacctgccctacgcctcctggtttgagtctttctgtcagtttacccactatcgttgctcgaatcatgtatactatgctaaaagagtgctgtgttcacaacctgtcagcatcctcagtccaaacactttaaaggaaattgaggcctccgcggaggtgtctccgacaaccatgacgagccccatatcccctcacttcactgttaccgaaaggcagacatttcagccatggcccgagcggctgtcaaataacgtggaagaacttttgcagagtagcctgtctctagggggacaagagcaggcacctgaacataaacaggagcagggcgtcgaacaccgccaagagccaactcaggaacacaagcaggaggagggtcaaaagcaggaggagcaggaagaggaacaggaggaggaagggaaacaagaggaaggacagggcaccaaggagggcagagaagccgtgtcccagctccagacagattcagagcccaaattccatagcgagagtctgtcttccaatccgagctcgtttgctcctagggtacgggaagttgagtctacccccatgatcatggaaaacattcaagagcttatccgctccgcccaggagattgacgaaatgaatgagatctacgatgaaaactcatattggcgaaatcagaacccagggagtctgttgcagctccctcacacggaggcactgttagtgctgtgctacagcatagtcgaaaatacttgtatcattacacccaccgctaaggcctggaaatacatggaggaggaaatcctcggattcggtaagtccgtgtgcgactctcttggcagaaggcatatgagcacttgtgcgctgtgcgatttttgttcattgaagctagagcaatgccacagtgaagcctccctgcagcggcagcagtgcgacacaagccacaaaaccccattcgtgtctcccctcctggcatcacaaagtcttagcattgggaaccaggtcggatcccctgagtctggccgtttttatggtctggatttgtacgggggactccatatggacttctggtgtgctcgcctggccacgaagggctgcgaagatgttagagtgtcgggctggttacagaccgagttcctgagctttcaagacggggatttcccaacaaaaatctgtgacactgactatatacagtacccgaattattgctcctttaagtcacagcagtgtctaatgaggaaccggaaccgaaaagtaagtcgcatgagatgcctccaaaatgagacctactctgctctgagccccggaaagtccgaagatgtggtccttaggtggtcacaggagttcagcacattgactctgggtcagtttggctga

SEQ ID NO: 2021 - RNA, 1830 nt, synthetic construct
  misc_feature 1..1830: note = AAB58754 variant
  source 1..1830: mol_type = other RNA
atgaagtgggtggagagcatcttcctgatttttctccttaacttcaccgaatccagaacactgcacaggaatgagtacggcatagcctctatcttggactcatatcagtgcactgctgaaattagtttagcagatctggccacgatctttttcgcgcaatttgtccaggaggctacctacaaagaagttagcaagatggtgaaagacgccctaacagcaattgagaagcccactggggatgagcagtcctctggatgtctcgaaaaccagctgcctgccttccttgaggaactgtgccatgagaaagagatcttggaaaagtatggtcactcggactgttgctcacaaagcgaggaaggccggcataattgttttctcgctcacaagaaaccaaccccggcaagtatacccctgttccaggtacctgagccagtgacatcctgcgaagcctacgaggaggatcgcgaaacctttatgaacaagttcatctatgagattgctcgacgtcatccctttctgtacgcccctactatcctcttatgggcggcaagatatgacaaaattatcccatcttgttgcaaggccgaaaatgctgtcgagtgtttccagacaaaagccgcaaccgtgacgaaggaactgagggagagctcccttttgaaccagcacgcttgcgccgttatgaagaattttgggactcggaccttccaagcgataacagtgactaaactgtcacagaagttcaccaaagtcaactttacagagattcagaagctagtgctcgatgtagcccacgttcatgaacactgttgccgcggagacgtgctggattgccttcaggacggcgagaaaatcatgagttacatttgtagccaacaggataccctgtctaataagatcacggaatgctgtaaattgactacactcgagagaggtcagtgcatcattcatgcagaaaacgacgagaagcccgaggggctgtcccctaatttaaacaggttcctgggagatcgggactttaatcaattctcaagcggcgaaaagaacatatttctcgctagtttcgtccacgagtactctcgccgacacccacagcttgccgtgtccgtgatcctgagagtcgctaaaggctatcaggaattgctagagaagtgttttcagaccgagaatccgctggaatgccaagacaaaggggaggaagaactccagaagtacattcaggaaagccaggccctggcaaaaaggtcgtgtggacttttccaaaagctgggtgagtattacttgcagaacgcctttctcgttgcttatactaagaaagcgccccagctgacatcttccgagttaatggcaatcacccggaagatggccgctacggccgcaacctgctgtcagctgtcagaagataaactactcgcctgcggcgagggggctgccgacataattatcggacatctgtgtatccgtcacgaaatgacacctgtgaacccaggcgtaggtcaatgctgcaccagtagctacgcaaatcgcagaccctgtttctcctctcttgtggtcgatgagacttatgtgcctccagcgtttagcgacgataagttcatttttcataaagacttgtgccaggctcagggggttgccctgcagacaatgaagcaagagttcctcatcaacctggtgaagcagaaaccccagattactgaggagcaacttgaagcagtcatagccgatttctcaggactgttggagaagtgttgccagggccaggaacaggaggtgtgttttgctgaagagggccaaaaactcatcagtaagaccagggccgcactgggggtatga

SEQ ID NO: 2022 - RNA, 2565 nt, synthetic construct
  misc_feature 1..2565: note = AAI26251 variant
  source 1..2565: mol_type = other RNA
atgatggcctacagcgacaccacaatgatgtccgatgacatcgattggctgagatctcacaggggcgtgtgcaaggtcgacctctataaccccgaggggcagcaagatcaggaccggaaagttatttgtttcgtggatgtatcaactcttaatgtggaagacaaggattacaaagacgctgcaagtagctcctctgagggaaacctgaatttgggttcgttagaagagaaggaaataatcgtcattaaagatacggagaagaaggaccagtcaaaaaccgagggcagcgtgtgcctgtttaagcaggcccctagtgatccagtttccgtgctaaactggctcctgtctgaccttcaaaaatatgcgctggggttccagcatgctttgagcccgtccacatcaacttgtaagcacaaagtcggagacaccgaaggcgagtaccatcgcgccagtagcgaaaattgctattctgtgtacgcagatcaggtaaacatcgactatctcatgaatcgaccccagaacctgcgtctggagatgacagccgctaagaataccaacaataaccaatccccttcagcaccacccgccaagcctccaagcactcagagagctgttattagtcccgatggtgagtgttctatcgacgatctctccttttacgtgaataggttaagctcgctggtcatacagatggcccacaaagaaatcaaggagaaacttgaagggaagtctaaatgcttgcatcactccatttgtccttcaccaggaaacaaggagcggatcagtccgcgcacacccgcgagcaaaattgcatccgaaatggcctacgaggctgtggagctgaccgccgcagaaatgagaggcacgggcgaggaatctagggaagggggacaaaagagcttcctatattcagaactcagtaataagtccaaaagcggtgacaagcagatgtctcagcgggagtcaaaagagtttgctgatagtatcagcaagggcctgatggtgtacgccaaccaggtcgcgtccgacatgatggtttctcttatgaaaactctgaaggtgcactcgagcgggaagcctataccagcctccgtagtgttgaaacgcgtcctcctgcgacataccaaggaaattgtgtcagatttaatcgacagttgcatgaaaaacctgcacaatattacaggagttctcatgactgattctgacttcgtgagcgcagtcaagagaaacctttttaatcaatggaaacagaacgctaccgacatcatggaggccatgctgaagaggttggtgtccgctctaatcggcgaagagaaggaaacaaaatcacagagcctgtcttatgcctccctcaaggcaggtagtcatgatcccaaatgtcggaatcagagcctggagttctctaccatgaaggccgagatgaaagaacgtgacaaggggaagatgaaatccgatccttgcaagtcacttacgagtgctgagaaagtaggagaacacattctgaaggagggcttgactatatggaaccaaaaacagggcaatagctgtaaggttgcgacaaaagcatgctcgaacaaggacgagaagggggagaaaatcaatgcctccaccgattctctcgctaaggacctgattgtgagcgccttaaaactgatccagtaccacctaactcagcaaacaaagggaaaagatacctgcgaggaagactgtccaggttcaacgatgggctatatggcacagagtacccagtacgagaagtgcgggggaggccagtccgccaaggctctctctgtcaaacaactggaaagccatcgcgcccccggtccgtccacatgtcagaaggagaaccagcaccttgattcacagaaaatggacatgagcaatatagtgttgatgctgattcaaaagctcctgaacgagaatccttttaaatgcgaagatccctgtgagggggaaaacaagtgcagtgagccaagagcatctaaggcggcttccatgagcaataggtcggacaaagccgaggaacagtgtcaggagcatcaagaacttgattgcacttcaggcatgaagcaggcaaacggacagttcatcgacaaactggtcgagtctgtgatgaagttgtgtctcatcatggccaaatatagtaacgacggcgctgccctggcagaattagaggaacaggctgcctccgcgaataagcctaactttcgggggacccgatgcattcacagcggagccatgccccaaaattaccaggattctctgggtcatgaggttatcgtgaacaatcagtgtagcacaaactccctacagaagcaactccaggctgtactgcagtggattgcagcctcacagttcaatgtcccaatgctttactttatgggcgacaaagatgggcaattggagaagctgccccaggtgagtgctaaagccgcagaaaagggatatagcgttggcggtctcctgcaggaggtgatgaaattcgcgaaggaacgccaacctgacgaggccgtcgggaaagtggctagaaagcagttactggattggcttttggccaacctctga

SEQ ID NO: 2023 - RNA, 1251 nt, synthetic construct
  misc_feature 1..1251: note = BAG61782 variant
  source 1..1251: mol_type = other RNA
atggtggactaccacgccgctaaccagagctatcaatacggcccctcctctgcagggaatggagccggtggcgggggatcaatgggcgattatatggcgcaggaggacgattgggacagagatctgctccttgaccctgcttgggaaaagcagcagaggaaaaccttcacagcctggtgcaacagtcatctgcggaaggcaggtactcaaatcgagaatattgatgaagactttcgcgatgggttgaaattaatgctgctactcgaggtcataagcggagaacgactgccaaagccggagcgtggcaaaatgagagttcacaagatcaacaatgtgaacaaggcccttgacttcattgcttccaaaggcgtaaagctggtgtctatcggggcagaggaaattgtcgatggaaatgccaaaatgacgttgggtatgatctggaccataatcctcaggtttgctattcaggacatctcggtggaggaaacatcagccaaggagggcctgctgctctggtgtcagcggaaaactgcgccctacaagaacgttaatgtgcagaacttccatattagctggaaggatgggttagcatttaatgccctgatccaccgccatagacctgagcttatagaatatgacaaattgaggaaggacgatccagtcaccaacctgaataacgctttcgaggtggccgaaaaatacctagacattcccaagatgctcgatgcagaggacatcgtaaatacagctcggcctgatgaaaaagccattatgacctatgttagttccttttaccacgcgttctctggagcccaaaaggcagagactgctgccaaccgcatctgcaaagtgctggctgtcaaccaggagaatgaacaccttatggaggactacgaaaagctggccagcgatttgctcgagtggatccgaagaacaattccatggctggaagacagggtgccccagaagaccatacaggagatgcaacagaaattagaggattttcgggactatcgtcgcgtgcataagcctccaaaagtccaggaaaagtgtcaactggagatcaacttcaatacgctccagactaaacttagactgtccaacaggccggcatttatgccctcatggcggagtcgagcctctagctcccctacctcaacatgcgctgcgagcagtccagcacgccccatgttgtggggccctggttctagaccaaggtggcggcgctccggggccagccccctaagatga

SEQ ID NO: 2024 - RNA, 1689 nt, synthetic construct
  misc_feature 1..1689: note = BAG65349 variant
  source 1..1689: mol_type = other RNA
atggtggactaccacgctgctaaccagagctatcaatacggcccctcctctgcagggaatggagccggtggcgggggatcaatgggcgattatatggcgcaggaggacgattgggacagagatctgctccttgaccctgcttgggaaaagcagcagaggaaaaccttcacagcctggtgcaacagtcatctgcggaaggcaggtactcaaatcgagaatattgatgaagactttcgcgatgggttgaaattaatgctgctactcgaggtcataagcggagaacgactgccaaagccggagcgtggcaaaatgagagttcacaagatcaacaatgtgaacaaggcccttgacttcattgcttccaaaggcgtaaagctggtgtctatcggggcagaggaaattgtcgatggaaatgccaaaatgacgttgggtatgatctggaccataatcctcaggtttgctattcaggacatctcggtggaggaaacatcagccaaggagggcctgctgctctggtgtcagcggaaaactgcgccctacaagaacgttaatgtgcagaacttccatattagctggaaggatgggttagcatttaatgccctgatccaccgccatagacctgagcttatagaatatgacaaattgaggaaggacgatccagtcaccaacctgaataacgctttcgaggtggccgaaaaatacctagacattcccaagatgctcgatgcagaggacatcgtaaatacagctcggcctgatgaaaaagccattatgacctatgttagttccttttaccacgcgttctctggagcccaaaaggcagagactgctgccaaccgcatctgcaaagtgctggctgtcaaccaggagaatgaacaccttatggaggactacgaaaagctggccagcgatttgctcgagtggatccagcgaacaattccatggctggaagacagagtgccccagaaggcaatacaagagatgcagcagaaattagaggattttagggactatcggcgtgtgcataagcctccaaaagtccaagaaaagtgtcagctggagatcaacttcaataccctccagacgaaacttcgcctgtccaacagaccggcctttatgccctcagaaggcaagatggttagtgatattaataacggttggcagcacttggagcaagctgaaaaggggtacgaggagtggctactgaatgaaatcaggcggctcgagcgactggaccatcttgcggaaaaattccgccagaaggcaagcatacacgaggcctggactgacggaaaagaggctatgctgaagcacagagattatgaaaccgccacattgtctgacattaaagcactcatcaggaagcatgaggcctttgaatccgatctggctgcccaccaggaccgggtggagcagatcgcagcgattgctcaagaattaaacgagctggattactatgactcacataatgtaaacactcctgatggcctacaggagggcccagggcagccccacagccctatcccacccctctgcatttacgccaagcatagtctgcagtcttccggagtgggtggctgggcagggcgcggatggggcagacttagcccgttgtcgctgtgtggtctcgccaggcgtttccctcggcccgggtggggcgacctgggaccagcccttctggtctggtga

SEQ ID NO: 2025 - RNA, 2736 nt, synthetic construct
  misc_feature 1..2736: note = AAH05033 variant
  source 1..2736: mol_type = other RNA
atggtggactaccacgccgctaaccagagctatcaatacggcccctcctctgcagggaatggagccggtggcgggggatcaatgggcgattatatggcgcaggaggacgattgggacagagatctgctccttgaccctgcttgggaaaagcagcagaggaaaaccttcacagcctggtgcaacagtcatctgcggaaggcaggtactcaaatcgagaatattgatgaagactttcgcgatgggttgaaattaatgctgctactcgaggtcataagcggagaacgactgccaaagccggagcgtggcaaaatgagagttcacaagatcaacaatgtgaacaaggcccttgacttcattgcttccaaaggcgtaaagctggtgtctatcggggcagaggaaattgtcgatggaaatgccaaaatgacgttgggtatgatctggaccataatcctcaggtttgctattcaggacatctcggtggaggaaacatcagccaaggagggcctgctgctctggtgtcagcggaaaactgcgccctacaagaacgttaatgtgcagaacttccatattagctggaaggatgggttagcatttaatgccctgatccaccgccatagacctgagcttatagaatatgacaaattgaggaaggacgatccagtcaccaacctgaataacgctttcgaggtggccgaaaaatacctagacattcccaagatgctcgatgcagaggacatcgtaaatacagctcggcctgatgaaaaagccattatgacctatgttagttccttttaccacgcgttctctggagcccaaaaggcagagactgctgccaaccgcatctgcaaagtgctggctgtcaaccaggagaatgaacaccttatggaggactacgaaaagctggccagcgatttgctcgagtggatccgaagaacaattccatggctggaagacagggtgccccagaagaccatacaggagatgcaacagaaattagaggattttcgggactatcgtcgcgtgcataagcctccaaaagtccaggaaaagtgtcaactggagatcaacttcaatacgctccagactaaacttagactgtccaacaggccggcatttatgccctcagaaggcaagatggttagtgatattaataacggttggcagcacttggagcaggccgaaaaggggtacgaggagtggctactgaatgaaatccggcgactcgagcgcctggaccatcttgctgaaaaattcagacaaaaggcgagcatacacgaggcatggaccgacggaaaagaggccatgctgaagcacagggattatgaaacagctactttgtctgacattaaagccctcatccggaagcatgaggcatttgaatccgatctggccgctcaccaggaccgcgtggagcagatcgccgcaattgcgcaggaattaaacgagctggattactatgactcacataatgtaaacaccagatgccaaaagatctgtgatcagtgggacgctctaggcagcctcacacacagtaggcgtgaggccctggagaaaaccgagaagcagcttgaagcaattgatcagttgcatctggagtacgccaaacgggctgcccctttcaataactggatggaatctgcaatggaggacctccaagatatgttcatagtgcacacgatcgaggaaattgagggcctgatctccgctcacgaccagtttaagagcactcttccagatgccgaccgagaaagagaggcgatcctggccattcataaagaagctcagaggatagcagagtcgaatcacatcaagttgtctgggtccaacccctatacaaccgtcactcctcagattatcaattcaaagtgggagaaagtgcaacagctcgttccaaagcgcgaccatgccctgttagaagaacagagtaaacaacagagcaacgaacatctgcggagacagttcgcttcccaggccaacgtggtcggaccctggattcaaacaaagatggaggagatcggtaggatatctatcgaaatgaatggcaccctagaggatcagctcagccacctgaaacagtacgaacgctcaattgtggactacaagccgaaccttgatttgctggagcagcaacaccagctcatccaggaagcactgatttttgacaataaacacacgaactataccatggagcatatccgagtagggtgggagcagttactgacaactatagcgcggaccattaatgaagttgagaaccaaatccttacacgtgatgccaagggaattagtcaggaacagatgcaagagttcagagcttcctttaatcacttcgacaaggatcatggcggtgccttggggcctgaagagtttaaagcatgcctcatcagcctgggctacgacgtggagaacgataggcagggagaagctgagttcaatcgcataatgtctctagtcgaccccaaccactcaggcctggtgacttttcaggccttcatcgattttatgagtcgggaaaccacagacaccgatactgcagaccaggtcattgccagcttcaaggtgctcgctggggacaaaaattttatcacggcggaggaactgagaagggagcttccacctgatcaagccgagtattgtattgcacgaatggctccctaccagggaccagacgccgttcccggtgccttggattataagtccttctctacagctctgtacggcgaatcggacttatga

SEQ ID NO: 2026 - RNA, 597 nt, synthetic construct
  misc_feature 1..597: note = EAX10817 variant
  source 1..597: mol_type = other RNA
atggccctgcagggcatcagcgtgatggagctctccgggcttgctcccggacctttctgcgcaatggtcctggccgactttggtgcgagagttgtgagggtagatcggccaggctctcgctacgacgtgtcacgattggggcgtggaaagagaagtttagtcctggatctaaaacaaccgaggggcgctgccgtgctccggcgcctgtgtaagagaagcgacgttcttctggaacccttcaggcggggtgtgatggagaaattgcagctcgggcctgaaattctgcagcgcgagaacccacgactgatatatgcaagactctccggatttggccagtctggctcgttctgcaggttagccgggcacgatatcaattacctggctctttcaggaggtcggaacagcatttttaagttctttagtgtcgaaaattccgagatcgagtctgtgggcagcacctcccgtacagaacatgtagggtggtggtcaactttcttgtatgacctgcaagatagtcgctggggcattcacggatgttggagcaacagaacgcccgttctaagggcagccgaccagcggacctggacaaaagtgtga

SEQ ID NO: 2027 - RNA, 597 nt, synthetic construct
  misc_feature 1..597: note = BAF85677 variant
  source 1..597: mol_type = other RNA
atggccctgcagggcatcagcgtggtcgagctctccgggcttgctcccggacctttctgcgcaatggttctggccgactttggtgcgagagtggtaagggtggatcggccaggctctcgctacgacgtctcacgattggggcgtggaaagagaagtttagtgctggatctaaaacaaccgaggggcgctgccgttctccggcgcctgtgtaagagaagcgacgtgcttctggaacccttcaggcggggtgtcatggagaaattgcagctcgggcctgaaattctgcagcgcgagaacccacgactgatatatgcaagactctccggatttggccagtctggctcgttctgcaggttagccgggcacgatatcaattacctggctctttcaggaggtcggaacagcatttttaagttctttagtgtggaaaattccgagatcgagtctgtaggcagcacctcccgtacagaacatgttgggtggtggtcaactttcttgtatgacctgcaagatagtcgctggggcattcacggatgttggagcaacagaacgccctttctaagggcagccgaccagcggacctggacaaaagtgtga

SEQ ID NO: 2028 - RNA, 2763 nt, synthetic construct
  misc_feature 1..2763: note = EAX05380 variant
  source 1..2763: mol_type = other RNA
atggaggtgcagctgggcctcgggagagtctaccccaggcctccaagcaagacctatcggggagccttccaaaacctttttcagtccgttcgcgaagtgatccagaatccgggtccccgacaccctgaggctgcatctgccgcgccacccggcgcttcactgttgttactgcagcaacagcagcagcaacagcagcagcaacagcagcaacagcagcagcaacagcagcagcaacagcaggaaacaagtcctcgtcagcaacagcagcagcaaggggaggacggaagcccacaggcccatagaaggggccccactggttacctagtactcgatgaggaacagcaaccttcccagccacagtctgcactggagtgccacccggaacgggggtgtgtgcccgagcctggagccgctgtcgcagcctcgaaaggccttccacagcaactgcccgctcctccagacgaagatgactcagccgcgcccagcacgttgagtctcctgggcccgaccttccctgggctgtcctcttgcagcgcagatctcaaggacattttatccgaggcctcaacaatgcagctgcttcagcagcaacagcaggaggctgtgagtgaaggaagcagctccggtcgcgccagagaggcatcaggcgctcccactagcagtaaagataactatcttgggggaacctctacaatatccgacaatgccaaggaactgtgtaaagcggttagcgtgtcgatgggcctaggtgtcgaggccctcgaacatctgtctccaggggagcagcttaggggagattgcatgtacgcacctctgttgggcgtgcccccagctgtacggcccaccccttgtgccccactcgctgagtgcaagggctccctgttagacgattcagccgggaagagtactgaagacacagcagagtatagcccgtttaaaggaggttacaccaagggcctggaaggggagtccctcggatgttctggcagcgccgctgcgggttcaagtgggacgcttgaactgccctccactttgagcctatataaatctggcgcactggatgaggccgctgcctaccaatcacgcgactactataacttccctctcgcactggccggaccaccccctccacccccgcctccacacccccatgctcgaatcaagttggagaatcctctggactacggcagtgcctgggcagcggctgccgcacagtgcagatatggggatttggccagcctccacggagctggtgccgcaggccccgggtccggatctccatcggctgccgcgagctcctcatggcacaccctgtttacagccgaagagggccagttatacggtccttgtgggggcggaggcgggggaggtggcgggggaggcggtgggggcggaggcgggggaggcggtgggggaggcgaagctggtgcagttgccccctatggctacactaggccaccgcaagggctggctggacaggagagtgacttcaccgcccctgatgtgtggtatcccggcgggatggtctctcgggtgccataccccagccctacatgcgtgaaatccgaaatgggaccatggatggactcatacagcggcccctatggtgatatgcgtctagagaccgcacgcgaccatgtcctccctattgattactattttccgccacagaagacgtgtctgatctgcggggacgaggcgtctggatgccactacggcgcccttacttgtggttcctgcaaggttttctttaaaagagctgccgaaggcaagcagaaatatttgtgtgcaagtaggaacgattgcacaattgacaagttccggcgaaagaattgtcccagctgccgcctgagaaagtgttacgaggctgggatgaccctcggagccaggaaactgaagaaacttggcaacctgaaattgcaagaagagggggaggcatcttccactacatcacctaccgaagagacgacccagaagctcacagtgagtcatatcgaaggatatgagtgccagccaatatttctgaatgtattagaagccatcgagcccggcgtggtctgtgctggtcacgataacaatcagcctgacagcttcgcggccctgctatcgtccctcaacgagctgggggaacggcaacttgtgcacgttgtgaaatgggcaaaggctttgccgggatttcgcaatctgcatgtcgacgatcagatggccgtgattcagtactcttggatgggcctcatggtattcgccatgggttggagatctttcactaacgttaattcaaggatgctgtactttgctcccgacttagtgttcaacgagtatcgtatgcacaaaagtcggatgtactcccagtgcgtccgaatgagacatctgtctcaagaatttggctggcttcagatcaccccacaggagttcttgtgtatgaaggcactcctgctatttagcattatccctgtggatgggctgaagaaccagaaattctttgacgaactcaggatgaattatataaaggagctggatcgcattatcgcctgcaaacggaagaaccccacatcctgctcaagaaggttctaccaacttactaaattgctggacagcgtccagccaattgcgcgcgagttacaccagtttaccttcgatctcctgatcaagagtcatatggtgtctgttgactttcctgaaatgatggctgagatcatttccgtgcaagtacccaagatacttagcggaaaagtcaagccaatctatttccacacacagtga

SEQ ID NO: 2029 - RNA, 1239 nt, synthetic construct
  misc_feature 1..1239: note = AAH64630 variant
  source 1..1239: mol_type = other RNA
atggcccccgtggagcacgtcgttgctgacgcaggcgccttcctgagacatgcggctctccaggatatcgggaagaacatttacaccataagggaagtggtaacagagatccgggacaaagccactcgccgacgtcttgcagtgctgccttatgaattgagatttaaggagccattaccggaatacgtcaggctggtgacggagttcagcaaaaagaccggagattatccctccctatctgccacagacattcaagttctcgctctgacttaccagcttgaggcagaatttgtgggtgtctcacacctgaaacaggagcctcagaaggtgaaggtaagtagctccatccaacatccagaaacccccttgcacatttctggcttccatctcccttataaaccaaagccccctcaggagacagagaaagggcactcggcctgcgaaccagagaatctggaatttagctcattcatgttttggcggaacccgctgcccaatatcgatcacgagctccaggaattactgatagaccgcggagaggatgttcctagtgaggaagaggaagaggaagagaacggcttcgaggacagaaaggatgactccgatgacgatggtgggggatggatcaccccatctaatattaaacagatccaacaggaacttgagcagtgtgacgtgcccgaagacgtcagggtgggctgcttgactacagattttgctatgcagaacgtgctgctacaaatgggcctccatgtcctggccgttaatgggatgcttattcgggaggcgcgcagctacatcctgcgatgtcacggatgcttcaagaccacgtccgacatgtcaagagtgttttgtagtcattgcggtaacaagactttgaaaaaggtaagcgtgaccgtctctgatgacggcacactccacatgcacttctccaggaatcctaaagtgctgaacccacgggggttacgttattcactgcccactccgaagggaggcaaatacgcaataaatcctcatctcaccgaagatcagcgctttccccagcttagactgagccaaaaggccaggcagaaaacaaacgttttcgctccagactacattgccggtgtgagtcctttcgtcgagaatgatatctcttcccggagcgcaaccttgcaggtacgagactcgacgctaggggctggacgcagaaggctgaaccccaatgcctctcggaagaagtttgtgaaaaagcgctga

SEQ ID NO: 2030 - RNA, 984 nt, synthetic construct
  misc_feature 1..984: note = AAH69102 variant
  source 1..984: mol_type = other RNA
atgcagatgcccgccatgatgagcctgctccttgtgtccgtcggcctgatggaggctttgcaagcacagtctcaccctatcaccagaagggacttattctcacaggaaattcagctggatatggccctagcgagttttgacgatcaatacgctgggtgcgccgcagccatgacagctgcactcccagacctgaaccatactgagttccaggccaatcaggtttatgctgatagctggacgcttgcctcctctcagtggcaagaacggcaggcgcgctggccggagtggtcgctgtcacccacccgacctagcccaccccctttgggatttcgtgacgaacacggtgtggcactcctggcctacacagctaacagtccactgcataaggagttcaatgccgcagtaagagaggctggcaggtcccgggcccactatctccatcacttttctttcaaaactttacactttctgcttaccgaagcgttgcagctgctagggagcggacagagaccccctcgctgtcatcaagtgttcaggggcgtccacggtctccggtttcgcccagccgggccgcgagcaacagtgagactgggaggcttcgcttccgcctcacttaagcatgttgctgcccagcagtttggcgaggataccttctttgggatatggacttgcctgggagcacccatcaaaggttacagtttcttccctggcgaagaggaggtgttgattccaccctttgaaacattccaagtcatcaacgccagcaggctcgctcaggggcctgcgcggatttatctgcgtgcattaggaaagcactctacctacaattgtgagtatatcaaagacaagaagtgcaaatccggcccatgtcacctggataactcagccatgggtcagagccccctcagtgctgtgtggtctcttctgttgctactgtggtttctcgtagttcgcgccttcccggacgggcctggactgctttga

SEQ ID NO: 2031 - RNA, 1035 nt, synthetic construct
  misc_feature 1..1035: note = AAH09751 variant
  source 1..1035: mol_type = other RNA
atggcccagaaggagaacagctacccctggccttatggcagacaaaccgctccatccgggctgtctacactcccgcagagggtgcttcggaaagaacccgtcactccttcagcactggttttgatgagtcgcagcaatgtgcagccaacggccgcgcccggacagaaggtaatggagaactcctctggtacccctgacatcttaacacgacacttcactattgatgactttgaaataggccgtccactggggaaaggaaagttcggcaatgtgtacctagctagagagaaaaagtcgcattttatcgtcgccctcaaggtgctgttcaaatcacaaattgaaaaggagggtgttgagcaccagcttaggcgggaaatcgagattcaggcacatctgcaccatcccaacatcttgcgcctctataattacttttatgatagaaggcggatatacctgatcctggaatatgcccctcgcggggagctctacaaagagttacagaaaagctgcaccttcgacgaacaacgaacagctaccattatggaggaactggcagatgcccttatgtactgtcacggaaagaaggtgatccacagagacattaagccagagaacttgctgctaggcctcaaaggcgaactgaagatcgctgattttgggtggagtgtccatgccccgtcccttaggcggaaaactatgtgcggaacactggactatttgccccctgagatgatagagggtcgtatgcacaatgaaaaggtggatctctggtgtattggcgtactgtgctacgagttactggttgggaacccacccttcgaatctgcgagccataatgagacctatcgcagaatcgtgaaagtcgacctcaagtttcctgcatccgtgccaatgggagcccaggatcttatttcaaaactgttgaggcacaaccccagtgaacggctaccgctggctcaggtgagcgcccacccttgggtccgagcaaattctcgcagagttctgcccccatccgctctccagtcagtggcctga

SEQ ID NO: 2032 - RNA, 360 nt, synthetic construct
  misc_feature 1..360: note = AAD48083 variant
  source 1..360: mol_type = other RNA
atgagcagatccgtggccctggctgtcctcgcacttctgtctttgtcaggcttagaggccatccagaggacccccaagattcaagtttacagtcggcaccctgcggaaaacgggaaaagcaatttcctgaactgctatgtgtccggatttcatccatctgacatagaggtagatctactcaagaatggtgaacgcatcgagaaagtggaacactcggacctgtcattcagcaaggattggagtttttaccttctgtattacacagagttcactccgacggagaaagacgaatatgcttgtcgagtcaaccatgtgaccttgtcccagcccaagattgttaagtgggatcgtgacatgtga

SEQ ID NO: 2033 - RNA, 1137 nt, synthetic construct
  misc_feature 1..1137: note = AAH28058 variant
  source 1..1137: mol_type = other RNA
atgagaatgctggtgagcggcaggcgggtcaagaaatggcagctcatcattcaacttttcgctacctgctttctggcctccttgatgttcttttgggagcccatagacaaccacatcgtttctcatatgaagtcatacagttatcgctacttaattaatagctatgatttcgtgaacgacacactgtccctaaaacacacttctgcagggcctcgataccagtatctcatcaatcataaggaaaaatgtcaggcccaggatgtactgcttctgttgtttgtgaagacggcgccagagaactacgaccgtagatcgggaattaggcggacctggggtaatgaaaactatgtccgctcacaactcaatgctaacatcaagacactgttcgccctgggcactccgaatcccctcgagggggaagagttacagagaaaactggcatgggaggatcagaggtacaacgacataatccagcaagattttgtggacagcttctacaatcttaccttgaagctgctaatgcagtttagttgggccaacacatattgccctcacgctaaattcctcatgaccgcagatgacgatatttttatccatatgccaaatctgattgaataccttcagtccctggagcagatcggagttcaagacttctggataggccgggtgcaccgcggtgctccccctattcgagataagtctagcaaatattacgtctcctatgaaatgtaccagtggccagcctatcccgactacactgccggggcggcatacgtgatctcaggagacgtagccgctaaggtttatgaggccagtcagacattgaacagctctctctacattgatgacgtgtttatgggcctgtgtgcaaataagatcggcatcgtccctcaagatcacgtgttcttctccggggagggaaaaaccccatatcatccgtgcatttacgaaaagatgatgacgtcacacggtcatttagaggacctgcaggatctctggaaaaacgctactgaccccaaggtgaaaaccataagcaagggctttttcgggcagatctattgtagacttatgaaaattatcctgttgtgcaagataagttacgtcgatacatatccttgtagggccgcgtttatttga

SEQ ID NO: 2034 - RNA, 1602 nt, synthetic construct
  misc_feature 1..1602: note = AAA35516 variant
  source 1..1602: mol_type = other RNA
atgtggctgggcagaagggccctctgcgctcttgtgctgttgttagcatgtgccagcctggggctactctacgcgtccacccgggacgctcccggactgcgccttcctctggccccatgggcaccgccccagtctcctcgacgtccagagttgcccgatctcgcccctgaaccaagatatgctcacatccccgtcaggattaaggagcaagttgtgggtctgctggcatggaacaattgctcatgtgaaagtagcggcgggggactccctttaccattccagaaacaggtacgggccatagacctgacaaaggcttttgatccggccgagcttcgcgcggcatccgccactagagaacaggagttccaagcatttttgtctaggtcgcagtcacccgccgaccagctgctaatcgctcctgctaacagcccactccagtaccccctgcaaggcgtggaggtccagcctcttcggagtattctggtgccaggtttgtccctccaggccgcgtctgggcaggaagtttatcaagtgaatctgacggccagcttaggaacctgggatgtcgcaggcgaggtgacaggcgtaactctgaccggggaaggacaggctgacctcacacttgtttcccccggtctggatcagttgaaccgccaactacagctggtgacctactcaagtcgaagctatcagactaatacagccgacaccgtcagattctctacggagggccatgaggctgcctttactatcaggattcggcacccgcctaacccccgtctctacccacctgggtccctgccccagggagcacaatataatatctcagcccttgtgaccatagctacaaaaactttcctgcgctacgatagattgagggcgctcatcaccagcattcggcgattttacccaacagtgaccgtcgttatcgcagacgatagtgacaagcccgaacgcgtgtctggcccttatgtagagcattacctgatgccattcggtaaagggtggtttgccggaagaaacttagctgtgtcccaggtcacgactaagtatgtgctgtgggttgatgacgacttcgtgtttacagccaggacccggctagaacgcctcgtcgatgtgctggagagaactccgcttgacttggtaggcggcgcagttagggaaattagcgggttcgccacaacctaccgtcagctgctctcggtggagcccggagctcctggtctgggcaattgccttcggcagcgaagagggtttcaccatgagctggtcggattcccaggctgtgtggtcacggatggtgtggttaacttctttttggccaggaccgacaaggtgcgcgaagtagggttcgatccccggctctctagagtcgcacacctggagtttttcttagacggcctgggatccctaagggtgggctcatgcagtgatgttgtggtcgaccacgcgagcaaactcaagctgccttggacatcccgcgatgctggggccgaaacttatgcacgataccggtatccaggatctcttgacgagagccaaatggccaaacatcgtttgctgtttttcaagcacagactccagtgtatgacctcacagtga

SEQ ID NO: 2035 - RNA, 849 nt, synthetic construct
  misc_feature 1..849: note = AAH74729 variant
  source 1..849: mol_type = other RNA
atggccagcctgggccagatcctcttctggtccattatatctatcattatcattcttgctggggcaatcgccctgataatcggatttggtatttcaggcagacacagtatcaccgtgacaactgtcgcgagcgctgggaacattggagaggacggcatcttgtcctgcacgttcgaacccgatataaagttatctgacattgttatccaatggctgaaagagggtgtgctagggctcgtacatgaatttaaggagggaaaagatgaactgtcggagcaggacgagatgttcaggggccggaccgccgtgtttgcagatcaggtcattgtgggcaatgcctcacttcgcctgaagaacgttcagttgacagacgctgggacttacaaatgttatatcatcaccagcaagggaaagggtaatgcaaacctcgaatacaaaacaggcgccttcagtatgcctgaggtgaatgtcgattataacgcttcctctgaaaccctgcgatgcgaggccccacgttggtttccgcaacccactgtggtatgggcgagccaggttgaccagggggcaaatttctccgaggtgtcaaacacaagttttgaactgaatagcgagaacgtcaccatgaaggtggtgtctgtcctctacaatgttacgattaacaatacttattcctgtatgatagaaaacgatatcgccaaagctaccggagacattaaggtgacagagtcagaaatcaaaagaaggagccacttacagctgcttaatagtaaggcctctttgtgcgtatccagcttctttgcaatatcgtgggctctgctacctctctctccatacctgatgcttaagtga

SEQ ID NO: 2036 - RNA, 132 nt, synthetic construct
  misc_feature 1..132: note = AAC50123 variant
  source 1..132: mol_type = other RNA
atggccgctagagcagtgttcctggccctcagcgcgcagcttctgcaagctaggttgatgaaggaggaatcccccgtcgtttcttggcggttagagcctgaagacggcaccgccctgtgctttatcttctga

SEQ ID NO: 2037 - RNA, 1158 nt, synthetic construct
  misc_feature 1..1158: note = AAN40694 variant
  source 1..1158: mol_type = other RNA
atggccgccgcactgttcgtgctccttggctttgccctgttggggacccacggagcgagcggtgctgccggcttcgtccaggcacccttatcccaacagagatgggttgggggatctgtggagctgcattgcgaagccgtaggctcacctgtgccagagatccagtggtggtttgaaggtcaggggccgaacgacacatgtagtcaactatgggatggagctaggctcgaccgggtccacattcatgcaacttaccaccagcatgccgctagcacgatatccatcgataccctggtggaggaagacacaggcacttatgagtgccgcgcctctaatgatcccgaccgaaaccaccttacccgtgcgcctagagttaagtgggtgagggcacaggccgtcgtgctggtattggagccaggcacagttttcaccactgtggaagatctcgggtcgaaaattctgctgacatgttcactcaatgacagcgctaccgaggtcacgggacaccggtggttaaagggtggcgtggtgctgaaagaagatgcccttcccgggcagaagactgagtttaaagtcgacagtgatgaccaatggggagagtactcctgcgttttcttgcctgaaccaatgggcaccgcaaacatccagctgcatggtccccctcgcgtgaaggctgtaaagtctagcgagcacattaatgaaggggagacagccatgctagtgtgtaaatccgaatcagtcccaccggtgactgattgggcgtggtataagatcaccgacagtgaggacaaagccctcatgaacggaagcgagtctagatttttcgtttcctcaagccagggcaggagtgaactgcatatagagaatcttaacatggaagcagatcccggccagtaccggtgcaatgggacatcttccaagggaagcgaccaagctatcattaccctgcgcgtgcgatcgcacttggccgctctctggccttttctgggtatcgtcgccgaggtgttagtactggttacgattatcttcatatatgagaaaagaaggaagccagaagatgtgctcgacgatgacgatgcaggctctgctccccttaagtcctcagggcagcaccagaacgacaaaggaaagaatgtccggcaacgtaacagtagctga

SEQ ID NO: 2038 - RNA, 720 nt, synthetic construct
  misc_feature 1..720: note = ABX60202 variant
  source 1..720: mol_type = other RNA
atggcccacgctggcagaaccgggtacgacaacagggagatcgtgatgaagtatattcattacaaactgagccagcggggatatgaatgggatgccggtgacgtcggcgcagcgccccctggggctgccccagcaccgggaatattctcctctcaacccggccacacacctcatccagccgcttcacgcgatcccgttgcacgaacgagtcctctccagactccagccgctcccggtgccgcggcagggcctgcccttagcccagtgccgcccgtagtgcacctgaccttgcgtcaggctggagacgatttttccagaaggtaccggcgcgacttcgccgagatgtcttcgcagttacatctgacaccttttactgcaagaggcaggttcgctaccgtcgtggaagaactatttcgggatggcgttaattgggggcgcatcgtggccttctttgagttcggaggtgtcatgtgcgtggagtcagtaaaccgagagatgagcccactcgttgacaatattgcgctgtggatgacagaatatcttaacagacatctgcacacctggatccaagataatggcgggtgggacgcctttgtggagttgtacggacccagtatgaggcctctcttcgatttttcctggctgtctctgaagactctcttaagcctggcacttgtcggcgcttgtattacattgggtgcctatctgtcccacaaatga

SEQ ID NO: 2039 - RNA, 1290 nt, synthetic construct
  misc_feature 1..1290: note = ABX82700 variant
  source 1..1290: mol_type = other RNA
atggtggaccccgtcggcttcgccgaggcttggaaggcacagtttcctgatagcgaaccaccgagaatggagctgaggtccgttggggacatcgaacaagagctcgaacggtgcaaagcctctattcgccgacttgagcaggaggtgaaccaggaacgtttcagaatgatatacctgcagaccttgttagcgaaggagaaaaagtcatatgataggcaacggtggggatttcgcagagctgcccaggcacccgacggtgccagtgaacctagggctagcgcatcccggccacagcccgcccctgctgatggcgccgacccaccccctgcggaggagccagaagcacgcccggatggggagggatctcccggcaaagcccgacctggtacagctagaaggccaggggccgcagcttcgggagaacgggacgatcgtgggccccctgcctcagtagcggccctgcgcagcaatttcgagagaatcaggaagggccacggccagccaggagcagacgctgaaaagcccttttacgtgaacgtcgagttccatcacgagcggggtctagtgaaagttaatgataaggaagtgagtgaccgaatttcctctctcggcagccaagccatgcagatggagcgcaaaaagtcccagcatggggctggatcaagtgtcggcgatgccagcagaccgccttataggggtcggtcttccgaatcaagctgtggggtggacggagactacgaggatgcagaactgaacccccgctttcttaaagacaatctgatcgatgccaacggcggcagtagaccaccttggcccccattggagtatcagccctaccaatctatttatgtagggggaatgatggagggtgaaggcaaggggcctctcctgaggtcccagagcacttcggagcaggaaaagcgtctgacgtggccacggcgatcttactccccgagatcattcgaggactgcggaggcggttacacccccgattgtagtagcaatgaaaacctcacatcctctgaggaggactttagctcagggcaaagttccagggttagcccttctccaactacctatcgcatgttccgggataaatcaagaagtcccagccaaaattcccagcagtcttttgactcgagctcccctccaacaccccagtgccacaagaggcatcgccactgtccggtggtcgtgtcagaagctaccatcgtgggcgtccgaaaaactggacagatatggcctaacgatggcgagggggcgttccacggagacgcagatggtggctga

SEQ ID NO: 2040 - RNA, 1665 nt, synthetic construct
  misc_feature 1..1665: note = ABX82703 variant
  source 1..1665: mol_type = other RNA
atggtggaccccgtcggcttcgccgaggcttggaaggcacagtttcctgatagcgaaccaccgagaatggagctgaggtccgttggggacatcgaacaagagctcgaacggtgcaaagcctctattcgccgacttgagcaggaggtgaaccaggaacgtttcagaatgatatacctgcagaccttgttagcgaaggagaaaaagtcatatgataggcaacggtggggatttcgcagagctgcccaggcacccgacggtgccagtgaacctagggctagcgcatcccggccacagcccgcccctgctgatggcgccgacccaccccctgcggaggagccagaagcacgcccggatggggagggatctcccggcaaagcccgacctggtacagctagaaggccaggggccgcagcttcgggagaacgggacgatcgtgggccccctgcctcagtagcggccctgcgcagcaatttcgagagaatcaggaagggccacggccagccaggagcagacgctgaaaagcccttttacgtgaacgtcgagttccatcacgagcggggtctagtgaaagttaatgataaggaagtgagtgaccgaatttcctctctcggcagccaagccatgcagatggagcgcaaaaagtcccagcatggggctggatcaagtgtcggcgatgccagcagaccgccttataggggtcggtcttccgaatcaagctgtggggtggacggagactacgaggatgcagaactgaacccccgctttcttaaagacaatctgatcgatgccaacggcggcagtagaccaccttggcccccattggagtatcagccctaccaatctatttatgtagggggaatgatggagggtgaaggcaaggggcctctcctgaggtcccagagcacttcggagcaggaaaagcgtctgacgtggccacggcgatcttactccccgagatcattcgaggactgcggaggcggttacacccccgattgtagtagcaatgaaaacctcacatcctctgaggaggactttagctcagggcaaagttccagggttagcccttctccaactacctatcgcatgttccgggataaatcaagaagtcccagccaaaattcccagcagtcttttgactcgagctcccctccaacaccccagtgccacaagaggcatcgccactgtccggtggtcgtgtcagaagctaccatcgtgggcgtccgaaaaactggacagatatggcctaacgatggcgagggggcgttccacggagacgcagatggtagttttggcacaccacccgggtacggatgcgccgctgaccgggccgaggaacagcgtagacatcaggacggcttaccttatatcgatgactctcccagctcctcaccacacctgagctctaagggtagggggtcccgcgatgcacttgttagtggcgccttggagagcaccaaggcttctgaactggacctagagaaaggactcgaaatgcggaaatgggtgctgtccggcattcttgcctcagaggaaacgtacctgagtcatttggaggcactcctgttacctatgaagcccctgaaggcggctgccactaccagccaaccagtactcacatcgcagcagatcgagactattttcttcaaagtgccggatcttctgtga

SEQ ID NO: 2041 - RNA, 1545 nt, synthetic construct
  misc_feature 1..1545: note = ABX82704 variant
  source 1..1545: mol_type = other RNA
atggtggaccccgtcggcttcgccgaggcttggaaggcacagtttcctgatagcgaaccaccgagaatggagctgaggtccgttggggacatcgaacaagagctcgaacggtgcaaagcctctattcgccgacttgagcaggaggtgaaccaggaacgtttcagaatgatatacctgcagaccttgttagcgaaggagaaaaagtcatatgataggcaacggtggggatttcgcagagctgcccaggcacccgacggtgccagtgaacctagggctagcgcatcccggccacagcccgcccctgctgatggcgccgacccaccccctgcggaggagccagaagcacgcccggatggggagggatctcccggcaaagcccgacctggtacagctagaaggccaggggccgcagcttcgggagaacgggacgatcgtgggccccctgcctcagtagcggccctgcgcagcaatttcgagagaatcaggaagggccacggccagccaggagcagacgctgaaaagcccttttacgtgaacgtcgagttccatcacgagcggggtctagtgaaagttaatgataaggaagtgagtgaccgaatttcctctctcggcagccaagccatgcagatggagcgcaaaaagtcccagcatggggctggatcaagtgtcggcgatgccagcagaccgccttataggggtcggtcttccgaatcaagctgtggggtggacggagactacgaggatgcagaactgaacccccgctttcttaaagacaatctgatcgatgccaacggcggcagtagaccaccttggcccccattggagtatcagccctaccaatctatttatgtagggggaatgatggagggtgaaggcaaggggcctctcctgaggtcccagagcacttcggagcaggaaaagcgtctgacgtggccacggcgatcttactccccgagatcattcgaggactgcggaggcggttacacccccgattgtagtagcaatgaaaacctcacatcctctgaggaggactttagctcagggcaaagttccagggttagcccttctccaactacctatcgcatgttccgggataaatcaagaagtcccagccaaaattcccagcagtcttttgactcgagctcccctccaacaccccagtgccacaagaggcatcgccactgtccggtggtcgtgtcagaagctaccatcgtgggcgtccgaaaaactggacagatatggcctaacgatggcgagggggcgttccacggagacgcagatggtagttttggcacaccacccgggtacggatgcgccgctgaccgggccgaggaacagcgtagacatcaggacggcttaccttatatcgatgactctcccagctcctcaccacacctgagctctaagggtagggggtcccgcgatgcacttgttagtggcgccttggagagcaccaaggcttctgaactggacctagagaaaggactcgaaatgcggaaatgggtgctgtccggcattcttgcctcagaggaaatcacgctgtga

SEQ ID NO: 2042 - RNA, 1326 nt, synthetic construct
  misc_feature 1..1326: note = ABX82705 variant
  source 1..1326: mol_type = other RNA
atggtggaccccgtcggcttcgccgaggcttggaaggcacagtttcctgatagcgaaccaccgagaatggagctgaggtccgttggggacatcgaacaagagctcgaacggtgcaaagcctctattcgccgacttgagcaggaggtgaaccaggaacgtttcagaatgatatacctgcagaccttgttagcgaaggagaaaaagtcatatgataggcaacggtggggatttcgcagagctgcccaggcacccgacggtgccagtgaacctagggctagcgcatcccggccacagcccgcccctgctgatggcgccgacccaccccctgcggaggagccagaagcacgcccggatggggagggatctcccggcaaagcccgacctggtacagctagaaggccaggggccgcagcttcgggagaacgggacgatcgtgggccccctgcctcagtagcggccctgcgcagcaatttcgagagaatcaggaagggccacggccagccaggagcagacgctgaaaagcccttttacgtgaacgtcgagttccatcacgagcggggtctagtgaaagttaatgataaggaagtgagtgaccgaatttcctctctcggcagccaagccatgcagatggagcgcaaaaagtcccagcatggggctggatcaagtgtcggcgatgccagcagaccgccttataggggtcggtcttccgaatcaagctgtggggtggacggagactacgaggatgcagaactgaacccccgctttcttaaagacaatctgatcgatgccaacggcggcagtagaccaccttggcccccattggagtatcagccctaccaatctatttatgtagggggaatgatggagggtgaaggcaaggggcctctcctgaggtcccagagcacttcggagcaggaaaagcgtctgacgtggccacggcgatcttactccccgagatcattcgaggactgcggaggcggttacacccccgattgtagtagcaatgaaaacctcacatcctctgaggaggactttagctcagggcaaagttccagggttagcccttctccaactacctatcgcatgttccgggataaatcaagaagtcccagccaaaattcccagcagtcttttgactcgagctcccctccaacaccccagtgccacaagaggcatcgccactgtccggtggtcgtgtcagaagctaccatcgtgggcgtccgaaaaactggacagatatggcctaacgatggcgagggggcgttccacggagacgcagatggtagtttagaactgcagggcaagccatctcggtggacacagtga

SEQ ID NO: 2043 - RNA, 1575 nt, synthetic construct
  misc_feature 1..1575: note = ABX82706 variant
  source 1..1575: mol_type = other RNA
atggtggaccccgtcggcttcgccgaggcttggaaggcacagtttcctgatagcgaaccaccgagaatggagctgaggtccgttggggacatcgaacaagagctcgaacggtgcaaagcctctattcgccgacttgagcaggaggtgaaccaggaacgtttcagaatgatatacctgcagaccttgttagcgaaggagaaaaagtcatatgataggcaacggtggggatttcgcagagctgcccaggcacccgacggtgccagtgaacctagggctagcgcatcccggccacagcccgcccctgctgatggcgccgacccaccccctgcggaggagccagaagcacgcccggatggggagggatctcccggcaaagcccgacctggtacagctagaaggccaggggccgcagcttcgggagaacgggacgatcgtgggccccctgcctcagtagcggccctgcgcagcaatttcgagagaatcaggaagggccacggccagccaggagcagacgctgaaaagcccttttacgtgaacgtcgagttccatcacgagcggggtctagtgaaagttaatgataaggaagtgagtgaccgaatttcctctctcggcagccaagccatgcagatggagcgcaaaaagtcccagcatggggctggatcaagtgtcggcgatgccagcagaccgccttataggggtcggtcttccgaatcaagctgtggggtggacggagactacgaggatgcagaactgaacccccgctttcttaaagacaatctgatcgatgccaacggcggcagtagaccaccttggcccccattggagtatcagccctaccaatctatttatgtagggggaatgatggagggtgaaggcaaggggcctctcctgaggtcccagagcacttcggagcaggaaaagcgtctgacgtggccacggcgatcttactccccgagatcattcgaggactgcggaggcggttacacccccgattgtagtagcaatgaaaacctcacatcctctgaggaggactttagctcagggcaaagttccagggttagcccttctccaactacctatcgcatgttccgggataaatcaagaagtcccagccaaaattcccagcagtcttttgactcgagctcccctccaacaccccagtgccacaagaggcatcgccactgtccggtggtcgtgtcagaagctaccatcgtgggcgtccgaaaaactggacagatatggcctaacgatggcgagggggcgttccacggagacgcagatggtagttttggcacaccacccgggtacggatgcgccgctgaccgggccgaggaacagcgtagacatcaggacggcttaccttatatcgatgactctcccagctcctcaccacacctgagctctaagggtagggggtcccgcgatgcacttgttagtggcgccttggagagcaccaaggcttctgaactggacctagagaaaggactcgaaatgcggaaatgggatcctgtgaagatgacgcccactttctccctgcattgtatgattctttggccagtagagatcaccctgtga

SEQ ID NO: 2044 - RNA, 1398 nt, synthetic construct
  misc_feature 1..1398: note = ABX82707 variant
  source 1..1398: mol_type = other RNA
atggtggaccccgtcggcttcgccgaggcttggaaggcacagtttcctgatagcgaaccaccgagaatggagctgaggtccgttggggacatcgaacaagagctcgaacggtgcaaagcctctattcgccgacttgagcaggaggtgaaccaggaacgtttcagaatgatatacctgcagaccttgttagcgaaggagaaaaagtcatatgataggcaacggtggggatttcgcagagctgcccaggcacccgacggtgccagtgaacctagggctagcgcatcccggccacagcccgcccctgctgatggcgccgacccaccccctgcggaggagccagaagcacgcccggatggggagggatctcccggcaaagcccgacctggtacagctagaaggccaggggccgcagcttcgggagaacgggacgatcgtgggccccctgcctcagtagcggccctgcgcagcaatttcgagagaatcaggaagggccacggccagccaggagcagacgctgaaaagcccttttacgtgaacgtcgagttccatcacgagcggggtctagtgaaagttaatgataaggaagtgagtgaccgaatttcctctctcggcagccaagccatgcagatggagcgcaaaaagtcccagcatggggctggatcaagtgtcggcgatgccagcagaccgccttataggggtcggtcttccgaatcaagctgtggggtggacggagactacgaggatgcagaactgaacccccgctttcttaaagacaatctgatcgatgccaacggcggcagtagaccaccttggcccccattggagtatcagccctaccaatctatttatgtagggggaatgatggagggtgaaggcaaggggcctctcctgaggtcccagagcacttcggagcaggaaaagcgtctgacgtggccacggcgatcttactccccgagatcattcgaggactgcggaggcggttacacccccgattgtagtagcaatgaaaacctcacatcctctgaggaggactttagctcagggcaaagttccagggttagcccttctccaactacctatcgcatgttccgggataaatcaagaagtcccagccaaaattcccagcagtcttttgactcgagctcccctccaacaccccagtgccacaagaggcatcgccactgtccggtggtcgtgtcagaagctaccatcgtgggcgtccgaaaaactggacagatatggcctaacgatggcgagggggcgttccacggagaacatccaggtgcagccgaggaggtttttcagaagttactgcccgacatccggggcgctgccgatgcagaccagcttgtgtgcgaaacacctgactgtccccaacacagtgccgatcatcagtga

SEQ ID NO: 2045 - RNA, 1377 nt, synthetic construct
  misc_feature 1..1377: note = ABX82709 variant
  source 1..1377: mol_type = other RNA
atggtggaccccgtcggcttcgccgaggcttggaaggcacagtttcctgatagcgaaccaccgagaatggagctgaggtccgttggggacatcgaacaagagctcgaacggtgcaaagcctctattcgccgacttgagcaggaggtgaaccaggaacgtttcagaatgatatacctgcagaccttgttagcgaaggagaaaaagtcatatgataggcaacggtggggatttcgcagagctgcccaggcacccgacggtgccagtgaacctagggctagcgcatcccggccacagcccgcccctgctgatggcgccgacccaccccctgcggaggagccagaagcacgcccggatggggagggatctcccggcaaagcccgacctggtacagctagaaggccaggggccgcagcttcgggagaacgggacgatcgtgggccccctgcctcagtagcggccctgcgcagcaatttcgagagaatcaggaagggccacggccagccaggagcagacgctgaaaagcccttttacgtgaacgtcgagttccatcacgagcggggtctagtgaaagttaatgataaggaagtgagtgaccgaatttcctctctcggcagccaagccatgcagatggagcgcaaaaagtcccagcatggggctggatcaagtgtcggcgatgccagcagaccgccttataggggtcggtcttccgaatcaagctgtggggtggacggagactacgaggatgcagaactgaacccccgctttcttaaagacaatctgatcgatgccaacggcggcagtagaccaccttggcccccattggagtatcagccctaccaatctatttatgtagggggaatgatggagggtgaaggcaaggggcctctcctgaggtcccagagcacttcggagcaggaaaagcgtctgacgtggccacggcgatcttactccccgagatcattcgaggactgcggaggcggttacacccccgattgtagtagcaatgaaaacctcacatcctctgaggaggactttagctcagggcaaagttccagggttagcccttctccaactacctatcgcatgttccgggataaatcaagaagtcccagccaaaattcccagcagtcttttgactcgagctcccctccaacaccccagtgccacaagaggcatcgccactgtccggtggtcgtgtcagaagctaccatcgtgggcgtccgaaaaactggacagatatggcctaacgatggcgagggggcgttccacggagacgcagatggtagttttggcacaccacccgggtactgctgtttatgcctgcctgcctggccctctggatgtaccgctgccacggcacgggttactcgtagctga

SEQ ID NO: 2046 - RNA, 1365 nt, synthetic construct
  misc_feature 1..1365: note = ABX82710 variant
  source 1..1365: mol_type = other RNA
atggtggaccccgtcggcttcgccgaggcttggaaggcacagtttcctgatagcgaaccaccgagaatggagctgaggtccgttggggacatcgaacaagagctcgaacggtgcaaagcctctattcgccgacttgagcaggaggtgaaccaggaacgtttcagaatgatatacctgcagaccttgttagcgaaggagaaaaagtcatatgataggcaacggtggggatttcgcagagctgcccaggcacccgacggtgccagtgaacctagggctagcgcatcccggccacagcccgcccctgctgatggcgccgacccaccccctgcggaggagccagaagcacgcccggatggggagggatctcccggcaaagcccgacctggtacagctagaaggccaggggccgcagcttcgggagaacgggacgatcgtgggccccctgcctcagtagcggccctgcgcagcaatttcgagagaatcaggaagggccacggccagccaggagcagacgctgaaaagcccttttacgtgaacgtcgagttccatcacgagcggggtctagtgaaagttaatgataaggaagtgagtgaccgaatttcctctctcggcagccaagccatgcagatggagcgcaaaaagtcccagcatggggctggatcaagtgtcggcgatgccagcagaccgccttataggggtcggtcttccgaatcaagctgtggggtggacggagactacgaggatgcagaactgaacccccgctttcttaaagacaatctgatcgatgccaacggcggcagtagaccaccttggcccccattggagtatcagccctaccaatctatttatgtagggggaatgatggagggtgaaggcaaggggcctctcctgaggtcccagagcacttcggagcaggaaaagcgtctgacgtggccacggcgatcttactccccgagatcattcgaggactgcggaggcggttacacccccgattgtagtagcaatgaaaacctcacatcctctgaggaggactttagctcagggcaaagttccagggttagcccttctccaactacctatcgcatgttccgggataaatcaagaagtcccagccaaaattcccagcagtcttttgactcgagctcccctccaacaccccagtgccacaagaggcatcgccactgtccggtggtcgtgtcagaagctaccatcgtgggcgtccgaaaaactggacagatatggcctaacgatggcgagggggcgttccacggagacgcagatggtagttttggcacaccacccgggtacggatgcgccgctggccggcctccccatttaaccgaactgccagttcagcaccagtga

SEQ ID NO: 2047 - RNA, 1404 nt, synthetic construct
  misc_feature 1..1404: note = ABX82711 variant
  source 1..1404: mol_type = other RNA
atggtggaccccgtcggcttcgccgaggcttggaaggcacagtttcctgatagcgaaccaccgagaatggagctgaggtccgttggggacatcgaacaagagctcgaacggtgcaaagcctctattcgccgacttgagcaggaggtgaaccaggaacgtttcagaatgatatacctgcagaccttgttagcgaaggagaaaaagtcatatgataggcaacggtggggatttcgcagagctgcccaggcacccgacggtgccagtgaacctagggctagcgcatcccggccacagcccgcccctgctgatggcgccgacccaccccctgcggaggagccagaagcacgcccggatggggagggatctcccggcaaagcccgacctggtacagctagaaggccaggggccgcagcttcgggagaacgggacgatcgtgggccccctgcctcagtagcggccctgcgcagcaatttcgagagaatcaggaagggccacggccagccaggagcagacgctgaaaagcccttttacgtgaacgtcgagttccatcacgagcggggtctagtgaaagttaatgataaggaagtgagtgaccgaatttcctctctcggcagccaagccatgcagatggagcgcaaaaagtcccagcatggggctggatcaagtgtcggcgatgccagcagaccgccttataggggtcggtcttccgaatcaagctgtggggtggacggagactacgaggatgcagaactgaacccccgctttcttaaagacaatctgatcgatgccaacggcggcagtagaccaccttggcccccattggagtatcagccctaccaatctatttatgtagggggaatgatggagggtgaaggcaaggggcctctcctgaggtcccagagcacttcggagcaggaaaagcgtctgacgtggccacggcgatcttactccccgagatcattcgaggactgcggaggcggttacacccccgattgtagtagcaatgaaaacctcacatcctctgaggaggactttagctcagggcaaagttccagggttagcccttctccaactacctatcgcatgttccgggataaatcaagaagtcccagccaaaattcccagcagtcttttgactcgagctcccctccaacaccccagtgccacaagaggcatcgccactgtccggtggtcgtgtcagaagctaccatcgtgggcgtccgaaaaactggacagatatggcctaacgatggcgagggggcgttccacggagacgcagttttaaagacagaagtgccacatcagggtgtacggcgtgccagactgagtcttgaggctttgggcgaggatccctcttttctgttccctgccagcgacgggcccaggcactcctcaacctggtga

SEQ ID NO: 2048 - RNA, 1542 nt, synthetic construct
  misc_feature 1..1542: note = ABX82712 variant
  source 1..1542: mol_type = other RNA
atggtggaccccgtcggcttcgccgaggcttggaaggcacagtttcctgatagcgaaccaccgagaatggagctgaggtccgttggggacatcgaacaagagctcgaacggtgcaaagcctctattcgccgacttgagcaggaggtgaaccaggaacgtttcagaatgatatacctgcagaccttgttagcgaaggagaaaaagtcatatgataggcaacggtggggatttcgcagagctgcccaggcacccgacggtgccagtgaacctagggctagcgcatcccggccacagcccgcccctgctgatggcgccgacccaccccctgcggaggagccagaagcacgcccggatggggagggatctcccggcaaagcccgacctggtacagctagaaggccaggggccgcagcttcgggagaacgggacgatcgtgggccccctgcctcagtagcggccctgcgcagcaatttcgagagaatcaggaagggccacggccagccaggagcagacgctgaaaagcccttttacgtgaacgtcgagttccatcacgagcggggtctagtgaaagttaatgataaggaagtgagtgaccgaatttcctctctcggcagccaagccatgcagatggagcgcaaaaagtcccagcatggggctggatcaagtgtcggcgatgccagcagaccgccttataggggtcggtcttccgaatcaagctgtggggtggacggagactacgaggatgcagaactgaacccccgctttcttaaagacaatctgatcgatgccaacggcggcagtagaccaccttggcccccattggagtatcagccctaccaatctatttatgtagggggaatgatggagggtgaaggcaaggggcctctcctgaggtcccagagcacttcggagcaggaaaagcgtctgacgtggccacggcgatcttactccccgagatcattcgaggactgcggaggcggttacacccccgattgtagtagcaatgaaaacctcacatcctctgaggaggactttagctcagggcaaagttccagggttagcccttctccaactacctatcgcatgttccgggataaatcaagaagtcccagccaaaattcccagcagtcttttgactcgagctcccctccaacaccccagtgccacaagaggcatcgccactgtccggtggtcgtgtcagaagctaccatcgtgggcgtccgaaaaactggacagatatggcctaacgatggcgagggggcgttccacggagacgcagatggtagttttggcacaccacccgggtacggatgcgccgctgaccgggccgaggaacagcgtagacatcaggacggcttaccttatatcgatgactctcccagctcctcaccacacctgagctctaagggtagggggtcccgcgatgcacttgttagtggcgccttggagagcaccaaggcttctgaactggaccctgtgaaaatgacgcccactttctccctacattgtatgattctctggccagtagagatcaccctgtga

SEQ ID NO: 2049 - RNA, 1221 nt, synthetic construct
  misc_feature 1..1221: note = ABX82714 variant
  source 1..1221: mol_type = other RNA
atggtggaccccgtcggcttcgccgaggcttggaaggcacagtttcctgatagcgaaccaccgagaatggagctgaggtccgttggggacatcgaacaagagctcgaacggtgcaaagcctctattcgccgacttgagcaggaggtgaaccaggaacgtttcagaatgatatacctgcagaccttgttagcgaaggagaaaaagtcatatgataggcaacggtggggatttcgcagagctgcccaggcacccgacggtgccagtgaacctagggctagcgcatcccggccacagcccgcccctgctgatggcgccgacccaccccctgcggaggagccagaagcacgcccggatggggagggatctcccggcaaagcccgacctggtacagctagaaggccaggggccgcagcttcgggagaacgggacgatcgtgggccccctgcctcagtagcggccctgcgcagcaatttcgagagaatcaggaagggccacggccagccaggagcagacgctgaaaagcccttttacgtgaacgtcgagttccatcacgagcggggtctagtgaaagttaatgataaggaagtgagtgaccgaatttcctctctcggcagccaagccatgcagatggagcgcaaaaagtcccagcatggggctggatcaagtgtcggcgatgccagcagaccgccttataggggtcggtcttccgaatcaagctgtggggtggacggagactacgaggatgcagaactgaacccccgctttcttaaagacaatctgatcgatgccaacggcggcagtagaccaccttggcccccattggagtatcagccctaccaatctatttatgtagggggaatgatggagggtgaaggcaaggggcctctcctgaggtcccagagcacttcggagcaggaaaagcgtctgacgtggccacggcgatcttactccccgagatcattcgaggactgcggaggcggttacacccccgattgtagtagcaatgaaaacctcacatcctctgaggaggactttagctcagggcaaagttccagggttagcccttctccaactacctatcgcatgttccgggataaatcaagaagtcccagccaaaattcccagcagtcttttgactcgagctcccctccaacaccccagtgccacaagaggcatcgccactgtccggtggtcgtgtcagaagctaccagtggccagtga

SEQ ID NO: 2050 - RNA, 2346 nt, synthetic construct
  misc_feature 1..2346: note = AAH58926 variant
  source 1..2346: mol_type = other RNA
atggccacccaggctgacctgatggagctcgatatggcaatggaacccgacagaaaggccgcggtgagccactggcaacagcagtcctaccttgattctggcatccattcaggggctacaactacggcccctagtctgagcggaaaaggtaacccagaggaagaggacgtcgatacctcccaggttttgtatgaatgggagcaaggcttctctcagtcgtttacacaggaacaggtggcagacattgatgggcaatacgccatgactagggctcagcgggtacgcgcagccatgttcccggagaccttagacgagggaatgcagataccctcaacacagtttgatgctgcccaccctaccaatgtgcaacgactggcggaaccaagccagatgctaaagcatgcagtcgtgaacctcatcaattatcaggacgatgccgagctggctactcgtgccattcccgagcttacaaaactgttgaacgacgaagatcaagttgtggtcaataaggcagctgtgatggtacaccagctcagtaaaaaggaggcctccagacatgcgatcatgaggtctcctcagatggttagcgccattgtgcggaccatgcagaacacgaatgacgtcgaaactgcacgctgcaccgctggcacactgcacaacctgtcccaccatagagagggtctcttagccatcttcaagtcagggggaataccagctctggtgaaaatgcttggcagtcccgtggacagcgtcttgttttacgccatcactaccctgcacaatctactcctgcatcaagaaggcgcaaagatggccgttaggcttgctgggggactgcagaaaatggtggcgttgctcaacaagacaaatgtaaaattcctggcaattaccacggattgtttacagatcctggcctatggtaaccaggagtctaagctcattatccttgcttccggcgggcctcaagccctggtgaatataatgcggacttacacatatgagaagttgctatggaccacttcacgcgtcctgaaagtgctcagcgtttgcagttctaacaagccagcaattgtggaagccggaggcatgcaggctctgggtcttcacctgacagacccgtcccagcgattggtccagaattgtctctggaccctgagaaacttaagcgatgccgcaacgaaacaagaggggatggaaggactgctaggcaccctcgtgcagctgcttggctcggacgatatcaacgtagttacatgcgcggctgggattttgtctaatctgacttgtaacaattacaagaacaaaatgatggtgtgccaggtcggaggtatcgaggccctcgtgaggaccgtcctgcgggcaggcgaccgtgaagatatcacagagcccgccatttgtgctcttagacacctgacttccagacatcaggaggccgaaatggcacaaaatgctgtgaggttgcactacgggctccctgttgtggtaaagctgttacatccaccctcacactggcctctgataaaagccaccgtcggactaatccggaacctcgcgctgtgcccagccaatcatgctccccttcgagagcagggcgcaattccgcgcttggtgcagctgctcgttagagcccaccaagacacacagaggcggaccagtatgggtgggactcagcagcaatttgtggaaggcgtccgcatggaggaaatcgtggagggatgtacgggcgctctgcacatattagccagagatgtacataacaggattgtgatccgtgggctgaatacaatccctcttttcgttcagttgctctatagccccattgagaacatccagcgggtcgcagcgggagtgctgtgcgaactagcccaggacaaggaggctgccgaagcaattgaggctgagggtgccaccgcaccactgactgaactcctgcactcccgaaatgagggcgtggccacctacgctgcggccgtcctttttagaatgtctgaagataagcctcaagactataaaaagaggttgagcgttgagctgacatcaagtttattccgcaccgaacccatggcatggaacgagactgctgacctcgggctggatataggagcccagggcgagccacttggttaccggcaggacgatccctcctatcgcagctttcattctgggggctacggacaggacgccctgggcatggatcctatgatggaacacgagatgggagggcaccatccaggtgctgactatccggtggatggcttgcccgacctcgggcacgcacaagatctgatggacggactacctccaggcgattcaaatcagctggcctggttcgacacagatctctga

SEQ ID NO: 2051 - RNA, 1692 nt, synthetic construct
  misc_feature 1..1692: note = AAI21007 variant
  source 1..1692: mol_type = other RNA
atggacgtgggcgagctgctcagctaccagcccaacagagggaccaagaggcctcgggatgacgaagaggaagaacagaaaatgcgccgaaagcaaacaggaactcgtgaaagaggtaggtatcgggaggaggaaatgacggtcgttgaggaagccgatgacgataaaaagcgccttctgcagatcattgacagagatggcgaggaggaagaggaagaggaggagccattggacgagtcctctgtgaaaaagatgatattaaccttcgaaaagaggtcatacaaaaatcaggagctgcggatcaagtttccggataaccccgaaaaattcatggagagtgaactagacctcaatgatattatccaagagatgcacgtagtggctacaatgcctgacctgtatcatcttctggtcgagttgaacgcagtgcagagcctcctggggctgctcggacacgataatactgacgtttccattgccgtggtcgacttactgcaggaacttaccgatatcgacacattgcatgagtctgaagagggcgcggaagtgctgatagatgctctagtagacggtcaggttgtggccctcctggtccaaaaccttgagcgcctggatgagtcggtgaaggaagaggcagacggggtgcacaataccttggccatcgtcgaaaacatggctgagtttcgaccagagatgtgcactgaaggagcacagcagggcctcctgcagtggttactgaaaagactcaaggccaagatgcccttcgatgctaataaactttactgttcagaggttctggccattttgctacaagacaacgatgaaaatagggagctgctcggcgaactggacgggatcgatgtgcttctgcagcagttgagcgtatttaagcggcataaccctagtacagcggaggagcaagaaatgatggagaatctcttcgactccctgtgctcttgtttaatgctgagctccaaccgtgaacgctttctaaaaggagagggtctccagctgatgaatcttatgttgagagaaaagaaaatttcaaggagtagcgcactgaaggtgctcgaccacgccatgatcggcccagaggggaccgataactgccacaaattcgtcgacatactgggacttcggacgatttttcccctgttcatgaagtctcctcgaaagatcaaaaaggtgggcactaccgagaaagaacatgaggaacacgtttgttccattttggcttcactcctgcgcaacttaagaggtcagcagaggacacggctgctaaataagtttactgagaacgatagcgaaaaagtggaccgcctcatggagctgcatttcaagtatcttggggccatgcaagtcgcagataagaaaatcgagggagaaaagcacgacatggtgagaaggggcgagatcattgataatgacaccgaagaggagttttacttgcgtcggctggatgctggcctcttcgtactgcagcacatatgctatatcatggccgaaatttgtaacgcgaatgttccacagatccgacagagagtgcatcaaatattaaacatgagggggagttctattaaaatcgtccgccacatcattaaggagtacgccgaaaatatcggagacggtcggtccccggagttcagagaaaacgagcagaaaaggattctgggccttttggagaatttttga

SEQ ID NO: 2052 - RNA, 1833 nt, synthetic construct
  misc_feature 1..1833: note = CCDS4772.1 variant
  source 1..1833: mol_type = other RNA
atggagaccgcccccaagcctggcaaagacgtgccaccgaagaaagataagctgcagacaaaaagaaagaagcccaggcggtactgggaagaggaaactgtccctacgaccgctggggcaagcccaggaccccctcgcaacaaaaagaatcgagagctccgtccacaaagacccaaaaacgcctatatccttaagaaatccaggatttctaagaagcctcaggttccgaaaaagccacgggaatggaaaaatcccgagtcacagcgcggtctgagtggcacacaggaccctttcccagggcccgcgcctgtgccagtagaggtggtccaaaagttttgcagaatagataaaagcaggaagttgccccactccaaagctaagactcggtctcgcttagaagtggccgaggcagaagaggaggaaacctcgatcaaggccgctcgatcagagctgctactcgcagaggaaccgggattcctggaaggcgaggacggtgaggatacagccaaaatttgtcaggctgacatcgttgaagccgtggatattgcgagcgcagccaagcattttgaccttaacctgagacagttcgggccttacaggttgaattatagtcggaccggacgtcacctcgcttttggcggccgcagagggcatgtcgccgcactggattgggtgactaaaaagctgatgtgcgagatcaacgtaatggaagctgttagggacatacggttcctccactccgaggccttactggcggtggcccagaatcgatggcttcatatctacgataaccaaggaattgaattgcactgtatccgcagatgcgacagggtcacacggctggagtttctacccttccactttctcctggcaaccgcttctgagacgggtttccttacttatctggatgtgagcgtgggcaaaattgtcgccgctttgaatgcccgcgcagggagactcgacgttatgtcccagaacccatacaatgccgtgatccatctgggacactcaaacggcaccgtaagtttatggagccctgctatgaaggaacccctggcgaagatactctgtcataggggtggggtgcgtgcagtcgccgtggactctacaggaacttatatggctacctccggccttgatcaccagctgaaaatttttgacttgcggggcacataccagccactatcaacccgaacgctgccccacggggccggacatctcgcattcagccaaagaggtctgcttgttgccggcatgggggatgtggtcaatatctgggctggacagggcaaggccagtcctccatctctggagcagccgtacttgactcacaggctctccggtcccgtgcatgggctgcaattttgccctttcgaagacgtattaggcgttggacacacaggcgggattaccagcatgctggtgccaggagcgggtgagcccaacttcgatggcctagaatcgaatccttatcgctctcggaaacagagacaggagtgggaggtcaaggcactcctggaaaaagtgccagctgagcttatctgtttggaccccagggccctggcagaagtcgatgtgatctccctcgagcaggggaagaaggagcaaattgaacgcctgggatacgacccgcaggccaaagctccttttcagccaaagcccaaacagaagggccgatcaagtactgccagccttgttaaacggaagcgtaaggtgatggatgaggaacatagagacaaagtaaggcaatccctgcagcagcagcaccacaaggaggcaaaagctaagcctacaggtgcccgcccctctgcgttggatcggttcgtcagatga

SEQ ID NO: 2053 - RNA, 897 nt, synthetic construct
  misc_feature 1..897: note = AAG37878 variant
  source 1..897: mol_type = other RNA
atgggccccaaggacagcgccaaatgcctgcacagagggcctcagccatcccattgggctgcaggagatggtccgacccaagagaggtgtggcccccggtctctcgggtcacctgtgcttggactggacacatgccgcgcctgggatcacgtcgacggccagatcttgggtcagttacgaccactgactgaagaggaagaggaagagggggcgggagctacgctaagtcgtggccccgccttccctggcatggggagcgaggaactcagactggcatccttttacgattggccacttaccgccgaggttccccctgaactgttggctgcagccggattctttcatacaggtcaccaggacaaggtgaggtgtttcttttgctatggcgggctccaatcttggaaacggggagatgacccatggactgagcatgctaagtggttcccgtcgtgtcagtttctgctgcgctcaaaaggcagagatttcgtacacagcgtgcaggagacccacagtcagctcttaggttcctgggacccctgggaggaacctgaagatgccgcgccagtcgcaccctctgtgcctgccagcgggtacccagagctgcccacaccgaggcgggaagttcaatccgagtcagctcaggagcctggaggcgtgagtcccgccgaagcacagcgcgcttggtgggtccttgagccacctggcgcccgagacgtggaagcgcagttgagaaggctgcaagaggaacggacctgcaaggtatgtctagatcgtgccgttagcattgtgtttgtcccctgcgggcatctcgtgtgtgcagagtgcgctccaggactgcagctttgtcccatatgccgcgcccctgtgagatctagggtccggactttcctgtcctga

SEQ ID NO: 2054 - RNA, 2280 nt, synthetic construct
  misc_feature 1..2280: note = EAW60925 variant
  source 1..2280: mol_type = other RNA
atggacctgagcgccctcagagtggaggaagtccagaacgttatcaatgctatgcaaaagattcttgagtgccccatatgtctggaattgatcaaagagcctgtgtccaccaagtgcgatcacattttctgtaaattttgcatgttaaagctgctaaaccagaaaaagggcccatctcagtgtccgctctgcaagaatgacatcacaaaaaggtcactgcaggaaagtactcggttcagccaacttgtagaggagctgttgaagattatctgtgcatttcagctcgatacggggctggaatacgccaactcctataatttcgcgaaaaaggagaacaattctcccgaacatctgaaagacgaggtgtcgataatccagtcaatgggataccgcaaccgagctaagcgtctcttacagagcgagcctgaaaatccaagtctgcaagagacctccctttctgtccagttgagcaacctgggtacagtgagaactctaaggaccaagcagcggattcagccccagaaaacatccgtttatatcgaactcggctcagatagtagcgaggacaccgtgaataaggccacttactgctctgtcggggatcaagaactgcttcagattacacctcaaggaacccgcgacgagatctccctggattcagcgaaaaaggccgcttgtgagtttagcgaaacggacgtgactaacaccgagcaccatcagccaagtaataacgatttgaatacaactgagaaaagagcagccgagaggcaccccgaaaagtatcagggcgaggctgcctctggttgcgagtccgaaaccagcgtatcggaggactgttctgggctctcctcacagagtgatatactgacaacccaacagcgggacacgatgcagcataacttaattaaactgcagcaagaaatggcggagctcgaagcagttcttgagcagcacggaagccagccttccaactcttacccaagcatcatttcagacagttccgccctggaggatttgcgcaatccggaacagagcacttctgagaaggtgctaacatcacaaaagagtagcgaatatcccatctcccagaaccctgagggcctgtctgctgacaaattcgaggtctcggccgatagctccacctcaaagaataaagaaccaggcgtggagcgaagttctcccagcaagtgcccttccctcgacgatagatggtacatgcactcatgcagcgggtctctgcagaacaggaattacccatcccaggaagaacttatcaaagtggtcgacgttgaagaacaacagctggaggaaagtggaccccatgatttgactgagacaagctatctcccgcggcaggacctggaaggtaccccttacttagagtctggcatttccctgttttcagatgaccccgaaagtgatccaagcgaggaccgtgcacctgagtcggctcgcgtggggaacataccctcctctacgagcgccctaaaggtaccacaactcaaggtggcggaatcagcccagagtcccgcagctgcccacaccacagacactgctggatataatgccatggaggaatccgtctctagagagaaacctgaactgaccgcaagcacagagagggtgaacaagcggatgtccatggttgtgtcaggccttactccagaggagttcatgttggtctacaaatttgcccgaaagcatcacatcaccctgacaaatctcattaccgaggaaactacgcacgtggtaatgaaaacagatgctgagttcgtttgtgagcgcaccctgaagtattttcttggtatcgcagggggaaagtgggtggtcagctacttctgggtgactcagagtataaaagaaagaaagatgctgaacgagcatgactttgaagtcaggggcgatgtggttaatggccggaaccaccaggggccgaaacgcgcaagagagtctcaagacaggaagattttccgtggattggaaatctgctgttatggtcccttcaccaatatgcctacagatcagctcgagtggatggtgcagctgtgcggcgcctccgtagtcaaagagttaagctcgtttaccctggggactggagtgcatccaatcgttgtggtccagcccgacgcttggacagaagataacggcttccacgccattggtcaaatgtgtgaggcacctgtggtaacgcgggaatgggtgctagactcagttgccctctaccagtgccaggagctggatacctaccttatcccacagattccccattctcactattga

SEQ ID NO: 2055 - RNA, 2160 nt, synthetic construct
  misc_feature 1..2160: note = EAW60922 variant
  source 1..2160: mol_type = other RNA
atggacctgagcgccctcagagtggaggaagtccagaacgttatcaatgctatgcaaaagattcttgagtgccccatatgtctggaattgatcaaagagcctgtgtccaccaagtgcgatcacattttctgtaaattttgcatgttaaagctgctaaaccagaaaaagggcccatctcagtgtccgctctgcaagaatgacatcacaaaaaggtcactgcaggaaagtactcggttcagccaacttgtagaggagctgttgaagattatctgtgcatttcagctcgatacggggctggaatacgccaactcctataatttcgcgaaaaaggagaacaattctcccgaacatctgaaagacgaggtgtcgataatccagtcaatgggataccgcaaccgagctaagcgtctcttacagagcgagcctgaaaatccaagtctgcaagagacctccctttctgtccagttgagcaacctgggtacagtgagaactctaaggaccaagcagcggattcagccccagaaaacatccgtttatatcgaactcgccgcatgcgagttttcagaaaccgatgtgactaatacagagcaccatcaacctagtaacaatgacctgaacaccacggagaagcgcgccgctgaaagacacccagagaaataccagggcgaagcagccagcgggtgtgagtctgaaacttccgtctcagaggattgcagcggacttagttctcaatccgacattctgaccacacagcagagggatactatgcagcataatttgatcaagctccaacaggagatggctgaactggaggccgtgttagaacagcacggcagccagccctcgaactcttatccttccataatttcagacagtagcgcgctggaggatctccggaacccagaacaatccacctctgagaaagcagtacttacaagccagaagtcaagtgagtacccgatctcccagaatcccgaaggtctgagcgccgacaaattcgaggtttctgctgattcaagtaccagcaagaacaaggaacctggggtggagcgctcctctccatcgaaatgtcccagcttggacgaccgatggtatatgcactcctgctcaggaagtctacagaatagaaactacccttctcaagaggaactgattaaggtcgtggatgtggaggaacagcagctcgaggaaagcggcccacatgacctgacggagacttcctaccttcccaggcaggatctggagggcacaccgtatttggaatcagggatcagcctcttttctgacgatcctgagtccgaccccagtgaagatcgggccccagagagcgcacgtgtcggaaatatcccttcttccacctcagctctgaaagttccccaattaaaggtggccgaaagtgcgcagagcccagccgcagctcacactacagacaccgccggttacaacgctatggaggagtcggtatcccgcgaaaaacccgagctgacggcctctaccgaaagagtgaataagaggatgagcatggtcgtgtcaggcctaacacctgaggagttcatgctcgtttataagtttgcacggaaacatcacattactctgaccaaccttataacagaagagactacccacgtggtcatgaagacagatgccgagttcgtgtgcgaacgaaccttgaaatactttctggggatcgctggaggcaagtgggtagttagttatttctgggtgactcagtccattaaagaacgcaagatgctcaatgagcatgactttgaggtcagaggtgatgtggtcaacgggaggaatcaccaaggaccaaagcgggcgcgcgaatctcaggacagaaaaatcttcaggggcctggagatatgttgctacggcccgttcacgaacatgcccacagaccagcttgaatggatggtgcagctgtgtggggcaagcgttgtgaaggagttgtcctcatttaccctcggaactggtgtacatcctattgtcgtggttcaaccagatgcctggaccgaagacaatggcttccacgctatcgggcagatgtgcgaggcccccgtggtcacacgtgagtgggtgctggatagcgtagcattatatcagtgtcaggaactggacacctacctaatccctcaaattccacatagtcactactga

SEQ ID NO: 2056 - RNA, 2166 nt, synthetic construct
  misc_feature 1..2166: note = EAW60923 variant
  source 1..2166: mol_type = other RNA
atggacctgagcgccctcagagtggaggaagtccagaacgttatcaatgctatgcaaaagattcttgagtgccccatatgtctggaattgatcaaagagcctgtgtccaccaagtgcgatcacattttctgtaaattttgcatgttaaagctgctaaaccagaaaaagggcccatctcagtgtccgctctgcaagaatgacatcacaaaaaggtcactgcaggaaagtactcggttcagccaacttgtagaggagctgttgaagattatctgtgcatttcagctcgatacggggctggaatacgccaactcctataatttcgcgaaaaaggagaacaattctcccgaacatctgaaagacgaggtgtcgataatccagtcaatgggataccgcaaccgagctaagcgtctcttacagagcgagcctgaaaatccaagtctgcaagagacctccctttctgtccagttgagcaacctgggtacagtgagaactctaaggaccaagcagcggattcagccccagaaaacatccgtttatatcgaactcggctcagatagtagcgaggacaccgtgaataaggccacttactgctctgtcggggatcaagaactgcttcagattacacctcaaggaacccgcgacgagatctccctggattcagccaaaaagggcgaggcagctagcggttgtgaaagtgagacgtctgtgtccgaagactgcagcgggttgtcgtctcagtccgatatactcactacccagcagagagacacaatgcaacacaacctgattaaattacagcaggagatggcagaactggaggccgtactcgagcagcatggatcacaaccaagtaatagctatccctccatcatttctgatagctcagctcttgaagacctgaggaaccctgagcagagtacttccgaaaaggccgttttgaccagccagaaatcttcagagtacccaatcagtcagaatccggaaggcctaagcgcggacaagtttgaggtgtccgcagattcttcgacaagcaagaacaaagagcccggcgtcgaacggtcctcacctagtaagtgtccatctctggacgatcgctggtatatgcacagctgctccgggtcactccaaaaccgaaattaccccagccaggaggaactgatcaaagtggtggacgtcgaggagcagcagcttgaagagtctggacctcatgatctgaccgaaacgtcctacttgccaagacaagacctcgagggtactccctatctggaaagtggcattagcttattctctgatgacccggagtccgatccttcagaggacagggcccccgaaagtgctcgggttgggaacataccaagctcgacatccgccctgaaggtgcctcagctaaaagtagcagagtctgctcagagccccgccgcggcccacaccactgatacagcaggatacaatgctatggaagagtcagtgagtcgtgaaaagccagagctcaccgcctccacggagcgcgtcaacaagagaatgtctatggtggttagcggcctgacccccgaagagtttatgcttgtgtataaattcgctaggaagcaccatatcacattgactaatctgattaccgaagagacaactcacgtcgtgatgaaaaccgacgccgaatttgtatgcgagcggacactcaagtacttcctgggtatcgcagggggaaaatgggttgtgtcctatttttgggtcacccaatcaataaaggagcgaaagatgcttaacgaacatgacttcgaggtgcgcggcgatgtcgtgaatggcagaaaccaccaggggcctaaaagggcccgggaaagccaggaccgcaagatttttagaggactggagatctgttgctacggtccattcactaatatgccgacggatcagttggagtggatggttcaactctgtggcgctagtgtggtaaaagaactgtcttccttcacattagggaccggagtccaccccatcgtggttgtgcagcctgacgcgtggactgaggataacggctttcatgcaattggtcagatgtgcgaagccccagtcgtgaccagggagtgggtactggacagcgtggctctatatcagtgtcaagaactcgatacatacctgatcccccagattcctcactcgcattactga

SEQ ID NO: 2057 - RNA, 36 nt, synthetic construct
  misc_feature 1..36: note = AIC83575 variant
  source 1..36: mol_type = other RNA
atggacctgagcgccctcagagtggaggaagtctga

SEQ ID NO: 2058 - RNA, 522 nt, synthetic construct
  misc_feature 1..522: note = ABC59810 variant
  source 1..522: mol_type = other RNA
atggacgccgagttcgtgtgcgaaagaaccctgaagtactttctcggcatcgctgggggaaaatgggtcgttagctatttctgggtgacacagtccattaaggagaggaaaatgcttaacgaacacgattttgaggtacggggtgacgtggtcaatggccgcaaccatcaagggcccaagcgagcacgtgaatctcaggatagaaaaatattcaggggactggagatctgttgctacggcccttttactaatatgccaacggaccagttggagtggatggtgcagttatgtggtgcctcagttgtgaaggaactgagtagcttcaccctagggacaggagtccacccgattgtggtagttcaacccgatgcgtggactgaggacaacggctttcatgctatcggccagatgtgcgaagcccctgtggtcacccgggagtgggtgctcgattccgtggcactgtatcagtgtcaggagcttgacacatacctgattccacaaatcccccactctcattattga

SEQ ID NO: 2059 - RNA, 1065 nt, synthetic construct
  misc_feature 1..1065: note = ABC88652 variant
  source 1..1065: mol_type = other RNA
atgcacagctgctccggctctctgcagaacagaaattacccctcacaagaggaactcatcaaggtggtcgacgttgaggaacagcagcttgaggaaagtgggcctcatgatctgaccgagacaagctatttgccaaggcaggacttagagggaactccgtacctggaatccggtatttctctattctcggatgaccccgagtcagatcctagcgaagaccgggccccagagagtgctcgcgtgggcaacataccctcctctacgagcgcactcaaagtacctcaactgaaggtggccgagtccgcgcaggggccagctgccgcacacaccacagatactgccggatataatgctatggaagagtcagtcagtcgagaaaaacccgagcttaccgcaagcacagaacgtgtgaacaagagaatgtctatggttgtgtccggcctgacccctgaggagtttatgttggtctacaaattcgccaggaagcatcacatcactctcacaaatctgattaccgaagagacgactcatgtggtaatgaagaccgacgctgaatttgtttgtgagcggacactgaaatatttcctcggtatcgccgggggaaagtgggtggtctcatacttttgggtgactcagagcattaaagaacgcaagatgttaaacgagcacgatttcgaggtgagaggcgacgtcgttaatggcaggaaccaccaggggccaaaacgggcgcgcgaaagtcaagatcgaaagatctttagaggactggagatatgctgttatggtccgttcaccaatatgcccacagaccagcttgaatggatggtgcagttgtgcggcgcatctgtagtgaaggagctgtccagctttaccctagggacgggagtccatcctatcgtggttgtgcagccagatgcctggactgaagacaacggcttccacgctattggtcaaatgtgtgagacacccgtcgtgaccagggagtgggtactcgactcggttgccctgtaccagtgccaggaacttgatacttacctgatccctcaaattccacattctcactattga

SEQ ID NO: 2060 - RNA, 2043 nt, synthetic construct
  misc_feature 1..2043: note = EAW60939 variant
  source 1..2043: mol_type = other RNA
atggacctgagcgccctcagagtggaggaagtccagaacgttatcaatgctatgcaaaagattcttgagtgccccatatgtctggaattgatcaaagagcctgtgtccaccaagtgcgatcacattttctgtaaattttgcatgttaaagctgctaaaccagaaaaagggcccatctcagtgtccgctctgcaagaatgacatcacaaaaaggtcactgcaggaaagtactcggttcagccaacttgtagaggagctgttgaagattatctgtgcatttcagctcgatacggggctggaatacgccaactcctataatttcgcgaaaaaggagaacaattctcccgaacatctgaaagacgaggtgtcgataatccagtcaatgggataccgcaaccgagctaagcgtctcttacagagcgagcctgaaaatccaagtctgcaagagacctccctttctgtccagttgagcaacctgggtacagtgagaactctaaggaccaagcagcggattcagccccagaaaacatccgtttatatcgaactcggcgaggccgcatcagggtgcgaaagtgagaccagcgtgtctgaggattgttccggactgtcaagccaaagtgacattcttactacacagcaacgcgataccatgcagcacaatctgatcaagttgcagcaggaaatggccgagctcgaagctgtcctggagcaacatggctctcagccttccaacagctacccatcgataatttctgactcctcagcattagaagatctgagaaatcccgagcagagtacgagcgagaaagccgtgctcacttcccagaagtctagcgaatatcctatctcacaaaacccagagggtcttagtgctgacaaatttgaagtatccgccgatagctctacctcaaagaataaagagccgggggttgaaaggagtagcccctccaagtgcccttctctggacgatcggtggtacatgcactcgtgtagcggatccttgcagaaccgcaactatccatcacaggaggagctaattaaggtggtcgacgtggaggaacagcaactggaagagagtggcccccatgacctcacagagacttcttacctgcctcgacaggatcttgaaggcaccccatacctggagagcgggatctccttgttctcagacgatcccgaaagcgacccgtctgaggatagagcgcctgaatccgcaagggtgggaaatatccccagtagcacatctgccctcaaagtcccacagctgaaggttgctgagtccgcccagagtcctgcagctgcccacaccacggacactgcgggttataacgccatggaggaatcagtgagccgggagaaacccgaattaacagcatcgaccgagcgtgtaaataagcgcatgtccatggtggtctctggcctgactccagaagagtttatgctagtgtacaaattcgctagaaagcaccatattacactcaccaacctgataacggaggaaaccacacacgttgtgatgaagactgatgccgagtttgtctgcgaaaggacccttaaatatttcttggggatcgctggaggcaagtgggtggtaagctacttttgggttacacaatcaattaaagagcggaagatgctgaatgaacatgacttcgaggtgcgaggtgatgtcgtgaacgggcgcaatcaccagggacccaaaagagccagggagagtcaggaccggaagatctttcgcggcctcgaaatatgctgttatggccctttcactaacatgccaaccgatcaactggagtggatggtccagctttgcggggcatccgtggttaaggaactgtctagcttcacattgggaaccggtgtgcacccgattgtagtcgtgcagcccgacgcctggactgaggacaatggctttcatgctatcgggcagatgtgtgaggcgcctgttgtgacgagagaatgggtcctcgattccgtggcactgtaccaatgccaggagttagacacatatctgatcccacagattccccactcacattactga

SEQ ID NO: 2061 - RNA, 546 nt, synthetic construct
  misc_feature 1..546: note = AAC72302 variant
  source 1..546: mol_type = other RNA
atgctgctcgagcccggcagagggtgctgtgcccttgctatcctgttggcaattgtggacatacagagcggaggttgcatcaacattacctcctctgcctcacaagaaggcacaaggttaaatctgatctgtactgtctggcacaagaaagaggaagcggaggggttcgttgtgtttctatgcaaggatcggagtggagactgtagccctgaaacgtccctcaaacagctgcgccttaagcgagatccaggcattgacggtgtaggggagatctcttcgcagctgatgttcaccatatcacaggtgacaccgttgcatagcggaacttaccaatgctgtgctcgtagtcagaaatccggcatcagactccagggccactttttctctattctgtttaccgagacagggaactataccgtcactggactgaagcagaggcaacatctcgagttcagccacaatgaaggtacattatcctcaggctttctgcaggaaaaggtgtgggttatgcttgtgaccagtttggtcgccctgcaggcactatga

SEQ ID NO: 2062 - RNA, 639 nt, synthetic construct
  misc_feature 1..639: note = BAG58223 variant
  source 1..639: mol_type = other RNA
atgctgctcagcgtgtacttcaaggagcagtttcttgacggcgatgggtggacctccagatggatcgaatctaaacacaagtcagacttcggaaaatttgtcctgagtagcggtaagttctatggcgatgaggaaaaagacaaggggttgcaaacatcccaggatgccaggttttacgctttatctgcatcgttcgagcccttttcaaacaagggacagactctggttgtgcagttcacggtaaaacatgaacaaaatattgactgcggcggtgggtatgtgaagctatttcctaacagcctcgatcagaccgacatgcacggagatagtgagtacaatataatgttcggcccagacatctgtggcccggggactaaaaaggtccatgtgatttttaactataaaggaaagaatgttctgatcaacaaggatattcggtgcaaagacgatgagttcacacacctttacaccctgatcgtgcgccccgacaatacatatgaagtcaagatagacaactcccaggtggagtctggtagcttggaagatgactgggattttctccctcccaaaaagatcaaagacccagatgcctccaagcctgaggactgggatgagcgagcgaaaattgacgatccatga

SEQ ID NO: 2063 - RNA, 891 nt, synthetic construct
  misc_feature 1..891: note = BAG65301 variant
  source 1..891: mol_type = other RNA
atgcacggcgacagcgagtacaacatcatgttcgggcccgatatttgcggacctggtaccaagaaagtgcatgtcatatttaattataagggcaaaaacgttctgatcaataaggacattagatgtaaagatgacgaatttacacacctctacactcttatcgtgaggccagataacacgtatgaggtaaagattgacaattcccaggtggaatctgggtcactggaggatgactgggatttcttgccgcccaagaaaatcaaggaccctgatgccagtaaaccagaagactgggatgagcgggctaagatagacgaccccaccgatagcaaacctgaggactgggataagccagaacatatccccgaccctgatgcaaagaaaccagaggactgggatgaagagatggacggagagtgggaaccgcccgtcattcaaaaccctgagtacaagggcgaatggaaaccacgccagatcgataatcccgactataagggtacatggattcaccctgagatcgataacccagaatactcccccgacccgtctatatatgcctacgacaatttcggggtgttaggactggatctatggcaggttaaatcgggcactatttttgacaacttcctcatcaccaatgatgaggcgtacgctgaggaatttggcaacgagacatggggagtgaccaaggccgcagaaaaacagatgaaggacaagcaagatgaggaacagcgactgaaagaggaggaagaggacaagaaacgtaaggaagaggaagaggccgaggataaagaagacgatgaggacaaggatgaagacgaggaggatgaagaggacaaggaagaggacgaagaggaggatgtccctgggcaggctaaagacgaactttga

SEQ ID NO: 2064 - RNA, 1254 nt, synthetic construct
  misc_feature 1..1254: note = AAA36582 variant
  source 1..1254: mol_type = other RNA
atgctgctcagcgtgccccttctgttgggcttactggggctagccgtcgctgagcctgcagtttacttcaaggaacagtttctcgacggagatggttggacctccagatggatcgagtctaaacacaagtcagacttcggcaaatttgtgctgagtagcgggaagttctatggagatgaagagaaagacaagggccttcaaacatcccaggatgccaggttttacgcgctgtctgcttcgttcgaaccattttcaaacaagggtcagactttggtagtgcagttcacggtcaaacatgagcaaaatattgactgcgggggaggctatgtgaagctctttccgaacagcctggatcagaccgacatgcacggcgatagtgagtacaatataatgttcgggcccgacatctgtggacctggtactaaaaaggttcatgtgatttttaactataaaggcaagaatgtcctgatcaacaaggatattcggtgcaaagacgatgagttcacacacctctacaccttaatcgtgcgcccagacaatacatatgaagtaaagatagacaactcccaggttgaatctgggagcctggaggatgactgggattttcttccccctaaaaagatcaaagacccagatgcctccaagcccgaggactgggatgaacgagcaaaaattgacgatcctaccgactcaaagccagaggattgggacaagccggaacatatccccgaccctgatgccaaaaagccagaggactgggatgaagagatggacggagagtgggaaccccctgtgattcagaatccagagtacaaaggcgaatggaagccccgtcaaatcgataacccggactacaaaggtacttggatacaccctgagattgataatcccgaatatagtccagaccctagcatctacgcttatgataacttcggggtcttgggactggacctatggcaagtgaagtctggcacaattttcgataattttctcatcaccaacgacgaggcatacgccgaggagttcggcaatgaaacgtggggagtgactaaggctgccgaaaaacagatgaaggataaacaggacgaggaacagagactgaaggaggaggaagaggacaaaaagaggaaggaagaggaggaagcggaggataaagaagacgatgaggacaaggatgaagacgaggaggatgaagaggacaaagaagaggatgaagaggaggacgtccccgggcaggcaaaggatgaactttga

SEQ ID NO: 2065 - RNA, 1155 nt, synthetic construct
  misc_feature 1..1155: note = BAB71655 variant
  source 1..1155: mol_type = other RNA
atggccagagctctggtgcagctctgggcaatctgcatgcttagggtcgccctggcgaccgtttacttccaagaggaatttttggacggcgagcactggcggaaccgctggttacagagcacaaatgattcccgattcgggcattttcgtctgtcttcaggaaagttctatggtcacaaagaaaaggacaaaggcctacagactacgcagaacgggagattttacgctattagtgccaggttcaagccctttagcaataaaggaaagaccctcgtgatacaatatacagtaaagcatgagcagaaaatggattgtggcggtgggtacatcaaggtgttccctgcagacattgatcagaaaaacctgaatggaaagtcccagtattacatcatgtttggcccagacatttgcggcttcgatatcaaaaaggtccacgtgatacttcattttaagaacaaatatcacgaaaataagaaactgatccggtgtaaggttgacgggttcactcacttgtacaccctcattctgcgcccggatctgtcttacgacgtgaaaatcgatggacaatcgattgagtcaggtagcatcgagtatgactggaacctcacaagtttaaagaaagaaacctcccccgccgagtctaaggattgggaacagactaaggacaataaagctcaggactgggagaagcattttctggatgcaagcacatccaaacagtcagactggaacggcgatcttgacggggattggcctgccccaatgttgcaaaagcccccttaccaggacggactgaaaccagagggcatacacaaggatgtctggctacatagaaagatgaaaaataccgactatctcacgcagtacgatctgagtgaatttgagaacattggtgctatcgggcttgaactgtggcaagtgaggagcggaactattttcgacaatttcttgatcaccgatgacgaggaatatgccgacaacttcggcaaggcgacatggggcgagactaaagggcccgagcgggaaatggatgcaatccaggccaaggaggaaatgaaaaaggctcgcgaggaagaggaggaggaactcctgtctggaaagattaatcgacacgaacactactttaaccagttccatagaaggaacgagttatga

SEQ ID NO: 2066 - RNA, 330 nt, synthetic construct
  misc_feature 1..330: note = CAA10193 variant
  source 1..330: mol_type = other RNA
atgctgatggcccaggaggctctcgcattccttatggcccaaggcgcgatgctggctgcccaggaaagaagggtgccccgggcagccgaggtccctggggctcagggacagcaaggtccacgcggccgagaagaggcaccgcgtggggttagaatggccgtgcccttgttaaggcggatggaaggagctcctgccggcccaggtgggcgcaccgcggcatgctttagctgtacatccagatgcctgtctaggcggccctggaagcgctcatggagtgccggaagctgtcctggcatgccacacctatcccccgaccagggccgattctga

SEQ ID NO: 2067 - RNA, 1440 nt, synthetic construct
  misc_feature 1..1440: note = CAA66853 variant
  source 1..1440: mol_type = other RNA
atggacttcagcagaaacctgtacgatatcggcgagcagctcgactccgaagatcttgcctctctgaagtttttgtcattagactatattccccaaaggaaacaggagcctataaaggatgctctgatgctattccagcggctccaggaaaaacgcatgctggaggaaagtaatcttagctttctgaaggagctcctcttccgaatcaaccgtctggacctgctcattacctacttaaatacaagaaaagaggaaatggagagggaactgcaaactccagggcgggcacagatctccgcctatcgcgtgatgctttaccagatttctgaggaggtctcgagatcagaattgaggagctttaagttcctgctacaggaggaaatcagtaagtgcaaactcgatgacgatatgaacctgcttgacatatttatcgagatggaaaagcgggttattctgggagagggtaaattggatatcctcaagcgcgtgtgtgcgcaaattaataaatccctgttaaagatcataaacgactatgaggagttctctaaggagcgaagctcctcactggaaggcagtccggatgagtttagcaatggggaagagttgtgcggagtaatgacgatttctgactcccccagagagcaggactcagaaagccagacccttgataaagtgtaccagatgaagagtaaacctaggggctattgtctgatcattaacaatcacaacttcgctaaggcccgggagaaagtcccaaagttgcattctatccgtgaccgcaatggtacacacctagatgcaggggccctgactaccacatttgaagaactccatttcgaaatcaaaccccacgacgattgcaccgtggagcaaatttacgagatactgaagatctaccagcttatggaccattccaacatggattgttttatttgctgtatcctgagccacggagacaagggcataatttatggcactgatgggcaggaagctcctatctacgagttgacatcgcaattcaccggactcaaatgcccatctctggcaggtaagcccaaagttttctttatccaggcctgtcagggcgacaattatcagaaggggattcctgtggaaacggattccgaggagcaaccatacttagaaatggacctgtcaagtccgcagactagatatatccccgacgaggctgatttcctactcggaatggccaccgtcaacaattgcgtgagctacaggaaccctgcggaaggcacatggtatattcagtccctgtgtcagtctcttcgggagcgatgcccacgcggtgacgatatattgactatcctgaccgaagtaaactacgaggttagcaataaagacgataagaagaacatggggaaacaaatgccccagcctacatttaccctcagaaagaaactggtgttcccatcagactga

SEQ ID NO: 2068 - RNA, 1569 nt, synthetic construct
  misc_feature 1..1569: note = CCDS2340.1 variant
  source 1..1569: mol_type = other RNA
atgaaaagccagggccaacactggtactcctcttcagacaagaactgcaaggtgagtttcagagagaaactgctcatcattgatagcaatcttggggtccaggacgttgaaaacctgaagtttttgtgtataggattagtgcccaataaaaagctggagaagtcctcttcggcctcagatgtattcgaacatctactcgctgaggacctgcttagcgaagaggatccatttttcctggcagagttgctctatatcattaggcagaaaaagctgctgcagcacctcaactgcaccaaagaagaggtggaacggttactgcctacacgccaacgagtcagtctttttcgtaatttgctgtacgagctatccgagggtatcgactctgaaaacctcaaggatatgattttcctgcttaaagacagcctgccgaagactgagatgacgtccttgtcatttctcgccttcctggaaaagcagggcaaaatcgatgaggacaatttaacctgtctggaagatctctgcaagacagtggttcccaaacttctgagaaacatagagaagtataaaagggagaaggcgatccagattgtgactcctccagtcgacaaagaagctgagagttaccagggggaagaggaattggtgagccaaaccgatgtaaagacatttctagaggccctgccccaggagtcttggcagaataagcatgcaggatccaacggcaatcgggccaccaacggtgctccttcactcgttagccgcgggatgcagggagcaagtgccaatactctgaactctgaaacatccaccaaaagagctgccgtgtataggatgaatcggaaccaccgcggcctttgtgtcatcgtgaacaatcatagcttcacgtcgctgaaggaccgacaaggcactcacaaagacgcggagattttgtctcacgtgtttcagtggctcgggttcaccgtccatatccacaacaatgttacaaaggtggaaatggagatggtactgcagaaacaaaagtgcaacccagcacatgccgatggagactgttttgtgttctgcatattaactcacggtagattcggcgctgtctactcctcagatgaagccctgattcccatcagggagattatgagtcactttaccgcactacagtgtcctcggctcgctgagaagccaaaactgttctttatccaggcctgccagggggaagagatccaaccgagcgtgtccattgaagcggacgcccttaatcccgagcaggcacctacatctttgcaggatagcataccagctgaggccgacttcctgctcggactggctaccgttcccggctatgtgtcatttcgtcatgtcgaagagggtagttggtacatccagtccctttgtaaccacctgaagaaattggtgcctcgccatgaagatattctcagcatcctgacggccgtaaatgacgatgtttctagaagggtggacaagcaagggactaaaaagcagatgccacagcccgcattcacattacggaagaaactggtctttccggtgcctctagatgccctctcactgtga

SEQ ID NO: 2069 - RNA, 1020 nt, synthetic construct
  misc_feature 1..1020: note = EAW65632 variant
  source 1..1020: mol_type = other RNA
atgtggcagctgtgggccagcctctgctgtcttctggtgttggctaacgcaagatccaggccctctttccaccctttatcagacgagctggtcaattacgttaacaagcggaataccacatggcaagccggccataacttttataatgtggatatgagttacctaaaacgcctctgcgggactttcctgggaggtccaaagccgccccagcgagtaatgtttacggaagaccttaaactgcctgcgagcttcgatgctcgtgagcagtggccacagtgtcccaccatcaaggaaattagagaccaaggctcctgcgggtcttgttgggcctttggagcagtggaggccatatcggataggatctgcattcacacaaacgctcatgtctcagtggaagttagcgcagaggacttgctcacttgttgcggcagtatgtgtggtgatgggtgcaatggaggctatcctgccgaggcttggaacttctggacccggaaaggcctggtgtccgggggactgtacgaatctcacgtcggttgtcgcccatatagcattcccccttgcgagcatcacgtgaatggctccagaccaccgtgcacaggggaaggagacacccccaagtgttcaaagatctgcgagcctggctacagtccaacttataaacaggataagcactacggttacaacagctattctgtatccaattcagagaaagacatcatggccgaaatatacaagaacgggcccgttgagggagcgtttagcgtgtatagtgatttcctcttatacaaatctggcgtctatcagcatgtgacaggcgaaatgatgggagggcacgcaatcaggattctgggttggggcgtggagaatgggaccccttactggcttgtcgccaactcctggaatacggactggggagataacggctttttcaagatcttgcggggtcaggaccattgtgggattgaaagcgaggttgtggctggcatcccacgcactgaccaatattgggagaagatatga

SEQ ID NO: 2070 - RNA, 1020 nt, synthetic construct; identical to SEQ ID NO: 2069
  misc_feature 1..1020: note = AAC37547 variant
  source 1..1020: mol_type = other RNA

SEQ ID NO: 2071 - RNA, 1002 nt, synthetic construct
  misc_feature 1..1002: note = EAW62731 variant
  source 1..1002: mol_type = other RNA
atgaaccccaccctgatcctcgccgctttctgccttggcattgcaagcgccacactgacttttgaccactccttggaggcgcagtggacgaagtggaaagctatgcataatagattatacgggatgaacgaagagggatggaggcgggccgtgtgggaaaagaatatgaaaatgatagagctgcacaaccaagaatatcgcgagggtaagcattctttcaccatggcaatgaatgcctttggcgatatgacatcagaggagttccgacaggtcatgaacgggtttcagaatcgtaaacctagaaagggaaaggttttccaggaaccactattttacgaagctccgaggagtgtggactggcgggagaaaggctatgtaactcccgtgaagaaccaaggtcagtgtgggagctgctgggcattctccgccaccggagctctcgagggccagatgtttcgcaaaacaggcagactgatctctctttcggaacagaatctggtcgattgttcagggcctcaaggaaacgagggttgcaatggcgggttgatggactacgccttccagtatgtgcaggataacggaggcctcgacagcgaagagagttacccatatgaagcgaccgaggagtcctgtaagtacaatcccaaatactctgttgcaaacgatactggttttgtggacattcctaagcaggaaaaggccctgatgaaagctgtcgccacagtggggccaatcagcgtagcaattgatgctggacacgagtccttcctgttttataaggaaggcatctacttcgagcccgactgctcaagtgaagatatggaccatggcgttctcgtggtcgggtatggattcgagagcaccgagtctgataataacaaatactggttagtgaagaactcctggggtgaagagtggggcatgggagggtatgtgaaaatggccaaggacaggcggaatcactgtggcatagcgtcagccgcaagctaccctacggtctga

SEQ ID NO: 2072 - RNA, 1002 nt, synthetic construct; identical to SEQ ID NO: 2071
  misc_feature 1..1002: note = AAA66974 variant
  source 1..1002: mol_type = other RNA

SEQ ID NO: 2073 - RNA, 456 nt, synthetic construct
  misc_feature 1..456: note = AAG17239 variant
  source 1..456: mol_type = other RNA
atggactacgccttccagtatgtgcaagataacggcgggctggacagcgaggaatcctacccctatgaggctaccgaagagtcttgcaagtacaatcctaaatattcagtcgcaaacgatacaggatttgttgacatcccaaagcaggaaaaagccctcatgaaggcggtggctactgtaggtccgattagtgtggccatagatgcaggccacgagagcttcctgttttacaaagaggggatctatttcgaacccgactgttcctctgaggatatggaccatggagtccttgtggttggctacggttttgaatcgacggagtcagataataacaagtactggttggtgaagaatagctggggagaggaatgggggatgggcggctatgtcaaaatggccaaggacagaaggaaccactgcgggattgctagtgcagcctcctaccctaccgtgtga

SEQ ID NO: 2074 - RNA, 984 nt, synthetic construct
  misc_feature 1..984: note = AAA51932 variant
  source 1..984: mol_type = other RNA
atgctgttcctccttctgcccttgttagccgtgctgcctggcgacgggaacgctgatggactaaaggagccactcagctttcacgtcacctggatcgcatccttctacaatcattcttggaaacagaacctggtttcaggttggcttagtgacctgcaaacacacacttgggatagcaattcctctacgattgtgtttttgtgcccgtggtcgagaggcaacttctcaaatgaagagtggaaggaactcgagaccctgtttaggatacggacaatccgcagcttcgaagggattcgacgttatgcccatgagctgcagtttgagtaccccttcgaaatccaggtaactggaggctgtgagctccacagtggtaaagtgtccgggagctttttacagctggcgtatcaaggatctgacttcgtctcctttcagaacaattcatggcttccttacccagtggctggcaacatggccaagcatttctgcaaagttttgaatcagaaccagcacgaaaatgatattacccacaacctgctaagtgacacatgtcccagatttatcctcggcctgcttgatgcagggaaggcccatctgcaaaggcaagtgaagcctgaggcttggttgagccacggaccatctcccggtcctggccatctccagctggtctgccacgtgtccgggttctatccaaaaccggtatgggttatgtggatgcggggagagcaggaacagcagggcacccagcgcggtgacatattaccctcagcagatgggacttggtacctgagagccacactcgaggtggctgccggagaagcggcagaccttagctgtagggtcaagcacagttctctggagggccaagatatcgtgttgtattgggaacatcactccagcgtgggcttcattatcctagccgtcattgttcctctgctcctgcttatcgggctggctttgtggtttcggaaacgctgcttctgttga

SEQ ID NO: 2075 - RNA, 1002 nt, synthetic construct
  misc_feature 1..1002: note = AAA51939 variant
  source 1..1002: mol_type = other RNA
atgctgctccttcccttccagctgttggccgtgttatttcctggcgggaacagcgagcacgctttccaaggaccaacctcctttcatgtcatccagacatcttcattcactaatagtacgtgggcacagacccagggtagcggctggctggacgatctacaaattcacgggtgggactccgattctggaacagccatatttctcaagccgtggtcgaaaggcaacttctcagacaaggaagttgcggagctggaagagatctttagagtgtacattttcggttttgctagggaagtacaggatttcgccggggactttcagatgaaatatcccttcgagatccagggaattgcaggctgcgagcttcatagcggcggggccatcgtgagttttctgcggggagctttgggtggcctcgatttcctgtccgtcaagaatgcatcttgtgtgcctagcccagaagggggatcccgcgcccaaaaattctgcgctctgataatccagtaccagggcattatggagactgttcgaatcctcttatatgaaacctgtccccgttacctgcttggtgtgttgaacgccgggaaggcggacctgcagagacaagtcaagcctgaggcatggctatcaagtggaccaagccccggccctggcaggctccagctggtgtgccacgtatctgggttttatccaaaaccggtttgggtgatgtggatgcggggagagcaggaacaacagggtacacagcttggcgatattctgcccaatgccaactggacctggtacttgcgcgctactctcgacgtcgccgatggggaggcagctggactgtcctgtagagtgaagcatagctcattagaaggccaggacatcatactgtattggaggaatcctacaagtattggttctatcgtgctcgccattatcgtcccatcccttctgttgctactgtgcctcgcgctgtggtacatgcggcgccgaagctaccaaaacatcccctga

SEQ ID NO: 2076 - RNA, 1002 nt, synthetic construct
  misc_feature 1..1002: note = AAI26466 variant
  source 1..1002: mol_type = other RNA
atgctgttcctccagtttcttctgttggccttactgctacccggcggggacaacgctgatgcaagccaagagcacgtgtccttccatgtcatccagatattttctttcgttaatcagtcatgggccagaggacagggtagtggctggctcgacgaactgcaaacccacgggtgggatagcgagtccggaacaattatctttcttcataactggtctaagggcaatttctcgaacgaggaactgtcagacttggaactcctgtttaggttctacctgtttggtctcactcgggagattcaggatcacgcgagccaggactatagtaaataccctttcgaggtgcaggtaaaggctgggtgcgaattacattccggaaaatctccagagggctttttccaagtggcctttaatggcctggatcttttgagcttccagaacacgacctgggtcccgtcccccgggtgtggatcactggcacagagtgtgtgccacctactcaatcaccagtatgaaggtgttacagagactgtgtacaacctgatccgcagcacctgtcctcgattccttctgggcttgctcgacgccgggaagatgtatgtccatcgtcaagtgagaccagaggcttggctgtcttccaggccctcattaggaagcggccagctgctccttgtatgccacgcaagtggtttttaccctaaaccagtttgggtgacatggatgcggaatgaacaggagcaactggggaccaagcatggagatattttgcccaacgccgacggcacttggtatctacaggtcatcctggaagtggcttctgaggaacctgccggcctctcctgtcgcgtgagacacagctcgcttgggggacaggatataatcctgtactggggtcaccatttctctatgaattggattgcgctggtcgttatcgtgccattggtaattctcatcgtgctggtcttatggtttaagaaacactgctcctaccaggacatactgtga

SEQ ID NO: 2077 - RNA, 1008 nt, synthetic construct
  misc_feature 1..1008: note = AAA59672 variant
  source 1..1008: mol_type = other RNA
atgggctgcctcctgttccttctgttgtgggccttactgcaggcttgggggagcgcagaggtgccccaaagactatttcctctcaggtgtctgcagatctcctctttcgccaactcaagttggacccggacagacggacttgcgtggctgggtgaattgcagactcacagctggtccaatgattctgacacggtccgctcgctcaagccatggtcacagggcacctttagcgatcaacagtgggagacactgcagcatattttccgagtttaccgtagttcctttactagagacgtgaaagagttcgctaagatgctgaggctctcttatccgttagaactgcaggtaagcgccgggtgcgaagtgcaccccggaaacgcatccaataactttttccatgtcgcctttcaaggcaaagatatactttcattccagggtaccagttgggagcctacacaggaggctccattgtgggtgaatctggcaatccaggttctaaaccaagacaagtggacccgggaaactgtgcagtggctcctgaatgggacatgtccccagtttgtcagcggacttctggagtctggcaaatccgaattgaagaagcaagtgaaacctaaggcctggctctcacgcggcccaagccccgggcctggaagactgttactggtatgccacgttagtggtttctacccaaaaccggtgtgggtcaagtggatgaggggcgagcaggagcagcaggggacccaacccggagatattctccctaacgctgacgaaacgtggtatcttcgggccactctggatgtggtggcgggcgaggcagccggtttgtcttgtcgcgtcaaacattccagcctagaagggcaggacatcgttctgtactggggaggctcgtatacctctatgggcctcattgctctggccgtgcttgcatgcctgttgtttctcctgatcgtagggttcacatcccgattcaagagacagacttcataccagggagtgttatga

SEQ ID NO: 2078 - RNA, 1167 nt, synthetic construct
  misc_feature 1..1167: note = EAW52830 variant
  source 1..1167: mol_type = other RNA
atgctgctccttttcctgttgtttgagggcttatgctgtcccggggaaaacaccgccgctcctcaggcactgcaaagctaccacctagccgcggaggaacagctctccttcagaatgctgcagacatcttcatttgctaatcatagttgggcccacagcgagggatccggttggcttggcgacctgcagactcatgggtgggatacggtgttgggaaccatcaggttcctcaagccatggtctcacggcaacttttcgaaacaagaactgaagaatctgcagtcactcttccagttatattttcatagcttcattcagatagtccaagcaagtgccggtcagtttcagctggagtacccgttcgagatccagattcttgctgggtgccggatgaacgcaccccaaatctttttgaatatggcctatcagggatccgacttcctgtcttttcagggcattagctgggaaccttccccaggcgctgggatccgcgcccaaaacatatgtaaagttctaaatcgatacctcgatatcaaggagattctgcagtcacttctgggacacacatgcccccgtttcttggcgggtctcatggaagcaggcgagagtgagctgaaaagaaaggtgaagcctgaagcctggttaagctgtgggccatctcccggacctggcaggctgcagctcgtatgccacgtgtccggtttctatccaaaaccggtctgggtgatgtggatgcgcggggagcaggaacaacggggaactcagagaggcgacgttcttcccaacgctgatgagacctggtacctgagggccacattggacgtggcagctggcgaagccgcggggctatcatgtcgggtcaagcatagcagtctgggaggtcacgatctcatcattcattggggcgggtattctatctttctgatacttatttgcctgaccgtgatcgtaactttggttattctcgtggtcgtggactcccgcctgaaaaagcagagctcgaataaaaacatcttatctcctcacacaccatcccccgtgttcctgatgggagccaatacccaggatacgaagaactcacgacaccaattttgtctagcacaggtcagttggatcaagaatagagttctcaaaaagtggaaaactaggctgaaccagctttggtga

SEQ ID NO: 2079 - RNA, 894 nt, synthetic construct
  misc_feature 1..894: note = AAA35581 variant
  source 1..894: mol_type = other RNA
atgaccacacccagaaacagcgtgaatggcactttccctgccgagccaatgaaggggccgatcgctatgcagtccggacccaaacctctgtttaggcggatgtcttcactcgtcggtccaacgcaaagtttctttatgcgcgaaagcaagacccttggcgcagttcagattatgaacgggctgttccacatagccttgggaggcttactgatgatccccgcgggtatttacgctcctatctgcgtgacagtatggtatccactatggggaggaattatgtacatcatatccggctctctcctggccgcaactgagaaaaattcgcgaaagtgtcttgtgaaaggcaagatgatcatgaactcactgagcttgtttgccgctattagtgggatgatcctctccattatggacatcctgaatataaagatttctcatttcctgaaaatggaaagcctcaactttatccgtgcacacaccccctatattaatatctacaactgcgagcctgccaatccatccgaaaagaactcaccgagtacacagtattgttacagcatccagtctttattcctggggattctttccgtcatgttgatatttgctttctttcaagagctggtgatcgccggtattgttgagaatgaatggaaaagaacctgctcaaggcccaagagcaacatcgtgctactcagtgcggaggagaaaaaggaacagactatagagattaaggaagaggtcgtgggcctgacagaaacctcttcccagcctaaaaatgaggaagatatcgagatcattccaatccaggaggaagaggaagaggaaacggagactaacttccccgagcctccacaagaccaggaaagctcgcccattgagaatgattcttccccgtga

SEQ ID NO: 2080 - RNA, 1989 nt, synthetic construct
  misc_feature 1..1989: note = AAC18956 variant
  source 1..1989: mol_type = other RNA
atggagagcaagaccgaaaaatggatggagagaatccacctgaacgtgtccgaaaggcccttccctccacatattcagctcccgcccgagatacaagaatctcaggaggtcacacttacttgcctgttgaatttttcatgttacggctatcctatccagttacagtggctgctagagggggttccaatgcggcaagccgctgtgacgagtaccagcctcacaattaagtccgtattcactcgctctgaactgaaattttcgccccagtggtcacaccatggaaagatcgtgacctgccagcttcaggacgcagatggtaaattcctgagcaacgacacagtccaattgaatgtgaagcacacccctaagctcgagattaaagttactccaagtgatgccatcgtgcgagaaggcgactccgtcacaatgacctgtgaggtgtctagcacgaaccccgagtacactaccgtatcctggctgaaggatgggacatcactgaaaaagcagaatacttttaccctcaacttacgtgaagttacaaaagaccagagtggaaagtattgctgtcaggtgagcaatgatgtcggccctggtagatctgaggaagtgttcctgcaagtgcagtacgcgccagagccgtccaccgtccagatacttcattcacccgctgttgaagggagccaagtggagtttttgtgcatgagtctggccaaccctctaccaacgaattatacttggtaccacaacggaaaggagatgcagggcaggacagaagagaaagtacacatccccaagattctcccttggcatgcaggcacctattcttgtgtggccgaaaatatcctggggactggacagcggggtccaggcgctgagcttgacgtccagtatcccccgaaaaaggtgacaaccgttattcaaaaccctatgcccatccgcgaaggggatacggtgaccctgtcctgcaattacaacagctcgaatccatctgtcacaagatacgagtggaaacctcacggagcatgggaggaaccctccttgggcgtgctcaagatacagaaagtaggttgggacaacactaccattgcctgtgctaggtgcaactcatggtgtagttgggccagcccagttgcgctgaatgtgcagtacgcaccccgggatgtccgcgtgcgaaagatcaagcctttatccgagattcattctgggaacagcgtctcactgcagtgcgacttcagttccagccacccaaaagaagtgcaatttttctgggagaagaatggaagactccttggcaaagaatctcagctgaactttgattcaatcagtccggaggacgccggcagctattcctgctgggttaataactctatcgggcagacagcttcgaaggcctggactttggaggtgctatacgcacccaggcggctgcgtgtaagcatgtcccctggagaccaggtcatggaaggtaaatcagctaccctccgctgtgagagtgatgccaatccacccgtgtctcactatacatggttcgactggaacaatcaaagcctgccttaccattcccagaaacttagactggaaccagttaaggtgcagcactcaggcgcgtattggtgccaggggaccaacagcgtcggaaagggcaggtctcccttgtccactctcacggtgtactacagtccggagacaattggtcggcgagtagccgtggggctgggcagctgtttagcaatactgatcctagctatttgcggactcaagctgcaacgcagagatgccgagtcttccgaaatgcagaggcctccacggacctgtgacgatactgttacctattcagcccttcataaacgccaggtcggcgactacgagaatgtgatccccgattttcctgaagacgaggggatacactatagtgaattgattcaattcggagtgggtgagagaccccaggctcaggagaacgtcgattacgttatcctgaagcattga

SEQ ID NO: 2081 - RNA, 2544 nt, synthetic construct
  misc_feature 1..2544: note = AAB06448 variant
  source 1..2544: mol_type = other RNA
atgcatctgctcggcccctggcttctgttgttagtgctggagtacctagccttcagcgactcctctaagtgggtctttgaacaccctgagaccctctatgcttgggaaggggcatgcgtttggatcccatgtacatacagagccctggatggagaccttgagtcattcattctgtttcacaacccggaatataataaaaacacttctaagttcgatggtacgaggttgtacgagagcaccaaagacggcaaggtgccctccgagcagaaacgggtacaatttctcggggataagaataagaactgcacactgtctatacatcctgtgcacctgaatgactcgggacagctcggcttacgcatggaatcaaaaactgagaagtggatggaacgaatccatctgaacgtcagcgagcgtccatttccccctcacattcagcttccacccgagatccaggaaagtcaagaggtgaccttgacatgtctgctaaatttctcctgctatggttaccctattcagctccagtggctgcttgaaggggttccaatgagacaggcggctgtgacctctactagcctgacaatcaaatccgtcttcaccaggtcagagttgaagtttagtccgcaatggagccaccatggaaaaatagtgacgtgtcagctccaggatgccgacggcaagttcctgtctaacgatactgtacagttaaatgttaagcacacccccaaactggaaatcaaggtgacaccttccgacgcaattgtccgggagggcgattcagtgactatgacctgcgaggtgagcagttctaacccagaatatacaaccgtctcctggctcaaagacgggacgagccttaagaaacaaaatacttttacactgaacttgcgcgaggttaccaaggatcagtcgggaaaatactgttgccaggtgtctaatgacgtaggtcccggcagatccgaagaggtgttcctacaagtccagtacgcccctgaaccatcaactgtgcagatcctgcatagtcccgctgttgaggggagccaggtggagtttctctgtatgtccctggcaaacccgcttcctacaaattatacctggtaccacaacggaaaggaaatgcaaggcaggacggaggaaaaggtccacattcccaaaatcctgccatggcatgccggtacctattcttgcgtggctgagaacatattggggacaggacagcggggccctggcgccgaactcgacgtacagtatcccccaaagaaagttactaccgtgattcagaatcccatgcctatccgcgagggggatacagtcactctgagctgtaactacaattcaagtaacccatccgtgacccgatacgagtggaagccgcacggagcgtgggaggaacccagcttaggtgtcctgaaaattcaaaatgtgggctgggacaacacaaccatcgcatgcgccgcttgcaattcttggtgttcatgggccagtcctgttgcactaaacgtgcagtatgctccaagagatgtaagggtccggaagatcaagcccctcagcgaaattcattccgggaatagtgtgtcgctgcagtgcgacttcagctcctcacaccctaaagaggttcagttcttttgggagaagaacggacgtcttttgggcaaagaaagtcaactgaatttcgattctataagcccagaggacgccggttcctactcatgttgggtgaacaatagcatcgggcagactgcgtctaaggcctggacgctcgaagtcctgtacgcaccccgcagacttagggtgtccatgagtccgggcgatcaggtaatggagggaaaaagcgctacactgacctgcgaatctgacgccaaccctccagtgtcccattatacttggtttgattggaataaccagtcattgccctaccacagtcaaaagctccggctggagcctgttaaggtccagcacagcggcgcttattggtgtcaggggaccaactcggtgggaaaaggtcgatcccccttatctacactgaccgtgtactatagcccagagactattggccgcagagtcgccgttgggctaggatcatgcctcgcaatcctgatacttgccatttgtggcttgaagctgcaaaggcggtggaaacgcacacagagtcagcagggtctccaagaaaattcctctgggcagagcttctttgtgagaaacaagaaagtgaggcgtgctcctctgtccgagggcccccattcattaggatgctacaatccaatgatggaagacggcatcagctatacgaccctgcggttcccggagatgaacatccctcgaactggggatgcggaaagttctgagatgcagagacccccacccgactgtgacgatacagtaacctactccgcacttcacaagaggcaggtcggagactacgagaatgtgattcctgattttccagaagacgagggtatccattatagcgaattgattcaattcggcgttggggagcgcccccaggcccaggaaaacgtggattacgtcatactcaagcactga

SEQ ID NO: 2082 - RNA, 2544 nt, synthetic construct; identical to SEQ ID NO: 2081
  misc_feature 1..2544: note = ABK41939 variant
  source 1..2544: mol_type = other RNA

SEQ ID NO: 2083 - RNA, 1605 nt, synthetic construct
  misc_feature 1..1605: note = CAE47548 variant
  source 1..1605: mol_type = other RNA
atgctgagaaggcggggcagccccgggatgggagtgcacgtcggtgccgctctcggcgcactttggttctgcctgaccggggccttggaggttcaggtgcctgaagacccagtagtggcgttagtcggaacagatgctactctgtgttgctccttttctccggagcccggcttctcactagcccaactcaacctgatctggcagcttacggacaccaagcagctggtgcatagttttgcagaaggtcaggatcaagggagcgcctacgctaatcgcacagcattgttccctgacctcctggcccagggaaacgcttccctgcgactccagcgtgttagagtggccgatgagggctcttttacttgtttcgtctcgattagggactttggctcagcggcagtgagcttacaggtagccgctccatatagtaaaccctccatgaccctggaacctaataaggatcttcggccaggggacacagttaccataacttgctctagctaccaaggatatcccgaggccgaggtgttctggcaggatggtcagggcgtccctttgacagggaacgtgaccacgtcccagatggcaaatgaacaaggactgtttgacgtgcactcaatcctacgcgtcgttctcggcgctaacggtacttacagttgtctggtgagaaatccagtacttcagcaggatgcccatagctctgtgaccattacaccgcaaaggtcccccactggggcggtcgaggtgcaggttcctgaagacccagtggtcgccctggtgggaaccgatgcaacattgcggtgctcattcagccccgagcctggctttagtctcgctcagctgaacttaatctggcagctgaccgacacgaaacaactcgtacactctttcactgagggccgcgaccaggggtccgcctatgctaatcgaacagccctttttccagatctgttggcacagggaaacgccagcctaagactgcagagggttcgggtggctgacgaaggttcgttcacctgtttcgtctctattcgtgattttggctccgcggcagtgtcactccaagtcgccgctccctacagtaagccgagcatgactctggagcctaataaagaccttcgccccggggatacagtgaccatcacgtgctcctcttatagaggatacccagaagccgaggttttctggcaggacggccagggtgtgcctctgaccgggaacgtaacaactagccagatggcaaatgaacaaggcttgtttgatgtccattcagtgctcagggttgtgctgggagccaacggcacctacagttgtttagtccggaatcccgtgctgcagcaggacgctcacgggtccgtaacaataactggacagccaatgacctttccccctgaggccctatgggtgacagttggtctcagcgtctgcctgatcgcacttttggtggcgctggctttcgtgtgttggcgaaagattaagcaatcttgcgaggaagagaacgccggcgcagaagatcaggacggggagggagaaggctcaaaaaccgccctccagccactgaagcacagtgatagcaaagaggacgacggtcaagagatcgcttga

SEQ ID NO: 2084 - RNA, 639 nt, synthetic construct
  misc_feature 1..639: note = BAG57312 variant
  source 1..639: mol_type = other RNA
atgcccctgctccttctgttgcctttactgtgggccgacctaacccacagaccaaagatcctcattccgggcacactggagcccgggcatagcaaaaaccttacttgctccgtgtcttgggcttgtgaacagggaacgcctccaatattctcatggctgagtgcagcccccaccagcttgggtcctaggacaactcactcctctgtcctcatcattaccccacggccccaagatcatggcacaaatctgacctgccaggttaagtttgcgggggctggagtgactacagagcgcaccatccagctgaacgtaacgtacgtgcctcagaatccaactaccggcattttcccgggtgacgggtcgggaaaacaagaaacacgagccggcgtcgtgcacggcgcaatcgggggagccggtgttactgctctcttagcactgtgtctttgcttgatatttttcatcgtgaagacccatcgtagaaaagccgctaggacagccgtcggccggaacgatacccaccccacgactgggtcagcgagccctgtgagtgacggagcatcctggcacccagtatgtcccgccgatacatctagccagtgcggccctccatcctgtcccattcagcattttcagaattga

SEQ ID NO: 2085 - RNA, 1095 nt, synthetic construct
  misc_feature 1..1095: note = AAK83654 variant
  source 1..1095: mol_type = other RNA
atgcccctgctccttctgttgcctttactgtgggccggcgctctagcaatggacccaaacttctggctccaggtgcaagagagcgtcaccgttcaggaagggctgtgcgtgcttgtaccgtgtacatttttccaccccatcccttactatgataaaaattccccagtgcatggatactggtttagagagggtgccattatatctagggactcacccgtcgcgactaacaagctggatcaggaagtgcaggaggaaacgcaaggccggttccgcttgctcggggaccctagtcgaaataactgcagcctgtccatcgttgatgctcgtagaagggacaatggatcttactttttccggatggagcgcggctcgaccaagtattcatataaaagcccacagctgagtgtgcacgtcacagatctcactcatagacccaagattttaatccctggtaccctggagccagggcactccaaaaaccttacatgttctgtgagctgggcctgcgaacagggaaccccgcccatttttagttggttgtcagcagcccctacttccctgggcccaaggacaacccatagctctgtactaatcataacgccccggcctcaggaccacggcactaatctcacctgtcaagttaagttcgctggggcaggagtgacaactgagcgcaccatccagctgaacgtcacatacgtgccacagaatcccaccacgggtatttttccgggcgatgggtccggaaagcaggaaactcgagccggcgtggtccacggtgctatcgggggagccggcgttacagcgcttctggcattgtgcctctgtctgattttctttatcgtgaaaacccatagaaggaaggccgctcggactgccgtaggccgtaacgacacacaccctaccacggggtcagcaagccccaaacatcaaaagaaaagtaagttacacggaccaaccgagacatcttcctgcagcggtgctgcccctactgtggagatggatgaggaactgcactatgcgtcgctcaatttccatggcatgaacccctctaaggacacctccacagaatactcagaggtccgcactcagtga

SEQ ID NO: 2086 - RNA, 1095 nt, synthetic construct; identical to SEQ ID NO: 2085
  misc_feature 1..1095: note = CAD36509 variant
  source 1..1095: mol_type = other RNA

SEQ ID NO: 2087 - RNA, 624 nt, synthetic construct
  misc_feature 1..624: note = AAA52295 variant
  source 1..624: mol_type = other RNA
atgcagagcggcacccactggagagtgctggggctctgccttctgtccgtcggagtttggggtcaagacggcaacgaggaaatgggagggatcacacagactccctacaaggtgtctatttcaggcacgaccgtaatattgacatgtcctcagtatccaggtagtgagatcttatggcagcataatgataaaaacattgggggagacgaagatgacaagaatatcggcagcgatgaggaccacctgtccctaaaagagttctctgaactcgagcaatcgggctactatgtgtgctacccgagggggtcaaagcccgaagatgccaacttttatctgtaccttcgggctcgcgtctgtgagaattgcatggaaatggacgtgatgagcgttgcaactattgtgatcgtcgatatatgtatcaccggaggtctgttgctcctggtgtattactggagtaaaaaccgaaaggccaaggcgaaacctgtaacacgtggcgctggggccggaggcagacagaggggtcagaataaggagcggccaccccctgttccaaaccccgactacgagcctattcgcaaagggcagagagatctgtattccggactcaatcaaaggcggatctga

SEQ ID NO: 2088 - RNA, 495 nt, synthetic construct
  misc_feature 1..495: note = AAH25703 variant
  source 1..495: mol_type = other RNA
atgaagtggaaagccctgttcaccgctgcaatcctccaggcccaacttcccattacagaggcgcagagctttggcctgttggaccctaagttatgctacctgctagatgggatactcttcatctatggagtgattctgactgctctttttctgagagtcaaattctccaggtctgccgacgcaccagcctaccagcagggtcaaaaccagttgtataatgaactcaacctgggccggcgcgaggaatacgatgttctggacaagcgacgtgggagagatccggagatgggaggcaaaccccagaggcggaagaatcctcaggaaggtctctataacgagttacaaaaggacaaaatggctgaggcatactcagaaatcgggatgaagggagagcgcagaaggggcaaaggccacgatgggctgtatcagggacttagtacggccaccaaggacacatacgatgctttgcatatgcaggccctgccaccccggtga

SEQ ID NO: 2089 - RNA, 2229 nt, synthetic construct
  misc_feature 1..2229: note = CCDS7897.1 variant
  source 1..2229: mol_type = other RNA
atggacaagttctggtggcacgccgcttggggcctgtgcctcgtgccccttagcctggcacagatcgatttgaacattacctgtagatttgccggggtcttccatgttgagaaaaatggaaggtactccatatctcggacagaagcggctgacttatgcaaggcctttaactcaactctgcctacgatggcacaaatggagaaagccctaagtatcggtttcgaaacctgtcgctatggctttattgaggggcacgtggtaatcccacgtattcatccgaatagcatctgcgctgcaaacaatacaggagtgtacatactcacttccaacacctctcagtatgatacatactgtttcaatgcctcggctccccctgaagaggactgcacctcagtcactgatctgccaaacgcctttgacggccccatcacaattaccatcgtgaatcgagatggtacgagatatgttcagaagggggagtacaggactaaccctgaagacatttatccaagcaatcccaccgatgacgatgtgagttccggatctagctccgagcggtcaagtacaagcggcggctacatcttctacactttttctaccgtccaccctataccagacgaagattccccgtggattacagactcaaccgaccgcatccccgcgacgactcttatgagcacaagtgcaaccgccactgagacagctaccaaaagacaggagacgtgggattggttctcttggctgtttttgccttccgaaagcaagaaccatctccacaccacaactcaaatggccgggacctcgtctaatacaatttccgcaggatgggagccaaacgaagagaatgaagacgagagggatcggcacctgtcattcagtggtagcggcatcgacgatgacgaggattttatctcctctactattagcaccacaccccgcgctttcgaccataccaagcagaaccaggattggactcagtggaacccttcacacagtaatccagaagtgctgctccaaacgacaacccgaatgactgacgtagatagaaacgggaccacagcctatgagggaaattggaaccccgaagcgcatccgcctttaatacaccacgagcatcacgaagaggaggaaactccccattccactagcacaatccaggccacgccatcttcaaccactgaggaaacagcaacccagaaagagcagtggttcggcaataggtggcacgaaggttaccggcaaacacctaaggaggacagtcatagcactaccgggacggctgccgcttccgcccacacctctcaccccatgcagggacgtacaactccatcgcccgaggacagctcctggaccgactttttcaaccctatttcacatccaatgggccgcggccaccaggcagggagaaggatggatatggatagttctcatagcatcacactgcaaccgactgccaatcccaacaccggacttgttgaagacttggatcggacgggtcctctgtccatgacaacccagcagtcaaatagccagtctttttccaccagtcacgagggcctagaagaggacaaagatcacccaacaaccagcactctcacctcttccaaccgaaatgacgtgacagggggacgcagagatcccaaccattcagagggcagtacgaccctgcttgaaggttatactagccactaccctcatacaaaggagtcgaggaccttcataccagtcacatccgctaaaactgggtcttttggcgtgaccgcggtgacggtcggagacagcaattcaaacgttaatcggagtctgtccggcgatcaagacacattccacccctctgggggaagccataccactcacggttccgaatcagatggccacagccatgggagtcaggagggaggcgcaaacaccacatctggtccgattcgcactcctcagatcccagaatggttgatcattctcgcctccctgttagctctggccctcatccttgcagtgtgtattgccgtaaacagcagaaggcgttgcgggcagaagaagaaactggtgataaattcgggcaacggagctgtcgaggaccggaagccctcaggcttgaatggggaggcctctaaaagtcaagaaatggtgcacctagttaacaaggagtccagcgaaacccctgaccagtttatgacagcagatgagacgcgaaatctgcagaacgtggacatgaaaatcggagtctga

SEQ ID NO: 2090 - RNA, 2100 nt, synthetic construct
  misc_feature 1..2100: note = XM_006718388.1 variant
  source 1..2100: mol_type = other RNA
atggacaagttctggtggcacgccgcttggggcctgtgcctcgtgccccttagcctggcacagatcgatttgaacattacctgtagatttgccggggtcttccatgttgagaaaaatggaaggtactccatatctcggacagaagcggctgacttatgcaaggcctttaactcaactctgcctacgatggcacaaatggagaaagccctaagtatcggtttcgaaacctgtcgctatggctttattgaggggcacgtggtaatcccacgtattcatccgaatagcatctgcgctgcaaacaatacaggagtgtacatactcacttccaacacctctcagtatgatacatactgtttcaatgcctcggctccccctgaagaggactgcacctcagtcactgatctgccaaacgcctttgacggccccatcacaattaccatcgtgaatcgagatggtacgagatatgttcagaagggggagtacaggactaaccctgaagacatttatccaagcaatcccaccgatgacgatgtgagttccggatctagctccgagcggtcaagtacaagcggcggctacatcttctacactttttctaccgtccaccctataccagacgaagattccccgtggattacagactcaaccgaccgcatccccgcgacgactcttatgagcacaagtgcaaccgccactgagacagctaccaaaagacaggagacgtgggattggttctcttggctgtttttgccttccgaaagcaagaaccatctccacaccacaactcaaatggccgggacctcgtctaatacaatttccgcaggatgggagccaaacgaagagaatgaagacgagagggatcggcacctgtcattcagtggtagcggcatcgacgatgacgaggattttatctcctctactattagcaccacaccccgcgctttcgaccataccaagcagaaccaggattggactcagtggaacccttcacacagtaatccagaagtgctgctccaaacgacaacccgaatgactgacgtagatagaaacgggaccacagcctatgagggaaattggaaccccgaagcgcatccgcctttaatacaccacgagcatcacgaagaggaggaaactccccattccaccagcacaacggcctctgcacacacctcacatccaatgcagggcaggactacacctagtcccgaggacagctcctggaccgacttctttaatccaatctctcaccccatgggtcgggggcaccaggctggacgtcgcatggatatggactcgagccattccattacactgcagcctactgccaacccaaataccggccttgttgaagatttggacagaacgggcccgctgtcaatgaccacacaacagagtaactctcagagcttctccacttcacacgaggggctagaagaggataaagaccatcccaccacaagcactctcacctcttccaataggaacgatgtgacgggaggtcggcgagaccctaatcacagtgagggcagcacaaccctgcttgaagggtacacttctcactatccacatacaaaggagtcccgcacctttatccccgtcacttcagctaaaaccggaagtttcggcgtgacagccgtgacggtcggtgatagcaactcgaatgttaacagatccctgtctggggaccaagatacctttcaccctagcggcggatcacatactacacacggcagtgaatccgacgggcattctcacggaagccaggagggtggcgcaaataccacatccgggccaataaggactccccagattccggagtggttgatcatcctcgcctcactgttagctctggcgctcattcttgcagtgtgtatcgccgtaaacagccggcgcagatgcggacagaagaaaaagctggtgattaacagtggcaatggtgctgtcgaagataggaagccttctgggttgaacggcgaggcctccaaaagccaagaaatggtgcacctagttaataaggagtcgtcagaaaccccagaccagttcatgacggcagacgagacacgtaacctgcagaatgtggatatgaaaataggagtctga

SEQ ID NO: 2091 - RNA, 1377 nt, synthetic construct
  misc_feature 1..1377: note = AAA35572 variant
  source 1..1377: mol_type = other RNA
atgaacagaggcgtgcccttcaggcatctgctccttgtcctgcagttggccttactgcctgctgcaacccaagggaagaaagttgtgctaggaaagaaaggtgacacagtagagctcacttgcacggccagccagaagaaatccatccagtttcactggaaaaattctaaccagattaagatactgggcaatcaagggtcattccttaccaaaggaccaagtaagctgaacgatcgggcggacagccgccgatccttgtgggatcagggcaattttccgctcatcattaaaaacctgaagatcgaagactctgatacatacatttgtgaggtggaagaccagaaagaggaagtccagctgctcgtgttcggtttaactgctaattcggatacccatctgcttcaagggcagtcattgacactgaccctagagagtccccctggaagctccccatctgttcagtgccgtagccccagaggcaagaacatccagggcgggaagactctctccgtgtcacaactggagcttcaggacagtggaacatggacctgtacggtcctgcagaatcaaaagaaggtggaatttaaaatagatatcgtagttttggccttccagaaggcaagctctattgtgtataaaaaggagggtgaacaggtcgagttttccttccctctcgcctttactgtggagaaactgaccggctcaggggaattatggtggcaggctgagagggcaagcagttctaagtcctggatcacattcgacctgaagaacaaagaagtgagcgtcaagcgggttactcaagatccaaaactccagatgggaaagaaacttcccctgcacttgaccctacctcaggccctgccacagtacgctggctcgggtaatctcacactggcccttgaggcgaagaccgggaagctgcaccaagaagtgaacttggtagtgatgcgcgcaacgcagctccagaaaaatctgacttgcgaggtctggggaccgacatctcccaagttaatgctgtccctaaaactcgagaacaaggaagccaaagtgtcaaagagagagaaggctgtttgggtgctgaatcctgaagccggcatgtggcagtgtcttttgagtgacagcggccaagtcctgctcgagtccaacattaaagtgctgccaacctggtctactcccgtacagcctatggcacttatcgttctgggaggggtggctggtttgctcctgtttataggcttagggattttcttttgcgtcaggtgtcggcatcgccgaagacaggccgaaaggatgagccagatcaagcggctgctatcagagaaaaagacatgccaatgtccacaccgtttccagaaaacctgcagtcccatttga

SEQ ID NO: 2092 - RNA, 186 nt, synthetic construct
  misc_feature 1..186: note = CAA44323 variant
  source 1..186: mol_type = other RNA
atgaagagattcctgtttctccttctgaccatcagcttgttagtgatggtccagattcaaacaggcctgtccgggcagaacgacacttctcagacgtcaagtcccagcgcctcctctaatatatcgggaggtatcttcctatttttcgttgctaacgcaattatccacctcttttgcttctcatga

SEQ ID NO: 2093 - RNA, 186 nt, synthetic construct
  misc_feature 1..186: note = AAP35780 variant
  source 1..186: mol_type = other RNA
atgaagagattcctgtttctccttctgaccatcagcttgttagtgatggtccagattcaaacaggcctgtccgggcagaacgacacttctcagacgtcaagtcccagcgcctcctcttcgatgtcaggaggtatattcctatttttcgttgctaatgcaatcattcacctcttttgcttcagctga

SEQ ID NO: 2094 - RNA, 186 nt, synthetic construct; identical to SEQ ID NO: 2092
  misc_feature 1..186: note = ACS44650 variant
  source 1..186: mol_type = other RNA

SEQ ID NO: 2095 - RNA, 954 nt, synthetic construct
  misc_feature 1..954: note = EAW93489 variant
  source 1..954: mol_type = other RNA
atgaccgtggccagacccagcgtccctgctgcactgccactccttggcgagctgccgaggttgttactgctagttctcctgtgccttcccgccgtgtggggagactgtgggctgcctccagatgtacccaacgcgcagcctgctttggaaggtcggacatccttcccagaggacactgtgatcacgtacaagtgcgaagagtcttttgtcaaaattcccggcgaaaaggattcagtgatatgtctcaaagggagtcaatggagcgacatcgaggagttctgcaatcagaagtcctgtcctaacccaggagaaattcgcaatggccagatcgatgttccgggtgggattctgtttggagccaccatctctttctcgtgcaacacaggctataaactgtttggctcaactagcagtttctgtctcatatccgggtctagcgtgcagtggtccgaccccttacctgagtgccgagaaatctactgtccagcaccccctcaaattgataatggaatcattcagggtgagcgtgaccactatggctacagacagtcagtcacctatgcctgcaacaaggggtttacaatgatcggagagcatagtatatactgtaccgtgaataacgatgaaggcgagtggagcggtccacccccggaatgcagggggaagtctctgacttccaaagtacctcccacagttcagaagccaaccacggtgaatgtccctactaccgaggtgtcacccacaagccagaaaactaccacaaagaccacgactccaaacgctcaagcaacacggagtacccccgtgtctcgcactacaaaacacttccatgaaaccacgcctaataagggatccggcaccacaagcggcactaccagacttttgtcggggcacacatgctttactctgaccggactactcggtacactggtcaccatgggccttctgacttga

SEQ ID NO: 2096 - RNA, 882 nt, synthetic construct
  misc_feature 1..882: note = EAW93497 variant
  source 1..882: mol_type = other RNA
atgatcggcgagcacagcatttactgcaccgtgaacaatgacgaaggggagtggtccggaccccctccagaatgtagaggtaagtctctgacatcaaaagtcccgcccactgttcagaagcctacgaccgtgaacgtaccaacaactgaggtgagtcccaccagccagaaaacaaccactaagacaaccacgcctaatgcccaaggcactgaaaccccatccgtcctccagaaacatacaactgagaacgtgtctgctaccaggacaccccctaccccacagaagccgacgactgttaatgtgcccgcaacaatagtcacccctactccacaaaagcccacaaccatcaacgtgcctgccacgggggtatcgtcaaccccacagcggcacacaattgttaatgtgagcgcgactggaacccttcccacactgcagaaaccgactcgcgctaacgatagtgccaccaagtcccctgcagccgctcagacatctttcatcagcaaaaccttgtccactaagacgccctcagcagcccaaaatccaatgatgacaaacgctagtgccacccaggcgactttaaccgcacagaaatttacaaccgccaaggtcgctttcactcagagcccttctgccgcacgaaagtccacaaatgtgcattcacccgtgacgaacggcctgaaaagcacccaacgttttccaagtgctcacattactgccacaagatctacccccgtctccaggacaactaagcatttccacgagaccacgcctaataaaggtagcgggaccacatcgggaactacccggctactctctggccacacatgctttactctgaccggccttctggggacgttggttacaatgggactcctgacctga

SEQ ID NO: 2097 - RNA, 804 nt, synthetic construct
  misc_feature 1..804: note = EAW93493 variant
  source 1..804: mol_type = other RNA
atgatcggcgagcacagcatttactgcaccgtgaacaatgacgaaggggagtggtccggaccccctccagaatgtagaggtaagtctctgacatcaaaagtcccgcccactgttcagaagcctacgaccgtgaacgtaccaacaactgaggtgagtcccaccagccagaaaacaaccactaagacaaccacgcctaatgcccaaggcactgaaaccccatccgtcctccagaaacatacaactgagaacgtgtctgctaccaggacaccccctaccccacagaagccgacgactgttaatgtgcccgcaacaatagtcacccctactccacaaaagcccacaaccatcaacgtgcctgccacgggggtatcgtcaaccccacagcggcacacaattgttaatgtgagcgcgactggaacccttcccacactgcagaaaccgactcgcgctaacgatagtgccaccaagtcccctgcagccgctcagacatctttcatcagcaaaaccttgtccactaagacgccctcagcagcccaaaatccaatgatgacaaacgctagtgccacccaggcgactttaaccgcacagaaatttacaaccgccaaggtcgctttcactcagagcccttctgccgcacccacacgatccacgccagtgtcacgtaccactaagcattttcacgagacaacccccaataaaggcagcggtacaaccagtgggactacgagactgctatctggacatacctgcttcacactcactggcctgcttggcaccctggtgacaatggggttgctcacttga

SEQ ID NO: 2098 - RNA, 1146 nt, synthetic construct
  misc_feature 1..1146: note = AAA52168 variant
  source 1..1146: mol_type = other RNA
atgaccgtggccagacccagcgtccctgctgcactgccactccttggcgagctgccgaggttgttactgctagttctcctgtgccttcccgccgtgtggggagactgtgggctgcctccagatgtacccaacgcgcagcctgctttggaaggtcggacatccttcccagaggacactgtgatcacgtacaagtgcgaagagtcttttgtcaaaattcccggcgaaaaggattcagtgatatgtctcaaagggagtcaatggagcgacatcgaggagttctgcaatcgctcctgtgaagttcctacccgactgaactctgcctcgctgaagcagccatatattacacagaattactttccggtgggaactgtcgtggagtatgaatgccgtcccggctacagaagggagccttcactcagcccaaaattaacctgtctgcagaaccttaagtggagtacagcagtagagttctgcaagaaaaagtcctgtcccaatcctggtgaaatccggaacgggcaaattgatgttccaggaggcatcttgtttggcgccaccatatctttcagctgcaatactgggtataaactgtttggatccacatcaagtttctgtctaatcagcggttcttccgtgcagtggtcagaccccctcccggagtgccgcgaaatttactgccctgctcccccacagatcgataacggcattatccagggggagagagaccactatggatacaggcaaagcgtcacctacgcatgtaataagggctttacgatgataggtgaacatagtatttattgcactgtgaacaatgatgagggggagtggtctggacctcccccagaatgtcggggcaaatccctgaccagcaaggtgccccctacagtccagaagccaactaccgttaacgtgccgacaaccgaggtatcgcccacgtctcagaaaactacaaccaagactacaacccctaatgcccaggctacgcgctccaccccagtgtcacgaacaactaaacacttccatgaaaccacacccaacaagggcagtgggactaccagcggaacaaccagacttctgtccggtcacacttgctttacgttgacaggcctcctggggaccttagtcactatgggactgctcacctga

SEQ ID NO: 2099 - RNA, 2577 nt, synthetic construct
  misc_feature 1..2577: note = CCDS73385.1 variant
  source 1..2577: mol_type = other RNA
atgctgcagaccaaggacctcatctggacacttttctttctgggcactgccgtgagcttgcaagtcgatattgttccctcccagggggagatatctgtgggagaatcaaaattctttttatgccaggtagctggtgacgcaaaggataaagacatcagttggttcagccctaacggcgagaagctgacgccaaatcagcaaagaatttccgtggtctggaacgatgactcttcgtcaaccctaacaatctacaatgccaacattgatgacgcggggatctataaatgtgtggttactggagaagatggcagcgagagtgaagctaccgtgaatgtcaagatatttcagaagctcatgttcaaaaacgccccgacaccccaggagtttagggagggtgaagacgcagtgatcgtatgcgatgttgtgtcctctctgcctccaaccattatctggaagcacaaagggcgggacgtcattcttaagaaagatgtgcgcttcatcgtgctgagcaataactacttgcagatacgaggaattaagaagactgacgagggcacatatcgttgtgaaggcagaatcctcgcccgcggggagattaattttaaagacatccaagtcatcgttaacgtgccccctaccattcaggctcggcagaatatagtaaacgcaacggccaatctgggacagtccgtgactctggtctgcgatgctgagggtttcccagaacccaccatgtcatggacaaaggacggcgagcaaatcgaacaggaggaagatgacgagaaatacatttttagtgatgacagctctcagctcactatcaagaaagtggataagaacgacgaggccgaatatatatgtattgcggagaataaagcaggggaacaagatgccaccatccatttaaaggttttcgctaagcctaaaatcacatacgtggagaaccagaccgccatggaactggaggagcaggtcacgcttacttgcgaagcatccggagacccaattccgtcaatcacatggcgcaccagcactagaaacattagttctgaggaaaaggcttcctggacaaggcccgagaaacaggaaaccttggatggccacatggtggtacggagccatgcccgcgtttcgtctctgacgctaaagtccatacaatataccgacgcgggtgagtacatctgtacagcctcaaatactattgggcaggacagtcagagcatgtacctcgaggtgcagtatgcacctaaactgcaaggaccagtcgctgtgtacacctgggaaggcaaccaggtcaatatcacatgcgaggtgtttgcctatccctccgctactatctcttggttccgagatggccagcttctgcctagctcaaactacagtaatattaagatatataacaccccatccgccagctacttggaagttacacccgactctgagaatgatttcgggaactataattgtaccgcagtgaacagaatcggacaggagtcactcgaatttattctggtacaagccgacactccgagtagcccttccatcgatcaggtcgagccctactcttcgacggctcaggtgcagttcgacgaaccagaggcgacaggtggcgttcctattttaaagtacaaagcagaatggagggccgtgggggaggaggtctggcacagcaagtggtatgatgctaaagaagcctccatggagggaatcgtgaccatagtaggcctgaagcccgaaactacctacgcagtgcggctcgccgctcttaatggtaaagggctgggcgagatctcagccgcaagtgaatttaagacacaaccagttcagggagagccctctgcgcctaagttggagggccagatgggggaagacggaaacagcattaaagtcaatctaatcaagcaagatgacggtggctccccaattcgtcattatctggtgcgctacagagctctctcaagcgagtggaaaccggaaatcaggctgccctctgggtccgatcacgtgatgcttaagagtctggactggaacgccgagtatgaagtctacgttgtggcagagaatcagcagggaaaaagcaaggccgctcacttcgtgtttcggacctctgcccagcctactgcaataccagctaacggctcccccacatcaggtttgagtacgggggccattgtaggcatcctcattgtcatcttcgtgctgttactggttgtggtcgatataacctgctattttctaaacaagtgtggactcttcatgtgcatcgcggtgaatctgtgcggcaaagccgggcctggagctaagggtaaagacatggaggaaggcaaggcagcctttagcaaagacgagtcgaaggaaccaattgttgaggtgcgaactgaggaagagaggacacccaaccatgatgggggaaaacacaccgaaccgaatgagacaactcctcttaccgaaccagagaagggccccgtagaggctaagcctgaatgtcaagagacggaaaccaaacccgccccagcagaggtcaagacagtgcctaacgacgcgactcagaccaaagaaaatgagtccaaggcctga

SEQ ID NO: 2100 - RNA, 867 nt, synthetic construct
  misc_feature 1..867: note = ABK41933 variant
  source 1..867: mol_type = other RNA
atgggccacaccagaaggcaggggacaagcccctccaagtgcccttacctgaacttctttcaactccttgtgctggccggattgtctcatttctgttcaggtgtcatccacgttactaaagaggtgaaggaagtagctacgttaagttgcggccataatgtgagcgtcgaggaactggcacagacccggatttattggcagaaagagaagaaaatggtgctaacaatgatgtccggggacatgaacatatggccagaatacaagaatcgcactatctttgatattaccaacaatctctctatcgttattctggcccttcgaccgtcggacgagggaacatatgagtgtgtggtcctgaagtacgaaaaagatgcgttcaagcgtgagcacttggctgaagtgaccctctcagtaaaagccgactttcccactcctagcatcagtgatttcgagataccaacatccaacatcagaaggattatctgctctaccagcggcggttttcccgagcctcatctgtcctggctggaaaatggggaggaactcaacgcaattaatacgactgtttcacaggacccagagaccgaattatatgccgtgagtagcaagctggatttcaacatgacaactaatcactcttttatgtgtcttatcaaatacggacacttgcgggtcaaccaaaccttcaattggaacacaaccaagcaggagcattttcccgacaatctgctaccttcctgggctataacgctcatttcagtgaacggcatcttcgtgatttgctgtctgacttattgctttgcaccacgctgtagagagaggcggcgcaacgaacgacttagaagggagagcgtccggccggtttga

SEQ ID NO: 2101 - RNA, 867 nt, synthetic construct; identical to SEQ ID NO: 2100
  misc_feature 1..867: note = AAA36045 variant
  source 1..867: mol_type = other RNA

SEQ ID NO: 2102 - RNA, 990 nt, synthetic construct
  misc_feature 1..990: note = CCDS3009.1 variant
  source 1..990: mol_type = other RNA
atggacccccagtgcaccatgggcctgagcaacatcctcttcgtgatggcctttcttctgtccggggctgcacctttgaagattcaagcctacttcaatgagacagcggatttaccatgtcagtttgctaactctcagaatcagtcactgagtgagctagtcgttttctggcaagaccaggaaaacctcgtgctgaatgaagtatatcttggaaaagagaagtttgatagcgtgcactccaaatacatgggtagaacttctttcgactcggattcatggacgctgaggttgcataacctccagataaaggacaaaggcctgtatcagtgcatcattcaccataagaagccgaccgggatgatccggattcaccaaatgaatagcgaactgagtgtcctcgccaacttttcccagcccgagatcgtgcctatatctaatatcacagagaacgtttacattaatttaacttgtagctccatccatggatatccagaacccaaaaagatgtcagtgctgcttcgcaccaaaaacagtacaattgagtacgatggcgtcatgcagaagagtcaggacaatgtgaccgaattgtatgatgtatctatctccctgtcagttagcttccctgacgtgactagcaacatgacaatattttgcattctagagaccgataaaacgcgactcctgtcttccccattcagcatcgagcttgaagacccccaacctccaccggatcacattccctggatcactgcagtcctgcctaccgtgatcatttgtgtgatggtcttttgcttgatactctggaagtggaagaaaaagaaacgtccaagaaattcgtacaagtgtggtacaaacactatggagagggaagagtctgaacagaccaaaaagcgggagaaaatccacattcccgagcgctccgacgaagcccagagagttttcaagtcaagtaagacaagctcctgcgacaaatctgatacctgtttttga

SEQ ID NO: 2103 - RNA, 708 nt, synthetic construct
  misc_feature 1..708: note = AAA59674 variant
  source 1..708: mol_type = other RNA
atggccctgcccgtgaccgctctccttctgcctttggcattactgctacacgccgcgagaccaagccagttcagggtctccccgctcgaccggacatggaacctgggcgagactgttgaacttaagtgccaagtgctgttgtctaatcccacgtcagggtgtagttggctctttcagcctcgcggagctgccgcaagcccaaccttcctgctgtacctctcccagaacaaacccaaggccgctgagggtttagatacacagcgattttctggcaaacgtctgggggacactttcgtacttaccttgtcggattttagaagggaaaatgagggatattacttctgctcagcactgagcaacagtatcatgtatttttcccatttcgtgcctgtctttctaccagccaagcccacaaccactcctgctccacggccgcccacccctgccccaacaattgcgtctcaacccctcagcctgcgccctgaagcatgtagaccagccgctggcggtgccgtgcacacgagggggcttgacttcgcatgcgatatatacatctgggctcccctggccggaacttgtggcgttttgctcctgtccttagtgattaccctgtattgcaatcatcggaaccgccgaagagtctgtaaatgcccgaggcctgtggtaaagtcaggcgacaagcccagtctcagcgcgcggtacgtttga

SEQ ID NO: 2104 - RNA, 2472 nt, synthetic construct
  misc_feature 1..2472: note = EAW57688 variant
  source 1..2472: mol_type = other RNA
atgaccgtgctgcaggagcccgtccaagccgctatctggcaggcactcaaccactacgcctatagagacgcggttttccttgctgaaaggctgtacgccgaggtgcatagcgaagaggcattgtttttactggccacatgctattaccggtccggcaaggcttataaagcataccgcctactcaaggggcactcttgtactacgcctcagtgcaaatatctgcttgccaagtgttgcgtagatctgtcaaaattggctgaaggagagcagattctcagtggtggcgtgttcaataagcaaaagagccatgacgatatagtcaccgagtttggggactccgcctgtttcacactgtctctgctcggacacgtgtactgcaaaactgatcgattagcgaagggctcggaatgttaccagaaatcactgagccttaacccatttttgtggagtccgttcgagtccctgtgcgaaatcggtgagaagcccgaccctgatcagacctttaaattcacatctctacagaattttagcaactgtctcccaaattcctgcaccactcaagttcccaaccattcactgagtcaccgtcagcctgagacagtgcttaccgaaacgccacaggacactattgagctgaatagattgaacctcgaaagctctaattccaagtattcactgaacaccgatagcagtgtctcttacatcgactccgcagtgattagccccgatacagtacctttagggactggaacctcgatcctgtctaagcaggttcaaaataaaccaaagacaggcaggtccctccttggcgggccggccgctctgtcacccttgacccctagtttcggaatactaccactggagacgcccagccctggtgacggctcctatctccagaactacactaatacaccacccgtgatcgatgtcccgtctaccggggcccctagcaaaaagtcagtggcacggattggacagactggcacaaaaagtgtgttttcccaaagcggtaactctcgcgaagtcacccccatcctggctcagacgcagtcaagtgggccacagaccagcacaactcctcaagttctttcccccaccattacatctccacccaatgccctgcctagaaggtcgagccggttgttcacttccgactcaagtaccacaaaggagaactctaaaaagctcaagatgaaatttccaccgaagatccccaaccgcaaaaccaagagcaaaactaataagggaggcataacgcagcctaacattaatgactccctggagatcacaaagttagattcaagcattatctctgaaggcaaaatctccaccattactccacagatacaggcgttcaacctgcaaaaggccgcagctgggctaatgagtctcctgcgagagatgggaaaaggttatcttgccttgtgtagctacaattgcaaggaagctatcaacattctgtctcacctcccctcccatcactataataccggctgggtgctgtgccagatcgggagagcctacttcgagctttcagaatacatgcaggcagagaggatatttagtgaggtacggcgtattgaaaactatcgcgtggagggaatggaaatctacagcacaaccctgtggcatttgcagaaagacgtcgccctctcggtgctgtccaaggatttaactgacatggataaaaattctcctgaggcttggtgtgcggcaggcaactgcttcagcctgcaaagagaacacgacatcgccattaagtttttccagagggctatccaggttgatccaaattatgcctacgcatatacactactcggtcacgagtttgtgctgacggaggaacttgacaaggccttggcttgtttccggaacgccattcgagtcaatccccgccattacaacgcatggtatgggctgggcatgatatactacaaacaggagaagttttcactcgcggaaatgcacttccaaaaagctctggatatcaatccgcagagttccgtgttactgtgccatattggagtagttcagcacgcccttaagaagtctgagaaagcattggacaccctcaacaaggccatcgtgatcgatcctaaaaacccactgtgtaagtttcatagagctagcgtcctattcgccaatgagaaatataagtccgcactgcaagaactcgaggaactgaaacagattgtgcccaaggagtcacttgtctactttttgataggcaaggtgtataaaaagctggggcagactcacttagctctcatgaacttcagctgggccatggacctggaccctaaaggagcgaataaccagatcaaggaagccattgataaaaggtaccttcccgacgatgaggagccaatcacacaagaggaacagattatgggtaccgacgaaagtcaggagtcttccatgacagatgctgacgatactcagctgcacgcagccgaaagcgacgagttttga

SEQ ID NO: 2105 - RNA, 2475 nt, synthetic construct
  misc_feature 1..2475: note = AAB34378 variant
  source 1..2475: mol_type = other RNA
atgaccgtgctgcaggagcccgtccaagccgctatctggcaggcactcaaccactacgcctatagagacgcggttttccttgctgaaaggctgtacgccgaggtgcatagcgaagaggcattgtttttactggccacatgctattaccggtccggcaaggcttataaagcataccgcctactcaaggggcactcttgtactacgcctcagtgcaaatatctgcttgccaagtgttgcgtagatctgtcaaaattggctgaaggagagcagattctcagtggtggcgtgttcaataagcaaaagagccatgacgatatagtcaccgagtttggggactccgcctgtttcacactgtctctgctcggacacgtgtactgcaaaactgatcgattagcgaagggctcggaatgttaccagaaatcactgagccttaacccatttttgtggagtccgttcgagtccctgtgcgaaatcggtgagaagcccgaccctgatcagacctttaaattcacatctctacagaattttagcaactgtctcccaaattcctgcaccactcaagttcccaaccattcactgagtcaccgtcagcctgagacagtgcttaccgaaacgccacaggacactattgagctgaatagattgaacctcgaaagctctaattccaagtattcactgaacaccgatagcagtgtctcttacatcgactccgcagtgattagccccgatacagtacctttagggactggaacctcgatcctgtctaagcaggttcaaaataaaccaaagacaggcaggtccctccttggcgggccggccgctctgtcacccttgacccctagtttcggaatactaccactggagacgcccagccctggtgacggctcctatctccagaactacactaatacaccacccgtgatcgatgtcccgtctaccggggcccctagcaaaaagtcagtggcacggattggacagactggcacaaaaagtgtgttttcccaaagcggtaactctcgcgaagtcacccccatcctggctcagacgcagtcaagtgggccacagaccagcacaactcctcaagttctttcccccaccattacatctccacccaatgccctgcctagaaggtcgagccggttgttcacttccgactcaagtaccacaaaggagaactctaaaaagctcaagatgaaatttccaccgaagatccccaaccgcaaaaccaagagcaaaactaataagggaggcataacgcagcctaacattaatgactccctggagatcacaaagttagattcaagcattatctctgaaggcaaaatctccaccattactccacagatacaggcgttcaacctgcaaaaggccgcagctgaggggctaatgagtctcctgcgagaaatgggaaaaggttatcttgccttgtgtagctacaattgcaaggaggctatcaacattctgtctcacctcccctcccatcactataataccggctgggtgctgtgccagatcgggagagcctacttcgaactttcagagtacatgcaggcagagaggatatttagtgaagtacggcgtattgagaactatcgcgtggaaggaatggagatctacagcacaaccctgtggcatttgcagaaagacgtcgccctctcggtgctgtccaaggatttaactgacatggataaaaattctcctgaggcttggtgtgcggcaggcaactgcttcagcctgcaaagagagcacgacatcgccattaagtttttccagagggctatccaggttgatccaaattatgcctacgcatatacactactcggtcacgagtttgtgctgacggaagaacttgacaaggccttggcttgtttccggaacgccattcgagtcaatccccgccattacaacgcatggtatgggctgggcatgatatactacaaacaggaaaagttttcactcgcggagatgcacttccaaaaagctctggatatcaatccgcagagttccgtgttactgtgccatattggagtagttcagcacgcccttaagaagtctgagaaagcattggacaccctcaacaaggccatcgtgatcgatcctaaaaacccactgtgtaagtttcatagagctagcgtcctattcgccaatgaaaaatataagtccgcactgcaagagctcgaggaactgaaacagattgtgcccaaggaatcacttgtctactttttgataggcaaggtgtataaaaagctggggcagactcacttagctctcatgaacttcagctgggccatggacctggaccctaaaggagcgaataaccagatcaaggaggccattgataaaaggtaccttcccgacgatgaggaaccaatcacacaagaggaacagattatgggtaccgacgagagtcaggaatcttccatgacagatgctgacgatactcagctgcacgcagccgagagcgacgagttttga

SEQ ID NO: 2106 - RNA, 1788 nt, synthetic construct
  misc_feature 1..1788: note = AAA51947 variant
  source 1..1788: mol_type = other RNA
atgagagtgctgctcgccgctcttggcctgttgttcttaggggcactgagggcctttccccaggaccggcctttcgaggatacctgccacggaaacccaagccattactatgacaaggcggtccgccgatgttgctaccgttgtccgatgggtctatttcccacacaacagtgccctcagagaccaactgattgtaggaaacagtgcgaacccgactattacctcgatgaggctgaccggtgtacggcctgcgttacctgttcccgcgatgacctggtggaaaagacaccttgcgcatggaactcttcaagagtatgtgagtgcaggccaggcatgttctgcagtactagcgccgtcaattcctgtgctcggtgctttttccactctgtgtgtcccgcagggatgatcgtgaaatttcctggaaccgcccaaaagaatacagtttgcgaaccagcttcgccgggcgtgtcacccgcctgtgcgagccctgagaactgcaaagagccaagttccggtaccattccccaggcaaagcctactccagtctctcccgccacaagctccgcttcaaccatgccggtgcgcgggggaacgcgacttgcccaggaagcagctagtaagctgactagagcccctgatagcccctcttccgtaggcaggccatcaagcgaccctggcttgagtcccacccagccatgtcccgaggggtctggagattgccggaaacaatgtgaacctgactattacctcgatgaggcgggtcgttgcacagcctgtgtttcctgcagccgcgacgacctggtggagaagactccatgcgcatggaactcgtctagaacctgtgaatgcaggccgggcatgatatgtgctacatccgccaccaattcatgcgctcggtgtgtcccctatcctatctgcgccgcagagacggtgactaaaccacaggatatggccgaaaaggacacaaccttcgaggctccccctctggggactcagccagattgtaatcccacaccggaaaacggagaggcgcctgcaagtaccagcccaacgcagtccctcttagtggactctcaagccagcaaaaccctgcccattcctacatcagctcccgtcgcccttagttccactggcaagccagttttggatgcaggtcctgtgctgttttgggtaatcctagtgctcgtcgtggttgtggggagctctgccttcctgctttgccatcgacgcgcttgtagaaagaggattcggcagaaactgcacttgtgctaccccgtccagacctcacaaccaaagctcgagctggtggacagtcgcccgagaaggagctccacacagttacgttctggagcctcggtaactgaacctgttgcagaggaacggggcctgatgagccagcccctcatggagacctgtcattccgtgggcgcggcttaccttgaatcactgccattgcaggatgccagtcccgcagggggaccttctagcccacgagacctacccgagcctagagtctccacagagcacaccaataacaaaatcgaaaagatatatatcatgaaagccgatactgtgattgtcggtacggtgaaggctgagctgccggaaggcagggggctcgccggaccagcagagcccgaactggaggaggaacttgaggctgaccacacacctcattacccagaacaagagaccgagccccctctgggctcatgcagcgatgttatgttgtctgtggaagaggaaggtaaagaggacccgctccccactgccgcgtccgggaagtga

SEQ ID NO: 2107 - RNA, 912 nt, synthetic construct
  misc_feature 1..912: note = EAW97060 variant
  source 1..912: mol_type = other RNA
atggccaccagcagatacgagcccgtggctgaaatcggcgtcggggcatatggaacagtttacaaggccagggaccctcactccggtcatttcgtggcgctgaaatctgtacgggtgccaaacggcgggggaggcggtgggggactcccgatttcaactgtccgcgaggtggctctgcttcgacgtttggaagcctttgagcaccccaatgttgtgagattaatggatgtctgcgcaacgagtaggaccgaccgggaaataaaggtgacactggtattcgagcatgttgatcaggacctacgcacttatctcgataaagcccctccacccggcctgcctgctgagaccatcaaggaccttatgagacaatttctgaggggcttggatttcctccacgcaaactgtattgtgcatcgggacctgaaaccagaaaatatcctggtcacaagcgggggaaccgtgaagctcgccgattttggtttagctcgcatttactcctatcagatggccctgactcccgtggtcgttacactttggtaccgagcgcctgaggtgttgctgcagtctacctatgcaacgccagtagacatgtggtcggtgggctgcatcttcgccgaaatgtttagaaggaagccgctattctgtgggaactcagaggctgatcagctcggaaaaatatttgacctgatcggccttccccctgaggatgactggccacgggacgtcagcctgccccgtggtgccttccctccacgcgggcccagaccggtgcaaagtgttgtgcctgaaatggaggaatccggagcacagttgctcctggagatgttaacttttaatccccacaagaggatttctgctttccgggccctgcagcacagctacctccataaagatgaaggcaacccagagtga

SEQ ID NO: 2108 - RNA, 912 nt, synthetic construct; identical to SEQ ID NO: 2107
  misc_feature 1..912: note = AAA35673 variant
  source 1..912: mol_type = other RNA

SEQ ID NO: 2109 - RNA, 690 nt, synthetic construct
  misc_feature 1..690: note = AAB50213 variant
  source 1..690: mol_type = other RNA
atggacgtgtgcgccaccagcagaacagatagggagatcaaggtcactctggttttcgaacacgtggaccaggatctccggacgtaccttgacaaagctccccctccaggcctgccggcagagaccattaaggatttgatgcgccaatttttacgagggctggacttcctacatgccaactgtatagtacaccgtgatctcaaacccgaaaatatcctggtgacatccggaggtactgtcaaacttgcggactttggcctggctagaatttattcttaccagatggccttgacccctgtggttgtgacactctggtatagggcaccagaggtcctgctgcagtcaacctacgccactcccgtggatatgtggagtgtagggtgcatcttcgctgaaatgtttcggcgcaagcctctcttctgtggaaacagcgaggcagaccagttaggcaagatttttgatctgatcggtcttccacccgaggacgattggcctagagacgtttccttgccaaggggagccttcccgccccgggggcctcgcccagtgcaatctgtcgtgcccgaaatggaggaatcgggcgctcagctgctactcgagatgctgacatttaatcctcataagcgaatatcagccttcagagcgcttcagcacagctatctgcataaagacgagggcaacccagaatga

SEQ ID NO: 2110 - RNA, 336 nt, synthetic construct
  misc_feature 1..336: note = AAH15669 variant
  source 1..336: mol_type = other RNA
atggccaccagcagatacgagcccgtggctgaaatcggcgtcggggcatatggaacagtttacaaggccagggaccctcactccggtcatttcgtggcgctgaaatctgtacgggtgccaaacggcgggggaggcggtgggggactcccgatttcaactgtccgcgaggtggctctgcttcgacgtttggaagcctttgagcaccccaatgttgtgagattaatggatgtctgcgcaacgagtaggaccgaccgggaaataaagcgctgtttcgtggagagcctgtcctctgtagagacactaaaacctacttcgtgggccaagtcactcacctga

SEQ ID NO: 2111 - RNA, 429 nt, synthetic construct
  misc_feature 1..429: note = ACY78326 variant
  source 1..429: mol_type = other RNA
atggagcccgccgctggcagctccatggaaccttctgcagactggctggccaccgcggctgccagagggagggtggaggaagtccgggcactccttgaggccggagctctgccaaacgcacccaattcatacggtcgccgaccgatccaggttatgatgatgggcagtgcccgtgtggctgaattgttactgctacacggggccgagcctaactgcgcggatccagcaacactcactagacccgtacatgacgccgctagggagggattcctggatacgcttgtggtcctgcaccgggccggcgcaccttgtgctatgccaggtgccgtgtgcccctggacctggttgcgcagctgggcgattgccatgtcccatgggacatgtgcaagactcaggggagctcctgaagccgttactatgccagcttga

SEQ ID NO: 2112 - RNA, 351 nt, synthetic construct
  misc_feature 1..351: note = EAW58598 variant
  source 1..351: mol_type = other RNA
atggagcccgccgctggcagctccatggaaccttctgcagactggctggccaccgcggctgccagagggagggtggaggaagtccgggcactccttgaggccggagctctgccaaacgcacccaattcatacggtcgccgaccgatccaggttggccgtgggagtgccgctggagccggcgatggtgggagattgtggaggacaaagttcgcgggagaattagagagcggctccgcatctattctgcggaaaaagggccgcctacctggggagttttcggaaggagtgtgcaaccacagaccaccccctggtgacgccctcggcgcttgggaggccaaagaagaggagtga

SEQ ID NO: 2113 - RNA, 471 nt, synthetic construct
  misc_feature 1..471: note = AFN61598 variant
  source 1..471: mol_type = other RNA
atggagcccgccgctggcagctccatggaaccttctgcagactggctggccaccgcggctgccagagggagggtggaggaagtccgggcactccttgaggccggagctctgccaaacgcacccaattcatacggtcgccgaccgatccaggttatgatgatgggcagtgcccgtgtggctgaattgttactgctacacggggccgagcctaactgcgcggatccagcaacactcactagacccgtacatgacgccgctagggagggattcctggatacgcttgtggtcctgcaccgggccggcgcacgcttggacgtgagagatgcttggggtaggctccctgttgacctggccgaggaactggggcatcgggatgtggcgcgctatctccgagccgcagctggaggcaccagaggcagcaatcacgccaggattgacgctgccgaagggccatccgatatacccgactga

SEQ ID NO: 2114 - RNA, 327 nt, synthetic construct
  misc_feature 1..327: note = CCQ43815 variant
  source 1..327: mol_type = other RNA
atggaggtgatgatgatgggcagcgccagagtcgctgaactgctccttctgcacggggcagagcccaactgcgccgaccctgcgaccttgacaaggccagttcatgatgctgcccgggaaggattcttagacactctggtggtactacaccgcgccggtgcacgactcgatgtgcgtgacgcttggggcagactgccggtcgatcttgcagaggaactggggcatagggacgtggcccggtacttgcgcgctgccgcgggaggcacgagaggttccaatcacgcaaggatcgatgccgctgaggggccctctgacattcctgattga

SEQ ID NO: 2115 - RNA, 399 nt, synthetic construct
  misc_feature 1..399: note = AAA82236 variant
  source 1..399: mol_type = other RNA
atggtgagaaggttcctggtcaccctccggatccgccgagcctgcgggccccctcgtgttagagtgtttgtagtgcacattccaaggcttacaggcgagtgggctgcaccgggagcccccgcggctgtcgccctggtgttgatgttactgcggagccagcgcctaggtcaacagcctctcccaagaaggcccggccatgacgatgggcagcggccttccggaggcgcagccgctgcaccacgccgaggtgcccagctgagaaggccccggcactctcatcctactcgtgctcgcagatgtccagggggacttccgggccacgccggcggggcggcacccggaaggggtgccgctggccgggcccgatgcctggggccttcagcacgcggaccaggctga

SEQ ID NO: 2116 - RNA, 2109 nt, synthetic construct
  misc_feature 1..2109: note = CCDS12584.1 variant
  source 1..2109: mol_type = other RNA
atggagagcccctccgcccctccacacagatggtgcatcccgtggcagaggctgctccttaccgcttctctgttgacattctggaatccccctactacggcaaagttaaccattgaatcaacaccatttaatgtggccgagggcaaagaagtcctgctactcgttcataacctgccccaacaccttttcgggtacagttggtataagggagagcgggtggacggtaatcgccagataatcggctacgtaattgggactcagcaggcgacccctggaccagcttatagcggccgagaaatcatttaccccaacgcctccctgttgatccaaaatataatccagaacgatacaggtttttataccctccatgtgattaaatctgacctggtcaatgaggaggcaactgggcagttccgtgtgtaccctgaactgccaaagccgtcgatctcaagcaacaatagtaaacccgttgaggataaggacgccgtggcttttacatgtgaacctgagacccaggatgcaacgtatctctggtgggtcaacaatcaatccttaccagtgtctcccagactgcagcttagcaacggaaataggactttgaccctgttcaacgtaacacggaatgacactgcctcctacaagtgcgagacccagaaccctgtttcagctcgcagaagtgatagcgtgattctaaacgtcctctacggcccagacgcccccacaatctctccgctgaatacctcctataggtcaggcgaaaaccttaatctgagctgtcacgcggcaagtaaccctcccgcccagtactcttggtttgtgaatgggacgttccaacagtccactcaggagttgtttataccaaacattacagtgaataacagcggatcgtatacctgccaagctcataattctgatactggtctcaaccggacaaccgtcacgaccatcacagtttacgccgaacctcccaaaccattcattacttccaataactcaaatcccgtggaggacgaagatgcagtagctctgacctgtgagcctgagatccagaacacaacttatttatggtgggtgaataaccagagtctgccagtcagcccgcgcctccagctttccaacgacaatcgaaccctgacattgctatctgtgaccagaaacgatgttggcccctacgaatgcgggatccaaaatgagctgagcgtggaccactcagaccctgtcattctcaacgtgctgtatggaccagatgaccccactataagtccttcctacacgtactataggccaggcgtaaatcttagcctgtcttgtcacgccgcgtcaaatcccccggcccagtacagttggttgatcgatggtaatattcagcagcatacacaagaactctttatcagcaacataaccgagaagaactccgggctgtatacttgccaggcaaacaattctgcttcgggacacagccggaccacagttaaaaccattactgtgtccgccgaattacctaagccatcaatcagttctaacaatagcaaacccgtcgaggacaaggatgctgtggccttcacatgtgagcctgaagcacagaacacgacctacctgtggtgggtcaatggccagtccctacccgtgtcaccacgtctccaactgagcaacggcaaccgcactcttacattgtttaatgttaccagaaacgacgccagggcttatgtgtgcgggatccagaactctgtatccgcgaaccggagtgatcctgtcacactggacgtgctctacggacccgatactccaattatcagcccgcctgactcttcctatctgtcaggtgcaaatcttaacctgagttgtcatagcgcctcgaatccctccccacagtactcttggcgaattaacggcataccccagcaacacacccaggttttgttcatcgctaagattacgcctaataacaatgggacctacgcctgcttcgtgagcaacctcgcaacaggacgcaataactcaatcgtcaaaagtatcactgtgtccgcctctggcaccagcccaggtctgtccgctggggccacagtaggcattatgataggagtgttagttggcgtcgcactgatctga

SEQ ID NO: 2117 - RNA, 1035 nt, synthetic construct
  misc_feature 1..1035: note = AAA51739 variant
  source 1..1035: mol_type = other RNA
atggggccccctagcgccccaccgtgcagactgcacgtgccctggaaggaggtcctccttaccgcttccctgttgacattctggaaccctccaactacggcaaaattaaccatcgaatctacaccctttaatgttgccgagggcaaggaagtgctgctactcgcgcataacctgcctcagaataggattggatactcatggtataaaggtgagcgggtagacggcaacagtcttatagtggggtacgtcatcggaactcaacaggctaccccaggccccgcctatagcggtcgcgaaacaatttaccctaatgcatccctgttgatccagaacgtgacccagaatgatactgggttctatacactccaagttattaagtctgacctggtgaacgaggaggccaccggacagtttcacgtctacccagaactgccgaaaccctcgatctcaagcaataacagtaatcctgtggaggataaggacgctgtagcattcacgtgtgaaccagaggttcagaacactacctatctctggtgggtgaatggccagtccttacccgtctctcctcgactgcaacttagcaacggcaatatgacattgactctgctatccgtgaagcgtaacgatgccgggtcatacgagtgcgaaatacagaacccagctagtgccaatagaagcgaccccgtgaccctcaacgtcctgtacggaccggatggtcctacaatctctccctccaaagcgaattataggccaggcgagaaccttaatctgtcatgtcatgcagccagcaaccctcccgctcagtacagttggtttattaatgggaccttccagcaatctacgcaggaattgtttatcccaaacattactgttaataactccggaagctatatgtgccaggcccacaattcggcaacaggcctcaaccggaccactgtgacaatgatcaccgtatctggttccgctcccgtgctgtcagccgtcgcgacggtggggataaccattggagttttagcccgcgtggcactgatctga

SEQ ID NO: 2118 - RNA, 1173 nt, synthetic construct
  misc_feature 1..1173: note = AAB04533 variant
  source 1..1173: mol_type = other RNA
atgggcgccaccacaatggaccaaaagagcctgtgggctggggtggtcgttctccttctgttgcagggaggttccgcatacaaattagtgtgctatttcactaactggtctcaggatagacaggagcccggcaagtttacgcctgaaaatatcgacccattcctgtgttcacacctaatttacagttttgccagcatagagaacaataaagtaatcattaaggataaatccgaagtgatgctctatcagaccatcaactctctgaagacaaagaatccgaaacttaagattctgttgtcgatcgggggatacctcttcggctcaaaaggttttcatcccatggtcgacagcagtacttccaggctggagttcataaactctatcattctgtttctccggaatcacaacttcgatgggttagacgtgagctggatctatcctgatcaaaaggaaaatacccattttacagttctgattcacgagcttgcggaggctttccagaaagactttaccaagtccactaaggaacgcttgctgctaacagccggagtgtcagcaggccgacagatgatcgataacagttaccaggtcgagaaactcgccaaggacctggatttcataaatcttctgagctttgacttccatggctcttgggaaaaaccattgattaccgggcacaactccccactctcaaagggatggcaagatcgtggtcctagcagttattacaatgtggagtacgctgtaggctattggatccacaaagggatgccatctgagaaggttgtgatgggcattcccacgtacggacattccttcactctggcaagcgccgaaaccacagtcggtgctcctgcctcggggccaggagcggcaggcccgatcactgagtcttccggctttttagcctattacgaaatctgccagttcctgaaaggggctaagattaccagactccaggaccagcaagtgccctatgccgtgaagggaaaccagtgggtcggttacgacgatgttaaatcaatggagacaaaggtgcagtttcttaaaaatctgaacttgggcggggcaatgatatggagtatcgacatggatgacttcaccggaaagagctgtaaccaaggcccttatcccctagtacaggctgtgaaaaggtccctgggttctctctga

SEQ ID NO: 2119 - RNA, 2832 nt, synthetic construct
  misc_feature 1..2832: note = AAD40367 variant
  source 1..2832: mol_type = other RNA
atgacccagagaagcatcgccggccccatttgcaacctgaagttcgtgacactccttgtcgctctgtcctctgagttgccatttttaggggcaggagttcaactgcaggacaatggttacaacggcctactcatagccatcaatcctcaggtgccggaaaaccagaatctgatttcaaacatcaaagagatgattactgaagcgagtttctatctttttaatgctacgaagaggcgggtattctttcgcaacatcaaaatactgatccccgccacctggaaggcaaataacaatagcaaaattaagcaagagtcctacgaaaaggccaacgtgatcgtcacagattggtatggggctcacggagacgatccttacactttgcagtatcgaggctgtggtaaagaggggaagtacattcatttcaccccaaattttctcctgaacgacaatctgacagcaggatatggctctcgtggcagagtgttcgttcacgagtgggcccatctcaggtggggagtgtttgatgaatacaacaacgacaaacccttctacatcaatgggcagaaccagataaaggtcacccggtgctcgtcagatattactggtatctttgtgtgtgagaaaggcccttgcccacaagaaaattgtattatcagcaagttattcaaggaggggtgcacatttatctataacagtacccagaatgctacggcctccattatgttcatgcagtctctgagctccgtagttgagttctgtaacgcgtcaactcacaatcaggaagcacccaaccttcaaaatcagatgtgcagtttgcgcagcgcctgggacgtgataaccgattctgctgactttcatcactccttccctatgaacggaacagagctgccaccgccccctacttttagtctagtccaggccggcgataaagtggtgtgtctcgtcctggacgttagcagtaagatggcagaagctgatagacttctgcaattgcagcaggccgcggagttctacctcatgcagatcgtggaaattcacacctttgtaggtatcgcctctttcgactccaaaggggagataagggcacaactgcatcagattaatagcaacgacgatcggaagttactggtgtcgtatctcccaacaaccgtctctgctaaaacggacatctccatctgctcaggacttaagaaaggctttgaggtggttgaaaagctgaatggcaaggcctacgggagtgtgatgattttggtcactagcggagatgacaaactactgggtaactgtctccccacagtgctgtcctctggcagcaccatccactcaattgctcttgggagttccgccgcacctaatctggaggaattgagccgcctcactggaggcctgaagttctttgtaccagatatatctaactcaaacagtatgatcgacgccttcagccgaatttcctctggtacaggggatatctttcagcagcatatccaattagagtcgaccggcgaaaatgttaaaccccaccaccagctgaagaacacggtgaccgtcgacaatacagtgggaaacgatactatgttcctagtcacctggcaggctagcggcccgcctgagattatactctttgaccccgatgggagaaaatattacacaaataacttcatcactaatctgaccttcaggacagcgtccctttggattccaggaaccgcaaagcctggtcattggacttatacgttgaacaatacacaccattcactgcaggccctcaaggtgaccgttacttcacgggcttctaacagcgccgtgcccccagcaaccgtagaggcctttgtcgaacgtgactccctgcacttcccccatcctgtgatgatctacgctaatgttaaacaaggcttttacccaattcttaacgccacagtgaccgcaactgtcgagccggaaacaggggaccccgtgacgctgcgcttgctcgatgacggagcgggcgctgatgtaatcaagaatgacggtatatattcaagatacttctttagcttcgccgcaaacgggaggtattctctgaaagtgcacgttaatcactcccctagtatcagcaccccagcccattctattcccggctcccacgctatgtacgtccctggatatactgccaacggcaacatccagatgaatgcaccacggaagtcagtggggcgaaacgaggaggaacgcaaatggggatttagtagagtgagctcgggtggctccttctctgtcttaggggttcccgctggaccgcatcctgatgtgtttccaccctgcaagattatcgacctggaggccgtgaaggtagaagaggaactaacactcagctggaccgcgcctggcgaggatttcgaccagggtcaggccacatcatacgagataaggatgagtaaatccctgcaaaatattcaggatgactttaacaatgctatccttgtcaacacttctaagcggaatccccagcaagcagggattcgcgaaatcttcacctttagcccacagatatccacgaacggccctgagcaccagcccaatggagaaacccacgagtcacatagaatctatgtggccattagggctatggatcgtaacagcttgcagagtgccgtttctaatatcgcacaagcgccactgttcattccgcctaactccgaccccgtgccagcccgggattacctcatcctgaaaggcgtcttaacagctatggggctgataggaattatctgccttatcattgtggttactcaccataccttgagccgaaagaaaagagccgacaagaaggaaaatggcacaaaactcctgtga

SEQ ID NO: 2120 - RNA, 708 nt, synthetic construct
  misc_feature 1..708: note = AAF82135 variant
  source 1..708: mol_type = other RNA
atggaggaagagacccacacagacgccaagatcagagctgaaaacggcactgggagctcccccaggggacctggttgctctctgcggcatttcgcatgtgagcagaatctcctttcacgcccagatggcagtgccagctttctgcaaggggacacgtccgtgttggcgggagtctacggcccggctgaagttaaagtgtctaaggagattttcaacaaagccaccttagaggtaatactgcgacccaagatcggtctacctggggtggcagaaaaatcgcgtgagagactcattaggaatacatgcgaagccgtcgtgctgggaactcttcacccacggacctcaatcacagttgtgctgcaggtcgtgagcgatgctggcagtttgctcgcatgttgcctgaacgccgcttgtatggccctggtagacgcgggcgttcccatgcgcgcactcttttgcggggtggcctgtgctttagattccgacggaaccctggtccttgatcctacttctaagcaggagaaggaggccagagcagtgttgacattcgctctggacagcgtggaaaggaaactactcatgtcctcaaccaagggtctgtatagtgatacggagcttcagcaatgcctggccgcggcccaggcagctagccagcatgtctttcggttctaccgcgaatctttgcagcgaagatattccaaatcatga

SEQ ID NO: 2121 - RNA, 1752 nt, synthetic construct
  misc_feature 1..1752: note = CCDS6312.1 variant
  source 1..1752: mol_type = other RNA
atggaggtggccgctaactgcagcctgagagtcaagaggcccctccttgaccctcggttcgaaggctacaaactgtccttggagccattaccgtgttatcagctggaactagatgcagccgttgcggaggtgaagctccgcgacgatcaatacaccctggaacacatgcatgcttttgggatgtataattaccttcactgcgactcttggtatcaggattcagtatactatatcgacacactgggacgaattatgaacttgactgtgatgctcgatacggccctgggtaaaccccgtgaggtcttcagactgcctaccgacctcacagcatgtgataataggttatgcgccagtatacattttagctcctctacttgggtgaccctgtcggacggcacagggcggctttacgttatcggaaccggcgagcgcggtaactcagctagcgaaaagtgggagattatgttcaatgaagagttgggggatccatttatcattatccacagtatatccctgctaaacgcagaggaacattctatcgccactctcctgcttagaattgagaaagaagaactggacatgaagggaagcggcttctacgtgtccttggaatgggtcacaatctcaaagaaaaatcaggataacaagaaatatgagattatcaagagggacatactccggggcaaaagtgtgccccactacgctgccattgagcctgacgggaatggactgatgatcgtaagctataagtctttaacctttgttcaggcgggtcaagatctggaagagaacatggacgaagatatttccgagaagatcaaagaaccactctactattggcagcagacggaggacgatcttactgtgaccatccgcctgcccgaggactcaacaaaggaagatattcagatacaattcttgcctgaccacatcaatattgtcctaaaagatcatcagtttctggagggcaagctctacagcagtatcgaccacgaatcttccacttggataattaaagagagcaactcgctggaaatctctcttatcaagaaaaatgaggggctgacctggccagagttggtgattggagataagcagggcgaactcatccgagactccgcacagtgtgccgctattgccgagagactgatgcatttaacatcagaggagctgaacccgaatcccgacaaggagaaacctccatgcaacgcacaagaactagaggaatgtgatatattctttgaggaaagtagctccctctgcaggttcgacggtaacaccctgaagacgactcacgtggtcaatcttgggtctaaccagtatttgtttagcgttatcgtggatcccaaagagatgccttgtttctgcctgcggcacgacgtagatgctctcctgtggcagccacattcaagtaagcaagacgatatgtgggagcacattgccacattcaatgcgcttggatacgtgcaggcctccaaacgtgacaagaagtttttcgcatgtgctcccaactacagctatgccgctctgtgcgaatgcttgcgcagagtctttatctacaggcagccggcccctatgtctaccgtgctctataatcggaaagagggccgacaggttggccaagtggcaaagcagcaggtcgcctcactggaaactaacgatcccatcttagggttccaggctacaaatgagcgcctgtttgtgctaaccacgaaaaacctcttcctgattaaggtaaataccgaaaactga

SEQ ID NO: 2122 - RNA, 1563 nt, synthetic construct
  misc_feature 1..1563: note = CCDS41288.1 variant
  source 1..1563: mol_type = other RNA
atgagctcccctctggcctctctctcaaagaccagaaaagtgcctcttccaagtgagccgatgaaccccggcaggcgggggatccgcatttacggagacgaagatgaggtcgacatgctgagcgatggttgcggctccgaagagaagatatctgttccttcgtgttatgggggaatcggcgctccagtgtcacgacaggtacccgcaagccacgacagtgaattgatggccttcatgacacgtaaattatgggatctggagcaacaggtgaaggcgcagactgacgagattctatccaaagatcagaagatcgctgccctcgaagacctggtccaaacgcttagacctcatccagcagaggccaccctgcagaggcaggaagagttggagacaatgtgcgtgcagctccaacggcaggttcgcgaaatggagagatttctgtctgattacggtctgcagtgggtgggggaacccatggaccaggaggatagcgaatccaagactgtctcagagcacggagagagggactggatgaccgctaaaaagttctggaaacctggcgatagtctcgcaccaccggaagtggactttgaccggttactggccagccttcaagatttgtctgagctggtagttgaaggcgacacacaggtgacccccgtccctgggggagctcgcctacgaactctcgagccaattcccctgaaactttatagaaatggtatcatgatgttcgatggcccttttcagccattctacgacccctccacacaaaggtgtctgcgggatatattggacgggtttttcccgtcagaactccagcgtctgtatcctaacggagtgccctttaaggtgagcgatttacgcaatcaggtctacctggaggacggcctcgatccattccctggtgaggggagagttgtgggaaggcagcttatgcataaggccctggaccgggtagaggaacaccccggcagtcgaatgaccgcggaaaagtttttgaaccgcctaccaaaattcgtgatcagacaaggcgaggtcattgatatcagggggcccattcgggacacgctgcagaattgctgtcctctcccagcacgcatccaggaaatagtggttgagactccgaccctggccgctgagagagaaaggtctcaggagtcccccaacacacccgccccaccccttagcatgctgcgtattaagtcggaaaatggagagcaagcatttttgctcatgatgcagcctgacaacactatcggtgatgtgcgggctctgttagcccaggcgcgagtcatggacgcctctgcattcgagattttctccacctttccacccacactgtatcaggatgacaccctaacgctccaagctgccggcctggtgccgaaagctgcccttttgctgagagcaaggcgcgcccctaagtcaagtctcaaattcagcccagggccctgccctggacccggcccaggtccttcccccgggccaggcccgggaccttctcccggcccagggcccggacctagcccatgtcccggtccttcaccgagtccacagtga

SEQ ID NO: 2123 - RNA, 429 nt, synthetic construct
  misc_feature 1..429: note = AAA88022 variant
  source 1..429: mol_type = other RNA
atggccaccaagatcgacaaagaggcttgcagagcagcctacaacctggtgagggatgacggcagcgcggtcatttgggttacattcaagtatgatgggtccactatagtgcccggagaacagggtgctgagtaccaacactttatccagcagtgtacggacgatgtacgcctcttcgcctttgtgcggttcaccacaggcgacgcaatgtctaaacgatcaaagtttgcccttattacttggatcggggaaaatgtcagtggactgcagcgtgctaaaaccggcacagataagaccttggtgaaggaggttgtgcaaaacttcgcaaaagaatttgtcattagcgacagaaaggagttagaggaagatttcatcaaatccgagctgaagaaagccggtggggctaattatgacgcccagactgaatga

SEQ ID NO: 2124 - RNA, 495 nt, synthetic construct
  misc_feature 1..495: note = CCQ43891 variant
  source 1..495: mol_type = other RNA
atggccaccagagacccctgggtgtggatggctagccctgatttccaggcaaggaagggcaaacgggtccaccaagagacactggccccaggggaaactaaggacaaaatggagctccttggactgcgcggtccgttggatttactgggccccggggcgctactcgctacgctgggaaagatggcccctggcgaacataaagcacagcgagccccaaaggagtcccccgacaagaccgctcgttgggcacagagagatcctcagggtccaagggtttctcttgaatacctggagcggcgcgccacaatggggcaccaggcttcattggaccatcaaggacccagagccagtcagggcgcgtggggcctcggggagaggactgtgtggaccgtacctcaggatcggcgcggaagcctggcaacagaagcccgaatggagctgcaaggtccaggcgtgccgcaggcttccagagcctctagggaaacccagtggtga

SEQ ID NO: 2125 - RNA, 1623 nt, synthetic construct
  misc_feature 1..1623: note = AAO18361 variant
  source 1..1623: mol_type = other RNA
atgggccccggggagagagccggaggtggcggggacgctggaaagggcaacgcagccggtgggggaggcggcgggaggagcgcgaccacagctggatcccgggccgtgtctgcactgtgcctccttctgtcagtcggtagtgccgctgcatgtttgttactgggcgttcaggccgctgccctacaagggcgcgtggcggcactcgaagaggaacgagagctgcttcgtagagccggacctccaggcgctctggatgcctgggcagaaccgcacttggagaggctcctgcgggagaaactggacggtctcgctaagatccgcactgccagagaagcgcccagcgagtgcgtatgtcctccagggccccctggaaggcggggcaaaccaggccgccgaggggatcccggacctccaggtcagtccggcagagacgggtacccgggacccttaggcctggatggtaagcctgggcttccaggccccaaaggagaaaagggcgcccctggggacttcggaccaaggggtgatcagggccaggacggggcagctggacccccgggccctcccggtccacctggggcccggggacccccaggcgatacgggcaaggacgggccccgtggagctcaaggtcctgccggcccaaaaggggagccgggacaggatggcgagatgggtcccaaggggcctccaggccccaaaggagaacctggcgtgccagggaagaaaggagacgatggcaccccctctcagccgggtcctccagggcccaagggagagcctggctcgatgggtccccgcggcgaaaatggggtcgacggagcaccaggccctaagggggagcccggacatagaggcacagacggtgccgctgggccaaggggagcgccgggcttgaaaggtgaacagggcgatactgtggttattgactatgatgggcggatactggacgcactaaagggacctcccggcccacaagggccccctggaccacccggcatccctggtgccaaaggggagctcggactgccgggcgctccaggtattgatggcgagaaggggcccaaaggacagaagggcgaccctggggaaccaggacccgccggccttaaaggtgaggcaggggaaatgggactgtcaggcttgcctggcgccgatgggctcaagggagagaagggtgaaagcgctagtgactccctgcaggagtctttagcccagctgatcgtggagccggggcccccaggccctcccggaccacctggccccatgggtctccaagggattcagggaccaaaaggccttgatggcgcaaagggggaaaaaggagcgagcggtgagcgaggcccgtccgggctgcctggacccgtcggcccacccggtttgatcgggctacctggaaccaagggcgaaaaaggccgcccaggggagcccggactggacggttttcctggcccgagaggggaaaagggagataggtcagagcggggcgagaagggtgaacgcggggtgccaggaagaaaaggcgtaaagggccagaaaggggagcccggacctcccggtctcgaccaaccatgccctgttggccccgacgggctgccagtgcctggatgttggcacaagtga

SEQ ID NO: 2126 - RNA, 492 nt, synthetic construct
  misc_feature 1..492: note = CAG25548 variant
  source 1..492: mol_type = other RNA
atgctggccagagctctccttctgtgcgcagtgttggccttaagccacaccgcgaacccctgttgctcccatccttgtcagaataggggcgtctgcatgtctgttgggttcgaccaatacaagtgtgattgcacacggactggattttatggtgagaactgttcaacgccagagttcctgacccgcatcaaactatttctcaagccgacacccaatactgtgcactacattctgacccatttcaaaggcttttggaacgtagtgaataacatacctttccttcgaaatgctatcatgagttatgtcctgacaagccgttcccacttgattgactctccacccacctacaacgccgattatgggtacaagtcgtgggaagcattttcaaatctcagctattacactagagccctgcctccagtgcccgacgattgccctacaccactgggagttaaagctctccatgcaagtgtgttccaggacaggtcctga

SEQ ID NO: 2127 - RNA, 1632 nt, synthetic construct
  misc_feature 1..1632: note = AAC50809 variant
  source 1..1632: mol_type = other RNA
atgggcaccagcctgtcccccaacgacccttggccactcaatccgctttctatccagcaaacaactctgttgttactgctatcagtgctcgccacggtccacgttgggcagagactgcttaggcagcggcgccgacagctgcgtagtgctccccctggaccattcgcatggcccttgattggtaacgccgcggctgtgggccaagccgcacatctcagctttgccagactggctaggcggtacggggatgtattccagatacgcctgggatcctgccctatcgtggtcctcaatggcgagagagcaattcaccaggccttagtgcagcaaggttctgcttttgccgacaggccagcgttcgcatcgtttcgggttgtgtcagggggacgcagcatggccttcggccattatagtgaacactggaaggtccagagacgagctgcccattccatgatgaggaactttttcacccggcagccccgttctcgccaggtgctggagggccacgtacttagcgaagcaagagagttggttgctctgctagtgagggggtccgccgatggagcgtttctcgaccctcggccactgacagtcgtggccgtggcaaatgtcatgtcagctgtttgtttcggttgccgatacagtcacgatgacccggaatttcgcgagcttctgagccataacgaggagttcggcagaactgtgggggccggatctttggtagatgtgatgccctggctccaatattttcctaatccagtcaggaccgtgttccgggagttcgaacagctgaaccgcaatttttccaacttcatcttagacaaatttctgagacactgtgagtcactcaggcccggcgctgcccctcgtgatatgatggacgcattcattcttagcgccgagaagaaagctgcgggtgatagtcatgggggaggcgcacggctggacttggaaaatgttccagccacaatcaccgatatatttggcgcttctcaggacactctatccacagccctgcaatggctcctgcttctgttcacccgataccccgacgtgcagacgagagtccaggcagagttggatcaggtggtagggagggaccgcctcccgtgcatgggagatcaacctaacctgccctatgttttagcctttctgtacgaagctatgcggttcagctcgtttgtgccagtcactatccctcacgccaccacagcaaatacttctgtgctaggttatcacattcccaaggacaccgtcgtgttcgttaaccagtggtccgtgaatcatgatccactcaaatggcccaaccctgagaactttgacccagcgagattcctggataaggacggccttatcaataaggatttgacatcaagggtaatgatttttagtgtcgggaaacgccgatgtatcggagaagaactgagcaagatgcaactcttcctgttcatatccattcttgctcaccagtgcgactttcgggccaacccgaatgagcccgcaaaaatgaacttctcttacggcctgaccatcaagcctaagagctttaaagtgaatgttacgttgcgtgaatcaatggagctcctggatagtgccgtgcagaacttacaggctaaggaaacttgtcagtga

SEQ ID NO: 2128 - RNA, 333 nt, synthetic construct
  misc_feature 1..333: note = NM_001129828 variant
  source 1..333: mol_type = other RNA
atgtggatgggcctgatccagctcgtggagggggtcaagagaaaagaccaaggattccttgaaaaggagttttaccacaaaaccaacattaagatgaggtgcgagttcctggcctgttggcccgcttttacagttttgggtgaagcatggcgggatcaggtggactggagccgcttactgcgagatgccggcctagtaaaaatgtcccgtaagcctagagcgtcttcaccactcagtaataaccatccgcccactcctaagaggttcccacggcagcccgggcgcgaaaaaggacctataaaggaggtgccaggcacgaaaggtagcccctga

SEQ ID NO: 2129 - RNA, 384 nt, synthetic construct
  misc_feature 1..384: note = NM_001129826 variant
  source 1..384: mol_type = other RNA
atgtggatgggcctgatccagctcgtggagggggtcaagagaaaagaccaaggattccttgaaaaggagttttaccacaaaaccaacattaagatgaggtgcgagttcctggcctgttggcccgcttttacagttttgggtgaagcatggcgggatcaggtggactggagccgcttactgcgagatgccggcctagtaaaaatgtcccgtaagcctagagcgtcttcaccactcagtaataaccatccgcccactcctaagaggcgggggagcggacgccacccactgaatcccggccctgaagctctttccaaattcccaagacagcccggtagggagaaggggcctataaaagaggtgccaggaacgaagggctctccgtga

SEQ ID NO: 2130 - RNA, 570 nt, synthetic construct
  misc_feature 1..570: note = AAI40914 variant
  source 1..570: mol_type = other RNA
atgaccgacaagacagagaaagtggccgtcgatcccgaaactgttttcaagagacctagggagtgcgacagcccatcctaccagaaacggcaacgcatggctctgctcgcacgaaagcagggcgccggggattctcttatcgcgggatcagctatgagtaaagccaagaagctgatgacgggtcacgcaattccgcccagccagttggactcccagatagatgactttaccggcttctctaaagatcgtatgatgcaaaagcctgggtcgaacgccccagtgggaggcaatgtaacaagctcatttagtggtgacgatttagaatgtagagagactgcttcctctcccaaaagccagagggaaatcaacgcagacattaagcggaaactggtgaaggagctacgctgcgtcgggcagaagtatgagaaaatcttcgaaatgctcgagggagtgcagggccctaccgccgttagaaagaggtttttcgaatccattatcaaagaggctgcccggtgtatgcgccgagattttgtgaagcatctgaaaaagaaacttaagagaatgatatga

SEQ ID NO: 2131 - RNA, 795 nt, synthetic construct
  misc_feature 1..795: note = AAH20662 variant
  source 1..795: mol_type = other RNA
atgctgagactccttaggctggccttggctttctacggccggaccgcagaccccgccgagcgccaggggcctcaacagcagggattaccacagggtgatacacaactgactacggtgcagggcgtcgttaccagcttttgcggggactatggaatgatcgatgaatccatttacttctcttcagacgtggtaacaggcaacgtgccgctaaaggtcggtcagaaagtgaatgttgtggtcgaggaagataagccccactatgggctccgagcgataaaagtggacgtagttcctcgtcatctgtacggagctggcccaagtgatagcggcactagagtgcttatcgggtgtgtcacctccattaacgaggacaatatctatatttctaactcgatctacttttcaatagccatcgtgagcgaagatttcgtgccctataagggagacctgttggaggtcgagtacagtacagaacctggtatttccaatatcaaagcaacctctgttaagccaattaggtgcatccacactgaggaagtgtgtataacaagcgtacatggccggaacggggtgattgattacaccatctttttcacgctcgactccgtcaagctgcccgatggatatgtgcctcaggttgacgacattgtgaatgtcgtgatggtagagtcaatccaattttgcttcatctggcgcgccattagtataactccagttcacaaatctagctccggctttcaggatgacggtgggctgggaagaccgaagagggagcggcgctcacagagcatctga

SEQ ID NO: 2132 - RNA, 2844 nt, synthetic construct
  misc_feature 1..2844: note = CCDS735.1 variant
  source 1..2844: mol_type = other RNA
atgagcctgccctccagacagaccgccatcattgtgaaccctccaccgcccgagtacataaatacaaagaaaaacggcaggctcactaatcaacttcagtatctgcagaaggtcgttttgaaagacttatggaagcactctttctcatggccttttcagcggccagtggatgctgtaaaactgcaactacccgactactatacgatcattaagaaccctatggatctcaataccatcaagaaacgcctggaaaacaagtactatgcaaaagccagtgagtgcattgaagacttcaatacaatgtttagcaactgttacctttataataagccaggggatgacatcgtgctgatggcgcaggctttggagaaactcttcatgcagaagctgtcccagatgccccaagaagaacaggtcgtgggagttaaggagcgaatcaaaaagggtactcagcagaacatagccgtgtcttcggcaaaagaaaagtcaagccctagtgccaccgagaaagtctttaagcaacaggaaattccatccgtgttcccgaaaacatctatcagccccctgaatgtagttcagggcgcttccgtgaactcaagtagccaaaccgcagcccaggtcactaagggggtgaagcgtaaagctgatacaaccacgcctgccacttctgcggtgaaggcatcctcagagtttagcccaaccttcacagagaaaagtgtcgccctcccacctattaaggaaaatatgcccaaaaacgttttacccgactctcagcagcaatacaatgtggtaaagactgtgaaggtcaccgagcagctgagacattgctccgaaatccttaaagagatgttggctaagaaacactttagctacgcctggccgttctataaccctgtggatgttaacgcactgggactacataattactatgacgtggtcaagaaccccatggatctcggcacaataaaagaaaagatggacaatcaggagtacaaggatgcttataaatttgccgcggacgtgaggctgatgttcatgaactgttacaagtataatccacctgaccacgaggtagttaccatggcccggatgcttcaggatgtgtttgaaacgcatttctcgaaaattcccatcgagccagtcgaatctatgcccctgtgctacattaagactgacatcacagagaccactggtcgcgaaaacacaaatgaggcatcctcagaggggaacagtagcgatgactccgaagatgagagagtgaaaaggttggctaagctccaagaacagctgaaggccgtccaccagcagttacaagtgctgtctcaggttcctttccggaaactcaataagaaaaaggagaaaagcaagaaagaaaagaagaaagagaaggtgaacaattcaaacgagaatccacgcaaaatgtgtgaacagatgcgacttaaggagaaaagtaagagaaaccagccgaagaaaaggaagcaacagtttatcggactgaaatccgaagacgaggataatgctaagcccatgaactacgacgagaaacggcagttgagcctaaacattaataagctgcctggcgataagctcggccgtgtagtccacataatccaatctcgcgaaccatcactgagtaacagcaatcccgacgagattgaaatcgatttcgagacccttaaagcctccacgctgagagaattggagaagtatgtgtctgcatgcctcaggaaacggcctctgaagccacccgccaaaaagataatgatgtcgaaggaggaattacatagccagaaaaagcaggagctggaaaaacgactactcgacgttaacaatcagctgaactcccgcaagagacaaaccaaatcagacaagacacagccgagtaaagctgtggagaatgtctctaggcttagcgaatcctcaagcagctccagttcttcttccgagtcagagagtagctcgtccgatttgtctagctcagacagttccgattctgaaagcgagatgtttcctaagttcactgaagtgaagccaaacgactccccctcaaaagagaatgtaaagaaaatgaagaacgaatgtattcctcccgaggggcggaccggagtgacacagatcggttactgcgttcaggatactaccagcgcgaatacaaccctggtccaccaaactacgccaagtcatgtgatgcctcccaaccaccaccagctcgcatttaattatcaggagctggaacatcttcagacagtgaaaaacatctctccactgcaaattttgccgccttccggcgacagcgagcagctctcgaatgggatcaccgtcatgcacccctcaggagattctgacactaccatgctggaaagtgagtgtcaggccccagttcaaaaggatattaagatcaaaaacgctgactcctggaagtctttaggcaaacccgtgaagcctagcggtgtgatgaaaagctccgatgagctgttcaaccagtttcgcaaggccgcaatagaaaaggaggtaaaagccagaacacaggaactaattaggaagcatctcgagcagaataccaaagaactgaaggcttcacaagagaaccagcgtgaccttgggaatggattgactgtcgagagtttcagcaacaaaatccagaataagtgctctggcgaggagcagaaggaacaccaacagtcctcagaggcccaggataaaagtaagctgtggctcctgaaagaccgggacttagcacgacagaaggaacaagagagaaggcgccgggaggcgatggtgggcacaatcgatatgacgctgcagagcgacattatgaccatgtttgaaaacaatttcgattga

SEQ ID NO: 2133 - RNA, 543 nt, synthetic construct
  misc_feature 1..543: note = CCDS35455.1 variant
  source 1..543: mol_type = other RNA
atgcaggccgagggcagagggaccggaggtagcacaggcgacgctgatgggcccggaggccctggtatcccagacgggccgggaggcaacgcaggcgggcccggagaagccggtgcgactggcgggaggggacctcggggcgctggtgccgcacgcgcctccgggccacgaggaggcgctccccgtggccctcacgggggagcagcctctgctcaagatggtagatgcccatgtggcgccaggcggcccgactcacgcctgctcgagcttcatattacgatgcctttcagtagcccaatggaagcggagctggtgagaaggatattgtcccgggatgcagccccgttaccccgccctggggctgtcctgaaggactttaccgtttctggaaatctactcttcatccgactgacagccgcagatcacagacagcttcagctgtcgatttcaagctgcttgcagcaactcagtctgctgatgtggatcactcagtgttttctcccagtgttcttagctcaggccccctccggccagaggcggtga

SEQ ID NO: 2134 - RNA, 633 nt, synthetic construct
  misc_feature 1..633: note = CAA10196 variant
  source 1..633: mol_type = other RNA
atgcaggccgagggccaagggaccggaggtagcacaggcgacgctgatgggcccggaggccctggtatcccagacgggccgggaggcaacgcaggcgggcccggagaagccggtgcgactggcgggagaggacctaggggcgctggtgccgcacgggcctccgggccacgcggaggcgctccccgaggccctcacgggggagcagcctctgctcaggatggtcgttgcccatgtggcgccagaaggcccgactcacggctgctccagcttcatattacgatgcctttcagtagcccaatggaggcggaactggtgcgcagaatattgtccagggatgcagccccgttaccccggcctggggctgtcctgaaggactttaccgtttctggaaatctactcttcatgtcggtgcgcgatcaggaccgagagggcgccggtagaatgagggtagtggggtggggcctgggatcagcaagcccagaaggccaaaaagctcgggatcttcgtacacccaagcacaaagtcagtgagcagcgccctgggactccaggacccccgcctcccgagggtgcccagggcgacgggtgcagaggagtggcgtttaacgttatgttctccgccccacatatctga

SEQ ID NO: 2135 - RNA, 1992 nt, synthetic construct
  misc_feature 1..1992: note = CCDS13459.1 variant
  source 1..1992: mol_type = other RNA
atggccgctaccgagatcagcgtgctgtccgaacagttcacaaagattaaagagctcgaacttatgcccgagaagggcctgaaagaagaggagaaggacggggtctgcagagaaaaagatcacaggtctccttcagagttggaagcagagcggacgagtggagcctttcaagacagcgttttagaggaagaggtggaactggtactagcgccatccgaggaatctgagaagtacatactcactctgcagaccgtgcatttcacatcggaggctgtcgaacttcaggatatgtcactgttgagcatccagcaacaggagggtgtgcaggttgtggtccagcaaccgggccccgggctcctgtggctggaagagggacctcgccagagtctccagcagtgtgtggccatttccatccaacaggaattatattctccacaggagatggaggtactgcaatttcacgcacttgaagagaacgttatggtggccagcgaagactccaagttggctgtctcactggcagagactaccggcctaattaaactcgaagaggagcaggaaaagaatcagctgcttgccgagcgaacaaaagaacagctgttctttgtggagaccatgagtggtgatgagcgtagcgacgaaatcgtgttgactgtctctaactccaatgttgaggaacaagaggatcagcccacagctgggcaggccgacgcggaaaaggcaaaatcaaccaagaaccagagaaagacgaaaggagccaagggcactttccattgcgatgtgtgtatgtttaccagcagtaggatgtcttccttcaatcggcacatgaaaacacatactagcgagaagcctcacctctgccacctgtgtttaaaaacctttcgcacagtaaccctgctcagaaaccatgtgaatacgcacactggcacaaggccatacaagtgcaacgactgtaatatggctttcgtcacctcgggggagcttgtgcggcatcgccgatataaacacactcacgaaaagccctttaagtgctctatgtgtaaatacgcctccgttgaggcatcaaagctgaaaagacatgtgaggagtcacacaggagaacggcctttccaatgctgtcagtgcagctatgcttcccgtgatacctacaagttgaaacgccatatgagaacgcactctggtgagaagccatatgaatgccatatatgtcacaccaggtttacacagagcggcactatgaagatccacattctacagaaacatggggagaacgtcccgaagtaccaatgcccccactgtgccaccatcattgcgcggaaatcagacctgcgagtgcatatgcgcaatctccacgcctacagtgcagctgagctgaagtgcagatattgttccgccgtattccacgaaaggtacgctcttatccagcatcagaaaacacacaagaacgagaagcggttcaaatgcaagcattgtagctatgcctgcaaacaggaacgccacatgactgcacatataagaacccacacaggagagaagccttttacctgtctgtcttgcaataaatgtttcaggcaaaagcagttgctcaacgcccactttcgtaagtaccatgatgctaatttcattccaactgtttataaatgctcaaagtgcggcaaaggttttagtcggtggatcaacctgcaccgacatagcgaaaagtgtgggtccggagaggcgaaatctgcagcctcgggcaagggcagaaggacgcgcaaacggaagcagacaattttaaaggaggctaccaaagggcaaaaggaagccgcaaaaggatggaaggaggccgctaacggtgacgaagccgcagcggaggaggctagcactaccaaaggcgaacagttccccggggagatgtttcctgtggcctgcagagaaacaaccgcaagggtcaaggaggaagtggacgagggagtcacttgtgagatgctgctaaatacaatggataagtga

SEQ ID NO: 2136 - RNA, 2148 nt, synthetic construct
  misc_feature 1..2148: note = CCDS11368.1 variant
  source 1..2148: mol_type = other RNA
atgagccaggtgatgtcctctcccctgctcgccggcgggcacgctgtctcacttgcaccttgcgacgagccaagaaggaccctgcatccggcccccagtcctagcttgccaccccaatgttcctactatacaactgaaggatggggtgcgcaggctttaatggcccctgttccatgcatggggccccctggccggctgcagcaggcaccacaagtggaggccaaggctacgtgtttcctaccgtctcccggagaaaaagcactcggcacccctgaggatctggactcgtacatcgatttttcacttgaaagcctgaaccagatgattttggagctcgacccaacattccagctgctgccccctggtactgggggaagtcaggccgagctcgctcaatccaccatgtctatgcgcaagaaagaagagagcgaagccttagatataaagtatatcgaggtaacatccgcgcgatcacgttgccacgacggcccacagcattgtagtagcccctctgtgaccccgccttttggctccctgagatcagggggacttttgctgagcagggatgtcccccgggagactcgcagttcttccgaaagcctaattttctcgggtaatcagggcagagggcaccagaggccactccctccctctgagggactgtccccacggccccctaactcaccaagtatcagcattccgtgcatgggctccaaagcatctagcccccatggtcttgggtcacctctggtggccagtccacgcttggaaaagcgactcggaggcctggctccccaaagaggctccaggatcagcgttttatctgcctcacctgtgagtgacgtcagctacatgtttgggtcctctcagtcgctgctccacagctccaattcaagtcaccagtctagctcccggtcacttgagagcccagcaaactcttccagtagcctgcattctttgggatccgtgtcactatgtacacgtcccagtgatttccaagctccgcgcaatcctaccctgacgatgggtcagccaagaactccccacagccctcccctcgccaaggaacatgcgtcgtcctgcccaccttctataaccaacagcatggtagacatccccattgttctgatcaatggctgtccagagccggggtcaagtcctccccagaggacaccaggacaccagaactccgtgcaacccggcgccgcatctcctagcaatccatgccccgctactcggtccaactcacagacccttagcgatgccccttttacaacctgtccggagggtccagctcgagacatgcagcccacgatgaaattcgtcatggatacaagtaagtattggtttaaacctaatattactcgcgaacaggccatcgagctgttgagaaaggaagaaccaggggcattcgtgataagggactcttccagctaccggggctcgtttggactcgccctgaaagtgcaagaagtccccgcttcagcgcagtctcgccctggcgaggacagtaacgatttaattagacacttcctgatcgagtccagcgcaaagggggttcatctaaagggagccgacgaggagccgtattttggttctctcagcgctttcgtgtgccagcactccattatggccctggcacttccctgcaaattgaccatcccacagagggaactgggcggggccgatggagcttcagacagtactgatagccctgcctcttgtcaaaagaaatccgcaggctgccatacactctacctgtcaagtgtaagcgtggagacccttacgggtgcgctggctgtccagaaggccatctccaccacattcgaacgtgacattttgcccactccaaccgtggttcactttaaagtgacagagcaggggataactctcaccgatgtccagcggaaggtgttctttcgaagacattaccctctgacaaccttaaggttctgtggcatggaccccgagcaacgcaaatggcagaagtattgcaagccatcttggatctttggattcgtagcaaaatcgcagactgaaccgcaagagaatgtttgtcacctgtttgccgaatacgatatggtgcagcctgctagccaggtcattggcctagtgacggccctcctgcaggacgcagagcggatgtga

SEQ ID NO: 2137 - RNA, 1302 nt, synthetic construct
  misc_feature 1..1302: note = AAH06510 variant
  source 1..1302: mol_type = other RNA
atggccctgagagtgaccaggaacagcaagatcaatgctgagaacaaagcaaagattaatatggccggcgcgaaacgggtccccacagctcctgccgcaacttccaagccagggctccgcccgcgaacggcccttggagacataggtaacaaagtttctgaacagctgcaagctaagatgcccatgaagaaagaggcaaagccttcagccaccggcaaagtgatcgataagaaattgccaaagcccttagaaaaggtacctatgctggtgccagtccccgtgagtgagcctgttccagaaccggagcccgagcctgaaccagagcccgtgaaagaagagaagctaagccctgagccaattctcgtcgacacagcttccccctctccgatggaaacttcggggtgcgcccctgcggaggaagatctgtgtcaggcattctcagacgtgatccttgccgtaaatgatgttgacgctgaggatggagccgaccccaacctgtgcagcgaatacgtgaaagatatttatgcatacttgcgtcagctcgaggaggaacaggctgtcagaccaaagtatctgctgggcagggaggtgaccggtaatatgcgggccatcctcatagactggttagtgcaagtccagatgaaatttcgcctgcttcaggaaacaatgtacatgaccgttagtatcattgatagattcatgcagaacaattgtgtgcctaagaaaatgttgcaactggtaggggtgactgcgatgtttatcgcctccaagtatgaggaaatgtatcccccagagattggagacttcgcatttgtcacagataacacctacacgaagcaccagatcaggcagatggagatgaaaatactacgggctctcaatttcggcctgggccgcccccttcctctgcactttttgagacgagcctctaagattggggaagtggacgttgagcagcatactctcgctaaatacctgatggaattaaccatgctggactacgatatggtgcatttcccaccgagccaaatcgccgcaggagccttttgcctcgctcttaagattctggacaacggtgagtggacacccactttgcagcactatctatcctacaccgaagagtcactgctccctgtcatgcagcatctggcgaaaaatgtggtaatggttaaccaaggccttacaaagcacatgaccgtgaagaataaatatgcaacgagtaagcacgccaaaatcagcactctgccacagttgaactctgctctcgtccaggatctggccaaggcagtggccaaagtctga

SEQ ID NO: 2138 - RNA, 888 nt, synthetic construct
  misc_feature 1..888: note = AAA58392 variant
  source 1..888: mol_type = other RNA
atggagcaccagctgctctgctgtgaagtggagaccatcagaagggcctaccccgacgctaaccttctgaatgatcgggtcttgcgcgcaatgttaaaggccgaagagacatgcgcgcctagcgtttcctatttcaaatgtgtgcaaaaggaagtactgccatctatgcgaaaaattgtggctacttggatgctagaggtctgcgaggaacagaagtgtgaggaagaggtgtttccgctcgccatgaactacctggaccgtttcctttcactggagcccgttaaaaagagtagattgcagctcctgggcgcaacgtgcatgtttgtggccagcaagatgaaagaaaccatacctctgacagctgagaagctctgtatctatactgataattccattaggccagaagagttactgcagatggaacttttgctggtcaacaaactaaagtggaatctcgcagccatgacaccccatgacttcatcgagcactttctgtctaaaatgcctgaggctgaagagaacaagcaaattatccggaagcatgcccagaccttcgtggcgctttgcgcaaccgatgtaaaatttatatcgaatccaccctcaatggttgccgctgggagcgtggtcgccgcagtgcagggactgaacttgcgcagtcctaataacttcctctcctactatagactgactaggtttttatctcgggtgatcaagtgtgacccagattgcctgcgcgcttgtcaggaacaaattgaggccctccttgaaagctccctgcgacaggcgcagcagaatatggacccgaaagccgcagaggaggaagaggaagaggaagaggaggtcgatttggcttgcacacccaccgacgttagagatgtggacatctga

SEQ ID NO: 2139 - RNA, 651 nt, synthetic construct
  misc_feature 1..651: note = AAA36601 variant
  source 1..651: mol_type = other RNA
atgctgagactcagcgagaggaacatgaaggtgcttctggccgctgcattgatcgccggctccgtcttctttttactgctacccgggccttctgcggctgacgagaaaaagaaaggaccaaaggttaccgtgaaagtatacttcgatctccggattggtgacgaagatgtgggccgcgtcatatttgggctgttcggaaagacagtgccgaagactgttgacaattttgtggcccttgcaacgggcgaaaaaggtttcgggtataagaactcaaaatttcaccgagtcatcaaggatttcatgattcagggaggcgactttacccgtggcgatgggacaggaggtaaaagtatctacggcgagagattccccgacgaaaattttaagctgaagcattatgggcctggatgggtgagcatggccaacgctggcaaagatactaatggttcccaattctttattaccacagtaaagaccgcatggttggacgggaaacacgttgtgttcggaaaggtcctcgagggcatggaggtggtgaggaaagtcgaatctactaagacagattcgcgggacaaaccactgaaggatgttatcatagccgactgcggcaagatcgaggtggaaaaacccttcgctattgccaaggagtga

SEQ ID NO: 2140 - RNA, 1044 nt, synthetic construct
  misc_feature 1..1044: note = AAD10634 variant
  source 1..1044: mol_type = other RNA
atgcccagaggccaaaagagcaaactgagggcccgggagaagcgccgaaaagctcgtgaagagacccaggggctcaaggtggcacacgccacagcggctgaaaaagaggaatgcccttcctcttcaccagtccttggagacactccgacgagtagccccgccgcaggtatccctcagaagccacagggcgctccccctaccacaactgccgcagccgctgtttcctgtaccgagtctgatgagggggccaagtgccagggagaagagaacgcgtcgttctcacaagcaacaaccagcactgaaagttccgtgaaagacccagtagcctgggaggctggcatgctgatgcattttattttgagaaagtacaaaatgagggagcccataatgaaggccgatatgttaaaagtggtcgacgaaaagtataaggatcacttcacagagatcctgaatggtgcatctcggcgcctagaactcgtgtttgggctggaccttaaagaggataaccctagcggacatacctacacgctggtttccaagttgaatctcactaacgacggcaatctgtcaaacgattgggacttcccaagaaatggcctgctcatgccgttactgggggtgatttttcttaaaggaaacagtgctaccgaagaggagatctggaagttcatgaatgtcttgggtgcctatgatggcgaggaacacctgatttacggggaacccaggaaatttatcacacaggacctagtgcaggagaagtatctcaaatacgaacaggtacctaacagcgatccaccccggtatcaattcctgtggggacctcgcgcgtacgccgagactaccaagatgaaggttcttgagtttctggcaaaaatgaatggcgctacaccacgagacttcccctctcattacgaagaggccttgagagacgaagaggaaagggctcaggtgcggtcctcagtccgtgcccgcagaaggaccacggcaactacatttcgggcccgaagccgcgctccgttcagtagatcttcccaccctatgtga

SEQ ID NO: 2141 - RNA, 2436 nt, synthetic construct
  misc_feature 1..2436: note = BAF91373 variant
  source 1..2436: mol_type = other RNA
atggagagccagggcgtgccccctgggccatacagagccaccaagctgtggaacgaagtcacaacttccttcagggctggaatgccgctccggaaacaccgccaacattttaagaaatatggtaattgcttcacggcaggcgaggccgttgactggctttacgatctgttgcgaaacaattctaactttgggcccgaagtgacccgtcagcagacaatccagttactgagaaagttcctgaaaaatcacgtaattgaggacataaagggaaggtggggctcagaaaacgtggatgacaataaccaactctttcggttccctgcgaccagtccactgaagactcttccccgcagatatcctgagctgaggaaaaataacatcgagaattttagcaaggataaagactccattttcaagttgcggaacctctctcgccgaacaccaaaaagacatggtctgcacctgtcgcaggaaaatggggagaagatcaagcatgaaattatcaacgaggatcaggagaatgctatagacaacagggaactctcacaggaggatgtcgaagaggtgtggcggtacgttatcttaatttatctgcaaaccatccttggagtgcccagcttggaagaggtcattaaccctaaacaggtgatcccacagtacataatgtataatatggccaacacaagtaagcgtggcgtagttattctgcagaataaatccgacgatctaccgcactgggtgctctctgcaatgaagtgtctggccaactggccccgcagcaatgacatgaacaatcctacttacgtcggctttgagagagatgtgttcaggaccatcgctgactactttcttgacctgccagaacccttgctcacgttcgagtattacgaactgtttgtgaacattttagtcgtttgcgggtatatcactgtgtccgatcggtcaagtggaatccacaaaattcaagacgatcctcagagctctaagttcctgcatctcaataaccttaattccttcaaatcaaccgagtgtctgttgctaagcctgctccaccgagaaaagaacaaggaggagagtgactctacagaacgcctgcagatatccaatccaggttttcaagagagatgcgccaaaaagatgcagcttgtaaacctgaggaatcggcgcgtgagcgcaaacgatatcatgggcgggtcgtgtcataacttgattggactctctaatatgcacgacctgtcctcaaacagtaaacccagatgctgtagcttagaaggcatcgtcgatgtgccgggtaattcctctaaggaggctagctcagttttccaccagagttttcctaacatagaagggcagaataacaaactgttcctagagtccaagcccaagcaagagtttctcctgaatcttcatagcgaagagaacattcagaaaccattctctgccggatttaagaggacttcaaccttgacagtgcaggaccaggaggaactgtgcaatggcaaatgtaagagtaaacaactctgccgtagccagtccctgcttctgcggtcttcgacccgaagaaacagctacatcaatacgcctgtcgcggagatcattatgaagcccaacgtgggccaggggtccacttcagtacagacagcaatggaaagtgagttgggagaatctagcgccaccatcaataagaggctctgtaaatccactattgagctgtcagaaaacagcttactgccagcttcttccatgctaacaggtacccaaagtctcctgcagccccaccttgagcgcgttgccatagatgcattgcagctgtgctgcctcctgttacctccaccgaatcggagaaagctgcagcttttgatgaggatgatcagccgcatgtctcaaaacgtggacatgcccaaactccatgatgctatgggcacgcgatccctgatgattcacaccttctcacggtgtgtcctatgctgtgccgaggaagtggacctggacgagctcctggcggggcgtcttgtcagctttttgatggatcatcaccaggaaatcctacaggtgcctagttatttacaaacagccgttgagaagcacctcgactacctgaaaaagggacatatcgaaaacccaggcgatggtcttttcgcacccctgcctacttattcgtactgcaagcagatttccgctcaggagtttgacgagcagaaagtgtctaccagccaagccgctatagccgaattgctcgagaatatcattaagaacagatcactgccactaaaagaaaagaggaaaaagctgaaacagttccagaaggagtaccccctcatctatcagaagcgctttccgacaactgaaagtgaggcagccctgttcggggataaacctaccattaagcaaccaatgcttatcttgcggaaacccaagttcagatccctgaggtga

SEQ ID NO: 2142 - RNA, 297 nt, synthetic construct
  misc_feature 1..297: note = AAA46940 variant
  source 1..297: mol_type = other RNA
atgcacggcgacacccccacactgcatgagtacatgctcgatcttcagcctgaaactacggacctgtattgctacgagcaattgaacgatagctccgaagaggaagacgagatcgatgggccagccggacaggctgagccggacagagcacactataatattgtgaccttctgttgcaagtgtgattctacattaaggctgtgcgtccagtcaactcatgttgacatacggaccctagaagatctcctgatgggtacacttggcatcgtgtgtcccatttgcagtcagaaaccttga

SEQ ID NO: 2143 - RNA, 318 nt, synthetic construct
  misc_feature 1..318: note = AAA46947 variant
  source 1..318: mol_type = other RNA
atgcacggccccaaggccaccctgcaggacatcgtgctccatcttgagcctcaaaacgaaattccagtcgatctgttgtgccacgagcagttaagcgactccgaagaggaaaatgatgagatagacggggttaaccatcagcatctgccggctagaagggcagagccccagcggcacacaatgctatgtatgtgctgtaaatgcgaagcccgcatcaagctcgtggtagagtcttcagcggatgacctgcgagctttccaacagctttttctgaatactttgagtttcgtgtgtccttggtgcgccagccagcagtga

SEQ ID NO: 2144 - RNA, 297 nt, synthetic construct
  misc_feature 1..297: note = AAA46951 variant
  source 1..297: mol_type = other RNA
atgagaggcgagacccccacactgcaggactacgtgctcgatcttcaacctgaagccactgacctgcactgctatgagcagttgccagatagctccgacgaagaggatgtcatcgactctccggctgggcaggcagaacccgatacgtcaaactacaatattgttaccttctgttgccagtgtaagagtacattaaggctgtgcgtgcaaagcactcaggtagacatacggatcctacaggagctcctgatgggatcctttggtattgtgtgtcctaactgctctacccgcctttga

SEQ ID NO: 2145 - RNA, 294 nt, synthetic construct
  misc_feature 1..294: note = AAA46959 variant
  source 1..294: mol_type = other RNA
atgagaggccacaagcccaccctgaaagagtacgtgctcgacctttatcctgaaccaacagatctgtactgctatgagcagttgagcgactcctctgatgaagacgaggggttagataggccggacggacaagcccagcccgctactgcagattactatatcgtcacgtgttgccatacctgtaacacaactgttcggctgtgcgtaaattcaaccgccagtgacctacgcacaattcagcagctcctgatgggtaccgtgaacatagtgtgtcctacttgcgcgcaacagtga

SEQ ID NO: 2146 - RNA, 300 nt, synthetic construct
  misc_feature 1..300: note = AAA46967 variant
  source 1..300: mol_type = other RNA
atgcacggcgagatcaccacactgcaggactacgtgctcgatcttgaacccgaggccactgacctgtattgctacgaacaattgtgtgatagctccgaggaagaggaggacacgattgatgggcctgctggacaggcaaagccagacacctctaactataatatagtcacatcatgctgtaaatgcgaagccactttaagactgtgtgttcagagtacccatatcgatattaggaagctagaggacctcctgatgggtacattcggcatcgtgtgcccggggtgtagccagcgggcgtga

SEQ ID NO: 2147 - RNA, 330 nt, synthetic construct
  misc_feature 1..330: note = AAA47051 variant
  source 1..330: mol_type = other RNA
atgagaggccccaagcctaccctgcaggagatcgtgctcgacctttgcccatacaacgaaattcaaccggtcgatctggtttgtcacgagcagttgggggaaagcgaggacgaaatagatgagcccgaccatgccgtgaatcaccagcatcagttactggctaggcgggatgagcctcaacgccacacaatccagtgctcctgttgcaaatgtaacaatactctacagctcgtagtggaagcatctcgagacacgctgcgtcagcttcaacagctgttcatggattcattgggatttgtctgcccatggtgtgccaccgcgaaccagtga

SEQ ID NO: 2148 - RNA, 321 nt, synthetic construct
  misc_feature 1..321: note = CAA52574 variant
  source 1..321: mol_type = other RNA
atgcacggccccagagagaccctgcaggaaatcgtgctccatcttgagcctcaaaacgaactggacccagtcgatttgttatgctacgagcagctgagcgaatccgaggaggaaaatgacgaggccgatggggtttctcacgctcagctaccggcaaggcgggccgaaccccagcgccataagattctctgtgtgtgctgtaaatgcgacggacgaatagagctgacagtagagtcaagtgcggaagatcttcgtactctgcaacagttgttcctcagcacgctgtcctttgtgtgtccttggtgcgctaccaaccagtga

SEQ ID NO: 2149 - RNA, 306 nt, synthetic construct
  misc_feature 1..306: note = M62877.1 variant
  source 1..306: mol_type = other RNA
atgagaggcaacgtgccccagctgaaggacgtcgttctccaccttacccctcaaacagagatcgatctgcagtgctacgaacagttcgacagctccgaggaagaggatgaagtggacaatatgagggatcagttgccagagcggcgcgccgggcaagctacttgttatcgaattgaggcaccgtgctgtcgttgttcttcagtagtgcagttagccgtcgaaagtagcggagacacgctgagagtggttcagcagatgctaatgggtgagctctccctggtgtgcccctgctgtgcgaacaattga

SEQ ID NO: 2150 - RNA, 300 nt, synthetic construct
  misc_feature 1..300: note = CAA52586 variant
  source 1..300: mol_type = other RNA
atgagaggcgacaaggccaccatcaaagattacattctggacctccagcccgagacaactgatcttcactgctatgaacaactgggggacagctccgatgaggaagacacggatggagtggacaggcctgatggtcaggctgagcaggcaacctctaactactatatagtcacatactgtcattcatgcgacagtactttgcggttatgtatccacagcaccgccacagatctgcgcaccctacagcaaatgctcctgggcactcttcaggttgtgtgcccagggtgtgcgcgactgtga

SEQ ID NO: 2151 - RNA, 318 nt, synthetic construct
  misc_feature 1..318: note = CAA52597 variant
  source 1..318: mol_type = other RNA
atgcacggcaaggtgcccaccctgcaggacgtcgttctcgagcttacacctcaaactgaaatcgatctgcagtgcaacgagcagttggacagctccgaagatgaggacgaagatgaggtggaccatttacaggagagaccacaacaggccaggcaggctaaacagcacacgtgttacctgattcatgtaccgtgctgtgaatgcaagttcgtggtccaactagatatacagtctaccaaagaggacctccgggtggttcagcagctgcttatgggggcactgacagtgacttgtcccttgtgcgcctcaagtaattga

SEQ ID NO: 2152 - RNA, 297 nt, synthetic construct
  misc_feature 1..297: note = AAF13691 variant
  source 1..297: mol_type = other RNA
atgagaggcaacaatcccaccctgagggagtacatcctcgaccttcaccctgaaccaacagatctgttctgctacgagcagttgtgtgacagctccgatgaagacgagattgggttagatcggccggacggacaagcccagcccgctactgcaaactactatatagtgacgtgctgttatacctgcgatacaactgtccgcctgtgtatcaattctaccacaaccgacgttcgaactctacagcagctcctgatgggtacatgcaccattgtgtgtccttcatgcgcccaacagtga

SEQ ID NO: 2153 - RNA, 324 nt, synthetic construct
  misc_feature 1..324: note = ACL12335 variant
  source 1..324: mol_type = other RNA
atgcacggccccaaggccaccctgtgcgacatcgtgctcgatcttgagcctcagaactacgaagaggtcgacctggtttgttatgaacaattgccagatagcgactccgagaatgaaaaagatgagccggacggggtgaaccatcccttactgctagctagaagggcagagcctcagcggcacaatattgtatgcgtgtgttgcaagtgtaacaatcagctccagctggtcgtggaaacatctcaagatggacttcgcgccctgcagcagttgttcatggacactctctcatttgtttgcccactgtgtgcggctaaccagtga

SEQ ID NO: 2154 - RNA, 318 nt, synthetic construct
  misc_feature 1..318: note = AAA79500 variant
  source 1..318: mol_type = other RNA
atgcacggcaaggtgcccaccctgcaggaggtcatcctcgaacttgcccctcaaacagagattgacctgcagtgcaacgaacagttggatagctccgaggacgaagatgaggacgagatagatcatttactggaaagaccacagcaagctaggcaggcagagcagcacaaatgttacctaatccatgttccgtgctgtaagtgcgaactcgtggtacagctggacattcaatctactaaagaggagcttcgggtggtccagcagctgttgatgggggccctcacggtgacctgtcccctgtgcgcgtcaagtaagtga

SEQ ID NO: 2155 - RNA, 1392 nt, synthetic construct
  misc_feature 1..1392: note = AAF80488 variant
  source 1..1392: mol_type = other RNA
atgggcaaggagaaaacccacatcaacattgtggtcatagggcatgttgacagcggaaagtccacaactacgggtcacctgatctacaaatgcggcgggattgataagagaaccatcgaaaaattcgagaaggaagccgctgagatgggaaagggctcttttaaatatgcatgggtgctcgacaaacttaaagccgaaagggagcggggtattacaatcgatatatcactgtggaagttcgagactaccaaatactatatcacaattatcgacgcgcccgggcatcgcgattttattaagaatatgatcaccggaacaagtcaggctgactgtgccgtattgatagtggcagccggcgtcggcgagttcgaagctgggattagcaagaacggacaaactcgagaacacgcattactggcctacaccctaggtgtgaaacagctcatcgttggcgtgaataagatggattccacggagcctgcttattctgagaaacgttacgacgaaattgtcaaggaggtgtcggcctatatcaaaaagatcgggtacaacccagcgactgtaccgtttgttcccatttcaggatggcatggcgataatatgctggaacctagcccaaacatgccctggttcaaaggttggaaggtggagagaaaggaagggaatgcaagtggagtctcccttctggaggccttggacaccatactccctccaacaaggcccactgataaacctctgcggctgccactccaggacgtgtacaagatcggcggcattgggaccgtgccggtcggacgcgttgagacaggtatcttaagacccggcatggtggtaacctttgctcctgtgaacataacgactgaagtcaaatctgtggagatgcaccacgaagccctgagcgaggcacttccaggggataatgttggattcaacgtgaagaatgtctccgtgaaagacattaggcggggcaacgtatgcggtgactcaaagagtgatccccctcaggaagctgcccaatttacaagccaggttatcatcttgaatcatccagggcagatttctgcgggctattcccccgtgatcgactgtcacaccgcccatattgcatgcaagttcgctgagctgaaagagaagatagatcgccgatcaggaaagaagctagaagacaacccgaaaagcctcaagagtggcgatgccgctatcgtcgagatggtgcctgggaagcccatgtgtgtcgaatctttttcccagtacccacctctgggaagattcgccgtgagggacatgcggcaaactgttgcagtgggtgtaattaaaaatgtcgagaagaaaagcggcggggccggaaaggtgacaaaatcggctcagaaggcgcagaaggcaggcaaatga

SEQ ID NO: 2156 - RNA, 2919 nt, synthetic construct
  misc_feature 1..2919: note = EAW51573 variant
  source 1..2919: mol_type = other RNA
atggacaccgatctgtacgacgagttcggcaactatatcgggcccgaactcgatagcgacgaggatgacgatgaacttggaagagagacaaaggacctggatgaaatggacgatgacgatgacgacgatgacgtgggtgatcacgacgatgaccatcctggcatggaggtcgttttgcacgaggataaaaagtactatccaactgccgaagaggtgtacgggccggaagtagagacgattgtgcaggaggaagacacccaacccttaacagagcctataatcaaaccagtcaagactaaaaagtttaccctgatggaacagacactacccgtgaccgtttatgagatggatttcctcgctgacctgatggataattccgaacttattaggaacgtgactctgtgcggacatttgcaccatggcaagacatgttttgtcgactgcctcatcgagcagacccaccctgagattcggaaacgctacgaccaggatctgtgttatacggacatcctgttcactgaacaagagcgaggtgtggggataaagtctaccccagtaacagttgtgctccccgatactaaaggaaagtcatacttatttaatatcatggacacccctggccacgtcaacttcagtgatgaagtgacagcaggcctgcgtattagcgacggggtggtcctttttatcgatgccgcggagggagttatgttgaataccgaaagactgattaaacatgctgtgcaggagaggctagccgtaacggtgtgcatcaacaagatagaccggctcattctggagcttaagctgccaccgactgatgcatactataaattgcgccacatcgtcgacgaagtgaatggtctcatttccatgtactctacagatgagaacctgatcttatcgcccctgctcggcaatgtttgtttctcaagcagtcagtattccatctgctttacccttgggtctttcgccaagatttacgctgacacttttggagatataaactatcaggagttcgcaaaaagactgtggggcgacatctactttaatcctaagacaaggaaattcaccaagaaagccccaacgagctcctcacaacggagtttcgtggaatttattttggaacccctatataagatcctggctcaggtcgtgggtgacgtagataccagcctccctcgcacactggacgagcttgggatacatctgactaaggaggaattgaaactcaacattcgaccactgttaagactggtttgtaagaaattctttggagagttcaccggctttgtggatatgtgcgtccagcacatcccctctccgaaggtgggcgccaaacctaagatcgaacacacatacactgggggagtcgactccgatctaggtgaggcgatgtcagactgtgatcccgacggcccactcatgtgccataccacaaagatgtacagcaccgatgacggggtgcagttccacgcatttggaagggttctgagtggcactattcatgccggtcaacctgtgaaagtacttggggagaattatacgttggaagatgaggaagactctcagatctgtacagtcggccggctgtggatttccgtggctcgttaccacatagaggttaaccgcgtgcccgccggaaattgggtcctcatcgaaggcgtggatcagccaattgtaaagaccgcaactatcaccgagcccagagggaacgaggaagctcaaatcttcaggcctctgaaatttaacacaaccagcgtgattaagatagccgttgagccagtcaatccgtcggaacttcccaaaatgctggacggattgcggaaggtgaacaagtcttatccttccctcactacaaaagtggaggaatcaggtgagcatgtcatcctgggcacgggggagttatacctggactgcgttatgcacgatctacgaaagatgtatagtgaaattgacatcaaagtggcggatccagtggtaaccttctgcgagactgtcgtggaaacaagctccctcaagtgttttgccgagacccccaataaaaagaacaagattacaatgatcgcagaacctctggagaaaggacttgctgaggacatagaaaatgaggttgtgcagatcacttggaaccgcaagaaattgggcgagttctttcagaccaagtacgattgggacctgctcgccgctagatctatttgggccttcggtccagatgcaacggggcccaatatcctggtcgacgataccttaccgagcgaagtggacaaagccctgcttggctcagttaaggatagtattgtgcagggattccaatggggcacaagggaggggcctttgtgcgacgaactcatccggaacgtaaaatttaagatactggacgctgtcgtggcgcaggagccactacaccgcggaggtggccagattatccccactgcaagaagggtggtctattccgccttcctgatggctacccctcgtctcatggaaccctactactttgttgaggtgcaggccccagcagattgtgtaagcgccgtgtatacagtcctggctcggcgaagagggcatgtgactcaagacgcccctattcccggatctccactttacaccatcaaggcattcataccggcgatcgattcatttggcttcgaaacggacttgaggacacacacccagggtcaggcttttagtctgagcgttttccatcactggcagattgtgcctggggatcccttagacaaatccatcgtcattcgcccactcgagccccaacctgccccacacctggcacgggagtttatgatcaagactagaaggcgcaaaggcctttctgaagatgtgtcgataagcaagttctttgacgatcccatgctgttggagctcgccaaacaggacgttgtgctgaattatcctatgtga

SEQ ID NO: 2157 - RNA, 1971 nt, synthetic construct
  misc_feature 1..1971: note = EAW50963 variant
  source 1..1971: mol_type = other RNA
atgagacccagcggcaccgccggggctgcactgctcgcccttctggcggctttgtgccctgcctccagggcattagaggaaaagaaagtgtgtcagggaacatctaacaagctgactcaactaggtacgttcgaggaccactttctctcactgcagcggatgttcaataactgcgaagtcgttcttggcaatctggagatcacctacgtgcagcgcaactatgatttgagttttctcaaaacaattcaggaagtagccgggtacgtgctgatagctctgaatactgtcgagcgaatcccactcgagaacttacaaattatccgtggaaatatgtattacgaaaacagctatgcactggccgtgctttccaattacgacgctaacaagaccggcttgaaagagctgccgatgagaaatctacaggaaattctccatggtgccgttaggttctctaacaatcccgcgctgtgtaacgtggagtcgatccagtggcgggatatagtctcaagcgactttcttagtaatatgtccatggatttccagaaccacctggggtcttgccaaaagtgtgaccctagctgcccaaacggatcctgttggggcgcaggcgaggaaaattgccagaagttgacaaaaatcatttgtgcccagcagtgctcagggcgctgtagaggaaagagtcccagcgattgctgccataaccaatgtgctgccggttgcaccggccctagggagtctgactgtctcgtgtgccggaaatttcgcgatgaagcaacttgtaaggacacatgcccacccctgatgttatataatcctaccacgtaccagatggatgtaaacccagaggggaaatactccttcggagctacttgtgttaagaagtgcccgcgaaattatgtggtcaccgaccacggctcatgtgtgagagcctgcggtgcggatagctacgaaatggaggaggacggggtgaggaaatgtaagaaatgcgaaggaccctgccggaaggtctgtaacggcatcggcattggggagtttaaagacagtctgtctatcaatgccacaaacataaagcatttcaaaaattgcacttccattagcggagatctccacatccttcctgttgcatttcgtggtgactcgttcacccacacaccacccctggatcctcaggaattggacattctaaagaccgtgaaggagatcacgggctttctgctcatccaggcttggccagaaaaccgcactgatctgcatgccttcgagaatcttgagattataagagggaggacaaaacaacacggacagttctctctggctgtagtgtccttgaacatcacctcactcggcctgcggagtttaaaggaaattagcgacggtgatgtcatcatatccgggaataaaaacctgtgttatgccaatactattaactggaagaaactatttggcacatctggacagaagaccaagatcatcagcaaccgaggcgaaaattcatgcaaagcaacggggcaagtgtgtcatgccctctgcagtcccgaaggatgttggggtccggagcctcgcgactgcgtttcctgtagaaacgtgagcaggggccgggaatgcgtcgataagtgtaatctgcttgagggggagccccgcgagttcgtggagaactctgaatgcattcagtgccacccagagtgtttgcctcaggctatgaatattacctgcacaggaagaggccccgacaactgtatccagtgcgcgcactacatagatggtccacattgtgtaaaaacttgccccgcaggggttatgggcgagaataacaccctggtgtggaagtatgccgacgctggacacgtctgtcatctctgccaccctaattgtacatacggctgcactgggccaggactggaaggttgtccgaccaacggctcatatatcgtgagtcattttcccaggagcttctacaaaatgtccgtccac

SEQ ID NO: 2158 - RNA, 3411 nt, synthetic construct
  misc_feature 1..3411: note = ADL28125 variant
  source 1..3411: mol_type = other RNA
atgagacccagcggcaccgccggggctgcactgctcgcccttctggcggctttgtgccctgcctccagggcattagaggaaaagaaagtgtgtcagggaacatctaacaagctgactcaactaggtacgttcgaggaccactttctctcactgcagcggatgttcaataactgcgaagtcgttcttggcaatctggagatcacctacgtgcagcgcaactatgatttgagttttctcaaaacaattcaggaagtagccgggtacgtgctgatagctctgaatactgtcgagcgaatcccactcgagaacttacaaattatccgtggaaatatgtattacgaaaacagctatgcactggccgtgctttccaattacgacgctaacaagaccggcttgaaagagctgccgatgagaaatctacaggaaattctccatggtgccgttaggttctctaacaatcccgcgctgtgtaacgtggagtcgatccagtggcgggatatagtctcaagcgactttcttagtaatatgtccatggatttccagaaccacctggggtcttgccaaaagtgtgaccctagctgcccaaacggatcctgttggggcgcaggcgaggaaaattgccagaagttgacaaaaatcatttgtgcccagcagtgctcagggcgctgtagaggaaagagtcccagcgattgctgccataaccaatgtgctgccggttgcaccggccctagggagtctgactgtctcgtgtgccggaaatttcgcgatgaagcaacttgtaaggacacatgcccacccctgatgttatataatcctaccacgtaccagatggatgtaaacccagaggggaaatactccttcggagctacttgtgttaagaagtgcccgcgaaattatgtggtcaccgaccacggctcatgtgtgagagcctgcggtgcggatagctacgaaatggaggaggacggggtgaggaaatgtaagaaatgcgaaggaccctgccggaaggtctgtaacggcatcggcattggggagtttaaagacagtctgtctatcaatgccacaaacataaagcatttcaaaaattgcacttccattagcggagatctccacatccttcctgttgcatttcgtggtgactcgttcacccacacaccacccctggatcctcaggaattggacattctaaagaccgtgaaggagatcacgggctttctgctcatccaggcttggccagaaaaccgcactgatctgcatgccttcgagaatcttgagattataagagggaggacaaaacaacacggacagttctctctggctgtagtgtccttgaacatcacctcactcggcctgcggagtttaaaggaaattagcgacggtgatgtcatcatatccgggaataaaaacctgtgttatgccaatactattaactggaagaaactatttggcacatctggacagaagaccaagatcatcagcaaccgaggcgaaaattcatgcaaagcaacggggcaagtgtgtcatgccctctgcagtcccgaaggatgttggggtccggagcctcgcgactgcgtttcctgtagaaacgtgagcaggggccgggaatgcgtcgataagtgtaatctgcttgagggggagccccgcgagttcgtggagaactctgaatgcattcagtgccacccagagtgtttgcctcaggctatgaatattacctgcacaggaagaggccccgacaactgtattcagtgcgcgcactacatagatggtccacattgtgtaaaaacttgccccgcaggggttatgggcgagaataacaccctggtgtggaagtatgccgacgctggacacgtctgtcatctctgccaccctaattgtacatacggctgcactgggccaggactggaaggttgtccgaccaacggccccaaaatcccttcaattgccacagggatggtgggagcacttctgttgctcctggtcgtggccttaggcatcggtctgtttatgaggcgtcggcatatcgttcgaaagagaaccctaaggcgcctcctgcaagagcgggaacttgtggagccattgactcccagtggggaagctcctaatcaggccctgctcagaatcctgaaggagacggagttcaaaaagataaaagtattaggcagcggagcatttggcacagtctataaggggctgtggatcccagaaggagagaaagtgaagattcccgttgcgatcaaggaacttagggaggctacctccccgaaagccaacaaggaaattttggacgaggcatacgtgatggcctctgtcgataatcctcacgtgtgccgcctcctgggcatctgcctaacttcgaccgtacagctgataacacagctcatgccattcggttgtctgcttgactacgtgcgagagcacaaagataacatcgggagccaatatttgctgaattggtgcgttcagattgctaagggaatgaactacttagaagaccggcgtctcgtccatagagatctggccgcaaggaacgtgcttgtgaaaactccccagcacgtcaagatcaccgactttggcctggctaaattgctcggtgccgaggaaaaggagtatcatgcggaaggcgggaaggttcctattaaatggatggccctggagtccatcctacaccgcatatacacacaccagtcagatgtgtggagttatggagtgacggtatgggagctgatgaccttcggctctaagccctacgacgggattccagctagcgaaatctcctcaattctcgagaaaggagaacggctgcctcaacccccaatctgtactatagatgtctatatgatcatggtgaagtgctggatgattgacgcagatagcagaccgaaatttagggagcttatcattgagttctctaagatggcccgagaccctcagcgctacttggttatccagggcgatgaacggatgcatctgccctccccaacagacagtaatttttacagagctttaatggacgaggaagatatggacgatgtggtcgacgccgatgagtatctcataccccaacagggtttctttagctctccttccacctcaaggacaccactgcttagtagcctgtcggcaacttccaacaattctaccgtggcgtgtattgaccgtaacgggctacagagctgccccatcaaggaagattcattcctccagcgctacagttccgaccctacgggagccctgaccgaggattctatcgacgatacattcttgccggttccaggcgagtggctggtgtggaaacaaagctgttcctcaactagcagtacccactctgctgccgcatccttacagtgccccagccaggtactccctccagcttcgcccgaaggtgagacagtcgccgacctgcagactcaatga

SEQ ID NO: 2159 - RNA, 150 nt, synthetic construct
  misc_feature 1..150: note = CCO13722 variant
  source 1..150: mol_type = other RNA
atgtgcgccacctgtgctatccagacagcacccactggccctaacaagagctccctgtctgacttctcactcccacttaaactgcactttttgagtacgattagcatatccccgttcgcctctaataaggtgttaaccctgtttatctga

SEQ ID NO: 2160 - RNA, 1218 nt, synthetic construct
  misc_feature 1..1218: note = CCDS47587.1 variant
  source 1..1218: mol_type = other RNA
atgagacccagcggcaccgccggggctgcactgctcgcccttctggcggctttgtgccctgcctccagggcattagaggaaaagaaagtgtgtcagggaacatctaacaagctgactcaactaggtacgttcgaggaccactttctctcactgcagcggatgttcaataactgcgaagtcgttcttggcaatctggagatcacctacgtgcagcgcaactatgatttgagttttctcaaaacaattcaggaagtagccgggtacgtgctgatagctctgaatactgtcgagcgaatcccactcgagaacttacaaattatccgtggaaatatgtattacgaaaacagctatgcactggccgtgctttccaattacgacgctaacaagaccggcttgaaagagctgccgatgagaaatctacaggaaattctccatggtgccgttaggttctctaacaatcccgcgctgtgtaacgtggagtcgatccagtggcgggatatagtctcaagcgactttcttagtaatatgtccatggatttccagaaccacctggggtcttgccaaaagtgtgaccctagctgcccaaacggatcctgttggggcgcaggcgaggaaaattgccagaagttgacaaaaatcatttgtgcccagcagtgctcagggcgctgtagaggaaagagtcccagcgattgctgccataaccaatgtgctgccggttgcaccggccctagggagtctgactgtctcgtgtgccggaaatttcgcgatgaagcaacttgtaaggacacatgcccacccctgatgttatataatcctaccacgtaccagatggatgtaaacccagaggggaaatactccttcggagctacttgtgttaagaagtgcccgcgaaattatgtggtcaccgaccacggctcatgtgtgagagcctgcggtgcggatagctacgaaatggaggaggacggggtgaggaaatgtaagaaatgcgaaggaccctgccggaaggtctgtaacggcatcggcattggggagtttaaagacagtctgtctatcaatgccacaaacataaagcatttcaaaaattgcacttccattagcggagatctccacatccttcctgttgcatttcgtggtgactcgttcacccacacaccacccctggatcctcaggaattggacattctaaagaccgtgaaggagatcacgggcctgtcttga

SEQ ID NO: 2161 - RNA, 3633 nt, synthetic construct
  misc_feature 1..3633: note = AAG35789 variant
  source 1..3633: mol_type = other RNA
atgagacccagcggcaccgccggggctgcactgctcgcccttctggcggctttgtgccctgcctccagggcattagaggaaaagaaagtgtgtcagggaacatctaacaagctgactcaactaggtacgttcgaggaccactttctctcactgcagcggatgttcaataactgcgaagtcgttcttggcaatctggagatcacctacgtgcagcgcaactatgatttgagttttctcaaaacaattcaggaagtagccgggtacgtgctgatagctctgaatactgtcgagcgaatcccactcgagaacttacaaattatccgtggaaatatgtattacgaaaacagctatgcactggccgtgctttccaattacgacgctaacaagaccggcttgaaagagctgccgatgagaaatctacaggaaattctccatggtgccgttaggttctctaacaatcccgcgctgtgtaacgtggagtcgatccagtggcgggatatagtctcaagcgactttcttagtaatatgtccatggatttccagaaccacctggggtcttgccaaaagtgtgaccctagctgcccaaacggatcctgttggggcgcaggcgaggaaaattgccagaagttgacaaaaatcatttgtgcccagcagtgctcagggcgctgtagaggaaagagtcccagcgattgctgccataaccaatgtgctgccggttgcaccggccctagggagtctgactgtctcgtgtgccggaaatttcgcgatgaagcaacttgtaaggacacatgcccacccctgatgttatataatcctaccacgtaccagatggatgtaaacccagaggggaaatactccttcggagctacttgtgttaagaagtgcccgcgaaattatgtggtcaccgaccacggctcatgtgtgagagcctgcggtgcggatagctacgaaatggaggaggacggggtgaggaaatgtaagaaatgcgaaggaccctgccggaaggtctgtaacggcatcggcattggggagtttaaagacagtctgtctatcaatgccacaaacataaagcatttcaaaaattgcacttccattagcggagatctccacatccttcctgttgcatttcgtggtgactcgttcacccacacaccacccctggatcctcaggaattggacattctaaagaccgtgaaggagatcacgggctttctgctcatccaggcttggccagaaaaccgcactgatctgcatgccttcgagaatcttgagattataagagggaggacaaaacaacacggacagttctctctggctgtagtgtccttgaacatcacctcactcggcctgcggagtttaaaggaaattagcgacggtgatgtcatcatatccgggaataaaaacctgtgttatgccaatactattaactggaagaaactatttggcacatctggacagaagaccaagatcatcagcaaccgaggcgaaaattcatgcaaagcaacggggcaagtgtgtcatgccctctgcagtcccgaaggatgttggggtccggagcctcgcgactgcgtttcctgtagaaacgtgagcaggggccgggaatgcgtcgataagtgtaatctgcttgagggggagccccgcgagttcgtggagaactctgaatgcattcagtgccacccagagtgtttgcctcaggctatgaatattacctgcacaggaagaggccccgacaactgtattcagtgcgcgcactacatagatggtccacattgtgtaaaaacttgccccgcaggggttatgggcgagaataacaccctggtgtggaagtatgccgacgctggacacgtctgtcatctctgccaccctaattgtacatacggctgcactgggccaggactggaaggttgtccgaccaacggccccaaaatcccttcaattgccacagggatggtgggagcacttctgttgctcctggtcgtggccttaggcatcggtctgtttatgaggcgtcggcatatcgttcgaaagagaaccctaaggcgcctcctgcaagagcgggaacttgtggagccattgactcccagtggggaagctcctaatcaggccctgctcagaatcctgaaggagacggagttcaaaaagataaaagtattaggcagcggagcatttggcacagtctataaggggctgtggatcccagaaggagagaaagtgaagattcccgttgcgatcaaggaacttagggaggctacctccccgaaagccaacaaggaaattttggacgaggcatacgtgatggcctctgtcgataatcctcacgtgtgccgcctcctgggcatctgcctaacttcgaccgtacagctgataacacagctcatgccattcggttgtctgcttgactacgtgcgagagcacaaagataacatcgggagccaatatttgctgaattggtgcgttcagattgctaagggaatgaactacttagaagaccggcgtctcgtccatagagatctggccgcaaggaacgtgcttgtgaaaactccccagcacgtcaagatcaccgactttggcctggctaaattgctcggtgccgaggaaaaggagtatcatgcggaaggcgggaaggttcctattaaatggatggccctggagtccatcctacaccgcatatacacacaccagtcagatgtgtggagttatggagtgacggtatgggagctgatgaccttcggctctaagccctacgacgggattccagctagcgaaatctcctcaattctcgagaaaggagaacggctgcctcaacccccaatctgtactatagatgtctatatgatcatggtgaagtgctggatgattgacgcagatagcagaccgaaatttagggagcttatcattgagttctctaagatggcccgagaccctcagcgctacttggttatccagggcgatgaacggatgcatctgccctccccaacagacagtaatttttacagagctttaatggacgaggaagatatggacgatgtggtcgacgccgatgagtatctcataccccaacagggtttctttagctctccttccacctcaaggacaccactgcttagtagcctgtcggcaacttccaacaattctaccgtggcgtgtattgaccgtaacgggctacagagctgccccatcaaggaagattcattcctccagcgctacagttccgaccctacgggagccctgaccgaggattctatcgacgatacattcttgccggttccagagtatattaatcaaagcgtgcccaaacggcctgctggctccgtacagaacccagtctaccacaatcagcccctgaaccctgccccgtcaagagacccccattatcaggatccacacagcactgcagtgggtaatcctgaatacttaaacaccgtgcaacccacatgtgtcaatagtacttttgactctccagctcattgggcccagaagggctcccaccagatcagcctcgacaaccctgattatcagcaagacttctttcccaaagaggcaaagccaaatgggattttcaaaggatcgaccgccgaaaacgctgagtacctgagggttgcgccgcagtcatctgaatttataggcgcctga

SEQ ID NO: 2162 - RNA, 1395 nt, synthetic construct
  misc_feature 1..1395: note = AAI18666 variant
  source 1..1395: mol_type = other RNA
atggccgctgaggacgtgatcatttgcgcacagcaatgtagcggcagatgcagggggaagtccccctctgattgttgccacaaccagtgtgccgcgggatgcaccggtcctcgggaatcagactgtctggtctgccgcaaattccgagatgaggctacatgtaaggacacttgcccaccgctcatgctttacaatcccacgacctatcagatggatgttaaccctgaaggcaaatacagttttggggccacatgtgtgaagaaatgcccacgtaattatgtagtgactgaccatggaagctgcgtcagagcatgtggcgccgattcctacgagatggaagaggacggtgtgaggaagtgcaagaaatgtgaggggccctgccggaaggtttgtaacggaataggcatcggcgagttcaaagattctctgtcgattaatgctaccaacatcaagcactttaaaaattgcacatcaattagcggggacttgcatatcttacctgtggcattccgcggagatagttttacccacactccacccctggaccctcaggaactagatatactcaagacagtcaaggaaatcaccggtttcctgcttattcaagcctggccagagaacagaacggacctgcatgcttttgagaatttggaaatcattaggggccggactaaacagcacgggcagttctccctcgccgtggtatctctgaacatcaccagcctgggactccgctccttaaaggagatatcagacggcgatgttattatcagtggtaataaaaacctgtgttatgcgaatacaattaactggaagaaactttttgggactagcggacagaagaccaaaatcatctctaatcgaggcgaaaactcctgcaaggcaacaggccaagtgtgtcacgccttgtgctcaccggaggggtgttggggacccgaacctagagactgcgtcagctgcaggaacgtgagtcggggtcgtgagtgtgtggataagtgcaatctgctagagggcgaaccacgcgagttcgtcgaaaactctgagtgtattcagtgccatcccgaatgtctccctcaggctatgaatataacctgcacggggagaggaccagacaactgtatccagtgcgcccactacattgatggcccccattgtgttaaaacttgcccggctggtgtgatgggggagaataacacactggtatggaagtatgcagacgccggccacgtgtgtcacctttgccatcctaattgcacctacggatgtactggccccgggctggagggatgcccaacaaacggtcctaaaatcccctccatagcgaccggcatggtcggggccttgctcctgttactggtggttgcactcggaattggcccacttcacggtaggtga

SEQ ID NO: 2163 - RNA, 3276 nt, synthetic construct
  misc_feature 1..3276: note = AAH94761 variant
  source 1..3276: mol_type = other RNA
atgagacccagcggcaccgccggggctgcactgctcgcccttctggcggctttgtgccctgcctccagggcattagaggaaaagaaagtgtgtcagggaacatctaacaagctgactcaactaggtacgttcgaggaccactttctctcactgcagcggatgttcaataactgcgaagtcgttcttggcaatctggagatcacctacgtgcagcgcaactatgatttgagttttctcaaaacaattcaggaagtagccgggtacgtgctgatagctctgaatactgtcgagcgaatcccactcgagaacttacaaattatccgtggaaatatgtattacgaaaacagctatgcactggccgtgctttccaattacgacgctaacaagaccggcttgaaagagctgccgatgagaaatctacagggtcagaagtgtgatccctcttgccctaacgggtcgtgttggggagccggcgaagagaattgccagaagctcacaaaaattatctgtgcgcaacagtgctcagggaggtgtcggggcaagagcccaagtgactgctgtcataaccagtgcgcagccggatgcaccggtccccgcgagtccgattgtctggtttgcagaaaattcagggacgaagctacttgtaaggatacatgccctccacttatgctgtataatcccaccacgtaccagatggacgtgaaccctgagggcaaatactcttttggggccacttgtgtcaagaagtgcccacggaactatgtggtaaccgatcacggaagctgtgttcgcgcatgcggcgctgactcctacgaaatggaggaagatggtgtgcgaaaatgtaagaaatgcgaggggccgtgtagaaaggtctgcaatggaataggcatcggcgagttcaaagactcattgagtattaacgccacaaatatcaagcattttaaaaactgcactagcatttctggggatctccacatcctgcccgtggcgttcaggggagactcctttacccatacacctccattagacccccaagaactggatatactcaagaccgtgaaggagattacgggtttccttctgatccaggcctggcctgaaaatcggactgacttgcacgcatttgagaacctagaaattatccgtggccgcacaaaacagcacgggcaattctcactggctgtcgttagcctcaatatcaccagtctgggacttagatctctgaaggagatttccgatggcgacgtgataatcagcggtaacaaaaatttgtgttatgccaacactattaattggaagaaactctttgggacatcgggccagaagaccaagatcatatctaacaggggagaaaattcctgcaaagctacgggccaggtatgtcatgccctgtgctcaccagaggggtgttggggacccgagccgcgggattgcgtgagttgtcgaaacgtcagccgcggtagagaatgcgtggacaagtgtaatttactggagggcgaacctagggagttcgttgagaactccgaatgcattcagtgtcaccccgagtgcctaccacaagcaatgaacattacctgcacagggcggggacctgataattgtatccagtgcgcccattacatcgacggcccccactgtgtgaaaacttgcccagctggtgtcatgggggaaaacaataccctcgtgtggaagtatgcggatgcaggccacgtatgtcatctgtgccaccccaactgtacatacggatgcactggccctgggcttgagggatgtccaaccaatggtccgaaaatcccctctattgccacaggcatggttggggctttgctgctcctgcttgtggtcgccctgggaataggcttgttcatgcgcagaaggcatatcgtgcgtaagcggaccctccgaagactgttacaggagagggaactggtcgagcctctaactccaagcggtgaagcacccaaccaggccctcctgcgcattcttaaggagacggaatttaaaaagatcaaagtgttggggtcaggcgctttcggaacagtttataagggcctgtggatccctgagggggagaaagtgaagattccagtagccataaaggaactccgggaggcaaccagtcccaaagcgaataaggaaatcctggacgaggcttacgtcatggcctccgtggataacccgcacgtttgcagattactgggaatttgtcttactagcaccgtgcaattgatcacacagctcatgccttttggctgcctgctagactacgtcagggaacataaagacaatattggttctcagtatctgctcaactggtgcgtgcagatcgcaaaggggatgaattacctggaggatcgccgacttgtacaccgggacttggccgctcgtaacgtgctggttaaaaccccacaacacgtcaagataactgatttcggattagccaaactcctgggcgcagaggaaaaggagtatcatgctgaaggtggcaaggtgcccatcaaatggatggcccttgagtcaattctgcacagaatctacacacatcagagtgacgtgtggagctatggggtcacggtttgggaattgatgacctttggatccaagccttacgatggcattcccgcgtctgagatctcgagcatactcgagaaaggggaaaggctgccacagcctcccatttgtactatcgacgtgtatatgattatggtgaagtgctggatgatcgatgccgactcccgcccaaaattccgggagctaataatcgaattttcaaagatggctagagatccgcagaggtacctggtaattcaaggagacgagcgaatgcacctccctagtcccacagattctaatttctaccgcgcactgatggacgaggaagatatggacgacgtcgtggatgccgacgagtatcttatcccacagcagggctttttcagctccccctcaaccagccggacacctttgctgtcttccttaagtgctactagcaacaattctaccgttgcctgtattgatagaaacggtctccaatcctgcccaatcaaggaagactcatttctgcagaggtacagtagcgatcccacgggggcacttaccgaggactcgatagatgacacattcctgcctgtgccgggagaatggctagtctggaaacagtcctgttctagcacttcaagtacccactccgcggccgcttctctccagtgcccaagccaagtgctgccccctgcctccccagagggcgagacagttgcagatttgcagactcagtga

SEQ ID NO: 2164 - RNA, 216 nt, synthetic construct
  misc_feature 1..216: note = CAA34902 variant
  source 1..216: mol_type = other RNA
atgagacccagcggcaccgccggggctgcactgctcgcccttctggcggctttgtgccctgcctccagggcattagaggaaaagaaaggaaagggtgtgtctcggcgcctgccacgacgtccgagaatcgcccccaggacacctcagccagctcaaccccggactggcgcccctgcacgcgctagagccccagcgaggcccttcctatttccttga

SEQ ID NO: 2165 - RNA, 720 nt, synthetic construct
  misc_feature 1..720: note = AAH10992 variant
  source 1..720: mol_type = other RNA
atgcccctgggccacatcatgagactcgaccttgagaagattgccctggaatacatagtgccttgcttgcatgaggtcgggttctgttatttagataactttctgggagaagttgtgggtgactgcgtactagagagggtgaaacagctccactgtaccggcgctctgcgggatgggcaacttgcaggaccacgcgccggcgtcagcaagcgacatctgcgtggtgaccagatcacatggattgggggaaatgaagagggctgcgaggcgatctccttcttgctctctctgattgatagactggtgctctactgtggctcaaggttagggaaatattacgttaaggaacggagtaaagctatggtggcctgctatccgggaaacggtactggctacgtccgccacgtggacaatcccaacggggatggaagatgtatcacgtgcatatattacctgaataagaactgggacgcaaaacttcatggcggtatcttgaggatttttcctgaggggaagtccttcatcgccgatgtagaaccaatttttgaccggctgctattcttttggagcgatcgccgaaatccccacgaggttcagccttcttacgctaccagatatgcaatgacagtgtggtacttcgacgccgaggaaagggctgaggccaagaaaaagtttcggaacctcactcgtaaaaccgaatcggcgctgacagaggattga

SEQ ID NO: 2166 - RNA, 1566 nt, synthetic construct
  misc_feature 1..1566: note = BAH13456 variant
  source 1..1566: mol_type = other RNA
atggccaccagcctgcacgagggccccacaaaccagctcgaccttctgatcagagctgtggaagcatccgtccattcttcaaatgcccactgcactgataagacgattgaggcggctgaagccttgttacatatggagagtcctacctgtctgagggacagccggtccccagagttcatacacgcagccatgcgcccggatgttatcacagaaactgtggtagaggtgtctaccgaagagtcggaacccatggacacatcacctattccaaccagccccgatagtcatgagcctatgaaaaagaaaaaggtcgggcgaaaaccaaagactcaacagtcccccatctctaacggaagccctgagctaggtattaagaaaaagccacgtgaaggcaaagggaatacaacctacctctgggagtttctgcttgacctgttgcaggataagaacacgtgcccgagatatatcaaatggactcagagggaaaagggaatattcaagctcgtggactccaaagctgtttcaaagctgtggggcaaacacaagaataaacccgatatgaactacgagaccatgggtcgggcactgcgctattactatcaaagagggatcctcgccaaggtggaaggacagaggttagtctaccagtttaaagacatgcctaagaatattgtggtaatcgatgacgataagagtgagacatgtaacgaggacctggctggcactaccgacgagaaaagccttgaacgggtttctttgtccgccgaatcactgctaaaggcggcaagcagtgtgcgctctggcaaaaattccagcccaattaactgctcgcgagccgagaagggggtcgctagagtggtgaatatcacatctcccggacacgatgcctcctcaaggagtcctaccacgactgcaagcgtctccgctacagccgcgccacggaccgttcgtgtggccatgcaggtacccgtggtcatgacttctctcggtcagaaaataagcacagtggcagttcaatcagtgaacgctggcgccccgctgattaccagtacgtcccctaccacagctactagccccaaggtcgtgatccagaccattccaacagtaatgcctgcctctactgaaaatggggacaagatcaccatgcagcccgcaaaaatcattacaataccagccacccaacttgctcagtgtcagctgcaaactaagtcaaacttgacgggaagtggcagcatcaatattgttggtacacccctcgcggtgcgcgcactgacccctgtctccatcgcccatgggactccagtgatgagattatctatgccgacccagcaggcttcgggacagacaccccctagggtcataagcgccgtgattaaaggcccagaggttaagtccgaggcagtggccaaaaagcaagaacacgatgtaaagaccctgcagctcgtcgaggaaaaacccgctgacggcaacaagactgtgacacatgttgtggtcgtgtcagcccctagtgcaatcgcgcttccagtaacgatgaaaaccgaggggctggtgacttgcgaaaagtga

SEQ ID NO: 2167 - RNA, 810 nt, synthetic construct
  misc_feature 1..810: note = BAC67168 variant
  source 1..810: mol_type = other RNA
atggccgctgcactgttcgtgctccttggatttgccctgttggggacccacggagcgagcggtgctgccggcacagtcttcactacggttgaggacttagggtccaagatcctgctaacctgctctctcaacgattcagcaacagaagtgactggacatagatggctgaaaggcggtgtagtgcttaaggaggacgccctgcccgggcagaaaaccgaatttaaggtcgatagtgacgatcaatggggagagtacagctgtgtgttcttgcctgaaccaatgggcacagctaatattcagctccacggcccgcccagggttaaagcagtgaagtcctctgagcatataaacgagggggaaaccgccatgctggtctgcaagtcggagtcagtgcctccagtaactgactgggcttggtataaaatcacagatagcgaagacaaggccctgatgaatggaagtgagtcccggtttttcgtttctagctcccagggtcgctcagagctccacattgaaaacttaaatatggaggcggatcccggccagtaccgatgtaacgggaccagtagcaaaggatctgaccaagcaatcattacgctgcgtgtgagatcccatcttgccgctttgtggccttttctgggcatcgtcgccgaagtgctagtgctcgtcactataatcttcatttatgagaagaggcggaaaccagaagatgttctggacgatgacgacgcaggttcagctccccttaagagcagtgggcagcaccagaatgataagggcaaaaacgtgcgccagagaaattcttcctga

SEQ ID NO: 2168 - RNA, 945 nt, synthetic construct
  misc_feature 1..945: note = AAA35723 variant
  source 1..945: mol_type = other RNA
atggctccccctcaggtgctggccttcggcctccttctggcagccgcgaccgctacatttgccgcagcccaagaggaatgcgtctgtgagaactacaagttggctgttaattgcttcgtgaacaataacagacagtgtcagtgcactagcgtaggggcacagaatacggtgatctgttccaaattagccgctaagtgcctggtcatgaaagccgaaatgaacggatctaagctaggtaggcgggcgaaaccagagggcgcactccaaaataacgacgggctgtatgatccggactgtgatgaatcaggactttttaaggccaagcagtgcaatggcaccagtatgtgttggtgcgtgaacacagctggtgttcgccgaactgacaaagataccgagattacatgtagcgagcgtgtgagaacctactggataatcattgaactgaagcacaaagccagggagaagccctatgactccaaatctttgcggactgcactccagaaggaaatcacaacccgctaccagctggatcctaagttcattacgtcgatcctgtatgagaataacgtcataactatcgacctcgtgcaaaattcaagccagaaaacccagaacgatgtagacattgctgatgttgcctactattttgagaaggacgtgaaaggggaaagtttattccattccaagaaaatggatctgacagtcaatggagagcagcttgacttggacccaggccaaactctgatctactacgtggatgaaaaggcgcccgagttttctatgcagggcctaaaagccggggtgattgcagtcatcgttgtggtagtgatagctgtcgtggccggaattgttgtgctcgtcatcagcagaaagaagaggatggctaaatatgaaaaggccgagattaaagagatgggtgaaatgcaccgggagctgaacgcatga

SEQ ID NO: 2169 - RNA, 2931 nt, synthetic construct
  misc_feature 1..2931: note = CCDS169.1 variant
  source 1..2931: mol_type = other RNA
atggagctgcaggccgctagagcatgcttcgccctcctttggggctgtgcgctggctgccgcagccgctgcacaagggaaggaagtggtcttgttagactttgccgctgccggaggtgagctgggctggctaacccacccctacgggaaaggatgggatctcatgcagaacatcatgaatgacatgcctatttatatgtacagcgtttgcaacgtgatgtccggcgatcaggacaattggctgaggacaaactgggtatatcggggtgaagcggagcgcatattcatcgaacttaagtttactgtgcgagattgtaattctttcccagggggagcatcaagttgcaaagagacgtttaacctgtactatgccgagagcgacttggattacggcaccaatttccagaagcgtctctttacaaaaattgacactatcgctccggatgaaattaccgtctcctctgacttcgaggccagacatgtgaagctgaacgttgaagagaggtcggtgggccccctgacacggaaggggttttatctcgcattccaagatatcggagcttgtgtcgccttactgtcagtgcgcgtatactacaaaaagtgccctgagcttttgcagggtctggcgcactttccagaaaccatagccggcagcgacgcacccagtctagctactgttgccgggacatgtgtggatcatgctgtcgtgcctccaggaggcgaggaacccagaatgcactgcgccgtggacggtgagtggctcgtccctatcgggcagtgtctgtgccaggcaggatatgaaaaagttgaggacgcctgtcaagcctgctccccaggcttctttaagttcgaggcgtctgaaagcccgtgccttgagtgtcccgaacataccctgccttccccagagggcgcaacgtcatgcgaatgtgaggaggggttctttagggctccccaggatcctgctagtatgccatgcactcggcccccgagcgcccctcactacttgaccgcagtgggaatgggtgccaaagtagaactccgctggacacccccacaggactctggcgggcgagaggatattgtgtattccgtcacttgtgaacagtgctggcctgagtcaggagaatgtggcccctgcgaggctagcgtgagatacagtgagccaccccacggtctgaccaggacatctgttaccgtgtccgacttagaacctcatatgaattatacgttcactgtcgaggcccggaacggggtgagcggcctggtaacatcgcgttcttttcgcaccgcatccgtttcaatcaatcaaactgaaccaccgaaggtgagactcgagggaaggagtacaaccagcctttccgtctcttggagcattccccctccacagcagtcacgggtgtggaagtacgaggtcacgtatcgcaaaaagggcgatagtaactcctacaatgtgcgaagaaccgaagggttcagcgttacactggacgatttggcgcccgacactacctacctagtgcaagtacaggctctgacacaggagggacagggtgccggctctaaagtccacgaatttcaaactctctcacctgaggggagtggaaacctggcagtgatcggcggtgttgccgtgggggtcgtgcttctgttggtactcgctggcgtgggattctttatacataggcggcgcaagaatcagagagccaggcagagcccagaagatgtttatttctccaaatctgagcagctgaagcccttaaaaacctacgtcgacccgcacacatatgaggatcctaaccaagcagtgctgaagtttaccactgaaattcacccatcgtgtgtgacgcgtcagaaggtcatcggcgctggggagttcggagaagtttacaaaggtatgctaaagacaagctccggcaaaaaggaggtgcccgtggccattaaaaccctcaaggcggggtatactgaaaagcagcgggtagactttctgggagaggccggcatcatgggtcagttctcacatcacaacatcattcgacttgagggggtcataagtaaatacaagcctatgatgatcattaccgaatatatggagaatggcgctttggacaaatttctgagagaaaaggatggagagttctctgtgctccaactggttggcatgcttagggggatcgcagccggaatgaaatacctggctaacatgaattacgtgcatcgcgacttggccgcacggaacatactcgtcaatagcaacctggtgtgcaaggtttccgatttcggcttatcaagagtgctggaagacgatcccgaggcgacatataccactagcggtgggaagattccaatcaggtggacagcccctgaggctatctcttaccgcaaatttacgtccgccagtgacgtatggagcttcggaattgtcatgtgggaagtgatgacctatggcgagcgaccctactgggaactatctaatcacgaggtgatgaaggcaatcaacgatggttttcggctcccaactccgatggactgtccttccgctatttatcagctgatgatgcagtgctggcagcaagagcgtgccagaaggcccaaattcgcagatatagtctcaatccttgacaagttgattcgcgccccagatagtctgaaaacactcgctgactttgatccccgggttagcatcagactgccttcgacctccggctctgaaggggtgccattcaggacagtaagcgagtggttagaatcaatcaagatgcagcagtacactgagcattttatggcggccggatataccgcaattgaaaaggtggtccaaatgacgaatgacgacataaaacgaatcggcgtgcgcctgcccgggcaccagaagcggattgcttacagtcttttgggactcaaagatcaggttaacaccgtgggcatccctatttga

SEQ ID NO: 2170 - RNA, 2952 nt, synthetic construct
  misc_feature 1..2952: note = AAG43576 variant
  source 1..2952: mol_type = other RNA
atggactgccagctgagcatcctccttctgttgtcctgttctgtgttagattcattcggcgagctgattccccaacctagtaacgaagtcaatctactcgacagcaagaccatacagggggagctgggatggatctcctacccatctcacggttgggaagagatttcgggcgttgatgaacattatacaccgatcagaacttaccaggtgtgcaacgtaatggaccactcacagaataactggcttaggacgaattgggtgccccggaacagcgcccagaaaatttatgtcgagctgaagtttaccttgcgcgattgtaatagtatccctctcgtgctggggacatgcaaagagactttcaacctgtactatatggaatccgacgatgaccatggagttaagtttcgagagcaccaattcaccaaaatagatacaatcgctgcagacgaatcttttacccagatggatctcggcgaccgtattttaaagctgaatactgagatcagagaggtgggtccagtcaacaagaaagggttctaccttgcctttcaggatgtgggagcgtgtgtagctttggttagcgtgagggtctatttcaagaaatgcccctttacagtgaagaatctggccatgttccctgacaccgtgccaatggactcccaaagtctagtcgaagttcggggctcatgtgtgaacaatagcaaagaggaagatccccctcgcatgtactgctctacggagggcgaatggctcgtaccaattgggaagtgttcctgcaacgcaggatacgaggagagaggttttatgtgtcaggcctgcaggccgggcttctataaggctctggacgggaatatgaaatgcgcaaagtgtccccctcattcaagcactcaggaagatggaagtatgaactgccggtgtgagaacaattactttcgcgccgacaaagatccaccctctatggcttgcacccgacctccatccagccccagaaacgtgatctcgaatataaacgaaacatctgtcattcttgactggtcctggccgctggatactggcggtaggaaggacgtgaccttcaatatcatttgtaaaaagtgcgggtggaacatcaaacagtgtgagccttgctcacccaatgttcggttcttgccacgtcaatttggactcacaaacaccacggtgactgtcacagatctgttagcccacaccaattatactttcgaaatcgacgcggtgaacggcgtaagtgagctgagctcccctccccgccagtttgcagccgtttctattacaaccaatcaggctgccccaagccccgtgctcacgataaagaaggatagaacctcaaggaacagtatctcccttagctggcaagagcctgaacacccaaatggcattatcctggactacgaggtcaaatattacgaaaagcaggagcaggaaacatcttatactatattgcgggcacgagggaccaacgtgacaatttcaagtctaaaaccggacactatctacgtcttccagatccgcgctagaaccgccgcgggatacggtacaaatagcaggaagtttgagttcgagacctcccccgattctttttcgattagcggcgaatcctcacaagtggttatgatcgccattagtgcagctgtggccataatcctgctcactgtagtcatttatgtgctgatcgggcggttctgtggatacaaatctaagcatggcgctgacgagaagcgccttcactttggtaacgggcatctgaaattgcctggcctcagaacgtatgttgatccacacacatacgaagaccccacccaggccgtgcacgagttcgcaaaggagctggatgccactaacatcagcattgacaaagtcgtgggagctggcgaatttggggaggtatgctccggaaggttaaagctgcctagcaaaaaggaaatatcagtggcgatcaagaccctaaaagttggttatacagagaagcagcgtcgggatttcctcggcgaagcatctattatggggcagtttgaccatccaaatatcattcgactggagggagtcgtgaccaaatccaagcccgtgatgatcgtcactgagtacatggaaaacggcagtcttgatagcttcttgagaaaacacgacgcccaattcacagttatacagctggtgggtatgctcagggggatcgcttctggcatgaagtatctgtccgatatgggatacgtgcatcgcgaccttgccgcacggaatattctgatcaactcaaatttggtatgtaaggtcagtgattttggcctcagcagagtgctggaggacgacccggaagccgcttacacgacccgcgggggaaaaattcctatcaggtggacttcgccagaggccatagcatatcgaaagttcacatccgcgtctgatgtttggagctacggtattgtgttatgggaagtcatgtcatatggcgagcggccctactgggagatgagtaaccaggacgtgatcaaagctgttgatgaagggtatcgtctgcctcccccaatggactgccctgccgcactataccagctcatgctggattgctggcaaaaggacagaaataacaggcccaaatttgagcagattgtgtccatccttgataagttgatacgcaatccaggatctctgaaaatcattaccagcgccgctgcccggccgtccaacctcctgttagaccagtcaaatgtagatatcacaactttcagaaccacgggcgactggctgaacggtgtctggaccgcacactgtaaggaaatttttacaggggtggagtatagcagttgcgatactatcgctaagatatctaccgacgatatgaaaaaggtgggcgtcacagttgtgggacctcagaaaaagattatctccagcatcaaagcccttgaaactcaatcgaagaatggccccgtaccagtgtga

SEQ ID NO: 2171 - RNA, 2952 nt, synthetic construct
  misc_feature 1..2952: note = AAH63282 variant
  source 1..2952: mol_type = other RNA
atggactgccagctgagcatcctccttctgttgtcctgttctgtgttagattcattcggcgagctgattccccaacctagtaacgaagtcaatctactcgacagcaagaccatacagggggagctgggatggatctcctacccatctcacggttgggaagagatttcgggcgttgatgaacattatacaccgatcagaacttaccaggtgtgcaacgtaatggaccactcacagaataactggcttaggacgaattgggtgccccggaacagcgcccagaaaatttatgtcgagctgaagtttaccttgcgcgattgtaatagtatccctctcgtgctggggacatgcaaagagactttcaacctgtactatatggaatccgacgatgaccatggagttaagtttcgagagcaccaattcaccaaaatagatacaatcgctgcagacgaatcttttacccagatggatctcggcgaccgtattttaaagctgaatactgagatcagagaggtgggtccagtcaacaagaaagggttctaccttgcctttcaggatgtgggagcgtgtgtagctttggttagcgtgagggtctatttcaagaaatgcccctttacagtgaagaatctggccatgttccctgacaccgtgccaatggactcccaaagtctagtcgaagttcggggctcatgtgtgaacaatagcaaagaggaagatccccctcgcatgtactgctctacggagggcgaatggctcgtaccaattgggaagtgttcctgcaacgcaggatacgaggagagaggttttatgtgtcaggcctgcaggccgggcttctataaggctctggacgggaatatgaaatgcgcaaagtgtccccctcattcaagcactcaggaagatggaagtatgaactgccggtgtgagaacaattactttcgcgccgacaaagatccaccctctatggcttgcacccgacctccatccagccccagaaacgtgatctcgaatataaacgaaacatctgtcattcttgactggtcctggccgctggatactggcggtaggaaggacgtgaccttcaatatcatttgtaaaaagtgcgggtggaacatcaaacagtgtgagccttgctcacccaatgttcggttcttgccacgtcaatttggactcacaaacaccacggtgactgtcacagatctgttagcccacaccaattatactttcgaaatcgacgcggtgaacggcgtaagtgagctgagctcccctccccgccagtttgcagccgtttctattacaaccaatcaggctgccccaagccccgtgctcacgataaagaaggatagaacctcaaggaacagtatctcccttagctggcaagagcctgaacacccaaatggcattatcctggactacgaggtcaaatattacgaaaagcaggagcaggaaacatcttatactatattgcgggcacgagggaccaacgtgacaatttcaagtctaaaaccggacactatctacgtcttccagatccgcgctagaaccgccgcgggatacggtacaaatagcaggaagtttgagttcgagacctcccccgattctttttcgattagcggcgaatcctcacaagtggttatgatcgccattagtgcagctgtggccataatcctgctcactgtagtcatttatgtgctgatcgggcggttctgtggatacaaatctaagcatggcgctgacgagaagcgccttcactttggtaacgggcatctgaaattgcctggcctcagaacgtatgttgatccacacacatacgaagaccccacccagactgtgcacgagttcgccaaggagctggatgcaaccaacatcagcattgacaaagtcgtgggagccggcgaatttggggaggtatgctccggaaggttaaagctgcctagcaaaaaggaaatatcagtggctatcaagacactaaaagttggttataccgagaagcagcgtcgggatttcctcggcgaagcgtctattatggggcagtttgaccatccaaatatcattcgactggagggagtcgtgactaaatccaagcccgtgatgatcgtcacagagtacatggaaaacggcagtcttgatagcttcttgagaaaacacgacgcacaattcacggttatacagctggtgggtatgctcagggggatcgcctctggcatgaagtatctgtccgatatgggatacgtgcatcgcgaccttgctgcccggaatattctgatcaactcaaatttggtatgtaaggtcagtgattttggcctcagcagagtgctggaggacgacccggaagcagcctacaccactcgcgggggaaaaattcctatcaggtggacatcgccagaggctatagcctatcgaaagttcacctccgcatctgatgtttggagctacggtattgtgttatgggaagtcatgtcatatggcgagcggccctactgggagatgagtaaccaggacgtgatcaaagcggttgatgaagggtatcgtctgcctcccccaatggactgccctgctgccctataccagctcatgctggattgctggcaaaaggacagaaataacaggcccaaatttgagcagattgtgtccatccttgataagttgatacgcaatccaggatctctgaaaatcattacaagcgcagccgctcggccgtccaacctcctgttagaccagtcaaatgtagatatcactaccttcagaacgaccggcgactggctgaacggtgtctggacagcccactgtaaggaaatttttactggggtggagtatagcagttgcgataccatcgcaaagatatctacagacgatatgaaaaaggtgggcgtcactgttgtgggacctcagaaaaagattatctccagcatcaaagctcttgaaacccaatcgaagaatggccccgtaccagtgtga

SEQ ID NO: 2172 - RNA, 1389 nt, synthetic construct
  misc_feature 1..1389: note = BAG54127 variant
  source 1..1389: mol_type = other RNA
atgcccatgagcaccatcctgcctgtgacatccccatgcctcccggccactggcgtcacggtttgggagcttatgaccttcggggctgaaccctacgcaggactgagattggccgaggtgcctgacttactggaaaagggtgagaggctagcgcagccacaaatttgtacaatagatgtatatatggtgatggtcaaatgctggatgatcgacgaaaacattcggcccacttttaaggagctcgctaatgagttcacccgcatggcccgagatcctccacgttacctggtgatcaaaagagaatctggccccgggattgcacctggaccagagccgcacggccttacaaacaagaaactggaagaggttgagttggaacccgagctcgacctggatctggacctcgaagccgaggaagataatttagctaccactacactgggttcagcacttagtttgcctgtggggaccctgaacaggccacggggaagccagtccctactctctccctcgtcaggctatatgcctatgaatcagggcaacctgggggagagctgtcaggagagtgccgtctccggatctagcgaacgctgcccaagacccgtgtcccttcatccgatgcctaggggttgtctggcttcagagagtagcgaaggccacgtaacggggtctgaggccgaattgcaagagaaggtttccatgtgccggtcacgcagccgaagtagatctcccaggccacggggagactccgcgtaccatagccagcgtcactcgctcctgactcctgtgacccccttatctccacccggcctggaggaagaggatgtcaatggttatgtgatgcctgacacacatctcaaggggactccatcctcacgcgaaggaacccttagtagcgtgggcctgtcctctgtcttgggcacagaggaagaggatgaggacgaagagtacgaatatatgaacagaaggcggcgacacagcccgccccaccctccacgcccctcaagtctagaggagctggggtacgaatacatggatgttggatccgacctcagcgcatctctgggttcaacccagagttgtcctcttcatccagtgcccatcatgccgacggccggcactacacctgacgaggattatgaatacatgaatagacagagggacgggggaggcccaggtggggattatgctgccatgggcgcatgccccgctagcgagcaaggatacgaagagatgcgggcctttcagggccctgggcaccaggcgccccatgtacactatgcccgcctgaaaaccttgagatccctcgaggcaactgactctgctttcgataacccagactactggcactcgaggctgtttcctaaggccaatgctcagcgtacatga

SEQ ID NO: 2173 - RNA, 2766 nt, synthetic construct
  misc_feature 1..2766: note = BAG57868 variant
  source 1..2766: mol_type = other RNA
atgagagccaacgacgctctccaggtgctgggccttctgttcagcttggcaagggggtccgaggtcggaaattctcaagccgtttgccccggtaccttaaacggcctgtcagtgacaggggatgcggaaaatcagtaccagactctatataagctctacgagcggtgtgaagtagtgatgggaaacctggagatcgtccttacgggccacaatgctgacctgtcgtttttgcagtggattcgcgaagtgaccggttatgttctcgtggccatgaacgagttcagcacactgcctctgccaaatctccgagtcgtgcgtgggactcaagtatacgatggaaaatttgcaatattcgttatgttaaactataataccaactcctctcatgccctgagacagcttaggttgacacagctgaccgagatcctatcgggcggcgtgtacattgaaaagaatgacaaactctgccacatggatactatcgactggcgggatattgtccgcgacagagatgctgagatcgtggtgaaggacaacgggaggtcatgtccgccctgccatgaagtctgtaaaggacggtgctggggtcctggcagcgaggattgtcagacactgaccaagacgatatgcgcaccacaatgtaatgggcactgctttggacccaaccctaatcagtgttgccatgacgagtgcgccggcggttgtagtgggccacaggatactgactgcttcgcttgtcgccactttaacgactccggagcctgcgttccccgatgtcctcagccacttgtgtataacaagctgaccttccaattggaaccgaatccccacacaaaataccagtacggcggcgtatgcgtggcgtcttgtcctcataactttgtcgtggatcagactagctgcgttagagcatgtccacccgacaagatggaggtggataaaaatgggctcaagatgtgcgaaccttgtggaggtctgtgcccaaaagcctgcgagggcaccgggtccggatcaaggttccaaacagtcgacagtagcaacatcgatggctttgtgaattgtaccaagattttaggtaacctggacttcctcatcacggggcttaatggcgatccctggcacaagattccggctctggaccctgaaaaattgaacgtatttcggactgttcgtgagatcacaggatatctaaatatacagtcttggcccccacatatgcacaacttctccgtgttctcaaatctgaccactattggcgggcgcagcctctacaacagaggatttagtctgcttatcatgaagaatctgaacgtcacatctttgggtttcaggtccctcaaagagattagcgccggccggatctatatctcggcaaatcgacagctgtgctaccaccattctttaaactggaccaaggtgctgcgcgggcctacggaagagagactagatattaaacacaacaggccccggcgcgactgtgtcgctgaaggaaaggtgtgcgatccactctgttcctcaggcggttgctgggggcccggccctggacagtgtctgagttgcagaaattatagcaggggcggggtttgtgtgacccattgcaactttcttaatggagagccacgtgagttcgcccacgaggcggagtgtttttcctgccatccggaatgccaacccatggagggtacagccacttgtaacggctctgggagcgatacctgcgcacagtgtgctcacttccgggacggacctcactgcgtatcaagttgtccacatggcgtcttgggtgccaaagggcccatatacaagtatcctgacgtgcagaatgaatgccgaccatgtcacgagaactgcacacagggctgtaagggacccgaactgcaagactgcctcggccagactctggttcttatcgggaaaacccatctgacaatggctttgaccgtgattgccggactcgtcgtgatctttatgatgctgggcggtactttcttatactggagagggaggcgcatacagaataagcgggcaatgagaaggtacctggagcgcggagagtccattgaaccgctagatcctagcgagaaagccaacaaggtactcgctcgaatctttaaagaaacggagctgcggaaacttaaggtgttgggctctggtgttttcggcacagtccacaagggggtgtggatcccagagggagaatcaattaagatccccgtgtgtattaaagtcatagaggacaagagtggccgtcagagctttcaagcggttaccgatcacatgctggcaatcgggtccctcgaccatgcccacattgtgagactgttaggactgtgccctggctctagtcttcagttggtgactcagtatctccccctgggtagcctactggatcatgtaaggcagcaccgcggggctctcggaccacaactgcttttgaattggggcgtccagatcgccaaaggtatgtactatctggaagaacatggcatggtgcaccggaacttagcagccagaaatgttctcctgaagtccccttcacaggtgcaagtcgctgacttcggggtggccgatcttctgcccccagacgataagcagttgctctacagtgaagcaaaaaccccgatcaagtggatggcgctggagtctattcactttggaaaatatacacatcagagcgacgtttggtcctacggccagtgcatatggatgccttcactacccagcctggctccagtgtctaacctccccttcgagaccccttcctga

SEQ ID NO: 2174 - RNA, 3927 nt, synthetic construct
  misc_feature 1..3927: note = AAB59446 variant
  source 1..3927: mol_type = other RNA
atgaagcccgccaccggcctgtgggtgtgggtcagcctccttgttgctgcagggacagtgcagccttccgactctcaatcagtatgcgccggaactgaaaacaaactgagtagcttgtccgatttagaacagcagtacagagcgctgaggaagtattacgagaattgtgaagtggtcatgggtaacctagagatcacgtctattgaacacaatcgggacctctcgttcctgcgctcagtgcgagaggttaccggctatgtgcttgtcgctctgaaccagtttcgttacttgccactcgagaatctgagaataatcagggggacaaaactgtatgaagatcggtacgccctcgcaattttcttaaactatcgcaaggacggaaattttggcctgcaagagcttggtttgaaaaacctgactgaaatcctaaatgggggagtgtacgtagatcagaacaagttcctctgctacgccgacaccattcattggcaggatatcgttagaaatccgtggcccagcaacctgacacttgtgagtaccaatggctcctctggctgtgggaggtgccacaagagctgtactggacggtgctggggtcctacagagaaccattgtcagaccctgacgcgcactgtctgcgctgagcaatgtgacggccgatgctatgggccatacgtgtccgattgttgccacagagaatgcgcaggaggctgttcaggtcccaaagacaccgattgctttgcctgtatgaatttcaacgacagtggggcttgcgtgacacagtgtcctcagacttttgtctataacccaaccacattccagttggagcataattttaacgccaagtacacctatggagcgttctgcgttaaaaagtgtccccacaattttgtggtagattctagctcctgcgtgagggcatgtccttcaagcaaaatggaagtcgaggaaaacggcataaagatgtgcaagccatgtacggacatctgcccgaaagcctgcgacggcattgggactggaagtctcatgtctgctcaaacagtggattccagcaatatcgacaagttcattaactgtaccaaaatcaatggtaacctgatatttttagttactggcattcacggggatccctacaatgccatcgaggcaattgaccctgagaagctgaacgtgttccggacagtccgtgaaatcaccggattcctcaatatccagtcgtggccacccaacatgacggatttttctgtgttctccaatcttgtaaccattggcggtcgcgttctgtattcagggttgagtctactgatactcaaacagcaaggcatcacaagcctgcagtttcagtcccttaaggagatttctgctggaaacatctacataactgacaatagcaacctgtgctactatcataccattaactggacaactttgttctcaaccatcaatcagagaatcgtgattagggataaccggaaagccgaaaattgtacagcggagggcatggtctgcaaccacctctgtagttccgacgggtgctggggacctggtccagatcaatgtctgagctgccgacgcttttctagaggcaggatctgtattgaatcatgcaatttatacgacggggagttccgggagtttgaaaacggaagtatatgtgtggagtgcgatccccagtgcgaaaagatggaggacggcctgctaacctgtcatggtccggggcctgacaattgcactaagtgtagccacttcaaagatggccccaactgcgtcgaaaagtgtccagacggactccagggcgccaattcctttatcttcaaatatgcagatcctgaccgcgagtgccacccctgtcatccaaactgcacgcaggggtgtaatggacccacatctcacgattgcatttactatccttggaccggtcattcgactctgccacaacacgctagaaccccgcttatcgccgctggcgtgatcgggggattgtttattctggttatagtgggcctcacattcgccgtatacgtcaggcgtaagagcatcaaaaagaagcgggcactgcgaagatttcttgagaccgaactggtggagcccttgactccttccggtacagccccaaaccaggctcagctcaggattctgaaagaaacggagttaaagcgcgttaaagtgctggggtcaggcgcgttcggaaccgtctataagggcatctgggtgcccgagggggaaactgtaaaaattcctgtggcaatcaagatactaaatgagacaaccggaccaaaggccaacgttgagttcatggacgaagctctcatcatggccagtatggatcatccccacctggtccggcttttgggcgtgtgtctgtctccgacaattcagctcgtgactcaactgatgcctcacggttgcttactggaatacgtccatgagcacaaagacaatatcgggagccagcttttgctcaactggtgcgttcagattgcaaagggaatgatgtacctggaggaaagaaggctagtgcatcgcgatctggccgctcgaaacgtgctcgtaaaatccccaaatcacgtcaagatcaccgactttggcctggcccggcttttggagggtgatgaaaaagagtataacgcagacggcgggaagatgcccataaagtggatggcgctggaatgtattcactaccgtaaattcacgcatcagtcagatgtgtggagctatggagttaccatctgggagttaatgacatttggcgggaagccttacgacggcattcccactagagagatcccagacctcctggaaaaaggagagaggcttcctcaacccccaatatgcaccatcgatgtgtatatggtcatggtgaagtgttggatgattgacgctgattctcgcccgaaattcaaggaactggccgcagagttttcccggatggccagagaccctcagaggtacttggttatccagggtgatgaccgaatgaaactccccagtccaaatgatagcaagttctttcaaaacctgctagacgaagaggatctggaggacatgatggatgctgaagagtatctcgtgccccaggccttcaatattcctccacccatctacacatctcgcgcacggatagactccaacagatcagaaattgggcacagtcctccgccagcttacactcccatgagcggaaatcagtttgtatatagggatggcggtttcgccgcggagcagggcgtctcggtgccttaccgtgccccaacctccacgatccccgaggctcctgtggcacaaggggccacagctgaaatctttgacgactcttgctgtaacggaaccctgcgcaagccggtcgcaccccatgttcaggaggatagctcaactcagcggtatagtgccgacccaacagtgttcgcgcctgaaagatcccccaggggcgagcttgatgaagaggggtacatgaccccaatgcgagacaaacctaagcaggagtatttgaatcccgtagaagagaacccatttgtgtctcggcgcaaaaatggagatctgcaagccttagacaacccggaataccacaatgctagcaacggccctcccaaggccgaggatgaatatgtcaatgagccactctacctgaacactttcgcaaacacccttggtaaagctgagtacctgaagaataacattctatccatgcccgaaaaggccaaaaaggcattcgacaatcctgattattggaaccattcactcccacccagaagcacactgcagcaccctgactacttgcaggagtatagtacgaaatacttttataagcagaatgggaggatccggccgattgtggccgaaaacccagagtacctgtctgagttctccttaaaacccggaaccgttctccctcccccaccttatcgacacagaaatactgtggtctga

SEQ ID NO: 2175 - RNA, 1461 nt, synthetic construct
  misc_feature 1..1461: note = CCDS46648.1 variant
  source 1..1461: mol_type = other RNA
atgatccagaccgtgcccgaccctgccgctcacattaaggaggcactgagcgtcgtttccgaagatcaatctctcttcgagtgcgcctacggcacaccacatcttgcgaaaactgaaatgacggcttcaagtagctccgactatgggcagacctctaagatgtcgccgagagtgccccagcaggattggctgtcacaacctccagccagggtaacaataaaaatggagtgtaaccccagccaggtgaatggaagtcggaactcccctgacgaatgctctgtcgcaaagggtggcaaaatggtggggagcccagatactgttggaatgaattacggctcctatatggaggagaagcacatgccccctccaaacatgaccacaaatgaacgccgagtgatcgtcccggccgaccccaccttgtggtcaactgatcatgtgcgtcagtggttagagtgggctgtaaaggaatacggtctgcctgacgttaacattctactctttcagaatatcgatgggaaagagctgtgtaagatgacaaaagacgatttccaaagacttaccccaagttataacgcagacattctgttgagccacctccattacctgagggagacgcccctgcctcacctcacttctgatgacgtggacaaggccttacaaaattccccacggctgatgcacgctcgcaacaccggaggcgccgcgtttatcttccccaatacatcagtctatccggaagcaactcagagaataaccacaaggcctgatcttccctacgagccacctcggcgcagcgcctggaccggccatgggcaccccacgccacagagtaaagctgcccagccctctccttccactgtgccaaagacagaagaccagcgaccgcagttggatccctaccaaatcctgggacctaccagctcgagactagcaaacccaggttctggccagattcagctctggcagtttctgcttgagctgttgtccgactcaagtaatagctcctgcatcacttgggaagggacaaacggagagttcaagatgaccgatcccgacgaggtggctaggcggtggggcgaacgtaaatctaagcctaatatgaactatgataaactcagccgcgccctgagatactattacgacaagaacattatgacgaaagtccatggtaagaggtatgcgtacaaatttgatttccacgggatcgcccaagcattacagccacatcccccggagtcaagtctgtataagtacccttccgacctcccatacatgggaagctatcacgctcacccccagaagatgaattttgttgcccctcatcccccagcccttcctgtgacctcttcaagtttctttgctgcacccaacccatactggaatagcccgacaggcggcatatatcctaacactcggctgcccacctcccacatgccatctcatttggggacatactattga

SEQ ID NO: 2176 - RNA, 1359 nt, synthetic construct
  misc_feature 1..1359: note = AAA19786 variant
  source 1..1359: mol_type = other RNA
atgagcgagacccccgcccagtgctccatcaagcaagaaagaatttcttacacacctccagagtcaccggtgcccagttatgctagctccactcctctgcacgtcccagttcccagggcactccggatggaagaggactctatacgccttcctgcccatctgcgattgcagccaatctactggtcgcgtgatgacgtggcgcagtggttaaaatgggctgaaaacgagttctcactgagacccattgatagcaatacgtttgagatgaacggcaaggccctactcctgcttaccaaagaagacttcaggtatcggagtcctcactccggggatgtactgtacgagttgctccagcatatcctgaagcaacgcaaaccaaggattctgttttctccgttctttcaccccggaaatagcatccatacacagcctgaagtgatactccaccagaaccacgaggaggacaattgtgtccagagaactccacggccctccgtggataacgttcatcacaatcctccaaccatcgaattactgcatcgctcacgaagtcccattacaaccaaccacagaccgagccctgaccccgagcaaaggccacttcggtctcctttggataatatgatccgtcgcctgtcccccgcagaaagagcccagggtccaaggccccaccaggagaacaatcatcaggaatcatatcctctaagcgtgagtccaatggagaacaatcactgcccggcttcttccgagagccatcccaagccttcgtctccacggcaagaatccactcgagtcattcagctcatgccctcacctatcatgcacccactgatacttaacccccgccatagtgtggacttcaagcagagcagactgtccgaggatggcttgcacagggaagggaaaccgattaatctctctcaccgggaggacctggcatacatgaaccatatcatggtaagcgtttcacctccagaagaacacgccatgcccattggacgcatcgctgattgtagattactgtgggactatgtgtaccaactccttagtgactccaggtacgagaactttatccgttgggaagataaggagagcaaaattttccggatagtcgaccctaatggcctggcccgattgtggggtaaccataagaatagaacaaacatgacctatgagaaaatgtctagggcgctacgccactactataagctgaatatcattcggaaggagcccgggcagagactcctgtttaggttcatgaaaacgccagatgaaatcatgtcaggacgcactgaccgacttgagcacctggagagtcaggaattggatgagcagatataccaagaagacgagtgctga

SEQ ID NO: 2177 - RNA, 1971 nt, synthetic construct
  misc_feature 1..1971: note = AAH04817 variant
  source 1..1971: mol_type = other RNA
atggccagcaccgactactccacatattctcaggctgcagcccaacagggctactcagcgtatactgctcagcccacgcaggggtacgcccaaaccacacaggcatatggacagcagagttacggtacttatggccaacctaccgatgtgagctacacacaggcccagaccactgctacatacgggcagaccgcatatgccacgtcctacggacaaccaccgactggctataccacacccactgctcctcaggcctactctcagccagtccaaggttatgggaccggagcgtacgacacaaccacggcaactgttacaaccactcaggcctcgtatgctgcccagtcagcatacggcacacagcccgcttaccctgcctatggccaacagccagcggccaccgcacccacgagacctcaggatgggaacaagccaaccgagacaagccagccgcaaagttccactggaggttacaatcagccctctctgggctatgggcagagcaactactcctatcctcaggtgccaggatcataccccatgcaacctgtaaccgctccacccagttatccgcctacaagctactcttccactcagcccacctcatacgaccagagcagttattctcagcaaaatacatacggccagccatccagctatggtcagcaatcgtcttacgggcagcagtcctcatatggacagcaacctcccaccagttacccaccccagactggcagctattcccaggccccttctcagtacagccaacagtcaagttcctacggccagcagagctctttcaggcaagatcacccatcaagtatgggggtgtatggacaggaaagcggtggcttttccgggccgggagagaaccggtctatgtcgggccccgacaatcgcggtcgagggcgtggcggattcgatagaggcgggatgagcaggggaggtcggggcgggggacgcggcggtatggggtccgctggcgaaagaggaggctttaacaaacctgggggaccaatggacgagggtcccgatctcgaccttggccctccagtcgatcccgacgaagattcagacaatagtgccatctacgtgcaggggctgaacgactctgttacgttggatgacttagcagatttctttaagcaatgcggagtggtcaaaatgaataagaggacaggccagccgatgattcatatatatctggacaaagagaccggtaagcctaagggggatgccactgtgagctacgaggacccacccaccgctaaagcggcagtagaatggttcgatggcaaggactttcagggatccaaactaaaggtttcactcgcccggaaaaagcctcccatgaacagcatgcgcggcgggctgccacctcgagagggaagaggcatgcccccaccgcttaggggtgggcctggaggccccggtggcccagggggacccatgggccggatgggagggcgtggcggtgatcgcgggggattccctccaagaggccccaggggttctcggggcaatccttccgggggaggcaacgtgcagcaccgagctggggactggcaatgtccgaatccaggatgcggcaaccagaattttgcctggcgcacagaatgtaaccagtgcaaggcacccaaacctgagggtttcctgccacccccttttccgcccccagggggagatagaggcaggggtggccctgggggaatgcggggcgggcgcggaggcttgatggacagaggtgggcccggaggcatgttcaggggcgggcgtggaggtgaccggggcgggtttcgaggaggcagaggtatggatcgcgggggattcggcggcgggaggcggggaggtccaggcgggcctcccggaccactcatggagcagatgggcggtagacgcgggggaaggggcggcccggggaagatggacaaaggagaacatcgacaagagcggcgtgatagaccttattga

SEQ ID NO: 2178 - RNA, 1998 nt, synthetic construct
  misc_feature 1..1998: note = AEA07595 variant
  source 1..1998: mol_type = other RNA
atgggccagaccgggaagaaaagcgagaagggacccgtgtgctggagaaaaagggtcaagtccgaatacatgcggctgcgccaactcaaacgattccgtagagccgacgaggttaagtctatgttttcaagtaacaggcagaagatccttgaacggacagagattctgaatcaggaatggaaacagcgcagaatacaacctgtgcacatcttgactagcgtatcctctttaaggggtacgcgggaggtggaggatgaaaccgtcctgcataacattccatatatgggcgacgaggtgctagatcaggacgggacattcatcgaagaactcattaagaattacgatggaaaagttcacggcgaccgcgagtgtggttttatcaacgatgaaatattcgtggagctggtcaatgctcttgggcagtataacgacgatgacgatgacgatgacggagacgatccggaggagcgagaagagaagcagaaagacctggaggatcatagagacgataaggaatcgaggccccctcggaagtttccatcagacaaaatcttcgaggcaattagcagtatgtttcccgataagggcactgccgaagagttgaaagaaaagtacaaagagctcaccgagcaacagctgcctggcgcgctgccacccgaatgcacacctaatatcgacgggccaaacgctaagtccgtgcagcgtgagcagtctctccacagcttccataccttattttgtcgcagatgcttcaaatatgattgttttctgcacccgttccacgccactcccaatacatacaagaggaagaacaccgaaacggcacttgacaataaaccttgcggaccacaatgttatcagcatttggagggtgccaaggaatttgctgcagccctgactgctgagcggattaaaacaccccctaagcgaccaggcgggcgcagaaggggacggctacccaacaattcctcacgcccgagtacccctactatcaacgtactcgagagcaaagataccgactctgacagagaagccggcacagagaccggtggggaaaataacgataaggaggaggaagagaagaaagacgaaacgtcctcaagcagtgaggcgaactctaggtgccagactcccataaagatgaaaccaaatattgaacctcccgagaacgttgagtggtccggagcagaagccagcatgttccgtgtgctgatcggcacatactacgataatttctgtgctattgcccggcttatcggcaccaagacttgccgacaagtctatgagtttagagtgaaagaatcgtctatcattgcaccagctcccgccgaggacgtggatacacctccaaggaagaagaaacgcaagcaccggctgtgggcggcccattgtagaaaaatacagttgaagaaagggcagaacaggttcccgggatgccgctgcaaggcacagtgtaataccaagcaatgcccctgttacctcgctgtccgagaatgcgaccctgatctgtgtttaacgtgcggtgccgctgaccactgggattccaaaaacgtttcatgtaagaattgcagtatccagcggggcagcaaaaagcatctgctccttgccccatccgacgtggcagggtggggaatttttatcaaagatcccgtacagaagaacgagttcatatctgagtattgtggcgaaattatcagccaggacgaggccgatcgtagaggtaaagtgtacgacaagtatatgtgctcatttctgttcaatttgaacaatgactttgtcgtggatgctaccaggaaggggaacaaaatccgcttcgcgaatcacagtgttaaccctaattgttacgcaaaggtgatgatggtcaacggcgaccaccggattggaatctttgccaaaagagctattcaaacaggcgaggaactattctttgattataggtactcccaggccgacgcactgaagtacgtggggatagaacgagagatggagatcccatga

SEQ ID NO: 2179 - RNA, 1005 nt, synthetic construct
  misc_feature 1..1005: note = EAW80068 variant
  source 1..1005: mol_type = other RNA
atgggccagaccgggaagaaaagcgagaagggacccgtgtgctggagaaaaagggtcaagtccgaatacatgcggctgcgccaactcaaacgattccgtagagccgacgaggttaagtctatgttttcaagtaacaggcagaagatccttgaacggacagagattctgaatcaggaatggaaacagcgcagaatacaacctgtgcacatcttgactagcgtatcctctttaaggggtacgcgggagtgttcggtgacctcagatctggacttcccaacacaggtcattccgctaaagactctcaacgctgtggcaagcgttcccatcatgtatagttggtcccctctgcagcagaattttatggtggaggatgaaaccgtccttcataacattccatacatgggcgacgaggtgctggatcaagacgggacattcatcgaagagttgatcaaaaattatgatggaaaggtacacggcgaccgcgagtgcggttttataaacgatgaaattttcgttgagctcgtgaatgccctggggcagtacaacgacgatgacgatgacgacgatggagacgatcccgaagaacgagaagagaaacagaaggacctggaggatcatagagacgataaggaatctaggcctccacggaaatttcccagcgacaagatcttcgaggcgatttcctcaatgtttcctgataaaggcaccgctgaggagctcaaggaaaaatataaggagttaactgagcagcaactgccaggcgcccttccgcccgaatgtacacctaatatcgacgggccaaacgcaaaaagtgtccagcgtgagcagagcttgcactctttccataccctgttttgccgcagatgtttcaagtacgattgctttctacaccccttccacgccacgcctaatacttataagaggaaaaacaccgaaacagctctcgacaataagccatgtggaccccaatgctaccagcatctgccgcttctgcctcggaactga

SEQ ID NO: 2180 - RNA, 195 nt, synthetic construct
  misc_feature 1..195: note = CCO13726 variant
  source 1..195: mol_type = other RNA
atgcccctggtgaacatcatgatgatgaccatgatgatgatggagacaattctcaagaaagaaaagaaaagcagaaagatatggaggatcactgagatgattaaaaaggccgctcaccttggcaatttcctgttgatcaagtttttaaaacctttcccacagtgctttcaaattcgggcacagcagaagaactga

SEQ ID NO: 2181 - RNA, 2241 nt, synthetic construct
  misc_feature 1..2241: note = AAC51520 variant
  source 1..2241: mol_type = other RNA
atgggccagaccgggaagaaaagcgagaagggacccgtgtgctggagaaaaagggtcaagtccgaatacatgcggctgcgccaactcaaacgattccgtagagccgacgaggttaagtctatgttttcaagtaacaggcagaagatccttgaacggacagagattctgaatcaggaatggaaacagcgcagaatacaacctgtgcacatcttgactagcgtatcctctttaaggggtacgcgggagtgttcggtgacctcagatctggacttcccaacacaggtcattccgctaaagactctcaacgctgtggcaagcgttcccatcatgtatagttggtcccctctgcagcagaattttatggtggaggatgaaaccgtccttcataacattccatacatgggcgacgaggtgctggatcaagacgggacattcatcgaagagttgatcaaaaattatgatggaaaggtacacggcgaccgcgagtgcggttttataaacgatgaaattttcgttgagctcgtgaatgccctggggcagtacaacgacgatgacgatgacgacgatggagacgatcccgaagaacgagaagagaaacagaaggacctggaggatcatagagacgataaggaatctaggcctccacggaaatttcccagcgacaagatcttcgaggcgatttcctcaatgtttcctgataaaggcaccgctgaagaactcaaggaaaaatataaggagttaactgagcagcaactgccaggcgcccttccgcccgaatgtacacctaatatcgacgggccaaacgcaaaaagtgtccagcgtgagcagagcttgcactctttccataccctgttttgccgcagatgtttcaagtacgattgctttctacaccccttccacgccacgcctaatacttataagaggaaaaacaccgaaacagctctcgacaataagccatgtggaccccaatgctaccagcatctggagggtgcaaaagagttcgccgctgcccttactgcggagcggataaagaccccgcctaaacgacccggcgggcgcagaaggggacggctgccaaacaattcctcacgccctagcacacccaccattaacgtgttggagagtaaggacacggattctgacagagaagcaggcactgagacaggtggggaaaacaatgataaggaggaggaagagaaaaaggacgaaacctccagctcgtctgaggccaactccaggtgtcagactccaatcaaaatgaagcccaatattgaacctccagagaacgtggagtggtcaggagctgaagccagtatgtttcgtgtcctcatcggcacatactatgataatttctgcgcaatcgctcggctgattggcaccaaaacgtgtcgacaggtttacgagtttagagtgaaggaaagctccataatcgccccggcgcccgccgaggacgtagatacccctccaaggaagaaaaagcgcaaacaccggttatgggcagctcattgcagaaagattcaactgaaaaaggacgggtctagcaaccacgtgtataattaccagccctgcgatcaccctaggcagccatgtgactcaagttgcccctgtgtcatcgcccagaacttctgcgaaaagttttgtcaatgctccagcgagtgtcagaatcgcttcccgggatgccgatgtaaagctcagtgcaacacaaagcagtgtccttgctatctcgccgtgcgggagtgcgatccagacctttgtctgacttgcggtgcagccgatcattgggactctaaaaatgtttcatgtaagaactgcagtatacaacgtggcagcaaaaagcacttgctactggctccctccgacgtggcggggtggggaatttttatcaaagatcctgtccagaagaatgagttcatctctgagtactgtggcgaaattatctcgcaggacgaggcagatagaaggggtaaggtgtatgacaaatacatgtgcagctttctcttcaacctgaataacgattttgtagttgacgccacccgcaaggggaacaaaattcggttcgctaatcattccgtgaaccccaattgttacgccaaggtcatgatggtgaacggcgatcacagaataggaatctttgcaaaaagggccattcagacaggcgaggaacttttcttcgactatcgatactcacaagctgatgccctgaagtatgtcgggatcgagcgcgaaatggagatcccatga

SEQ ID NO: 2182 - RNA, 2124 nt, synthetic construct
  misc_feature 1..2124: note = AEN79481 variant
  source 1..2124: mol_type = other RNA
atgggccagaccgggaagaaaagcgagaagggacccgtgtgctggagaaaaagggtcaagtccgaatacatgcggctgcgccaactcaaacgattccgtagagccgacgaggttaagtctatgttttcaagtaacaggcagaagatccttgaacggacagagattctgaatcaggaatggaaacagcgcagaatacaacctgtgcacatcttgactagcgtatcctctttaaggggtacgcgggaggtggaggatgaaaccgtcctgcataacattccatatatgggcgacgaggtgctagatcaggacgggacattcatcgaagaactcattaagaattacgatggaaaagttcacggcgaccgcgagtgtggttttatcaacgatgaaatattcgtggagctggtcaatgctcttgggcagtataacgacgatgacgatgacgatgacggagacgatccggaagaacgagaagagaagcagaaagacctggaggatcatagagacgataaggaatcgaggccccctcggaagtttccatcagacaaaatcttcgaggcaattagcagtatgtttcccgataagggcactgccgaagagttgaaagaaaagtacaaagagctcaccgagcaacagctgcctggcgcgctgccacccgaatgcacacctaatatcgacgggccaaacgctaagtccgtgcagcgtgagcagtctctccacagcttccataccttattttgtcgcagatgcttcaaatatgattgttttctgcacccgttccacgccactcccaatacatacaagaggaagaacaccgaaacggcacttgacaataaaccttgcggaccacaatgttatcagcatttggagggtgccaaggaatttgctgcagccctgactgctgagcggattaaaacaccccctaagcgaccaggcgggcgcagaaggggacggctacccaacaattcctcacgcccgagtacccctactatcaacgtactcgagagcaaagataccgactctgacagagaagccggcacagagaccggtggggaaaataacgataaggaggaggaagagaagaaagacgaaacgtcctcaagcagtgaggcgaactctaggtgccagactcccataaagatgaaaccaaatattgaacctcccgagaacgttgagtggtccggagcagaagccagcatgttccgtgtgctgatcggcacatactacgataatttctgtgctattgcccggcttatcggcaccaagacttgccgacaagtctatgagtttagagtgaaagaatcgtctatcattgcaccagctcccgccgaggacgtggatacacctccaaggaagaagaaacgcaagcaccggctgtgggcggcccattgtagaaaaatacagttgaagaaagacgggtcctcaaaccacgtctacaattatcagccgtgcgatcaccccaggcagccttgcgacagtagctgtccatgcgttatcgcacaaaacttctgtgaaaagttttgccagtgttcctctgagtgccagaatcgcttccccggatgtcgatgcaaggctcagtgtaacaccaaacaatgcccttgttacctcgccgtgcgggagtgcgatccagacctgtgcttaacgtgtggtgctgccgatcattgggacagcaagaatgtatcatgcaaaaactgtagtattcagcgtggctccaagaaacatctgctccttgcacccagcgatgtggccgggtggggaatctttataaaggacccggtccagaaaaatgagttcatttctgagtattgcggcgaaatcatctcacaggacgaggctgatagaaggggtaaggtgtacgacaagtatatgtgtagttttctgttcaacttgaataacgattttgttgtggacgcgacccgcaaagggaataagattcggttcgcaaaccacagcgtcaaccctaattgctacgccaaagtgatgatggtaaacggcgatcacagaatcggaatttttgctaagagggccatacaaacaggcgaggagctattctttgactaccgatattcccaggcagatgccctgaaatacgttgggatcgagcgcgaaatggagattccatga

SEQ ID NO: 2183 - RNA, 399 nt, synthetic construct
  misc_feature 1..399: note = AAB87141 variant
  source 1..399: mol_type = other RNA
atggtggaggccttctgcgctacctggaagctgacaaacagccagaattttgacgaatacatgaaagcactcggcgtcgggttcgccactagacaagttggaaacgtgacgaagcccaccgtaatcatttcccaggagggtgataaagtggtcataaggacactttctacttttaagaataccgaaatctcattccagctgggcgaggaatttgacgagacaaccgcggatgaccggaactgtaaaagtgtggttagcttggatggggacaagttagtgcacattcagaagtgggatggaaaagagactaatttcgtccgcgaaatcaaggacggcaaaatggtgatgacactgacctttggtgatgtagttgctgtgcgacattatgagaaggcctga

SEQ ID NO: 2184 - RNA, 765 nt, synthetic construct
  misc_feature 1..765: note = CAA36870 variant
  source 1..765: mol_type = other RNA
atgtggcagctgctccttcccaccgccctgttgttactggtgagcgctggcatgagaacagaggacctacctaaggcagtcgttttcctcgaaccacaatggtacagggtgctggagaaagattccgtaactcttaagtgccagggggcctattctccggaagacaactcaacgcagtggtttcacaatgagagtctgatcagctcccaggcgtcttcgtacttcattgatgctgccaccgtggacgattcaggagaatatcggtgtcaaacaaacttgagcactctcagtgaccccgtccagctggaggtgcatataggttggctgctcttacaggcacctcgctgggtttttaaagaggaagatccaatccatctgcgatgccactcctggaagaataccgcccttcacaaagtgacatacttgcagaacggcaaggggcgtaagtatttccatcacaattctgacttttacattcccaaagctaccctgaaggatagcggatcctatttctgtagaggcctatttggtagtaaaaacgtctcaagcgagactgtgaatatcacaattacccaagggctcgcagtatctacgatctcctcattctttcctccaggataccaggttagcttctgcctggtgatggtccttctgtttgccgtggacactggcttgtacttcagtgtgaagaccaacataaggtcttccacacgggattggaaagaccacaagtttaagtggcgcaaagatccccaggacaagtga

SEQ ID NO: 2185 - RNA, 873 nt, synthetic construct
  misc_feature 1..873: note = CCDS1232.1 variant
  source 1..873: mol_type = other RNA
atgggcgggggagccggtgagagactgttcaccagctcctgcctcgtgggccttgtccccctggggttgaggatctctttagttacatgtcctctgcagtgcggaattatgtggcaactactcctgccaactgcccttctgttgctcgtgtcagcaggcatgcggacggaagacctgccgaaggccgtagtgtttctggagccccagtggtaccgcgtcctcgaaaaagatagtgtgaccttaaagtgtcagggtgcgtatagccctgaggacaactccacacagtggttccacaatgaatctctgatatcgtcacaagctagcagttactttatcgatgccgcaactgttgacgattccggggagtatcgatgccagaccaacctttctacattgagcgacccagtgcagctggaggtccatattggatggctactcctgcaggctccccgttgggtgttcaaagaagaggatcctatccaccttagatgtcattcctggaagaataccgctctgcacaaagtaacttacttgcaaaacggcaagggcaggaagtattttcatcacaattcagacttctacattccaaaagcaacactcaaggatagtgggagctatttttgccggggactgttcggttctaaaaacgtttcctcagaaaccgtgaatatcacgataactcagggcttagccgtcagcaccatcagttctttctttccccctgggtaccaggtgtccttttgtctggtgatggtcctccttttcgctgttgacacaggactgtactttagcgtgaagactaacattcgctcgtctaccagagattggaaagaccacaagttcaagtggaggaaagatccacaggacaagtga

SEQ ID NO: 2186 - RNA, 807 nt, synthetic construct
  misc_feature 1..807: note = AAH74858 variant
  source 1..807: mol_type = other RNA
atgagcctgtccttcctccttctgttgtttttctctcacttaatcctgtcagcctgggctcatggcgaaaagagactagcacccaaagggcagcctggaccagccgcgaccgacaggaacccgcggggtagtagctcccgccaatcttcgtcaagcgctatgagttcctctagcgcctcctcaagtcccgcagccagcctcggctctcaggggtccggactggaacagagctcatttcagtggagtccttctggccgacgtacaggttccctttactgcagagtggggattggattccatctgcaaatatatccagatggcaaggtcaatggcagccacgaggctaacatgttgtcggttctcgaaatctttgcagtgtctcaggggattgtaggaatcaggggtgtgttctccaataaatttctggccatgtcaaagaaaggcaagctgcacgctagtgccaagttcactgacgattgtaaatttcgggagcgcttccaggaaaacagctacaatacgtatgcgtccgcaattcatagaaccgagaagacagggagggagtggtacgtcgccctcaacaaacggggaaaggctaaacgcggctgctctccccgagtgaagcctcagcacatcagcactcactttttaccaagattcaagcaatcagaacagcccgagctgagttttaccgttacagtgcctgagaaaaagaaaccaccgtcccccataaagcctaaaatcccacttagcgcccccaggaagaataccaactctgtcaaatatcggttgaagttccgtttcggttga

SEQ ID NO: 2187 - RNA, 117 nt, synthetic construct
  misc_feature 1..117: note = AAB06462 variant
  source 1..117: mol_type = other RNA
atgagcaccagatgcggcgaggccgggagggctcggggaacacagccccaccgcggttaccgagcacaaaaccagccttataagatgcatctgggcccaccgcgtctcgaagagtga

SEQ ID NO: 2188 - RNA, 2466 nt, synthetic construct
  misc_feature 1..2466: note = AAA59470 variant
  source 1..2466: mol_type = other RNA
atggtgagctggggcagattcatctgcctggtcgttgtgaccatggccacactctcccttgctaggccctctttttcactggtagaggacactacgttggaacctgaggaaccaccgaccaagtaccagattagtcaacccgaggtgtatgtcgcagcccctggggaatccttagaggtgcggtgtctgctaaaagatgcggctgttatatcctggacaaaggacggagtgcacctcggtccaaacaatcgcactgtcctgatcggcgagtaccttcagattaaaggggccacaccccgagattctggactgtatgcatgcaccgcctcgcgtaccgtggactcagaaacttggtacttcatggtaaacgttacagatgctatcagcagtggcgacgatgaggacgataccgacggtgcagaagattttgtgtccgaaaattctaacaataagagagccccttattggacgaacactgagaaaatggaaaagaggttgcatgctgtcccagccgcgaataccgtgaagttccggtgtcccgcagggggaaaccctatgccaacaatgcgctggctcaaaaatggcaaggagtttaaacaggaacacagaattggcgggtacaaggtgaggaaccagcattggagcctgatcatggagtccgtcgttccgtcagacaaaggaaattatacttgcgtggtagaaaacgagtacggtagtataaatcacacctaccatctggatgtggtcgagcggagcccccaccgccctatcctccaagccggcttaccagctaacgcctctacagtggttgggggagacgtggagttcgtctgtaaggtgtattccgacgcacagccccacattcagtggatcaagcatgtagagaaaaatggctcaaagtacggtcctgatgggctgccatatcttaaagttttgaaggctgccggagtgaacaccacggacaaagaaattgaggtcctgtacatccgaaacgtgacttttgaagatgcgggcgagtatacatgcctagccggcaatagcatagggattagtttccactctgcatggctcaccgtcctgcccgctccgggaagagagaaggaaatcactgcctcccctgactaccttgagattgctatctattgtatcggtgtgtttctgattgcctgcatggttgtgacagtaatattgtgtaggatgaaaaacaccacgaagaagcccgatttcagctcgcagccagcagtccataaactcaccaagcggatccctctgcgtcgccaagtgacagtttctgccgaatcctcaagtagcatgaatagcaacactcccttagtgagaattaccacaaggctgtctagcactgctgacaccccaatgctcgcgggcgtctcagagtacgaacttcccgaggatcctaaatgggagtttccacgggacaagctgacattggggaaaccgctaggagaaggctgcttcggtcaggtggtaatggcagaggccgtggggatcgataaggacaagcccaaagaagctgttaccgtcgccgtgaagatgctgaaagatgacgcaactgagaaggacctcagtgatctggtgtccgagatggaaatgatgaaaatgataggcaagcacaagaatattatcaaccttctgggagcctgtacgcaggacggccctttgtacgtcatcgttgagtatgctagcaaagggaatctccgagaatacctgcgcgccagaaggccacccggaatggagtattcttacgatattaaccgggtgcctgaggaacagatgacatttaaggacttagtgtcatgcacctatcaactggcacgcggtatggagtacctagcgagtcagaaatgcatccacagagatctcgctgccaggaatgtactggtcactgaaaacaatgtgatgaagattgcagacttcggccttgcccgtgatataaacaatatcgactattacaaaaagaccacaaacgggcggttgccagttaagtggatggctcccgaggccctgttcgatcgagtgtacacccatcagagcgacgtctggtcctttggagtgctcatgtgggaaattttcactctgggcggttctccgtatcctgggatcccagttgaggaactttttaaactgttgaaggagggccacagaatggataaacccgcaaattgtacaaacgagctctacatgatgatgagggactgctggcatgctgtgccttcgcaacgccccacgttcaagcagctggtagaagatttagaccggatcctgaccctaactacaaacgaggaatatctcgacctgagccagccacttgagcagtactccccttcatatcccgataccagaagttcttgtagctccggagacgattcagtctttagcccagacccgatgccttacgaaccctgcttgccacaatatccccacattaatggctctgtgaaaacatga

SEQ ID NO: 2189 - RNA, 1908 nt, synthetic construct
  misc_feature 1..1908: note = EAW74574 variant
  source 1..1908: mol_type = other RNA
atggcaccccctctgctccttctgttgttagctagcggcgcagccgcgtgcccactgccgtgtgtgtgccagaacctatccgagtctctctcaaccctgtgtgctcacagagggcttctgttcgttccccctaatgtcgacaggcggacagtggaattgcgcctcgccgataactttatccaagcactgggaccacccgacttccgaaatatgactggtctggtagatctcacgttaagtcgtaacgccattaccagaataggcgctagggcatttggggacctggagagccttcggtccttgcatctggatggaaatcgcctagtggaactcggcacaggttctctgagagggcctgtcaaccttcagcacctgatcttgtcgggaaatcagctcggcaggattgccccaggcgctttcgacgattttctggagtcattagaagacctggatctcagctacaacaatcttcgccaggtgccctgggccgggatcggagcgatgcctgcactgcatactttgaacctagaccacaatctgattgatgccctcccaccgggtgctttcgcccaactgggccagcttagtcggctggacttgacctccaaccgactcgcaacactggctcccgatcctttattttctagagggagggacgccgaggcgagcccagcacccctggttctatccttctcaggaaatcctctccattgcaactgtgagctgctttggttgcggcgtctggcccgcccagacgatctcgaaacctgcgctagtcccccgggcctggccggtagatatttttgggctgtgcctgagggggagttcagctgtgaacccccacttatcgccaggcacactcagcggctgtgggtcttggagggacagcgagcaacactccgctgcagagccctgggcgaccctgctcccaccatgcactgggtgggcccagatgacaggttagtaggaaattcttcccgggcgcgcgcatttcccaacgggacgctggaaataggtgttactggcgccggggatgctggaggctacacctgtatcgccacaaaccctgccggtgaggccactgctagagtggaactaagggtcctcgccctgccacatgggggcaattcaagcgcagagggaggccgtccggggcccagtgacattgcggcttctgcccggaccgcagccgaaggagagggtacacttgagtccgaacctgctgtgcaagtgaccgaggtcacggccactagcggcttggtttcgtgggggccaggacgacccgcagatcctgtgtggatgttccagatccagtataactcttccgaagacgagacactgatttacagaatcgtaccagcttcaagtcaccattttctcctgaagcacttagtgcccggcgccgattatgacctgtgccttttggcgctcagcccggccgctggtccttccgatctgaccgcaactaggctactggggtgtgcccacttctctacactcccagctagccccctgtgccatgcccttcaggcacacgtcttgggcggaaccctgacggtggcggttggcggggtgttagtcgccgctctcctggtgttcaccgtagcccttctggttcgcggacggggtgcaggcaatgggagattgcctctcaaactgtcacatgtgcaaagtcagacaaacggaggcccctccccaactcctaaggctcatcccccaaggagcccgcctccccgcccacagcgatcttgctcactagacctgggtgacgccgggtgttacggctatgcacggcgtctcggaggcgcctgggctagaaggagtcacagcgtccacgggggactgcttggcgcgggttgccgcggggtgggaggctccgccgaacggttggaggagtctgtcgtgtga

SEQ ID NO: 2190 - RNA, 3297 nt, synthetic construct
  misc_feature 1..3297: note = EAW96782 variant
  source 1..3297: mol_type = other RNA
atgccccctagacagccaccgaggcaagccggcgggggactgagccgggagttcggtaagctccttcccgctctgtcccactctcctttgggcgggttaggatcaggcagtggtagcgtggcaccagggcagggacgcgccggcgcgatgggctcccgaacccccgaatctcctctgcatgctgtccagctacgttgggggccaagaaggcggccccctctcctgccacttctgttgctcctgctgccgccccctccacgcgttggaggttttaacctcgacgccgaggcacccgccgtgttatcgggccctccagggtcattctttggattcagcgtagaattttacagacccggcacagatggtgtgagtgtcctggtgggggctccgaaagcaaatacttcccagcctggagttcttcaaggcggcgccgtgtatttgtgcccctggggagcttctccaacgcagtgtacccctatcgagttcgacagcaaggggtccaggctgctagaatcaagtctctctagctccgagggtgaggaacccgtcgagtacaaatcactgcagtggtttggcgccacagtgcgggcgcacgggagcagtattcttgcatgcgccccactgtattcttggcgcactgaaaaggagcccttgtccgatcctgtaggaacctgttacctcagcacagacaacttcacccgaatactggagtatgctccatgcagatcggatttttcttgggccgcaggccagggttactgtcaagggggcttctccgctgaatttactaaaacaggaagggttgtgttaggcgggccgggatcatatttctggcagggtcagatcctgagtgccacccaggagcaaattgcggaaagctactaccccgagtatctcatcaatcttgtccagggccagctgcaaacgcggcaggcctcctctatttacgacgatagctatttggggtactcagtggcagtgggagaatttagtggcgacgatactgaggacttcgtcgctggtgttcctaaggggaacctaacctatggctacgtgacaatcctgaatggatccgatatacgtagcctctataacttctctggcgagcagatggcctcatactttgggtacgctgtagccgcaactgacgtgaatggagatggtctggacgaccttctggtcggcgccccattgctcatggatcgcacccccgacgggagacctcaggaagtgggaagggtttatgtgtacctgcaacatccagctggcatcgagcccacaccgaccttaacgctgactggtcacgatgagttcgggcggtttggcagtagcctaacacctctcggagacctggatcaggacggctataacgatgtcgcgattggggcaccattcggaggcgagacccagcagggtgtggtatttgttttccccgggggacctggcggtcttggctccaagccctctcaagtgttgcagccactgtgggccgcttcgcatactcctgactttttcgggagcgccctccgaggaggccgcgatctggacgggaatggataccccgatcttatcgtcggctcctttggtgtggacaaagcagtcgtgtatagagggaggccaattgtttcagccagtgcttctctgacaatcttcccggccatgtttaaccctgaagaacggagctgctccttggagggaaatcccgtggcatgtataaacctctcattctgcctgaatgcgagcggcaagcacgtagctgactctattggttttaccgtcgaattacagctggattggcagaaacaaaagggcggggtgcgcagagccctattcctcgcatccaggcaggccacgctgacccagacacttttgatccagaacggagctcgtgaggactgtcgggaaatgaaaatttacctgcgaaatgagagtgagttcagagataagctcagcccaatccacatcgccctgaacttttctttagacccccaagcacctgttgattcccatggcctgaggccagcccttcactatcagtcaaagagtcgcattgaagacaaagctcagatattgctcgattgcggggaggacaacatctgtgtgcccgatctgcaactagaagtcttcggagagcagaatcatgtgtacctgggcgacaagaacgcgctcaatctgacttttcacgcccagaacgtaggtgaagggggagcttacgaggcagagcttcgggtgaccgcccctccggaagctgagtatagcggcttggttagacacccaggtaatttctcgtccctgtcttgcgattactttgccgtcaaccagagcaggttactcgtgtgcgacctgggcaatcccatgaaagcaggggcgtcactttggggaggcctgcgcttcacagtgcctcatttgcgagatactaagaaaaccattcaatttgacttccagatcctcagtaagaacctgaataactcccagtctgacgtcgttagctttcggctatccgtggaagcccaggctcaagtgacactgaatggggtatcaaaaccagaggccgtcctcttccccgtgagcgattggcaccctcgtgaccagccgcagaaggaagaggatctgggacccgcagttcatcacgtgtatgagcttataaaccagggcccaagttctatttcccaaggtgtcttggaactgagctgtcctcaggctttagaggggcagcaactcctgtacgtgaccagagttactggacttaattgcacgacaaaccatcccatcaatccaaagggcctggaactagaccctgagggctcgctccaccaccagcagaaaagggaagccccctcacgctctagtgcatccagcgggccacagatcctgaagtgtccggaggccgagtgctttcggttgagatgtgaactgggacctttacatcaacaggagtctcagagcctccagctgcacttcagggtgtgggctaaaacctttcttcaacgagaacatcagcccttctccctgcagtgcgaggcggtatataaggccttgaaaatgccataccgcattctcccccggcagctgcctcaaaaggaaagacaggtcgcaactgctgtgcagtggaccaaggccgagggttcatatggcgtgccactatggatcattatactggccatccttttcgggctcctgttgctgggattactcatttacatcctgtacaaacttggctttttcaagaggagtctgccctatggtacagctatggagaaagcacagttgaagcctccggccaccagcgatgcgtga

SEQ ID NO: 2191 - RNA, 3597 nt, synthetic construct
  misc_feature 1..3597: note = EAX08808 variant
  source 1..3597: mol_type = other RNA
atggccgagcatccccctctgctcgacaccacacagatccttagctccgatatttctctgttgtcagctccaatagtgagtgcagacggcactcaacaggtcatcttagttcaggtgaacccgggggaagccttcacgattagaagggaggatggacagtttcaatgcatcaccggtcccgcgcaggtacctatgatgagcccaaatggctccgtgccccctatttacgtcccacccgggtatgctcctcaggtgatcgaagacaacggagttcggcgcgtggtcgtggtaccacaggccccggagttccaccccggctctcacacagttctgcatcgatcgcctcacccacccctacctggttttataccagtgcccactatgatgccgcctcccccacgtcatatgtactcacctgtcaccggggcaggagatatgacaacccaatatatgccccagtaccagagcagtcaggtgtatggcgacgtggatgcccactccactcacggcagatctaatttcagggacgaacggagctccaagacatacgagcgcctccaaaagaagctgaaagatagacaggggacccagaaggacaaaatgtcaagtccacccagctctcctcaaaagtgtccatccccgatcaacgagcataatggacttattaagggtcagatcgctggcgggattaacacgggatcagcaaaaatcaagagcggcaaaggtaaagggggaactcaggtcgataccgaaatagaggaaaaagacgaggagacaaaggcctttgaagctctgttgagtaatattgttaagcccgtggcctctgatatccaggcgaggactgtagtgctcacctggtcccctccaagctcgctgattaacggcgagacagacgaatcttccgtccccgagctgtatggctacgaagtgctcatctcaagtaccgggaaagacggaaagtacaaaagcgtttatgtgggtgaggagacgaatatcactttaaacgatctgaagcctgcaatggactaccacgccaaagtccaagctgaatataattccattaagggcacaccatctgaggccgaaatattcaccactcttagctgcgagcccgatatcccgaaccctccacggattgcaaatcgcaccaaaaactcattgaccctgcagtggaaggctcccagtgacaatgggtccaagatccagaactttgtgctagaatgggatgagggaaaaggcaacggtgagttctgtcagtgctacatggggagccaaaagcagtttaaaataacgaagctctctcctgccatgggctgtaaattccgactgtcagcgagaaatgactatggaaccagtggctttagcgaagaggtactttactatacatccgggtgcgccccctctatgccagcatcgcctgttctgactaaggctggaattacctggttgagcctccagtggtccaagccctcaggtacaccaagtgatgaaggcatctcttacatcctggagatggaagaggagactagcgggtacggattcaaaccgaagtatgacggcgaagatttagcctacaccgtgaaaaacctgaggcggtccacaaagtataaatttaaggtcattgcttacaattcagagggtaagagcaacccttctgaagtggtcgagttcaccacttgtcccgacaaaccagggatccccgtgaagccttccgttaaaggcaagattcatagtcacagcttcaaaataacgtgggatccacccaaggacaatggaggcgccacaatcaacaagtatgtggtagagatggcagaagggtctaatggaaacaaatgggagatgatttactccggtgccacccgtgaacacctctgcgaccgccttaatcctggctgtttttatagactgagggtctactgcatctcagatgggggacagagtgctgtgagcgagtcgttgctagttcaaactccggcggtgccacccggcccttgtctgccaccccggctccagggtcgacctaaggcaaaagaaatccagctgcgctgggggccgccccttgtcgacggcggatccccaatttcttgctacagcgtggagatgtcacctatagagaaggatgaacccagagaggtatatcagggcagtgaagtggagtgcaccgtttcctctctgttgccagggaaaacatacagcttcaggctccgggccgctaacaagatgggatttggccctttctccgaaaaatgtgacatcaccactgcccccggtccaccggatcaatgcaagcctccccaggtcacatgtcgctcagcaacgtgcgcccaggtgaattgggaggtgccactgagcaacgggaccgacgtcactgagtatagattagaatggggaggcgttgagggtagtatgcaaatttgttactgcggccccgggctgtcttatgaaatcaagggactatcccctgctacaacctactattgtagggtgcaggccctcagcgtggtaggcgcagggccattttcggaggtcgtggcgtgcgttacacccccttcagtgccgggaattgtcacttgtctgcaggaaatctctgatgacgagatagagaatccacattacagtccctccacatgccttgctatcagctgggaaaaaccttgtgatcacggctctgagattttggcctacagcatcgacttcggtgataagcagtccctgacggtggggaaagttacctcatatattatcaacaatctccaacccgacacaacttaccgtatacggattcaggcactgaacagtcttggagccggcccatttagccatatgatcaagctgaaaaccaagcctttgcccccagatcctccgcgactcgaatgcgtggctttctctcaccagaacctgaagttaaaatggggtgagggcacacccaagactctgtccaccgactcaattcagtatcatctacaaatggaggacaaaaatgggagatttgtaagtctctacaggggaccatgccacacgtataaggtccagcgcctgaacgaaagcacatcctacaaattctgtatccaggcctgcaatgaggcaggcgaagggcctctttctcaggagtatatatttaccactcccaagtcggtgccagctgccttgaaggcgcctaaaatcgaaaaggtgaacgatcacatttgtgagatcacatgggagtgcctgcaacccatgaaaggagacccggtcatttacagcctccaggttatgctgggcaaggattcagagttcaaacagatctacaagggtccagactccagttttcggtattctagcttacaactgaattgtgaatacagattcagggtgtgcgccatacgccagtgtcaggattcccttgggcatcaggacttggtaggaccttattcaaccactgtcctcttcatttctcaacgaaccgaacccccagctagcacaaaccgggatacggtggagagtacccgtactagaagggcactgtccgacgaacagtgcgccgctgtgatcctagttctgtttgccttctttagcatcctcattgcattcatcattcagtactttgtgataaagtga

SEQ ID NO: 2192 - RNA, 3429 nt, synthetic construct
  misc_feature 1..3429: note = EAX08809 variant
  source 1..3429: mol_type = other RNA
atgagcggccccgcccaggtgcctatgatgtccccaaacgggtctgtcccgcccatctacgttcctccaggatatgctccccaagtgattgaggacaatggtgtaagaagggtggtcgtggttcctcaggcaccagagttccaccccggctcacataccgtgctgcaccggagtcctcatccaccgctccccgggtttatacctgtcccaacaatgatgccccctccaccccgccacatgtacagcccggtgactggagccggcgatatgacgacccagtatatgcctcagtaccaatcctctcaggtatatggtgacgttgatgcgcattcgacacacgggcgatcaaacttccgtgacgaaagaagcagtaagacttacgaaaggcttcagaaaaagctgaaagatcggcagggaacccaaaaggacaaaatgtcctctcccccaagctcccctcagaagtgcccctcaccaatcaatgagcacaacggcttgattaagggccagatcgctgggggaattaatacaggtagtgccaaaatcaagagcggcaaagggaagggaggcacccaggtggatactgaaatagaggagaaagacgaagagacaaaggcatttgaagccttactgtctaacatcgtcaagcccgtggcttccgatattcaagcacgcaccgtggtcctaacgtggtcacctccaagcagtctcatcaatggtgagactgacgagtcttccgttccggaactgtatgggtacgaggtgcttattagctcgaccggaaaagatggcaagtacaaatctgtatatgtgggcgaagagacaaacatcactctgaatgacttgaagcccgccatggattaccatgctaaagtccaggccgaatataactccataaaggggaccccttcagaggcggagattttcacaaccctcagttgtgaaccagacatccccaatcctccaagaattgcaaacaggacgaaaaatagcctgactctgcagtggaaggccccctccgacaacggatctaagatccaaaattttgtgctcgagtgggatgaaggtaaaggcaacggggagttctgccagtgttacatgggaagccagaagcagtttaaaatcacaaagttatcaccggctatgggctgcaaattccggctgagtgcccgcaacgactatggtacctccgggtttagcgaagaggttctttactatacttctggctgtgcaccttcaatgccagctagtcccgtgttgacaaaggccggaattacctggctgagcctacaatggtccaagccttctggcacgccctcggatgaggggataagctacatcctcgaaatggaggaagagacctccggatacggtttcaaaccaaagtatgacggcgaagatctggcgtacacagtcaaaaatcttcgaagatcaactaagtataaatttaaggtgattgcctacaacagtgaggggaagtctaatcctagcgaggtagttgagttcaccacatgccccgacaaaccaggaatcccggtgaagccttccgtcaaaggcaagatacactcacatagctttaaaattacttgggatcccccaaaggacaacggtggggcaaccatcaataagtatgtggtcgaaatggctgaaggctctaacggaaataaatgggagatgatctactccggcgccacaagggagcacctgtgtgatcggttgaaccccgggtgcttctatcgtctccgcgtgtactgtattagtgacggaggtcagagcgctgtttctgaatccctgttagtgcagacccctgccgtaccacccggcccttgcctgccgccaagactccaggggaggcccaaggcaaaagagatccaacttcggtggggacctccactggtcgatggcggttcacccattagttgttacagcgtggaaatgtcgcctatagagaaggacgaaccgcgagaggtttatcaggggtccgaggtggaatgcactgtctctagcttgctacccggcaaaacgtactcattccgcctgagagccgctaataagatgggatttggcccattcagtgagaaatgcgacatcacaaccgcgcctgggcccccagatcagtgtaagcctccccaggtgacttgcaggtccgcaacctgtgcccaagtaaactgggaagtgccactctctaatggaacagacgttaccgagtatcggctggaatggggcggtgtcgaggggagcatgcagatttgctactgtggaccgggcctttcctatgagatcaagggtctgagccctgctactacatactattgccgcgtgcaggccttgtcagtggtcggcgcagggccctttagtgaagttgtggcctgtgtgacgccaccctctgtacctggaatcgtgacctgcctccaggagatttccgatgacgaaatagagaacccacactacagcccctcgacttgtctggctatctcatgggaaaaaccttgcgatcatggctctgagattttagcctacagtatcgacttcggggataagcaatccctgacagtcggaaaagttaccagctatattatcaataacctacagccggacacaacttacagaataaggatccaggcactcaattctctgggcgcgggtccatttagccacatgattaagctgaaaaccaagcccttgcctcccgatccacctcgtctggagtgtgtggctttctcccatcaaaacctcaagctgaaatggggagaagggacgcccaagaccctttcaacagacagtatccagtatcaccttcagatggaggataaaaacggccggtttgtcagcttgtaccgaggtccatgccatacttataaggtgcagagactcaatgaatctacctcctacaaattctgcattcaagcctgtaacgaggcaggcgaggggcctctgtcacaggaatatatctttacaactccgaagagtgttcccgccgctttaaaggccccaaaaatagagaaggtgaatgaccacatttgcgaaatcacctgggagtgtctgcagcctatgaaaggagatcccgtaatttacagcctacaggtcatgctcggcaaggactccgagttcaaacaaatctacaaggggccagactcttcgtttaggtatagctcactgcagcttaactgcgaataccgcttccgggtgtgtgcaataagacagtgccaggattccttgggacaccaagacctggtgggcccttatagtacgacagtcctctttatctctcagaggaccgagcccccggctagcactaatcgcgatacagttgaatccacccgaactcggcgtgccctgtcagacgagcagtgtgcggccgtgattttagtactgttcgctttcttttctatccttattgcattcatcatacaatactttgtgattaagtga

SEQ ID NO: 2193 - RNA, 1020 nt, synthetic construct
  misc_feature 1..1020: note = EAW49214 variant
  source 1..1020: mol_type = other RNA
atgccccctagcaagccacacccgcccgtggtcggcaaagttacccatcactccatcgagctgtactgggacctcgaaaagaaagccaagagacaggggcctcaagagcagtggttcaggttttctattgaagaggaagatccaaaaatgcatacatatggaataatctacactggttatgctacgaagcacgtggtagagggccttgagccccggaccctgtaccgcttccgattgaaggtgacatcacctagtggggaatgcgagtatagcccattagtctccgtgtctactacccgtgaacccatttcgtcagagcatctgcacagagcagttagcgtgaacgacgaggatctactcgtcaggatcctgcagggaggccgggtgaaagtagacgttcctaataagtttggtttcacagcccttatggtggcggctcagaaagggtacacccgcctggtcaagattttggtgagtaacggaactgatgtgaatctcaaaaacggctccggcaaggactctctgatgctggcctgttatgcagggcacctcgatgtcgttaagtacttaagaaggcatggagccagctggcaagctcgggacctgggtggctgcacagcacttcactgggccgctgatgggggacattgttccgtgatcgaatggatgataaaagacggctgcgaggtagatgtggtcgacaccggttcagggtggacgccattgatgcgcgtgagtgccgttagcggaaatcagcgagtggcgtctctgctaatcgatgcaggcgccaacgtcaatgtgaaggacagaaacggcaaaactccgctcatggtagctgttctgaataaccacgaggaacttgtgcagctgttgctcgacaagggggccgatgcatccgtcaaaaatgaatttggaaagggtgtgctggagatggctagggtcttcgaccggcagtcagtggttagcttactggaggaacgtaaaaagaagcaacgccccaaaaagagttgtgtgtgctga

SEQ ID NO: 2194 - RNA, 3150 nt, synthetic construct
  misc_feature 1..3150: note = BAF84259 variant
  source 1..3150: mol_type = other RNA
atgggcagcagaacccccgagtcccctctgcacgccgtgcagctcaggtgggggccacggcgccgaccgccccttctgcctttgttactgctactcctgccaccccctccacgtgtcggaggtttcaaccttgacgctgaagcacccgccgttctgtctggccctccagggtcatttttcggatttagtgtggagttctacagaccgggcacagatggtgtaagcgtgttggtcggggcgcccaaggctaatacttcccaacctggagtgctccagggcggcgccgtttatctgtgcccatggggagcatctcccacgcagtgtacccctatcgaatttgactcgaaaggatcaaggctgctcgagagcagtttatcctctagcgaaggtgaggagccagtggaatacaagtccctgcagtggttcggcgccacagtccgggctcatgggtcaagtattcttgcatgcgcccccttgtatagctggcgcactgagaaagaaccgctgtctgatcctgtgggaacctgttacctatccacagacaactttaccagaatactcgagtatgctccctgcaggtcagatttcagctgggccgcgggccaaggttactgtcaagggggatttagtgcagagttcactaagacaggccgggtagttctgggcgggccaggatcttatttttggcagggtcagatcctttccgccacccaggaacagattgctgagagctactaccctgaatatctgatcaatttggtgcagggccagctccaaacgcgccaggcctcgtctatttacgacgattcctatctggggtactcagtcgcagtgggagagttcagtggcgacgatactgaagactttgtggctggtgtccccaaagggaacttaacctatggctacgttacaatcctgaatggaagcgatatacgatccctctataacttctctggcgagcagatggccagctacttcgcgtacgccgtggcagctactgacgtaaatggggatggacttgacgacctgttggtgggtgccccactactgatggatagaacccccgacggcaggcctcaagaggtcgggcgggtgtatgtttacctccagcacccagctggaatcgaatcaacaccgaccctgacgcttactggccatgatgagtttggtcgtttcgggagttccctgacacccttgggcgacctcgatcaggacggatataacgatgtggccattggcgcaccttttgggggagaaacccagcaaggtgtcgtgttcgtatttccaggcgggcccggaggcctgggtagcaagccttctcaggttttacagccactgtgggccgcttcacacactcccgacttctttgggagtgcgctacgcggcggaagagatctcgacggcaatgggtacccggatctgatcgtggggagcttcggcgtcgacaaggcagtggtctataggggtcggcctattgtgtccgcctctgcttcgcttacaatctttccagccatgttcaaccccgaggaacgaagctgctccttggaggggaatcctgttgcatgtataaacctgtcattttgcctcaatgccagtggaaaacatgtggctgactctattggcttcaccgtagagctgcagcttgattggcaaaagcagaaaggtggcgtccgcagagccctgtttttggcaagcaggcaggcgacgctcacccagacactgttaatccaaaacggggctcgggaagactgtcgcgagatgaagatttacctgagaaatgaatccgagttcagggataaactatcacccatccacatcgccctcaacttcagcctggacccacaggcacctgtggattctcacggacttcgtcccgccttgcattatcagtccaagagtcggattgaagacaaggctcagatactgctcggctgcggggaggataacatctgtgttccagacctgcaattagaggtgtttggagaacagaatcacgtctacctgggcgataaaaacgcccttaatttgactttccatgcacagaacgtgggtgaagggggagcttacgaggccgagctccgagtaaccgcgccgcctgaggccgaatatagcggcctggtgagacaccccggtaatttttcttccctatcatgcgactacttcgctgttaaccaaagtaggctgctcgtctgcgatctgggcaatccaatgaaggcaggggccagcctttggggaggcttgcgctttacagtgccccacttgcgggacactaaaaagaccattcagttcgattttcagatcttatcgaaaaacctcaataactcccagtctgacgtggtcagcttcagactgtcagttgaggctcaagcccaggtgacacttaatggggtgagtaagcctgaagcagtactgtttccagtctccgactggcatcccagggatcagcctcaggaggaagaggacttgggaccggcggtgcaccatgtttatgagctcataaaccaaggcccatctagcatttcccagggtgtgctggaactatcatgtccccaggccctggaggggcagcaactcctgtacgtcacccgcgtgactggacttaattgcacgacaaaccaccctatcaatccaaaaggcttggaactggatcccgagggtagcttacatcaccagcagaagcgagaagctcctagtcggtcttccgccagctcgggcccgcaaatcctcaagtgtcccgaggcagagtgcttccgtctgagatgtgaacttgggccactgcaccagcaggagtcacagtctctacaactccattttagggtttgggctaaaaccttcctgcagcgcgaacaccagccttttagtttgcagtgcgaggccgtgtataaggcactgaaaatgccctaccggattttaccaagacaactccctcagaaggaaaggcaggtagccactgctgtccagtggaccaaagcggagggatcctatggcgtgcccctgtggatcattatacttgccatcctgttcgggttgctcctgctaggactgcttatttacatcctctacaagctgggcttctttaagcgaagcctgccatatggtacagcaatggagaaagctcaactgaagccgcctgccacctctgacgcctga

SEQ ID NO: 2195 - RNA, 3150 nt, synthetic construct
  misc_feature 1..3150: note = BAG35324 variant
  source 1..3150: mol_type = other RNA
atgggcagcagaacccccgagtcccctctgcacgccgtgcagctcaggtgggggccacggcgccgaccgccccttctgcctttgttactgctactcctgccaccccctccacgtgtcggaggtttcaaccttgacgctgaagcacccgccgttctgtctggccctccagggtcatttttcggatttagtgtggagttctacagaccgggcacagatggtgtaagcgtgttggtcggggcgcccaaggctaatacttcccaacctggagtgctccagggcggcgccgtttatctgtgcccatggggagcatctcccacgcagtgtacccctatcgaatttgactcgaaagggtcaaggctgctcgagagcagtttatcctctagcgaaggtgaggagccagtggaatacaagtccctgcagtggttcggcgccacagtccgggctcatgggtcaagtattcttgcatgcgcccccttgtatagctggcgcactgagaaagaaccgctgtctgatcctgtgggaacctgttacctatccacagacaactttaccagaatactcgagtatgctccctgcaggtcagatttcagctgggccgcgggccaaggttactgtcaagggggatttagtgcagagttcactaagacaggccgggtagttctgggcgggccaggatcttatttttggcagggtcagatcctttccgccacccaggaacagattgctgagagctactaccctgaatatctgatcaatttggtgcagggccagctccaaacgcgccaggcctcgtctatttacgacgattcctatctggggtactcagtcgcagtgggagagttcagtggcgacgatactgaagactttgtggctggtgtccccaaagggaacttaacctatggctacgttacaatcctgaatggaagcgatatacgatccctctataacttctctggcgagcagatggccagctacttcgggtacgcggtggccgcaactgacgtaaatggagatggtcttgacgacctgttggtgggcgctccactactgatggatagaacccccgacgggaggcctcaaggagtcggccgggtgtatgtttacctccagcacccagccggtatcgagccgacacccaccctgacgcttactgggcatgatgaatttggccgtttcggatcaagtctgacacctttgggcgacctcgatcaggacgggtataacgatgtggctattggagccccatttggtggcgagacccagcaaggggtcgtgttcgtatttcccggaggccctggtgggctgggctccaagttaagccaggttctgcagccactatgggcagcctctcacactcccgacttctttggatcagctctccgcggcgggagagatctggacggaaatggctacccggatcttatcgtgggtagtttcggggtcgacaaggcggtggtctataggggacggcctattgtgagcgcatccgcctctttgacaatctttccagctatgttcaaccccgaagaacgatcgtgcagcctggaaggcaatcctgttgcctgtataaacctctccttttgcctgaatgcatcaggtaaacatgtggccgacagtattggcttcaccgtagagcttcagctggattggcaaaagcagaaagggggagtccgcagagctttgtttctcgcctctaggcaggcaacgctgacccagacattactgatccaaaacggcgcgcgggaggactgtcgcgaaatgaagatttacctaagaaatgagagcgagttcagggataaactctcccccatccacatcgctctgaacttctcacttgacccacaggcccctgtggatagccacgggttgcgtcccgcactgcattatcagtctaagtcccggattgaggacaaggcccagatactcctggattgcggagaagacaacatctgtgttccagatttacaactggaggtgtttggcgagcagaatcacgtctaccttggtgacaaaaacgctttgaatctcactttccatgcccagaacgtgggggaaggaggcgcatacgaggctgaactgcgagtaaccgccccgcctgaggcggagtatagtggtctagtgagacaccccggcaattttagctctctgtcctgcgattacttcgccgttaaccaatcaaggctcctggtctgcgaccttgggaatccaatgaaggctggagcaagtttgtggggcgggctgcgctttacagtgccccacttacgggatactaaaaagaccattcagttcgactttcagatcctcagcaaaaacctgaataactcgcagtccgacgtggtctctttcagacttagcgttgaagcccaagctcaggtgacactgaatggagtgtcaaagcctgaggccgtattgtttccagtcagtgattggcatcccagggaccagcctcagaaagaagaggatctcggcccggcagtgcaccatgtttatgaactgataaaccaaggtccatcctctattagccagggggtgctagagctgtcctgtccccaggcgctcgagggacagcaactgctttacgtcacccgcgtgactggcttgaattgcacgacaaaccaccctatcaatccaaagggtctggaattagaccccgagggctcactccatcaccagcagaagcgagaagcccctagccggagttctgcttccagcgggccgcaaatcctgaaatgtcccgaggccgaatgcttccgtcttagatgtgagctgggaccactacaccagcaggagtcgcagtcactccaactgcattttagggtttgggcaaagaccttcttgcagcgcgaacaccagcctttttctctgcagtgcgaggctgtgtataaagccttaaagatgccctaccggattctcccaagacaactgcctcagaaagaaaggcaggtagcaactgccgtccagtggaccaaggctgagggcagttatggggtgcccctttggatcattatactggcgatcttgttcggactcctgctactgggccttctcatttacatcctgtacaagttgggtttctttaaacgatccctgccatatgggacagccatggaaaaggcacaattaaaaccgcctgctaccagcgatgcctga

SEQ ID NO: 2196 - RNA, 1401 nt, synthetic construct
  misc_feature 1..1401: note = BAG54537 variant
  source 1..1401: mol_type = other RNA
atgctgagcctcagacagaggatgatgcacgcccggttccgcaaccccctttcccgacaacctgctcgtccatcttacagacagggctataatgggaggccgaacgtggagggaaaggtcctgcccggttcaaatggcaaacctaacgggcagcggatcattaatggaccacagggcaccaagtgggttgtggacttggatcgcggtttagtactgaacgcagaagggagatacctacaagacagtcatggaaatcccctcaggataaaactgggcggcgatgggcggacaatcgtggaccttgagggaactcctgtcgtgagcccagatggtctgcccttgtttggccaggggcgccacggaacgcctctcgccaacgcgcaggacaagccaattctgtccctgggcggtaaaccgctcgttgggttagaagtgatcaagaagaccacacatccccctactaccacaatgcagccaaccactacaaccacgcccctgcctactaccacaactccacgacccaccacagctaccacgagaaggactacaacccggcgtccgactacaaccgtccgcacgaccacaagaactaccacaactaccacacctaaacccaccactccaattcctacgtgtcccccaggaacacttgagaggcacgatgacgatggcaatttgatcatgtcttcgaacggcatacccgaatgctatgccgaggaggacgagttctcagggctggaaaccgatactgcagtgcctaccgaagaggcctacgtaatctatgacgaggattacgaatttgagacaagccggccaccgaccactacagaacccagtacgaccgctactacacctcgagttattccagaggaaggagcaatctcctctttccccgaggaggaatttgacctagccggtcgcaagagattcgtggctccttatgtcacctacctcaataaagacccaagcgccccctgctccctgacagatgcgcttgaccattttcaagtggattcactggacgagattatcccgaacgatttgaagaaaagtgacctccctccacagcacgcacccaggaatataactgtggtcgccgttgaaggctgtcacagcttcgtgattgtagattgggacaaggctacccctggggatgtggtcacgggatacctggtgtattctgcctcctacgaggactttatccggaacaagtggtcaacccaggcaagcagtgttacacatttacccattgaaaatctgaaaccaaacactcgctattacttcaaggtgcaggctcaaaaccctcacggctatggtcccatctctccatccgtcagctttgtgaccgagtcggataatccgctccttgtagttagacctcccgggggcgagccaatctga

SEQ ID NO: 2197 - RNA, 471 nt, synthetic construct
  misc_feature 1..471: note = BAG58437 variant
  source 1..471: mol_type = other RNA
atggaggaacagagaaacgaggaaatccagagcttcatttactccctgaagcaaatgctccttaatgtggaggccaactctgctaaagtccaggaagacctggaggcagagtttcagtcattgttcagtttactggaggaactaaaggaaggcatgctcatgaaaataaagcaagatagggccagccggacctatgagctgcagaatcagcttgcggcttgcacacgcgccctggagtcctctgaagagttgctcgaaactgcaaaccagacgctgcaagccatggactcggaggattttccccaggctgcaaaacagatcaaggacggggttaccatggcccctgctttccgactgtcactcaaggccaaagtgagcgataatatgagtcacttaatggtagactttgcgcaggaacgtcaaatgctgcaggcacttaagttcttgccaggagagagaggtacacattga

SEQ ID NO: 2198 - RNA, 921 nt, synthetic construct
  misc_feature 1..921: note = BAH14721 variant
  source 1..921: mol_type = other RNA
atgatcttcgaggaacacggctttagaaggaccacaccccctactacggccaccccaattcggcatcgcccgcgaccctaccctccaaacgtggggcaggaggctctgagccaaacaactatatcctgggcacccttccaggacacctctgaatatatcatttcatgccaccctgtcggaacagatgaggaaccactccagtttcgtgttcccggtaccagtactagcgccacacttaccggcctgacgagaggggcgacttacaatatcattgtggaggctttgaaggaccagcaaaggcataaagtacgggaggaagtggtcaccgtgggaaactccgttaatgagggcttaaaccagcctacagatgactcttgtttcgatccatatactgtgtcgcactacgccgtcggtgacgaatgggagcgcatgtcagagagcgggtttaagctgctatgccagtgtctcggattcggcagtggccattttagatgcgattcctctaggtggtgtcacgacaatggggtgaactataaaatcggagaaaagtgggatcggcagggtgagaatggccaaatgatgagctgcacctgtctggggaacggaaaaggcgagttcaagtgcgacccgcacgaagcaacatgttacgatgacggtaagacctatcatgtaggggaacagtggcagaaagagtaccttggagccatatgctcctgtacgtgctttggcggccagcgcgggtggcgatgcgataattgtagaaggcccggaggtgagccttcaccagaaggcactacagggcaaagttacaaccagtatagccagcggtaccaccaacgtaccaatactaacgttaattgccccatcgagtgtttcatgcctctggacgtgcaggctgaccgcgaagattctagagagtga

SEQ ID NO: 2199 - RNA, 1920 nt, synthetic construct
  misc_feature 1..1920: note = BAG61560 variant
  source 1..1920: mol_type = other RNA
atggagaagatcctgttctacctctttcttattggcatagccgtgaaagctcagatctgccccaagagatgtgtctgccaaattctgagccctaacttggcaaccttatgtgccaaaaaggggctgctattcgttccaccgaatatcgacaggcggacagtggaactccgcctggcggataactttgtaactaatattaaacgaaaggacttcgctaacatgacgtcccttgtggatctgaccttgtctcgtaatacaatctcatttataactccccacgccttcgcagacctcagaaacctgaggagtctgcatctcaatagcaaccggttaaccaagatcacaaatgatatgttttccggactgtctaaccttcaccatttgattctgaataacaatcagctaaccctcatctcgtcaactgccttcgacgatgtctttgctctggaggaacttgacctgagctataacaatttggagacaattccttgggatgcagtggaaaagatggttagtctccacaccctgtccttagaccataacatgatcgataacataccaaagggtacgttctctcaccttcacaaaatgactcgcctcgacgtgaccagcaataagctgcagaaactgccccctgatccattgtttcagagagcccaagtcctagctacatccggcattatctcacccagtactttcgccctgagctttgggggaaaccctctccattgcaattgtgagctgctttggctgaggcggttgtctcgcgagtacgacctcgaaacctgcgcgtccccaccgctgttaacaggccgatatttctggtcaattcccgaggaagagttcctgtgtgagcctccactaatcaccagacacacgcatgaaatgagggtgctcgagggtcagcgggcaactctgcgttgcaaggcccgcggggaccccgaacctgctatccactggattagcccagagggaaaacttataagtaacgccacaagatctttggtatacgataatggcaccctggacatcctcattactacagttaaagataccggcgcatttacgtgtatcgcttccaaccccgccggggaagcgacccagatagtggacctgcacattatcaaacttccgcatctgttgaatagcacaaaccacatccatgagcctgatcccggatcgtctgacatttccacttcaaccaagagtggtagcaatacatcctctagcaacgatggcatcacttcactcaccgccacaagggtcgtggggtgcattcagttcaccactgagcaagactatgtgcggtgtcactttatgcagagtcagttcctgggaggcacgatgataatcattatcggtgggatcattgtcgcatccgttttagtgtttataatcattctgatgatccgatacaaggtatgcaataacaatggacagcataaagtgacaaaggtcagcaacgtgtattctcaaaccaatggcgctcagattcagggctgctcagttactctaccacaaagtgtgagcaaacaggccgtcgggcacgaagagaacgctcagtgttgcaaggccacctccgataacgtgatccagtcttcggaaacatgtagctcccaagactcagcaaccactacaagtgccctccctccctcttggacgagctccacctcagtaagccagaagcagaaacgcaagactggaacaaaaccatctaccgagccccagaatgaagctgttacaaacgtggagtcccaaaatactaacagaaataacagtaccgcgctgcagcttgcaagcaggcctccagattctgtcacggagggtccgacctccaagcgggcccacataaaacccaatgctttgctgacaaacgtggaccagatcgtccaggaaactcaacgcctcgagctgatttga

SEQ ID NO: 2200 - RNA, 1014 nt, synthetic construct
  misc_feature 1..1014: note = BAG61984 variant
  source 1..1014: mol_type = other RNA
atgatcttcgaggaacacggctttagaaggaccacaccccctactacggccaccccaattcggcatcgcccgcgaccctaccctccaaacgtgggggaggaaatacagatcggacacattccccgtgaggacgtcgattatcatctgtaccctcacggtccaggcctcaatcccaacgctagcacagggcaagaagcactttcccagactaccatctcttgggcccctttccaggacacatcagagtatattatcagttgccatccagttggaaccgatgaggaaccgctgcagtttagagtgcccggcactagcacatccgcgaccttgacgggtttaactaggggagctacctacaatataatcgtagaggccctgaaggaccaacagcggcacaaagtgcgcgaagaggtcgtgacagttgggaactctgtgaatgagggcctaaaccagcctactgatgactcgtgtttcgatccatataccgtctcacactacgcagtgggcgacgaatgggagagaatgagcgaaagtgggtttaagctcctgtgccagtgtcttggattcggttccggccattttaggtgcgattctagccggtggtgtcacgacaatggggtaaactataaaattggagagaagtgggatcgccaaggcgaaaatggtcagatgatgtcctgcacatgtctggggaacggaaaaggcgagttcaagtgcgacccccatgaggccacctgttacgatgacggcaagacgtaccacgttggggaacagtggcagaaagagtatttgggagctatctgctcatgtacttgctttggtggccaacgagggtggagatgcgacaattgtaggcggcctggaggcgaaccaagtcccgagggtacaaccgggcagagctacaaccagtattctcaacgttaccaccagcgcactaatacaaacgtgaattgcccgattgaatgtttcatgcctctcgatgtccaggcagacagagaggattccagggagtga

SEQ ID NO: 2201 - RNA, 3045 nt, synthetic construct
  misc_feature 1..3045: note = BAG62013 variant
  source 1..3045: mol_type = other RNA
atgagagtgacctgggccccgcctccaagcatcgacctgacaaacttcctcgtcaggtactccccggttaagaatgaggaagatgtggctgagctttctatttcacccagtgacaacgcagtagtgctgactaatttgttacctggcacggaatatgtcgtgagcgtttcctctgtgtacgagcagcacgaatcgaccccactgcgggggcgccagaaaacaggactagattcacccactggtatagactttagcgatatcaccggcaacagtttcacagtccattggattgcccctcgagcgaccatcactgggtatcgtattagacaccatccagagcacttttccggaaggccccgggaggaccgcgtgcctcattctagaaatagcatcacactcaccaacctgacgccaggcactgaatacgtagtttccatagtggctcttaatggtagggaggaatcaccgctgttgatcgggcagcagagtaccgtcagcgatgtgccccgggacctcgaggtggtcgccgcaacacctacttctctgctgatttcctgggatgccccagctgttaccgtgcgctattaccgaatcacatatggagagaccggcggcaactcacccgtacaggagttcacggtgcctgggagcaagagtactgcaacaatttctggactcaaaccaggtgtcgactacaccatcactgtgtacgccgttacaggcagaggggattcccccgctagctcgaagccgatatctattaattataggaccgaaatcgacaaaccttcccaaatgcaagtgacggatgtccaggacaactcaattagtgtgaagtggttacccagctcctctccagtaaccggataccgggttacaactacccctaagaatggccccggtccaacaaaaactaagaccgccgggcccgaccagacagaaatgaccatcgagggactgcaacctactgtggaatatgtcgtgagcgtctacgcgcagaacccatcaggcgagagtcagccgcttgtgcagacggcagttacaaccatccccgcccctactgatttgaaatttacccaagtgacaccaacctccctgagcgctcagtggactccccctaatgtacagctaacaggctatcgtgtccgcgtgacgccaaaggagaaaaccgggcccatgaaggaaattaacctcgccccggactcttcaagtgttgtggtcagcggactgatggtggcaactaagtacgaggtatccgtgtatgctcttaaagatacactgacctctagacctgcccaaggtgttgtcacaactttggaaaatgtgtcgccacccaggcgggcgcgagtgaccgacgccacggagaccacaataactatcagctggcgcaccaagacagaaactattaccggcttccaggtcgatgcagttcctgctaacgggcagacgcccatccagagaacaataaaaccagacgtgaggtcctacaccattactggactccaacctggcacagattacaagatctatctgtacaccttaaacgacaatgcccggtcaagtcccgtggtaatcgatgcttctactgccattgacgcaccaagcaacctgcgctttctcgccaccacacccaattcccttctggtctcatggcagcctcccagagctaggatcacgggttatattataaaatacgagaagccagggtctccccctcgtgaggtggttccacggccccgacctggcgtgaccgaagcgactatcacaggattggagccgggcaccgaatatacaatttacgtcatcgcactaaagaacaatcagaaaagcgagccactgatcgggagaaagaaaactgatgaactcccccagctggtgacccttcctcacccaaacctgcacggacccgagattttggacgttccttccacggtgcaaaagacaccgttcgtaacccatcccggttatgacactggcaatgggatacagctcccaggaaccagtggccagcagcctagcgtcggtcaacagatgatctttgaggaacacgggttcaggcgcacaactcccccaaccacagccacgcctattcggcatagacccaggccatacccgcctaacgtgggcgaggaaatccagattggacacatcccccgcgaggatgtggactaccacctgtatccacatggccccgggttaaatcctaacgcttctaccggacaggaggccctgtcccaaactacaatatcatgggcaccatttcaggataccagtgaatacatcattagctgccaccccgtcggtactgacgaggaacctctacagttccgagttccgggcacatcgacctccgccacgctcactgggctgacccggggagctacatataatatcattgtggaggcccttaaagatcaacagcgtcataaggtaagagaagaggtggtcaccgtgggcaactctgttaatgagggtttgaaccagccaactgacgatagctgttttgacccctacacagtgtcacactatgcagtcggggatgaatgggagaggatgagtgaatccggcttcaaactgctctgccagtgtctgggattcggctctgggcattttcgctgcgacagctcccggtggtgtcacgataatggagtgaactacaagatcggcgagaagtgggacagacaaggtgaaaacgggcagatgatgtcatgcacctgtcttggaaatggcaaaggtgagttcaagtgcgatcctcacgaggcgacatgttatgacgacggcaaaacttaccatgttggggaacagtggcagaaggagtacctgggagctatatgcagctgtacctgctttggcgggcaaaggggatggcgatgcgataactgtcgccggcccggcggtgaaccaagtcctgaggggacgacaggacagtcttataatcagtactcccagagatatcaccaaaggaccaacactaatgtgaactgccccattgaatgtttcatgccattggacgtccaggccgatcgtgaggacagccgcgagtga

SEQ ID NO: 2202 - RNA, 2685 nt, synthetic construct
  misc_feature 1..2685: note = BAG62178 variant
  source 1..2685: mol_type = other RNA
atgagagtgacctgggccccgcctccaagcatcgacctgacaaacttcctcgtcaggtactccccggttaagaatgaggaagatgtggctgagctttctatttcacccagtgacaacgcagtagtgctgactaatttgttacctggcacggaatatgtcgtgagcgtttcctctgtgtacgagcagcacgaatcgaccccactgcgggggcgccagaaaacaggactagattcacccactggtatagactttagcgatatcaccgccaacagtttcacagtccattggattgcgcctcgagctaccatcactggctatcgtattagacaccatccagagcacttttccgggaggccccgggaggaccgcgtgcctcattctagaaatagcatcacactcaccaacctgacgccaggaactgaatacgtagtttccatagtggcccttaatggcagggaggaatcaccgctgttgatcggtcagcagagtaccgtcagcgatgtgccccgggacctcgaggtggtcgcagccacacctacttctctgctgatttcctgggatgctccagcagttaccgtgcgctattaccgaatcacatatggggagaccggaggcaactcacccgtacaggagttcacggtgcctggcagcaagagtactgccacaatttctgggctcaaaccaggagtcgactacaccatcactgtgtacgctgttacaggtagaggcgattcccccgccagctcgaagccgatatctattaattataggaccgaaatcgacaaaccttcccaaatgcaagtgacggatgtccaggacaactcaattagtgtgaagtggttacccagctcctctccagtaaccgggtaccgggttacaactacccctaagaatggacccggcccaacaaaaactaagaccgcgggtcccgaccagacagaaatgaccatcgaggggctgcaccctactgtggaatatgtcgtgagcgtctacgcacaaaacccatcaggagagagtcagccgcttgtgcagacggccgttacaaccatccccgctcctactgatttgaaatttacccaggtgacaccaacctccctgagcgcccaatggactccccctaatgtacagctaacaggctatcgtgtccgcgtgacgccaaaggagaaaaccggccccatgaaggaaattaacctcgcaccggactcttcaagtgttgtggtcagcgggctgatggtggctactaagtacgaggtatccgtgtatgcccttaaagatacactgacctctagacctgcgcagggagttgtcacaactttggaaaatgtgtcgccacccaggcgggcccgagtgaccgacgcaacggagaccacaataactatcagctggcgcaccaagacagaaactattaccggtttccaagtcgatgctgttcctgccaacggccagacgcccatccagagaacaataaaaccagacgtgaggtcctacaccattactgggctccagcctggaacagattacaagatctatctgtacaccttaaacgacaatgctcggtcaagtcccgtggtaatcgatgcctctactgcaattgacgccccaagcaacctgcgctttctcgctaccacacccaattcccttctggtctcatggcaacctcccagagcgaggatcacgggctatattataaaatacgagaagccaggttctccccctcgtgaggtggttccacggccccgacctggggtgaccgaagcaactatcacaggcttggagccgggaaccgaatatacaatttacgtcatcgccctaaagaacaatcagaaaagcgagccactgatcggcagaaagaaaactgggcaggaagctctctcccagaccacgattagttgggcccccttccaagatacaagcgagtatataatctcttgccaccctgtgggaaccgacgaggaaccactgcagtttagggttcccggtacttccacctcagcaacacttactggcctgacccgcggggccacatacaacattatcgtggaggctttgaaggaccagcagcggcataaagtaagagaagaggtcattacggtgggaaatagtgtgaacgagggcctcaatcaacctaccgatgacagctgtttcgatccgtacactgtctcgcactatgccgttggtgacgaatgggagaggatgtccgaatctgggtttaagctgttatgccagtgtctgggcttcggaagcggccattttcgctgcgattcaagtcgatggtgtcacgacaacggggtgaattacaaaatcggagagaagtgggatcggcagggtgaaaacggccagatgatgtcctgcacatgtctagggaatggaaagggcgagttcaaatgcgacccccacgaggcaacctgttatgatgacggtaagacttaccatgtaggggaacaatggcagaaagagtatctcggcgcgatatgctcttgtacatgcttcggaggccagcgtgggtggagatgcgataactgtaggcgcccaggaggcgaacctagccccgagggtaccacggggcaatcctacaatcagtattcacagcggtaccaccagagaactaacaccaacgtgaattgcccaatcgaatgttttatgcctctggacgtccaagctgatagggaggacagccgagagtga

SEQ ID NO: 2203 - RNA, 1152 nt, synthetic construct
  misc_feature 1..1152: note = BAH12351 variant
  source 1..1152: mol_type = other RNA
atggccagcgctttcagactgtccctcaagcccaaagtgtctgacaacatgacccaccttatggtcgatttttcacaggagaggcaaatgctgcagacattgaagttcttacctgttccaaaagcaccggaaatcgaccccgtggagtgcctggtagccgataatagtgtgactgtcgcgtggcggatgcctgaagaggacaacaagattgatcattttatactagaacaccgcaaaacgaatttcgacggcctcccacgagtgaaggatgagcgttgttgggagatcattgacaacatcaaggggaccgaatacacactgagcggacttaaatttgattccaagtatatgaatttcagagttagggcttgcaacaaagccgtggccggtgagtactctgaccccgtcactctggaaaccaaggcattgaattttaacctcgataattcgtcaagccatctgaacctgaaagtggaggacacatgtgtagagtgggatcctaccggcgggaagggacaggaaagtaagattaaaggcaaggagaataaaggttccgttcacgtgacttctctcaagaaacatacaagcgggaccccatcccccaagcggacgtcagtcggaagtcgccctccagctgtgagaggcagcagggaccggttcactggcgaatcttataccgtgttaggggacacagcaatcgagtccggacagcactactgggaagtcaaagcccaaaaggattgcaagtcatatagcgttggtgtggcttacaaaactctgggcaagtttgaccagcttgggaaaaccaacacaagttggtgtatacacgtaaataactggttgcagaataccttcgccgcgaagcataacaacaaagtgaaggcactggatgtcacggtgccggagaagatcggagtgttttgcgacttcgatggcggtcagctatctttttatgacgccaattccaaacaactcctgtacagcttcaagactaaattcacacagcccgtgcttcctgggtttatggtctggtgtggaggcctgtcgttgtctaccggcatgcaggttccatccgctgtacgcactctccagaagtcagagaacgggatgacaggaagtgccagctccctgaataacgttgtgacccaatga

SEQ ID NO: 2204 - RNA, 441 nt, synthetic construct
  misc_feature 1..441: note = BAH14175 variant
  source 1..441: mol_type = other RNA
atgccccctagcaagccacacccgcccgtggtcggcaaagttacccatcactccatcgagctgtactgggacctcgaaaagaaagccaagagacaggggcctcaagagcagtggttcaggttttctattgaagaggaagatccaaaaatgcatacatatggaataatctacactggttatgctacgaagcacgtggtagagggccttgagccccggaccctgtaccgcttccgattgaaggtgacatcacctagtggggaatgcgagtatagcccattagtctccgtgtctactacctcggaatactcagaccgtccccatagccctctgagtagatccatggagatgacatctaacctagagaaaatcttttgtctcagcttcggactgaccaggtcccggaatgatactatttttaagcactgcaacaatatttgttga

SEQ ID NO: 2205 - RNA, 2055 nt, synthetic construct
  misc_feature 1..2055: note = EAX08810 variant
  source 1..2055: mol_type = other RNA
atggccgagcatccccctctgctcgacaccacacagatccttagctccgatatttctctgttgtcagctccaatagtgagtgcagacggcactcaacaggtcatcttagttcaggtgaacccgggggaagccttcacgattagaagggaggatggacagtttcaatgcatcaccggtcccgcgcaggtacctatgatgagcccaaatggctccgtgccccctatttacgtcccacccgggtatgctcctcaggtgatcgaagacaacggagttcggcgcgtggtcgtggtaccacaggccccggagttccaccccggctctcacacagttctgcatcgatcgcctcacccacccctacctggttttataccagtgcccactatgatgccgcctcccccacgtcatatgtactcacctgtcaccggggcaggagatatgacaacccaatatatgccccagtaccagagcagtcaggtgtatggcgacgtggatgcccactccactcacggcagatctaatttcagggacgaacggagctccaagacatacgagcgcctccaaaagaagctgaaagatagacaggggacccagaaggacaaaatgtcaagtccacccagctctcctcaaaagtgtccatccccgatcaacgagcataatggacttattaagggtcagatcgctggcgggattaacacgggatcagcaaaaatcaagagcggcaaaggtaaagggggaactcaggtcgataccgaaatagaggaaaaagacgaggagacaaaggcctttgaagctctgttgagtaatattgttaagcccgtggcctctgatatccaggcgaggactgtagtgctcacctggtcccctccaagctcgctgattaacggcgagacagacgaatcttccgtccccgagctgtatggctacgaagtgctcatctcaagtaccgggaaagacggaaagtacaaaagcgtttatgtgggtgaggagacgaatatcactttaaacgatctgaagcctgcaatggactaccacgccaaagtccaagctgaatataattccattaagggcacaccatctgaggccgaaatattcaccactcttagctgcgagcccgatatcccgaaccctccacggattgcaaatcgcaccaaaaactcattgacactgcagtggaaggctcccagtgacaatgggtccaagatccagaactttgtgctagaatgggatgagggaaaaggcaacggtgagttctgtcagtgctacatggggagccaaaagcagtttaaaataacgaagctctctcctgccatgggctgtaaattccgactgtcagcgagaaatgactatggaaccagtggctttagcgaagaggtactttactatacatccgggtgcgccccctctatgccagcatcgcctgttctgactaaggctggaattacctggttgagcctccagtggtccaagccctcaggtacaccaagtgatgaaggcatctcttacatcctggagatggaagaggagactagcgggtacggattcaaaccgaagtatgacggcgaagatttagcctacaccgtgaaaaacctgaggcggtccacaaagtataaatttaaggtcattgcttacaattcagagggtaagagcaacccttctgaagtggtcgagttcaccacttgtcccgacaaaccagggatccccgtgaagccttccgttaaaggcaagattcatagtcacagcttcaaaataacgtgggatccacccaaggacaatggaggcgccacaatcaacaagtatgtggtagagatggcagaagggtctaatggaaacaaatgggagatgatttactccggtgccacccgtgaacacctctgcgaccgccttaatcctggctgtttttatagactgagggtctactgcatctcagatgggggacagagtgctgtgagcgagtcgttgctagttcaaactccggcggtgccacccggcccttgtctgccaccccggctccagggtcgacctaaggcaaaagaaatccagaccccgtccgggtga

SEQ ID NO: 2206 - RNA, 492 nt, synthetic construct
  misc_feature 1..492: note = AAG35520 variant
  source 1..492: mol_type = other RNA
atgagcgagtccggcttcaagctgctctgccagtgtcttgggtttggatctggtcacttcagatgcgactcaagtaggtggtgtcatgataacggcgtgaattacaaaatcggggaaaagtgggaccggcaaggagagaacggccagatgatgagctgcacctgtctgggtaatgggaaaggagaatttaagtgcgatccccacgaggccacatgttatgacgatggcaaaacttaccatgtcggcgaacagtggcagaaggagtatttgggggctatttgctcctgtacgtgcttcggaggtcaacgcggctggcgatgtgacaactgccgtagacctgggggagagccatctccggaaggcaccacaggtcagtcgtacaatcagtattcacagaggtaccaccaacggactaacaccaatgttaactgccccatagagtgttttatgcctttagatgtgcaggcagaccgcgaagatagcagagagtga

SEQ ID NO: 2207 - RNA, 1143 nt, synthetic construct
  misc_feature 1..1143: note = AAA52471 variant
  source 1..1143: mol_type = other RNA
atgatgttcagcggctttaacgccgactacgaggcttcctcttcaagatgcagtagcgcatcccccgccggggattctctgtcgtattaccacagccctgcggacagcttcagttccatgggatctccagtgaatgctcaggatttttgtaccgacctcgccgtcagctccgcaaacttcatcccgacagttactgccatttcaacgagtcccgatcttcaatggctggtgcagcctgctttggtaagctctgtggcaccatcccagaccagggctccccatccttttggtgtcccagccccctcagccggcgcgtatagccgggcaggggtggttaagacaatgactggaggccgcgcccagagtataggtcgacgtgggaaagtggaacaattatctcctgaggaagaggaaaagagaaggatccggcgcgagagaaataaaatggctgccgcaaagtgcaggaaccggcgccgagagctgaccgacacactacaggctgaaaccgatcagctcgaggacgaaaaatccgccctgcagactgagattgcgaatcttctgaaggagaaggaaaaattggagttcatcctcgccgcacacagaccagcttgtaagattccggatgacctgggatttcccgaagagatgagcgtcgcctcgctggatctcacaggcggcttacctgaagtggctaccccagagtctgaggaagccttcacgctgccccttttgaacgaccctgagccaaaaccctccgtagaaccggttaagtcaatcagtagcatggagctgaaaactgaaccttttgatgacttcctatttcccgcatcctctaggccaagcgggtcagagaccgcccggagtgtgcctgacatggatctctccggatcattctacgctgcggactgggagcccctgcattctggttcacttggcatggggccaatggcaacagaactggagcccttgtgcactcctgtcgtgacctgtacaccaagttgcaccgcctatacgagctcctttgtgttcacttacccggaagctgattctttcccctcgtgtgccgcagcccaccgtaagggaagctcctcaaatgagcctagttctgacagcctctcctcaccaacactgttagctctgtga

SEQ ID NO: 2208 - RNA, 1296 nt, synthetic construct
  misc_feature 1..1296: note = AAG53607 variant
  source 1..1296: mol_type = other RNA
atgcccaaccctagaccaggcaagccgagcgccccctccctggctctcgggccttctccaggagcatcacccagttggagggccgcgcctaaagctagcgaccttctgggtgcccggggcccagggggaaccttccagggccgcgatttgcgaggtggggcacacgcctcctcttcgtcattaaatcccatgcctccaagccaactgcagctaccgacactccccctggtgatggtcgctcctagtggagcacgtcttggcccactgccccatttgcaggccctcctgcaggacagacctcactttatgcatcaactgtccactgttgatgctcacgccaggacgccagtgctccaggtacatcccttagaatctccggcgatgatcagcctgacccctcccacaactgcaaccggcgtgttctcccttaaggcccggccagggttgcctcccggaattaacgtcgcttcactggaatgggtgagtcgcgagccagccctactctgcacatttcccaatcctagcgcaccaagaaaagactctaccctgtccgctgttccgcagtcaagctacccccttctggccaacggtgtgtgtaagtggcctggctgcgaaaaagtcttcgaggaaccagaggatttcttgaagcactgtcaggcggaccacctcctggatgagaaggggagggcccaatgcttactgcagcgggaaatggtgcagagtctcgagcagcaacttgtactggaaaaagagaagttgtctgcaatgcaggctcatctagccggaaaaatggctctgactaaggcctccagcgttgcatcgtctgacaaaggctcctgttgcatagtggccgctggttcacaggggcccgtcgtgcctgcgtggagtggaccacgcgaggcacccgatagcctcttcgccgtgcgaagacacctgtggggctcccatggcaattctacatttccggaatttcttcacaacatggactattttaagttccacaatatgaggcctccatttacctacgctacgctgatccggtgggccattttggaggcacccgaaaagcaacgtactctcaacgagatctatcattggttcacccgcatgtttgccttcttcagaaatcaccctgctacatggaaaaacgccattaggcataatctgagcttacacaagtgttttgtccgggttgaatcagagaaaggggcagtgtggactgtagatgagctggagttccgaaagaaacgcagtcagagaccctccaggtgcagcaacccaacccctggaccctga

SEQ ID NO: 2209 - RNA, 1098 nt, synthetic construct
  misc_feature 1..1098: note = AAA52639 variant
  source 1..1098: mol_type = other RNA
atgtggctgagaagccacaggcagctctgccttgccttcctgttggtgtgtgtcttatccgttatctttttcctgcatattcaccaagactcttttccccatggcctagggctctcaatactgtgccctgatcggcgccttgtgaccccaccggtagctatcttctgtctgcccggaacagcaatgggtcctaacgccagtagctcctgcccacagcaccccgcgtctttgtcgggcacttggacggtgtaccctaatgggcgatttggaaaccagatgggccagtatgctaccctcctggccctggcacaactcaatggtcgtagagccttcattttaccagctatgcatgcagccctggctcccgtctttaggatcacacttcctgtgttggccccagaggttgactcacggactccgtggcgcgaactgcagctacacgattggatgagcgaggaatacgcggacctcagagatcccttcctgaaacttagtgggtttccttgttcctggaccttctttcaccatctgagggagcagattcggcgcgagttcacattgcacgaccatctccgagaagaggcacagtctgtgctgggacaattaagactgggcaggaccggcgatcggccacgtacttttgtcggggtgcacgtacgcagaggagactatctccaggttatgccccagaggtggaagggtgtggtcggcgatagcgcctaccttcggcaggctatggactggttccgagcccgccacgaagcacctgtgttcgtggtcacatccaacgggatggagtggtgcaaggaaaatatcgatacctcacaaggagacgttacgtttgctggcgatggtcaggaggccactccatggaaagacttcgcgctgttgacccagtgtaaccatacaataatgactatcgggacctttggattctgggccgcatatctagctggcggcgacacagtgtacctggccaattttaccctccccgatagtgagttcctgaagatttttaaaccggaagctgccttccttcctgagtgggtagggatcaacgcagacctgagccccttgtggacgctcgccaagccatga

SEQ ID NO: 2210 - RNA, 1380 nt, synthetic construct
  misc_feature 1..1380: note = EAW58359 variant
  source 1..1380: mol_type = other RNA
atggctcccctgtgccctagcccatggctcccgcttctgatccccgctcctgcaccaggcttgaccgtgcagttactgctatccctcctgcttctggtccccgttcaccctcaaagattgccaaggatgcaggaggactctcccctcgggggaggttcaagtggcgaagatgaccctctgggggaggaagatctgccaagcgaggaagactccccgcgggaggaggatccccctggagaagaggacctcccaggcgaagaggatttacccggtgaggaagacctgcctgaggtgaagccaaaatctgaagaggaagggtcgcttaagttggaggatctgcccacagtagaggccccgggagaccctcaggaaccccagaacaatgcgcatcgcgataaagagggcgacgatcaatcacactggcgatacggcggggacccaccttggccccgtgtgagcccagcttgtgccggaagattccagagtcccgtcgacattaggcctcagctagcagccttttgcccagctctccggccgctggaacttctgggtttccagttgccccctctcccagagctgcgcttaagaaacaatggccattccgtgcaactgactttgccccctgggcttgaaatggcactgggaccaggcagggagtatcgggccttgcagctacatctgcactggggtgctgccgggcgccccggatctgagcacacggttgaaggccaccgatttccggcggagatacatgtggtccacctcagcaccgcattcgccagagtggatgaagctctgggcaggcctgggggacttgccgtactggcagcttttctcgaggaaggtccagaggagaactccgcctacgaacagctcctgtcacggttagaggaaatcgcggaggagggcagtgaaacacaggttcccgggctggacattagcgccctactcccttctgatttctcccgttattttcaatacgagggatcactgactacacccccatgtgcacagggcgtgatctggaccgtcttcaatcagaccgtgatgcttagcgctaagcaattgcatactctgagtgacacactctggggtcctggggattctcgcctgcagcttaactttagagccacccagcccctgaatggcagggtgattgaagcctccttcccagccggagtcgacagctcgccgcgggcagccgagcctgttcagttgaactcttgcctcgctgcgggcgatatcctggcattagtgtttgggctgctattcgccgtaacgtccgtggcttttctcgtccaaatgcgacgccagcacagaaggggaactaaaggtggcgtgtcatatcggcccgccgaagttgcagagaccggggcctga

SEQ ID NO: 2211 - RNA, 417 nt, synthetic construct
  misc_feature 1..417: note = U19142.1 variant
  source 1..417: mol_type = other RNA
atgagctggagaggcaggtccacctaccggccccgccctcgacgttatgtggagccaccggaaatgatcgggcccatgagacctgagcagttctctgacgaagtcgagccagccacacccgaagagggagagcctgctactcaaaggcaggacccagcagccgcgcaggaaggtgaggacgaaggcgcttcagccgggcagggacccaagcctgaggcagatagtcaagagcagggccacccacagacgggttgcgaatgtgaggacgggccggatggacaggaaatggatccccctaacccagaggaagttaaaacccccgaggaggaaatgcggagccattacgtggcccaaacaggcattctgtggctccttatgaataactgctttctgaatttgtcccctcgcaagccatga

SEQ ID NO: 2212 - RNA, 351 nt, synthetic construct
  misc_feature 1..351: note = AAH69397 variant
  source 1..351: mol_type = other RNA
atgagctggagaggcaggtccacctaccggccccgccctcgacgttatgtggagccaccggaaatgatcgggcccatgagacctgagcagttctctgacgaagtcgagccagccacacccgaagagggagagcctgctactcaaaggcaggatccagcagccgcgcaggaaggtcaggacgagggcgcttcagccgggcaaggacccaagcctgaagcacacagtcaggagcagggccatccacagacgggttgcgagtgtgaagatgggccggacggacaagagatggatccccctaacccagaagaggttaaaacccccgaagagggcgagaagcagagccagtgctga

SEQ ID NO: 2213 - RNA, 357 nt, synthetic construct
  misc_feature 1..357: note = AAA82746 variant
  source 1..357: mol_type = other RNA
atgaacctgagcagaggcaagtccacctactattggcccaggcctcggcgctacgtgcagccaccggaggtcatcgggcccatgcgacctgaacaattctctgacgaggttgaaccagccacacccgaggaaggagagcctgctactcagcgtcaggacccagcagccgcgcaggagggtgaagacgagggcgcttcagccgggcaaggacccaaacctgaagcagatagtcaggagcagggccacccacagacgggttgcgagtgtgaagacgggccggatggacaagagatggatccccctaatccagaagaggtgaagacccccgaagagggcgagaaacagagccagtgctga

SEQ ID NO: 2214 - RNA, 354 nt, synthetic construct
  misc_feature 1..354: note = AAH69470 variant
  source 1..354: mol_type = other RNA
atgagctggagaggcaggtccacctactattggccccggcctcgccgatacgtgcagccaccggagatgatcgggcccatgcgtcctgaacaattctctgacgaggtcgaaccagccacacccgaggaaggagagcctgctactcagagacaggacccagcagccgcgcaggagggtgaagacgagggcgcttcagccgggcaaggacccaagcctgaagcagatagtcaggagcagggccacccacagacgggttgcgagtgtgaagacgggccggatggacaagagatggatccccctaacccagaagaggttaaaacccccgaagagggcgagggccagagccagtgctga

SEQ ID NO: 2215 - RNA, 354 nt, synthetic construct
  misc_feature 1..354: note = AAA82748 variant
  source 1..354: mol_type = other RNA
atgagctggagaggcaggtccacctactattggccccggcctcgccgatacgtgcagccaccggaggtcatcgggcccatgcgtcctgaacaattctctgacgaggttgaaccagccacacccgaggaaggagagcctgctactcagagacaggacccagcagccgcgcaggagggtgaagacgagggcgcttcagccgggcaaggacccaagcctgaagcagatagtcaggagcagggccacccacagacgggttgcgagtgtgaagacgggccggatggacaagagatggatccccctaacccagaagaggtgaaaacccccgaagagggcgagaagcagagccagtgctga

SEQ ID NO: 2216 - RNA, 354 nt, synthetic construct
  misc_feature 1..354: note = AAA82749 variant
  source 1..354: mol_type = other RNA
atgagctggagaggcaggtccacctactattggccccggcctcgccgatacgtgcagccaccggaggtcatcgggcccatgcgtcctgaacaattctctgacgaggttgaaccagccacacccgaggaaggagagcctgctactcagagacaggacccagcagccgcgcaggagggtgaagacgagggcgcttcagccgggcaaggacccaagcctgaagcagatagtcaggagcagggccacccacagacgggttgcgagtgtgaagacgggccggatggacaagaggtggatccccctaacccagaagaggtaaaaacccccgaagagggcgagaagcagagccagtgctga

SEQ ID NO: 2217 - RNA, 354 nt, synthetic construct
  misc_feature 1..354: note = AAC25989 variant
  source 1..354: mol_type = other RNA
atgagctggagaggcaggtccacctactattggccccggcctcgccgatacgtgcagccaccggagatgatcgggcccatgcgtcctgaacaattctctgacgaggtcgaaccagccacacccgaggaaggagagcctgctactcagagacaggatccagcagccgcgcaggagggtgaagacgagggcgcttcagccgggcaaggacccaagcctgaagcacacagtcaggagcagggccatccacagacgggttgcgagtgtgaagatgggccggacggacaagagatggatccccctaacccagaagaggttaaaacccccgaagagggcgagaagcagagccagtgctga

SEQ ID NO: 2218 - RNA, 351 nt, synthetic construct
  misc_feature 1..351: note = AAC33676 variant
  source 1..351: mol_type = other RNA
atgagctggagaggcaggtccacctaccggccccgccctcgacgttatgtggagccaccggaaatgatcgggcccatgagacctgagcagttctctgacgaagtcgagccagccacacccgaagagggagagcctgctactcaaaggcaggacccagcagccgcgcaggaaggtgaggacgaaggcgcttcagccgggcagggacccaagcctgaggcagatagtcaagagcagggccacccacagacgggttgcgaatgtgaggacgggccggatggacaggaaatggatccccctaacccagaggaagttaaaacccccgaggagggcgaaaagcaaagccagtgctga

SEQ ID NO: 2219 - RNA, 1344 nt, synthetic construct
  misc_feature 1..1344: note = AAA35657 variant
  source 1..1344: mol_type = other RNA
atggagctgctcaaacttaacagaagcgtgcagggcaccgggcccggacctggtgcctccctgtgcaggccaggcgctccgttgttaaattcttcaagtgtcgggaacctgagctgtgaaccccctcggatccgcggagcaggcacacgagagctagaactcgccattcgtataactctgtacgcggttatcttccttatgtccgtgggtgggaatatgctgattatcgtagtgttgggactctctagaaggctgcggacggtcaccaacgcttttctgctctcgttagccgtgtcagacctgcttttggcagttgcctgcatgccattcacactgctacccaatctcatgggcacttttattttcggcaccgtgatctgtaaggctgtcagctatctgatgggggtgagtgtatccgtttctacacttagcctggtggcaatagccttggagcgctactccgctatctgcagacctctccaagccagggtctggcagacccggtcacacgcggcacgcgtgattgtggccacttggctgttaagtggactgctcatggtcccatatcccgtttacacagtggtacagcctgtgggtccacgagtccttcagtgtgtgcatagatggccgagcgctagggttcggcaaacctggtctgtgctgttgctactgctcctgtttttcatccccggcgtcgtgatggccgtagcatatgggcttatttcccgtgaactgtacttgggactccgctttgatggcgactcagatagcgacagtcagtctagagttaggaaccagggtgggctgcctggagctgtgcaccagaatggccggtgccgaccagagacgggcgccgtcggggaggattccgacggatgttatgtgcaattaccccgcagcagacctgcgctggaactaactgccctcaccgcaccaggtcccggctcggggtctaggccgacacaggctaagctgcttgccaaaaagcgggtcgtgcgcatgttgctggttatcgtggtactcttctttctgtgctggcttcctgtctactccgctaacacttggagagccttcgatggacccggcgcacatagggccctgtcaggtgctccaataagttttattcacttgctcagctacgcgtccgcatgtgtgaatcctctggtttattgcttcatgcatcgtcggtttcgacaggcctgtttagagacctgcgctagatgctgtcccaggccaccccgcgcccggcctagagcactgccagacgaagatccgcccacaccttctatcgccagcctatcaaggctcagttacaccacgatttccactctggggccaggctga

SEQ ID NO: 2220 - RNA, 2226 nt, synthetic construct
  misc_feature 1..2226: note = AAD22449 variant
  source 1..2226: mol_type = other RNA
atggccctgttcaccccctggaagctcagctcccagaaacttggctttttcctggtgacatttgggttcatctggggaatgatgttgttacactttactattcaacagagaacgcagcctgagtcttcaagtatgctgagggaacagatactagacctcagcaagcggtacatcaaagctctggcagaggaaaaccgcaatgtcgttgatggtccatatgccggcgtgatgaccgcgtacgaccttaagaaaacactggctgtattgctcgataacattctgcaacgaatcgggaagctggagtccaaggtggacaatctcgtcgtgaacggaactggcaccaattctacaaactcgaccactgccgttccgtcattagtggcactggaaaagattaatgtcgccgatatcataaacggtgctcaggagaagtgcgtgcttccccctatggacgggtatccacattgtgagggaaaaatcaagtggatgaaagatatgtggcgtagcgacccctgctacgcagattatggcgtagacggcagtacatgttccttctttatttacttgtctgaagttgagaattggtgccctcatctgccatggagagccaagaacccctatgaagaggctgatcacaatagcctagccgagatcaggaccgacttcaacattctctactccatgatgaagaaacacgaagagtttcggtggatgcgcctgagaatcaggcggatggcggatgcatggatacaggccattaagtcacttgctgaaaaacagaatctggagaagcgcaaacgaaagaaagtgttggtccatctcgggctgttaacgaaggaaagtggattcaagatcgccgagactgcatttagcggtggccctctgggggagctcgtgcaatggtctgaccttattacctccctgtacttgctaggacacgacatcagaatctcagctagcctggccgaactcaaagagattatgaagaaagtggtcggcaacaggagtggttgtccaacagttggggatcggatagtggaactgatctatattgacatcgtaggacttgcgcagttcaagaaaactctgggcccgtcttgggtgcactaccagtgcatgttgcgtgtcctcgattcctttggcaccgagcccgagttcaatcatgccaactatgcacagagcaaggggcacaagacaccttggggaaaatggaacctgaatccacaacagttctacaccatgtttccccatacgcctgacaactcgttcttaggttttgtggttgaacagcaccttaattcttccgatatacaccatattaacgagatcaagcgccaaaatcagagtctagtgtatggcaaagtcgacagtttctggaagaacaaaaagatctacctcgatattatccacacttatatggaagtgcatgctacagtatacgggagctccaccaagaatattccatcttacgttaaaaaccacggaatactgagcggcagagaccttcagtttttgctgagggagactaaactcttcgtgggtctggggtttccctatgaaggcccggcccctcttgaggctatcgccaatggatgtgcattcctgaaccccaaatttaatccacctaagtcaagtaaaaacacagatttctttattggcaagcccaccttgcgggaactcacgtcccagcatccatacgccgaggtcttcatcgggcgaccccacgtgtggaccgtcgacctgaataaccaagaggaagtggaggatgctgttaaggcgatcttaaatcagaaaattgaaccttatatgccatacgagtttacatgcgagggaatgctgcagcgcataaacgcattcatcgaaaagcaggacttctgtcacggtcaagtgatgtggccgcccctaagcgccctccaggtaaaactggctgagcctggccagtcttgcaagcaggtctgtcaagaatcacagcttatttgcgagccatcatttttccagcatttgaacaaagacaaggatatgctgaaatataaggtgacttgccagagctccgaactcgccaaggacatcctggttccctcttttgatcctaaaaataagcactgtgtgttccaaggggacttactgctgttttcgtgcgcaggagcccatccaagacaccagagggtctgtccctgccgggatttcattaaaggccaggtggctttgtgtaaggactgcctctga

SEQ ID NO: 2221 - RNA, 1743 nt, synthetic construct
  misc_feature 1..1743: note = EAX11770 variant
  source 1..1743: mol_type = other RNA
atggccggcaccgtgagaacagcttgcctggtcgttgcaatgctccttagcctggacttccccgggcaggcccaacctccaccgccccctccagatgcgacttgtcaccaggtgaggtcctttttccagcggttgcagcccggattaaagtgggtacctgagacgccagtgcccggttctgacctgcaagtctgcctacctaaaggcccaacctgttgctcacgcaagatggaagagaaataccagctcacagctcgactgaacatggaacagcttctgcagagtgccagcatggagttgaagtttctcatcattcaaaatgcagccgtgttccaggaagcatttgagatagttgtgcgtcatgctaaaaactatactaatgccatgttcaagaacaattacccgtccctgacaccccaggcttttgagttcgtcggggaatttttcaccgatgtgtctctgtatatcctcggatcggacattaacgtagatgacatggttaatgagttatttgattcactgttccctgtgatctacacccagcttatgaacccaggcttgcccgacagcgccctggatattaatgaatgtctaagaggtgcgaggcgggacctcaaggtctttgggaacttccctaaactgatcatgactcaagtgagtaagtcccttcaggtgacacgcatattcctgcaggcattgaatctcggaatcgaggtcattaacaccacggatcacctgaaattttctaaggactgcggcagaatgttaactaggatgtggtattgtagctactgccaaggcctgatgatggttaaaccatgtgggggatattgcaatgtggtaatgcagggttgtatggccggcgtggtcgagatcgataagtactggcgggaatacattctctcccttgaggaactggtgaacgggatgtatcgcatctacgacatggagaatgttttgctaggactgttctcaaccatacatgacagtattcagtatgtgcagaagaacgctggcaaactcacaactaccatcggtaagctgtgcgcccacagccaacagcgacagtacagatctgcatattaccccgaagatctttttattgacaaaaaggtcctgaaagtggctcatgtagagcacgaggaaacattgtcctcaaggcggcgtgagctcatccagaagctgaaaagtttcatcagcttttattctgccttaccggggtacatttgctcccacagccctgttgcggaaaacgataccctgtgttggaatggacaagagctagtggaacgctactcgcagaaggccgcaagaaacggcatgaagaatcagttcaacctccatgagctgaaaatgaagggccccgagccagtcgtgtctcagataatcgacaaacttaagcacattaatcaattgctgaggacgatgtccatgcctaaagggcgggtcctcgataagaacctggacgaagagggatttgaatcaggtgattgcggcgacgatgaggacgaatgtatcgggggaagtggcgatggtatgataaaggtgaaaaatcagcttcgattcctggctgagttggcctatgacctcgacgttgatgacgctcccgggaacagccagcaggccactccaaaggataatgagatttccacatttcataacctgggcaatgtgcactctcccttaaaactgctaaccagcatggcaatctcagtagtctgcttctttttcctcgtgcactga

SEQ ID NO: 2222 - RNA, 1743 nt, synthetic construct; identical to SEQ ID NO: 2221
  misc_feature 1..1743: note = AAA93471 variant
  source 1..1743: mol_type = other RNA

SEQ ID NO: 2223 - RNA, 1743 nt, synthetic construct
  misc_feature 1..1743: note = AAH35972 variant
  source 1..1743: mol_type = other RNA
atggccggcaccgtgagaacagcttgcctggtcgttgcaatgctccttagcctggacttccccgggcaggcccaacctccaccgccccctccagatgcgacttgtcaccaggtgaggtcctttttccagcggttgcagcccggattaaagtgggtacctgagacgccagtgcccggttctgacctgcaagtctgcctacctaaaggcccaacctgttgctcacgcaagatggaagagaaataccagctcacagctcgactgaacatggaacagcttctgcagagtgccagcatggagttgaagtttctcatcattcaaaatgcagccgtgttccaggaagcatttgagatagttgtgcgtcatgctaaaaactatactaatgccatgttcaagaacaattacccgtccctgacaccccaggcttttgagttcgtcggggaatttttcaccgatgtgtctctgtatatcctcggatcggacattaacgtagatgacatggttaatgagttatttgattcactgttccctgtgatctacacccagcttatgaacccaggcttgcccgacagcgccctggatattaatgaatgtctaagaggtgcgaggcgggacctcaaggtctttgggaacttccctaaactgatcatgactcaagtgagtaagtcccttcaggtgacacgcatattcctgcaggcattgaatctcggaatcgaggtcattaacaccacggatcacctgaaattttctaaggactgcggcagaatgttaactaggatgtggtattgtagctactgccaaggcctgatgatggttaaaccatgtgggggatattgcaatgtggtaatgcagggttgtatggccggcgtggtcgagatcgataagtactggcgggaatacattctctcccttgaggaactggtgaacgggatgtatcgcatctacgacatggagaatgttttgctaggactgttctcaaccatacatgacagtattcagtatgtgcagaagaacgctggcaaactcacaactaccatcggtaagctgtgcgcccacagccaacagcgacagtacagatttgcatattaccccgaagatcttttcattgacaaaaaggtcctgaaagtggctcatgtagagcacgaggaaacattgtcttccaggcggcgtgagctcatccagaagctgaaatcatttatcagcttctatagtgccttaccggggtacatttgctctcactcccctgttgcggaaaacgataccctgtgttggaatggacaagagctagtggaacgctacagccagaaggccgcaagaaacggcatgaagaatcagtttaacctccatgagctgaaaatgaagggccccgagccagtcgtgtcgcagataatcgacaaacttaagcacattaatcaattgctgaggacgatgtctatgcctaaagggcgggtcctcgataagaacctggacgaagagggattcgaatccggtgattgcggcgacgatgaggacgaatgtatcgggggatcaggcgatggtatgataaaggtgaaaaatcagcttcgatttctggctgagttggcctatgacctcgacgttgatgacgctcccgggaacagtcagcaggccactccaaaggataatgagattagcacattccataacctgggcaatgtgcactcccccttaaaactgctaacctctatggcaatcagcgtagtctgctttttctttctcgtgcactga

SEQ ID NO: 2224 - RNA, 1683 nt, synthetic construct
  misc_feature 1..1683: note = EAW93784 variant
  source 1..1683: mol_type = other RNA
atggagtgcctatactatttcctcggctttcttctgttggccgctagattacccctggacgcagccaagaggttccacgatgtgctagggaacgaacggcctagcgcgtacatgcgcgagcataatcagctcaacggatggtcctctgacgaaaatgattggaacgagaaactgtatccagtctggaagcgaggtgacatgcgttggaaaaattcatggaagggcgggagagttcaagctgtgcttaccagtgatagcccggccctggtaggatccaacatcacatttgcagtgaatttgattttccccaggtgtcagaaagaagacgccaacggcaatatagtctacgagaagaactgccggaatgaggctggtctctctgcagatccttatgtgtacaactggactgcctggtcggaagactcagatggggagaatggaacgggccagagccaccataacgtttttccagacggcaagcccttccctcaccatccagggtggcgcagatggaattttatctatgtgttccacaccctgggacagtactttcaaaaactgggtaggtgtagtgtccgggtgtccgtaaacacagctaacgttactctcggcccccagttaatggaagtgaccgtctaccgccgacacgggagagcctatgtgcctattgcgcaagtgaaggatgtctacgttgtgacagaccagatcccagtattcgtgaccatgtttcagaaaaatgataggaactctagcgacgagactttcctgaaggaccttccgattatgtttgatgtcttgatccatgacccctcccacttcctgaattattcaacaataaactacaaatggagtttcggagataataccggcctatttgtgagcacgaaccatactgttaatcacacctatgtgctcaacggtacattctctctgaatcttactgtcaaggcagccgctcctgggccatgtccccctccacccccgcctccccggccatccaagcctaccccctcactgggaccagccggcgacaaccccttggagctcagccgtatccctgatgaaaattgccagattaaccgctacggccactttcaggcaacaatcaccattgtggaggggatcctggaagtaaatataattcagatgacggacgttttaatgccagtgccgtggcccgagagttctctgatcgatttcgtcgtgacttgccaaggatccattcctacagaagtctgtaccatcatcagcgacccaacttgcgagattacacagaacaccgtgtgttcgcccgttgatgtggacgagatgtgcctccttacggtaagaaggacctttaatggttctggcacatattgtgtcaacctgactttgggggatgacacctccctagctctgacatcaactctcataagtgtgcctgaccgggatccagccagccccctgcgaatggcgaactccgcccttatctctgttggatgcctggcaattttcgtgaccgtcatcagcttgctcgtgtacaaaaagcataaagaatacaatccgatagagaactcacctggcaatgtagtgcgcagtaagggtctgtccgtctttttaaacagagctaaagccgttttctttccagggaatcaggaaaaggaccccctgctgaaaaaccaagagttcaagggcgtgagctga

SEQ ID NO: 2225 - RNA, 1719 nt, synthetic construct
  misc_feature 1..1719: note = AAH32783 variant
  source 1..1719: mol_type = other RNA
atggagtgcctgtactatttcctcggctttcttctgttggccgctagattacccctggacgcagccaagaggttccacgatgtgctagggaacgaacggcctagcgcgtacatgcgcgagcataatcagctcaacggatggtcctctgacgaaaatgattggaacgagaaactgtatccagtctggaagcgaggtgacatgcgttggaaaaattcatggaagggcgggagagttcaagctgtgcttaccagtgatagcccggccctggtaggatccaacatcacatttgcagtgaatttgattttccccaggtgtcagaaagaagacgccaacggcaatatagtctacgagaagaactgccggaatgaggctggtctctctgcagatccttatgtgtacaactggactgcctggtcggaagactcagatggggagaatggaacgggccagagccaccataacgtttttccagacggcaagcccttccctcaccatccagggtggcgcagatggaattttatctatgtgttccacaccctgggacagtactttcaaaaactgggtaggtgtagtgtccgggtgtccgtaaacacagctaacgttactctcggcccccagttaatggaagtgaccgtctaccgccgacacgggagagcctatgtgcctattgcgcaagtgaaggatgtctacgttgtgacagaccagatcccagtattcgtgaccatgtttcagaaaaatgataggaactctagcgacgagactttcctgaaggaccttccgattatgtttgatgtcttgatccatgacccctcccacttcctgaattattcaacaataaactacaaatggagtttcggagataataccggcctatttgtgagcacgaaccatactgttaatcacacctatgtgctcaacggtacattctctctgaatcttactgtcaaggcagccgctcctgggccatgtccccctccacccccgcctccccggccatccaagcctaccccctcactggccacaaccttgaaaagctacgacagtaacacgccaggacccgcaggcgataatcctctcgagctgtctcgtatcccagacgaaaactgccagattaatcgctatggccactttcaggctactatcacaattgtggaggggatcttagaagtaaacataattcagatgaccgatgttctgatgccggtgccctggcctgagtccagcctcatcgacttcgtcgtgacttgccaaggatcgattccaacagaagtctgtaccatcatctctgatcccacgtgcgagattacccagaatacagtgtgttcccctgttgacgtggatgagatgtgccttctgactgtaagaaggacctttaacggttcaggcacatactgtgtcaacttgactctaggggacgacaccagtctggccctcacaagcaccctgatatccgtgccagatcgggaccccgcgtctccgcttcgaatggccaatagcgcactgatctcagttggatgcttggctattttcgtgactgtcatcagtctcctggtgtacaagaaacataaggaatataaccctatagaaaattccccaggcaacgtagtgcgcagcaaaggtttatctgtttttctgaatagagccaaggctgtcttctttcccgggaaccaggagaaagatcctctactcaagaatcaagagttcaagggcgtgtcatga

SEQ ID NO: 2226 - RNA, 621 nt, synthetic construct
  misc_feature 1..621: note = CAD43718 variant
  source 1..621: mol_type = other RNA
atggagtgcctgtactatttcctcggctttcttctgttggccgctagattacccctggacgcagccaagaggttccacgatgtgctagggaacgaacggcctagcgcgtacatgcgcgagcataatcagctcaacggatggtcctctgacgaaaatgattggaacgagaaactgtatccagtctggaagcgaggtgacatgcgttggaaaaattcatggaagggcgggagagttcaagctgtgcttaccagtgatagcccggccctggtaggatccaacatcacatttgcagtgaatttgattttccccaggtgtcagaaagaagacgccaacggcaatatagtctacgagaagaactgccggaatgaggctggtctctctgcagatccttatgtgtacaactggactgcctggtcggaagactcagatggggagaatggaacgggccagagccaccataacgtttttccagacggcaagcccttccctcaccatccagggtggcgcagatggaattttatctatgtgttccacaccctggattggctgctccagacacccaaattactgctttacttgagtctgaagtttcaaccttccctattcctcctgtacaactga

SEQ ID NO: 2227 - RNA, 621 nt, synthetic construct
  misc_feature 1..621: note = AAH11595 variant
  source 1..621: mol_type = other RNA
atggagtgcctgtactatttcctcggctttcttctgttggccgctagattacccctggacgcagccaagaggttccacgatgtgctagggaacgaacggcctagcgcgtacatgcgcgagcataatcagctcaacggatggtcctctgacgaaaatgattggaacgagaaactgtatccagtctggaagcgaggtgacatgcgttggaaaaattcatggaagggcgggagagttcaagctgtgcttaccagtgatagcccggccctggtaggatccaacatcacatttgcagtgaatttgattttccccaggtgtcagaaagaagacgccaacggcaatatagtctacgagaagaactgccggaatgaggctggtctctctgcagatccttatgtgtacaactggactgcctggtcggaagactcagatggggagaatggaacgggccagagccaccataacgtttttccagacggcaagcccttccctcaccatccagggtggcgcagatggaattttatctatgtgttccacaccctgggatggctgctccagacacccaaattactgctttacttgagtctgaagtttcaaccttccctattcctcctgtacaactga

SEQ ID NO: 2228 - RNA, 2640 nt, synthetic construct
  misc_feature 1..2640: note = CCDS5600.1 variant
  source 1..2640: mol_type = other RNA
atgaagatgctgaccagactccaggtgcttacactggccttgttcagcaaaggctttttactgtccctaggggaccacaacttcctcaggcgggagatcaagattgaaggagatctggtccttggtggcctgtttcccataaatgagaaagggactggaacggaagagtgcggccgcatcaacgaagaccgaggtattcaacgtttggaggctatgctgttcgcaatcgatgagattaataaggacgattacctcctgcctggggttaaactcggagtgcatatcttagacacctgttctagagatacatatgccctggaacagtcacttgagtttgtaagggcgagtttgactaaggtggacgaagctgagtacatgtgcccagatggcagctatgccatacaggagaacatcccgctgctaattgcaggcgtcatcgggggatcctactcttcggtgtcaattcaggttgccaatctcctgcggcttttccaaatcccccagataagctatgctagtacctccgcaaagctgtctgacaaaagccgctacgattattttgccagaacagtgcctccagacttctaccaggctaaggccatggcggaaattttgaggtttttcaactggacctacgtctccactgtggcatcagagggtgattatggcgaaacagggatcgaggcctttgaacaggaggctcggctccgcaatatttgtatcgccaccgcagagaaagtaggacgaagtaacatcagaaagagctacgactctgttattagggaactgttacaaaaacccaatgctcgggtggtcgtgctgttcatgcgttccgacgattcacgcgagctcatagccgcggccagcagagcaaacgctagttttacgtgggtggcctctgacggctggggtgctcaggaatccatcattaaggggagcgagcacgtcgcctatggagcaatcactcttgaactggcctcgcagcctgttaggcagttcgatcggtacttccaatctttgaatccatataacaatcatcgaaacccctggtttcgcgacttctgggagcagaagtttcagtgctccctacaaaataaaagaaaccacaggcgggtgtgtgataagcatctggctatagactcaagtaactacgagcaggaaagcaaaattatgttcgtagtgaatgcggtctatgcaatggcccacgctctccacaagatgcagcgcaccctgtgccctaacacaactaaactttgtgatgccatgaagatcctggacggcaaaaagttgtacaaggattacctcctgaaaatcaattttaccgcaccattcaacccgaataaggacgccgattccattgtgaaatttgacacattcggcgacgggatgggaagatataacgtttttaatttccagaacgtgggtggcaagtactcttatttaaaagtcgggcattgggctgagaccctgagcctagatgtaaattcaatccactggagtaggaactccgtgcccacgagccaatgctctgacccttgtgccccaaatgaaatgaagaacatgcagcccggagatgtttgctgttggatttgcataccttgcgagccatacgaatatctcgcagacgagtttacttgtatggattgcggctcaggtcagtggcccacagcggacctgaccgggtgttacgatcttccggaggactatatccgttgggaagatgcttgggccattggccctgtgactatcgcatgcttgggattcatgtgtacatgcatggtcgtgaccgtctttatcaagcataataacacgcccctggtgaaagccagtggccgggagctctgttacattctgcttttcggggttggactgagctactgcatgaccttctttttcatagctaagccatcccctgtgatctgtgccttgcgaagactcggtctggggtcttcgtttgcaatttgctatagcgctttactgacaaaaactaattgtatcgccaggattttcgacggcgtaaagaacggagcgcagcgccccaaatttatctccccatcaagtcaagtcttcatatgcctaggcctcatcctggtgcagattgttatggtgtctgtctggcttatcttggaagcccccggtacccggagatacacactggctgagaagagggagactgtgattctcaagtgcaacgtaaaagatagctccatgctgatctcattaacctatgacgtgatactggttattctttgtacagtctacgcatttaagacccgcaaatgccctgaaaatttcaacgaggccaagtttatcgggttcactatgtatacgacatgtattatctggttggcttttctcccaatattctacgtgaccagctctgattatcgagtgcagactaccacaatgtgcatctccgtcagtctgagcggctttgttgtgctaggatgtctgttcgccccgaaagtgcacattatcctcttccagccccaaaagaatgtagtcacccaccggctgcatcttaaccgtttttctgtgtccggcactgggacaacgtactcacagagtagcgcatcgacctacgttcctactgtgtgcaatggaagagaagtcttggactccacaacctctagcctgtga

SEQ ID NO: 2229 - RNA, 1947 nt, synthetic construct
  misc_feature 1..1947: note = CCDS4977.1 variant
  source 1..1947: mol_type = other RNA
atgagccaccatggcggggcccccaaggcttccacctgggtggtcgcatctagaaggtcaagtacagttagccgggcccctgagcgccgaccagcggaagaactgaaccgtactggaccggaaggttactccgtgggcagagggggaaggtggcggggcacgtctaggccccctgaggctgtagccgcaggtcacgaggagctcccactttgcttcgccctgaaatcgcattttgtgggggctgtcatcggaagaggcggctcaaagattaaaaatatacagagcaccacaaacactaccatccaaattatccaggagcagcccgaaagtttggtgaagattttcgggtccaaagcaatgcagacaaaggccaaggctgttatcgacaattttgtgaaaaagttagaggaaaactataattctgagtgtggaatagataccgccttccaacctagcgtcggtaaagacggctccactgataacaatgtggtagcgggggacaggccactgatcgattgggaccagattcgggaggaaggactaaagtggcagaaaacaaagtgggcagatctccctcccatcaagaaaaacttttacaaggagtcaaccgccacgagtgctatgagcaaagttgaagccgactcttggcgcaaggagaatttcaacattacttgggatgacctgaaagatggcgaaaagcgaccaatcccgaatcctacctgcacatttgacgatgcattccagtgttatcccgaggtgatggagaacattaaaaaggctggttttcaaaagccaactcccatacagtcccaggcctggcctatcgtccttcaggggattgacctgatcggagtggcgcaaaccggcacaggcaaaaccttgtgctacctcatgccagggttcatccacctggtgctgcagccctcactcaagggacagagaaataggccgggtatgttagtcctgacgcctactcgggaacttgccttgcaagttgagggcgaatgttgcaaatatagctacaaggggctgcgtagtgtgtgtgtatatggaggcggtaaccgcgacgagcagattgaagagttgaaaaagggggtggatataatcattgcaacacccggcagactcaatgacctgcagatgtctaactttgtcaaccttaagaatatcacctacctggtgttggatgaggctgacaaaatgctcgatatgggattcgaaccacagataatgaagattctgttagacgttaggcctgatcggcaaactgtgatgacatccgccacctggccccatagcgtccaccgactggctcagtcgtacctcaaagagccaatgatcgtgtatgtaggcacgcttgacctggttgccgtgtcttccgtcaagcagaacatcattgtgaccacagaagaggaaaaatggtcacacatgcagacttttctacaaagtatgagctccaccgataaggtcatcgtgttcgtttctcgcaaggcagtggccgaccatctaagctcagatctgattctcgggaatataagtgtagagtccctgcacggagacagagagcagagggaccgggaaaaagctcttgagaacttcaagacaggtaaagtccgcatcctgattgcgactgatttggcaagcagaggcctcgacgtgcatgatgttacccacgtgtacaattttgacttccccaggaacatcgaagagtatgtccaccgtatcgggcggacaggacgagccggcagaaccggtgtgtctattactacgctgacaaggaatgattggcgcgtagcttcagagttaataaacatcctggaacgggccaatcagagtattcctgaggagctagtgagcatggcagaaagatttaaggcccatcagcaaaaacgcgaaatggagcgcaagatggagcgaccacaggggcggccgaagaaattccactga

SEQ ID NO: 2230 - RNA, 1209 nt, synthetic construct
  misc_feature 1..1209: note = ACD02430 variant
  source 1..1209: mol_type = other RNA
atggcccagaaggagggcgggagaaccgtgccctgctgtagcaggcctaaagtcgctgcactgacagccggaactctccttctgttgacggcgatcggtgctgcctcctgggcaattgttgccgtgttactgcggtctgaccaagaaccactatacccggtacaggtgtcaagtgctgatgcacgcctcatggtcttcgacaagaccgagggcacatggcgactgctttgcagctcccgttctaacgccagagtggctgggctgtcgtgtgaagagatgggatttttgagggccctcactcactcagaactggatgttcggaccgcgggcgcaaatggtacaagcgggttcttttgcgtggacgagggacgcctgccccatacccagagactcttagaggtcataagtgtgtgtgattgccctaggggccggttcctggccgctatctgtcaggactgcggccgccgaaaacttccagtagatagaattgttgggggaagggacacttccttgggtcggtggccctggcaagtgtctctgcgttatgatggcgcccacctatgtgggggaagcctcctgtccggcgactgggtccttacagcagctcattgctttcctgaacgcaacagagtgctgtcaaggtggcgggtgttcgccggtgcggtcgcccaggcaagtccacacgggttgcagctcggagttcaggctgtggtataccatggcggctatctgccctttcgagatcctaatagcgaggaaaactctaatgacatcgccttagtgcacctgtcctcaccactcccgcttaccgagtacattcaacccgtctgtctgcctgctgccgggcaggcattggtggatggaaagatctgcacggttactggttggggcaacacccagtattacgggcagcaagccggagtgctacaggaggctcgcgtcccaataatcagcaatgacgtgtgcaacggcgcggacttctatggtaatcagattaaacccaagatgttttgtgcagggtaccctgaaggcggaatcgatgcctgccaaggcgacagtgggggaccattcgtatgtgaggattctatttccagaacacccaggtggcggctgtgcggtatcgttagctggggcactgggtgtgctctcgcccagaagccgggagtgtacaccaaagtctcggactttcgcgaatggatattccagtga

SEQ ID NO: 2231 - RNA, 1254 nt, synthetic construct
  misc_feature 1..1254: note = AAA36013 variant
  source 1..1254: mol_type = other RNA
atggcccagaaggagggcgggagaaccgtgccctgctgtagcaggcctaaagtcgctgcactgacagccggaactctccttctgttgacggcgatcggtgctgcctcctgggcaattgttgccgtgttactgcggtctgaccaagaaccactatacccggtacaggtgtcaagtgctgatgcacgcctcatggtcttcgacaagaccgagggcacatggcgactgctttgcagctcccgttctaacgccagagtggctgggctgtcgtgtgaagagatgggatttttgagggccctcactcactcagaactggatgttcggaccgcgggcgcaaatggtacaagcgggttcttttgcgtggacgagggacgcctgccccatacccagagactcttagaggtcataagtgtgtgtgattgccctaggggccggttcctggccgctatctgtcaggactgcggccgccgaaaacttccagtagatagaattgttgggggaagggacacttccttgggtcggtggccctggcaagtgtctctgcgttatgatggcgcccacctatgtgggggaagcctcctgtccggcgactgggtccttacagcagctcattgctttcctgaacgcaacagagtgctgtcaaggtggcgggtgttcgccggtgcggtcgcccaggcaagtccacacgggttgcagctcggagttcaggctgtggtataccatggcggctatctgccctttcgagatcctaatagcgaggaaaactctaatgacatcgccttagtgcacctgtcctcaccactcccgcttaccgagtacattcaacccgtctgtctgcctgctgccgggcaggcattggtggatggaaagatctgcacggttactggttggggcaacacccagtattacgggcagcaagccggagtgctacaggaggctcgcgtcccaataatcagcaatgacgtgtgcaacggcgcggacttctatggtaatcagattaaacccaagatgttttgtgcagggtaccctgaaggcggaatcgatgcctgccaaggcgacagtgggggaccattcgtatgtgaggattctatttccagaacacccaggtggcggctgtgcggtatcgttagctggggcactgggtgtgctctcgcccagaagccgggagtgtacaccaaagtctcggactttcgcgaatggatattccaggcaattaagacacactctgaggcctccggcatggtgacccagctgtga

SEQ ID NO: 2232 - RNA, 2940 nt, synthetic construct
  misc_feature 1..2940: note = BAG62073 variant
  source 1..2940: mol_type = other RNA
atggagctggccgctctctgcagatggggccttctgttggcattactgccccctggggccgcgagcacccaggacaactacctatccacagatgtgggatcttgtactctcgtctgcccactgcacaatcaagaagttacggctgaggacggtacccagaggtgtgaaaagtgctcaaaaccgtgtgcccgggtgtgctatggccttgggatggagcatctgcgcgaagtacgagcagtgacaagtgccaacatccaggagttcgctggatgtaagaaaatttttggcagcttggcattcctccccgagtcctttgatggtgaccctgcctctaatactgctccactgcagcccgaacaactgcaggtcttcgagaccctcgaagagataacagggtacttatatatctcggcctggcctgattcactgccagaccttagcgtgtttcagaacttgcaggttattcgtggaagaatcctgcacaatggcgcgtacagtctaaccctccaaggcctggggatttcctggcttggactgaggtctttgcgggagctcggtagcggcctggcattaatccatcacaacactcatctgtgcttcgtgcacacagtcccctgggatcagctctttcgcaatcctcaccaggcccttctgcataccgctaacagaccagaagacgagtgtgtgggggaaggattggcctgccaccagctatgtgcaaggggccattgctggggtccggggcccacgcaatgcgtaaattgttcccagttcctgcggggacaggagtgcgttgaagagtgtcgcgtgctccaaggcctgcctcgagagtatgtcaacgctagacactgccttccatgtcaccccgaatgccagcctcagaatggctcagtgacttgttttgggccagaggccgatcagtgcgtggcgtgtgcccattacaaggatcccccgttctgcgtcgcaaggtgtcctagtggagttaaacccgacctgagctatatgccaatatggaagtttcctgacgaagagggtgcttgccaaccctgcccaatcaactgtacccactcttgcgtggatttggacgacaagggctgtcccgccgaacagcgggcttcccctctcacatcaattatcagcgccgtagtggggattctgttagtcgtggttctgggagtggtcttcggcatcctaataaaacgtcgccagcagaagattagaaaatacactatgaggcggctcctgcaagagaccgagcttgtggaaccattgacaccgagtggtgcaatgcccaatcaggcccagatgcgaatcctgaaggagaccgaactccgcaaagtaaaggttctggggtctggcgcttttggaacggtgtacaagggcatttggatccctgatggggagaacgtcaaaatcccagtggcgattaaggtccttagagaaaatacttcccccaaagcaaacaaggagatactggacgaggcctatgtgatggctggagttggtagcccttacgtgtcgaggttgctcggcatctgcctgacatctaccgtacagttagtcactcaactgatgccatatgggtgtctactcgatcatgtgcgggaaaaccgcggaagactgggctcccaggaccttttgaattggtgcatgcagattgccaaaggtatgtcatacctggaggatgttaggctcgtgcaccgtgacctggcagcccggaacgtcttagtgaagagtcccaatcatgtaaaaatcacagatttcgggctggctcgacttttggacatagatgaaaccgagtatcacgccgacggcggaaaggtgccgattaagtggatggcactcgagagcatcctgagaaggcgcttcacgcaccagtccgatgtttggtcttacggcgtcaccgtgtgggaactaatgacatttggggcgaaaccttatgacggaatcccagctcgggagattcccgacctgctcgaaaagggtgagagactgcctcaacccccaatctgtactattgatgtgtacatgataatggtcaaatgctggatgatcgacagcgaatgtaggcctcgcttccgagagcttgtttcagagtttagtcggatggcccgtgatccccagagattcgtggtgattcagaacgaagacttgggcccagcatccccgctggatagcaccttttacaggtctttactcgaggacgatgacatgggggatctggtagacgccgaagagtatcttgtccctcaacagggattcttttgccccgatccagctcccggcgccggtgggatggtgcatcaccgccatcggtcaagtagcacaagatccggcggaggcgacctgactttggggctcgaaccttctgaggaggaagcaccaaggtcgcccctggctcctagcgagggagccggctccgatgttttcgacggtgacctagggatgggagcggccaagggcctgcagtcactcccgacccacgatccaagtcccctgcagcgatactctgaagaccctacagtgccacttcccagcgagaccgatggttatgtcgctcctttgacttgttccccgcaacccgaatacgtgaatcagccagacgttcgccctcagcccccatcacctcgggagggccccctgccagcagccagaccggctggggccacgttagagaggcctaaaacactcagccccggaaagaacggcgtggtaaaggatgtctttgcattcgggggagcggtggaaaatccagagtatctgactccccagggcggtgccgctcctcaaccacaccctcccccggccttttctccagcattcgacaacctttactattgggatcaggatccccctgaacgtggggctcccccatccacctttaaaggaacccctacagccgagaatcccgagtacctgggcctagacgtgccagtctga

SEQ ID NO: 2233 - RNA, 264 nt, synthetic construct
  misc_feature 1..264: note = CCQ43016 variant
  source 1..264: mol_type = other RNA
atgatgagaatgaagaccttcgtgatgatccactttcatctgatgaacggcgggaaagccaagctctacagcaggccccacgctaaacttctgcctgagcagcgggtcacagacaagactggagcaccagttgaatggccgggtcaaacgcagtgctccaccgagacacagactttggccgcgatgcccgctcaggccgtgatgcgcgtaacctgtacagtggtcgatatgcataaatctgaatgcgcccctgcacaaacctga

SEQ ID NO: 2234 - RNA, 3768 nt, synthetic construct
  misc_feature 1..3768: note = AAI67147 variant
  source 1..3768: mol_type = other RNA
atggagctggccgctctctgcagatggggccttctgttggcattactgccccctggggccgcgagcacccaggtgtgtacaggaactgacatgaagctaaggctcccagcttccccggaaacgcacctggatatgcttcggcatctgtaccaaggttgccaggtcgttcagggcaacttggagctcacctatctgcccacaaatgcctctctgtcattcctccaggacatccaagaagtgcaggggtacgtattaattgcacacaaccaggtgcgccaggtccctctgcaacgacttcgtatagtgagaggaactcagttgtttgaggataattatgccctggctgttctagacaacggcgatccactcaataacaccacacccgtgaccggtgcaagtcctgggggactgagggaacttcagctgcggagcttgactgagatcctcaaaggcggcgtcctgattcagcgcaatccacaattatgttaccaggacacaatcctgtggaaggatattttccataaaaacaatcagctcgcccttaccctgatcgacacgaacagatccagggcttgccacccctgttctcctatgtgcaaggggtcgcggtgttggggagagtcaagcgaagattgccaaagtttgactcgcaccgtgtgtgccggtggctgcgcgcgatgtaaagggccactaccgacagactgctgccatgagcagtgtgcagccggatgcactggccccaagcactccgattgtctggcttgcctccactttaatcattctggtatatgtgaactgcactgccctgcccttgtaacctataacacagacaccttcgagagcatgccaaatcccgaggggagatacacgtttggagcatcctgtgttactgcttgcccttataactacctgtcaacagatgtgggcagttgtaccttggtctgcccactccataatcaggaagtgactgccgaggacggcacacagaggtgtgaaaagtgcagcaaaccctgcgcgcgggtgtgttacgggctgggaatggagcacttacgtgaagtccgcgccgttacctctgcaaacatccaagagttcgctggttgcaagaaaatttttggctccctggccttcctaccggagtcatttgacggggatcctgctagcaacacggcacccctccagccagaacagcttcaggtgttcgagaccctggaagagatcacaggatatttgtacattagtgcctggcctgactctctgcccgatctctccgtatttcaaaatcttcaggtgatcagaggcaggatactgcacaacggtgcctatagcctgactttgcaggggctcggcatttcgtggctgggattacggtctctgcgagaactaggctccgggctcgctctgatccatcacaatacccatctttgtttcgtccacacagtgccatgggaccagttgtttcgcaacccccatcaagcgctgctccacactgcaaatagacctgaggatgagtgcgttggagaaggtctggcctgtcaccagttatgcgctaggggccattgttgggggccaggaccgacccagtgcgtgaactgttcacagttcctgcggggccaagagtgcgtcgaagagtgtcgcgtgcttcagggtttgcccagagaatacgtaaatgccaggcactgcctcccttgccatccagagtgtcagccccaaaacgggagtgttacatgcttcggccctgaggcagaccagtgtgtggcctgcgctcactataaggatccacccttttgtgtcgcccgttgcccgagcggagtgaaacctgacctgtcctacatgccaatttggaagttccccgatgaagagggcgcatgtcagccttgccccatcaattgtacccactcttgcgtcgacctagatgacaaggggtgtccagcggaacagcgggctagccctctgacttcaatcattagtgccgtggttggaatactcctggtggtagtccttggtgtggtttttggcatcttgattaaacgaagacaacagaagatcaggaaatatacgatgcgccggctgttacaggagacagagctcgtggaacccctgaccccatccggggcaatgccgaaccaggcccaaatgagaatacttaaggagactgaactgaggaaagtcaaggtgttgggaagcggcgctttcggtaccgtatacaaagggatttggatccctgacggcgagaatgtgaagatccccgttgccattaaggtcctccgcgaaaacacatctccaaaagcaaataaggagatcctggatgaggcttacgtgatggccggagtgggctcaccctatgtcagtcgactactggggatttgcctcaccagcactgttcagctggtgacacagcttatgccttacggatgcttgctggaccatgtgcgggaaaaccgtggcagattaggttcccaggatctcctgaattggtgtatgcaaatagcgaaagggatgtcttatcttgaggacgtaaggctggtccaccgcgatctagccgctcggaacgtgctcgttaagtcgccaaaccatgtgaaaatcacggactttggactggcaagattgctggatattgacgaaaccgagtaccacgccgatggcggtaaggtccccatcaagtggatggctttagaaagcatcctcaggcgacgcttcactcatcagtccgacgtgtggtcatatggcgttacagtgtgggagctgatgacctttggggccaaaccttacgatggcattccggcacgggagataccagaccttctggaaaagggagagagattgccccagcctccaatctgcacaattgatgtatatatgatcatggtcaaatgttggatgattgacagtgaatgcaggccccgtttccgcgagctcgtgtctgaatttagccggatggcgagagaccctcaaaggttcgtggtcatccagaatgaggatctggggccggcctctcccctagactcaactttttaccgaagcctgcttgaggatgacgatatgggagacctcgttgatgctgaagagtacctggtgccacagcagggcttcttttgtcctgaccccgccccaggtgcagggggaatggtacaccaccggcatcgctcctccagtaccagaagcggcggtggcgatttgacgctggggttagaaccttctgaggaggaagctcccaggtccccactcgccccgtcagagggagcaggcagtgacgtgttcgatggggacctgggaatgggcgccgctaagggtcttcaaagcctgcctacccacgatccctcgccattgcagcggtattccgaagaccccacagtccctctcccatctgagactgacgggtacgtggcgcccctgacctgcagccctcagccggaatatgttaaccagccagatgtgcgaccccaacctccctcaccaagagagggacctctacccgccgcacgcccagctggcgccacactggagaggcctaaaactcttagtccgggtaagaatggcgtcgtgaaggacgttttcgcctttgggggagctgtggaaaaccccgagtacctcaccccacagggcggggcagcccctcagccccatccacctcccgcgttctccccggcttttgataatctgtattactgggaccaggatccacctgaacgtggagcacccccatctacgttcaaaggcacacccaccgccgagaaccctgaatatttgggtttagacgtcccggtatga

SEQ ID NO: 2235 - RNA, 1260 nt, synthetic construct
  misc_feature 1..1260: note = AAD56009 variant
  source 1..1260: mol_type = other RNA
atggagctggccgctctctgcagatggggccttctgttggcattactgccccctggggccgcgagcacccaggtgtgtacaggaactgacatgaagctaaggctcccagcttccccggaaacgcacctggatatgcttcggcatctgtaccaaggttgccaggtcgttcagggcaacttggagctcacctatctgcccacaaatgcctctctgtcattcctccaggacatccaagaagtgcaggggtacgtattaattgcacacaaccaggtgcgccaggtccctctgcaacgacttcgtatagtgagaggaactcagttgtttgaggataattatgccctggctgttctagacaacggcgatccactcaataacaccacacccgtgaccggtgcaagtcctgggggactgagggaacttcagctgcggagcttgactgagatcctcaaaggcggcgtcctgattcagcgcaatccacaattatgttaccaggacacaatcctgtggaaggatattttccataaaaacaatcagctcgcccttaccctgatcgacacgaacagatccagggcttgccacccctgttctcctatgtgcaaggggtcgcggtgttggggagagtcaagcgaagattgccaaagtttgactcgcaccgtgtgtgccggtggctgcgcgcgatgtaaagggccactaccgacagactgctgccatgagcagtgtgcagccggatgcactggccccaagcactccgattgtctggcttgcctccactttaatcattctggtatatgtgaactgcactgccctgcccttgtaacctataacacagacaccttcgagagcatgccaaatcccgaggggagatacacgtttggagcatcctgtgttactgcttgcccttataactacctgtcaacagatgtgggcagttgtaccttggtctgcccactccataatcaggaagtgactgccgaggacggcacacagaggtgtgaaaagtgcagcaaaccctgcgcgcgggggacccactctctgccgcctcgtcccgccgcagtgccagtccctttacgcatgcaacccggaccagctcaccccgttctgtccttcctaagaccttcatgggacctcgtgagcgccttttacagtctgccacttgctccgttgtctcccacgtccgtacctatcagcccagtgtcggtcggtaggggccccgatcctgacgcccatgtggcagttgatctgtctcggtatgaggggtga

SEQ ID NO: 2236 - RNA, 546 nt, synthetic construct
  misc_feature 1..546: note = U70863.1 variant
  source 1..546: mol_type = other RNA
ggcagccactccatgagatacttctttacctctgtgtcaaggcccgggcggggagagcctcgcttcatcgccgtcggttatgttgacgatacacagtttgtgcgattcgacagtgatgctgcaagccaacgtatggaaccaagagccccgtggattgagcaggaaggccccgagtactgggacggggaaactaggaaggtaaaagcgcattcccagacgcaccgggtggatctgggaaccctccgcggctattacaaccagtctgaggctggttcgcatacagtccaaagaatgtatgggtgcgacgtgggatcagattggaggtttcttcggggctaccaccagtatgcctacgacggcaaggattacatagcactgaaagaggacttgcgcagctggactgccgctgatatggcagcccagaccacaaagcataaatgggaaaccgctcacgttgccgagcagttacgagcgtatctggaagggacttgtgtggagtggctaagaaggtacctcgagaatggaaaggaaacactgcaacggacc

SEQ ID NO: 2237 - RNA, 543 nt, synthetic construct
  misc_feature 1..543: note = AH009136.2 variant
  source 1..543: mol_type = other RNA
agccactccatgagatacttctttacctctgtgtcaaggcccggccgcggggagcctcggttcatcgccgtcggatatgttgacgatacacagtttgtgcgattcgacagtgatgctgcaagccaacgtatggaaccaagagccccgtggattgagcaggaaggtcccgagtactgggacggcgaaactaggaaggtaaaagcgcattcccagacgcaccgggtggatctggggaccctccgcggatattacaaccagtctgaggctggctcgcatacagtccaaagaatgtatggttgcgacgtggggtcagattggaggtttcttcggggataccaccagtatgcctacgacggcaaggattacatagcactgaaagaggacttgcgcagctggactgccgctgatatggcagcccagaccacaaagcataaatgggaagctgcccacgttgcggagcagttacgagcatatctggaaggcacctgtgtggagtggctaagaaggtacctcgagaatgggaaggaaactctgcaacggaca

SEQ ID NO: 2238 - RNA, 705 nt, synthetic construct
  misc_feature 1..705: note = AAG09781 variant
  source 1..705: mol_type = other RNA
atgctgagagtgcccgagcctaggccaggcgaagccaaggctgagggggcagccccgcccacccctagcaaaccactcacatccttccttatccaggacattctgcgggatggagcgcaacgccagggtggccgaacttcttcacagcgtcagagagaccccgaacctgagccagaacccgagcctgaagggggaaggagtcgggctggcgcccaaaacgatcagttgagcacgggtccacgcgcagccccggaggaggctgaaaccttagcagagacagagcccgaaagacacctggggtcctacctactcgactctgagaatacttcgggagccctgcctaggcttccacagacccccaagcagcctcaaaaacggtcacgcgctgcctttagccatacacaggtcatagaactggagcgaaagttcagtcaccagaaatatttgtccgcgccagaaagagcacatctcgccaagaacctgaagctgaccgagactcaggttaaaatctggtttcaaaataggcggtacaagacaaaacgtaagcagctctctagcgagttaggcgatctggaaaaacactcctcacttcccgctttgaaggaggaagccttcagtcgcgcaagcctggtgtctgtatataactcctacccgtattacccttatctatactgcgtgggctcatggagccccgctttttggtga

SEQ ID NO: 2239 - RNA, 942 nt, synthetic construct
  misc_feature 1..942: note = BAG37303 variant
  source 1..942: mol_type = other RNA
atggccagcttcagaaagctgaccctctccgagaaagtgccccctaaccacccatctaggaagaaagtcaattttcttgacatgtcactggatgacatcattatatacaaggaattggagggcacaaacgctgaagaggagaaaaataagcggcagaaccatagtaagaaagaaagcccgtcccgccaacagtctaaggcacaccgacatcgtcacagaagggattattcgcggtgccgctcaaatagcgaggaagggaaccatgacaaaaagcccagtcagaaaccttccggattcaagtctggtcagcacccattaaatggccaacccctgatcgagcaggaaaagtgtagcgataactacgaggcccaggcggagaaaaatcaggggcaatccgaaggaaaccagcaccagtcagagggcaatcctgacaagagtgaagagagccagggtcaaccagaagagaaccatcactctgagagatccaggaatcatctagaacggtcactcagccagagtgatcgctctcaggggcaactgaaacgacaccacccccagtatgagagatcccatggacagtacaagaggagccacggccagtcggaacggtctcatggccactccgagcgttcacatgggcacagtgaacgcagccacggacattccgagagatctcacggtcatagcaaaaggtcacggagtcaaggcgaccttgttgatactcagtccgacctgattgctacgcagcgagatttgatcgccacccagaaggacctcattgcaacacaacgcgatctgatcgccactcagagagacctgatagtgacccagagggacctcgtagctacagagcgggatttaatcaaccagagcgggcgctctcacggacaatcagaaagacaccagaggtatagtaccggcaaaaatactattacaacctga

SEQ ID NO: 2240 - RNA, 942 nt, synthetic construct
  misc_feature 1..942: note = AAI28135 variant
  source 1..942: mol_type = other RNA
atggccagcttcagaaagctgaccctctccgagaaagtgccccctaaccacccatctaggaagaaagtcaattttcttgacatgtcactggatgacatcattatatacaaggaattggagggcacaaacgctgaagaggagaaaaataagcggcagaaccatagtaagaaagaaagcccgtcccgccaacagtctaaggcacaccgacatcgtcacagaagggggtattcgcggtgccgctcaaatagcgaggaaggaaaccatgataaaaagcccagtcagaaaccttccggtttcaagtctggccagcacccattaaatgggcaacccctgatcgagcaggaaaagtgtagcgacaactacgaggcccaggcggagaaaaatcagggacaatccgaaggcaaccagcaccagtcagagggtaatcctgataagagtgaagagagccaggggcaaccagaagagaaccatcactctgagagatccaggaatcatctagaacggtcactcagccagagtgaccgctctcagggacaactgaaacgacaccacccccagtatgagagatcccatggccagtacaagaggagccacggccagtcggaacggtctcatgggcactccgagcgttcacatggacacagtgaacgcagccacggtcattccgagagatctcacggccatagcaaaaggtcacggagtcaaggggatcttgttgacactcagtccgatctgattgctacgcagcgagacttgatcgccacccagaaggatctcattgcaacacaacgcgacctgatcgccactcagagagatctgatagtgacccagagggacctcgtagctacagagcgggacttaatcaaccagagcggacgctctcacggccaatcagaaagacaccagaggtatagtaccggtaaaaatactattacaacctga

SEQ ID NO: 2241 - RNA, 384 nt, synthetic construct
  misc_feature 1..384: note = 12543784 variant
  source 1..384: mol_type = other RNA
atgatcaagaaaaacctgaagaaactcggcattgaggaaacctaccttaatataatcaaggccatttatgacagacccacagctagcatccagaaaactgagaacctgtccacgaagaccgggacatctcaagaataccacttgtcacctttatggttctatattgtgctggagatcctagcaagtactataaggcaggaaaagaatctcaaagatatccataccgagaaggaggaagtcaaactgagcctttttgccgacgcgatgattctgtacttgaagaaaccaaacgattccacacggaagctcctggagctgatcaagaaaattcactcttcgtgccgcatcaagataaatattcatttcgctttttgttcacagtga

SEQ ID NO: 2242 - RNA, 1926 nt, synthetic construct
  misc_feature 1..1926: note = AAA63226 variant
  source 1..1926: mol_type = other RNA
atggccaaggctgcagccatcggcattgacctggggaccacatacagctgcgtgggagtcttccagcacggtaaagttgagataatcgcgaacgatcaaggcaatagaactacgccctcctatgtggcttttaccgacacagaaaggctcattggggatgccgcaaagaaccaggtagcccttaatcctcagaacactgtgttcgacgctaaacggctgatcggacgcaagtttggcgatccagtcgtgcagtctgacatgaaacattggccgttccaagttattaatgatggtgacaagcccaaggtgcaggtctcatacaaaggggagaccaaggcattttatcctgaagagatcagtagcatggtgttgacaaaaatgaaggaaatagccgaggcttacttaggatatccagtaaccaacgccgttatcactgtgcccgcgtacttcaatgattcccagcgacaggcaacaaaagacgccggcgtcattgctggcctgaacgtgctacgtatcattaatgagcctaccgccgcagctatcgcctatgggctcgatagaacgggaaagggtgaaaggaacgtgctgatatttgaccttggcgggggaactttcgatgtctctattctgaccatcgacgacggcatttttgaggttaaggcgacagccggtgatactcaccttgggggagaagacttcgataatcggctcgtgaaccattttgtagaggagttcaaacgcaagcacaaaaaggacatctcgcaaaataaaagagcagtgaggcggctgcgcaccgcttgtgaacgagccaagagaacactgtcaagcagtacccaggcttccctcgagatcgattctttatttgaaggcattgacttctacacgagcataactagggcccggttcgaggaactgtgctccgatctttttcgttcaacattggagccagtcgagaaagcactgcgcgacgccaagctagataaggctcagatccatgacctcgtgctggttggcgggagtacccggattcccaaagtgcagaagttgctgcaagatttctttaacggaagggacttgaataaaagcatcaaccctgacgaagcggtcgcatacggtgccgctgtgcaggccgcaatactcatgggcgataagtctgagaacgtacaggacctgttactgctcgatgttgccccactttccctggggttggaaactgctggaggcgtgatgacagccctaattaaaagaaattcaaccatcccgacgaagcaaacccagatcttcacaacttatagcgacaaccagcccggtgtcctgattcaggtgtacgagggggaacgagcaatgaccaaggataataacctcctgggccgctttgagcttagtggaatccctccagcgcccagaggcgtccctcaaattgaggtgacattcgacatagatgctaatgggatcctgaacgttactgccaccgacaaatctacaggaaaggcaaataaaattaccatcactaacgataagggtaggttgtccaaagaagagatcgaacggatggtgcaggaggccgaaaagtataaggctgaggacgaggtacagcgcgaaagagtcagcgccaaaaatgcactcgagtcgtacgcttttaacatgaagtctgccgtggaagatgagggcctgaaagggaagatttccgaggcggacaaaaagaaggttttagataaatgtcaggaagtgatatcatggctggacgccaatacgctagctgagaaggacgagttcgaacacaaaaggaaggaactcgagcaagtctgcaacccaatcattagtggactgtatcagggcgccggtgggcccggcccgggaggctttggggcacagggacctaaaggtggcagcgggtccggacccacaatcgaggaagtggattga

SEQ ID NO: 2243 - RNA, 1926 nt, synthetic construct; identical to SEQ ID NO: 2242
  misc_feature 1..1926: note = AAA63227 variant
  source 1..1926: mol_type = other RNA

SEQ ID NO: 2244 - RNA, 627 nt, synthetic construct
  misc_feature 1..627: note = AAI21098 variant
  source 1..627: mol_type = other RNA
atggccctgggccagaagctgttcatcaccatgagcagaggggctggaaggcttcaaggtacactgtgggcattggtgtttttaggcattctggtcgggatggttgtgccctcccctgccggaactcgggcgaacaatacgctactcgactctcgcggctggggtaccctgctttcacgaagtcgtgctgggctggccggagagatagcaggcgtaaactgggaaagcggctacttggtggggatcaaaagacagaggcggctctattgcaatgtcggaattggtttccacctccaggtgctgccagatggccgcatctccgggacacatgaggaaaacccgtactctctcttagagatttcgactgttgaaagaggagtggtctcactgtttggcgtgaggagcgcccttttcgtagctatgaatagtaagggtcggttgtatgcaaccccctcctttcaggaggagtgtaaattccgcgaaacactgctacctaacaattacaacgcctatgagtctgacctctaccaagggacctatatcgctctgagcaagtacggacgagttaaaagaggctccaaggtgtcaccaataatgactgtcacacactttcttcccaggatctga

SEQ ID NO: 2245 - RNA, 1569 nt, synthetic construct
  misc_feature 1..1569: note = BAA74724 variant
  source 1..1569: mol_type = other RNA
atgcccagagcccctaggtgccgggctgtgcgcagcctgctccgatcccactaccgtgaggtccttccactggcaaccttcgttagaaggttgggcccgcaggggtggcggttagtgcaacgcggagaccccgccgcgtttagagctctggtagcccagtgtctagtgtgcgtcccttgggatgcaaggccaccccctgccgctccatctttccgccaggtgtcatgtctcaaggaactggttgcacgggtgcttcagcgactgtgcgagagaggtgccaaaaacgtcttggcttttggcttcgccctcctggacggggcgaggggaggtccccctgaagcatttacaacgagtgtgcggagctatctgccaaatactgtaaccgatgccctccgtggctccggggcttggggattactgcttcgcagagttggcgacgatgtgttggtccatctgctagccaggtgtgcactcttcgtgctggtggctccgtcttgcgcctaccaagtctgtgggccccctctttatcagctgggcgcggccacacaggcacggccaccccctcacgcttcgggaccacgacgcagattgggttgcgagagggcctggaaccattcagttcgggaagctggcgtgcccctcgggctgccggcccctggagcacgcagaaggggcggtagcgccagtcgttccttacccctgccaaagcggcctcgaagaggggctgcgcccgagccagagaggactcccgtaggacagggctcttgggcacaccctggccgcacccgggggccaagcgacagaggattttgtgtggtctccccggccaggcccgctgaagaggccacatcactcgaaggtgcacttagtggcacccgccatagccacccttctgtggggcgacaacaccatgccggaccaccctccacttcacggcctccacgtccctgggatacaccgtgccctccagtttacgctgagaccaaacacttcctgtatagcagtggcgacaaggagcagttgagaccctcttttctactgtccagcctcaggcctatcctgacgggtgcccgccggcttgtggaaactattttcctggggtcgtctcccggctgtcagggattgccagcaggctgccctgcgtgcccctccgctaccgggaaatgtggaccatgcttttggtcatgtctcggtacaactagaagtgccccgaccggctgcagctccaggcgaacagcacgctgtgagctgcggtctcctcagcaacccgtcagcgtgccagggagatcacccagggccttatggcgtcctccacgccggagaacccagacgcccgtagcttggtgcagttgttccgccagcactgcacctctggctggagttaggctacgagccggcctcccggcgccagccggtgctccccggcctctggggcttcaggcacaacgcagaaggttcttgcggaatacaaagaagtttatatctctgggcaaacatgccaagctctcactgcaggaacttacctggaaaatgagtgtgcgagattgcgcttggctgagacgcagccca

SEQ ID NO: 2246 - RNA, 1680 nt, synthetic construct
  misc_feature 1..1680: note = BAA23606 variant
  source 1..1680: mol_type = other RNA
atgagactgcacaggctccgggcccgccttagcgctgtggcatgcggcctgttgttactgctagtccgagggcagggacaagactccgcctctcccatccgtaccacacatactggtcaggttctcggctcactggtgcacgtaaagggggcgaacgctggagtgcagacgttccttggcattccttttgccaaaccaccgctgggtcccttgagattcgcacctccagagccccctgaaagttggagcggggtcagggatggaaccacacatccagccatgtgtctccaggacctgactgctgtggagtccgaatttctgtctcaattcaatatgacctttccctcggattcaatgagcgaggactgcctctacttaagtatatatacccctgcacactcccatgaaggctctaacctgccagttatggtgtggatccacggcggggcccttgtcttcggaatggctagcttgtacgatggttccatgctggccgcgctagagaatgtggtagttgtgattatccagtatcggctcggcgtcctggggtttttctcaacaggagacaagcacgcaactggcaactggggttaccttgatcaggtggccgctctgcgctgggtgcagcaaaatattgcccattttgggggaaacccggacagagtcacaatcttcggcgagagtgcaggcgggaccagcgtttcttccttggtggtatcacccataagccagggactctttcacggtgctatcatggaaagtggcgtggccctgttacctgggctgattgcgtcttccgccgatgtcatcagcacggtggttgcaaatctctcggcttgtgaccaggtggattctgaggcccttgtcggatgcctgaggggcaaatccaaggaagagattttggctatcaacaaaccattcaagatgatacccggtgtggtagacggggtttttctacctcggcatccacaggagctgctcgcctcagcagatttccaacccgtgccgagtattgtcggcgtgaataacaatgagttcggatggctgatccctaaggtcatgcgcatttatgacactcagaaagagatggaccgagaagccagccaggctgcgcttcaaaagatgctgaccttgctcatgctgcccccaacatttggcgatttactgagagaggaatacatcggggacaacggagatcctcagactctacaggcacagttccaagagatgatggccgactccatgtttgtgatccccgctctccaggttgcccacttccagtgttctagggcaccagtgtatttttacgagttccagcaccaacccagctggctgaaaaatattcggcctccacatatgaaggccgatcacggtgacgaacttccgtttgtattccgttcatttttcggcgggaactacataaaatttaccgaggaagaggaacagttgagtcgcaagatgatgaagtattgggctaatttcgccagaaacggaaaccccaatggcgagggtctgcctcattggccactctttgatcaggaggaacagtacctgcaacttaacctgcagcccgcagtcgggagggcgttgaaagctcaccggctccagttctggaagaaagccctgcctcagaagatccaagagttagaagaaccagaggaacgacatacagagctgtga

SEQ ID NO: 2247 - RNA, 1740 nt, synthetic construct
  misc_feature 1..1740: note = AAH65269 variant
  source 1..1740: mol_type = other RNA
atgaacaagctgtacatcggcaatctcagcgagaacgccgctccctccgaccttgaatctattttcaaagatgcaaagatacctgtgtcagggccatttctggtcaaaaccggatatgccttcgttgactgcccggatgagagttgggcgttgaaggctatcgaagccttaagcggtaaaattgagctgcacggcaagcccatcgaagtggagcattccgtacctaagagacagaggattcggaaactacaaatccgcaatataccaccccacctccagtgggaggtgctggactctcttctggtccagtacggggtggttgaatcgtgtgaacaggtgaacacagattcagagactgcagtcgtgaatgtaacgtatagcagtaaggaccaagcccgacaggctttggataaactcaacggatttcagctggagaatttcaccctgaaggttgcatacatccctgacgagatggccgctcagcaaaacccactccagcagccccgtggcagaaggggtttagggcagcggggatcctctcgccaaggcagccctggctccgtgtcaaaacagaagccatgcgatctgccgcttagattgctggtccccacacagtttgtgggggccattatcggaaaggaaggtgcgactattaggaatatcaccaaacaaacacagagtaagatagacgtgcatcggaaagagaacgcaggcgccgctgaaaagagcattaccatcctatctactcctgaggggacatccgccgcatgtaaatcaattctcgaaatcatgcacaaggaggctcaggatatcaaattcaccgaggaaattccactgaagatacttgcccataataactttgtcggacgcctgatcggcaaggagggtcgaaatttgaaaaagattgaacaggacacggatactaaaatcaccataagccccctccaagagctgacattatataaccctgaaagaactattaccgttaaggggaatgtggagacatgcgcgaaagccgaggaagagatcatgaagaagatcagggaaagttacgagaacgacattgcatctatgaacctgcaggctcacctcatcccaggacttaatctgaacgccttgggcctatttcccccgacctccggcatgcctcccccaacgagcgggcctccctcggctatgactccaccctatcctcagttcgaacagtctgagacagagaccgtacacctgttcattccagccctctccgtgggagcaataatcggtaaacaaggccagcatattaagcagctgtcacggtttgccggggctagtatcaaaatcgcgccggcagaagcccccgacgctaaggtccgtatggtgattataactggacctccagaggcccagttcaaagcacaaggccgcatctacggtaagattaaggaagagaattttgttagccccaaagaggaagtgaaacttgaggcccacatcagagtcccttccttcgctgccgggagggtgattggcaagggaggcaagacagtaaacgaactgcagaatttgtctagcgcagaggttgtggtcccacgggatcagacccccgacgaaaacgatcaggtggtcgtgaaaatcacggggcatttctacgcgtgtcaagttgctcagcgaaagatacaggagatcctcacccaagtgaagcagcaccagcagcaaaaagccctgcagtcaggaccgcctcagagtcgcagaaagtga

SEQ ID NO: 2248 - RNA, 537 nt, synthetic construct
  misc_feature 1..537: note = AAA63207 variant
  source 1..537: mol_type = other RNA
atgcacagctccgccctgctctgctgtcttgtgctgttgaccggcgtcagagcttctcccgggcagggaacacaatcagagaacagttgcactcatttccctggtaatttaccaaacatgctgagggacctacgggatgcatttagccgcgttaagacgttctttcagatgaaagaccagctcgataatctgcttctgaaggaatccttgctcgaggacttcaaaggctacctggggtgtcaggccctgtctgaaatgatccaattttatctcgaggaagtgatgccgcaggcggagaaccaggatcccgacattaaggctcacgtaaattcgttaggagagaacctgaaaacccttcgattgcgtctgagaaggtgccatcggttcctaccttgtgaaaataagtcaaaggccgtggagcaggtcaaaaacgcatttaataagctccaagaaaaaggcatatacaaggccatgagcgagttcgatatctttattaactatatcgaggcttacatgacaatgaaaattcgcaattga

SEQ ID NO: 2249 - RNA, 1143 nt, synthetic construct
  misc_feature 1..1143: note = AAB17170 variant
  source 1..1143: mol_type = other RNA
atggccttcgtgtgcctggctatcggctgtctctacacctttcttattagcacaactttcgggtgcacgtcctcttcagacaccgagataaaggtcaatccccctcaggattttgaaatcgttgacccaggatatctgggttacttgtatttacaatggcagccgcccctgagtctagatcacttcaaagagtgtacagtggaatacgagctcaagtatagaaacattggcagcgaaacttggaaaaccatcattacaaagaacctgcattacaaagacgggtttgatcttaataagggaatcgaggcaaagatacacaccctgttgccttggcagtgcactaacggctccgaggtacagtcttcgtgggccgaaacaacctattggatctcaccacaaggtattcccgagacgaaagtgcaggacatggattgtgtctactacaattggcagtatctcctgtgcagctggaagcctgggatcggagtgctgctcgacactaactacaatttattctattggtacgaaggcctggatcatgcgcttcagtgtgttgactatattaaagctgatggccaaaacatcgggtgcaggtttccatacttggaggccagtgactataaggatttctacatatgtgtgaatggatcctctgagaacaaacccattcggagctcctactttaccttccagctgcagaatatcgtcaagcctctaccaccggtgtatctcacatttactcgcgaatcaagttgcgagattaagctgaaatggagcatcccccttggtcctatcccagcacgatgtttcgactacgaaattgagatacgtgaagacgataccacactggtaaccgccacggttgagaacgagacttatacattgaagaccactaatgaaacaagacagctctgctttgtggtcaggtctaaagtgaacatctactgctccgacgatggcatttggtcagagtggagcgacaagcaatgttgggaaggggaggatctgagtaaaaagaccttactgcggttctggctccccttcggatttatccttatactggtgattttcgtcacgggcttgctactgcgcaaacctaatacctatccaaagatgatccccgaatttttctgcgacacatga

SEQ ID NO: 2250 - RNA, 819 nt, synthetic construct
  misc_feature 1..819: note = AAA67527 variant
  source 1..819: mol_type = other RNA
atggacagctacctgctcatgtggggccttctgaccttcatcatggtgcccgggtgccaggccgagttgtgtgatgacgatcctccagaaattccgcacgctacatttaaggcaatggcctataaagagggaactatgttaaactgcgaatgtaagagaggtttcaggcggataaaatccggctctctgtacatgctatgcacgggaaattcaagtcatagctcctgggacaaccaatgtcagtgcacctcttcggcgacacgcaatactaccaagcaggtcacaccccagcctgaggaacaaaaagagcgaaagaccactgagatgcagtcaccaatgcagcccgttgatcaggctagcctccctgggcactgtcgtgaaccacccccttgggagaacgaagccacagagagaatctatcattttgtggtaggccaaatggtgtactatcagtgcgtccagggttacagggcactgcaccgggggccagccgagagtgtgtgtaagatgacccatggaaaaacgcgctggactcagccgcaacttatttgcaccggcgaaatggagacatcccagttccccggcgaagagaagcctcaggcttctccagaagggagacccgagagcgagacttcctgtctggttaccacaaccgactttcaaatccagacggaaatggcagccactatggagacatcaattttcaccactgaatatcaggtggctgtcgccggatgcgtgtttttgctcatcagtgtactgctgctcagcggtttaacatggcagaggcggcaacgcaaatctcgaagaaccatatga

SEQ ID NO: 2251 - RNA, 1656 nt, synthetic construct
  misc_feature 1..1656: note = AAA59143 variant
  source 1..1656: mol_type = other RNA
atggccgctcccgcactgagctggagactccctcttctgatcttgttactgccactagccacctcctgggcgtctgctgccgtgaacggcacatcacagttcacttgcttttacaatagtagggcaaacattagctgtgtctggtcccaagacggggccctccaggatacgtcttgccaggttcacgcttggccggaccggcgccgatggaatcagacctgtgagctgcttcccgtgtcgcaagcatcatgggcctgcaacctgatattgggagctcctgatagccagaagctcacaactgtagacatcgtgaccctgcgtgtcctgtgtagagaaggtgtgaggtggcgggttatggccattcaggatttcaaaccatttgagaatctccgcttaatggcgcccatcagtcttcaggtggtccatgtggaaacacacagatgcaacatttcctgggagatctctcaagcaagccattatttcgaaaggcacctggagtttgaggcccggaccttgtcccctggccatacttgggaagaggctccactgctaacactcaagcagaaacaggaatggatatgtctggagacccttacgcccgacactcagtacgagttccaagtacgcgttaagcctctgcagggggaatttaccacatggtcaccatggagtcagccgttggccttccgaactaaacccgcagctctcggaaaggataccatcccttggctgggccacttactggtgggtctcagcggggcctttggattcattatccttgtctatctgttgattaattgcagaaacacaggcccatggctaaagaaagtgctgaagtgtaatacccccgacccttctaaatttttctcccaactctcaagcgagcacggcggggatgtgcagaagtggctgagttctccatttccctccagctcgttctctccgggaggtcttgcgcctgaaatctcacccctggaggtcttggaaagggacaaagttacgcagctcctgttacagcaagataaggtgccagagcctgcctccctgagtagcaaccattccctaacttcttgcttcacaaatcagggctactttttctttcacctccccgacgcactggagatagaggcttgtcaggtatatttcacctacgatccatatagcgaagaagaccccgacgagggggtggccggagctcctactggctcaagtccacagccgcttcaacccttgtccggtgaagatgacgcctactgcacatttcctagccgggatgacctgctcctgttctctccatcacttctgggagggcccagtcctccaagcaccgcacccggcggctccggggccggagaggagcgtatgccgccttctttgcaggaacgcgtcccaagagattgggacccccagcctctcggtcccccaacgcctggcgtgcccgatctggttgactttcagccaccgcctgagttagtgctgagggaagctggggaggaagtccccgatgcgggaccacgggagggcgtgtcgttcccctggagccgacctccaggtcaaggggagtttcgcgcactaaacgccagactccccctgaataccgacgcttacctttccttgcaggaactgcagggccaggatcctacacatctcgtatga

SEQ ID NO: 2252 - RNA, 1110 nt, synthetic construct
  misc_feature 1..1110: note = AAA59145 variant
  source 1..1110: mol_type = other RNA
atgctgaagcccagcctccctttcacctcccttctgtttttgcagttaccactgctaggcgtggggctcaacacaactatcctgacgccgaatggaaacgaggacaccacagccgatttctttcttactaccatgcccacagactctctgtcagtcagtaccttgcctctcccagaagttcaatgcttcgtgtttaatgtagagtacatgaactgtacttggaatagctcctctgaaccccagcctacaaacctgaccctgcactattggtacaaaaattcggataacgacaaggtgcagaaatgctcacattatctcttcagcgaggaaatcacgagtggttgtcagttacaaaagaaagagatacacctgtaccagacttttgtcgtgcagcttcaggatccaagagagcccaggcggcaagctacccagatgttgaagctgcagaatctagttatcccttgggcaccagaaaacctcacactgcataaactttccgagtctcagctggaattgaattggaacaatcgcttcctcaaccactgcctggagcatttagtgcaatatcgaactgactgggatcacagctggaccgagcagtccgtcgactaccgtcacaagttttcactgccgagtgtggatggccagaagagatatacattcagggtacggagccgctttaatcccctctgtgggtctgcccaacattggtccgaatggtcacaccctattcattggggaagcaacaccagtaaagagaacccattcctttttgcgctggaagctgttgtgatctctgtcggctccatgggtttgattatcagcctactgtgcgtgtacttctggctcgagagaacgatgcccaggatacctactctgaagaatcttgaagacctggtgacagagtaccacgggaacttctcggcctggtctggagtctccaaaggcttggcagagtcactccagccagattatagtgaacggctgtgtttagttagcgagattcccccgaagggcggggccctgggagaaggtcctggcgcttccccctgcaatcagcactctccatactgggcacctccctgttataccctaaagccagagacttga

SEQ ID NO: 2253 - RNA, 405 nt, synthetic construct
  misc_feature 1..405: note = AAA74469 variant
  source 1..405: mol_type = other RNA
atgagaatgctgctccaccttagcctgttggccttaggcgctgcatacgtgtatgccatccccaccgagattcctacatccgcgctggtcaaggaaactctagctctcctgtctacgcataggacccttctgatagccaacgagacattgcggatcccagttccggtgcacaaaaatcatcagctctgcactgaagagattttccaagggatcggaaccctggaatcacagacagtacagggtggcaccgtggagcgcctgtttaagaacctcagtttaattaaaaagtacatcgacgggcagaaaaagaagtgtggagaggaacgacgtagagtcaatcaattcctggattatcttcaggagtttttgggcgtgatgaacactgaatggataatcgagagctga

SEQ ID NO: 2254 - RNA, 555 nt, synthetic construct
  misc_feature 1..555: note = AAH06487 variant
  source 1..555: mol_type = other RNA
atggtgagaaagctgaaattccacgagcagaagctccttaaacaagtcgactttctgaactgggaagttaccgatcataatttgcacgagttaagggtgctgcggcgctaccgactacagcgtagagaagactatacaaggtacaaccagctcagccgggccgtacgcgagctggctagaaggcttcgggatctgcccgaacgcgaccagttccgagtgagagcatccgccgcgttgctcgataagctgtatgctctgggcctcgtccctactagggggtctttagagctgtgcgactttgtgacggcctcaagtttctgtcggcgtcgccttccaaccgttttgctgaaactaagaatggcacaacatctccaggccgctgtggcatttgtcgagcagggacacgtgagggtaggtccggatgttgtgacagaccccgccttcctggtcactcggagcatggaagattttgtgacctgggtggactcctctaagatcaagcgacatgtccttgagtacaatgaggaacgcgatgacttcgatctggaggcttga

SEQ ID NO: 2255 - RNA, 3150 nt, synthetic construct
  misc_feature 1..3150: note = AAH08786 variant
  source 1..3150: mol_type = other RNA
atgggcagcagaacccccgagtcccctctgcacgccgtgcagctcaggtgggggccacggcgccgaccgccccttctgcctttgttactgctactcctgccaccccctccacgtgtcggaggtttcaaccttgacgctgaagcacccgccgttctgtctggccctccagggtcatttttcggatttagtgtggagttctacagaccgggcacagatggtgtaagcgtgttggtcggggcgcccaaggctaatacttcccaacctggagtgctccagggcggcgccgtttatctgtgcccatggggagcatctcccacgcagtgtacccctatcgaatttgactcgaaagggtcaaggctgctcgagagcagtttatcctctagcgaaggtgaggagccagtggaatacaagtccctgcagtggttcggcgccacagtccgggctcatgggtcaagtattcttgcatgcgcccccttgtatagctggcgcactgagaaagaaccgctgtctgatcctgtgggaacctgttacctatccacagacaactttaccagaatactcgagtatgctccctgcaggtcagatttcagctgggccgcgggccaaggttactgtcaagggggatttagtgcagagttcactaagacaggccgggtagttctgggcgggccaggatcttatttttggcagggtcagatcctttccgccacccaggaacagattgctgagagctactaccctgaatatctgatcaatttggtgcagggccagctccaaacgcgccaggcctcgtctatttacgacgattcctatctggggtactcagtcgcagtgggagagttcagtggcgacgatactgaagactttgtggctggtgtccccaaagggaacttaacctatggctacgttacaatcctgaatggaagcgatatacgatccctctataacttctctggcgagcagatggccagctacttcgggtacgcggtggccgcaactgacgtaaatggagatggtcttgacgacctgttggtgggcgctccactactgatggatagaacccccgacgggaggcctcaagaggtcggacgggtgtatgtttacctccagcacccagccggcatcgaaccgacacccaccctgacgcttactggtcatgatgagtttgggcgtttcggctcaagtctgacacctttgggagacctcgatcaggacggctataacgatgtggctattggggccccatttggaggtgaaacccagcaaggcgtcgtgttcgtatttcccgggggacctggcggtctggggtccaagccaagccaggttttacagcccctgtgggcagcctctcacactccggacttctttggctcagctctacgcggaggcagagatctcgacgggaatggataccctgatctgatcgtgggcagtttcggtgtcgacaaggcggtggtctatagggggcggccaattgtgagcgcatccgcctctcttacaatctttcccgctatgttcaaccctgaggaacgatcgtgcagcttggagggaaatcccgttgcctgtataaacctgtccttttgcctcaatgcatcaggcaaacatgtggccgacagtattggtttcaccgtagagctgcagcttgattggcaaaagcagaaaggcggggtccgcagagctctgtttttggcctctaggcaggcaacgctcacccagacactgttaatccaaaacggagcgcgggaagactgtcgcgagatgaagatttacctgagaaatgaaagcgagttcagggataaactatccccaatccacatcgctctcaacttctcactggaccctcaggcccccgtggatagccacggccttcgtccagcattgcattatcagtctaagtcccggattgaagacaaggcccagatactgctcgattgcggggaggacaacatctgtgttccggatctgcaattagaggtgtttggagaacagaatcacgtctacctgggcgacaaaaacgctcttaatttgactttccatgcccagaacgtgggtgaagggggagcatacgaggctgagctccgagtaaccgcccctcccgaggcggaatatagtggcctggtgagacacccaggtaattttagctctctatcctgcgattacttcgccgttaaccaatcaaggctgctcgtctgcgacctgggcaatcccatgaaggctggggcaagtctttggggaggcttgcgctttacagtgcctcatctgcgggatactaaaaagaccattcagttcgactttcagatcttaagcaaaaacctcaataactcgcagtccgacgtggtctctttcagactgagcgttgaggcccaagctcaggtgacacttaatggggtgtcaaagccagaagccgtactgtttcccgtcagtgattggcaccctagggaccagccgcagaaagaggaagatttgggaccagcagtgcaccatgtttatgagctcataaaccaaggcccctcctctattagccagggtgtgctggagctatcctgtcctcaggcgctggaagggcagcaactcctgtacgtcacccgcgtgactggacttaattgcacgacaaaccacccaatcaatcccaagggcttggagctggaccctgaaggttcattacatcaccagcagaagcgagaggccccgagccggagttctgcttccagcggcccccaaatcctcaaatgtccagaagccgagtgcttccgtctgagatgtgagcttgggcctctgcaccagcaggaatcgcagtcactacaactccattttagggtttgggcaaagaccttcctgcagcgcgagcaccagcccttttctttgcagtgcgaagctgtgtataaagccctgaagatgccataccggattttacctagacaactcccccagaaagagaggcaggtagcaactgccgtccagtggaccaaggctgaaggaagttatggcgtgccactgtggatcattatacttgcgatcctgttcgggttgctcctgctaggactgcttatttacatcctctacaagctgggcttctttaaacgatccttgccgtatggtacagccatggagaaggcacaactgaaacctcccgctaccagcgatgcctga

SEQ ID NO: 2256 - RNA, 2397 nt, synthetic construct
  misc_feature 1..2397: note = AAH20057 variant
  source 1..2397: mol_type = other RNA
atgaacctgcagcccatcttctggattggcctcataagctccgtgtgctgtgtctttgcccaaaccgacgagaatagatgccttaaggctaacgcaaaatcttgtggggaatgcatccaggccggacctaattgtggttggtgcacaaactcaactttcctgcaggagggcatgccaacgagtgcgaggtgtgatgacttggaggctttaaagaaaaaggggtgcccgcccgatgacattgaaaatcctcggggaagcaaagatatcaagaagaacaaaaatgttaccaaccgctccaagggcacagccgaaaaactgaagccagaggacattactcagatccaaccccagcagctagtgctccgactgcgttctggtgagcctcagacctttacacttaaattcaagagagcagaagattacccaatagacctgtattacttgatggatctctcgtattcaatgaaggacgatctggagaatgtaaaaagcctggggaccgacctcatgaacgaaatgaggcggatcacaagtgattttcgcattggattcggctcctttgtggagaagactgtcatgccctacatctctaccacgcctgccaaattaagaaatccatgtactagcgagcaaaactgcacctccccgttctcatataagaatgtgctgagtcttacaaacaaaggcgaagtttttaatgagttggtggggaagcagaggattagcggaaacctggactctcccgaaggtggcttcgacgctatcatgcaggtcgcagtgtgtgggtccctaataggatggcggaacgtaactcgcctcctggtttttagcaccgatgccggcttccactttgctggtgacgggaaacttggaggcattgtgctgcctaatgatggccagtgccatttggagaacaatatgtacacaatgagccactattacgactacccaagtatcgcccatctcgtccaaaagctgtctgaaaacaatattcagaccatcttcgcggtgacggaggagttccagcccgtgtataaggaactgaaaaacttaatccctaagtccgcagtcgggactctcagcgccaattcgtctaacgttattcaacttataatcgatgcttacaattccctgtcaagtgaggtgattttggaaaacggaaaactaagcgagggtgtaacaatctcctataagtcttactgcaaaaatggcgtgaacgggaccggagaaaatggccgaaagtgtagcaacatatcaattggtgacgaggtccagtttgagatcagtatcacttccaataagtgccccaaaaaggatagcgactctttcaaaattagaccactggggtttacagaagaggtggaagttatcctccagtatatttgtgagtgcgaatgtcagtcagagggcataccggagagtcctaagtgccacgaaggaaacggcaccttcgagtgtggggcctgtaggtgcaacgaaggacgggtgggtcgtcattgcgagtgtagcacggatgaggtcaattccgaagacatggatgcatactgccgcaaagagaactcttcggaaatctgcagcaataacggcgagtgtgtgtgcgggcaatgtgtatgcagaaagagggacaataccaacgaaatttattccggaaagttttgtgagtgcgacaatttcaactgtgatcggtcaaatggcctgatctgcggtgggaacggcgtttgtaaatgccgagtgtgtgagtgcaatcccaactacacaggaagtgcttgcgactgttctcttgatacttcaacctgcgaagcctccaatggccagatctgtaacgggcgcggaatttgcgagtgtggtgtctgcaagtgtacagacccaaaatttcagggccagacttgcgaaatgtgtcaaacctgcctgggggtgtgtgcggagcacaaggaatgcgtccagtgcagagccttcaataaaggagagaagaaggatacatgtacccaggagtgctcatactttaacataactaaagtggaaagcagggacaagttgcctcagcccgttcaaccagatcccgtgtctcactgtaaagagaaggacgtagatgactgctggttctattttacgtactccgtcaacggcaataacgaagtgatggttcatgtggtcgagaatcctgaatgtccaacaggtccggatatcattcccatcgtggcaggggtagtggctggcattgttctcatcggactggccttactgctaatatggaaactcctgatgatcattcacgaccggcgcgagttcgctaagtttgagaaagaaaagatgaacgccaagtgggataccggcgagaatcctatctataaaagtgcagtcactaccgtggtgaacccaaagtacgaagggaaatga

SEQ ID NO: 2257 - RNA, 2367 nt, synthetic construct
  misc_feature 1..2367: note = AAA36122 variant
  source 1..2367: mol_type = other RNA
atgggcatcgagctgctctgccttttctttctgttcttggggagaaacgaccacgtgcagggaggttgtgccttaggcggggctgaaacctgcgaggattgtctgctaattggaccccaatgcgcatggtgtgcccaggaaaattttacacatcctagcggcgtcggtgagaggtgcgacactccagcgaacctcctggctaaggggtgtcagcttaatttcatagaaaacccggtttcccaggtggagatcctgaaaaataagcccttgtctgtaggacggcagaaaaactcaagtgatattgtgcaaatcgcccctcagagcctcattctgaagctgcgcccaggcggcgcacagacgctccaagtccacgtgcgacagaccgaggactaccccgttgatttatattacctgatggacctttccgcctctatggatgacgatttgaatacaatcaaagaactggggtcgcgtctatcaaaggagatgagcaagctcacttccaactttagactgggattcggttcctttgtggaaaaacctgtctctccattcgtgaagaccacacccgaggagatagctaatccttgcagctccatcccatatttttgtcttccgaccttcggctttaaacatattctgcccttgactaacgacgcagaaaggttcaatgagatcgtaaagaaccagaaaatttcagccaatatcgatacacctgaagggggatttgacgctataatgcaggccgcggtttgcaaggagaagattggctggcggaacgatagtctccacctgttagtgttcgtcagcgacgcagactctcatttcggtatggattccaaactggccgggatcgtgattccaaatgacggactctgtcaccttgattcaaagaacgaatacagcatgagtaccgtgctggagtatcccacgatcggccaattgatcgacaagctagtccagaacaatgttctgctcatttttgctgtgactcaggagcaagtacacctgtacgaaaactatgccaaacttatacctggcgcaaccgtggggctgttgcagaaagattctggaaatatcctccagctgattatctccgcttacgaggaattacgcagcgaggtcgaactggaggtgctaggtgacacagagggcctcaacctgtcgttcactgccatatgcaataacgggaccctttttcagcatcaaaagaaatgctctcacatgaaggttggagatacagcgtccttctcagtgaccgtcaatattccacattgtgaaagaaggagtcggcacatcatcattaagcccgtgggcttgggtgacgccctggagctcctggtaagcccggaatgcaactgtgattgccagaaagaggttgaagtgaatagttctaagtgtcaccatgggaacggcagctttcagtgcggagtctgtgcatgccaccctggccatatggggccccgctgtgagtgcggagaggacatgctttcaacggatagttgtaaagaagctccagaccacccttcctgcagcggtcgaggcgactgctactgtgggcagtgcatctgtcatctgtctccctatggaaatatttacggcccatattgccaatgtgataacttctcatgcgtgagacacaagggtttgctctgtgggggcaatggagactgcgattgtggcgagtgcgtctgtaggagtgggtggactggagaatactgcaactgcacaaccagcactgactcctgtgtgtctgaggatggtgttctgtgctcgggccgtggggactgtgtgtgcggaaaatgtgtatgcacaaatcccggcgccagcggtcctacctgtgagcggtgcccaacgtgtggggatccgtgcaactccaagcgctcatgtatagaatgccacttaagtgctgccggccaggcaagagaggaatgcgtcgacaagtgtaaactggccggagctaccatctctgaggaagaggattttagcaaggacggctccgtgtcatgcagcctacagggggagaacgaatgtctcattacattcctgatcactaccgataatgagggaaaaacaatcattcattctataaacgaaaaggactgccccaaacctccaaatatccccatgattatgcttggcgtttccttggcgatcctgctcattggtgtggtcctgttatgtatctggaagctgcttgtgagttttcacgataggaaggaggtagcaaaattcgaagccgagcggagcaaggctaaatggcagactgggaccaaccctttgtatcgaggatctacatccacctttaagaatgtgacttacaaacatcgcgagaagcaaaaggttgacctctcaacggactgctga

SEQ ID NO: 2258 - RNA, 786 nt, synthetic construct
  misc_feature 1..786: note = EAW71937 variant
  source 1..786: mol_type = other RNA
atgtgggacctggtgctcagcatcgccctttccgtcggctgcaccggggctgttcccctgattcagtctagaatagtgggaggttgggagtgtgaaaagcactcacaaccttggcaggtagcagtgtacagtcatggctgggcccactgcgggggagtcttggtgcatccacagtgggttttaacagcggctcactgtctgaaaaagaacagccaggtgtggctaggcaggcataatctcttcgagccggaagatactggtcaacgggtccccgtgtcccactcttttcctcacccactgtataacatgtcgcttctgaaacatcagtcattgcgccccgacgaggatagcagtcacgacctcatgctgctgcgactctccgaacctgccaagatcacggatgtagttaaagtgttagggctgccaacccaggagcccgcacttggaacaacttgctacgcctctggctggggcagcattgagcctgaagagttcttgcgtccaagatccctgcagtgtgtctcactacatctcctgagtaatgacatgtgcgctagggcatatagcgaaaaggtgaccgagtttatgctttgtgccgggctgtggacaggaggtaaggatacctgcggcggggactctggaggcccgttggtgtgtaacggtgtcctccaagggatcacttcctggggacccgagccttgcgctctgccagaaaaacccgccgtttacacaaaggtggtacactatcggaaatggattaaggataccatcgcggcaaatccttga

SEQ ID NO: 2259 - RNA, 672 nt, synthetic construct
  misc_feature 1..672: note = EAW71938 variant
  source 1..672: mol_type = other RNA
atgtgggacctggtgctcagcatcgccctttccgtcggctgcaccggggctgttcccctgattcagtctagaatagtgggaggttgggagtgtgaaaagcactcacaaccttggcaggtagcagtgtacagtcatggctgggcccactgcgggggagtcttggtgcatccacagtgggttttaacagcggctcactgtctgaaaaagaacagccaggtgtggctaggcaggcataatctcttcgagccggaagatactggtcaacgggtccccgtgtcccactcttttcctcacccactgtataacatgtcgcttctgaaacatcagtcattgcgccccgacgaggatagcagtcacgacctcatgctgctgcgactctccgaacctgccaagatcacggatgtagttaaagtgttagggctgccaacccaggagcccgcacttggaacaacttgctacgcctctggctggggcagcattgagcctgaagagttcttgcgtccaagatccctgcagtgtgtctcactacatctcctgagtaatgacatgtgcgctagggcatatagcgaaaaggtgaccgagtttatgctttgtgccgggctgtggacaggaggtaaggatacctgcggcgtgtctcacccgtactcccaacacttggaggggaaaggatga

SEQ ID NO: 2260 - RNA, 189 nt, synthetic construct
  misc_feature 1..189: note = BAF98781 variant
  source 1..189: mol_type = other RNA
atgagcctgctcaagcaccagtcccttagacccgacgaggattcttcacatgacctgatgttgttaaggctgagtgaacctgccaaaatcaccgatgtggtcaaggttctaggcctcccaacacaagagccggctctggggactacgtgctacgcaagcggatggggttccattgaacccgaggaatga

SEQ ID NO: 2261 - RNA, 735 nt, synthetic construct
  misc_feature 1..735: note = BAG62239 variant
  source 1..735: mol_type = other RNA
atgggcaccctgtgggggtgccccggagcccctccagtgggtgctcacagctgtccgctccccaaggaggtctccagaacacttggctctggggaaggaatggcagtttcacataggaacaatagtggcatgctgcctccaggtagcttgttacggaactcccaggtgtggctggggcgccacaatctattcgagcccgaagacactggacgacgtgtacctgtgtctcattcgtttccacaccccctctacaacatgtcactgcttaaacatcaaagcctgagacctgatgaggacagttcccacgatttgatgctcctgaggctgtctgaaccagccaagatcacggacgtcgtgaaagttctcggcttaccgacccaggagcccgcgctgggcacaacttgctatgctagcgggtggggatccattgagcctgaagagttccttcggccacgctcattgcagtgtgtgagtctgcacctactcagcaatgatatgtgcgccagagcatactctgaaaaggtcaccgagtttatgctgtgtgccggtctttggacaggcgggaaagatacctgcggaggcgactccggtgggcccctggtgtgtaacggagtattgcagggcataacttcatggggccctgagccatgcgctctccccgaaaagccggcagtttatacaaaggtggtccattacaggaaatggatcaaggacaccattgccgctaatccttga

SEQ ID NO: 2262 - RNA, 786 nt, synthetic construct; identical to SEQ ID NO: 2258
  misc_feature 1..786: note = AAA74454 variant
  source 1..786: mol_type = other RNA

SEQ ID NO: 2263 - RNA, 150 nt, synthetic construct
  misc_feature 1..150: note = AAR10469 variant
  source 1..150: mol_type = other RNA
atgtgggacctggtgctcagcatcgccctttccgtcggctgcaccgggattgctagatctggatgggttggtacaacttgtctgtcattgaagacgcaggcaaggggcagtttaagcgccaccgcgtcccacacacggtctactatatga

SEQ ID NO: 2264 - RNA, 543 nt, synthetic construct
  misc_feature 1..543: note = AAR10468 variant
  source 1..543: mol_type = other RNA
atgtgggacctggtgctcagcatcgccctttccgtcggctgcaccggggctgttcccctgattcagtctagaatagtgggaggttgggagtgtgaaaagcactcacaaccttggcaggtagcagtgtacagtcatggctgggcccactgcgggggagtcttggtgcatccacagtgggttttaacagcggctcactgtctgaaaaagaacagccaggtgtggctaggcaggcataatctcttcgagccggaagatactggtcaacgggtccccgtgtcccactcttttcctcacccactgtataacatgtcgcttctgaaacatcagtcattgcgccccgacgaggatagcagtcacgacctcatgctgctgcgactctccgaacctgccaagatcacggatgtagttaaagtgttagggctgccaacccaggagcccgcacttggaacaacttgctacgcctctggctggggcagcattgagcctgaagagtgtaccccagggccggacggagtcgctggttcccccgatgcatgggtgtga

SEQ ID NO: 2265 - RNA, 765 nt, synthetic construct
  misc_feature 1..765: note = EAW71943 variant
  source 1..765: mol_type = other RNA
atggccaccgctggcaacccctgggggtggttcctgggatacctcatccttggtgtggcaggcagcctggtctccgggtcttgctcacagattataaatggagaggactgtagtcctcacagccaaccatggcaggccgcgttggttatggaaaacgagttattttgctccggcgtgctggtacatccgcagtgggtgctatctgctgcccactgtttccaaaattcgtatacaatcggtctcgggctgcattcacttgaagcagatcaggagcccggaagccagatggtcgaagccagtctgtccgtgagacaccctgagtacaacaggccattgctcgctaatgacctgatgctgattaagctcgatgagtctgttagcgaatccgacactatccggtcaattagtatcgcaagccagtgccccacggccggcaactcttgtttagtgtccggctgggggctgcttgctaatggacgcatgcctaccgtcttgcagtgcgtgaacgtatcagttgtgagcgaggaagtctgtagtaaactgtatgatccactataccatccctctatgttttgcgccggtggcgggcaagaccagaaggattcctgtaatggagacagcggcggtcctctcatatgcaacgggtatctgcagggacttgtgtcgttcggcaaagcgccatgtggccaggtgggggtcccgggagtttacacaaatctgtgcaagtttactgagtggatcgagaaaaccgtgcaagcatcttga

SEQ ID NO: 2266 - RNA, 228 nt, synthetic construct
  misc_feature 1..228: note = AAX30051 variant
  source 1..228: mol_type = other RNA
atggccaccgctggcaacccctgggggtggttcctgggatacctcatccttggtgtggcaggcagcctggtctccgggtcttgctcacagattataaatggagaggactgtagtcctcacagccaaccatggcaggccgcgttggttatggaaaacgagttattttgctccggcgtgctggtacatccgcagtgggtgctatctgctgcccactgtttccagaagtga

SEQ ID NO: 2267 - RNA, 588 nt, synthetic construct
  misc_feature 1..588: note = AAL14782 variant
  source 1..588: mol_type = other RNA
atggccaccgctggcaacccctgggggtggttcctgggatacctcatccttggtgtggcaggcagcctggtctccgggtcttgctcacagattataaatggagaggactgtagtcctcacagccaaccatggcaggccgcgttggttatggaaaacgagttattttgctccggcgtgctggtacatccgcagtgggtgctatctgctgcccactgtttccaaaattcgtatacaatcggtctcgggctgcattcacttgaagcagatcaggagcccggaagccagatggtcgaagccagtctgtccgtgagacaccctgagtacaacaggccattgctcgctaatgacctgatgctgattaagctcgatgagtctgttagcgaatccgacactatccggtcaattagtatcgcaagccagtgccccacggccggcaactcttgtttagtgtccggctgggggctgcttgctaatggagagttgaccggtgtctgcctgccttcaagccgccgaagttctgcccagtcccgtggcctaacacaaagctcggcgtctcaggcagaatgtctcccatgctgttccgcctga

SEQ ID NO: 2268 - RNA, 480 nt, synthetic construct
  misc_feature 1..480: note = AAL14781 variant
  source 1..480: mol_type = other RNA
atggccaccgctggcaacccctgggggtggttcctgggatacctcatccttggtgtggcaggcagcctggtctccgggtcttgctcacagattataaatggagaggactgtagtcctcacagccaaccatggcaggccgcgttggttatggaaaacgagttattttgctccggcgtgctggtacatccgcagtgggtgctatctgctgcccactgtttccaaaattcgtatacaatcggtctcgggctgcattcacttgaagcagatcaggagcccggaagccagatggtcgaagccagtctgtccgtgagacaccctgagtacaacaggccattgctcgctaatgacctgatgctgattaagctcgatgagtctgttagcgaatccgacactatccggtcaattagtatcgcaagccagtgccccacggccggcaactcttgtttagtgtccggctgggggctgcttgctaatggatga

SEQ ID NO: 2269 - RNA, 765 nt, synthetic construct
  misc_feature 1..765: note = AAD21580 variant
  source 1..765: mol_type = other RNA
atggccaccgctggcaacccctgggggtggttcctgggatacctcatccttggtgtggcaggcagcctggtctccgggtcttgctcacagattataaatggagaggactgtagtcctcacagccaaccatggcaggccgcgttggttatggaaaacgagttattttgctccggcgtgctggtacatccgcagtgggtgctatctgctgcccactgtttccaaaattcgtatacaatcggtctcgggctgcattcacttgaagcagatcaggagcccggaagccagatggtcgaagccagtctgtccgtgagacaccctgagtacaacaggccattgctcgctaatgacctgatgctgattaagctcgatgagtctgttagcgaatccgacactatccggtcaattagtatcgcaagccagtgccccacggccggcaactcttgtttagtgtccggctgggggctgcttgctaatggacgcatgcctaccgtcttgcagtgcgtgaacgtatcagttgtgagcgaggaagtctgtagtaaactgtatgatccactataccatccctctatgttttgcgccggtggcgggcacgaccaaaaggattcctgtaatggagacagcggcggtcctctcatatgcaacgggtatctgcagggacttgtgtcgttcggcaaagcgccatgtggccaggtgggggtcccgggagtttacacaaatctgtgcaagtttactgagtggatcgagaaaaccgtgcaggcatcttga

SEQ ID NO: 2270 - RNA, 2673 nt, synthetic construct
  misc_feature 1..2673: note = AAC83230 variant
  source 1..2673: mol_type = other RNA
atgagccagggcatcctgtctccccctgccgggctcctttccgacgatgacgtggtcgtttcaccaatgttcgagagtaccgctgcagatctgggaagcgtggtaagaaagaacttgttatccgactgctctgtggtctcgacatcactggaagataaacaacaggtgccgagcgaggacagtatggaaaaggttaaagtgtacctaagggtccggcccctcctgccttccgagcttgaacgccaggaggatcagggttgtgtgcgaattgagaatgtagaaactctggttttgcaagccccaaaggactcttttgcgctcaaaagcaacgagcgtggcatagggcaggctacgcacagattcaccttttcccagatcttcggacccgaagtgggccaggcctcatttttcaatctgacagtcaaggagatggtgaaggatgtgctgaaaggtcaaaactggctcatttatacttacggggtcaccaatagtggaaagacacataccatccagggcactattaaagacggcgggatcttacctaggagcctggcacttatatttaactctttgcagggacagctgcacccaacacccgatctaaagcctctcctgtccaatgaggttatctggcttgactcaaaacaaattcggcaggaagagatgaagaagctgagcttgctcaacggtggcctgcaggaagaggaattaagtacctctctgaaacgctccgtgtatatcgagagcagaattgggacgtcgacttctttcgattccggaatcgccggcctctcaagtataagccaatgcacctcctctagccagcttgacgagacatcacataggtgggctcagccagacactgcaccgctgcccgtacctgccaatattcggtttagtatctggatttccttctttgaaatctacaacgagttgctatatgatctgctcgaaccacccagccagcaacgcaagcgacagaccctgagactttgtgaggaccagaatggtaacccttacgtgaaagatctgaattggatccacgtccaggacgctgaagaggcctggaagttgctcaaagtggggaggaagaaccaatctttcgcgtcaacacatctgaatcagaacagtagccggtcccactctatattttcgattcgtatcttacatctgcagggagagggcgatattgttccaaaaatcagcgaactatccctctgcgacctggcaggctcagagcgctgtaaggatcagaagagtggggaaagacttaaagaggccggaaacataaatacctctttgcacacgctgggtaggtgcattgctgccctccggcaaaaccagcagaatcgaagcaagcagaacctggtgcccttccgcgactccaaacttactagagtcttccaaggctttttcacagggaggggacggtcatgtatgatcgtgaatgtaaacccgtgcgcaagcacctatgatgaaactctgcacgttgctaagttttctgccatcgcgtcccagttggtgcatgcccctcccatgcagctcggcttcccaagtctgcacagctttattaaagagcactctttacaagtctccccttcactggagaagggtgcaaaggctgacacagggctagatgacgacatcgaaaatgaggccgatattagtatgtacggcaaagaagaactccttcaggtggtcgaggctatgaagaccctgttgctgaaagaacgccaggagaagctccagctggaaatgcatttaagagacgagatatgtaacgaaatggtggagcaaatgcagcagagggagcagtggtgcagcgaacacctggatacgcaaaaagagcttttggaagagatgtacgaagagaagctcaatatcctgaaggagtcgctaacctccttctatcaggaagagattcaggaacgtgacgagaaaatcgaggagctggaggccctcctgcaggaagcacggcaacagtctgttgcccatcagcaaagcggatcagagcttgctttgcgaagaagtcagaggctggcggcatccgcctctacacagcagttacaagaagtgaaggctaaactccagcagtgtaaggccgagctgaacagcactaccgaggaacttcacaaataccagaagatgctggagcccccaccctccgcaaagccttttacaatcgatgtagacaaaaagttggaagagggccagaaaaatattcgcctcctgcggactgaactacaaaagctgggggagtcactccagagcgccgagagagcttgctgccatagtaccggagccggtaaactgaggcaggcacttacaacctgtgatgacatattgatcaagcaagatcagactctggcggaattacagaacaatatggtcctcgtgaaactggaccttcgcaagaaggctgcctgcattgcagagcagtatcacacggttctgaaactacaaggccaggtgtctgccaagaaacgactcgggacaaaccaggaaaatcaacagccaaaccagcagccgcccggaaagaaacctttcctgcggaacttgctgccacgtacccccacttgtcaatccagcaccgattgctcgccttacgctagaatcttaaggtcacgccggtctccactcctgaagagtggcccctttggtaagaaatattga

SEQ ID NO: 2271 - RNA, 1113 nt, synthetic construct
  misc_feature 1..1113: note = AAH34621 variant
  source 1..1113: mol_type = other RNA
atggccatcaccctggaggaagctccctggctcggctggcttctggtgaaggcattgatgagattcgcctttatggtcgttaacaatttagtggcgattcctagctacatatgctatgtaatcattctgcagccactaagggtgctcgactccaaacggttctggtacatcgaggggattatgtataagtggctgcttggaatggtcgcttcttggggttggtacgccggctatacagtgatggaatggggagaggatatcaaagcagtttcaaaggacgaagccgtgatgctggtcaaccaccaagctactggggatgtgtgtacgttgatgatgtgcctccaggacaaaggcctggtagttgcacagatgatgtggctgatggatcatatatttaagtacaccaatttcggtatcgtgagtctcgtccacggggactttttcattcgccagggacgaagctatcgtgatcaacagttactgcttttgaagaaacatctggagaacaattacagatccagggaccggaagtggatcgtgctatttccggagggcggcttcctccgcaaaagaagggaaacatctcaggcctttgctaagaaaaacaatctgcccttccttactaacgtgaccctgcctcggtcgggggccacaaagattatcttgaatgcgctcgtcgcacagcaaaagaacggatcaccagccggtggcgatgctaaagagctggacagcaagagtaaagggttacagtggataattgataccactatcgcctaccccaaggcagaacctattgacatccagacatggatcctgggatatcgcaaaccaaccgttacgcacgtgcattaccgaatttttcccataaaggatgtacctctcgagactgacgaccttaccacatggctgtatcagagattcgtggagaaagaagatttgctatcccacttttacgagactggcgctttcccaccgtctaagggtcacaaggaagccgtcagcagggagatgaccctgtccaatctctggatcttcctgattcaatcatttgcgttccttagtgggtatatgtggtacaacatcatacagtatttttaccattgtctgttctga

SEQ ID NO: 2272 - RNA, 2178 nt, synthetic construct
  misc_feature 1..2178: note = AAH14924 variant
  source 1..2178: mol_type = other RNA
atggccatggacagctccctgcaggctagactcttccccggccttgcaatcaagattcaaaggtctaacgggctgatacactcagccaatgtgcggaccgtcaacttggagaaaagttgcgttagcgtggaatgggcggagggaggtgctacaaagggcaaagaaatcgattttgacgatgtagccgcaattaatcctgagttactgcagctactcccactgcatccgaaggacaaccttcccctgcaggaaaatgtgactatccagaaacaaaagcgccgatccgtcaactctaagattcctgccccaaaagagtcgttgcgttcaagaagcacgaggatgagtaccgtgtccgagctccggatcacagctcaggaaaatgatatggaggttgaactgcccgcagccgctaactctcgcaagcagttcagcgtgcctccagcccccactagaccttcctgtccagcggtcgcagagataccgctgaggatggtgtcagaggaaatggaggaacaggtacacagtatccgggggtctagctccgccaatcccgttaactcagtgcgccgaaaaagctgcctcgtcaaggaggtggagaaaatgaagaataagagagaggagaaaaaggctcaaaacagtgaaatgaggatgaaacgggcccaggagtacgactcttcctttcctaattgggagttcgcacgtatgattaaggagtttcgcgctaccttagaatgtcatccactgacaatgaccgatcccatcgaggagcacagaatttgcgtgtgtgtcaggaaacggcctcttaacaagcaggaattggccaaaaaggagatcgacgttataagcattccatcgaagtgcctgctactcgtgcatgaacccaaactgaaggtagatcttactaaatatctggagaatcaggcgttctgttttgacttcgcctttgatgaaacagcatctaacgaggtggtctaccgattcaccgctcgcccgttggtgcaaacgatctttgagggaggcaaggccacttgcttcgcttatggtcagaccgggtccggaaaaacacacactatgggcggcgacctctcagggaaggcccagaacgcaagtaagggaatttacgccatggctagcagagatgtttttctgctgaaaaatcaaccttgttataggaagttaggtctcgaagtgtacgtcaccttcttcgagatctataacggcaaactttttgacctgttgaataagaaagcgaagctacgggtgctggaagacgggaagcagcaggtacaggttgtgggactccaagagcacctggtcaactccgcagatgacgtgatcaaaatgattgatatgggctctgcctgccgcacaagcggtcagaccttcgctaattcaaacagttccagaagccatgcctgttttcagataatccttagggcaaaggggcgtatgcacggaaaattctctctggtcgacttggccggcaatgagcggggcgctgatacgtcaagtgccgaccgacagactagaatggaaggggcagagattaacaagagcctcctggcgttaaaagaatgcatcagggctctgggacaaaataaggcccatacaccctttcgcgagtccaagctaacccaggtgctccgggattctttcataggtgaaaactcgagaacttgcatgattgcaacaatcagcccaggcatctcctcatgtgagtacaccctgaatacgcttaggtacgccgaccgcgttaaagagttgagtcctcactctgggcccagcggagaacagctgattcagatggagaccgaagagatggaggcttgctccaacggcgccctcatcccaggtaatctgtcaaaggaagaggaagaacttagctctcaaatgtccagttttaacgaagcaatgacacagattcgagagctggaagagaaagctatggaggaattgaaggagataatccagcaggggcccgattggctcgaactgagcgagatgactgagcaacctgactatgatttagaaaccttcgtgaataaagccgagtctgcgctggcccagcaggctaagcacttttccgcactacgggacgtaattaaagccctccgtctggctatgcaacttgaagaacaggcctcaagacagatcagtagcaagaagaggccacagtga

SEQ ID NO: 2273 - RNA, 342 nt, synthetic construct
  misc_feature 1..342: note = AAH62223 variant
  source 1..342: mol_type = other RNA
atgaacttctacctgctccttgccagctccatcctgtgcgctttgattgtgttttggaagtatagaaggttccagcggaataccggcgagatgtcttcaaacagtacagcattagccctggtccgccccagctcctctgggctaataaattcgaacactgacaataacctcgcggtttacgatctgtcacgagacatccttaataactttcctcacagcattgctcgtcaaaaacggatcctggtgaatttgagtatggtagaaaacaagctcgtggagctggaacatacgctgctctccaaaggattcaggggtgcctctccacacagaaagagcacctga

SEQ ID NO: 2274 - RNA, 2583 nt, synthetic construct
  misc_feature 1..2583: note = AAA56833 variant
  source 1..2583: mol_type = other RNA
atgggcccctgggggtggaagctgagatggaccgtggccctccttctggctgcagccggaacagcggtcggtgacaggtgcgagcggaacgaatttcagtgtcaagatggcaaatgcatcagctacaagtgggtttgtgacgggtccgctgagtgccaggatggatctgacgaatcacaggagacttgtttgagtgtgacgtgcaaaagcggcgatttttcctgtggtgggcgcgtaaatcgatgcattcctcagttctggcgttgtgacggacaagtggattgcgacaacggctctgatgaacagggctgtccaccgaagacctgctcgcaggacgagtttagatgccacgatgggaaatgtatatcaaggcagttcgtctgcgacagcgatcgggactgtttagacggaagtgatgaggcctcctgccccgtgctgacatgtggtcctgcatcttttcaatgcaatagctccacttgtatcccacagctatgggcctgcgacaacgatcccgactgtgaagatggctcagacgagtggcctcagcgctgcagagggctctatgttttccagggagatagtagcccatgttctgcttttgagttccattgcctgtccggcgaatgcattcactcaagctggaggtgtgacggtgggcccgattgcaaggacaagagtgatgaggaaaattgtgcagtggctacctgccggcctgacgagtttcaatgttctgacggaaactgcatccatggctcccgccagtgtgatcgagaatacgactgcaaagatatgagcgacgaggtcggctgtgtgaatgtaacactttgcgaagggccaaacaagttcaaatgtcactcgggagagtgcattaccctggataaggtttgcaatatggccagagactgtagggattggtctgacgagccgatcaaagaatgcggtactaacgagtgtttggataataacggcgggtgctcccatgtgtgtaatgacctcaagataggatatgaatgcctgtgtcccgatggctttcagctggtcgcccaacggcgttgcgaggacatcgatgaatgtcaggaccctgacacatgctcacagctctgtgtgaacttagagggtgggtacaagtgccagtgcgaggaaggcttccaactggatccacacaccaaagcgtgtaaggcagtgggaagtattgcctatcttttcttcacgaatcgccacgaggtcagaaaaatgactttggacaggagcgaatacacctccctgatccccaacctacggaacgttgtggctctcgatacagaggtagcctctaatcgaatttattggagcgacctgtcacagcgcatgatctgcagtactcagcttgatagagcacatggcgtgtccagctacgacaccgtcatatctagggatattcaggctcctgacgggctggccgtggattggatccactcaaacatttactggacagacagtgttttgggaaccgtgagcgtcgcggatacgaagggtgtgaaacggaagactctcttccgcgaaaatggctccaaaccaagagccatcgtagttgaccccgtgcatgggtttatgtattggacagattggggaaccccggcaaagatcaagaaaggcggtctgaacggggtcgacatttactctttagtgactgagaatatacaatggcctaacggcatcacactggacctcctttcgggaaggctgtattgggtcgatagcaagttgcactccatttcaagtatcgacgtgaatggcgggaaccgtaaaaccatactagaggatgaaaagcggctggctcaccccttctctctcgccgtttttgaggacaaagtgttctggacggatattatcaatgaagctatctttagcgccaaccgactgaccggatccgacgtaaatcttctggcagagaacttgctctcaccagaggatatggtcctgttccataatttaacacagcctagaggtgtgaactggtgtgaaaggactaccctgagcaatggcgggtgccagtacctatgtctccccgccccacagattaacccccactctcctaagtttacatgcgcttgtccagacggaatgctgcttgcgcgcgatatgcggtcctgcttgactgaggcagaagccgctgttgccacccaagagacaagtaccgtgagactgaaggtcagctctactgcagtgaggacgcagcatacaaccactcgcccggtacccgacacctcccgactccctggcgccacaccaggtctgaccactgtggaaatcgttacaatgtcacaccaggctcttggggatgtcgccggccggggaaacgagaaaaagcccagtagcgtgcgtgcactgtcgattgtgttgcctatagtcctcctggttttcttatgtctgggcgtgtttctactctggaaaaattggagactgaagaacatcaattccattaacttcgacaatccagtgtatcagaaaacgaccgaggacgaagtacatatctgccacaaccaagatgggtactcttatcccagcaggcagatggtctcacttgaggacgatgtggcgtga

SEQ ID NO: 2275 - RNA, 1302 nt, synthetic construct
  misc_feature 1..1302: note = CAA70989 variant
  source 1..1302: mol_type = other RNA
atggtgtggaaggtcgccgttttcctgagcgtggctctcggcatcggggcagtacccattgacgatcctgaggacggaggtaaacactgggtggtcatagtggccggctccaacgggtggtacaattatagacatcaggcggatgcttgccacgcctaccaaatcattcataggaacggaatcccagacgaacagattgttgtgatgatgtatgatgacatcgcatactctgaggataatccgacccccggcatagtcatcaaccggcctaatggtacagacgtgtatcagggggtaccaaaggattacactggagaagacgttacgccccagaactttcttgccgtgctgcgcggcgatgctgaggcagtcaaaggcattgggtcaggaaaggtgttgaaaagtggtcctcaagaccacgtgttcatctattttaccgatcatggcagcacagggattttagtcttcccaaatgaagacctgcacgttaaggacctaaacgagactatccactacatgtacaagcataaaatgtatcgaaagatggtgttttacatagaggcctgtgaatccggatctatgatgaatcacctccccgataacattaatgtatatgctaccacagccgcgaaccctcgtgagtcgtcatacgcatgctattacgacgagaaaagaagcacctatctgggcgattggtacagtgtgaattggatggaagactccgatgtcgaggaccttactaaggaaacactgcataaacagtaccacttggtgaagtctcacaccaacacgagccatgttatgcagtatggtaataagactatctccaccatgaaagtgatgcagttccaagggatgaagaggaaagcctcaagtccagtcccgctgccccctgtgacacacctcgatctgactccaagccccgacgtacctctcaccattatgaagcggaaattaatgaacacaaacgatctggaggaatctcgccagcttaccgaggaaatccagagacatttggacgctaggcacctgatcgagaagtccgttcggaaaattgtgtcactactcgccgcaagcgaggctgaagtcgagcagctgcttagtgaacgcgccccactgacgggacattcttgttaccccgaggcgttgctccactttcgaactcactgcttcaattggcattccccgacatatgaatacgccctgagacacttatatgtgctggtcaacctctgtgagaagccttacccccttcataggataaagctgagcatggatcacgtgtgcttgggccactattga

SEQ ID NO: 2276 - RNA, 1797 nt, synthetic construct
  misc_feature 1..1797: note = AAL36991 variant
  source 1..1797: mol_type = other RNA
atgacccccatcgtgacagtcctgatttgcctcggccttagcctggggcctagaactcacgttcagacgggaaccataccaaagccgacattgtgggccgagcccgactccgtgatcactcaaggttctcctgtaaccttatcatgtcagggcagtctggaagctcaggagtacaggctatatcgggagaaaaagagcgcatcctggattacacgcatccgaccagagctcgtgaaaaacgggcagttccatattccctctatcacctgggaacacactggacgttacggctgccaatattactcgagagccaggtggtcagagctgagcgatcctcttgtcctggtgatgacaggtgcgtatccaaagcccaccttgagtgctcagccttccccagttgtgacgtctgggggacgggtcactctccagtgtgagagccaggtggcctttggcggcttcatactgtgcaaagaaggggaggaagaacatccgcaatgtctgaactcccagccccacgcacgcggatcaagtagagccatctttagcgtaggtcctgtttctccaaataggcggtggtcccatcgctgctacggctatgacctcaattcaccctacgtgtggagcagtccttctgatttactggagcttttggtcccaggggtgtccaagaagcccagcctgtcggtgcagccgggacctgtcgttgctcccggcgaatctctaaccctccagtgtgtgtccgacgtaggttacgatcgattcgtgctgtataaagagggggaaagagaccttaggcaactgccaggacggcagcctcaggcaggcttgtcacaagccaactttacactcggccccgtcagtcgtagctacgggggacagtatcgctgctacggtgctcacaatctgtcctctgagtgtagcgccccatcagatcccttagacattctgatcactggccagattagagggacccctttcatcagtgtgcagccaggaccgacagttgcgtccggcgaaaacgtgaccctcctttgccaaagctggaggcagtttcacacgttcctgttgactaaggccggtgccgctgatgcacccctacggctgcgatctatacatgagtatcctaaataccaggcagagtttccaatgtcacccgtcacaagtgctcacgccgggacctatcgctgttacggcagcctcaattccgacccttacctgctttctcatccatcggaacccctggagttggtggtaagcggaccgtccatgggctcaagtcctccacccactgggcctatttctacacccgcgggaccagaagatcagcctctcacccccacgggtagcgacccacaatccggcctggggagacacttaggagttgtgatcggcattctggtcgccgtggtcctactcctgcttttgctgctcctgcttttcctgatcttgaggcaccggcgccagggtaagcattggacctcaacacagagaaaagcagattttcagcacccggctggggccgtgggccctgagcccactgacaggggactccaatggcgtagctctccagctgccgacgcacaggaagagaacctgtatgccgctgttaaggatacccagcccgaggacggcgtggaaatggatacacgggcggcagcctccgaggctcctcaggacgtaacttacgcccaattacatagtctgaccctacgaagaaaggcaacagaaccaccccctagccaggagagggaaccgccagccgagccctctatctatgctaccctcgccattcactga

SEQ ID NO: 2277 - RNA, 498 nt, synthetic construct
  misc_feature 1..498: note = CCDS6385.2 variant
  source 1..498: mol_type = other RNA
atggccctgctcgcacttctgttggtggtcgctttacccagagtttggaccgacgccaacctgacagcgaggcagcgggatcctgaggacagccaacgcactgatgaaggcgacaatcgagtgtggtgccacgtatgtgagcgtgaaaacacgttcgagtgccagaatccaagaaggtgtaagtggaccgaaccgtactgcgtgatcgctgccgtcaaaatttttccccggttctttatggtggcaaagcagtgttccgccgggtgcgctgcaatggagcgccctaaaccagaggaaaagagattcctactcgaggaacccatgccatttttctatctgaaatgttgcaagataaggtactgtaaccttgagggacctcccatcaattcttcagtttttaaggagtatgccggtagtatgggcgaaagctgcgggggactgtggttggctattctcctgctgctcgcctccatcgcggcaggcttatctctgtcgtga

SEQ ID NO: 2278 - RNA, 375 nt, synthetic construct
  misc_feature 1..375: note = AAA68873 variant
  source 1..375: mol_type = other RNA
atgagcctggagcagaagtcccaacactgcaaacccgaagagggcctcgacacccaggaagaggcccttgggctggtgggagtccaggctgcaacaactgaggaacaggaggccgtttcttcaagtagccctttggtgccaggtacgttaggcgaagtaccggcggctgggtcccccggacctctgaagtctccacaaggcgcctcggcaatccccaccgccattgatttcacactatggagacagtcaataaaaggtagcagtaaccaggaggaagaggggccttccacttctccagaccccgagagcgtgtttagggctgcactctccaagaaagtcgccgatctgatccatttccttctgttgaagtactga

SEQ ID NO: 2279 - RNA, 957 nt, synthetic construct
  misc_feature 1..957: note = AAH02455 variant
  source 1..957: mol_type = other RNA
atgctgctcggccaaaagagccagagatacaaagccgaggaagggcttcaggctcagggagaggcacccggtctgatggacgtgcagatccctaccgccgaggaacaaaaggcggcttcctcttcaagtacattgattatgggcactttagaagaggtcacggatagcgggtccccatctccgccccagtcgcctgagggagcctcaagcagtctgaccgttacagactccactctatggtctcagagcgatgaaggctcctcaagtaacgaggaagagggtccaagcacctctcccgaccctgcacacctcgagtccctgttcagggaagcccttgatgagaaagtggctgaactggtacggtttttgctccgcaagtatcagataaaagagccagtgacaaaggcagaaatgctggagtcagtcatcaagaattacaaaaaccatttccccgacatttttagcaaggccagtgagtgcatgcaagtgatcttcgggattgatgttaaagaagtggaccctgctggacactcttatatcctggtcacctgtctcggcttatcctacgatggcctgcttggggacgatcagagcactccaaagacaggattgctgataatcgtgctaggtatgattctcatggagggctcgcgagccccggaagaggcgatctgggaagcactgtctgtaatggggctttatgacggacgtgagcattccgtttactggaaactgagaaagttgctcacccaggagtgggtgcaggaaaattatctggagtacaggcaagcccccggctcagatcctgtccggtacgaatttttatggggtccacgcgctctggccgagacgagttatgtgaaggtgctcgaacacgtcgttagagtgaacgcaagggtacggattagctacccctcccttcatgaggaggctctgggggaagagaaaggagtgtga

SEQ ID NO: 2280 - RNA, 1290 nt, synthetic construct
  misc_feature 1..1290: note = AAH04479 variant
  source 1..1290: mol_type = other RNA
atggagacccagttcagaaggggcgggctgggatgcagccccgcctccatcaagcggaaaaagaaacgcgaagactctggtgattttggcctccaagtgtcaacaatgttcagtgaggacgattttcagagcactgaacgagctccttacgggccacagcttcagtggtcccaagacctgccgcgtgtccaggttttcagagagcaggcaaacttggaagataggtctccccggcgcacgcagagaattaccggaggcgagcaagtgttatggggtcctataacacagatctttccaactgtaaggcccgccgacctgacccgggtgattatgcctctagagcagcgctcgcagcactgtaagccagaagaggggctccaagcgcaggaagaggatctgggacttgtcggcgctcaggccctgcaagcagaggaacaggaggccgctttcttttcaagcacattgaatgtgggcaccctcgaggaactgcccgcagccgaaagtccttccccaccgcagtctccccaggaggagagcttctcccctactgctatggacgccatctttgggtcactgagtgatgaaggaagcggttctcaagagaaagaaggcccatccacatcacccgacctcattgatcctgagagcttcagtcaggacatcttacatgataagataatcgacctggttcaccttttgctgcgaaagtatagagtgaaagggctaattaccaaggcggaaatgctcggatctgtcatcaaaaactacgaggactattttccagagattttcagggaagcatccgtgtgcatgcagctgctttttggcatcgatgtaaaggaggttgaccccacgagccattcgtacgtgctggtcacttctttgaatctctcctatgatggtatacagtgtaacgaacaatcaatgccgaaaagtgggctgttaattatcgtgctgggagtgattttcatggagggcaattgcatccctgaagaggtcatgtgggaggttctcagcatcatgggcgtgtacgccgggcgggaacacttcctttttggagagcccaagcgtctgttgacccagaactgggtacaggaaaagtatctagtgtaccgccaggtcccaggtacagaccctgcttgttacgagttcctgtggggccccagagcccatgcagagacttccaaaatgaaggtgctcgaatatattgctaatgccaacgggagggatccaacctcttaccccagcctgtatgaggacgcgcttcgggaagagggagaaggcgtttga

SEQ ID NO: 2281 - RNA, 1110 nt, synthetic construct
  misc_feature 1..1110: note = EAW99421 variant
  source 1..1110: mol_type = other RNA
atgcccagagcccctaagaggcagcggtgcatgccagaggaagacctgcaaagccagtccgagacccagggcctcgaaggggctcaggcaccgcttgccgtggaggaagatgcgtcttcaagtacaagcacttcctcttcgttccccagctcatttcctagttcctctagctcctcaagtagctcttgttacccactgatcccctccacgcctgaggaggtctcagctgacgatgaaaccccaaatccccctcaaagcgcccagattgcatgcagttctccatccgttgtggccagcttgccgttagaccagtcggatgagggatcttcctcacagaaagaagagagtcccagcacactgcaagtactacctgactccgagtctctcccacgcagcgaaatagatgagaaggtgactgacctggtccagttccttctgtttaaatatcagatgaaggaacccatcaccaaagctgagattttggaatcagtgatcaagaactacgaggatcacttccctctcctgtttagtgaggcatccgaatgtatgctgctcgttttcggtattgacgtgaaggaggtcgatccaacaggccatagctttgtgttagtaacctctctggggcttacttatgacggaatgttgtcagatgttcagagtatgcccaaaacaggcatcctgatactaatcctcagcattatcttcattgaaggttactgcaccccggaggaagtgatctgggaggccctgaacatgatggggctttatgacggaatggagcacctgatatacggcgaacctcgaaagttgctcacgcaagactgggtccaggagaattatctggaataccgtcaggtgcccggctccgatccagctagatacgagtttttatgggggcctagggcccatgcggaaattcggaaaatgtctctgctcaagttccttgcaaaagtgaacggatcggacccccgcagctttccactgtggtatgaggaggccttgaaggatgaagaggaaagagctcaagacaggatcgccactaccgatgacacaactgcaatggcttccgcctcaagttctgcgaccggtagcttctcctaccccgagtga

SEQ ID NO: 2282 - RNA, 945 nt, synthetic construct
  misc_feature 1..945: note = AAH03408 variant
  source 1..945: mol_type = other RNA
atgcccctggagcagagaagccaacactgcaagcctgaagagggcctcgaagcccagggggaggctcttggactggtgggtgcacaggccccagcgaccgaagaacaggagacagcttcctcttcaagtactttggtcgaagttacgttaagggaggtgccggccgcagaaagcccctcccctccacattctccccaaggcgcctcgaccctgcctacaactatcaactacaccctatggtcacagagcgacgaggggagttccaatgaggaacaggagggaccatctacattccccgatctcgaaaccagctttcaggtagctctgtcccggaaaatggcagagcttgtgcacttcctgttgctcaagtaccgcgcccgagaaccttttactaaagctgagatgctgggctcagtcattcgtaacttccaagactttttcccagtgatatttagtaaggccagcgagtacctgcagctcgttttcggtatcgaagtggtcgaggtggtaagaattgggcatttatatatcctggttacatgtcttggattgtcttacgatggcctgctaggcgacaatcagattgtgccgaaaaccgggctcctgatcatagtccttgcgatcattgcaaaggaaggagattgcgcccccgaggaaaagatctgggaggagctgtccgtgttggaggcttcagacggtagggaggatagcgtgtttgcccaccctcggaaactcctgacgcaggacttagtccaagaaaactatctggagtaccgccaggttccaggcagtgatcccgcatgttatgagttcctctgggggcctagagctcttgtggaaacttcttacgtaaaggtgctgcatcacttgctaaaaatttccggaggcccacacatcagctatcccccgctgcatgagtgggcctttagggaaggtgaggaatga

SEQ ID NO: 2283 - RNA, 930 nt, synthetic construct
  misc_feature 1..930: note = AAA03229 variant
  source 1..930: mol_type = other RNA
atgagcctggagcagagatccctccactgcaagcccgaagaggcccttgaagctcaacaggaggcactgggcttggtgtgtgtccaggccgcgacctcttcaagtagccctttagttctggggacactagaagaggtgccaactgctggatccacggacccgccccagtctcctcaaggtgcctcggcattcccaaccacaatcaactttactaggcagcggcagccctcagagggcagcagttcccgcgaagaggaagggccttctaccagctgcattctcgagtccctgttccgagccgtaataaccaaaaaggtggctgatcttgtcggatttctgttgctcaaataccgtgcaagagagccagtgacaaaggccgaaatgctggagtcagttatcaaaaattataagcattgtttccccgaaatttttggcaaggctagtgagagcctgcagctcgtgttcggtatcgacgtcaaagaagccgatcctactgggcactcttacgtgttagtaacatgcctgggactttcctatgacggcttgctgggcgataaccaaattatgccaaagaccgggtttctaatcatagttctcgtgatgatcgcgatggagggaggtcatgcaccggaggaagagatttgggaagaactgtcagtcatggaagtgtacgacggcagggagcacagcgcctatggggagccccggaaacttctgacgcaggatttggtgcaggaaaagtacctcgagtatcgccaggtccctgacagtgatccagctagatacgagttcctgtggggacccagggccttagcagagacttcttacgttaaagtgctggaatatgtaatcaaggtgtccgctcgggtccgctttttctttcctagcctccgagaggccgcgcttagagaggaagaggaaggcgtgtga

SEQ ID NO: 2284 - RNA, 945 nt, synthetic construct
  misc_feature 1..945: note = AAA17729 variant
  source 1..945: mol_type = other RNA
atgcccctggagcagagaagccaacactgcaagcctgaagagggcctcgaagccaggggagaggctcttgggctggtgggtgcacaggccccagcgaccgaggaacagcagacagcttcctcttcaagtactttggtcgaggttacgttaggcgaagtgccggccgcagacagcccctcccctccacattctccccaaggggcctcgtcattcagcaccacaatcaactacactctgtggcggcagagtgatgagggatcctctaatcaggaagaggagggccctcgcatgtttccagacctagaaagcgagttccaggctgcaatttcccgaaaaatggtagaactcgtgcactttctgcttctgaagtaccgtgccagagagcccgtcaccaaagctgaaatgttggagtcagtgctcaggaactgtcaagatttctttcctgttatattcagtaaggccagcgagtacctgcagctggtgtttggtatcgaagtcgtggaggtagttccaatttctcatctctatatcttagtgacatgcctggggctttcctacgacggattgctgggcgataatcaggtcatgccgaaaaccggcctactcattatcgtgctggcgataatcgcaattgaaggggactgtgcccccgaggaaaagatctgggaggagctttcaatgctggaagtgttcgagggacgggaagatagcgtctttgctcaccctcgcaagttgctcatgcaggacctggttcaagagaactatttagaatacagacaggtgccaggtagtgatcccgcctgctatgagttcctgtggggccctagggcactcattgagacttcttacgtaaaagtgcttcatcacacactgaagatcgggggagaaccacacatatcctatcccccgttgcatgagcgggctctacgcgaaggcgaggagtga

SEQ ID NO: 2285 - RNA, 945 nt, synthetic construct
  misc_feature 1..945: note = AAA17446 variant
  source 1..945: mol_type = other RNA
atgcccctggagcagagaagccagcactgcaagcctgaagagggcctcgaagccaggggagaggctcttgggctggtgggtgcacaggccccagcgaccgaggaacaggaggctgcctcctcttcaagtacattggtcgaagttactttaggcgaggtgccggcagccgaaagccccgaccctccacagagcccccaaggggcttcttcgctgcctacgaccatgaactacccactatggtcacagagctatgaggatagttccaatcaggaggaagagggaccctctacattccctgacctcgaaagcgagtttcaggcagccctgtcccggaaagtagctgaacttgtgcatttcctgttgctcaagtaccgcgcccgagagccagtcactaaagcggagatgctgggctcagtggttggtaactggcaatactttttcccggtgatctttagtaaggcatcctcttccctgcagctcgtcttcgggattgaattaatggaggtggatcccataggacacctgtatatctttgccacctgtcttggcttgtcatatgacggcctgctaggggataatcagattatgcctaaagctggactcctgatcattgtacttgccatcatagcacgtgaaggtgactgcgctccagaggaaaagatctgggaggagctgagcgttttggaagtgttcgagggcagagaagatagtattctcggggaccccaagaaactgttaacacagcattttgtccaagagaactacctggaatataggcaagtgcctggatctgatccagcctgttacgagttcctctggggcccccgggcgcttgtggagacctcctacgtcaaggttctgcaccatatggtgaaaatcagcggtgggccgcacatttcgtatcctcccttgcacgaatgggtactacgcgagggagaagagtga

SEQ ID NO: 2286 - RNA, 954 nt, synthetic construct
  misc_feature 1..954: note = EAW99410 variant
  source 1..954: mol_type = other RNA
atgagctccgagcagaagtctcaacactgcaaacccgaagagggcgtggaagcccaggaggaagctctggggctcgtcggagcacaggcccctaccacagaggagcaggaagcggctgtttcaagtagctccccacttgtgccgggtactctggaggaagtacccgccgcagagtctgccggccctccacaatcgccccagggggcttcagcattgcctacgaccatcagcttcacatgttggagacagccaaacgagggaagttcctctcaggaagaggaaggccccagcacttcccctgacgccgagtcattatttagggaagctctgagtaataaggtggatgagctagcccatttcctcctgcggaaataccgcgcgaaggagcttgtcaccaaagcagaaatgctggagcgagtgattaagaactataagcgttgctttccagttatattcggtaaagccagcgaatctttgaagatgatctttgggattgacgtgaaagaggtcgatccggcttccaatacatacaccctcgtgacttgtctgggactgtcatatgacggcctcttaggcaacaatcaaatcttccccaagacagggctgcttattatcgtattgggaaccatagccatggaaggtgatagcgcaagtgaggaggaaatctgggaggaactgggcgttatgggggtgtacgacggaagagagcacacggtctatggcgaacctaggaaactactcactcaggattgggtgcaggagaactacctggagtatcgccaggtgccaggttctaatcccgctcggtacgaatttctttgggggcctagagccctggcggagacctcctacgtcaaggttttggaacatgtggtaagggtgaacgcccgggtccgcattgcatatccaagcctccgagaggctgccctgttagaggaagaggaaggagtgtga

SEQ ID NO: 2287 - RNA, 954 nt, synthetic construct; identical to SEQ ID NO: 2286
  misc_feature 1..954: note = AAA68871 variant
  source 1..954: mol_type = other RNA

SEQ ID NO: 2288 - RNA, 954 nt, synthetic construct
  misc_feature 1..954: note = AAY27261 variant
  source 1..954: mol_type = other RNA
atgagctccgagcagaagtctcaacactgcaaacccgaagagggcgtggaagcccaggaggaagctctggggctcgtcggagcacaggcccctaccacagaggagcaggaagcggctgtttcaagtagctccccacttgtgccgggtactctggaggaagtacccgccgcagagtctgccggccctccacaatcgccccagggggcttcagcattgcctacgaccatcagcttcacatgttggagacagccaaacgagggaagttcctctcaggaagaggaaggccccagcacttcccctgacgccgagtcattatttagggaagctctgagtaataaggtggatgagctagcccatttcctcctgcggaaataccgcgcgaaggagcttgtcaccaaagcagaaatgctggagcgagtgattaagaactataagcgttgctttccagttatattcggtaaagccagcgaatctttgaagatgatctttgggattgacgtgaaagaggtcgatccgacatccaatacctacactctcgtgacatgtctgggactgtcatatgacggcctcttaggcaacaatcaaatcttccccaagaccgggctgcttattatcgtattgggaacgatagctatggaaggtgatagcgccagtgaggaggaaatctgggaggaactgggcgttatgggggtgtacgacggaagagagcacactgtctatggcgaacctaggaaactactcacccaggattgggtgcaggagaactacctggagtatcgccaggtgccaggttctaatcccgcacggtacgaatttctttgggggcctagagctctggccgagacatcctacgtcaaggttttggaacatgtggtaagggtgaacgcgcgggtccgcattgcctatccaagcctccgagaggcagctctgttagaggaagaggaaggagtgtga

SEQ ID NO: 2289 - RNA, 945 nt, synthetic construct
  misc_feature 1..945: note = BAF82126 variant
  source 1..945: mol_type = other RNA
atgcccctggagcagagaagccaacactgcaagcctgaagagggcctcgaagccaggggagaggctcttgggctggtgggtgcacaggccccagcgaccgaagaacaggaggctgcctcctcttcaagtacattggtcgaagttactttaggcgaggtgccggcagccgaaagccccgaccctccacagagtccccaaggggcttcttcgctgcctacgaccatgaactacccactatggtcacagagctatgaggatagttccaatcaggaggaagagggaccctctacattccctgacctcgaaagcgagtttcaggcagccctgtcccggaaacttgctaagctggtacatttcttgctcctgaaataccgcgcccgagaaccagtgactaaggcggagatgctgggctcagtcgtgggtaactggcaatatttcttcccggttatctttagtaaagcaagcgattctctccagttagtgttcgggattgagctgatggaagtcgaccccataggacacgtgtacatctttgccacctgtcttggcttgtcctatgatggcctgctaggggacaatcagattatgcctaagacaggattcctcatcattatcctggctataatcgccaaggagggtgattgcgcaccagaagagaaaatttgggaggagctttcagtactggaggtttttgaaggccgtgaggacatcattttcggggatcccaagaaattgctcacccagtactttgtgcaagaaaactatctggagtacagacaggtccctggaagcgacccagcttgttacgaatttttatggggccccagggccctgatcgagacttcctatgtgaaggtgctccatcacatggtcaaaatatctggtgggccgcggatttcctaccctcttctgcatgagtgggcgttgcgcgaaggagaggaatga

SEQ ID NO: 2290 - RNA, 945 nt, synthetic construct
  misc_feature 1..945: note = AAA19006 variant
  source 1..945: mol_type = other RNA
atgcccctggagcagagaagccaacactgcaagcctgaagagggcctcgaagccaggggagaggctcttgggctggtgggtgcacaggccccagcgaccgaagaacaggaggctgcctcctcttcaagtacattggtcgaagttactttaggcgaggtgccggcagccgaaagccccgaccctccacagtctccccaaggggcttcctcgctgcctacgaccatgaactacccactatggtcacagagctatgaggatagttccaatcaggaggaagagggaccctctacattccctgacctcgaaagcgagtttcaggcagccctgtcccggaaagtagctaaacttgtgcatttcctgttgctcaagtaccgcgcccgagaaccagtcactaaggcggagatgctgggctcagtggttggtaactggcaatatttcttcccggtgatctttagtaaagcaagcgattctctgcagctcgtcttcgggattgagttaatggaagtggaccccataggacacgtatacatctttgccacctgtctgggcctttcctatgatggcttgctgggggacaatcagattatgcctaagacaggattcctaatcattatcctcgctataatcgccaaggagggtgattgcgcaccagaagagaaaatttgggaggagctgtcagttcttgaggtgtttgaaggccgtgaggacagcatcttcggggatcccaagaaactgttgacccagtactttgtccaagaaaactatctcgagtacagacaggtgcctggaagtgacccagcttgttacgaatttctgtggggccccagggccttaattgagacttcttatgtgaaggtcctgcatcacatggttaaaatctccggtgggccgcggataagctaccctctccttcatgagtgggcgctgcgcgaaggagaggaatga

SEQ ID NO: 2291 - RNA, 945 nt, synthetic construct
  misc_feature 1..945: note = CAG46567 variant
  source 1..945: mol_type = other RNA
atgcccctggagcagagaagccaacactgcaagcctgaagagggcctcgaagccaggggagaggctcttgggctggtgggtgcacaggccccagcgaccgaagaacaggaggctgcctcctcttcaagtacattggtcgaagttactttaggcgaggtgccggcagccgaaagccccgaccctccacagtctccccaaggggcttcctcgctgcctacgaccatgaactacccactatggtcacagagctatgaggatagttccaatcaggaggaagagggaccctctacattccctgacctcgaaagcgagtttcaggcagccctgtcccggaaagtagctaaacttgtgcatttcctgttgctcaagtaccgcgcccgagaaccagtcactaaggcggagatgctgggctcagtggttggtaactggcaatatttcttcccggtgatctttagtaaagcaagcgattctctgcagctcgtcttcgggattgagttaatggaagtggaccccataggacacgtatacatctttgccacctgtctgggcctttcctatgatggcttgctgggggacaatcagattatgcctaagacaggattcctaatcattatcctcgctataatcgccaaggagggtgattgcgcaccagaagagaaaatttgggaggagctgtcagttcttgaggtgtttgaaggccgtgaggacagcatcttcggggatcccaagaaactgttgacccagtactttgtccaagaaaactatctcgagtacagacaggtgcctggaagtgacccagcttgttacgaatttctgtggggccccagggccttaattgagacttcttatgtgaaggtcctgcatcacatggttaaaatctccggtgggccgcggataagctaccctctccttcatgagtgggcgtttcgcgaaggagaggaatga

SEQ ID NO: 2292 - RNA, 948 nt, synthetic construct
  misc_feature 1..948: note = AAA68877 variant
  source 1..948: mol_type = other RNA
atgagcctggagcagagatctccccactgcaagcctgacgaagatctcgaggcccaaggcgaagaccttgggctgatgggagctcaggagccaaccggtgaagaggaggaaacaacttcctcaagtgatagcaaagaggaagaggtgtccgcagccgggtcttcgtcaccgccccagagccctcagggcggagcgagttcctctatcagcgtctactatacgttgtggtcccaattcgacgagggctcaagtagccaggaagaggaggaaccatcttcctcagttgatcccgctcagttagaatttatgttccaggaggccctgaagctaaaagtggcagagctcgtacattttctgcttcacaagtacagggtgaaagaacctgtcaccaaggccgagatgctggaaagcgtgattaagaactataaacggtacttcccagttatatttggtaaggctagtgagttcatgcaagtgatctttgggacagacgtcaaagaagtggatcccgcaggacattcttatattttggtaactgccctcggcctgtcctgtgacagcatgctgggcgatgggcactcgatgcctaaggctgccctcttaatcattgttctgggagtgatccttaccaaagacaattgcgcgccagaggaggtcatatgggaagcattgtctgtgatgggtgtgtacgtcggcaaggagcatatgttctatggggaaccgcgcaagctgctaacacaggattgggttcaggagaactacctcgaataccgacaggtgcccggatccgaccctgcccactatgagtttctgtggggctcaaaagctcacgccgagaccagttacgaaaaggtaatcaattatcttgtgatgctgaacgcacgtgagccaatttgttaccccagcttgtatgaagaggtcctcggtgaggaacaagagggggtgtga

SEQ ID NO: 2293 - RNA, 1044 nt, synthetic construct
  misc_feature 1..1044: note = AAI01309 variant
  source 1..1044: mol_type = other RNA
atgcccagaggccaaaagagcaaactgagggcccgggagaagcgccgacaggctcgtgggggactcgaagaccttatcgatgcactggacattttggaggaagaggaagagtcccctccatctgcctcagcgtgcttaaaagatgtgttccagagtagcctggacggtgcttccaacaatccgcacggcctaagagaggcccagtctacctcgacatcagcaactgccgctagccatacgaggcaccccgaaggggtcaacgatcagatggaggaacggcctatatgtacccaagacctcgaggcaacagatagttttccacgcggacccgttgacgagaaggtgatcattctggtacattaccttctgtataaataccagatgaaggaacctatcactaaggccgatatgttgagaaatgtgacccagatgtccaaatctcagttcccagtcattctcagcagggcttccgagcacctggaactgatctttggcctcgacttaaaggaggtggaacccaacaaacatatatatgttctggtgaataaacttgatttgggttgcgacgccaagctgtcagatgagacaggggtccctaagaccggactactcatgactgtgctgggcatcattttcacaaacggcaattgtgtagcggaggaagaggtttggaaggtgtttaacaccatggggctttacgacggaatcgaacacttcatgtttggtgagccacggaaactgttgacgaaggacctcgtcaaagaaaattatctggagtaccaacaggtgccgaacagtgatccccctcgctatcagttcttatggggcccacgagcacacgccgagactagcaagatgaaagtgctggaatttctcgctaaggtcaatgacaccgccccctctgagttctccaactggtacacagaagcacttcaggatgaggaagagagagctagggcccgggttgcggccaaagcacgtgtgtcagctactgccggggctcgcagcaaggtaaagagttctaaatccagccaactgcagtga

SEQ ID NO: 2294 - RNA, 975 nt, synthetic construct
  misc_feature 1..975: note = CCDS43927.1 variant
  source 1..975: mol_type = other RNA
atgagccaggaccaagagtcccccagatgcacccacgatcagcatctgcagacattctctgaaactcagtcactcgaggtggcccaagtcagtaaggctcttgagaaaacgctgttgagctcctctcaccctttagttccaggcaagctgaaagaagcaccggccgcgaaggctgaatcgcccctagaggtgcctcagtcattttgtagcagttccatcgccgtaaccacaacttctagctccgagtcagacgaagcaagtagcaaccaggaggaagaggattctccatcctcaagcgaggacaccagtgatcccaggaatgtgcctgccgacgctctcgatcagaaagtcgcattcctggtgaactttatgcttcataagtgccaaatgaagaaaccaattacaaaggccgacatgctgaaaataatcattaaggatgacgaatctcacttctccgagatcttgctccgggctagcgaacatctggagatgatttttgggctggatgttgtggaagtcgaccccaccactcactgttacggactcttcatcaaattaggtctgacatatgatggcatgctttcgggggagaagggagtgcctaagaccggcttgctgataatcgtactaggtgttatttttatgaaagggaatcgcgccacggaggaagaggtgtgggaagtcctcaacctgactggagtgtactctggcaagaaacacttcatctttggcgagccacgaatgcttattaccaaggacttcgtgaaagaaaagtatctggagtaccagcaggtcgcaaattccgacccggcgcgttatgagtttttgtgggggcccagagccaaagctgaaacatcaaagatgaaggttctcgagttcgtggccaaagtacatggaagttaccctcacagctttccatcccagtatgcagaagctctgaaggaggaagaggagagggcccgggcgcgcatctga

SEQ ID NO: 2295 - RNA, 1011 nt, synthetic construct
  misc_feature 1..1011: note = CCDS59524.1 variant
  source 1..1011: mol_type = other RNA
atgcccagaggccaggccagcaagaggcgggctcgcgagaaacgacgtcaagcaagaggggaagaccagtgcctgggaggtgcccaggcgaccgctgccgagaaggaaaaactcccttcctcttcaagtccagcatgtcagagcccgccccaatccttccctaacgccggcatcccacaggagtctcagagggcttcgtacccctcaagccctgcaagtgccgtgtcccttacatctagcgatgaaggggctaagggacagaaaggcgagtccccaaattcatttcacggtcccagtagctctgagtccactgggcgggacctgttgaacacgaagaccggagaattagtccaattcctgctaaataagtatattcgcaaagagcctataacaagagaagccatgctcaaggttatcaacaggaaatacaagcagcattttccagagattctgcggcgctcaactgagaatgtggaagtagtgttcggcctttatctgaaagagatggatccgagccgacagagttacgtcttggtgggcaagctcgactttcccaaccaggggtctctgtccgatggaggtggcttccctctgagcgggctcttaatggttctgctttcgaccatctttatgcacggaaatagagcgacagaagaggaaatgtgggagtgcttgaacgcactgggcatgtataagggtaggaaacatttcatttacggggagccacaagagctagtgaccaaggacctcgtccgggaaggatatctggaataccaacaggtgccctcttccgatcctccacgttacgagtttctttggggcccccgcgccagagctgaaacttcaaaaatgaaggtactggagttcgttgccaaattgaatgacacagtggcaagtacctataagagcaggtacgaggaagctctccgggaggaagaggaacaggcccgagcgcgcgccgtcgcaagagattccgctagggcccgggcttctcgcagctttcagccgtga

SEQ ID NO: 2296 - RNA, 1044 nt, synthetic construct
  misc_feature 1..1044: note = AAC23616 variant
  source 1..1044: mol_type = other RNA
atgcccagaggccaaaagagcaaactgagggcccgggagaagcgccgaaaagctcgtgaagagacccaggggctcaaggtgagacacgcaacagccgcggaaaaagaggaatgcccttcctcttcaccagtccttggagacactccgacgagtagccccgctgccggtatccctcagaagccacagggcgcaccccctaccacaactgccgctgcagccgtttcctgtaccgagtctgatgagggggctaagtgccagggagaagagaacgcctcgttctcacaagcgacaaccagcactgaaagttccgtgaaagacccagtagcatgggaggccggcatgctgatgcattttattttgaggaagtacaaaatgcgggagcccataatgaaggctgatatgttaaaagtggtcgacgaaaagtataaggatcacttcacagagatcctgaatggtgcctctcgcagactagaactcgtgtttgggctggaccttaaagaggataaccctagctcccatacctacacgctggtttcaaagttgaatctcactaacgacggaaatctgagtaacgattgggacttcccaaggaatggcctgctcatgccgttactgggcgtgatttttcttaaagggaacagcgcaaccgaagaggagatctggaagttcatgaatgtcttgggagcttatgatggtgaggaacacctgatttacggcgaaccccggaaatttatcacacaggacctagtgcaggagaagtatctcaaatacgaacaggtacctaactctgatccaccccgctatcaattcctgtgggggcctcgagcctacgcggagactaccaagatgaaggttcttgagtttctggccaaaatgaatggagcaacaccaagagacttcccctcccattacgaagaggctttgagggacgaagaggaacgggcccaggtgcgttcaagcgtccgcgctagaaggcggaccacggccactacatttcgagcacgcagtagagccccgttctctaggtccagccaccctatgtga

SEQ ID NO: 2297 - RNA, 960 nt, synthetic construct
  misc_feature 1..960: note = AAD10635 variant
  source 1..960: mol_type = other RNA
atgcccagaggccagaaaagcaaactgagggcccgggagaagcgccgaaaagctcgtgacgaaaccagagggctcaacgtgcctcaagtcacagaggcagaagaggaagaggccccatgctgttcctcttcagttagtggaggtgcggctagctcctctccggccgcaggcatcccccaggagcctcagagggccccaactacggctgcagccgctgccgcgggggtgtcgtcaaccaagagcaaaaagggagcaaagagtcaccagggcgaaaagaatgcctcctctagccaagctagtacatcaactaagagtcccagcgaggatcctcttacccggaaatctggttccctggtacagttcttgttatacaagtataaaattaagaagtcagtgacaaaaggggaaatgctgaagatagtcggaaaacgctttagagagcatttcccagagatcctaaagaaagccagcgaaggcctcagtgtggtttttggcctggagcttaacaaggtgaatcccaacgggcacacctacactttcattgacaaagtcgatctgacagacgaagagtctttgctctccagctgggattttcctaggcggaagctgctgatgccactcttaggagtgatcttcctgaatggtaactcggcaaccgaagaggagatttgggaatttcttaatatgttgggcgtatatgacggggaggaacattctgttttcggagagccgtggaagctgatcacgaaagatctagtgcaggaaaagtacctcgagtataaacaggtcccctcctcagaccctccacgctttcaattcctgtggggcccccgagcttacgccgagacttccaagatgaaagtgcttgaatttctggcgaaggtgaacggtaccacaccttgcgccttcccaactcactatgaggaagcattgaaggatgaggaaaaagctggggtctga

SEQ ID NO: 2298 - RNA, 1041 nt, synthetic construct
  misc_feature 1..1041: note = AAD10636 variant
  source 1..1041: mol_type = other RNA
atgcccagaggccaaaagagcaccctgcacgccagggagaaacggcaacagacacgcgggcagactcaggaccatcaaggagctcagatcacggcaaccaacaagaaaaaggtgtccttctcttcacctctcattcttggtgccacaatacagaaaaagagtgcgggccgaagccgttccgctctgaagaaaccacagagagccttgtctactaccacatcggtcgatgtttcatacaagaaaagctataagggggcaaatagtaaaatcgaaaagaagcaatccttttctcagggattaagctccaccgtgcagtcaaggactgacccgctgattatgaaaacaaacatgctagtacagttcctcatggagatgtacaagatgaaaaagcccatcatgaaagccgatatgctgaagattgtgcagaaaagtcacaagaattgctttcctgaaatccttaagaaagctagcttcaacatggaggtcgtgtttggcgttgacctgaagaaagtggattctaccaaggactcctatgtcttggtgtcaaaaatggatctcccaaataacggtacggtaactcgggggcgcggattccccaagaccggcctgctgctcaatttactgggcgttatatttatgaaggggaactgtgcaacagaagagaaaatctgggagttccttaataagatgagaatttacgacggtaaaaagcattttatcttcggagaacctaggaaattgattactcaggatctggtgaagctaaagtatctcgagtaccggcaggtcccaaacagcaatcccgcccgctatgaatttctgtggggccctcgagctcacgccgagaccagtaaaatgaaggtgcttgagttctgggcgaaagtgaacaagacagtcccatctgcatttcaattctggtacgaagaggccctgagagacgaagaggaaagggttcaggctgccgcaatgttgaatgatgggtccagcgctatgggacggaaatgctcgaaggccaaggcgtcttcctcaagtcatgcctga

SEQ ID NO: 2299 - RNA, 1041 nt, synthetic construct
  misc_feature 1..1041: note = AAC23619 variant
  source 1..1041: mol_type = other RNA
atgcccagaggccaaaagagcaaactgagggcccgggagaagcgccagcgaacccgtgggcagacacaggacctcaaagtgggacagcctactgctgcagaaaaggaggaatccccatcttcaagtagctccgtccttagagatacggcctcttcgtcactggcgttcggtatcccgcaagagccccagagggaacctccaaccacaagcgctgccgcagccatgagttgcactggctccgacaaaggggatgagtctcaggacgaggaaaacgctagctcctcacaggcaagtaccagcacagagcggtctttgaaggattccttaacccgcaagactaaaatgctggttcaatttctactctacaagtataaaatgaaggaacccacaaccaaagccgagatgctgaagattatatcaaagaaatacaaggagcacttccctgaaatctttagaaaagtgagccagaggacggagcttgtattcggactggctttgaaggaagtgaatccaactacccatagttatattctcgtctctatgctgggccccaacgacggtaatcagtccagcgcctggacactgcctcggaacgggctcttaatgccactgctttcggtgatctttttgaatggaaactgtgcgcgcgaggaagagatttgggagttcctgaatatgctaggcatctacgatggcaaacgacacctcatatttggggaaccgagaaagctgatcactcaggaccttgttcaagagaaatatctggaataccaacaggtgcccaactctgatcctccaaggtatcagttcttgtggggaccccgggcacatgccgagacctccaagatgaaggtcctcgaatttctggctaaagtgaatgacacaacccctaacaatttcccattactgtacgaggaggccctccgtgatgaagaggaacgcgctggtgcaagacccagggtagccgcgcggcgaggcacgactgccatgacatcagcatacagtcgcgctaccagctcctctagctcacagccgatgtga

SEQ ID NO: 2300 - RNA, 828 nt, synthetic construct
  misc_feature 1..828: note = CCDS65233.1 variant
  source 1..828: mol_type = other RNA
atgaccagcgccggcgtgttcaacgctgggtccgacgagagagcaaattctagggatgaagagtacccctgctcaagtgaagtcagcccttccacagagtcttcgtgttcaaactttatcaatattaaggttggactgctcgaacagttccttctgtataaatttaagatgaaacaacggatattgaaggaggacatgttaaaaatcgtgaacccacgctaccagaatcagttcgccgagattcaccgacgtgcgagcgaacatatcgaggtagtgtttgctgtcgatctgaaggaagtgaacccgacttgccacctatatgacctcgttagtaagctgaaacttcccaataacggtaggattcatgtgggcaaggtcctgcctaaaacggggttgctcatgaccttcctggtggtaatctttctgaagggaaattgtgccaacaaagaggatacatggaagttcctcgacatgatgcagatatacgatggcaagaaatattacatctatggtgagccaagaaagttaattactcaagactttgttcggctgacctaccttgaataccaccaggtgccctgctcctatcctgcacattaccagttcttgtgggggccacgcgcctatacagagacctctaaaatgaaggtcctggaatacctagctaaagtgaatgatatcgcacccggagcctttagctcccagtatgaggaagctctccaagacgaggaggaatcacctagtcagagatgtagcaggaactggcactactgctctggccaggattgtctgcgggccaagttctcctcatttagccagccatattga

SEQ ID NO: 2301 - RNA, 1224 nt, synthetic construct
  misc_feature 1..1224: note = AAH67286 variant
  source 1..1224: mol_type = other RNA
atgcccagaggccacaagagcaaactgaggacctgcgagaagcggcaggaaacaaacgggcaacctcagggactcactggtccacaggccacggctgagaaacaggaagagtcccattcttcaagtagctcctctcgcgcatgtcttggcgactgccgacgttcgtcagatgccagcatcccgcaagaaagtcagggggtgtcccccaccggatctcctgacgcggtcgttagctactccaagtcagatgtggctgccaatggccaggacgagaaaagtccaagcacatctagagatgcatccgtaccccaggagtcacaaggtgccagccctactgggagtccagacgctggagtgtctggctccaagtatgatgtcgcagccaacggccaggacgaaaagagcccctcgacctctcacgatgtgtccgttcctcaggagtcacagggggctagtccaacaggaagcccggacgccggtgtgtccggctctaaatacgatgtcgcggcagaaggggaggacgaggaaagcgtgtcagccagtcaaaaggctattatattcaaaaggctgtccaaggatgccgtgaaaaagaaggcatgtaccttggctcagtttttacagaaaaagttcgagaaaaaggaaagcatcctgaaagccgacatgctaaagtgcgttcggcgcgagtataaaccctactttcctcaaattctcaatagaacttctcagcatctggtggtcgcgttcggagtggaacttaaggagatggactcaagtggcgagagctatacactggtgtccaagttgggtctcccatctgaagggatcctgtcgggagataacgccctgcccaaaagcggcctcttaatgtccctgcttgtcgttatttttatgaatggcaactgtgcaaccgaggaagaggtgtgggagttcttggggctgctaggaatctacgacggtatactccactcaatctatggcgatgctaggaagattatcacggaagacctggtacaggataaatacgtggtctaccggcaggtatgcaatagtgaccctccatgttatgagtttctttgggggccccgcgcctacgctgaaactaccaagatgcgagttctgagagtgttggccgattctagcaacacatccccgggactctatcctcatctgtacgaggacgcattaattgatgaagtcgagagggccctgcggctccgtgcttga

SEQ ID NO: 2302 - RNA, 3429 nt, synthetic construct
  misc_feature 1..3429: note = CCDS35417.1 variant
  source 1..3429: mol_type = other RNA
atgggcgacaaggatatgcccaccgccgggatgcctagcctgctccagtcctcttcagagagtccacaaagctgcccggaaggagaggactcccagtctccccttcagatccctcagtcgtcaccagaaagcgatgacacactgtaccccttgcaaagtcctcagtccagatctgagggtgaagatagctccgacccattacagaggccccctgagggcaaagattcacagagtccactgcaaattccgcagagctctcccgagggggacgatactcagtcccctctacagaactcacaaagcagtccagaaggaaaggactctctctcccctctggagataagccagtcgcccccagaaggcgaggatgtgcagtctccccttcaaaatccggcttcctcattctttagtagcgcactgttgtccatcttccagtctagccctgagtcaacgcagagtccctttgaaggtttcccacagtccgtcctccaaattcctgttagcgccgcgtcttcaagtaccctggtgagcatctttcagtcctctcccgagtcgacacagagcccattcgaagggtttccccagtcccctctgcaaattccagtatcacggagtttctctagcactctcttatccatctttcagtcaagcccggagcgcacccagtctacattcgaaggatttgctcagtcccctctgcaaatacccgtgagtccatcctcttcctcaacccttttgagtctgttccagagcttttcggagcgaactcagtccacattcgagggcttcgcccagtctagcctacaaatccccgtctcacctagtttttcctctaccctcgtgagcctgttccagtcctcaccagaacgtacgcagagcacttttgagggcttcccccaaagtccgcttcagattcctgtttcttccagctcgtcatctaccctgttgagtctctttcagtccagcccagaaagaacacactctactttcgaggggtttccccagagcctgttacaaatccctatgacctcctcattcagtagcacactgctctctatttttcagtcctcacccgaaagtgcacagagcaccttcgagggatttccacagtcccctcttcaaatccccggttctccatcgttcagctcaacgctgttgtccctatttcagagttctccggagaggactcatagcacattcgaaggcttccctcagtccccactgcagatacccatgacctcatcttttagcagtactctcctgtccattcttcaaagctctcccgagtcagcccagtccgctttcgaagggtttcctcagagtccactgcaaatccccgtgagctcgtctttctcctatacattgctcagcctgtttcagtcaagtcctgagcggacccactctacgttcgaaggatttccgcagtccccattacagattcccgtcagctcaagtagctcctctagcaccctgctatccctcttccaatcatctcctgagtgtacacagagtacttttgagggcttcccacagtcgcccctgcagatccctcaaagcccgcccgaaggtgagaacacccattccccacttcagatcgtgccttctttgcccgaatgggaggactcactgagcccacactactttcctcagtccccaccccagggggaggatagtctctctccgcattatttccctcaatcacccccacagggagaagacagcctgagcccccactactttcctcagagtccacagggcgaggacagcctttctccccactatttccctcaatccccgccacagggcgaagattcaatgagccccctgtacttccctcagtcgcccttgcaaggggaggaatttcagtctagtctccagtccccagtaagcatttgctcatcctctacacctagcagtctgccccagtccttcccagagagctctcaatcacctccggagggacccgttcagagtccattacattcccctcagtctcccccagaaggtatgcacagccagtcgcctctgcaatcacccgagagcgcaccggaaggcgaggactccctaagtccactccagatacctcagtctcccctggaaggggaggatagcctttcctcattgcattttccacagagtccccctgagtgggaagactctctgagcccgctccacttcccccaatttccacctcagggagaggatttccagtcctcactgcaaagccccgtgtctatctgttccagtagcacttcgttatccctgcctcagtcttttccagaatcaccccagagccctccagagggccccgcccagagtccgcttcaacgccctgtctcctctttctttagctataccttggcttcactcctgcagtccagtcacgaaagcccacagtctccccctgagggtccagcccagtcacccctacaatccccggtgagctctttccctagttcgacatccagctcactgtctcagagctcccccgtgagttcatttccatctagcacctccagtagcctctccaaatcttcacctgagagccccctgcagtcgccagtcatttccttcagttctagcacttcactttcccccttctctgaagagagtagctcccctgttgacgaatacacgtcaagctctgatacattgctggagagtgactccttaaccgatagcgagtcactcatcgaatctgagccactgtttacttacacccttgacgaaaaggtggatgagctggcgagattcttgctcctgaaatatcaggtaaagcaaccgataacaaaggcagaaatgctaaccaatgtgatttccaggtacactgggtattttcccgtcatcttccggaaagcccgcgagtttatcgagattctgttcggcatctcgctccgagaagtggaccctgacgatagctacgtttttgtgaacacactggaccttacgagtgagggatgcttgtctgatgaacagggcatgtcccagaatagactgttaattctcatactgagcatcattttcatcaaggggacctatgcttcagaggaagtcatctgggacgtgcttagtggaattggtgtaagggccggccgggagcattttgcattcggggagccacgtgaactgctaactaaagtttgggtgcaggagcactacctcgaatatcgcgaggtccccaactccagccctccaagatacgaatttctgtggggacccagggctcattctgaggtgataaagcggaaagtcgtggagttcttggccatgctgaagaatacagttcctatcacctttccgtcaagctacaaggatgcgttaaaagacgtggaggaacgagcccaagcaattatcgatacaactgacgattccaccgctacggaatctgccagttcgagcgtaatgtccccatcattctctagcgagtga

SEQ ID NO: 2303 - RNA, 1122 nt, synthetic construct
  misc_feature 1..1122: note = AAF07210 variant
  source 1..1122: mol_type = other RNA
atgccccctgtgccaggcgtcccgttcagaaacgttgacaatgatagccccacctccgtggagctggaagactgggtagatgcccagcaccctacagacgaggaagaggaagaggcttcttcagcaagtagcactctctaccttgtgttttccccatcttcgttctcaacgagcagttccctgatcttagggggacccgaggaagaggaagtcccttctggtgtgattccaaacttgaccgagagcataccctcctcacctccacaaggcccgccccaggggcctagtcagagcccactgtcttcctgctgtagctcatttagttggtcttccttcagcgaggaatcgtcttcccagaagggagaggatacaggcacttgccaaggtctacccgactcagaaagtagctttacctatacactcgatgagaaagttgccgaactggtggagttccttctgttgaagtacgaggcggaagaacctgtcaccgaagctgagatgctcatgatcgtgattaaatataaggactactttccagtaatcctgaaaagggcccgggagttcatggagctgctctttgggttagcactgattgaggttggacccgatcatttctgtgtgtttgccaatactgtcggccttacagacgaaggctccgatgacgaggggatgccggaaaactctttgctgatcataatcctaagcgtgattttcatcaagggaaattgcgcttcagaggaagtgatttgggaggtcctcaacgcagttggtgtgtatgccggccgcgagcactttgtatacggggaacctcgagagctgcttaccaaggtgtgggtccagggacattatctggaataccgtgaggtgccccacagttccccaccttactatgagttcttgtggggccccagagctcatagcgaatctatcaaaaagaaagttctcgagttcctggccaagttaaataacacggtgccatcaagttttcccagctggtacaaagatgcgctgaaggacgtcgaagagagggtgcaggcaactatagacaccgccgatgacgctacagtaatggcctccgaatctctctcggttatgagctccaatgtgtcattcagtgagtga

SEQ ID NO: 2304 - RNA, 1932 nt, synthetic construct
  misc_feature 1..1932: note = AAM08355 variant
  source 1..1932: mol_type = other RNA
atgctgctcccctgccactgggtgcttgacgccaccttcagcgatggctccctggggcagtgggtcaagaacacatgtgctacttacgcattgtctcctgttgtgttaccaccgcaaccccagcctcggaaaaaggccacggacaaagattattcagcgtttcatctgggacacctaagggaggtaagactcttcctgcgcggtggcaccagtgaccagcgaatggatagccttgtgctgtgcccaacatactttaagttgtggcgtactctctccgggtctcccggactgcagctgtcggacctccatttcggctcacaacctgaaggtaaatttagcttaagaagggctgtcagtgtgaagcagcgggaggaaccacaggattggcccctgaatgagaagcgcaccctttggaaagactccgatttgcctacatggagaagggggaccggatatactctgtctctaccagccgttagcccgggcaagcggctctggggcgaaaaagcagggtccctgcccgagtcagagcctcttttcacatacaccctggacgaaaaggtggataaattggtccagtttctcctgttaaagtatcaagccaaggagccactgacgcgcgctgaaatgcagatgaacgtgatcaatacttacaccggatatttccccatgatttttcgaaaagcaagagagttcatagagatcctctttggtattagtcttacagaagtagaccctgatcacttctacgtttttgtgaacactctggacttgacctgtgagggcagcctatctgacgaacaggggatgccacagaataggctgctcatcctgattctttccgtcatcttcataaagggaaactgcgcctcagaggaagtgatctgggaggtgctgaatgctattggcccctggagcgccttggcgggtttcgcagatgtcctcagtcggctggccttatgggagtctgaagggccggaggctttttgtgaagagtccggactgcgtagcgccgaaggctcggttctagacctcgcaaaccctcaaggcctggctgggcatcgccaggaggatggaagaaggggtcttacagaggcctctccccagcagaaaaagggcggggaagacgaggatatgccagcggccggaatgcctcccttgccacaatcaccccctgaaatcccaccgcagggccctcccaaaatttccccacagggtccccctcaaagtccaccccagagcccgctggactcctgctctagccctctcctgtggacccggcttgatgaggaatcaagttccgaggaggaagacacggcaacttggcacgctctgccagagagcgaatctttgccccgatacgccctcgatgagaaggtggctgagctggtacagttcttactgctaaaatatcagacaaaggaacctgtgaccaaggccgagatgctcactacagtcatcaaaaagtacaaagactattttcccatgatattcgggaaggcacacgaatttattgagctgatcttcggcattgcccttaccgatatggacccagacaatcattcatactttttcgaagatacgttggacctgacctatgagggaagtctcatcgatgaccaaggcatgcctaaaaactgtctgttaatcctgattcttagcatgatatttatcaaggggtcctgcgtgcccgaggaagttatttgggaggtgttgtctgctatcggaccaatacagcgcccggcgagagaagtcctcgagttcctgtcgaagctaagctccattatcccttcagcatttcccagttggtacatggatgccctgaaagacatggaagatagggctcaggccatcattgacacaactgatgacgcaaccgccatggcttctgccagcccatccgtgatgtcaacaaatttctgtcccgagtga

SEQ ID NO: 2305 - RNA, 2337 nt, synthetic construct
  misc_feature 1..2337: note = AAG23757 variant
  source 1..2337: mol_type = other RNA
atggcccagaagatggactgcggcgctgggctgctcggattccaagcagaggccagcgtggaagattccgcgcttctgatgcagaccttgatggaggctatccagatttctgaagcaccccctacaaaccaggccactgccgctgcatcaccacaaagtagccagccgcccacggccaatgagatggctgacatacaggtctccgccgcggcagccagacctaaatctgcttttaaggttcagaacgccaccacaaaaggtccaaatggcgtgtacgatttctcgcaagcacacaacgctaaggacgtacccaatactcagcctaaagccgcgtttaagtcacagaacgccaccccaaaggggcccaatgcagcttatgatttcagccaggccgctacaaccggagaattagccgcaaacaaaagtgagatggcctttaaggctcaaaatgcgactacaaaagtgggccctaacgcaacctacaatttctcccagtctctgaacgccaatgacctagctaacagcaggccaaagacgccgtttaaagcctggaatgatactaccaaggcacccacagccgacactcagacccaaaacgtcaaccaggctaagatggccacatcccaggcagatatcgagaccgaccctggtatttcagaaccagatggggcgacggctcagacaagtgccgacggaagccaagcacagaatctcgagtctcggactatcattcgcggcaaacgaacccgtaagatcaacaatctgaacgtggaagaaaattcctcaggcgatcagagaagggctccccttgccgccgggacttggcggagcgcacctgttccagtgacaacccagaatcccccgggagctcctcccaacgtcctgtggcaaacgccattggcctggcagaaccctagtggttggcagaatcagaccgcgcgccaaacacccccagccagacagtctccccctgctaggcagactccaccggcatggcagaaccccgtggcctggcaaaatcctgtaatatggccaaaccccgttatctggcagaatcctgtgatttggccaaaccccatcgtctggccgggccctgtggtgtggccaaatcccctcgcttggcagaaccctcccgggtggcaaaccccacctggatggcagacacccccaggctggcagggtccgcctgactggcaggggcccccagactggcccctgcctccagattggcccctgcctccggactggccactccccactgattggcctttaccacccgactggattcctgccgattggccgatacccccagactggcaaaacctgcggccttcccccaatcttcgcccaagccctaactcgcgagcatctcagaatcccggagcggcccagccaagagatgtcgctttgctgcaggagagggccaacaagctagttaaatatctcatgctgaaagactacaccaaggtgccgatcaaacggtccgagatgcttcgtgatattatccgcgagtatacagacgtataccctgaaattatcgagagagcatgtttcgtgctggaaaagaagtttggcatccaattgaaagagattgataaggaggaacatctctatatactgatctcaacccccgagagtttagctggcattctggggactacgaaagacacaccaaagctcggacttctgttggtcatcctaggtgtgatattcatgaatggcaacagggccagcgaagcagttctgtgggaggccctccggaaaatggggctgcgacccggagtgcgccaccctcttctgggcgacttgagaaagctcctgacctacgaatttgtcaagcagaaatacttagattataggcgggtgccaaattccaatccccctgagtacgagttcctgtggggtctacgctcttatcatgaaactagcaagatgaaagtactcagatttattgctgaggttcagaagagggacccgcgtgattggaccgcgcagttcatggaagccgcagacgaggctctggatgcccttgacgccgctgcagccgaagcggaggctcgggccgaggcacgaacaagaatggggatcggcgatgaagccgtgtcaggaccatggagttgggacgatatcgagttcgaattgctgacctgggacgaggagggcgattttggggacccctggtccaggattcctttcactttttgggctcgctaccaccaaaacgcacggagcagattcccccagacatttgccggaccaatcattggtcctggcgggacggcgtctgctaacttcgccgcaaattttggagccataggcttcttttgggtcgaatga

SEQ ID NO: 2306 - RNA, 1821 nt, synthetic construct
  misc_feature 1..1821: note = AAD28598 variant
  source 1..1821: mol_type = other RNA
atgagcgacacctccgagtctggcgccgggctgacaagattccaggctgaagcatcagagaaggatagtagctccatgatgcaaactctccttacggtgacccagaacgtcgaagttcccgagacacctaaagcctctaaggcgctggaagtgtcggaggacgtaaaagtgtcaaaggctagcggagtcagtaaagccactgaggtgtccaagaccccagaagcaagggaggccccggctacacaggcatctagcaccactcagttgacagatacccaagttttagccgctgaaaataagtccctggccgcggacacgaaaaagcagaacgcagatccccaggccgtgactatgcctgctaccgagactaaaaaggtctcacacgtggccgacactaaagtaaataccaaggcacaggagacagaagctgccccaagtcaagcgcccgccgatgagcctgaaccagagagcgcagctgcccagtctcaggaaaaccaggacacccggcccaaggttaaagctaagaaagcccgcaaggtgaaacatctagatggtgaggaggacggctcctcagatcaaagccaggcaagtgggacgactggaggccgacgtgtctctaaggccctcatggcttccatggcgagaagggcaagccggggtcctatcgccttttgggctcgcagagcctcgaggacacggctggcagcctgggctcgccgagcccttctgtctttgagatccccaaaagcaaggcgggggaaggcgcgtcgcagagctgccaagctccagtcaagtcaagaaccggaggcaccccctccaagggacgtggccctgctgcagggacgggctaatgatctcgtgaaatacttactggccaaggaccagaccaaaattcccataaagcgaagcgacatgcttaaagatatcattaaggaatatactgacgtctaccctgagatcattgaacgcgcaggctattccttggagaaggttttcggcatccagctgaaagagatagataagaacgaccacctatacatcctcctgtctacacttgaaccaaccgatgctgggattctgggaacgaccaaagacagccccaagttgggtctcctgatggtgttactgtcaatcatttttatgaatggcaacagaagttccgaggccgtaatctgggaagtgctcaggaaacttgggctgcggccgggaatacatcacagcttgttcggcgatgtcaagaagctaattacagacgagtttgtgaaacaaaagtatctggattacgcgcgcgttcctaattctaatcccccagaatatgagttcttttggggtctcagatcatactacgagacaagtaaaatgaaggtgctgaaattcgcctgcaaggtccagaagaaagaccctaaggaatgggctgcacagtatagggaggccatggaagctgatcttaaagccgcagcggaggccgctgccgaggcaaaggctcgtgccgaaatccgggcacgaatggggattggactgggcagcgagaacgccgctggcccctgtaactgggacgaagcggacatcgggccatgggccaaagcaagaatccaggctggagccgaggccaaggctaaagcacaagaatccggttctgcctcgaccggcgcgagcacatccactaataactcagctagtgcctctgcaagcacctccgggggattttcagccggcgctagcttgacagcaaccctcactttcggtctgtttgccgggttaggcggagcgggcgcttctacgtccgggagtagcggagcctgcggtttctcttacaagtga

SEQ ID NO: 2307 - RNA, 2226 nt, synthetic construct
  misc_feature 1..2226: note = AAH63838 variant
  source 1..2226: mol_type = other RNA
atggccgagggcagcttctccgtgcagtctgaatcatacagtgtcgaggacatggatgaagggagcgacgaggttggagaagaggagatggtggaaggtaacgattatgaggaatttggcgctttcgggggatacggcaccctgacatcctttgacatccacattctcagagcattcggttctcttgggcccggactgaggatattgtcgaatgagccttgggagttagaaaacccagtactggcccaaactctagtggaggcgctccagctggatccggaaacgcttgctaatgagaccgccgcacgggccgctaacgtcgcacgcgccgctgcctcaaatcgagcggcacgtgccgctgccgcagctgccagaacagcgtttagccaggtggttgccagtcatagggtggcaactccccaggtctccggcgaagacacccaacctacaacctatgctgccgaggctcagggcccaactcccgagcctccactggcctctccccagacaagccagatgttggtgacctccaagatggcagcccctgaagctccagcgacgtcagcacaaagtcagactgggagcccggcccaggaggctgccaccgaaggaccctcttccgcatgcgccttctcacaggctccttgtgcccgggaggtagatgcaaaccgcccaagcacagcgtttctcggtcaaaatgacgttttcgattttactcagcccgctggcgtgagtgggatggccttccctagaccaaaaaggcccgcaccggcccaggaagctgccaccgagggaccttctgcagcttccggcgtcccccaaacaggtccagggcgggaggtggccgcgacccgccctaagacgactaaaagcggaaaggccctggctaaaacacgatgggtggaaccccagaacgtcgttgcagccgctgccgcaaaggcgaagatggccacctcgatcccagagcccgaaggcgctgccgcagctactgcccagcactctgcagagccttgggccagaatgggcgggaaaaggacaaagaaatccaagcatctggacgatgaatacgagtcaagtgaggaggaacgggaaaccccagctgtgccgcccacgtggcgtgcgagccagccttccctcaccgtacgcgcccaattagcaccaagaccccctatggctccaaggtctcagattcccagccggcacgtgctgtgccttccgcctcgaaatgtcacattgctgcaggagcgcgccaacaagctagtgaaatatctcatgatcaaggactacaaaaagattccaatcaaaagagccgatatgctgaaggacgttataagggagtatgacgaacattttcccgagatcattgaacgggctacttacacccttgagaaaaagttcggaatccacctgaaagaaattgataaggaggagcacttgtacatcctcgtgtgtacacgcgactcaagtgcaagactgttaggtaagactaaagatacccctaggctgtccctccttctggtcatattgggcgtgatttttatgaatgggaaccgtgccagcgaagcggtactatgggaggctctgcggaagatgggactccgacccggcgttagacatccattcctgggtgaccttaggaaactgatcacagatgacttcgtgaagcagaaatatttggaatacaagaagattcctaattctaatcccccagagtatgaatttctctgggggctgcgcgcccggcacgagacctcaaaaatgagagtcttaaggttcatcgcacaaaaccagaaccgcgatccgcgagagtggaaggcccattttctggaagctgtggacgatgcattcaaaactatggacgtcgatatggccgaggaacacgcgcgggctcagatgcgtgcccagatgaacatcggcgacgaggcactaattggaagatggagttgggacgatatacaagtggaactcctgacgtgggacgaggatggcgactttggggatgcctgggctaggatccctttcgccttttgggcacgctaccaccagtatattcttaatagcaaccgggctaatagaagggccacatggcgagcgggagtttcctctggtaccaacggcggggcctcgactagcgtgttggacggaccctccacctcaagtacaatccgcacccggaatgcagctagagccggcgcttctttctttagctggatacagcataggtga

SEQ ID NO: 2308 - RNA, 1122 nt, synthetic construct
  misc_feature 1..1122: note = CAG33449 variant
  source 1..1122: mol_type = other RNA
atgccccctgtgccaggcgtcccgttcagaaacgttgacaatgatagccccacctccgtggagctggaagactgggtagatgcccagcaccctacagacgaggaagaggaagaggcttcttcagcaagtagcactctctaccttgtgttttccccatcttcgttctcaacgagcagttccctgatcttagggggacccgaggaagaggaagtcccttctggtgtgattccaaacttgaccgagagcataccctcctcacctccacaaggcccgccccaggggcctagtcagagcccactgtcttcctgctgtagctcatttagttggtcttccttcagcgaggaatcgtcttcccagaagggagaggatacaggcacttgccaaggtctacccgactcagaaagtagctttacctatacactcgatgagaaagttgccgaactggtggagttccttctgttgaagtacgaggcggaagaacctgtcaccgaagctgagatgctcatgatcgtgattaaatataaggactactttccagtaatcctgaaaagggcccgggagttcatggagctgctctttgggttagcactgattgaggttggacccgatcatttctgtgtgtttgccaatactgtcggccttacagacgaaggctccgatgacgaggggatgccggaaaactctttgctgatcataatcctaagcgtgattttcatcaagggaaattgcgcttcagaggaagtgatttgggaggtcctcaacgcagttggtgtgtatgccggccgcgagcactttgtatacggggaacctcgagagctgcttaccaaggtgtgggtccagggacattatctggaataccgtgaggtgccccacagttccccaccttactatgagttcttgtggggccccagagctcatagcgaatctatcaaaaagaaagttctcgagttcctggccaagttaaataacacggtgccatcaagttttcccagctggtacaaagatgcgctgaaggacgtcgaagagagggtgcaggcaactatagacaccgccgatgacgctacagtaatggcctccgaatctctctcggttatgagctccaatgtgtcattcagtgattga

SEQ ID NO: 2309 - RNA, 2874 nt, synthetic construct
  misc_feature 1..2874: note = AAM08354 variant
  source 1..2874: mol_type = other RNA
atgagcctggtgtcccagaactctagaaggcggcgccgacgtgtcgccaaggctaccgcacacaattcaagttggggcgagatgcaagcccccaacgcgcctgggctcccagctgacgttccgggaagcgatgtgccccagggtccttccgactctcagatccttcagggcctgtgcgcctcggaagggccatcaacaagcgtattgcccacgagtgcagagggaccttccactttcgtgccacccaccatttctgaagccagctccgcttcaggccaacctacaataagtgagggtccagggactagcgtcttaccgaccccctctgaaggactgtccacatcaggccctccaaccatcagcaaaggcctatgtacaagtgtgactctcgcagcctctgaggggagaaatacctccaggccccctacgagctcggaggaaccatctacttccgttcccccgaccgcttcagaggtgcctagtacaagcctgcccccaactcctggagaaggtacctccacatctgtccctccaaccgcctacgagggccccagcacgtcagtggtacctactccagatgaggggccgagtacatccgttcttcccacccctggagaaggcccaggtactagcgtgcccctggcggcaacagaggggttgtctacctcagtccaggccacgcctgacgaaggaccaagtaccagcgtgcccccgacagctactgagggcctctccacccctgtgccacccacacgggatgaaggcccttctacttcggtccccgccaccccaggggagggacctagcacatccgttctgcccgcagcttcagacggtcagagtatttctctggtgccaacccgcggcaaggggagctccacttcagtaccgcctacggccacagagggactcagcacctctgtgcagcccactgcgggcgaaggttccagtaccagcgtcccacccacacctgggggcggattatctacctccgtgccacccactgccacagaggaactgtcaacgagtgttcctccgaccccaggcgaggggcccagcacttcggtgcttcctatcccaggagaaggtttgtccacatctgtgccccctaccgcaagcgatggctcagacacaagtgtcccgcccactccaggggagggagcttccaccctggtacaacctacggcccccgatggcccaggttctagcgttctacctaaccccggggagggcccatccaccctcttttcaagcagtgcttctgtggacagaaatccgtccaaatgcagcctggtccttccttcgcccagggtgacaaaggcctcagtcgattctgacagtgaaggaccaaaaggcgcagaggggcccattgagttcgaagtgctgcgggattgtgaatcccctaacagcatctctataatgggattgaatactagccgcgttgccatcaccctcaagccacaggaccccatggagcagaacgtggctgagctgttacagtttctgctcgtaaaggaccaatccaaatatcctattcgagaatcagagatgagagaatacatcgtcaaggagtataggaatcagttcccggagattcttcggcgtgcggcagcccatctggaatgcatctttcgcttcgagttgagagaactagatccagaggctcacacatacatactgctcaacaaactgggtcccgtgccttttgaaggccttgaggagagtcccaatgggccaaagatgggactgttgatgatgattctcggccagatcttcctgaacggtaatcaagccaaagaagcagagatttgggaaatgttatggaggatgggggttcagcgggagcgacgcctgagcatctttggcaaccctaagagactactctctgtggagttcgtctggcagaggtatctggactaccggcccgtgactgattgtaagccagtagaatatgagtttttctggggacctcgctcccatcttgaaaccacgaaaatgaagatcttgaaatttatggccaagatttacaataaagacccgatggattggcccgagaagtacaacgaagctctggaggaagacgccgcaagagcgttcgctgagggctggcaggccctcccacacttcaggcgtccctttttcgaggaagcagccgctgaggtgccctcaccagatagtgaagttagctcctattcttcgaaatacgcccctcatagctggcccgagtcacggctggagtccaaggcacgaaaacttgtccaactgtttttgctcatggacagtacaaagctgccgataccaaagaaagggatcttatattacattggaagagaatgctctaaggtgttccctgatctgctaaacagggctgcccgcaccctcaatcacgtgtatggcactgagctggtcgttcttgacccccggaaccacagctacacattgtataatagaagggaaatggaggaaaccgaggagatcgtggattccccaaaccgccccggtaataactttctgatgcaagtgctctcattcatatttattatggggaatcatgcgcgagaatctgccgtatgggctttcctgcggggattaggcgtccaggcaggtcgtaaacacgtgatcacttgtagatacctgagccagaggtacatcgacagtcttcgcgttcctgactccgatccggtgcagtatgagtttgtctggggcccccgggccagattggaaaccagcaagatgaaggctctcaggtacgtggcccgcattcatcgaaaagagccacaggactggcctcagcagtatcgggaagcaatggaggatgaggcgaacagagccgacgttgggcacaggcaaatcttcgtgcacaattttcgttga

SEQ ID NO: 2310 - RNA, 1572 nt, synthetic construct
  misc_feature 1..1572: note = AAH93964 variant
  source 1..1572: mol_type = other RNA
atgagcctggtgtcccagaacgccagacactgctctgctgagatcaccgcagactacggcgatgggaggggagaaattcaagccacaaatgcgtcaggtagtcccactagcatgctcgtcgttgacgctcctcagtgtccacaggccccgataaactcccagtgcgtgaatacgtctcaagcagtacaggatcccaacgaccttgaggtgctgatcgatgaacagtcgcggcgcttgggcgccttacgagtccatgaccctctggaggatcgttcaattgctctagtgaatttcatgagaatgaaaagccagaccgaagggagtatccaacagtccgagatgctcgagtttctgagggaatattctgaccagttcccagagattcttcggcgcgcaagcgcccacctggatcaggtttttggattgaacctcagagtgatcgacccccaagctgatacatacaatctggtctccaagaggggcttccagataactgaccggatcgccgaatcactggatatgcctaaggcgagtctcttagcactggtgcttggtcatattttgctgaacgggaatcgcgcccgagaggctagcatctgggacctactcctgaaagtagacatgtgggataagccacagagaattaacaatctttttggaaacaccaggaatctgttgacaaccgacttcgtttgtatgcggtttctcgagtattggcccgtgtacggcactaaccctctggagttcgagtttttatggggctctcgtgcccaccgcgaaatcacaaaaatggaggcactgaagttcgtctccgatgctcatgacgaagaaccatggtcatggccggaggaatataataaggccctcgagggggataaaaccaaggaaagaagccttacggcgggactggagttttggagtgaagacactatgaacgataaagccaacgacttggtgcaactagcaatatctgtgaccgaggagatgctgcccattcaccaggatgaactcctggctcacacaggtaaggagttcgaagacgtctttcctaatatccttaacagggccactctgattttggatatgttctacggcctctccctgatcgaggttgacaccagcgaacatatctatttactggtgcagcagccagagtcggaggaggaacaagtaatgctagaatctctcgggcggcccacacaggagtacgtgatgcctattctgggacttatattcttgatgggcaatcgagtcaaagaggctaacgtgtggaatctgctccgcagattttccgttgacgtgggtaggaagcactcaatcacccggaagctgatgcgccagagataccttgaatgcaggccactgagttatagcaaccccgtcgagtacgaattgctctgggggccgcgtgcccatcacgagacgattaaaatgaaggtgctggaatatatggcacggttataccgaaaaagacctcagaattggcccgagcaatatagggaggccgtagaagatgaggaagctcgcgcgaagtccgaggcaactatcatgttctttctggacccaacatga

SEQ ID NO: 2311 - RNA, 924 nt, synthetic construct
  misc_feature 1..924: note = CCDS3269.1 variant
  source 1..924: mol_type = other RNA
atgctgcagacccccgagagcagaggcctccctgtgccacaagccgaaggggagaaggacggaggtcacgatggcgaaacaagggctccgactgcatcccaggagcggcccaaagaagaacttggggccggacgcgaggaaggcgcggctgagcctgccctgacgcgaaagggtgcacgtgccttggctgcaaaagccttagctagaaggcgggcctaccgcagactgaacaggaccgtcgcggagctagttcagttcctcctggtgaaggacaaaaagaagtctccaatcacacggtcagagatggtaaaatatgtgattggggatcttaagatactgtttcccgacatcattgcacgcgccgctgagcatttgcgatacgtcttcggatttgaactcaaacagttcgatagaaagcaccatacttatatcctgattaataaactgaagcctctcgaggaagaggaagaggaggacttaggcggcgatgggccaaggctgggacttttgatgatgatcctgggtctaatatacatgcggggcaacagtgcccgtgaagcacaagtgtgggagatgctccgcagactgggggttcagcccagcaagtatcactttcttttcggataccctaaaaggctgatcatggaagactttgtgcagcagcggtatttgtcctaccgacgcgtcccacataccaatccgcccgagtacgagttctcttggggccctagatcgaacctcgaaatttcaaagatggaggtgctgggttttgtagctaaattacacaagaaagaaccacaacactggcccgttcagtatagggaggccctggcggatgaagccgaccgggcacgcgctaaggccagagctgaggccagcatgagggcacgtgccagtgctcgggcggggatccatctctggtga

SEQ ID NO: 2312 - RNA, 660 nt, synthetic construct
  misc_feature 1..660: note = AAD31314 variant
  source 1..660: mol_type = other RNA
atgcccagaggcaggaagtcgcggcgccgacgtaacgccagagctgcagaggaaaataggaacaatcggaaaatccaggcctccgaggcgtctgaaacccctatggctgcctcagtggtcgcaagtacaccagaggacgatctgagcgggccggaagaggacccctccactcctgaggaagcctctacgaccccagaggaagctagctcaacagcacaagcccagaagcccagcgttcctcgcagtaacttccagggaactaaaaagtccctccttatgtctattctggctttgatatttatcatgggtaatagcgccaaagaggcgttagtgtggaaggtactgggcaagctagggatgcagccaggaagacaacactccattttcggcgatcccaaaaagatcgtgaccgaggaatttgtcaggcggggttacctcatttataaacctgtgccacgctcaagtccggttgagtacgagttcttttgggggccccgagcacatgtggaaagctctaagctgaaagtcatgcacttcgtggccagagtaaggaaccggtgctccaaggactggccttgtaattatgattgggactcagatgacgatgctgaagttgaggccatccttaacagcggagcacgtggctacagtgctccatga

SEQ ID NO: 2313 - RNA, 3750 nt, synthetic construct
  misc_feature 1..3750: note = CCDS73700.1 variant
  source 1..3750: mol_type = other RNA
atgagccagctgtccaagaacctcggcgactcttcaccccctgccgaggctccaaaaccgcccgtgtacagtagacctaccgtccttatgagggcaccacccgccagctcccgggcgcctccagttccctgggatcctccaccgatcgacctgcaggcttctttggccgcatggcaagctccccagcctgcctgggaagcaccacaggggcaattacccgcccctgtggtaccaatgacacagcccccggctctgggaggtcctattgtgcccgccccacctctaggcgggcccatgggaaagccacccactcctggcgtcctcatggtgcacccaccgccccctggtgcgccaatggcacagccccctacgccaggggttctgatggtgcatccctcggccccgggagctcctatggcccacccaccccctcccggcaccccaatgtcacatcctcccccaccgggcacacctatggcacacccaccaccccctgggactccaatggctcatccccctccgccaggaacccccatggtccaccctccaccccctggtacaccgatggcccatcccccacctcccggcaccccaatggcgcaccctcccccaccggggactcctatggcccacccaccaccccctggaacaccaatggcacatccccctccgccaggcacccccatggctcagcctcccgccccaggtgtgcttatggctcaacctctgacgcccggggtattgatggttcagccagccgcacctggagccccgatggtgcagccccctcccgctgcgatgatgactcagccccaaccaagcggcgcacctatggccaaacccccgggcccaggggtcctcatgatacaccctcccggagctcgcgccccaatgacccagccccctgcaagtggtgccccgatggctcagcccgccgcaccccctgcgcaacccatggctcctccagcccagcccatggcatcctgggcccctcaggctcagccactgatcctgcaaattcagtctcaggtgatccgagccccgccccaggtgcctcaaggcccacaggcaccccctgctcagctcgccacaccacccgggtggcaggcgactagcccgggatggcaagccacccagcagggctggcaggctacacctttaacctggcaaacgactcaggtcacatggcaggcacccgccgttacctggcaagtgccacctcccatgcgtcagggtccaccccctattagaccagggccgccccctatcaggccaggaccccctccagtacggcaggctccccctctgatacgccaggccccgccagtgatcagacaagcaccccctgtcattaggcaggcgcccccagtgatccggcaggcccctgctgttattcgccaggcacccccagtgatccgacaagccccgcctgtcataagacaggctcccccagtgattaggcaggcaccccctcttatccggcaggccccaccccctattcgtccggccccacaagtattggctactcagccccctctgtggcaggcgctaccaccccctcccccactccgccaagccccgcaggcaagactgcctgctccccaggttcaggccgccccacaagtgcctacagctcccccagcaacccaggtccctgccgcgcccccggctggcccacaggtgcctcagcccgtccttccagcacccctgtccgcccctttgtcagccccgcaagctgtgcactgcccaagtatcatctggcaggcacccaagggccagcctcccgttccacatgagattcctacgagcatggagttccaggaagtgcaacagacccaggccctcgcgtggcaggctcaaaaagcccccacacacatatggcagccactgcctgcacaggaagcccaaaggcaggctccgcccttagtacagctggagcagccatttcaaggggcccctccctctcagaaggcagtccagatccagctcccacctcaacaggctcaggcctccggaccccaggcggaggtgccgactcttccactgcaaccttcatggcaggcacccccagccgttttgcaggctcaacccggtcctcccgtggccgctgcaaatttcccactaggcagcgccaagagtctgatgaccccttctggggaatgtcgggcctccagcattgatcgacgcggatcgtctaaagagagaaggacatcctcaaaggaacggcgcgctccgagtaaagacagaatgatctttgcggcaactttctgcgcccccaaggctgtcagcgccgcaagggcccatctcccagctgcgtggaaaaacctgcctgccacccccgagacatttgcaccatcctctagcgtgttccctgctacctcacagtttcagcccgccagtcttaatgcattcaagggcccgtccgccgctagcgagactcctaagtctctgccatatgccttgcaggatccctttgcgtgtgtagaagcactccctgccgtgccatgggttccccaacctaacatgaatgcttcaaaagccagtcaggctgtcccaacgttcctgatggcaacagccgctgcaccccaggccaccgcgactacccaggaggccagcaagacatccgtggaaccgcctcgtcggtctggtaaagctacccgaaagaaaaagcacttagaggcccaagaagactcgagagggcatactctggcatttcacgattggcagggccccaggccatgggagaacctaaatctcagcgactgggaggtgcagtcccccatacaggtctcaggagattgggaacaccctaacacaccacgcggcctgagtgggtgggagggaccctctacgagccggattctttccggttgggaaggcccttcagctagctgggccttgtctgcatgggaggggccatccaccagtagagccctgggactcagcgaatctccgggctcctcactgcccgttgtggtgagtgaggtagctagcgtctcgcctggttcctctgcgactcaagacaatagcaaagtggaggcccagccactttcacccctggatgaaagggcaaacgctttggttcagttcctcctggtgaaggaccaggccaaggtccctgtgcaacgcagtgagatggttaaagtgatcttacgagaatacaaggatgagtgcctggacatcattaatcgggccaacaataaactagaatgtgcatttgggtatcagctcaaggagatcgacaccaaaaaccatgcttacattataatcaataagctgggctatcacacaggaaaccttgtagcctcctacttggatcgtccaaagttcggcctgctcatggtcgtgctgtctttaattttcatgaaagggaactgcgtgagagaggacctgatctttaatttcctttttaagttgggactcgatgtcagggaaacaaacggcctgttcggtaatactaaaaagctaatcaccgaggtttttgtgcgccagaaatatctggaataccggaggattccctacacggagccggcggagtatgagttcctctgggggcctagagcttttctggaaaccagcaagatgcttgtattgcgattcctggccaagttacataaaaaggacccacaatcctggccctttcactacctcgaagcactggccgagtgtgaatgggaggatacagacgaggatgaacctgacactggagattcagctcacggccccaccagccgcccaccgcctcggtga

SEQ ID NO: 2314 - RNA, 282 nt, synthetic construct
  misc_feature 1..282: note = AAC39608 variant
  source 1..282: mol_type = other RNA
atgaagctgctcatggtgcttatgctggccgctttgagccagcactgctacgcaggctccgggtgtcccttactggagaacgtcatctctaaaaccattaatcctcaagtttcaaagacagaatataaagagctactccaggagttcatagacgataacgccactacgaatgcgatcgacgaactgaaggaatgctttcttaaccagaccgatgagacactgagtaatgtggaggtattcatgcagttgatttacgacagctccctctgtgatctgttttga

SEQ ID NO: 2315 - RNA, 363 nt, synthetic construct
  misc_feature 1..363: note = AAH67220 variant
  source 1..363: mol_type = other RNA
atgaagctgctcatggtgcttatgctggccgctttgagccagcactgctacgcaggctccgggtgtcccttactggagaacgtcatctctaaaaccattaatcctcaagtttcaaagacagaatataaagagctactccaggagttcatagacgataacgccactacgaatgcgatcgacgaactgaaggaatgctttcttaaccagaccgatgagacactgagtaatgtggaggtattcatggtgattagcttttcctcttacaaattgttcaagtcgccagaccagggacaagtcggtagctcatttctcactgataacgctaaggccaccagtgaacaggcattctcctatatcggctga

SEQ ID NO: 2316 - RNA, 357 nt, synthetic construct
  misc_feature 1..357: note = AAA19238 variant
  source 1..357: mol_type = other RNA
atgcccagagaggacgcccacttcatctacggctatcctaagaaagggcatggacacagctacaccacagctgaagaggcagccggtattggcatactgactgtgatcctcggggtccttctgttgattggatgctggtattgtaggcggcgcaacggctaccgagcgttaatggataagtccctgcatgttggtacgcagtgcgctctaacccgtagatgtccacaagaagggtttgaccacagggattctaaagtgtcactccaggagaagaattgcgaaccggtagtgcccaacgcccctccagcatatgagaaactgagtgccgagcagagccctcccccatactccccctga

SEQ ID NO: 2317 - RNA, 1482 nt, synthetic construct
  misc_feature 1..1482: note = EAW93427 variant
  source 1..1482: mol_type = other RNA
atgctgcccagatgggagctcgccctttacctgttggctagcttaggcttccacttttattccttctacgaagtgtataaggtctctagggagcatgaagaggaactggaccaggagtttgagctagaaaccgatacactcttcgggggactgaaaaaggacgcaactgattttgagtggtcattctggatggaatggggtaaacaatggcttgtttggctgttgctcggccacatggtggtaagtcagatggccacgctgctggcgcggaagcatcgcccttggatcctcatgttatacgggatgtgggcttgctggtgtgtgctgggaaccccaggcgtcgccatggtgcttttgcacacaactattagcttttgcgttgcacagttccgatcccagctgctaacctggctctgttctctgcttctgttgtcgacactccgtctgcaaggtgtggaggaggtcaaaagaaggtggtataagaccgaaaacgagtactatttactgcagtttactctcacagtgcggtgcctttactacacctcattcagcctggaattgtgttggcagcagctaccggccgctagtacgtcctattcttttccctggatgctggcatacgtattctattaccctgttctccataatgggccaatactgagcttttccgagttcatcaagcaaatgcagcagcaggaacacgactcacttaaagccagtctgtgcgtgttggctctcggactgggccgcttactgtgttggtggtggctagccgagctcatggcgcacctgatgtatatgcatgcaatttacagctctatcccccttttggagactgtctcctgctggaccctgggcgggctcgccctggctcaagtgcttttcttttatgtgaagtacctggtcttgttcggagttcctgccctcctgatgagattagatggtctgacaccacccgcactacctaggtgtgtgtcaactatgtttagcttcaccggcatgtggcggtactttgacgtagggctccacaacttcctgattcgctatgtgtacatcccagtcggaggcagtcagcatggtcttttggggacactgttttctaccgctatgacgttcgcctttgtgtcctattggcacggaggctacgattatctctggtgctgggcggccctgaattggttaggcgttactgtggaaaacggggtccgaagactggtggagacaccgtgtatacaggacagccttgcaaggtacttctcgccccaagctcggcgtcgctttcacgccgctttggcctcttgctccacctcaatgctcatcctgagtaatctagtattcctgggaggtaacgaagttggcaaaacttattggaatagaatttttatccaggggtggccttgggtgacactcagcgtcctgggattcctttactgctactcccatgtgggcattgcatgggcccagacctatgctacggattga

SEQ ID NO: 2318 - RNA, 954 nt, synthetic construct
  misc_feature 1..954: note = AAD41349 variant
  source 1..954: mol_type = other RNA
atggccgtgcagggcagccaaagaaggctgctcgggtcccttaactctacccccacagctatccctcagctgggattggcagccaatcagactggtgcgcggtgcttagaggtctcaattagtgacggcctgttcctaagcctcgggctggtttcccttgtggaaaacgctctggtagtggccacgatagcaaagaatcgcaacttgcactctccaatgtactgttttatctgctgtctcgccctgtcggatctgctcgtctcaggaagcaatgtgttagagaccgctgttattctgcttttggaagcaggcgccctggtggctcgagccgcggtcctacagcaactcgacaacgtgatcgatgtaattacatgcagttccatgctgtctagcctttgtttcctgggtgcaatcgccgttgaccgttatatatccatcttttacgctttgagatatcattcaattgtgactctcccgagggcccggcgcgcagtcgctgccatctgggtggcgagtgtggtcttcagcaccctgtttattgcctactatgatcacgttgcagtgttactgtgcctcgtagtgttctttcttgctatgctggtcttgatggccgtgctatacgttcatatgctggctagagcctgtcagcacgcacaggggatcgccaggctccataaacggcagcgccccgtgcaccaaggattcggcctgaagggcgctgtcacacttaccatactgttggggatctttttcctctgctggggaccatttttcctgcacttaactctgattgtgctatgtcctgagcatcccacatgcggttgtatttttaaaaatttcaacctcttcctggcgcttatcatctgcaatgcaattatagaccctttgatctatgcctttcactctcaggaactgcgaagaaccctcaaggaggtactgacgtgctcctggtga

SEQ ID NO: 2319 - RNA, 954 nt, synthetic construct; identical to SEQ ID NO: 2318
  misc_feature 1..954: note = AHC09522 variant
  source 1..954: mol_type = other RNA

SEQ ID NO: 2320 - RNA, 954 nt, synthetic construct
  misc_feature 1..954: note = AHC09804 variant
  source 1..954: mol_type = other RNA
atggccgtgcagggcagccaaagaaggctgctcgggtcccttaactctacccccacagctatccctcagctgggattggcagccaatcagactggtgcgcggtgcttagaggtctcaattagtgacggcctgttcctaagcctcgggctggtttcccttgtggaaaacgctctggtagtggccacgatagcaaagaatcgcaacttgcactctccaatgtactgttttatctgctgtctcgccctgtcggatctgctcgtctcaggaagcaatgtgttagagaccgctgttattctgcttttggaagcaggcgccctggtggctcgagccgcggtcctacagcaactcgacaacgtgatcgatgtaattacatgcagttccatgctgtctagcctttgtttcctgggtgcaatcgccgttgaccgttatatatccatcttttacgctttgagatatcattcaattgtgactctcccgagggcccggcaggcagtcgctgccatctgggtggcgagtgtggtcttcagcaccctgtttattgcctactatgatcacgttgcagtgttactgtgcctcgtagtgttctttcttgctatgctggtcttgatggccgtgctatacgttcatatgctggctcgcgcctgtcagcacgcacaggggatcgccagactccataaaaggcaacggcccgtgcaccagggattcggcctgaagggcgctgtcacacttaccatactgttggggatctttttcctctgctggggaccatttttcctgcacttaactctgattgtgctatgtcctgagcatcccacatgcggttgtatttttaaaaatttcaacctcttcctggcgcttatcatctgcaatgcaattatagaccctttgatctatgcctttcactctcaggaactgcgccgaaccctcaaggaggtactgacgtgctcctggtga

SEQ ID NO: 2321 - RNA, 954 nt, synthetic construct
  misc_feature 1..954: note = BAE94313 variant
  source 1..954: mol_type = other RNA
atggccgtgcagggcagccaaagaaggctgctcgggtcccttaactctacccccacagctatccctcagctgggattggcagccaatcagactggtgcgcggtgcttagaggtctcaattagtgacggcctgttcctaagcctcgggctggtttcccttgtggaaaacgctctggtagtggccacgatagcaaagaatcgcaacttgcactctccaatgtactgttttatctgctgtctcgccctgtcggatctgctcgtctcaggaagcaatgtgttagagaccgctgttattctgcttttggaagcaggcgccctggtggctcgagccgcggtcctacagcaactcgacaacgtgacagatgtaatcacttgcagttccatgctgtctagcctttgtttcctgggtgcaattgccgttgaccgttatatctccatattttacgctttgagatatcattcaatcgtgaccctcccgagggcccggcgcgcagtcgctgccatttgggtggcgagtgtggtcttcagcacactgtttatcgcctactatgatcacgttgcagtgttactgtgcctcgtagtgttctttcttgctatgctggtcttgatggccgtgctatacgttcatatgctggctagagcctgtcagcacgcacaggggattgccaggctccataaacggcagcgccccgtgcaccaaggattcggcctgaagggcgctgtcacccttactatcctgttggggatatttttcctctgctggggaccctttttcctgcacttaacactgattgtgctatgtccagagcatcctacctgcggttgtatctttaaaaatttcaacctcttcctggcgcttattatctgcaatgcaatcattgaccctttgatatatgcctttcactctcaggaactgcgaagaacgctcaaggaggtactgacttgctcctggtga

SEQ ID NO: 2322 - RNA, 954 nt, synthetic construct
  misc_feature 1..954: note = AHC09531 variant
  source 1..954: mol_type = other RNA
atggccgtgcagggcagccaaagaaggctgctcgggtcccttaactctacccccacagctatccctcagctgggattggcagccaatcagactggtgcgcggtgcttagaggtctcaattagtgacggcctgttcctaagcctcgggctggtttcccttgtggaaaacgctctggtagtggccacgatagcaaagaatcgcaacttgcactctccaatgtactgttttatctgctgtctcgccctgtcggatctgctcgtctcaggaagcaatatgttagagaccgctgtgattctgcttttggaagcaggcgccctggttgctcgagccgcggtgctacagcaactcgacaacgtcatcgatgtgattacatgcagttccatgctgtctagcctttgtttcctgggtgcaatcgccgtagaccgttatatatccatcttttacgctttgagatatcattcaattgttactctcccgagggcccggcgcgcagtggctgccatctgggtcgcgagtgtggtgttcagcaccctgtttattgcctactatgatcacgtcgcagttttactgtgcctcgtggtattctttcttgctatgctggtgttgatggccgtcctatacgtgcatatgctggctagagcctgtcagcacgcacaggggatcgccaggctccataaacggcagcgccccgttcaccaaggattcggcctgaagggcgctgtgacacttaccatactgttggggatctttttcctctgctggggaccatttttcctgcacttaactctgattgtcctatgtcctgagcatcccacatgcggttgtatttttaaaaatttcaacctcttcctggcgcttatcatctgcaatgcaattatagaccctttgatctatgcctttcactctcaggaactgcgaagaaccctcaaggaggtgctgacgtgctcctggtga

SEQ ID NO: 2323 - RNA, 954 nt, synthetic construct
  misc_feature 1..954: note = BAE94311 variant
  source 1..954: mol_type = other RNA
atggccgtgcagggcagccaaagaaggctgctcgggtcccttaactctacccccacagctatccctcagctgggattggcagccaatcagactggtgcgcggtgcttagaggtctcaattagtgacggcctgttcctaagcctcgggctggtttcccttgtggaaaacgctctggtagtggccacgatagcaaagaatcagaacttgcactctccaatgtactgttttatctgctgtctcgccctgtcggatctgctcgtctcaggaagcaatgtgttagagaccgctgttattctgcttttggaagcaggcgccctggtggctcgcgccgcggtcctacaacagctcgacaacgtgatcgatgtaattacatgcagttccatgctgtctagcctttgtttcctgggtgcaatcgccgttgaccgatatatatccatcttttacgctttgcgttatcattcaattgtgactctcccgagagccaggcaggcagtcgctgccatctgggtggcgagtgtggtcttcagcaccctgtttattgcctactatgatcacgttgcagtgttactgtgcctcgtagtgttctttcttgctatgctggtcttgatggccgtgctatacgttcatatgctggctcgggcctgtcagcacgcacaagggatcgcccgcctccataaaagacagaggcccgtgcaccagggattcggcctgaagggcgctgtcacacttaccatactgttggggatctttttcctctgctggggaccatttttcctgcacttaactctgattgtgctatgtcctgagcatcccacatgcggttgtatttttaaaaatttcaacctcttcctggcgcttatcatctgcaatgcaattatagaccctttgatctatgcctttcactctcaggaactgcggcgcaccctcaaggaggtactgacgtgctcctggtga

SEQ ID NO: 2324 - RNA, 954 nt, synthetic construct
  misc_feature 1..954: note = BAE94309 variant
  source 1..954: mol_type = other RNA
atggccgtgcagggcagccaaagaaggctgctcgggtcccttaactctacccccacagctatccctcagctgggattggcagccaatcagactggtgcgcggtgcttagaggtctcaattagtgacggcctgttcctaagcctcgggctggtttcccttgtggaaaacgctctggtagtggccacgatagcaaagaatcgcaacttgcactctccaatgtactgttttatctgctgtctcgccctgtcggatctgctcgtctcaggaagcaatgtgttagagaccgctgttattctgcttttggaagcaggcgccctggtggctcgagccgcggtcctacagcaactcgacaacgtgatcgatgtaattacatgcagttccatgctgtctagcctttgtttcctgggtgcaatcgccgttgaccgttatatatccatcttttacgctttgagatatcattcaattgtgactctcccgagggcccggcaggcagtcggggctatctgggtggccagtgtggtcttcagcaccctgtttattgcgtactatgatcacgttgccgtgttactgtgcctcgtagtgttctttcttgcaatgctggtcttgatggctgtgctatacgttcatatgctggcccgcgcttgtcagcacgcccagggaatcgcaagactccataaaaggcaacggcccgtgcaccagggcttcggcctgaagggggccgtcacacttaccatactgttgggaatctttttcctctgctggggtccatttttcctgcacttaactctgattgtgctatgtcctgagcatcccacatgcggctgtatttttaaaaatttcaacctcttcctggctcttatcatctgcaatgcgattatagaccctttgatctatgcatttcactctcaggaactgcgccgaaccctcaaggaggtactgacgtgctcctggtga

(The sequence listing continues in the following parts.)
